(19) United States
(12) Patent Application Publication
(10) Pub. No.: US 2007/0009899 A1
(43) Pub. Date: Jan. 11, 2007

(54) Nucleic acid arrays for detecting gene expression in animal models of inflammatory diseases

(76) Inventor: William Martin Mounts, Andover, MA (US)

Correspondence Address: NIXON PEABODY, LLP, 401 9TH STREET, NW, SUITE 900, WASHINGTON, DC, 20004-2128, US

(21) Appl. No.: 10/956,160

(22) Filed: Oct. 4, 2004

Related U.S. Application Data
(60) Provisional application No. 60/507,481, filed on Oct. 2, 2003.

(51) Int. Cl. C12Q 1/68; C07H 21/04; C12M 1/34

(52) U.S. Cl. 435/6; 435/287.2; 536/24.3

(57) ABSTRACT

The present invention provides nucleic acid arrays and methods of using the same for detecting gene expression in animal models of osteoarthritis or other inflammatory diseases. The nucleic acid arrays of the present invention comprise polynucleotide probes for genes that are differentially expressed in osteoarthritis-affected cartilage tissues as compared to non-osteoarthritic cartilage tissues. In one embodiment, a nucleic acid array of the present invention comprises a plurality of polynucleotide probe sets, each of which is capable of hybridizing under stringent or nucleic acid array hybridization conditions to a different respective tiling sequence selected from Table C, or the complement thereof.

### RELATED APPLICATIONS

[0001] This application claims benefit and incorporates by reference the entire disclosure of U.S. Provisional Application Ser. No. 60/507,481 filed Oct. 2, 2003.

[0002] All materials on the compact discs labeled “Copy 1” and “Copy 2” are incorporated herein by reference in their entireties. Each of the compact discs includes the following files: Table B1.txt (318 KB, created Oct. 1, 2004), Table B2.txt (1,016 KB, created Oct. 1, 2004), Table C.txt (1,335 KB, created Sep. 14, 2004), Table D.txt (183 KB, created Sep. 14, 2004), Table E.txt (1,388 KB, created Sep. 14, 2004), Table F.txt (11,546 KB, created Sep. 14, 2004), Table I.txt (11,587 KB, created Sep. 14, 2004), and Sequence Listing.ST25.txt (54,107 KB, created Sep. 29, 2004).

LENGTHY TABLES FILED ON CD
The patent application contains a lengthy table section. A copy of the table is available in electronic form from the USPTO web site (http://seqdata.uspto.gov/?pageRequest=docDetail&DocID=US20070009899A1) An electronic copy of the table will also be available from the USPTO upon request and payment of the fee set forth in 37 CFR 1.19(b)(3).

### TECHNICAL FIELD

[0003] This invention relates to nucleic acid arrays and methods of using the same for detecting gene expression in animal models of osteoarthritis or other inflammatory diseases.

### BACKGROUND

[0004] Osteoarthritis is one of the most common diseases of the elderly. It mostly affects the weight-bearing joints such as spine, knees and hips, but thumb and finger joints may also be affected. Osteoarthritis is mainly a disease of “wear and tear.” Repetitive mechanical injury of the cartilage eventually results in loss of cartilage and damage to joint surfaces and adjacent bone. Inflammatory cells then invade the damaged joints, causing pain, swelling and stiffness of the joints. The repetitive mechanical injury also leads to pathological changes that are characterized by the loss of proteoglycans and collagen from the cartilage matrix.

[0005] Animal models of osteoarthritis, such as canine models, are currently used for studying the pathogenesis of cartilage degeneration. In addition, these models are used for evaluating new drugs or therapies for treating osteoarthritis. Typically, osteoarthritis in an animal model can be either spontaneous, or surgically induced using procedures such as medial partial or total meniscectomy or anterior cruciate ligament transection. Animal models of osteoarthritis mimic human osteoarthritis. They provide a broad spectrum of end-points for evaluating joint damage. Moreover, animal models are site-specific and reproducible. The onset and progress of osteoarthritis can be readily monitored in the animal models.

### SUMMARY OF THE INVENTION

[0006] The present invention provides nucleic acid arrays and methods of using the same for detecting gene expression in animal models of osteoarthritis or other inflammatory diseases. Preferred animal models include canine animals, such as dogs. Other animal models, such as mice, rats, rabbits, hamsters, and guinea pigs, can also be used.

[0007] In one aspect, the nucleic acid arrays of the present invention comprise at least one polynucleotide probe capable of hybridizing under stringent and/or nucleic acid array hybridization conditions to a gene which is differentially expressed in osteoarthritic cartilage cells relative to non-osteoarthritic cartilage cells. In many cases, the osteoarthritic and non-osteoarthritic cartilage cells are derived from the same species, such as dog (Canis familiaris) or another canine species. The osteoarthritic and non-osteoarthritic cartilage cells can be prepared from the same animal. For instance, the osteoarthritic cartilage cells can be prepared from one leg of an animal that is induced with osteoarthritis, while the other matching limb in the animal is kept unaffected to produce donor-matched non-osteoarthritic cartilage cells. The osteoarthritic and non-osteoarthritic cartilage cells can also be prepared from different animals, such as from an osteoarthritic animal and a non-osteoarthritic animal, respectively. As used herein, a polynucleotide probe can hybridize to a gene if the probe can hybridize to an mRNA, a cDNA or a codon sequence of the gene, or the complement thereof.

[0008] In one embodiment, a nucleic acid array of the present invention includes at least 1, 2, 3, 4, 5, 10, 50, 100, 500, 1,000, or more polynucleotide probe sets. Each of these probe sets is capable of hybridizing under stringent and/or nucleic acid array hybridization conditions to a different respective gene which is differentially expressed in osteoarthritic cartilage cells relative to non-osteoarthritic cartilage cells. As used herein, a probe set can hybridize to a gene if each probe in the probe set can hybridize to the gene. By “different respective,” it means that each probe set in a group of probe sets can hybridize to a gene that is different from those to which other probe sets in the group hybridize. Each probe set can include any number of probes, such as 2, 5, 10, 15, 20, 25, or more. In one example, each probe set employed in the present invention includes at least 12 polynucleotide probes.

[0009] In another embodiment, a nucleic acid array of the present invention includes at least 1, 2, 3, 4, 5, 10, 50, 100, 500, 1,000, or more polynucleotide probe sets, each of which is capable of hybridizing under stringent and/or nucleic acid array hybridization conditions to a different respective gene whose average expression level in osteoarthritic cartilage cells is higher or substantially higher than that in non-osteoarthritic cartilage cells. In still another embodiment, the nucleic acid array further comprises at least 1, 2, 3, 4, 5, 10, 50, 100, 500, 1,000, or more polynucleotide probe sets, each of which is capable of hybridizing under stringent and/or nucleic acid array hybridization conditions to a different respective gene whose average expression level in non-osteoarthritic cartilage cells is higher or substantially higher than that in osteoarthritic cartilage cells.

[0010] In a further embodiment, a nucleic acid array of the present invention includes at least 1, 2, 3, 4, 5, 10, 50, 100, 500, 1,000, or more polynucleotide probes or probe sets, each of which is capable of hybridizing under stringent and/or nucleic acid array hybridization conditions to a different respective tiling sequence selected from Table C, or the complement thereof. In one example, the polynucleotide probes or probe sets can hybridize under stringent and/or nucleic acid array hybridization conditions to respective tiling sequences (or the complements thereof) that have pattern values of 010, 011, 100 or 101. In another example, the nucleic acid array includes at least one polynucleotide probe for each tiling sequence selected from Table C, or the complement thereof. In still another example, the nucleic acid array includes each and every polynucleotide probe selected from Table F. In still yet another example, the nucleic acid array includes a perfect mismatch probe for each perfect match probe stably attached to the nucleic acid array.

[0011] In another aspect, the present invention provides methods of screening for drug candidates capable of modulating expression of genes that are differentially expressed in osteoarthritic cartilage cells relative to non-osteoarthritic cartilage cells. In one example, the methods comprise the steps of:

[0012] (a) preparing a first nucleic acid sample from a vertebrate affected by osteoarthritis;

[0013] (b) hybridizing the first nucleic acid sample to a first nucleic acid array of the present invention;

[0014] (c) detecting a first set of hybridization signals;

[0015] (d) treating the vertebrate with a candidate drug;

[0016] (e) repeating steps (a)-(c) with a second nucleic acid sample from the treated vertebrate and a second nucleic acid array identical to the first array to obtain a second set of hybridization signals; and

[0017] (f) comparing the first and second sets of hybridization signals, where any change in expression level of at least one gene differentially expressed in osteoarthritic cartilage cells relative to non-osteoarthritic cartilage cells identifies the candidate drug as one that modulates expression of that gene. In many cases, the vertebrate is a canine animal (e.g., a dog) or a human, and the first and second nucleic acid samples are prepared from cartilage tissues of the canine animal or human. Other vertebrates or tissues (e.g., body fluids) can also be analyzed according to the present invention.

[0018] In another embodiment, the methods of the present invention comprise the steps of:

[0019] (a) preparing a first nucleic acid sample from a cartilage cell or tissue affected by osteoarthritis;

[0020] (b) hybridizing the first nucleic acid sample to a first nucleic acid array of the present invention;

[0021] (c) detecting a first set of hybridization signals;

[0022] (d) treating the cell or tissue with a candidate drug;

[0023] (e) repeating steps (a)-(c) with a second nucleic acid sample from the treated cell or tissue and a second nucleic acid array identical to the first array to obtain a second set of hybridization signals; and

[0024] (f) comparing the first and second sets of hybridization signals, where any change in expression level of at least one gene differentially expressed in osteoarthritic cartilage cells relative to non-osteoarthritic cartilage cells identifies the candidate drug as one that modulates expression of that gene.

[0025] The present invention also features methods for detecting gene expression in a sample of interest. The methods comprise the steps of hybridizing nucleic acid molecules prepared from the sample of interest to a nucleic acid array of the present invention; and detecting hybridization signals on the nucleic acid array.

[0026] In addition, the present invention features methods for making nucleic acid arrays. The methods comprise the steps of selecting a plurality of polynucleotides, each of which is capable of hybridizing under stringent or nucleic acid array hybridization conditions to a different respective gene which is differentially expressed in osteoarthritic cartilage cells relative to non-osteoarthritic cartilage cells; and attaching the plurality of polynucleotide probes to one or more substrate supports. In many cases, the osteoarthritic and non-osteoarthritic cartilage cells are derived from the same species.

[0027] Furthermore, the present invention features probe arrays for the detection of protein levels in animal models of osteoarthritis or other inflammatory diseases. Each of these probe arrays comprises probes or probe sets capable of specifically binding to protein products of genes that are differentially expressed in osteoarthritic cartilage cells relative to non-osteoarthritic cartilage cells. In one embodiment, a probe array of the present invention comprises a plurality of antibodies, each of which can specifically bind to a protein product of a gene that encodes a tiling sequence selected from Table C and having a pattern value of 010, 011, 100 or 101.

[0028] The present invention also features polynucleotide collections. In many embodiments, the polynucleotide collections of the present invention comprise at least one polynucleotide capable of hybridizing under stringent or nucleic acid array hybridization conditions to a parent sequence selected from SEQ ID NOs: 1-12,167, or the complement thereof. In one example, a polynucleotide collection of the present invention includes at least one tiling sequence selected from Table C, or the complement thereof. In another example, a polynucleotide collection of the present invention comprises (1) at least one polynucleotide capable of hybridizing under stringent and/or nucleic acid array hybridization conditions to a tiling sequence selected from Table C and having a pattern value of 010, or the complement thereof; and (2) at least another polynucleotide capable of hybridizing under stringent and/or nucleic acid array hybridization conditions to a tiling sequence selected from Table C and having a pattern value of 100, or the complement thereof. In still another example, a polynucleotide collection of the present invention includes at least one polynucleotide comprising a sequence selected from SEQ ID NOs: 1-12,167.

[0029] Other features, objects, and advantages of the present invention are apparent in the detailed description that follows. It should be understood, however, that the detailed description, while indicating preferred embodiments of the invention, is given by way of illustration only, not limitation. Various changes and modifications within the scope of the invention will become apparent to those skilled in the art from the detailed description.

### BRIEF DESCRIPTION OF THE DRAWING

[0030] The drawing is provided for illustration, not limitation.

[0031] FIG. 1 represents an Eisen cluster of transcriptional profiling data generated with a nucleic acid array of the present invention.

### DETAILED DESCRIPTION

I. Definitions

[0032] “Nucleic acid array hybridization conditions” refer to the temperature and ionic conditions that are normally used in nucleic acid array hybridization. These conditions include 16-hour hybridization at 45° C., followed by at least three 10-minute washes at room temperature. The hybridization buffer comprises 100 mM MES, 1 M [Na⁺], 20 mM EDTA, and 0.01% Tween 20. The pH of the hybridization buffer preferably is between 6.5 and 6.7. The wash buffer is 6× SSPET. 6× SSPET contains 0.9 M NaCl, 60 mM NaH₂PO₄, 6 mM EDTA, and 0.005% Triton X-100. Under more stringent nucleic acid array hybridization conditions, the wash buffer can contain 100 mM MES, 0.1 M [Na⁺], and 0.01% Tween 20.

[0033] The frequency of occurrence of an mRNA transcript is “substantially higher” in one tissue than in another tissue if the molar concentration of the mRNA transcript relative to the total mRNA in the former tissue is at least 1.5-fold of that in the latter tissue. For instance, the molar concentration of the mRNA transcript/molecule relative to the total mRNA in the former tissue can be at least 2-fold, 3-fold, 4-fold, 5-fold, 10-fold, 20-fold or more of that in the latter tissue. In one instance, the mRNA transcript is detectable in the former tissue but not in the latter tissue. In another instance, the mRNA transcript is more readily identifiable using 3′ sequence reads from a cDNA library prepared from the former tissue than that prepared from the latter tissue.

[0034] “Stringent conditions” are at least as stringent as, for example, conditions G-L shown in Table A. In certain embodiments of the present invention, highly stringent conditions A-F can be used. In Table A, hybridization is carried out under the hybridization conditions (Hybridization Temperature and Buffer) for about four hours, followed by two 20-minute washes under the corresponding wash conditions (Wash Temp. and Buffer).

TABLE A
Stringency Conditions

| Stringency | Polynucleotide | Hybrid | Hybridization | Wash Temp. |
|---|---|---|---|---|
| Condition | Hybrid | Length (bp)¹ | Temperature and Buffer^{H} | and Buffer^{H} |
| A | DNA:DNA | >50 | 65° C.; 1xSSC -or- | 65° C.; 0.3xSSC |
| | | | 42° C.; 1xSSC, 50% formamide | |
| B | DNA:DNA | <50 | T_{B}*; 1xSSC | T_{B}*; 1xSSC |
| C | DNA:RNA | >50 | 67° C.; 1xSSC -or- | 67° C.; 0.3xSSC |
| | | | 45° C.; 1xSSC, 50% formamide | |
| D | DNA:RNA | <50 | T_{D}*; 1xSSC | T_{D}*; 1xSSC |
| E | RNA:RNA | >50 | 70° C.; 1xSSC -or- | 70° C.; 0.3xSSC |
| | | | 50° C.; 1xSSC, 50% formamide | |
| F | RNA:RNA | <50 | T_{F}*; 1xSSC | T_{f}*; 1xSSC |
| G | DNA:DNA | >50 | 65° C.; 4xSSC -or- | 65° C.; 1xSSC |
| | | | 42° C.; 4xSSC, 50% formamide | |
| H | DNA:DNA | <50 | T_{H}*; 4xSSC | T_{H}*; 4xSSC |
| I | DNA:RNA | >50 | 67° C.; 4xSSC -or- | 67° C.; 1xSSC |
| | | | 45° C.; 4xSSC, 50% formamide | |
| J | DNA:RNA | <50 | T_{J}*; 4xSSC | T_{J}*; 4xSSC |
| K | RNA:RNA | >50 | 70° C.; 4xSSC -or- | 67° C.; 1xSSC |
| | | | 50° C.; 4xSSC, 50% formamide | |
| L | RNA:RNA | <50 | T_{L}*; 2xSSC | T_{L}*; 2xSSC |
| ¹The hybrid length is that anticipated for the hybridized region(s) of the hybridizing polynucleotides. When hybridizing a polynucleotide to a target polynucleotide of unknown | | | | |
| # sequence, the hybrid length is assumed to be that of the hybridizing polynucleotide. When polynucleotides of known sequence are hybridized, the hybrid length can be determined by | | | | |
| # aligning the sequences of the polynucleotides and identifying the region or regions of optimal sequence complementarity. | | | | |
| ^{H}SSPE (1x SSPE is 0.15 M NaCl, 10 mM NaH₂PO₄, and 1.25 mM EDTA, pH 7.4) can be substituted for SSC (1x SSC is 0.15 M NaCl and 15 mM sodium citrate) in the | | | | |
| # hybridization and wash buffers. | | | | |
| T_{B}*-T_{R}*: The hybridization temperature for hybrids anticipated to be less than 50 base pairs in length should be 5-10° C. less than the melting temperature (Tₘ) of the hybrid, | | | | |
| # where Tₘ is determined according to the following equations. For hybrids less than 18 base pairs in length, Tₘ(° C.) = 2(# of A + T bases) + 4(# of G + C bases). For hybrids between 18 | | | | |
| # and 49 base pairs in length, Tₘ(° C.) = 81.5 + 16.6(log₁₀Na⁺) + 0.41(% G + C) − (600/N), where N is the number of bases in the hybrid, and Na⁺ is the molar concentration of sodium ions in | | | | |
| # the hybridization buffer (Na⁺ for 1xSSC = 0.165 M). | | | | |

[0035] Various aspects of the invention are described in further detail in the following sections or subsections. The use of sections and subsections is not meant to limit the invention; each section and subsection may apply to any aspect of the invention.

II. The Invention

[0036] The nucleic acid arrays of the present invention comprise polynucleotide probes for expression profiling of genes that are differentially expressed in osteoarthritis-affected cartilage tissues as compared to non-osteoarthritic cartilage tissues. The polynucleotide probes can be derived from cartilage tissues of any animal model of osteoarthritis. Suitable animal models of osteoarthritis include, but are not limited to, canines, rodents, rabbits, and primates. Preferred animal models include dogs, mice, rats, rabbits, hamsters, and guinea pigs. Osteoarthritis can naturally occur in some of these animal models, such as mice, hamsters, or guinea pigs. Osteoarthritis can also be surgically induced in animals like dogs and rabbits.

[0037] The nucleic acid arrays of the present invention can further include probes for expression profiling of other genes that are not associated with osteoarthritis. These probes can be derived from a variety of sources, including publicly accessible databases, such as GenBank. These probes can also be derived from cDNA libraries prepared from numerous animal tissues.

[0038] The nucleic acid arrays of the present invention can be used to identify or validate novel therapeutic targets for osteoarthritis. The nucleic acid arrays of the present invention can also be used to screen for potential drug candidates or evaluate new therapies for treating osteoarthritis. In addition, the nucleic acid arrays of the present invention can be used to monitor the global gene expression in animal models of osteoarthritis or other inflammatory diseases.

[0039] The following sections/subsections focus on the preparation of nucleic acid arrays suitable for the detection of gene expression in Canis familiaris. As appreciated by those skilled in the art, the same methodology can be readily adapted to the making of nucleic acid arrays suitable for the detection of gene expression in other animal disease models.

[0040] A. Collection of mRNA/cDNA Sequences of Canis familiaris

[0041] mRNA/cDNA sequences of Canis familiaris can be collected or derived from a variety of sources, such as GenBank and TIGR (The Institute for Genome Research). These publicly accessible sequence databases frequently include a large number of ESTs, cDNAs, and other transcribed or transcribable sequences of a species of interest. In addition, these sequence databases contain a large amount of genomic sequences. Open reading frames (ORFs) in these genomic sequences can be predicted or isolated using methods known in the art. Suitable methods for this purpose include, but are not limited to, GeneMark (provided by the European Bioinformatics Institute), Glimmer (provided by TIGR), and ORF Finder (provided by the National Center for Biotechnology Information).

[0042] mRNA/cDNA sequences can also be obtained by sequencing cDNA clones isolated from cDNA libraries. Suitable cDNA libraries can be prepared from any tissue of Canis familiaris. In one embodiment, a cDNA library is prepared from a cartilage tissue. The cartilage tissue can be either non-osteoarthritic, or affected by osteoarthritis. Exemplary cartilage tissues suitable for the present invention include hyaline cartilage, elastic cartilage, fibrous cartilage, and articular cartilage. In one specific example, the cartilage tissue is isolated from the large joints of Canis familiaris.

[0043] Methods for constructing a cDNA library are well known in the art. In standard methods, the mRNA in the cells of interest, such as cartilage cells, is isolated by virtue of the presence of a polyadenylated (polyA) tail present at the 3′ end of the mRNA. The polyA tail binds to a resin conjugated with oligo-dT (oligo-dT chromatography). The purified mRNA is then copied into cDNA using a reverse transcriptase and a primer under conditions sufficient for the first strand cDNA synthesis to occur. Although both random and specific primers can be employed, in many embodiments the primer is an oligo dT primer that provides for hybridization to the polyA tail in the mRNA. The oligo dT primer is sufficiently long to provide for efficient hybridization to the polyA tail. Typically, the oligo dT primer ranges from 10 to 25 nucleotides in length, such as from 12 to 18 nucleotides in length. Additional reagents, such as dNTPs, buffering agents (e.g. TrisCl), cationic sources (monovalent or divalent, e.g. KCl, MgCl₂), and sulfhydril reagents (e.g. dithiothreitol), can also be included in the reaction.

[0044] A variety of enzymes, usually DNA polymerases possessing reverse transcriptase activity, can be used for the first strand cDNA synthesis. Examples of suitable DNA polymerases include the DNA polymerases derived from thermophilic bacteria, archaebacteria, retroviruses, yeasts, Neurosporas, Drosophilas, primates, or rodents. In one embodiment, the DNA polymerase is derived from Moloney murine leukemia virus (M-MLV), human T-cell leukemia virus type I (HTLV-I), bovine leukemia virus (BLV), Rous sarcoma virus (RSV), human immunodeficiency virus (HIV), Thermus aquaticus (Taq), Thermus thermophilus (Tth), or avian reverse transcriptase. M-MLV reverse transcriptase that lacks RNaseH activity can also be used. See, for example, U.S. Pat. No. 5,405,776, which is incorporated herein by reference.

[0045] The order in which the reagents are combined can be modified as desired. In one protocol, all reagents except for the reverse transcriptase are combined on ice, and then the reverse transcriptase is added at around 40° C. Following the addition of the reverse transcriptase, the temperature of the reaction mixture can be raised to 37° C., followed by incubation for a period of time sufficient for the primer extension to form the first strand of cDNA. The primer extension starts at the 3′ end of the mRNA and proceeds towards the 5′ end. The incubation period can take about 1 hour.

[0046] Second strand cDNA synthesis is then performed. Linkers are added to the ends of the double stranded cDNA to allow for its package into virus or cloning into plasmids/vectors. At this stage, the cDNA is in a form that can be propagated. The linkers or the primers can include rare restriction enzyme sites, such as Not I and/or Pac I, to facilitate the cloning of the cDNA into plasmids/vectors. Suitable plasmids/vectors for subcloning cDNA molecules include, for example, the pT7T3-Pac vector (a modified pT7T3 vector, Pharmacia), the pSPORT 1 vector (Invitrogen), and the various lambda cDNA library vectors provided by Stratagene (La Jolla, Calif.).

[0047] In one embodiment, mRNA is purified through its unique 5′-cap structure. The 5′-cap structure of eukaryotic mRNA includes m7GpppN, where N can be any nucleotide. Resins conjugated with a 5′-cap binding agent can be used to purify mRNA. Suitable 5′-cap binding agents include, but are not limited to, the eIF-4E/eIF-4G fusion protein disclosed in U.S. Pat. No. 6,326,175, which is incorporated herein by reference. The first strand cDNA synthesis can be performed using any conventional protocol. Following the first strand cDNA synthesis, the resultant mRNA/DNA duplex is contacted with an RNase to degrade single stranded RNA but not RNA complexed to DNA. Suitable RNases for this purpose include RNase Ti from Aspergillus orzyae, RNase I, and RNase A. The conditions and duration of incubation during this step can vary depending on the specific nuclease employed. Generally, the incubation temperature is between about 20° C. to 37° C., and the incubation time lasts from about 10 to 60 min.

[0048] Nuclease treatment produces blunt-ended mRNA/DNA duplexes. The mRNA/DNA hybrids that include the unique 5′-cap structure can be isolated using resins conjugated with the eIF-4E/eIF-4G fusion protein. Following isolation, the nucleic acids can be further processed, including release from the resins and production of double stranded cDNA. The double stranded cDNA is then subcloned into appropriate plasmids/vectors to create a cDNA library.

[0049] In a preferred embodiment, the cDNA library is prepared using the CloneMinerm™ cDNA Library Construction Kit provided by Invitrogen (Carlsbad, Calif.). The CloneMiner Kit uses a modified reverse transcriptase and a biotin-attB-oligo(dT) primer to synthesize the first strand of cDNA. The modified reverse transcriptase has reduced RNAase H activity, thereby decreasing RNA degradation during the first strand synthesis. The second strand of cDNA is then synthesized using E. coli DNA polymerase I, and an attB adaptor is added to the 5′ end of the double stranded cDNA.

[0050] The att sites, including the attB and attP sites, are components of the lambda recombination system. Recombination between the attB and attP sites swaps the sequences located therebetween. The CloneMiner destination vectors contain the attP sites which flank the ccdB gene. The ccdB gene inhibits the growth of most E. coli strains. Recombination between the attB-flanked cDNA product and the destination vectors replaces the ccdb gene with the cDNA product, thereby removing the inhibitory effect of the ccdB gene and allowing negative selection of the recombinant vector that contains the cDNA insert. The selected recombinant vector is then transformed into competent E. coli cells to produce a cDNA library. The cDNA library prepared using the CloneMiner cDNA Library Construction Kit preferably includes at least 5×10⁶, 1×10⁷, 5×10⁷ or more primary clones.

[0051] According to the CloneMiner user's manual, cDNA can be either radiolabeled or non-radiolabeled during its synthesis. Radiolabeling facilitates the measurement of cDNA yield and overall quality of the first strand cDNA synthesis. For instance, if [α-³²P]dCTP is used to monitor the first strand reaction, the percent incorporation of [α-³²P]dCTP preferably is no less than 10%. More preferably, the percent incorporation of [α-³²P]dCTP is about 20-50%.

[0052] In addition, cDNA can be size fractionated before being subcloned into the destination vectors. Suitable methods for size fractionation include, but are not limited to, column chromatography and gel electrophoresis. The final cDNA yield after size fractionation and subsequent ethanol precipitation preferably is no less than 30-40 ng. In some cases, at least 50, 75, 100, 150, 200 ng or more cDNA is used for subcloning.

[0053] The cDNA libraries used in the present invention can be prepared from any tissue of Canis familiaris. In one preferred embodiment, the cDNA library is prepared from osteoarthritis-affected cartilage tissues. Cartilage samples can be surgically removed from the knees of osteoarthritic dogs, and then homogenized and extracted for mRNA. Suitable agents for mRNA extraction include, but are not limited to, guanidine isothiocyanate/acidic phenol method, the TRIZOL™ Reagent (Invitrogen), or the Micro-FastTrack® 2.0 or FastTrack™ 2.0 mRNA Isolation Kits (Invitrogen). Alternatively, cartilage cells (e.g. chondrocytes) can be first dissociated from the cartilage samples, and then extracted for mRNA. The extracted mRNA is subsequently purified based on its unique 3′ or 5′ structure. The mRNA extraction and purification steps are preferably conducted under conditions where the RNase activities are minimized. The quality of the purified mRNA can be monitored using agarose/ethidium bromide gel electrophoresis. The amount of the purified mRNA can range from 0.5 to 10 μg. Preferably, at least 2 μg of purified mRNA is used for the construction of a cDNA library. In one embodiment, 1 to 5 μg of mRNA is used for preparing a cDNA library containing 10⁶ to 10⁷ primary clones in E. coli.

[0054] Similar methods can be used to prepare cDNA libraries from non-osteoarthritic cartilage tissues.

[0055] Canis familiaris cDNA sequences can be readily obtained from these cartilage cDNA libraries. In standard methods, individual cDNA clones in these libraries are isolated. Vectors containing the cDNA inserts are purified, followed by the sequencing of the cDNA inserts. The sequencing primers can be designed based on the common vector sequences adjacent to the 5′ or 3′ end of the cDNA inserts.

[0056] In one embodiment, Canis familiaris cDNA sequences are collected using the 3′ sequence reads from an osteoarthritis-affected cartilage cDNA library as well as an osteoarthritis-free cartilage cDNA library. Both libraries are prepared by using oligo-d(T) primers for first strand cDNA synthesis. Both libraries are constructed such that the frequency of occurrence of each cDNA clone in each cDNA library is proportional to the molar concentration of the corresponding mRNA in the cartilage tissue from which that cDNA library is derived. The frequency of occurrence of each cDNA clone also correlates with the chance of that cDNA clone being identified in the cDNA library. Thus, the easiness of a cDNA clone being identified in the cDNA library can indicate that the corresponding mRNA transcript has a relatively high level of expression in the cartilage tissue from which the cDNA library is derived.

[0057] The 3′ sequence reads from the cartilage libraries can be further edited before being used for other purposes. For instance, the vector sequences at the 5′ end of the sequence read product can be removed or masked out. This process may be carried out automatically, such as by employing a screening algorithm, or conducted manually. In addition to trimming the 5′ end, the 3′ end of the sequence read product can also be trimmed. Typically, the quality of the sequence read may decrease as it moves towards the 3′ end of the sequence. Thus, by trimming the 3′ end, the overall quality and accuracy of the eventual sequence will be improved.

[0058] The edited 3′ sequence reads from both the osteoarthritic cartilage library and the osteoarthritis-free cartilage library, together with the Canis familiaris sequences obtained from GenBank, can be clustered to identify highly homologous cDNA sequences. Suitable clustering algorithms for this purpose include, but are not limited to, the CAT (cluster and alignment tool) software package provided by DoubleTwist. See Clustering and Alignment Tools User's Guide (DoubleTwist, Inc., 2000).

[0059] The CAT program can reduce the redundancy, as well as mask low-complexity regions of the input sequence set. The resulting sequence set derived from CAT contains two distinct groups of sequences. The first group is a set of consensus sequences derived from multiple sequence alignment produced for CAT clusters containing more than one sequence. These multi-sequence clusters may include single transcripts represented in the input sequence set numerous times. The second group is a set of exemplar sequences that do not cluster with any other CAT cluster. The consensus and exemplar sequences can be generated such that any base ambiguity would be identified with the respective IUPAC (International Union of Pure and Applied Chemistry) base representation, which is identical to the WIPO Standard ST.25 (1998).

[0060] In a small number of cases, the multi-sequence clusters contain a large number of sequences due to clustering artifacts (e.g., highly homologous genes or domains). In these cases, through more stringent clustering parameters, the large clusters are re-clustered. In addition, the consensus sequences can be manually curated to verify cluster membership.

[0061] Examples of the consensus sequences obtained using the above-described method are illustrated in Table B 1. Examples of the exemplar sequences are shown in Table B2. Each consensus or exemplar sequence has a respective SEQ ID NO and a header that includes the qualifier (starting with “wyeCanine 1a”) and other information of that sequence. The consensus and exemplar sequences are collectively referred to as the “parent sequences.”

[0062] Table D illustrates the source(s) from which each parent sequence is derived. The source(s) for each parent sequence is represented by a pattern value (“Value”) in the formula of “XYZ.” X, Y, and Z represent the three input sequence sources, i.e., the osteoarthritis-free Canis familiaris cartilage cDNA library (“Nor.”), the osteoarthritis-affected Canis familiaris cartilage cDNA library (“Aff.”), and GenBank (“Gen.”), respectively. Each digit in “XYZ” can be either 1 or 0, depending on whether or not an input sequence for the parent sequence is derived from the source represented by that digit. For instance, if at least one input sequence is derived from the osteoarthritis-free cartilage library (“Nor.”), then the digit at “X” is selected as 1. Otherwise, “X” is 0. Similarly, if at least one input sequence is derived from the osteoarthritic cartilage cDNA library (“Aff.”) or GenBank (“Gen.”), then the digit at “Y” or “Z” is selected as 1, respectively. Otherwise, the digit at “Y” or “Z” is 0.

[0063] In one specific example, all of the input sequences for a parent sequence are derived from the osteoarthritis-free cartilage library (“Normal”). Therefore, the pattern value of that parent sequence is 100 (i.e., XYZ=100). In another specific example, all of the input sequences for a parent sequence are derived from the osteoarthritic cartilage cDNA library (“Affected”). Therefore, the pattern value of that parent sequence is 010 (i.e., XYZ=010). In yet another specific example, all of the input sequences for a parent sequence are derived from GenBank. Therefore, the pattern value of that parent sequence is 001 (i.e., XYZ=001).

[0064] Table D indicates that some of the consensus and exemplar sequences have a pattern value of 010. These sequences were collected from the 3′ sequence reads of the osteoarthritic cartilage library, but not detected in the osteoarthritis-free cartilage library. As discussed above, the chance for a sequence being detected in a cDNA library generally correlates with the level of the corresponding mRNA in the tissue from which the library is derived. Thus, the parent sequences having a pattern value of 010 can correspond to the mRNA transcripts whose levels are higher in the osteoarthritic cartilage tissue than in the non-osteoarthritic cartilage tissue. Similarly, the parent sequences having a pattern value of 011 can represent genes whose levels of expression are higher in the osteoarthritic cartilage tissue than in the non-osteoarthritic cartilage tissue.

[0065] In one embodiment, the parent sequences having a pattern value of 010 correspond to the mRNA transcripts whose levels are substantially higher in the osteoarthritic cartilage tissues than in the non-osteoarthritic cartilage tissues. For instance, the level of each of these RNA transcripts in the osteoarthritic cartilage tissues can be at least 1.5-fold, 2-fold, 3-fold, 4-fold, 5-fold, or more of that in the non-osteoarthritic cartilage tissues. The levels of mRNA transcripts can be determined using methods known in the art, such as RT-PCR, Northern Blot, or microarrays.

[0066] Table D also shows that some of the consensus and exemplar sequences have a pattern value of 100. These sequences were collected from the 3′ sequence reads of the osteoarthritis-free cartilage library, but not detected in the osteoarthritic cartilage library. Therefore, these sequences can correspond to the mRNA transcripts whose levels are substantially higher in the non-osteoarthritic cartilage tissue than in the osteoarthritic cartilage tissue. Similarly, the parent sequences having a pattern value of 101 can represent genes whose levels of expression are higher in the non-osteoarthritic cartilage tissue than in the osteoarthritic cartilage tissue.

[0067] In addition, Table D shows consensus and exemplar sequences having a pattern value of 110 or 111. These sequences are detectable in both the non-osteoarthritic and osteoarthritic cartilage tissues. The expression levels of these sequences in non-osteoarthritic cartilage tissues can be substantially the same as those in osteoarthritic cartilage tissues.

[0068] As appreciated by one of ordinary skill in the art, RNA transcripts, cDNA sequences, and other expressible sequences can be similarly collected from other animal disease models. Consensus and exemplar sequences can be generated from these sequences using the methods described above.

[0069] B. Preparation of Polynucleotide Probes for Detecting Gene Expression in Canis familiaris

[0070] The consensus and exemplar sequences depicted in Tables B1 and B2 can be used to prepare polynucleotide probes for detecting gene expression in Canis familiaris. The polynucleotide probes for each parent sequence can hybridize under stringent and/or nucleic acid array hybridization conditions to that parent sequence, or the complement thereof. Preferably, the probes for each parent sequence are incapable of hybridizing under stringent and/or nucleic acid array hybridization conditions to other parent sequences, or the complements thereof. If a parent sequence contains one or more ambiguous residues, the probes for that parent sequence can hybridize under stringent and/or nucleic acid array hybridization conditions to the longest unambiguous segment of that parent sequence. In one embodiment, the probe for a parent sequence comprises or consists of an unambiguous sequence fragment of that parent sequence, or the complement thereof.

[0071] The length of each polynucleotide probe can be selected to produce the desired hybridization effects. For example, the probes can include or consist of at least 10, 15, 20, 25, 30, 35, 40, 45, 50, 60, 70, 80, 90, 100, 200, 300, 400 or more consecutive nucleotides. The probes can be DNA, RNA, or PNA. Other modified forms of DNA, RNA, or PNA can also be used. The nucleotide units in each probe can be either naturally occurring residues (such as deoxyadenylate, deoxycytidylate, deoxyguanylate, deoxythymidylate, adenylate, cytidylate, guanylate, and uridylate), or synthetically produced analogs that are capable of forming desired base-pair relationships. Examples of these analogs include, but are not limited to, aza and deaza pyrimidine analogs, aza and deaza purine analogs, and other heterocyclic base analogs, wherein one or more of the carbon and nitrogen atoms of the purine and pyrimidine rings are substituted by heteroatoms, such as oxygen, sulfur, selenium, and phosphorus. Similarly, the polynucleotide backbones of the probes can be either naturally occurring (such as through 5′ to 3′ linkage), or modified. For instance, the nucleotide units can be connected via non-typical linkage, such as 5′ to 2′ linkage, so long as the linkage does not interfere with hybridization. For another instance, peptide nucleic acids, in which the constitute bases are joined by peptide bonds rather than phosphodiester linkages, can be used.

[0072] In one embodiment, the probes have relatively high sequence complexity, and preferably do not contain long stretches of the same nucleotide. In another embodiment, the probes can be designed such that they do not have a high proportion of G or C residues at the 3′ ends. In yet another embodiment, the probes do not have a 3′ terminal T residue. Depending on the type of assay or detection to be performed, sequences that are predicted to form hairpins or interstrand structures, such as “primer dimers,” can be either included in or excluded from the probe sequences. Preferably, each probe does not contain any ambiguous base.

[0073] Any part of a parent sequence can be used to prepare probes. For instance, probes can be prepared from the protein-coding region, the 5′ untranslated region, or the 3′ untranslated region of a parent sequence. Multiple probes, such as 5, 10, 15, 20, 25, 30, 40, 50, 100, 150, or more, can be prepared for each parent sequence. The multiple probes for the same parent sequence may or may not overlap each other, although overlap among different probes may be desirable in some assays.

[0074] In a preferred embodiment, the probes for a parent sequence have low sequence identities with other parent sequences, or the complements thereof. For instance, each probe for a parent sequence can have no more than 70%, 60%, 50% or less sequence identity with other parent sequences, or the complements thereof. This reduces the risk of potential cross-hybridization between the probes and the undesirable RNA transcripts. Sequence identity can be determined using methods known in the art. These methods include, but are not limited to, BLASTN, FASTA, FASTDB, and the GCG program.

[0075] The suitability of the probes for hybridization can be evaluated using various computer programs. Suitable programs for this purpose include, but are not limited to, LaserGene (DNAStar), Oligo (National Biosciences, Inc.), MacVector (Kodak/IBI), and the standard programs provided by the Genetics Computer Group (GCG).

[0076] The polynucleotide probes of the present invention can be synthesized using methods known in the art. Exemplary methods include automated or high throughput DNA synthesizers, such as those provided by Millipore, GeneMachines, and BioAutomation. Preferably, the synthesized probes are substantially free of impurities, such as incomplete products produced during the synthesis. In addition, the probes are substantially free of other contaminants that may hinder the desired functions of the probes. The probes can be purified or concentrated using different methods, such as reverse phase chromatography, ethanol precipitation, gel filtration, electrophoresis, or any combination thereof.

[0077] In one embodiment, the parent sequences with large sizes are divided into shorter sequence segments to facilitate the probe design. In addition, where a parent sequence contains both introns and exons, the intron sequences are removed such that the adjacent exons can be joined. In some cases, additional exons of the same gene are added to the exons in the original parent sequence. These divided, spliced or otherwise modified parent sequences are collectively referred to as the “tiling sequences.”

[0078] Table C depicts the tiling sequences and their respective headers. The headers include the qualifiers (starting with “wyeCanine1a:”) and other information of the tiling sequences. The first 2,676 tiling sequences in Table C correspond to, in consecutive order, the consensus sequences in Table B 1. The remaining tiling sequences correspond to, in consecutive order, the exemplar sequences in Table B2.

[0079] Table E shows the location of each tiling sequence in the corresponding parent sequence. The 5′ end of each tiling sequence in the corresponding parent sequence is indicated under “TilingStart,” and the 3′ end of the tiling sequence is shown under “TilingEnd.” For the tiling sequences that are derived by joining exons, the 5′ and 3′ ends of each of the joined exons are shown in Table E. See, for example, tiling sequences “wyeCanine1a:AJ238150.1_s_at,” “wyeCanine1a:AJ251207.1_at,” and “wyeCanine1a:AJ271090.1_at” in Table E. The sources for the additional exons that are added to the original parent sequence are also indicated in Table E. See, for example, tiling sequences “wyeCanine1a:AJ278005.1_s_at” and “wyeCanine1a:AJ302726.1_at” in Table E.

[0080] Polynucleotide probes for each tiling sequence can hybridize under stringent and/or nucleic acid array hybridization conditions to that tiling sequence, or the complement thereof. Preferably, a probe for a tiling sequence can hybridize under highly stringent conditions to the tiling sequence, or the complement thereof. More preferably, the probes for a tiling sequence are incapable of hybridizing under stringent and/or nucleic acid array hybridization conditions to other tiling sequences, or the complements thereof If a tiling sequence contains one or more ambiguous residues, the probes for the tiling sequence can hybridize under stringent and/or nucleic acid array hybridization conditions to the longest unambiguous segment of that sequence, or the complement thereof.

[0081] Any of the above-described methods can be used to prepare probes for the tiling sequences. In one embodiment, the probes are generated using Array Designer, a software package provided by TeleChem International, Inc (Sunnyvale, Calif. 94089). Examples of the probes thus generated are illustrated in Table F. The location of the 5′ and 3′ ends of each probe in the corresponding tiling sequence is shown under “5′ End” and “3′ End,” respectively. Other methods or software programs can also be used to generate hybridization probes for the tiling sequences.

[0082] The parent sequences, tiling sequences, and polynucleotide probes of the present invention can be used to detect or monitor gene expressions in any Canis familiars tissues. Methods suitable for this purpose include, but are not limited to, nucleic acid arrays (including bead arrays), Southern Blot, Northern Blot, PCR, and RT-PCR. Exemplary Canis familiaris tissues include cartilage, heart, liver, kidney, brain, lung, blood, muscle, and bone marrow.

[0083] As appreciated by those skilled in the art, polynucleotide probes suitable for detecting or monitoring gene expressions in other animal disease models can be similarly prepared using the methods described above.

[0084] C. Nucleic Acid Arrays For Detecting Gene Expression in Canis familiars

[0085] The polynucleotide probes of the present invention can be used to make nucleic acid arrays. A typical nucleic acid array includes at least one substrate support. The substrate support includes a plurality of discrete regions. The location of each discrete region is either known or determinable. The discrete regions can be organized in various forms or patterns. For instance, the discrete regions can be arranged as an array of regularly spaced areas on the surface of the substrate. Other patterns, such as linear, concentric or spiral patterns, can be used. In one embodiment, a nucleic acid array of the present invention is a bead array which includes a plurality of beads stably associated with the polynucleotide probes of the present invention.

[0086] Polynucleotide probes can be stably attached to their respective discrete regions through covalent and/or non-covalent interactions. By “stably attached,” it means that during nucleic acid array hybridization the polynucleotide probe maintains its position relative to the discrete region to which the probe is attached. Any suitable method can be used to attach polynucleotide probes to a nucleic acid array substrate. In one embodiment, the attachment is achieved by first depositing the polynucleotide probes to their respective discrete regions and then exposing the surface to a solution of a cross-linking agent, such as glutaraldehyde, borohydride, or other bifinctional agents. In another embodiment, the polynucleotide probes are covalently bound to the substrate via an alkylamino-linker group or by coating the glass slides with polyethylenimine followed by activation with cyanuric chloride for coupling the polynucleotides. In yet another embodiment, the polynucleotide probes are covalently attached to a nucleic acid array through polymer linkers. The polymer linkers may improve the accessibility of the probes to their purported targets. Preferably, the polymer linkers are not involved in the interactions between the probes and their purported targets.

[0087] In addition, the polynucleotide probes can be stably attached to a nucleic acid array substrate through non-covalent interactions. In one embodiment, the polynucleotide probes are attached to the substrate through electrostatic interactions between positively charged surface groups and the negatively charged probes. In another embodiment, the substrate is a glass slide having a coating of a polycationic polymer on its surface, such as a cationic polypeptide. The probes are bound to these polycationic polymers. In yet another embodiment, the methods described in U.S. Pat. No. 6,440,723, which is incorporated herein by reference, are used to attach the probes to the nucleic acid array substrate(s).

[0088] Various materials can be used to make the substrate support. Suitable materials include, but are not limited to, glasses, silica, ceramics, nylons, quartz wafers, gels, metals, and papers. The substrates can be flexible or rigid. In one embodiment, they are in the form of a tape that is wound up on a reel or cassette. Two or more substrate supports can be used in the same nucleic acid array. Preferably, the substrate is non-reactive with reagents that are used in nucleic acid array hybridization.

[0089] The surfaces of the substrate support can be smooth and substantially planar. The surfaces of the substrate can also have a variety of configurations, such as raised or depressed regions, trenches, v-grooves, mesa structures, and other irregularities. The surfaces of the substrate can be coated with one or more modification layers. Suitable modification layers include inorganic and organic layers, such as metals, metal oxides, polymers, or small organic molecules. In one embodiment, the surface(s) of the substrate is chemically treated to include groups such as hydroxyl, carboxyl, amine, aldehyde, or sulfhydryl groups.

[0090] The discrete regions on the substrate can be of any size, shape and density. For instance, they can be squares, ellipsoids, rectangles, triangles, circles, other regular geometric or irregular geometric shapes, or any portion or combination thereof. In one embodiment, each of the discrete regions has a surface area of less than 10⁻¹ cm², such as less than 10⁻², 10⁻³, 10⁻⁴, 10⁻⁶, or 10⁻⁷ cm². In another embodiment, the discrete region and its closest neighbor, measured from center-to-center, is in the range of from about 10 to about 400 μm. The density of the discrete regions may range, for example, between 50 and 50,000 regions/cm².

[0091] All of the methods known in the art can be used to make the nucleic acid arrays of the present invention. For instance, the probes can be synthesized in a step-by-step manner on the substrate, or can be attached to the substrate in pre-synthesized forms. Algorithms for reducing the number of synthesis cycles can be used. In one embodiment, a nucleic acid array of the present invention is synthesized in a combinational fashion by delivering monomers to the discrete regions through mechanically constrained flowpaths. In another embodiment, a nucleic acid array of the present invention is synthesized by spotting monomer reagents onto a substrate support using an ink jet printer (such as the DeskWriter C manufactured by Hewlett-Packard). In yet another embodiment, polynucleotide probes are immobilized on a nucleic acid array of the present invention by using photolithography techniques.

[0092] In one embodiment, a nucleic acid array of the present invention comprises one or more polynucleotide probes, each of which is capable of hybridizing under stringent and/or nucleic acid array hybridization conditions to a different respective mRNA transcript, or the complement thereof. The frequency of occurrence of each of these mRNA transcripts is substantially higher in osteoarthritic cartilage tissues than in non-osteoarthritic cartilage tissues. The osteoarthritic and non-osteoarthritic cartilage tissues can be derived from the same animal or from different animals. Suitable animals include dogs, rabbits, rats, mice, hamsters, guinea pigs, or any other animal that may be used as a model of osteoarthritis.

[0093] Any number of the polynucleotide probes can be included in the nucleic acid arrays of the present invention for detecting the differentially expressed mRNA transcripts. In one embodiment, a nucleic acid array of the present invention includes at least 2, 5, 10, 20, 30, 40, 50, 100, 200, 300, 400, 500, 1,000, or more different probes, and each probe can hybridize under stringent and/or nucleic acid array hybridization conditions to a different respective mRNA transcript. The level of expression of each of these mRNA transcripts is substantially higher in the osteoarthritic cartilage tissues than in the non-osteoarthritic cartilage tissues. For instance, the level of expression of each of these mRNA transcripts in the osteoarthritic cartilage tissues can be at least 1.5-fold, 2-fold, 3-fold, 4-fold, 5-fold, 10-fold, or more of that in the non-osteoarthritic cartilage tissues. Suitable polynucleotide probes for this embodiment can be selected from Table F. These probes can hybridize under stringent and/or nucleic acid array hybridization conditions to the tiling sequences with a pattern value of 010 or 011.

[0094] In another embodiment, a nucleic acid array of the present invention further comprises one or more polynucleotide probes, each of which is capable of hybridizing under stringent and/or nucleic acid array hybridization conditions to a different respective mRNA transcript, or the complement thereof, where the level of expression of each of the respective mRNA transcripts is substantially higher in the non-osteoarthritic cartilage tissues than in the osteoarthritic cartilage tissues. For instance, the level of expression of each of these mRNA transcripts in the non-osteoarthritic cartilage tissues can be at least 1.5-fold, 2-fold, 3-fold, 4-fold, 5-fold, 10-fold, or more of that in the osteoarthritic cartilage tissues. The nucleic acid array may include at least 2, 5, 10, 20, 30, 40, 50, 100, 200, 300, 400, 500, 1,000, or more probes of this type. Suitable probes for this embodiment can be selected from Table F. These probes can hybridize under stringent and/or nucleic acid array hybridization conditions to the tiling sequences with a pattern value of 100 or 101. Probes for the tiling sequences with other pattern values can also be included in the nucleic acid array.

[0095] In yet another embodiment, a nucleic acid array of the present invention comprises a plurality of polynucleotide probes, each of which can hybridize under stringent and/or nucleic acid array hybridization conditions to a different respective tiling sequence selected from Table C, or the complement thereof. The tiling sequences can have any pattern value, such as 001, 010, 011, 100, 101, 110, or 111. The plurality of polynucleotide probes can include at least 2, 5, 10, 20, 30, 40, 50, 100, 200, 300, 400, 500, 1,000, 5,000, 10,000, or more different probes. Suitable probes for this embodiment can be selected from Table F.

[0096] In still yet another embodiment, a nucleic acid array of the present invention comprises at least one probe for each tiling sequence selected from Table C. Preferably, the nucleic acid array includes two or more probes (such as 4, 6, 8, 10, 12, 14, 16, 18, 20, 30, 40, 50, 60, or more) for each tiling sequence selected from Table C. In a further embodiment, a nucleic acid array of the present invention includes each and every oligonucleotide probe selected from Table F.

[0097] The length of each probe on a nucleic acid array of the present invention can be selected to achieve the desirable hybridization effects. For instance, each probe can include or consist of 15, 20, 25, 30, 35, 40, 45, 50, 60, 70, 80, 90, 100 or more consecutive nucleotides. In one embodiment, each probe consists of 25 consecutive nucleotides.

[0098] Different probes can be included in a nucleic acid array for detecting the same tiling sequence selected from Table C. For instance, at least 2, 5, 10, 15, 20, 25, 30 or more different probes can be used for detecting the same tiling sequence. In one specific example, 16 different probes are used for detecting the same tiling sequence. In another specific examples, at least 12 different probes are used for detecting the same tiling sequence. Each of these different probes can be attached to a different respective discrete region on a nucleic acid array. Alternatively, two or more different probes can be attached to the same discrete region. The concentration of one probe with respect to the other probe or probes in the same region may vary according to the objectives and requirements of the particular experiment. In one embodiment, different probes in the same region are present in approximately equimolar ratio.

[0099] Preferably, probes for different tiling sequences are attached to different discrete regions on a nucleic acid array. In some applications, probes for different tiling sequences are attached to the same discrete region.

[0100] A nucleic acid array of the present invention can further include a plurality of control probes which can hybridize under stringent and/or nucleic acid array hybridization conditions to the respective control sequences, or the complements thereof. Examples of control sequences suitable for the present invention are listed in Table G. Like the parent sequences, each ontrol sequence in Table G has a SEQ ID NO and a header that includes the qualifier (starting with “wyeCanine 1a”) and other information of the control sequence.

TABLE G
Control Sequences (SEQ ID NOS: 12,168-12,311)

| SEQ ID | Header |
|---|---|
| 12168 | >control:wyeCanine1a:18SRNA3_Hs_at; Unassigned; Human |
| | 18S rRNA gene, complete. |
| 12169 | >control:wyeCanine1a:18SRNA3_Mm_at; Unassigned; Mouse |
| | gene for 18S rRNA. |
| 12170 | >control:wyeCanine1a:18SRNA5_Hs_at; Unassigned; Human |
| | 18S rRNA gene, complete. |
| 12171 | >control:wyeCanine1a:18SRNA5_Mm_at; Unassigned; Mouse |
| | gene for 18S rRNA. |
| 12172 | >control:wyeCanine1a:18SRNAM_Hs_at; Unassigned; Human |
| | 18S rRNA gene, complete. |
| 12173 | >control:wyeCanine1a:18SRNAM_Mm_at; Unassigned; Mouse |
| | gene for 18S rRNA. |
| 12174 | >control:wyeCanine1a:28SRNAM_Cf_at; 28SRNAM_Cf; |
| | AJ388541.1 Canis familiaris 28S rRNA gene, clone BC50 |
| 12175 | >control:wyeCanine1a:AFFX-18SRNAMur/X00686_3_at; |
| | X00686; X00686 Mouse gene for 18S rRNA (_5, _M, _3 |
| | represent transcript regions 5 prime, Middle, and 3 prime respectively) |
| 12176 | >control:wyeCanine1a:AFFX-18SRNAMur/X00686_5_at; |
| | X00686; X00686 Mouse gene for 18S rRNA (_5, _M, _3 |
| | represent transcript regions 5 prime, Middle, and 3 prime respectively) |
| 12177 | >control:wyeCanine1a:AFFX-18SRNAMur/X00686_M_at; |
| | X00686; X00686 Mouse gene for 18S rRNA (_5, _M, _3 |
| | represent transcript regions 5 prime, Middle, and 3 prime respectively) |
| 12178 | >control:wyeCanine1a:AFFX-b-ActinMur/M12481_3_at; |
| | M12481; M12481 Mouse cytoplasmic beta-actin mRNA (_5, _M, |
| | _3 represent transcript regions 5 prime, Middle, and 3 prime respectively) |
| 12179 | >control:wyeCanine1a:AFFX-b-ActinMur/M12481_5_at; |
| | M12481; M12481 Mouse cytoplasmic beta-actin mRNA (_5, _M, |
| | _3 represent transcript regions 5 prime, Middle, and 3 prime respectively) |
| 12180 | >control:wyeCanine1a:AFFX-b-ActinMur/M12481_M_at; |
| | M12481; M12481 Mouse cytoplasmic beta-actin mRNA (_5, _M, |
| | _3 represent transcript regions 5 prime, Middle, and 3 prime respectively) |
| 12181 | >control:wyeCanine1a:AFFX-BioB-3_at; J04423; J04423 E coli |
| | bioB gene biotin synthetase (-5, -M, -3 represent transcript |
| | regions 5 prime, Middle, and 3 prime respectively) |
| 12182 | >control:wyeCanine1a:AFFX-BioB-5_at; J04423; J04423 E coli |
| | bioB gene biotin synthetase (-5, -M, -3 represent transcript |
| | regions 5 prime, Middle, and 3 prime respectively) |
| 12183 | >control:wyeCanine1a:AFFX-BioB-M_at; J04423; J04423 E coli |
| | bioB gene biotin synthetase (-5, -M, -3 represent transcript |
| | regions 5 prime, Middle, and 3 prime respectively) |
| 12184 | >control:wyeCanine1a:AFFX-BioC-3_at; J04423; J04423 E coli |
| | bioC protein (-5 and -3 represent transcript regions 5 prime and 3 prime respectively) |
| 12185 | >control:wyeCanine1a:AFFX-BioC-5_at; J04423; J04423 E coli |
| | bioC protein (-5 and -3 represent transcript regions 5 prime and 3 prime respectively) |
| 12186 | >control:wyeCanine1a:AFFX-BioDn-3_at; J04423; J04423 E coli |
| | bioD gene dethiobiotin synthetase (-5 and -3 represent transcript |
| | regions 5 prime and 3 prime respectively) |
| 12187 | >control:wyeCanine1a:AFFX-BioDn-5_at; J04423; J04423 E coli |
| | bioD gene dethiobiotin synthetase (-5 and -3 represent transcript |
| | regions 5 prime and 3 prime respectively) |
| 12188 | >control:wyeCanine1a:AFFX-CreX-3_at; X03453; X03453 |
| | Bacteriophage P1 cre recombinase protein (-5 and -3 represent |
| | transcript regions 5 prime and 3 prime respectively) |
| 12189 | >control:wyeCanine1a:AFFX-CreX-5_at; X03453; X03453 |
| | Bacteriophage P1 cre recombinase protein (-5 and -3 represent |
| | transcript regions 5 prime and 3 prime respectively) |
| 12190 | >control:wyeCanine1a:AFFX-DapX-3_at; L38424; L38424 B |
| | subtilis dapB, jojF, jojG genes corresponding to nucleotides 1358-3197 |
| | of L38424 (-5, -M, -3 represent transcript regions 5 prime, |
| | Middle, and 3 prime respectively) |
| 12191 | >control:wyeCanine1a:AFFX-DapX-5_at; L38424; L38424 B |
| | subtilis dapB, jojF, jojG genes corresponding to nucleotides 1358-3197 |
| | of L38424 (-5, -M, -3 represent transcript regions 5 prime, |
| | Middle, and 3 prime respectively) |
| 12192 | >control:wyeCanine1a:AFFX-DapX-M_at; L38424; L38424 B |
| | subtilis dapB, jojF, jojG genes corresponding to nucleotides 1358-3197 |
| | of L38424 (-5, -M, -3 represent transcript regions 5 prime, |
| | Middle, and 3 prime respectively) |
| 12193 | >control:wyeCanine1a:AFFX-GapdhMur/M32599_3_at; M32599; |
| | M32599 Mouse glyceraldehyde-3-phosphate dehydrogenase |
| | mRNA, complete cds (_5, _M, _3 represent transcript regions 5 |
| | prime, Middle, and 3 prime respectively) |
| 12194 | >control:wyeCanine1a:AFFX-GapdhMur/M32599_5_at; M32599; |
| | M32599 Mouse glyceraldehyde-3-phosphate dehydrogenase |
| | mRNA, complete cds (_5, _M, _3 represent transcript regions 5 |
| | prime, Middle, and 3 prime respectively) |
| 12195 | >control:wyeCanine1a:AFFX-GapdhMur/M32599_M_at; |
| | M32599; M32599 Mouse glyceraldehyde-3-phosphate |
| | dehydrogenase mRNA, complete cds (_5, _M, _3 represent |
| | transcript regions 5 prime, Middle, and 3 prime respectively) |
| 12196 | >control:wyeCanine1a:AFFX-HSAC07/X00351_3_at; X00351; |
| | X00351 Human mRNA for beta-actin (_5, _M, _3 represent |
| | transcript regions 5 prime, Middle, and 3 prime respectively) |
| 12197 | >control:wyeCanine1a:AFFX-HSAC07/X00351_5_at; X00351; |
| | X00351 Human mRNA for beta-actin (_5, _M, _3 represent |
| | transcript regions 5 prime, Middle, and 3 prime respectively) |
| 12198 | >control:wyeCanine1a:AFFX-HSAC07/X00351_M_at; X00351; |
| | X00351 Human mRNA for beta-actin (_5, _M, _3 represent |
| | transcript regions 5 prime, Middle, and 3 prime respectively) |
| 12199 | >control:wyeCanine1a:AFFX-hum_alu_at; U14573; U14573 |
| | Human Alu-Sq subfamily consensus sequence. |
| 12200 | >control:wyeCanine1a:AFFX-HUMGAPDH/M33197_3_at; |
| | M33197; M33197 Human glyceraldehyde-3-phosphate |
| | dehydrogenase (GAPDH) mRNA, complete cds (_5, _M, _3 |
| | represent transcript regions 5 prime, Middle, and 3 prime respectively) |
| 12201 | >control:wyeCanine1a:AFFX-HUMGAPDH/M33197_5_at; |
| | M33197; M33197 Human glyceraldehyde-3-phosphate |
| | dehydrogenase (GAPDH) mRNA, complete cds (_5, _M, _3 |
| | represent transcript regions 5 prime, Middle, and 3 prime respectively) |
| 12202 | >control:wyeCanine1a:AFFX-HUMGAPDH/M33197_M_at; |
| | M33197; M33197 Human glyceraldehyde-3-phosphate |
| | dehydrogenase (GAPDH) mRNA, complete cds (_5, _M, _3 |
| | represent transcript regions 5 prime, Middle, and 3 prime respectively) |
| 12203 | >control:wyeCanine1a:AFFX-HUMISGF3A/M97935_3_at; |
| | M97935; M97935 Homo sapiens transcription factor ISGF-3 |
| | mRNA, complete cds (_5, _MA, MB, _3 represent transcript |
| | regions 5 prime, MiddleA, MiddleB, and 3 prime respectively) |
| 12204 | >control:wyeCanine1a:AFFX-HUMISGF3A/M97935_5_at; |
| | M97935; M97935 Homo sapiens transcription factor ISGF-3 |
| | mRNA, complete cds (_5, _MA, MB, _3 represent transcript |
| | regions 5 prime, MiddleA, MiddleB, and 3 prime respectively) |
| 12205 | >control:wyeCanine1a:AFFX-HUMISGF3A/M97935_MA_at; |
| | M97935; M97935 Homo sapiens transcription factor ISGF-3 |
| | mRNA, complete cds (_5, _MA, MB, _3 represent transcript |
| | regions 5 prime, MiddleA, MiddleB, and 3 prime respectively) |
| 12206 | >control:wyeCanine1a:AFFX-HUMISGF3A/M97935_MB_at; |
| | M97935; M97935 Homo sapiens transcription factor ISGF-3 |
| | mRNA, complete cds (_5, _MA, MB, _3 represent transcript |
| | regions 5 prime, MiddleA, MiddleB, and 3 prime respectively) |
| 12207 | >control:wyeCanine1a:AFFX-HUMRGE/M10098_3_at; M10098; |
| | M10098 Human 18S rRNA gene, complete (_5, _M, _3 represent |
| | transcript regions 5 prime, Middle, and 3 prime respectively) |
| 12208 | >control:wyeGanine1a:AFFX-HUMRGE/M10098_5_at; M10098; |
| | M10098 Human 18S rRNA gene, complete (_5, _M, _3 represent |
| | transcript regions 5 prime, Middle, and 3 prime respectively) |
| 12209 | >control:wyeCanine1a:AFFX-HUMRGE/M10098_M_at; |
| | M10098; M10098 Human 18S rRNA gene, complete (_5, _M, _3 |
| | represent transcript regions 5 prime, Middle, and 3 prime respectively) |
| 12210 | >control:wyeCanine1a:AFFX-LysX-3_at; X17013; X17013 B |
| | subtilis lys gene for diaminopimelate decarboxylase corresponding |
| | to nucleotides 350-1345 of X17013 (-5, -M, -3 represent |
| | transcript regions 5 prime, Middle, and 3 prime respectively) |
| 12211 | >control:wyeCanine1a:AFFX-LysX-5_at; X17013; X17013 B |
| | subtilis lys gene for diaminopimelate decarboxylase corresponding |
| | to nucleotides 350-1345 of X17013 (-5, -M, -3 represent |
| | transcript regions 5 prime, Middle, and 3 prime respectively) |
| 12212 | >control:wyeCanine1a:AFFX-LysX-M_at; X17013; X17013 B |
| | subtilis lys gene for diaminopimelate decarboxylase corresponding |
| | to nucleotides 350-1345 of X17013 (-5, -M, -3 represent |
| | transcript regions 5 prime, Middle, and 3 prime respectively) |
| 12213 | >control:wyeCanine1a:AFFX-M27830_3_at; M27830; M27830 |
| | Human 28S ribosomal RNA gene, complete cds (_5, _M, _3 |
| | represent transcript regions 5 prime, Middle, and 3 prime respectively) |
| 12214 | >control:wyeCanine1a:AFFX-M27830_5_at; M27830; M27830 |
| | Human 28S ribosomal RNA gene, complete cds (_5, _M, _3 |
| | represent transcript regions 5 prime, Middle, and 3 prime respectively) |
| 12215 | >control:wyeCanine1a:AFFX-M27830_M_at; M27830; M27830 |
| | Human 28S ribosomal RNA gene, complete cds (_5, _M, _3 |
| | represent transcript regions 5 prime, Middle, and 3 prime respectively) |
| 12216 | >control:wyeCanine1a:AFFX-MUR_b2_at; X63136; X63136 |
| | M. musculus DNA for intragenic sequence including B2 element |
| 12217 | >control:wyeCanine1a:AFFX-MURINE_b1_at; U01310; U01310 |
| | Mus musculus C57/Black6 BC1 scRNA |
| 12218 | >control:wyeCanine1a:AFFX-MURINE_B2_at; K00131; K00131 |
| | mouse b2 repeat sequence from clone mm61 |
| 12219 | >control:wyeCanine1a:AFFX-PheX-3_at; M24537; M24537 B |
| | subtilis pheB, pheA genes corresponding to nucleotides 2017-3334 |
| | of M24537 (-5, -M, -3 represent transcript regions 5 prime, Middle, and 3 |
| | prime respectively) |
| 12220 | >control:wyeCanine1a:AFFX-PheX-5_at; M24537; M24537 B |
| | subtilis pheB, pheA genes corresponding to nucleotides 2017-3334 |
| | of M24537 (-5, -M, -3 represent transcript regions 5 prime, Middle, and 3 |
| | prime respectively) |
| 12221 | >control:wyeCanine1a:AFFX-PheX-M_at; M24537; M24537 B |
| | subtilis pheB, pheA genes corresponding to nucleotides 2017-3334 |
| | of M24537 (-5, -M, -3 represent transcript regions 5 prime, Middle, and 3 |
| | prime respectively) |
| 12222 | >control:wyeCanine1a:AFFX-PyruCarbMur/L09192_3_at; |
| | L09192; L09192 Mus musculus pyruvate carboxylase mRNA, |
| | complete cds (_5, _MA, MB, _3 represent transcript regions 5 |
| | prime, MiddleA, MiddleB, and 3 prime respectively) |
| 12223 | >control:wyeCanine1a:AFFX-PyruCarbMur/L09192_5_at; |
| | L09192; L09192 Mus musculus pyruvate carboxylase mRNA, |
| | complete cds (_5, _MA, MB, _3 represent transcript regions 5 |
| | prime, MiddleA, MiddleB, and 3 prime respectively) |
| 12224 | >control:wyeCanine1a:AFFX-PyruCarbMur/L09192_MA_at; |
| | L09192; L09192 Mus musculus pyruvate carboxylase mRNA, |
| | complete cds (_5, _MA, MB, _3 represent transcript regions 5 |
| | prime, MiddleA, MiddleB, and 3 prime respectively) |
| 12225 | >control:wyeCanine1a:AFFX-PyruCarbMur/L09192_MB_at; |
| | L09192; L09192 Mus musculus pyruvate carboxylase mRNA, |
| | complete cds (_5, _MA, MB, _3 represent transcript regions 5 |
| | prime, MiddleA, MiddleB, and 3 prime respectively) |
| 12226 | >control:wyeCanine1a:AFFX-r2-Bs-dap-3_at; L38424; Bacillus |
| | subtilis /REF = L38424 /DEF = B subtilis dapB, jojF, jojG genes |
| | corresponding to nucleotides 2634-3089 of L38424 /LEN = 1931 (-5, |
| | -M, -3 represent transcript regions 5 prime, Middle, and 3 prime respectively) |
| 12227 | >control:wyeCanine1a:AFFX-r2-Bs-dap-5_at; L38424; Bacillus |
| | subtilis /REF = L38424 /DEF = B subtilis dapB, jojF, jojG genes |
| | corresponding to nucleotides 1439-1846 of L38424 /LEN = 1931 (-5, |
| | -M, -3 represent transcript regions 5 prime, Middle, and 3 prime respectively) |
| 12228 | >control:wyeCanine1a:AFFX-r2-Bs-dap-M_at; L38424; Bacillus |
| | subtilis /REF = L38424 /DEF = B subtilis dapB, jojF, jojG genes |
| | corresponding to nucleotides 2055-2578 of L38424 /LEN = 1931 (-5, |
| | -M, -3 represent transcript regions 5 prime, Middle, and 3 prime respectively) |
| 12229 | >control:wyeCanine1a:AFFX-r2-Bs-lys-3_at; X17013; Bacillus |
| | subtilis /REF = X17013 /DEF = B subtilis lys gene for |
| | diaminopimelate decarboxylase corresponding to nucleotides |
| | 1008-1263 of X17013 /LEN = 1108 (-5, -M, -3 represent transcript |
| | regions 5 prime, Middle, and 3 prime respectively) |
| 12230 | >control:wyeCanine1a:AFFX-r2-Bs-lys-5_at; X17013; Bacillus |
| | subtilis /REF = X17013 /DEF = B subtilis lys gene for |
| | diaminopimelate decarboxylase corresponding to nucleotides 411-659 |
| | of X17013 /LEN = 1108 (-5, -M, -3 represent transcript regions |
| | 5 prime, Middle, and 3 prime respectively) |
| 12231 | >control:wyeCanine1a:AFFX-r2-Bs-lys-M_at; X17013; Bacillus |
| | subtilis /REF = X17013 /DEF = B subtilis lys gene for |
| | diaminopimelate decarboxylase corresponding to nucleotides 673-1002 |
| | of X17013 /LEN = 1108 (-5, -M, -3 represent transcript |
| | regions 5 prime, Middle, and 3 prime respectively) |
| 12232 | >control:wyeCanine1a:AFFX-r2-Bs-phe-3_at; M24537; Bacillus |
| | subtilis /REF = M24537 /DEF = B subtilis pheB, pheA genes |
| | corresponding to nucleotides 2897-3200 of M24537 /LEN = 1409 (-5, |
| | -M, -3 represent transcript regions 5 prime, Middle, and 3 prime respectively) |
| 12233 | >control:wyeCanine1a:AFFX-r2-Bs-phe-5_at; M24537; Bacillus |
| | subtilis /REF = M24537 /DEF = B subtilis pheB, pheA genes |
| | corresponding to nucleotides 2116-2382 of M24537 /LEN = 1409 (-5, |
| | -M, -3 represent transcript regions 5 prime, Middle, and 3 prime respectively) |
| 12234 | >control:wyeCanine1a:AFFX-r2-Bs-phe-M_at; M24537; Bacillus |
| | subtilis /REF= M24537 /DEF = B subtilis pheB, pheA genes |
| | corresponding to nucleotides 2484-2875 of M24537 /LEN = 1409 (-5, |
| | -M, -3 represent transcript regions 5 prime, Middle, and 3 prime respectively) |
| 12235 | >control:wyeCanine1a:AFFX-r2-Bs-thr-3_s_at; X04603; Bacillus |
| | subtilis /REF= X04603 /DEF = B subtilis thrC, thrB genes |
| | corresponding to nucleotides 1689-2151 of X04603 /LEN = 2073 (-5, |
| | -M, -3 represent transcript regions 5 prime, Middle, and 3 prime respectively) |
| 12236 | >control:wyeCanine1a:AFFX-r2-Bs-thr-5_s_at; X04603; Bacillus |
| | subtilis /REF = X04603 /DEF = B subtilis thrC, thrB genes |
| | corresponding to nucleotides 288-932 of X04603 /LEN = 2073 (-5, |
| | -M, -3 represent transcript regions 5 prime, Middle, and 3 prime respectively) |
| 12237 | >control:wyeCanine1a:AFFX-r2-Bs-thr-M_s_at; X04603; Bacillus |
| | subtilis /REF = X04603 /DEF = B subtilis thrC, thrB genes |
| | corresponding to nucleotides 995-1562 of X04603 /LEN = 2073 (-5, |
| | -M, -3 represent transcript regions 5 prime, Middle, and 3 prime respectively) |
| 12238 | >control:wyeCanine1a:AFFX-r2-Ec-bioB-3_at; J04423; |
| | Escherichia coli /REF = J04423 /DEF = E coli bioB gene biotin |
| | synthetase corresponding to nucleotides 2772-3004 of J04423 |
| | /LEN = 1114 (-5, -M, -3 represent transcript regions 5 prime, |
| | Middle, and 3 prime respectively) |
| 12239 | >control:wyeCanine1a:AFFX-r2-Ec-bioB-5_at; J04423; |
| | Escherichia coli /REF = J04423 /DEF = E coli bioB gene biotin |
| | synthetase corresponding to nucleotides 2071-2304 of J04423 |
| | /LEN = 1114 (-5, -M, -3 represent transcript regions 5 prime, |
| | Middle, and 3 prime respectively) |
| 12240 | >control:wyeCanine1a:AFFX-r2-Ec-bioB-M_at; J04423; |
| | Escherichia coli /REF = J04423 /DEF = E coli bioB gene biotin |
| | synthetase corresponding to nucleotides 2393-2682 of J04423 |
| | /LEN = 1114 (-5, -M, -3 represent transcript regions 5 prime, |
| | Middle, and 3 prime respectively) |
| 12241 | >control:wyeCanine1a:AFFX-r2-Ec-bioC-3_at; J04423; |
| | Escherichia coli /REF = J04423 /DEF = E coli bioC protein |
| | corresponding to nucleotides 4609-4883 of J04423 /LEN = 777 (-5 |
| | and -3 represent transcript regions 5 prime and 3 prime respectively) |
| 12242 | >control:wyeCanine1a:AFFX-r2-Ec-bioC-5_at; J04423; |
| | Escherichia coli /REF = J04423 /DEF = E coli bioC protein |
| | corresponding to nucleotides 4257-4573 of J04423 /LEN = 777 (-5 |
| | and -3 represent transcript regions 5 prime and 3 prime respectively) |
| 12243 | >control:wyeCanine1a:AFFX-r2-Ec-bioD-3_at; J04423; |
| | Escherichia coli /REF = J04423 /DEF = E coli bioD gene |
| | dethiobiotin synthetase corresponding to nucleotides 5312-5559 of |
| | J04423 /LEN = 676 (-5 and -3 represent transcript regions 5 prime |
| | and 3 prime respectively) |
| 12244 | >control:wyeCanine1a:AFFX-r2-Ec-bioD-5_at; J04423; |
| | Escherichia coli /REF = J04423 /DEF = E coli bioD gene |
| | dethiobiotin synthetase corresponding to nucleotides 5024-5244 of |
| | J04423 /LEN = 676 (-5 and -3 represent transcript regions 5 prime |
| | and 3 prime respectively) |
| 12245 | >control:wyeCanine1a:AFFX-r2-P1-cre-3_at; X03453; |
| | Bacteriophage /REF = X03453 /DEF = Bacteriophage P1 cre |
| | recombinase protein corresponding to nucleotides 1032-1270 of |
| | X03453 /LEN = 1058 (-5 and -3 represent transcript regions 5 |
| | prime and 3 prime respectively) |
| 12246 | >control:wyeCanine1a:AFFX-r2-P1-cre-5_at; X03453; |
| | Bacteriophage /REF = X03453 /DEF = Bacteriophage P1 cre |
| | recombinase protein corresponding to nucleotides 581-1001 of |
| | X03453 /LEN = 1058 (-5 and -3 represent transcript regions 5 |
| | prime and 3 prime respectively) |
| 12247 | >control:wyeCanine1a:AFFX-ThrX-3_at; X04603; X04603 B |
| | subtilis thrC, thrB genes corresponding to nucleotides 248-2229 of |
| | X04603 (-5, -M, -3 represent transcript regions 5 prime, Middle, |
| | and 3 prime respectively) |
| 12248 | >control:wyeCanine1a:AFFX-ThrX-5_at; X04603; X04603 B |
| | subtilis thrC, thrB genes corresponding to nucleotides 248-2229 of |
| | X04603 (-5, -M, -3 represent transcript regions 5 prime, Middle, |
| | and 3 prime respectively) |
| 12249 | >control:wyeCanine1a:AFFX-ThrX-M_at; X04603; X04603 B |
| | subtilis thrC, thrB genes corresponding to nucleotides 248-2229 of |
| | X04603 (-5, -M, -3 represent transcript regions 5 prime, Middle, |
| | and 3 prime respectively) |
| 12250 | >control:wyeCanine1a:AFFX-TransRecMur/X57349_3_at; |
| | X57349; X57349 M. musculus mRNA for transferrin receptor (_5, |
| | _M, _3 represent transcript regions 5 prime, Middle, and 3 prime |
| | respectively) |
| 12251 | >control:wyeCanine1a:AFFX-TransRecMur/X57349_5_at; |
| | X57349; X57349 M. musculus mRNA for transferrin receptor (_5, |
| | _M, _3 represent transcript regions 5 prime, Middle, and 3 prime |
| | respectively) |
| 12252 | >control:wyeCanine1a:AFFX-TransRecMur/X57349_M_at; |
| | X57349; X57349 M. musculus mRNA for transferrin receptor (_5, |
| | _M, _3 represent transcript regions 5 prime, Middle, and 3 prime |
| | respectively) |
| 12253 | >control:wyeCanine1a:AFFX-TrpnX-3_at; K01391; K01391 B |
| | subtilis TrpE protein, TrpD protein, TrpC protein corresponding to |
| | nucleotides 1883-4400 of K01391 (-5, -M, -3 represent transcript |
| | regions 5 prime, Middle, and 3 prime respectively) |
| 12254 | >control:wyeCanine1a:AFFX-TrpnX-5_at; K01391; K01391 B |
| | subtilis TrpE protein, TrpD protein, TrpC protein corresponding to |
| | nucleotides 1883-4400 of K01391 (-5, -M, -3 represent transcript |
| | regions 5 prime, Middle, and 3 prime respectively) |
| 12255 | >control:wyeCanine1a:AFFX-TrpnX-M_at; K01391; K01391 B |
| | subtilis TrpE protein, TrpD protein, TrpC protein corresponding to |
| | nucleotides 1883-4400 of K01391 (-5, -M, -3 represent transcript |
| | regions 5 prime, Middle, and 3 prime respectively) |
| 12256 | >control:wyeCanine1a:BACTIN3_Cf_at; BACTIN3_Cf; Cluster |
| | includes AF021873.2 Canis familiaris beta-actin mRNA, complete cds. |
| 12257 | >control:wyeCanine1a:BACTIN3_Hs_at; Unassigned; Human |
| | mRNA for beta-actin. |
| 12258 | >control:wyeCanine1a:bACTIN3_Mm_at; Unassigned; Mouse |
| | cytoplasmic beta-actin mRNA. |
| 12259 | >control:wyeCanine1a:BACTIN5_Cf_at; BACTIN5_Cf; Cluster |
| | includes AF021873.2 Canis familiaris beta-actin mRNA, complete cds. |
| 12260 | >control:wyeCanine1a:BACTIN5_Hs_at; Unassigned; Human |
| | mRNA for beta-actin. |
| 12261 | >control:wyeCanine1a:bACTIN5_Mm_at; Unassigned; Mouse |
| | cytoplasmic beta-actin mRNA. |
| 12262 | >control:wyeCanine1a:BACTINM_Cf_at; BACTINM_Cf; Cluster |
| | includes AF021873.2 Canis familiaris beta-actin mRNA, complete cds. |
| 12263 | >control:wyeCanine1a:BACTINM_Hs_at; Unassigned; Human |
| | mRNA for beta-actin. |
| 12264 | >control:wyeCanine1a:bACTINM_Mm_at; Unassigned; Mouse |
| | cytoplasmic beta-actin mRNA. |
| 12265 | >control:wyeCanine1a:BIOB3_at; Unassigned; E. coli biotin |
| | synthetase (bioB), complete cds. |
| 12266 | >control:wyeCanine1a:BIOB5_at; Unassigned; E. coli biotin |
| | synthetase (bioB), complete cds. |
| 12267 | >control:wyeCanine1a:BIOBM_at; Unassigned; E. coli biotin |
| | synthetase (bioB), complete cds. |
| 12268 | >control:wyeCanine1a:BIOC3_at; Unassigned; E. coli bioC |
| | protein, complete cds. |
| 12269 | >control:wyeCanine1a:BIOC5_at; Unassigned; E. coli bioC |
| | protein, complete cds. |
| 12270 | >control:wyeCanine1a:BIOD3_at; Unassigned; E. coli dethiobiotin |
| | synthetase (bioD), complete cds. |
| 12271 | >control:wyeCanine1a:BIOD5_at; Unassigned; E. coli dethiobiotin |
| | synthetase (bioD), complete cds. |
| 12272 | >control:wyeCanine1a:CRE3_at; Unassigned; Bacteriophage P1 |
| | cre gene for recombinase protein. |
| 12273 | >control:wyeCanine1a:CRE5_at; Unassigned; Bacteriophage P1 |
| | cre gene for recombinase protein. |
| 12274 | >control:wyeCanine1a:DAP3_at; Unassigned; Bacillus subtilis |
| | dihydropicolinate reductase (dapB), jojF, jojG, complete cds's. |
| 12275 | >control:wyeCanine1a:DAP5_at; Unassigned; Bacillus subtilis |
| | dihydropicolinate reductase (dapB), jojF, jojG, complete cds's. |
| 12276 | >control:wyeCanine1a:DAPM_at; Unassigned; Bacillus subtilis |
| | dihydropicolinate reductase (dapB), jojF, jojG, complete cds's. |
| 12277 | >control:wyeCanine1a:GAPDH3_Cf_x_at; GAPDH3_Cf; Cluster |
| | includes AB038240.1 Canis familiaris GAPDH mRNA for |
| | glyceraldehyde-3-phosphate dehydrogenase, complete cds. |
| 12278 | >control:wyeCanine1a:GAPDH3_Hs_at; Unassigned; Human |
| | glyceraldehyde-3-phosphate dehydrogenase (GAPDH) mRNA, |
| | complete cds. |
| 12279 | >control:wyeCanine1a:GAPDH3_Mm_at; Unassigned; Mouse |
| | glyceraldehyde-3-phosphate dehydrogenase mRNA, complete cds. |
| 12280 | >control:wyeCanine1a:GAPDH5_Cf_at; GAPDH5 Cf; Cluster |
| | includes AB038240.1 Canis familiaris GAPDH mRNA for |
| | glyceraldehyde-3-phosphate dehydrogenase, complete cds. |
| 12281 | >control:wyeCanine1a:GAPDH5_Hs_at; Unassigned; Human |
| | glyceraldehyde-3-phosphate dehydrogenase (GAPDH) mRNA, |
| | complete cds. |
| 12282 | >control:wyeCanine1a:GAPDH5_Mm_at; Unassigned; Mouse |
| | glyceraldehyde-3-phosphate dehydrogenase mRNA, complete cds. |
| 12283 | >control:wyeCanine1a:GAPDHM_Cf_at; GAPDHM_Cf; Cluster |
| | includes AB038240.1 Canis familiaris GAPDH mRNA for |
| | glyceraldehyde-3-phosphate dehydrogenase, complete cds. |
| 12284 | >control:wyeCanine1a:GAPDHM_Hs_at; Unassigned; Human |
| | glyceraldehyde-3-phosphate dehydrogenase (GAPDH) mRNA, |
| | complete cds. |
| 12285 | >control:wyeCanine1a:GAPDHM_Mm_at; Unassigned; Mouse |
| | glyceraldehyde-3-phosphate dehydrogenase mRNA, complete cds. |
| 12286 | >control:wyeCanine1a:LYSA3_at; Unassigned; Bacillus subtilis |
| | lys gene for diaminopimelate decarboxylase (EC 4.1.1.20). |
| 12287 | >control:wyeCanine1a:LYSA5_at; Unassigned; Bacillus subtilis |
| | lys gene for diaminopimelate decarboxylase (EC 4.1.1.20). |
| 12288 | >control:wyeCanine1a:LYSAM_at; Unassigned; Bacillus subtilis |
| | lys gene for diaminopimelate decarboxylase (EC 4.1.1.20). |
| 12289 | >control:wyeCanine1a:PHE3_at; Unassigned; Bacillus subtillis |
| | phenylalanine biosynthesis associated protein (pheB), and |
| | monofunctional prephenate dehydratase (pheA) genes, complete cds. |
| 12290 | >control:wyeCanine1a:PHE5_at; Unassigned; Bacillus subtillis |
| | phenylalanine biosynthesis associated protein (pheB), and |
| | monofunctional prephenate dehydratase (pheA) genes, complete cds. |
| 12291 | >control:wyeCanine1a:PHEM_at; Unassigned; Bacillus subtillis |
| | phenylalanine biosynthesis associated protein (pheB), and |
| | monofunctional prephenate dehydratase (pheA) genes, complete cds. |
| 12292 | >control:wyeCanine1a:PYRCRB3_Hs_at; Unassigned; Human |
| | pyruvate carboxylase (PC) mRNA, complete cds. |
| 12293 | >control:wyeCanine1a:PYRCRB3_Mm_at; Unassigned; Mus |
| | musculus pyruvate carboxylase mRNA, complete cds. |
| 12294 | >control:wyeCanine1a:PYRCRB5_Hs_at; Unassigned; Human |
| | pyruvate carboxylase (PC) mRNA, complete cds. |
| 12295 | >control:wyeCanine1a:PYRCRB5_Mm_at; Unassigned; Mus |
| | musculus pyruvate carboxylase mRNA, complete cds. |
| 12296 | >control:wyeCanine1a:PYRCRBMA_Hs_at; Unassigned; Human |
| | pyruvate carboxylase (PC) mRNA, complete cds. |
| 12297 | >control:wyeCanine1a:PYRCRBMA_Mm_at; Unassigned; Mus |
| | musculus pyruvate carboxylase mRNA, complete cds. |
| 12298 | >control:wyeCanine1a:PYRCRBMB_Hs_at; Unassigned; Human |
| | pyruvate carboxylase (PC) mRNA, complete cds. |
| 12299 | >control:wyeCanine1a:PYRCRBMB_Mm_at; Unassigned; Mus |
| | musculus pyruvate carboxylase mRNA, complete cds. |
| 12300 | >control:wyeCanine1a:THR3_at; Unassigned; B. subtilis thrB and |
| | thrC genes for homoserine kinase and threonine synthase (EC |
| | 2.7.1.39 and EC 4.2.99.2, respectively). |
| 12301 | >control:wyeCanine1a:THR5_at; Unassigned; B. subtilis thrB and |
| | thrC genes for homoserine kinase and threonine synthase (EC |
| | 2.7.1.39 and EC 4.2.99.2, respectively). |
| 12302 | >control:wyeCanine1a:THRM_at; Unassigned; B. subtilis thrB |
| | and thrC genes for homoserine kinase and threonine synthase (EC |
| | 2.7.1.39 and EC 4.2.99.2, respectively). |
| 12303 | >control:wyeCanine1a:TRANSFR3_Hs_at; Unassigned; Human |
| | transferrin receptor mRNA, complete cds. |
| 12304 | >control:wyeCanine1a:TRANSFR3_Mm_at; Unassigned; |
| | M. musculus mRNA for transferrin receptor. |
| 12305 | >control:wyeCanine1a:TRANSFR5_Hs_at; Unassigned; Human |
| | transferrin receptor mRNA, complete cds. |
| 12306 | >control:wyeCanine1a:TRANSFR5_Mm_at; Unassigned; |
| | M. musculus mRNA for transferrin receptor. |
| 12307 | >control:wyeCanine1a:TRANSFRM_Hs_at; Unassigned; Human |
| | transferrin receptor mRNA, complete cds. |
| 12308 | >control:wyeCanine1a:TRANSFRM_Mm_at; Unassigned; |
| | M. musculus mRNA for transferrin receptor. |
| 12309 | >control:wyeCanine1a:TRP3_at; Unassigned; B. subtilis |
| | tryptophan (trp) operon, complete cds. |
| 12310 | >control:wyeCanine1a:TRP5_at; Unassigned; B. subtilis |
| | tryptophan (trp) operon, complete cds. |
| 12311 | >control:wyeCanine1a:TRPM_at; Unassigned; B. subtilis |
| | tryptophan (trp) operon, complete cds. |

[0101] In a preferred embodiment, a nucleic acid array of the present invention comprises a perfect mismatch probe for each polynucleotide probe on the nucleic acid array. A perfect mismatch probe has the same sequence as the original probe except for a homomeric substitution (A to T, T to A, G to C, and C to G) at or near the center of the perfect mismatch probe. For instance, if the original probe has 2n nucleotide residues, the homomeric substitution in the perfect mismatch probe is either at the n or n+1 position, but not at both positions. If the original probe has 2n+1 nucleotide residues, the homomeric substitution in the perfect mismatch probe is at the n+1 position. The center location of the mismatched residue is more likely to destabilize the duplex formed with the target sequence under the hybridization conditions. Each probe and its perfect mismatch probe can be stably attached to different discrete regions on the nucleic acid array.

[0102] D. Applications

[0103] The nucleic acid arrays of the present invention can be used to detect or monitor gene expression in a vertebrate of interest. The vertebrate can be any animal model of osteoarthritis, such as a canine, a rodent, a rabbit, or a primate. Preferably, the vertebrate is a dog, a rabbit, a rat, a mouse, a hamster, or a guinea pig. The vertebrate can be either non-osteoarthritic, or affected by osteoarthritis. In one specific example, the vertebrate includes both non-osteoarthritic and osteoarthritic cartilage tissues. Other vertebrates can also be analyzed using the nucleic acid arrays of the present invention. In addition, the nucleic acid arrays of the present invention can be used to screen for potential drug candidates or evaluate new therapies for the treatment of osteoarthritis.

[0104] Protocols for conducing nucleic acid array hybridization are well known in the art. Exemplary protocols include those provided by Affymetrix in connection with the use of its GeneChip arrays. Samples amenable to nucleic acid array hybridization can be prepared from any tissue of the vertebrate of interest, such as cartilage, heart, liver, kidney, brain, lung, blood, urine, body fluid, or bone marrow. These tissues can be either osteoarthritis-affected or osteoarthritis-free. In one embodiment, the tissue being analyzed is prepared from the same species from which the polynucleotide probes on the nucleic acid array are derived. In another embodiment, the tissue being analyzed is a cartilage tissue prepared from a dog or another animal model of osteoarthritis. As used herein, “tissue” also includes cell preparations or cell cultures. Thus, a cartilage cell preparation or culture is considered a cartilage tissue for the present invention.

[0105] The sample for hybridization to a nucleic acid array can be either RNA (e.g., mRNA or cRNA) or DNA (e.g., cDNA). Various methods are available for isolating RNA from tissues. These methods include, but are not limited to, RNeasy kits (provided by QIAGEN), MasterPure kits (provided by Epicentre Technologies), and TRIZOL (provided by Gibco BRL). The RNA isolation protocols provided by Affymetrix can also be used.

[0106] The isolated RNA preferably is amplified and/or labeled before being hybridized to a nucleic acid array of the present invention. Suitable RNA amplification methods include, but are not limited to, reverse transcriptase PCR, isothermal amplification, ligase chain reaction, and Qbeta replicase method. The amplification products can be either cDNA or cRNA. In one embodiment, the isolated mRNA is reverse transcribed to cDNA using a reverse transcriptase and a primer consisting of oligo d(T) and a sequence encoding the phage T7 promoter. The cDNA is single stranded. The second strand of the cDNA can be synthesized using a DNA polymerase, combined with an RNase to break up the DNA/RNA hybrid. After synthesis of the double stranded cDNA, T7 RNA polymerase is added to transcribe cRNA from the second strand of the doubled stranded cDNA. The isolated RNA can also be hybridized to a nucleic acid array of the present invention without amplification.

[0107] cDNA, cRNA, or other nucleic acid samples can be labeled with one or more labeling moieties to allow for detection of hybridized polynucleotide complexes. The labeling moieties can include compositions that are detectable by spectroscopic, photochemical, biochemical, bioelectronic, immunochemical, electrical, optical or chemical means. The labeling moieties include radioisotopes, chemiluminescent compounds, labeled binding proteins, heavy metal atoms, spectroscopic markers, such as fluorescent markers and dyes, magnetic labels, linked enzymes, mass spectrometry tags, spin labels, electron transfer donors and acceptors, and the like.

[0108] Nucleic acid samples can be fragmented before being labeled with detectable moieties. Exemplary methods for fragmentation include, for example, heat and/or ion-mediated hydrolysis.

[0109] Hybridization reactions can be performed in absolute or differential hybridization formats. In the absolute hybridization format, polynucleotides derived from one sample are hybridized to the probes in a nucleic acid array. Signals detected after the formation of hybridization complexes correlate to the polynucleotide levels in the sample. In the differential hybridization format, polynucleotides derived from two samples are labeled with different labeling moieties. A mixture of these differently labeled polynucleotides is added to a nucleic acid array. The nucleic acid array is then examined under conditions in which the emissions from the two different labels are individually detectable. In one embodiment, the fluorophores Cy3 and Cy5 (Amersham Pharmacia Biotech, Piscataway, N.J.) are used as the labeling moieties for the differential hybridization format.

[0110] Signals gathered from nucleic acid arrays can be analyzed using commercially available software, such as those provided by Affymetrix or Agilent Technologies. Controls, such as for scan sensitivity, probe labeling and cDNA or cRNA quantitation, are preferably included in the hybridization experiments. Hybridization signals can be scaled or normalized before being subject to further analysis. For instance, hybridization signals for each individual probe can be normalized to take into account variations in hybridization intensities when more than one array is used under similar test conditions. Hybridization signals can also be normalized using the intensities derived from internal normalization controls contained on each array. In addition, genes with relatively consistent expression levels across the samples can be used to normalize the expression levels of other genes. In one embodiment, probes for certain maintenance genes are included in a nucleic acid array of the present invention. These genes are chosen because they show stable levels of expression across a diverse set of tissues. Hybridization signals can be normalized and/or scaled based on the expression levels of these maintenance genes.

[0111] In a preferred embodiment, probes for certain exogenous transcripts are included in a nucleic acid array of the present invention. These transcripts can be chosen such that they show no similarity to eukaryotic transcripts. In one specific example, eleven exogenous transcripts at different known concentrations are spiked in to each sample. The array is first scaled to a trimmed-mean target value of 100. Based on the scaled hybridization signal of these eleven probe sets, a standard curve can be drawn such that all transcripts present in the sample can be converted from a signal value to a more meaningful concentration value. In another specific example, a standard curve correlating the signal value read off of the array and known frequency (molarity) can be generated when the array image is read and the probe set expression values are generated. From this standard curve, each signal value can then be converted to a parts per million or picomolarity value. The exogenous controls spiked into each sample can include, for instance, E. coli BioB-5, E. coli BioB-M, E. coli BioB-3, E. coli BioC-5, E. coli BioC-3, E. coli BioD-3, Bacteriophage P1 Cre-5, Bacteriophage P1 Cre-3, E. coli Dap-5, B. subtilis Dap-M, and B. subtilis Dap-3. These transcripts can be monitored by control probe sets as discussed below.

[0112] The nucleic acid arrays of the present invention can be used to detect or diagnose osteoarthritis in a vertebrate of interest. A cartilage tissue can be isolated from the vertebrate. RNA samples prepared from the cartilage tissue can be hybridized to a nucleic acid array of the present invention. The expression profiles of genes that are differentially expressed in osteoarthritic tissues as compared to non-osteoarthritic tissues can be used as markers to determine the presence or absence of osteoarthritis in the vertebrate of interest. For instance, an observation showing that the gene expression profile in the cartilage tissue of the vertebrate of interest is more similar to that in osteoarthritic tissues than that in non-osteoarthritic tissues is often indicative of osteoarthritis in the vertebrate.

[0113] The nucleic acid arrays of the present invention can also be used to screen for drug candidates or evaluate therapies for treating osteoarthritis or other diseases. In addition, the nucleic acid arrays of the present invention can be used to assess the toxicity or other effects of a drug candidate on dogs or other animals that can be used as models of osteoarthritis.

[0114] In one embodiment, a drug candidate is first administered to an osteoarthritic vertebrate. The osteoarthritic vertebrate preferably is an animal model of osteoarthritis, such as a dog. The drug candidate can be formulated in a pharmaceutical composition compatible with the intended route of administration. Examples of routes of administration include parenteral, e.g., intravenous, intradermal, subcutaneous, oral (e.g., inhalation), transdermal (topical), transmucosal, and rectal administration. Solutions or suspensions used for parenteral, intradermal, or subcutaneous application can include the following components: a sterile diluent such as water for injection, saline solution, fixed oils, polyethylene glycols, glycerine; propylene glycol or other synthetic solvents; antibacterial agents such as benzyl alcohol or methyl parabens; antioxidants such as ascorbic acid or sodium bisulfate; chelating agents such as ethylenediaminetetraacetic acid; buffers such as acetates, citrates or phosphates and agents for the adjustment of tonicity such as sodium chloride or dextrose. pH can be adjusted with acids or bases, such as hydrochloric acid or sodium hydroxide. The parenteral preparation can be enclosed in ampoules, disposable syringes or multiple dose vials made of glass or plastic.

[0115] After administration of the drug candidate, a tissue of interest, such as a cartilage tissue, can be isolated from the osteoarthritic vertebrate. A nucleic acid sample is prepared from the tissue and hybridized to a nucleic acid array of the present invention. Preferably, the polynucleotide probes on the nucleic acid array are derived from the same species as the osteoarthritic vertebrate. Any change in hybridization signals after the treatment, compared to that before the treatment, often indicates that the drug candidate can produce a biological response in the osteoarthritic vertebrate (e.g., modulation of expression levels of genes that are differentially expressed in osteoarthritic tissues relative to non-osteoarthritic tissues). Similar methods can be used to assess the effect of a therapy on treating osteoarthritis in dogs or other animal models of osteoarthritis. A return of the expression levels in osteoarthritic tissues to that in osteoarthritis-free tissues is reflective of the efficacy of a drug candidate or therapy in treating osteoarthritis.

[0116] In another embodiment, a cartilage tissue or cell culture that mimics a disease state of osteoarthritis is treated with a drug candidate. Nucleic acid molecules can be prepared from the cartilage tissue or cell culture and then hybridized to a nucleic acid array of the present invention. The expression levels of genes that are differentially expressed in osteoarthritic tissues relative to non-osteoarthritic tissues are monitored. A change in the hybridization signals of these genes after the treatment, compared to that before the treatment, is suggestive of the effectiveness of the drug candidate to modulate the expression levels of these differentially expressed genes.

[0117] The present invention also features protein arrays for detecting gene expression in animal models of osteoarthritis or other inflammatory diseases. Each protein array of the present invention includes probes which can specifically bind to protein products of genes that are differentially expressed in osteoarthritic cartilage tissues relative to non-osteoarthritic cartilage tissues. Examples of these differentially expressed genes include, but are not limited to, those that encode the tiling sequences selected from Table C and having pattern values of 010, 011, 100 or 101.

[0118] In one embodiment, the probes on a protein array of the present invention are antibodies. Many of these antibodies can bind to the corresponding target proteins with an affinity constant of at least 10⁴ M^{-1,} 10⁵ M^{-1,} 10⁶ M⁻¹, 10⁷ M⁻¹, or stronger. Suitable antibodies for the present invention include, but are not limited to, polyclonal antibodies, monoclonal antibodies, chimeric antibodies, single chain antibodies, synthetic antibodies, Fab fragments, or fragments produced by a Fab expression library. Other peptides, scaffolds, antibody mimics, high-affinity binders, or protein-binding ligands can also be used to construct the protein arrays of the present invention.

[0119] Numerous methods are available for immobilizing antibodies or other probes on a protein array of the present invention. Examples of these methods include, but are not limited to, diffusion (e.g., agarose or polyacrylamide gel), surface absorption (e.g., nitrocellulose or PVDF), covalent binding (e.g., silanes or aldehyde), or non-covalent affinity binding (e.g., biotin-streptavidin). Examples of protein array fabrication methods include, but are not limited to, ink-jetting, robotic contact printing, photolithography, or piezoelectric spotting. The method described in MacBeath and Schreiber, SCIENCE, 289: 1760-1763 (2000), which is incorporated herein by reference, can also be used. Suitable substrate supports for a protein array of the present invention include, but are not limited to, glass, membranes, mass spectrometer plates, microtiter wells, silica, or beads.

[0120] The protein-coding sequence of a gene can be determined by a variety of methods. For instance, the protein-coding sequences can be extracted from the corresponding tiling or parent sequences by using an open reading frame (ORF) prediction program. Examples of ORF prediction programs include, but are not limited to, GeneMark (provided by the European Bioinformatics Institute), Glimmer (provided by TIGR), and ORF Finder (provided by NCBI). Many protein sequences can also be obtained from Entrez or other sequence databases by BLAST searching the corresponding tiling or parent sequences against these databases. The protein-coding sequences thus obtained can be used to prepare antibodies or other protein-binding agents.

[0121] In addition, the present invention contemplates a collection of polynucleotides. Each polynucleotide is capable of hybridizing under stringent or nucleic acid array hybridization conditions to a parent sequence selected from SEQ ID NOs: 1-12,167, or the complement thereof. In one embodiment, the polynucleotide collection comprises (1) at least one polynucleotide capable of hybridizing under stringent and/or nucleic acid array hybridization conditions to a tiling sequence selected from Table C and having a pattern value of 010, and (2) at least one additional polynucleotide capable of hybridizing under stringent and/or nucleic acid array hybridization conditions to a tiling sequence selected from Table C and having a pattern value of 100. In another embodiment, the polynucleotide collection includes at least one tiling sequence selected from Table C. For instance, the polynucleotide collection can include at least 5, 10, 50, 100, 500, 1,000, 5,000, 10,000 or more tiling sequences selected from Table C. In yet another embodiment, the polynucleotide collection contains at least 1, 5, 10, 50, 100, 500, 1,000, 5,000, or 10,000 sequence selected from SEQ ID NOs: 1-12,167.

[0122] It should be understood that the above-described embodiments and the following examples are given by way of illustration, not limitation. Various changes and modifications within the scope of the present invention will become apparent to those skilled in the art from the present description.

### E. EXAMPLES

### Example 1

### Preparation of Canis familiars Cartilage cDNA Libraries

[0123] The cartilage tissue is harvested from non-osteoarthritic or osteoarthritis-affected dogs, and then placed in Dulbecco's Modified Eagle Medium (DMEM, Gibco/BRL) supplemented with antibiotics (penicillin, streptomycin, and gentamicin). The cartilage is removed aseptically from the underlying bone, rinsed in DMEM and diced into small pieces, and then placed in 100 mm petri dishes containing 20 ml of Neuman and Tytell's serum free medium (GIBCO/BRL). Using the protocol of G. Cathala et al., DNA 2:329-335 (1983), the cartilage from each dog is digested with 4 mg/ml pronase (Sigma, St Louis) for 1.5 hours, and then digested with 3 mg/ml bacterial collagenase (Sigma) for 1.5 hours. The digested material is filtered through a cell strainer, and the cells are pelleted by centrifugation. The cell pellet is washed once with phosphate buffered saline and then dissolved in 5 ml of buffer consisting of 5M guanidine isothiocyanate, 10 mM EDTA, 50 mM Tris (pH 7.5) and 8% β-mercaptoethanol. A five-fold volume of 4M LiCl is added to the buffer, and the mixture is stored in the refrigerator overnight. After centrifugation, the precipitate is washed once with 3M LiCl and recentrifuged. The second precipitate is dissolved in a solution consisting of 0.1% sodium dodecyl sulfate, 1 mM EDTA and 10 mM Tris (pH 7.5). The suspension is frozen at −70° C. and then vortexed during thawing.

[0124] Total RNA is extracted twice with phenol chloroform, once with chloroform, and then precipitated with ethanol. Following centrifugation, the RNA pellet is redissolved in DEPC treated, distilled deionized water (DEPC-ddHOH) and run over a CsCl gradient. The RNA is extracted with acid phenol (at pH 4.0, catalog #972Z, Ambion, Austin Tex.), precipitated with ethanol and resuspended in DEPC-ddHOH. The RNA is treated with RNase-free DNase (Epicentre Technologies, Madison Wis.) for 15 minutes, extracted with chloroform, precipitated and washed with ethanol, and dissolved in DEPC-ddHOH. Since the RNA yield may vary with each sample, approximately 40% of total RNA from each sample is contributed to the pooled sample. The pooled RNA is used to construct a cartilage cDNA library.

### Example 2.

### Analysis of Cartilage cDNA Libraries

[0125] To assess the quality of the Canis familiars cartilage cDNA libraries, 379 3′ sequence reads were produced from an osteoarthritis-affected cartilage cDNA library, and 432 3′ sequence reads were generated from an non-osteoarthritic cartilage cDNA library. Each of the 3′ sequence reads was compared by BLASTN to both the human genome as well as the human sequences present in GenBank. Table H shows the BLASTN results for the 3′ sequence reads from the osteoarthritis-free library (“Free”) as well as from the osteoarthritis-affected library (“Affected”). Those 3′ sequence reads that were mapped to a human cDNA with an expect (“e-”) value no less than 10⁻¹⁴ were considered to be homologous to the human transcript.

TABLE H
Analysis of Cartilage cDNA Libraries

| | | | | A-F |
|---|---|---|---|---|
| Gene Symbol | Gene Name | Free | Affected | Change |
| GP | matrix Gla protein | 7 | 0 | −7 |
| RPL10 | ribosomal protein L10 | 8 | 2 | −6 |
| RPS3A | ribosomal protein S3A | 6 | 1 | −5 |
| CHAD | chondroadherin | 4 | 1 | −3 |
| CLU | clusterin (complement lysis inhibitor, SP- | 6 | 3 | −3 |
| | 40, 40, sulfated glycoprotein 2, | | | |
| | testosterone-repressed prostate message | | | |
| | 2, apolipoprotein J) | | | |
| CST3 | cystatin C (amyloid angiopathy and | 3 | 0 | −3 |
| | cerebral hemorrhage) | | | |
| RPL10A | ribosomal protein L10a | 3 | 0 | −3 |
| RPL8 | ribosomal protein L8 | 3 | 0 | −3 |
| RPS8 | ribosomal protein S8 | 3 | 0 | −3 |
| UNK_AK023362 | UNKNOWN | 3 | 0 | −3 |
| UNK_K03432 | UNKNOWN | 5 | 2 | −3 |
| BTF3 | basic transcription factor 3 | 2 | 0 | −2 |
| K-ALPHA-1 | tubulin, alpha, ubiquitous | 2 | 0 | −2 |
| PRO1073 | PRO1073 protein | 2 | 0 | −2 |
| RPL4 | ribosomal protein L4 | 2 | 0 | −2 |
| RPLP0 | ribosomal protein, large, P0 | 3 | 1 | −2 |
| RPS11 | ribosomal protein S11 | 2 | 0 | −2 |
| 13CDNA73 | hypothetical protein CG003 | 1 | 0 | −1 |
| ACTG1 | actin, gamma 1 | 2 | 1 | −1 |
| ADRM1 | adhesion regulating molecule 1 | 1 | 0 | −1 |
| AMOTL2 | angiomotin like 2 | 1 | 0 | −1 |
| ANXA5 | annexin A5 | 1 | 0 | −1 |
| APRT | adenine phosphoribosyltransferase | 1 | 0 | −1 |
| ARF3 | ADP-ribosylation factor 3 | 1 | 0 | −1 |
| ARPC1B | actin related protein 2/3 complex, subunit | 1 | 0 | −1 |
| | 1B, 41 kDa | | | |
| ATP6V1D | ATPase, H+ transporting, lysosomal | 1 | 0 | −1 |
| | 34 kDa, V1 subunit D | | | |
| BTBD1 | BTB (POZ) domain containing 1 | 1 | 0 | −1 |
| BTG2 | BTG family, member 2 | 1 | 0 | −1 |
| CABC1 | chaperone, ABC1 activity of bc1 | 1 | 0 | −1 |
| | complex like (S. pombe) | | | |
| CCK | cholecystokinin | 1 | 0 | −1 |
| COL10A1 | collagen, type X, alpha 1(Schmid | 1 | 0 | −1 |
| | metaphyseal chondrodysplasia) | | | |
| COX7A2L | cytochrome c oxidase subunit VIIa | 1 | 0 | −1 |
| | polypeptide 2 like | | | |
| CTSL2 | cathepsin L2 | 1 | 0 | −1 |
| D21S2056E | DNA segment on chromosome 21 | 1 | 0 | −1 |
| | (unique) 2056 expressed sequence | | | |
| DDOST | dolichyl-diphosphooligosaccharide- | 1 | 0 | −1 |
| | protein glycosyltransferase | | | |
| DKFZP566H073 | DKFZP566H073 protein | 1 | 0 | −1 |
| DMPK | dystrophia myotonica-protein kinase | 1 | 0 | −1 |
| EIF3S4 | eukaryotic translation initiation factor 3, | 1 | 0 | −1 |
| | subunit 4 delta, 44 kDa | | | |
| EIF4G2 | eukaryotic translation initiation factor 4 | 1 | 0 | −1 |
| | gamma, 2 | | | |
| ERH | enhancer of rudimentary homolog | 1 | 0 | −1 |
| | (Drosophila) | | | |
| F13A1 | coagulation factor XIII, A1 polypeptide | 1 | 0 | −1 |
| FLJ13081 | hypothetical protein FLJ13081 | 1 | 0 | −1 |
| FLJ22729 | hypothetical protein FLJ22729 | 1 | 0 | −1 |
| FOSL2 | FOS-like antigen 2 | 1 | 0 | −1 |
| FTH1 | ferritin, heavy polypeptide 1 | 3 | 2 | −1 |
| GDF10 | growth differentiation factor 10 | 1 | 0 | −1 |
| GSN | gelsolin (amyloidosis, Finnish type) | 1 | 0 | −1 |
| HBS1L | HBS1-like (S. cerevisiae) | 1 | 0 | −1 |
| HSPC163 | HSPC163 protein | 1 | 0 | −1 |
| ID1 | inhibitor of DNA binding 1, dominant | 1 | 0 | −1 |
| | negative helix-loop-helix protein | | | |
| IMPDH2 | IMP (inosine monophosphate) | 1 | 0 | −1 |
| | dehydrogenase 2 | | | |
| KIAA0375 | KIAA0375 gene product | 1 | 0 | −1 |
| KIAA1053 | KIAA1053 protein | 1 | 0 | −1 |
| LAMR1 | laminin receptor 1 (ribosomal protein SA, | 3 | 2 | −1 |
| | 67 kDa) | | | |
| LOC119504 | hypothetical protein LOC119504 | 1 | 0 | −1 |
| MDH1 | malate dehydrogenase 1, NAD (soluble) | 1 | 0 | −1 |
| METAP2 | methionyl aminopeptidase 2 | 1 | 0 | −1 |
| MGC10471 | hypothetical protein MGC10471 | 1 | 0 | −1 |
| MGC13017 | similar to RIKEN cDNA A430101B06 | 1 | 0 | −1 |
| | gene | | | |
| MGC20781 | hypothetical protein MGC20781 | 1 | 0 | −1 |
| MGC3035 | hypothetical protein MGC3035 | 1 | 0 | −1 |
| MPG | N-methylpurine-DNA glycosylase | 1 | 0 | −1 |
| MRPS18B | mitochondrial ribosomal protein S18B | 1 | 0 | −1 |
| MRPS31 | mitochondrial ribosomal protein S31 | 1 | 0 | −1 |
| MYL6 | myosin, light polypeptide 6, alkali, | 1 | 0 | −1 |
| | smooth muscle and non-muscle | | | |
| NACA | nascent-polypeptide-associated complex | 1 | 0 | −1 |
| | alpha polypeptide | | | |
| PAI-RBP1 | PAI-1 mRNA-binding protein | 1 | 0 | −1 |
| POLR1C | polymerase (RNA) I polypeptide C, | 1 | 0 | −1 |
| | 30 kDa | | | |
| PSMB3 | proteasome (prosome, macropain) | 1 | 0 | −1 |
| | subunit, beta type, 3 | | | |
| PYGL | phosphorylase, glycogen; liver (Hers | 1 | 0 | −1 |
| | disease, glycogen storage disease type | | | |
| | VI) | | | |
| RABAC1 | Rab acceptor 1 (prenylated) | 1 | 0 | −1 |
| RNF130 | ring finger protein 130 | 1 | 0 | −1 |
| RNF5 | ring finger protein 5 | 1 | 0 | −1 |
| RPC62 | polymerase (RNA) III (DNA directed) | 1 | 0 | −1 |
| | (62 kD) | | | |
| RPL10L | ribosomal protein L10-like | 1 | 0 | −1 |
| RPL12 | ribosomal protein L12 | 1 | 0 | −1 |
| RPL13A | ribosomal protein L13a | 2 | 1 | −1 |
| RPL17 | ribosomal protein L17 | 1 | 0 | −1 |
| RPL18 | ribosomal protein L18 | 1 | 0 | −1 |
| RPL19 | ribosomal protein L19 | 1 | 0 | −1 |
| RPL21 | ribosomal protein L21 | 1 | 0 | −1 |
| RPL34 | ribosomal protein L34 | 1 | 0 | −1 |
| RPL6 | ribosomal protein L6 | 1 | 0 | −1 |
| RPL9 | ribosomal protein L9 | 2 | 1 | −1 |
| RPS6 | ribosomal protein S6 | 2 | 1 | −1 |
| SAA1 | serum amyloid A1 | 1 | 0 | −1 |
| SCP2 | sterol carrier protein 2 | 1 | 0 | −1 |
| SEC23B | Sec23 homolog B (S. cerevisiae) | 1 | 0 | −1 |
| SERF1A | small EDRK-rich factor 1A (telomeric) | 1 | 0 | −1 |
| SERPINA1 | serine (or cysteine) proteinase inhibitor, | 3 | 2 | −1 |
| | clade A (alpha-1 antiproteinase, | | | |
| | antitrypsin), member 1 | | | |
| SLC25A6 | solute carrier family 25 (mitochondrial | 1 | 0 | −1 |
| | carrier; adenine nucleotide translocator), | | | |
| | member 6 | | | |
| SREBF1 | sterol regulatory element binding | 1 | 0 | −1 |
| | transcription factor 1 | | | |
| SRP72 | signal recognition particle 72 kDa | 1 | 0 | −1 |
| STRAIT11499 | hypothetical protein STRAIT11499 | 1 | 0 | −1 |
| SUI1 | putative translation initiation factor | 1 | 0 | −1 |
| TGFBR3 | transforming growth factor, beta receptor | 1 | 0 | −1 |
| | III (betaglycan, 300 kDa) | | | |
| THBS1 | thrombospondin 1 | 1 | 0 | −1 |
| THY1 | Thy-1 cell surface antigen | 1 | 0 | −1 |
| TIMP1 | tissue inhibitor of metalloproteinase 1 | 1 | 0 | −1 |
| | (erythroid potentiating activity, | | | |
| | collagenase inhibitor) | | | |
| TLN1 | talin 1 | 1 | 0 | −1 |
| TPM1 | tropomyosin 1 (alpha) | 1 | 0 | −1 |
| UBAP2 | ubiquitin associated protein 2 | 1 | 0 | −1 |
| UBB | ubiquitin B | 1 | 0 | −1 |
| UBC | ubiquitin C | 1 | 0 | −1 |
| UNK_AK000896 | UNKNOWN | 1 | 0 | −1 |
| UNK_AK025781 | Homo sapiens, clone IMAGE: 5211207, | 1 | 0 | −1 |
| | mRNA | | | |
| UNK_AK026491 | UNKNOWN | 1 | 0 | −1 |
| UNK_AK054605 | UNKNOWN | 1 | 0 | −1 |
| UNK_AK057071 | UNKNOWN | 4 | 3 | −1 |
| UNK_BC014023 | UNKNOWN | 1 | 0 | −1 |
| UNK_BC017189 | UNKNOWN | 1 | 0 | −1 |
| UNK_U37146 | UNKNOWN | 1 | 0 | −1 |
| UNK_U76194 | UNKNOWN | 1 | 0 | −1 |
| VAPB | VAMP (vesicle-associated membrane | 1 | 0 | −1 |
| | protein)-associated protein B and C | | | |
| VPS28 | vacuolar protein sorting 28 (yeast) | 1 | 0 | −1 |
| WDR1 | WD repeat domain 1 | 1 | 0 | −1 |
| WDR5 | WD repeat domain 5 | 1 | 0 | −1 |
| WIF1 | WNT inhibitory factor 1 | 1 | 0 | −1 |
| WIZ | widely-interspaced zinc finger motifs | 1 | 0 | −1 |
| YWHAE | tyrosine 3-monooxygenase/tryptophan 5- | 1 | 0 | −1 |
| | monooxygenase activation protein, | | | |
| | epsilon polypeptide | | | |
| ZNF236 | zinc finger protein 236 | 1 | 0 | −1 |
| ZNF-U69274 | zinc finger protein | 1 | 0 | −1 |
| DCN | decorin | 1 | 1 | 0 |
| DNASE1L1 | deoxyribonuclease I-like 1 | 1 | 1 | 0 |
| ECRG4 | esophageal cancer related gene 4 protein | 2 | 2 | 0 |
| EEF1A1 | eukaryotic translation elongation factor 1 | 2 | 2 | 0 |
| | alpha 1 | | | |
| EEF1B2 | eukaryotic translation elongation factor 1 | 1 | 1 | 0 |
| | beta 2 | | | |
| FGFR1 | fibroblast growth factor receptor 1 (fms- | 1 | 1 | 0 |
| | related tyrosine kinase 2, Pfeiffer | | | |
| | syndrome) | | | |
| H3F3B | H3 histone, family 3B (H3.3B) | 1 | 1 | 0 |
| ITGB5 | integrin, beta 5 | 1 | 1 | 0 |
| MGC3047 | hypothetical protein MGC3047 | 1 | 1 | 0 |
| PIR | Pirin | 1 | 1 | 0 |
| PSMA2 | proteasome (prosome, macropain) | 1 | 1 | 0 |
| | subunit, alpha type, 2 | | | |
| RPL7 | ribosomal protein L7 | 1 | 1 | 0 |
| RPS2 | ribosomal protein S2 | 1 | 1 | 0 |
| TPT1 | tumor protein, translationally-controlled 1 | 2 | 2 | 0 |
| TSPAN-3 | tetraspan 3 | 1 | 1 | 0 |
| UNK_AJ328465 | UNKNOWN | 1 | 1 | 0 |
| ACTA1 | actin, alpha 1, skeletal muscle | 0 | 1 | 1 |
| AGC1 | aggrecan 1 (chondroitin sulfate | 0 | 1 | 1 |
| | proteoglycan 1, large aggregating | | | |
| | proteoglycan, antigen identified by | | | |
| | monoclonal antibody A0122) | | | |
| AP2M1 | adaptor-related protein complex 2, mu 1 | 0 | 1 | 1 |
| | subunit | | | |
| APOE | apolipoprotein E | 0 | 1 | 1 |
| AQP1 | aquaporin 1 (channel-forming integral | 0 | 1 | 1 |
| | protein, 28 kDa) | | | |
| ARHA | ras homolog gene family, member A | 0 | 1 | 1 |
| ASS | argininosuccinate synthetase | 0 | 1 | 1 |
| BCKDHB | branched chain keto acid dehydrogenase | 0 | 1 | 1 |
| | E1, beta polypeptide (maple syrup urine | | | |
| | disease) | | | |
| BGN | biglycan | 0 | 1 | 1 |
| BOC | brother of CDO | 0 | 1 | 1 |
| C13ORF9 | chromosome 13 open reading frame 9 | 0 | 1 | 1 |
| C1ORF8 | chromosome 1 open reading frame 8 | 0 | 1 | 1 |
| C1QTNF7 | C1q and tumor necrosis factor related | 0 | 1 | 1 |
| | protein 7 | | | |
| C20ORF67 | chromosome 20 open reading frame 67 | 0 | 1 | 1 |
| C5ORF3 | chromosome 5 open reading frame 3 | 0 | 1 | 1 |
| C6ORF37 | chromosome 6 open reading frame 37 | 0 | 1 | 1 |
| CALM2 | calmodulin 2 (phosphorylase kinase, | 0 | 1 | 1 |
| | delta) | | | |
| CAPN2 | calpain 2, (m/II) large subunit | 0 | 1 | 1 |
| CD164 | CD164 antigen, sialomucin | 0 | 1 | 1 |
| CD81 | CD81 antigen (target of antiproliferative | 0 | 1 | 1 |
| | antibody 1) | | | |
| CGI-135 | CGI-135 protein | 0 | 1 | 1 |
| CGI-148 | CGI-148 protein | 0 | 1 | 1 |
| CGI-99 | CGI-99 protein | 0 | 1 | 1 |
| CHST1 | carbohydrate (keratan sulfate Gal-6) | 0 | 1 | 1 |
| | sulfotransferase 1 | | | |
| CKM | creatine kinase, muscle | 0 | 1 | 1 |
| COL11A2 | collagen, type XI, alpha 2 | 0 | 1 | 1 |
| COL12A1 | collagen, type XII, alpha 1 | 0 | 1 | 1 |
| COL1A1 | collagen, type I, alpha 1 | 0 | 1 | 1 |
| COL3A1 | collagen, type III, alpha 1 (Ehlers-Danlos | 0 | 1 | 1 |
| | syndrome type IV, autosomal dominant) | | | |
| COPE | coatomer protein complex, subunit | 0 | 1 | 1 |
| | epsilon | | | |
| CRABP2 | cellular retinoic acid binding protein 2 | 0 | 1 | 1 |
| CRIM1 | cysteine-rich motor neuron 1 | 0 | 1 | 1 |
| CRSP6 | cofactor required for Sp1 transcriptional | 0 | 1 | 1 |
| | activation, subunit 6, 77 kDa | | | |
| DDB2 | damage-specific DNA binding protein 2, | 0 | 1 | 1 |
| | 48 kDa | | | |
| DKFZP564O092 | DKFZP564O092 protein | 0 | 1 | 1 |
| DKFZP566E144 | small fragment nuclease | 0 | 1 | 1 |
| DKKL1-PENDING | soggy-1 gene | 0 | 1 | 1 |
| DLC1 | deleted in liver cancer 1 | 0 | 1 | 1 |
| DP1 | likely ortholog of mouse deleted in | 0 | 1 | 1 |
| | polyposis 1 | | | |
| E1B-AP5 | E1B-55 kDa-associated protein 5 | 0 | 1 | 1 |
| EEF1D | eukaryotic translation elongation factor 1 | 2 | 3 | 1 |
| | delta (guanine nucleotide exchange | | | |
| | protein) | | | |
| EEF1G | eukaryotic translation elongation factor 1 | 0 | 1 | 1 |
| | gamma | | | |
| EIF3K | eukaryotic translation initiation factor 3 | 0 | 1 | 1 |
| | subunit k | | | |
| EIF4A2 | eukaryotic translation initiation factor | 0 | 1 | 1 |
| | 4A, isoform 2 | | | |
| ELF1 | E74-like factor 1 (ets domain | 0 | 1 | 1 |
| | transcription factor) | | | |
| EMP3 | epithelial membrane protein 3 | 0 | 1 | 1 |
| ENO1 | enolase 1, (alpha) | 0 | 1 | 1 |
| ETFB | electron-transfer-flavoprotein, beta | 0 | 1 | 1 |
| | polypeptide | | | |
| FBXW1B | F-box and WD-40 domain protein 1B | 0 | 1 | 1 |
| FKBP1A | FK506 binding protein 1A, 12 kDa | 0 | 1 | 1 |
| FLJ11171 | hypothetical protein FLJ11171 | 0 | 1 | 1 |
| FLJ23751 | hypothetical protein FLJ23751 | 0 | 1 | 1 |
| FOLR2 | folate receptor 2 (fetal) | 0 | 1 | 1 |
| GABARAP | GABA(A) receptor-associated protein | 0 | 1 | 1 |
| GEMIN6 | gem (nuclear organelle) associated | 0 | 1 | 1 |
| | protein 6 | | | |
| GLG1 | golgi apparatus protein 1 | 0 | 1 | 1 |
| GNA11 | guanine nucleotide binding protein (G | 0 | 1 | 1 |
| | protein), alpha 11 (Gq class) | | | |
| GNAI2 | guanine nucleotide binding protein (G | 0 | 1 | 1 |
| | protein), alpha inhibiting activity | | | |
| | polypeptide 2 | | | |
| GPX3 | glutathione peroxidase 3 (plasma) | 0 | 1 | 1 |
| GSTM3 | glutathione S-transferase M3 (brain) | 0 | 1 | 1 |
| H17 | hypothetical protein H17 | 0 | 1 | 1 |
| HADH2 | hydroxyacyl-Coenzyme A | 0 | 1 | 1 |
| | dehydrogenase, type II | | | |
| HDAC6 | histone deacetylase 6 | 0 | 1 | 1 |
| HHGP | HHGP protein | 0 | 1 | 1 |
| HNOEL-ISO | HNOEL-iso protein | 0 | 1 | 1 |
| HNRPA1 | heterogeneous nuclear ribonucleoprotein | 0 | 1 | 1 |
| | A1 | | | |
| HSPA1A | heat shock 70 kDa protein 1A | 0 | 1 | 1 |
| HSPC039 | HSPC039 protein | 0 | 1 | 1 |
| IDUA | iduronidase, alpha-L- | 0 | 1 | 1 |
| ING4 | inhibitor of growth family, member 4 | 0 | 1 | 1 |
| LASP1 | LIM and SH3 protein 1 | 0 | 1 | 1 |
| LDHA | lactate dehydrogenase A | 0 | 1 | 1 |
| LENG1 | leukocyte receptor cluster (LRC) member 1 | 0 | 1 | 1 |
| LOC283824 | hypothetical protein LOC283824 | 0 | 1 | 1 |
| LOC286257 | hypothetical protein LOC286257 | 0 | 1 | 1 |
| LOC56270 | hypothetical protein 628 | 0 | 1 | 1 |
| LRP10 | low density lipoprotein receptor-related | 0 | 1 | 1 |
| | protein 10 | | | |
| MAGED1 | melanoma antigen, family D, 1 | 0 | 1 | 1 |
| MGC10540 | hypothetical protein MGC10540 | 0 | 1 | 1 |
| MGC2306 | hypothetical protein MGC2306 | 0 | 1 | 1 |
| MLF2 | myeloid leukemia factor 2 | 0 | 1 | 1 |
| MORF4L2 | mortality factor 4 like 2 | 0 | 1 | 1 |
| MTX1 | metaxin 1 | 0 | 1 | 1 |
| MVP | major vault protein | 0 | 1 | 1 |
| MYH10 | myosin, heavy polypeptide 10, non- | 0 | 1 | 1 |
| | muscle | | | |
| MYL2 | myosin, light polypeptide 2, regulatory, | 0 | 1 | 1 |
| | cardiac, slow | | | |
| MYST3 | MYST histone acetyltransferase | 0 | 1 | 1 |
| | (monocytic leukemia) 3 | | | |
| NDP52 | nuclear domain 10 protein | 0 | 1 | 1 |
| NDUFV1 | NADH dehydrogenase (ubiquinone) | 0 | 1 | 1 |
| | flavoprotein 1, 51 kDa | | | |
| NESHBP | DKFZP586L2024 protein | 0 | 1 | 1 |
| NPDC1 | neural proliferation, differentiation and | 0 | 1 | 1 |
| | control, 1 | | | |
| NR1D1 | nuclear receptor subfamily 1, group D, | 0 | 1 | 1 |
| | member 1 | | | |
| NR4A2 | nuclear receptor subfamily 4, group A, | 0 | 1 | 1 |
| | member 2 | | | |
| NSEP1 | nuclease sensitive element binding | 0 | 1 | 1 |
| | protein 1 | | | |
| OAZ2 | ornithine decarboxylase antizyme 2 | 0 | 1 | 1 |
| ORF1-FL49 | putative nuclear protein ORF1-FL49 | 0 | 1 | 1 |
| P4HA1 | procollagen-proline, 2-oxoglutarate 4- | 0 | 1 | 1 |
| | dioxygenase (proline 4-hydroxylase), | | | |
| | alpha polypeptide I | | | |
| P5 | protein disulfide isomerase-related | 0 | 1 | 1 |
| | protein | | | |
| PABPC4 | poly(A) binding protein, cytoplasmic 4 | 0 | 1 | 1 |
| | (inducible form) | | | |
| PCCB | propionyl Coenzyme A carboxylase, beta | 0 | 1 | 1 |
| | polypeptide | | | |
| PDK1 | pyruvate dehydrogenase kinase, | 0 | 1 | 1 |
| | isoenzyme 1 | | | |
| PDK4 | pyruvate dehydrogenase kinase, | 0 | 1 | 1 |
| | isoenzyme 4 | | | |
| PMP22 | peripheral myelin protein 22 | 0 | 1 | 1 |
| PMPCB | peptidase (mitochondrial processing) beta | 0 | 1 | 1 |
| POLR2E | polymerase (RNA) II (DNA directed) | 0 | 1 | 1 |
| | polypeptide E, 25 kDa | | | |
| PPP1R14B | protein phosphatase 1, regulatory | 0 | 1 | 1 |
| | (inhibitor) subunit 14B | | | |
| PRDX1 | peroxiredoxin 1 | 0 | 1 | 1 |
| PSMD8 | proteasome (prosome, macropain) 26S | 0 | 1 | 1 |
| | subunit, non-ATPase, 8 | | | |
| PTD008 | PTD008 protein | 0 | 1 | 1 |
| RAI16 | retinoic acid induced 16 | 0 | 1 | 1 |
| RBMX | RNA binding motif protein, X | 0 | 1 | 1 |
| | chromosome | | | |
| RELA | v-rel reticuloendotheliosis viral oncogene | 0 | 1 | 1 |
| | homolog A, nuclear factor of kappa light | | | |
| | polypeptide gene enhancer in B-cells 3, | | | |
| | p65 (avian) | | | |
| RGC32 | RGC32 protein | 0 | 1 | 1 |
| RPL7A | ribosomal protein L7a | 1 | 2 | 1 |
| SCAND1 | SCAN domain containing 1 | 0 | 1 | 1 |
| SEC24B | SEC24 related gene family, member B | 0 | 1 | 1 |
| | (S. cerevisiae) | | | |
| SIL1 | endoplasmic reticulum chaperone SIL1, | 0 | 1 | 1 |
| | homolog of yeast | | | |
| SLC25A4 | solute carrier family 25 (mitochondrial | 0 | 1 | 1 |
| | carrier; adenine nucleotide translocator), | | | |
| | member 4 | | | |
| SMOC2 | SPARC related modular calcium binding 2 | 0 | 1 | 1 |
| SMYD5 | SMYD family member 5 | 0 | 1 | 1 |
| SPOP | speckle-type POZ protein | 0 | 1 | 1 |
| TERF2IP | telomeric repeat binding factor 2, | 0 | 1 | 1 |
| | interacting protein | | | |
| TINP1 | TGF beta-inducible nuclear protein 1 | 0 | 1 | 1 |
| TLP19 | thioredoxin-like protein p19 | 0 | 1 | 1 |
| TRIM28 | tripartite motif-containing 28 | 0 | 1 | 1 |
| TRPV4 | transient receptor potential cation | 0 | 1 | 1 |
| | channel, subfamily V, member 4 | | | |
| UNK_AF031379 | UNKNOWN | 0 | 1 | 1 |
| UNK_BC005228 | UNKNOWN | 0 | 1 | 1 |
| UNK_BC007204 | Homo sapiens, clone IMAGE: 4815142, | 0 | 1 | 1 |
| | mRNA | | | |
| UNK_BC009736 | UNKNOWN | 0 | 1 | 1 |
| UNK_D29011 | UNKNOWN | 0 | 1 | 1 |
| UNK_M63394 | UNKNOWN | 0 | 1 | 1 |
| UNK_X07868 | UNKNOWN | 0 | 1 | 1 |
| UXT | ubiquitously-expressed transcript | 0 | 1 | 1 |
| VPS26 | vacuolar protein sorting 26 (yeast) | 0 | 1 | 1 |
| WBP2 | WW domain binding protein 2 | 0 | 1 | 1 |
| FN1 | fibronectin 1 | 1 | 3 | 2 |
| GAPD | glyceraldehyde-3-phosphate | 2 | 4 | 2 |
| | dehydrogenase | | | |
| HSPCB | heat shock 90 kDa protein 1, beta | 0 | 2 | 2 |
| LUM | lumican | 0 | 2 | 2 |
| UNK_AF035455 | UNKNOWN | 0 | 2 | 2 |
| UNK_M14219 | UNKNOWN | 2 | 4 | 2 |
| UNK_X02670 | UNKNOWN | 0 | 2 | 2 |
| VIM | vimentin | 2 | 4 | 2 |
| FMOD | fibromodulin | 0 | 3 | 3 |
| RPS4X | ribosomal protein S4, X-linked | 3 | 6 | 3 |
| SPARC | secreted protein, acidic, cysteine-rich | 3 | 6 | 3 |
| | (osteonectin) | | | |
| UNK_AF227907 | UNKNOWN | 0 | 3 | 3 |
| CLECSF1 | C-type (calcium dependent, | 1 | 5 | 4 |
| | carbohydrate-recognition domain) lectin, | | | |
| | superfamily member 1 (cartilage-derived) | | | |
| RPS5 | ribosomal protein S5 | 1 | 5 | 4 |
| COMP | cartilage oligomeric matrix protein | 3 | 10 | 7 |
| | (pseudoachondroplasia, epiphyseal | | | |
| | dysplasia 1, multiple) | | | |
| COL2A1 | collagen, type II, alpha 1 (primary | 0 | 9 | 9 |
| | osteoarthritis, spondyloepiphyseal | | | |
| | dysplasia, congenital) | | | |

[0126] Of the 379 non-osteoarthritic 3′ sequence reads, about 58.6% were found to be homologous with a human transcript. Of the 432 osteoarthritis-affected 3′ sequence reads, 58.1% were found to be homologous with a human transcript.

[0127] Given the homology mappings above, a simple in silico transcription profiling experiment was conducted. As shown above, each canine 3′ read was mapped to a human transcript. These human transcripts are collected into two distinct gene indices at the NCBI, Unigene and LocusLink. Using these gene indices, all of the mapped 3′ reads were associated to their corresponding genes (i.e., the genes under “Gene Symbol” and “Gene Name”). By doing a simple count of each gene in the osteoarthritis-free and osteoarthritis-affected libraries, some indications as to the transcription profile in the non-osteoarthritic and osteoarthritis-affected tissues can be obtained. For example, the osteoarthritis-free library contains seven copies of the matrix Gla protein, whereas the affected library contains zero copies. Conversely, the affected library contains nine copies of the collagen, type II, alpha 1 protein, whereas the normal library contains zero copies. The ratio of the frequency of occurrence of a 3′ sequence read in the osteoarthritis-affected library over that in the osteoarthritis-free library is shown under “A-F Change.”

[0128] This analysis has been performed on a small set of data. Similar analysis can be applied to a larger set of 3′ sequence reads, as appreciated by those skilled in the art.

### Example 3.

### Nucleic Acid Array

[0129] The tiling sequences depicted in Table C were submitted to Affymetrix for custom array design. Affymetrix selected probes for each tiling sequence using its probe-picking algorithm. Non-ambiguous probes with 25 bases in length were selected. Sixteen probe-pairs were requested for each tiling sequence with a minimum number of acceptable probe-pairs set to twelve. The final array was directed to 11,986 Canis familiars transcripts and contained 197,796 perfect match probes and 197,796 mismatch probes, including 137 exogenous control probe sets. These probes are shown in Table I.

[0130] The probes in Table I are perfect match probes and correspond to SEQ ID NOs: 12,312-210,107, respectively. Each probe in Table I has a qualifier which is identical to the qualifier of the corresponding tiling sequence from which the probe is derived. The strandedness of each probe (“Direction”) is also demonstrated.

[0131] FIG. 1 represents an Eisen cluster of transcriptional profiling data generated using the above-described custom array. Data was scale frequency normalized. Only those qualifiers with at least 1 present call in any sample were used for the cluster analysis. Data were log transformed, and hierarchical clustering was done using the complete linkage clustering finction on the arrays. Levels of all expressed genes strongly segregate canine osteoartritis (OA) samples by temporal stage of disease.

### Example 4.

### Nucleic Acid Array Hybridization

[0132] 10 μg of biotin-labeled sample DNA/RNA is diluted in 1× MES buffer with 100 μg/ml herring sperm DNA and 50 μg/ml acetylated BSA. To normalize arrays to each other and to estimate the sensitivity of the nucleic acid arrays, in vitro synthesized transcripts of control genes are included in each hybridization reaction. The abundance of these transcripts can range from 1:300,000 (3 ppm) to 1:1000 (1000 ppm) stated in terms of the number of control transcripts per total transcripts. As determined by the signal response from these control transcripts, the sensitivity of detection of the arrays can range, for example, between about 1:300,000 and 1:100,000 copies/million. Labeled DNA/RNA are denatured at 99° C. for 5 minutes and then 45° C. for 5 minutes and hybridized to the nucleic array of Example 3. The array is hybridized for 16 hours at 45° C. The hybridization buffer includes 100 mM. MES, 1 M [Na+], 20 mM EDTA, and 0.01% Tween 20. After hybridization, the cartridge(s) is washed extensively with wash buffer (6×SSPET), for instance, three 10-minute washes at room temperature. The washed cartridge(s) is then stained with phycoerythrin coupled to streptavidin.

[0133] 12× MES stock contains 1.22 M MES and 0.89 M [Na+]. For 1000 ml, the stock can be prepared by mixing 70.4 g MES free acid monohydrate, 193.3 g MES sodium salt and 800 ml of molecular biology grade water, and adjusting volume to 1000 ml. The pH should be between 6.5 and 6.7. 2× hybridization buffer can be prepared by mixing 8.3 ml of 12× MES stock, 17.7 ml of 5 M NaCl, 4.0 ml of 0.5 M EDTA, 0.1 ml of 10% Tween 20 and 19.9 ml of water. 6× SSPET contains 0.9 M NaCl, 60 mM NaH₂PO₄, 6 mM EDTA, pH 7.4, and 0.005% Triton X-100. In some cases, the wash buffer can be replaced with a more stringent wash buffer. 1000 ml stringent wash buffer can be prepared by mixing 83.3 ml of 12× MES stock, 5.2 ml of 5 M NaCl, 1.0 ml of 10% Tween 20 and 910.5 ml of water.

[0134] The foregoing description of the present invention provides illustration and description, but is not intended to be exhaustive or to limit the invention to the precise one disclosed. Modifications and variations are possible consistent with the above teachings or may be acquired from practice of the invention. Thus, it is noted that the scope of the invention is defined by the claims and their equivalents.

What is claimed is:

1. A nucleic acid array comprising at least one polynucleotide probe capable of hybridizing under stringent or nucleic acid array hybridization conditions to a gene which is differentially expressed in osteoarthritic cartilage cells relative to non-osteoarthritic cartilage cells, and wherein said osteoarthritic and non-osteoarthritic cartilage cells are derived from the same species.

2. The nucleic acid array according to claim 1, comprising at least 10 polynucleotide probe sets, wherein each said probe set is capable of hybridizing under, stringent or nucleic acid array hybridization conditions to a different respective gene which is differentially expressed in said osteoartlritic cartilage cells relative to said non-osteoarthritic cartilage cells.

3. The nucleic acid array according to claim 1, comprising at least 100 polynucleotide probe sets, wherein each said probe set is capable of hybridizing under stringent or nucleic acid array hybridization conditions to a different respective gene which is differentially expressed in said osteoarthritic cartilage cells relative to said non-osteoarthritic cartilage cells.

4. The nucleic acid array according to claim 3, wherein each said probe set comprises at least 12 polynucleotide probes.

5. The nucleic acid array according to claim 3, wherein the average expression level of each said gene in said osteoarthritic cartilage cells is substantially higher than that in said non-osteoarthritic cartilage cells.

6. The nucleic acid array according to claim 5, further comprising at least 100 polynucleotide probe sets, each of which is capable of hybridizing under stringent or nucleic acid array hybridization conditions to a different respective gene whose average expression level in said non-osteoarthritic cartilage cells is substantially higher than that in said osteoarthritic cartilage cells.

7. The nucleic acid array according to claim 6, wherein said osteoarthritic and non-osteoarthritic cartilage cells are Canis familiars cartilage cells.

8. The nucleic acid array according to claim 1, comprising at least one polynucleotide probe which is capable of hybridizing under stringent or nucleic acid array hybridization conditions to a tiling sequence selected from Table C, or the complement thereof, wherein said tiling sequence has a pattern value of 010, 011, 100 or 101, as shown in Table D.

9. The nucleic acid array according to claim 1, comprising at least 10 polynucleotide probe sets, wherein each said probe set is capable of hybridizing under stringent or nucleic acid array hybridization conditions to a different respective tiling sequence selected from Table C, or the complement thereof, and wherein each said tiling sequence has a pattern value of 010, 011, 100 or 101, as shown in Table D.

10. The nucleic acid array according to claim 1, comprising at least 100 polynucleotide probe sets, wherein each said probe set is capable of hybridizing under stringent or nucleic acid array hybridization conditions to a different respective tiling sequence selected from Table C, or the complement thereof, and wherein each said tiling sequence has a pattern value of 010, 011, 100 or 101, as shown in Table D.

11. A method of screening for drug candidates capable of modulating expression of genes that are differentially expressed in osteoarthritic cartilage cells relative to non-osteoarthritic cartilage cells, comprising the steps of:
(a) preparing a first nucleic acid sample from a vertebrate affected by osteoarthritis;
(b) hybridizing the first nucleic acid sample to a first nucleic acid array as in any one of claims 1-4;
(c) detecting a first set of hybridization signals;
(d) treating the vertebrate with a candidate drug;
(e) repeating steps (a)-(c) with a second nucleic acid sample from the treated vertebrate and a second nucleic acid array identical to the first array to obtain a second set of hybridization signals; and
(f) comparing the first and second sets of hybridization signals, wherein any change in expression level of at least one gene differentially expressed in osteoarthritic cartilage cells relative to non-osteoarthritic cartilage cells identifies the candidate drug as one that modulates expression of said gene.

12. The method according to claim 11, wherein the vertebrate is a canine animal, and the first and second nucleic acid samples are prepared from cartilage tissues of said canine animal.

13. A method of screening for drug candidates capable of modulating expression of genes that are differentially expressed in osteoarthritic cartilage cells relative to non-osteoarthritic cartilage cells, comprising the steps of:
(a) preparing a first nucleic acid sample from a cartilage cell or tissue affected by osteoarthritis;
(b) hybridizing the first nucleic acid sample to a first nucleic acid array as in any one of claims 1-4;
(c) detecting a first set of hybridization signals;
(d) treating the cell or tissue with a candidate drug;
(e) repeating steps (a)-(c) with a second nucleic acid sample from the treated cell or tissue and a second nucleic acid array identical to the first array to obtain a second set of hybridization signals; and
(f) comparing the first and second sets of hybridization signals, wherein any change in expression level of at least one gene differentially expressed in osteoarthritic cartilage cells relative to non-osteoarthritic cartilage cells identifies the candidate drug as one that modulates expression of said gene.

14. A method for detecting gene expression in a sample of interest, comprising:
hybridizing nucleic acid molecules prepared from said sample to a nucleic acid array as in any one of claims 1-4; and
detecting hybridization signals on the nucleic acid array.

15. A nucleic acid array comprising a plurality of polynucleotide probes, wherein each said probe is capable of hybridizing under stringent or nucleic acid array hybridization conditions to a different respective tiling sequence selected from Table C, or the complement thereof.

16. The nucleic acid array according to claim 15, wherein said plurality of polynucleotide probes includes at least 10 probe sets, and each said probe set is capable of hybridizing under stringent or nucleic acid array hybridization conditions to a different respective tiling sequence selected from Table C, or the complement thereof.

17. The nucleic acid array according to claim 15, wherein said plurality of polynucleotide probes includes at least 100 probe sets, and each said probe set is capable of hybridizing under stringent or nucleic acid array hybridization conditions to a different respective tiling sequence selected from Table C, or the complement thereof.

18. A method of making a nucleic acid array, comprising the steps of:
selecting a plurality of polynucleotide probes, each of which is capable of hybridizing under stringent or nucleic acid array hybridization conditions to a different respective gene which is differentially expressed in osteoarthritic cartilage cells relative to non-osteoarthritic cartilage cells; and
attaching the plurality of polynucleotide probes to one or more substrate supports, wherein said osteoarthritic and non-osteoarthritic cartilage cells are derived from the same species.

19. A polynucleotide collection comprising at least one polynucleotide capable of hybridizing under stringent or nucleic acid array hybridization conditions to a parent sequence selected from SEQ ID NOs: 1-12,167, or the complement thereof.

20. A probe array comprising a plurality of probes capable of binding to expression products of genes that are differentially expressed in osteoarthritic cartilage cells relative to non-osteoarthritic cartilage cells, wherein said osteoarthritic cells and said non-osteoarthritic cartilage cells are derived from the same species.

21. The probe array according to claim 20, wherein each said gene encodes a tiling sequence selected from Table C and having a pattern value of 010, 011, 100 or 101.

The application's sequence listing, which the Patent Office published only in electronic form, follows.

SEQUENCE LISTING (222274 sequences)

SEQ ID NO: 1 - DNA, 553 bp, Canis familiaris
tagaggttcgctagagctagctagagctcgctagagctagctagagctcgctagagctagctagagctcgctagagctagctagagctcgctagagctagctagagctcgctagagctcgctagagctagctagagctcgctagagctagctagagctagctagagctcgctagagctagctagagctagctagagctcgctagagctcgctagagctagctagagctcgctagagctagcgagcgcgctaacagattaacttaagttatagaaaggggggttaggggggctaaagtgatctgatgtattatagagttatttatctgggcggaaaggggaaaaagaccagtaactcgatagaatagtgagaacgtttatttaaattatatagaaatctattcgtagtgtacttaagttaagagaagactgttagagcgatttcctgtgctactgtatgtatacatacgattgggtttttttttggtgtgatatttagtatctattttatttattagcgagagtagaatttgactataaaaaaaaaaaaaaaaa

SEQ ID NO: 2 - DNA, 613 bp, Canis familiaris
ttggggacgtatcggtcttaatggtccgtgacactttgttggacttagatatttatatgagggcaactggtgctggttaggtctcccatggaacctgtgggaccacaggtcacccgtgggccgaacgtgggcagggttggggtgtggtctggtggtgggtgatcgggtggacaccacgtcacccacacacctgtctcgtttgtgatgtttaatcccacatctaaaaccaaagacctatccggtgttgtgagggttgtgataacataaaccattcggaagagttcaacagtcctgagttacacggaagaatgtggtggctgttgtccgatgacacaggaatggtagagactgggacccgggtccctgggtcacacaccaaacaaaatcgacccacgagacacaaccccgatctgggacagactagggtgatggtggtcggttggaaacgggacatctggacgtgtgtcgggttgggagtggttagtcccatgttcagattttgtaccggtgtctcggatcgagacttcgacacatcactgaaatggataggaggagtcacatgtgatttattcggagacatcgagaaaataaataagggaagatgagaaaaaaa

SEQ ID NO: 3 - DNA, 596 bp, Canis familiaris
ggtccaggtacaggtgaaaattctgggatacacctgagactggggagagagaggggcgtggggatgtgaggcgacccctgggtcaatctttcctggtcagactcggacccgggtttccacacggcgcccgtgtcagacaccgcggttgacgttggtcggtgaaccagtaccctgcatagggaggggaccctatgagggggtcacgggggtcacgtgggcccaggggagagccccaagtcgggtgttggacgatggtcccacccacggggacgtgtcgagggaccggtcggttgcttcccccagggtgggagattggtgtttctaagggtgaccccatcggtcggtgtgtttcgtgggctcgccggtctgttgtggggttgagcctcctatttattcgacggcctcgtcgtgctgtgtcaggtggacggactccctggggactctcgacgcggccggagtttgggcgcggcgtgagggggaggacggtagaacccagacttggtcccgggtcccgggcgtgggtcgccaccggcgtggtataataaaacgtgatttggacactgaaaaaaaaaaaaaaaaaaaaaaaaaaaaaaaaa

SEQ ID NO: 4 - DNA, 581 bp, Canis familiaris
gttgagcttcgtcggaggaacgaccgacctccatttgttccgggtggaggtggttgtcccaaattttgttcaaatgaacaacaagggtctcaatagggctgattgtttttaaagattgaaacttacagtccgaagtattttctacgaccacggatacagacggttacccgttcccggagtttgtacttgtcacttatttttacagtttttccatattattgtaatcacaatccgagggaagaaagatcatactagtttgactgagacattaatttaaaaaaatatctttcttccttacataacttgacctcatctttatctaatcacaaagaaatacgatgtttgttctttccgttagatcaatattttgtctcccaggcattgaactctctcgtatctcggttctaggatccaacttccgtgtggatcacgatttacacttgtccaacaaaaattgactttctcatatgttaattccaagtatttcttctagattctttggaacggaaatatatcaggcaacatcaataaacaacggaaaattttacgtaaaaaaaaaaaaaaaaaaaaaaaaaaaaaaa

SEQ ID NO: 5 - DNA, 606 bp, Canis familiaris
ccctggcccattgggcccatccaacatccgacagattgacaggcacgctcggtaggaaaacgacggaaggatgcctgaaaataacaacaccctggtagttccacaaagtccgaaccacaacgtgggcgcctagtagaaaaagatgcctgtcccgttgaacagcgggaaccaccggattcacccgaggtatattcagaacaaatcggggtttagtccgaatctgtggatggcacccgccattttctgtcctctcctcaggaaaatcaacatcgacaccagtattctgatggcggcacagtaggtggagtagatggcaaactagaaggcgtttcacaaagcggagaacaagatctgcctcgagttctgtggttcgttgacccatctggacatgccgcagattctgagactccctcactcggcgggtttcacgaacagtctcgctttgaagctcgtgaaactgagaaaacgtcgtccgagcaacaacgacttggacaacttttcaccgaacagttgtctgtagaggggtcaacaaaataaaagtctgtagagggttcaacaaaataaaagtctgtagaggggtcaaaaaaaaaaaaaaaaaaaaaaaaa

SEQ ID NO: 6 - DNA, 562 bp, Canis familiaris
tgactcacccgattcttccgcccgtgtactgattggactccaacatcaatctaagagtcgagcctccattaaacgactttatttggggtgtcaggggaacacgtccgtggacaacattcccatgaatgtcaatcttttatctcttcgatttagttttagaaaaaatttataactatatatatatatagagatatatatatttaaataggaaggcaaaggggatgtcccctttgtactccgccttcaaatattgggagatctcatgatggaatataacggattggtgagaggaagctcccataaagtggttcagttggaaccggtaccacttgatggtcgtctctcttttacaatgggtggggtcggttaatcttttatccgactcaaatcggtgttcatgatctggaactctctgtttgaagtctatgtatttgtcatgatcttggacttcgttccgggtcggagtccccgggactagtggttctcacgataagtctagtaaatgttttttggacatgactataataaaccactcatctcgaataaaaaaaaaaaaaaaaaa

SEQ ID NO: 7 - DNA, 585 bp, Canis familiaris
gagctctccggtgggcctcaggccggcttcgctctggcgggtcccggcggcgttggagggccaggagttgaggtcgaggttttcggtcgcgggcgtgaggaacccgtggttggaccacgcgcgcccgaacgggtagtcggacgggtcgtttctgaacgtgttgccgtcacgcggtcgccccgtccggggtcgcccacaggaaccggggacccaggggcgggttgggggacagaggggaaccggttcgtggtccacgttccccctgtgtgtgacgggagggcctcaccggtgacggagtccacacagggaggggtaacctagtgttaaatggtggatccggacaattgacaaaacctgtccggcatttgaaccggtggtcgctccgtggtggcgtctccacgaggggtcggtcacctgttgagtttattgggagggttccccacggggccggccaccacccgggttcgagtgtcagtaaggacaccaggcgggccagacacgtcgtgggtcgtgggtgagtattgtctcgagttttttttgtaggtagataaaacgagatcggagataaaaaaaaaaaaaaaaaaa

SEQ ID NO: 8 - DNA, 637 bp, Canis familiaris
gggcaatgaacctgatatcgtggtcggaattcacagactcggggggaactagtgattttctattttttaaaacataagtcgattacaagaccatttatgttacttttctccgagggacgctcacccggtgagtgggatgagtgagttttagggtaccccacaggtctcactgacgaataactgtccggtcccggggagcttcggtttgtgagaacgttggacggggacggactcgtagacttgtacacgggagatctccacgaaccgccgtctctaatattttgtgtcacatcgataggattgaattggaatttacaattcacataaagattttatttcggagtaaatttttttgtgtaaaagaggtactaaaaaatagaacctacgagataaaatcggttctaatttttgttaagaaaacttatctatcacgttcgttctccatacttattcaaattacgaaaacgttgaaggtcaaaaccaaattggatagctcgtcaacatgttagacctattttttattcaaacatgagtttggttgaataatccagattttagattaaaagtttatagaaggaaaaatgtgaaaataatattaaaatgagagtaacatatttttgaaaaaaaaaaaaaaaaa

SEQ ID NO: 9 - DNA, 761 bp, Canis familiaris
aaagactgtttggcctgccattggtcaatgacgaatccggcagttgtcatggttgattacgtcccttcacattttggatcatcaaattccctagcacacgatggagaaactcaaacaaaccgaaacaaagccaaccggtgccgtttccgtggcaacaaccctgtgcacgcgccatcgctcaccattatcagactctccacgaccatccacatcaagggccaggcgaagcgtgtcttcaaccgtccattgtgtttctgagtccactggatcaccaacggaggcaacaacagatggatcagaaatttcgacaatatccccacataaaaaatatggaggtgaaggtccagaccgctagaccatagttcaacccatatagtttacttcactatcaaagatagaaccaacgggaccgtcgtatccacccagtgaatccggaccatttcatcccagacggcatgactctccagtcctcttttcttgcccctggcggaaacccgaacaccacacctccggcaacagcgacgaccactggacagaccaccgccgcgtcagacctggtgtcttctggacatcttgtgtggacacattgtgtttcaggatcgacggttccacaaatacccgtcacctccaagtgagtctttatatttaatgtgttatggtagttactcccctttttttttttcaattatcaataaatctgggattttttcttttctagatttaaaattagtttggttttgtaaaaaaaaaaaaaaaaaaaa

SEQ ID NO: 10 - DNA, 598 bp, Canis familiaris
agggaacagtccaatgttgaggtcggacatgggaccagaatagtatttgtggtaggagctcgatctcaaaacgagggagctttcctcccggtgtataacaagccgaggggtctcatctagaggtagcagcaatagaggaacccgtaggtccatgaccgttgccccacgcggctcgtgcacgtgagccacaagcaggacctctccgtggacgtcgggaagagcccatgcaagcccgtctagtggtgggactagctggagtggtgtttgtgacccttggtcctccgaggaatctcacgctattgggaaggcacgtgagctaaatgtcgttcagcaccgattggggaattggcgtcgcggggagaaaatcgatatccagctaccggaaaaactcagggcttttaagtttggaaatagacatctcacgtttgacaggaagggattgtggtcgtccaaaacgcccgacgaatcctaaacaatatctcaacagggtgttcaatttgtactgactcctgggaacagtataaacttttgtctcaagtggttgactatttaaagatttgaaggtgaaactggtactaccctaaaaaaaaaaaaaaaa

SEQ ID NO: 11 - DNA, 595 bp, Canis familiaris
gctgtcaacgtgttcccagcagaaccacgacgtcctcaacaagaggtagctggtctcaaccgggtcggacggacattctgagggttggttgaccagtgggtcttcagcaacacaaggtcccaacccacccccagagaactctgcaatcttctctctcgtttttaaaatacactcatttcccatttctattttctcgcatgatttacccgtggcccttgtctttctttagtggaacaacctaacaccgttcgttggtcgtgtgggaacagtccctgtttgtttcccagggtgttccaccacccgtgtcggggacaggacactgacgtagtgttgcctttacttgttgagtggacctattccttttgtttcgttagattcaatggtctacgatggattgggattagaaaactaatctaatactttggtttcatttctccttttcttctttctttcttttttaaataactccaaagaaaacttttttttattaccattgtcaaaccaacacaaaaaatctagaactttaataaaaacacggttgggtttaaaataaaaaaaaaaaaaaaaaaaaaaaaaaaaaaaaaaaaaaaaaaaa

SEQ ID NO: 12 - DNA, 608 bp, Canis familiaris
  misc_feature (202)..(202): n comprises a, c, g, or t, or includes no nucleotide
aggatgcatatctcaacggaacatggaccataaacacccgatgggcggtcaggacgacaccgtgatgtttcgaccgaacgacgtccaacatcggcgagtgtttgtcattagaagatggacaaacactgtagtgtggaggtcctggtcgcggtcaccctcctatgacatgttgctcaacagggtcaggccgaacaggatgagngtccacctccacgggactcataggattcaaaatctcaaccggaacatggaccataaacacccgatgggcggtcaggacgacaccgtgatgtttcgaccgaacgacgtccaacatccggcgagtgtttgtcattagaagatggacaaacactgaagtgtggaggtccttgtggctgtcacccctccgtcttaattgttgaatgttcaattgttactcgggaatcatccgattcgtgtcgagtgtacggatttcggggaatttaactttacaaattaggactttgactaacacgtcaatgagtccttttgtgaatacgtcttgaaaatcttaataaaacttttcttcgatcctacgataaaaaaaaaaaaaaaaaaaaaaaaaaaaaaaaaaaaaaaaaaaaaaaaaa

SEQ ID NO: 13 - DNA, 600 bp, Canis familiaris
acacgttgtatcggcctatacctcccggatgaacaccctgtaatctcgtaattcgggaccgacacttgagtcgtcttagaaagtggtaccaccggttcgtctcgccacccggtcgtatcctctcgtgccttgatgatccacactccccggaaaccgtctcacctgctcctctgtcccaaagtggcaccagacacccgtaaatggatcaactttctccatccgttcatcattgagactccacagggtcttaagtagtagcttcagaggcgtctcgcggatctcgtcgtgacagaccctctcgtcccgatgaaactgaacatgatcgttgggtcccagggtactcctaacattccgggtaacaacggggtcggacatgatctcacgattctccaagggaaccatcacatagtcgggaggagggggatgtgccaagacaaccctcccaacggacacggcggtcgtatcggcgacggactagggagacgataaataccctgtggttccgacttccatgtccaccgtccattttagtgtctcaacaggtttaataaaatatttcactaaaagagctccgagaaataaaaaaaaaaaaaaaaaaaa

SEQ ID NO: 14 - DNA, 572 bp, Canis familiaris
taggttaacggatcaactgacacgaaagattggggtcttaacacgtgggagtcgagggtggttagacacccagagactgtctcccaatcctcgttaaggtggagacctatgtcactccatctaagtaccagagggtgaacccgaactaccgggtcactctagaatgttaacagaccaaattttctgttgtcttcagtgttctgacagattgacgacaagggtcagggtacgttgtgttttttcaccgttacgggtcgtggtaggtgtagtgggagtgggaggtgggaacaccaacaacacggtcccgatggatacctcctgtaaatcccacataccgatcccaatcccactctacactctacacctagagtgatacaatagacccgtccaggttcagttgaagtggtatcacgtgtccgtcaacgaatccctcccagacatcaaccggggactcccatgggggaacactagtttggtcgtggttgaagtatgtcggatgactcagtaaaagtatcatcggattcgtagtgaataaagtcaaaaggtctgtaaaaaaaaaaaaaaaaaaaaaa

SEQ ID NO: 15 - DNA, 573 bp, Canis familiaris
atctacatcagaccaagacattgtgtcttgaaaattctatatcgaccgatgggtccctccttgactcccttacgaggtcgttgcccgggaccctatcatggtccccggggtccatgaactgggagatgaccgtgggttgatccacggtcgttgttggtgtcggtctctgtgtcgttgtgtgtctgtgtgatcaataaacaaacaaaatgttttaaaaaaaattctatatcgggaaataatttttcacgttaacatagttagacacgatatataaatagtctttccatataattttacgaatcctaatgatttaaaacctcatttaaatctttcaaatgtttagtagtctaaaattttctgagtattaaaaagttgatagtaggactttgttttacaataggtctaagtacttaattatggagaccgataatattagaaaagtttagagatattttttcacttcttgttttctagatgatatattctatcaaaactcccactattataccaaaaattttcctcatattaaaatcaatttttgaataaactctcttcaaattactaaaaaaaaaa

SEQ ID NO: 16 - DNA, 439 bp, Canis familiaris
cgaaggtgtggggagccgggggatccgaggagagccgtcgctcggcggccggaggacgtatgccaccgcggcacgtggagtcggagggtctcagggggcctcctccaccacgagttggcgaccacggtcccgaacaagtagaaccacgggcacggccgcgggaagtggctctggatgagcccgtggctccagcaggagtttcgtaaacgggtcccgcatagctccgtggacatgaaccgccggaaccagccgcgctggacgacgggtcactgccggtgggcgaccccggacgggcggacggggtgtcgcgagatcctgacggagactgagtgggggtggctcctgtggtcaacccacgtggagggtgcacgaacatctgactgtcgatcctttcggtcacgtttcaagactgactcgttaaaaaatccaaaaaaaaaaa

SEQ ID NO: 17 - DNA, 600 bp, Canis familiaris
  misc_feature (297)..(297): n comprises a, c, g, or t, or includes no nucleotide
aataccacgactgtcatattacgaggtcccagtccgtgaccccctccgagatccgaaatctcctggcgtccattgggaaggggactcacggacaatgggagtgattccaaaaggagttctgatctaagattcagttttccaagttaagtaaagatttcggatctctcctcgtatattgttttttcagaacacgaacttctgatctggtgtgtagaagtacccaacccttccccaatttgaaggaaacaacagttgaaactaagttctggttttagggactcgtttgaaccggagggnaccggtacactgttccattttagtagtcatgtcccggattctttcacagtcagggagtggtttgaggttcggatccttcttagtcccaccgaacttctgagatttggtgtcccccaccaaagtccacggtaaaaacaaccaattgggaccaacgccggttcccagaaccgtcacaagaaacggatggtgaggaggactgtggagaggagattctgttcgttccgccaaaactcaccaatcttgagaaagatgttaaaggtcttcgttcggttcaaacaccatagttaaaaaaaaaaaaaaaaa

SEQ ID NO: 18 - DNA, 627 bp, Canis familiaris
tcgcggatctgtcgtgacagacctctcgtccgatgaaagctgacattgatcgttgggtcccagggtatctcctaacattcccgggtaacaacgcggtcggacatgatctcacgattctccaagggaaaccatcacatagtcgggaggagggggatgtgccaagacaaccctcccaacggacacggcggtccgtatccggcgacggactagggagacgataaataccctgtggttccgacttccatgtccaccgtccattttagtgtctcaacaggtttaataaaatatttcactaaaagagctccgagaaatacagtctggagtatttcctgtcacaattgtattcggtcaacccaagattaagttccttccgtcggccggtgattttgggtcaaatggttcctttgacgtcttcttctcaccgaacacggacaagaccaacagggaaagacgtaaggacactaatatggtataaatgtctctaaactcaaccgtcattcgtacttccatacgaggttcattaattgagggagactttcaccttatacctttccaacacccatatatttaacatctttttgttttgtaatcgataaacaaatgttattcgagatacaaaataaaaaa

SEQ ID NO: 19 - DNA, 523 bp, Canis familiaris
cacgacttttacgtccctcctggggaagtccgttaaggtgagttgaaaactcaacaggattttatgtggacctgagcagcgtccttgtgacagtttgtcagtggaatcttggggctcccgtttgaagaaaacctctttcttcaacgtgtttcacttgtccaggggatgagcctcatcatgggacaacgactgttgaccaagaatggtaaatttatccacagtctccgacacaaccgtgttgaccactatgcggaaaacgaggcacaccaatcacatctcaagattcgttgtggaaatatcccacccgtcacttggtttcaggggaacatcactcgtaccggggtacacacacgtgtcgatctgaggaactcaggaccggttcggtgcaccgcgtggtctgtggtaagggacgtttggttggtgtccagtggcgagtctaagcggtagctttcgtcatgatcccaacaagtggtctctcggagtaagtgaataaaaggcggaaccaatgtcaaaaaaaaaaaaa

SEQ ID NO: 20 - DNA, 577 bp, Canis familiaris
ccggtcccagaagcgtactgggacgccaatcggtcggtaggggccagcatagggacatttgttgtttaaacacgaaccaccgacatcggagggggagggggagataaaccctccccttctatcccggagatctctccatagacagccagatgtccaacgtttacaccccggtcgaccaaccgcgccgttggtgggcagagaccatcaacatcgttactttcaagatctcttaaatccttcacaagtgaagtgttgacggggccagttttcactaatgctcacagtctataattttttttttttttttaagtcttcgatgacctagacaaaaaaaaaatcgcttgatacagtttcctctcatttctctaaatccgtgagccgaatcagcttcccttctggggtaccggtccggcactgctccgttcaatatcaagagagtctgttaagacgcactcaagacataaccccggaggcggaaatggggcagagacatcgagtttaaaaacggagtgatcgtttccgttaaagtctaattaatttattttatctagaataaaatatgattttaaaacaaaaa

SEQ ID NO: 21 - DNA, 584 bp, Canis familiaris
ccatcgcagggtgagtgacgttccggagtcgctcctgaatgtccgtctccctccgcacaacgtcgaccatcggtcagtagatgtttgacccaaatccgtcagaactcgtgatggagggtcgtcgtcgtgaagccgaccgccggtcggagatccgggacccggcatcccaccgtcggcaacccctcgtggaccaccgtgtccagaaccagactccggagggacacagagtcatgaaggtgatgctggtctgagacgaggtcccgaacggagggcacctcagaaaggcgtaggtctgggacgtcaaccagcgagagacctgggaggggtttatgaaccactaggaccggaaccacaagcagtttcaggccgtcctcgtcgactatcgtgggacgcggtcaccggccgtcgaccgtccttgggaacgggcccaagacgcaccgtcccgatcgtcgggggagtcggaccgagggatggtgttctcgtgttccttcgtgtccgtacacctcaaccgtgcaccgtgacggtcaggacccggggttgtctgaataaatatgtggaggtcaaaaaaaaaaaaaaaaaaaaaa

SEQ ID NO: 22 - DNA, 623 bp, Canis familiaris
tcgtctcctgattttaaacctctatagtgacatctcggacagataaattaacgtgaaattaaacgtgtgattttaaatccttacagaggtattctatattgtaactccatgggaacggagtcaatcgatctagtttacgtagtggttagtaaataacgatattaaattttggagaggaccggatgacatggttaataagggcaggactttatgtacaagtgactctgtggtaaatatttttggggtcgaatcgacggttgattcattttcgacggaaatattagactcatgattatctgcgttgtccattaaaaatttttgctctcttaacttcggttctaaacacgatcttcactaaatccccgacgctccggtttctcctacttcttaaacgaaaacaaacatcttccacgagtttcaacatacatgttttgaccaaaagtctactaatttaacttttttcacaaacaactcataggaataccaaattctgataatcaacttgttgatggacgacctctttaagactcttattttcggattttcggattaataatctataaggatgtatcactcatttagaataaatcattatcaatttcaaaaaaaaaaaaaaaaaaaaa

SEQ ID NO: 23 - DNA, 518 bp, Canis familiaris
accgaaggacccagggagtcgttccgttactgaccgtatctctggaccttgtcctatttcgaccgtctcgttgtcccaaaccagttcggtccattttgggtagttctggttgagggtaggtgaactctcccttttccttctcccccaagaccggtcatctcgactagaaccgacaccagaccgtccccacacgactcccctgcctctccacttgacactggggttaaatgttttccccggggctcgtcgggtggttagtaccggacctccgtcctcttggacttgacgttggttcgtcgtgttacacctcctcacccgatacgtcctggtcggtgaccaagaccctcactacgtaaatacacagctaccgtttttttgtttgtttgacatcgttcgtgttgtggttttgtttgtaggagggtcggtttagtcttactacgtagaaaaatcaggagatagtatctagtttcgtctaaataaacagtcagaagaagaaacacggaaaaaaaaaaaaaaaa

SEQ ID NO: 24 - DNA, 625 bp, Canis familiaris
aagttgtcaaacgggaaacagagagatatcccatatattttcacctcatttaaatctaaagtaaaacagacgacagtcgagctggagagacttgtttagcgactctgtcaggaacaagtgagaccaacctagtgtaacgagttcggactcggatcatattgaacaaggttcgacgatttgtctcggatccgttgagatcaccggacaccgatggtccagattacaggtattatagtctaacaatataattataaactcgattgatataaatctcaccttttgttttcgttcactccagactacgaggtctatgattcaagtgattttctatgaaacgaattttcgttcgacaaacgtatcaaataaaagagctgggttaagtagattcgtatccaattaattttttggggacccaaaatggctctatttttttatcacgaatatgaatttccactcaggaaaacatagttaaaaaatccctttattttcatttgtgatgtcaaataatgatcttgtcctattatatgtatatttaataaatatatagattttaatttattatctatagtgagatagtatacaaacatattactatcgatttaataaaagatattgagttcaaaaa

SEQ ID NO: 25 - DNA, 596 bp, Canis familiaris
ctgagaaattttcgttgcagatcacgccatgatgggatcagaacatttccctatgtccgtttccgatcccacactcaatgaaccattcatcgttttcccagggacacaaacttgtcagtttggggctcaatcagggagtgagtgaatggacaacatgtctagacggtgattaacacttgtgacatcgttcgtctgggtccgtccagggattgactggacccgaacgagtcgaatcggacggacactgatgaaacatatctactgtgactctatgttgttctaacgagttagtgtcgtgttgttcttcgttcaaagtcggaggaacttttcttcttcctaattaaaatcgtagtctggggtgtttctttccatcctctttaaaatgttatgaaatcttttcacctttttccactaaaaacgagttgttgatatcgaacaccaagtatcaatatatttggtttgtggaattaaatctccttacctccgttgtatggatattaaagggaaccatatcaataaatgtcggtaaatattttgtttcccatgaccatgattttgtaactaaatgggattccatcatctaaaaaaaaaaaaaa

SEQ ID NO: 26 - DNA, 602 bp, Canis familiaris
ccagaaaaaaccagtatgcatagccatacttgttttgatgtctatgacaactattcttgttcgaccgttgtttgtcacggttttagggagtggacggtacggggtagtggtcaagttcccccttccgtcaggtggtaggccgattattggtgtaagggattacaactcggtgtagtgaagaggtgactggtggtacgtggccactatgtattaagttcacgggatgatactgttaatacaacctaatgcgaaagatatatgttgaacggttattgattagaatgtggttaccgctatattttagcgtattagaccggtggcaatagtatcacagatgttttagaatgtggcatcccctatagccatgtaggttttttatacggagtccatttgagccattagagctaattattccgtgtagattggtgatgctctcgttggtggcagacgtatagtaggaagttgagatgaaaggaggagttgccatttcaacggcgtcgatcatattcagagtttcttcatctactgtccgtattgttctatctatgtatttattcatcaccatggtaaaaaaaaaaaaaaaaaaaaaaaaaaaaaaaaaa

SEQ ID NO: 27 - DNA, 538 bp, Canis familiaris
  misc_feature (221)..(221): n comprises a, c, g, or t, or includes no nucleotide
tccctgggctgagggaattcgacattgtccaccggtcagggtgcgactgaacgtgttcggggttggcggggcacaggacaggacggctacgacgatcacaattcacccccgcgggtctcgggaccgttggtgaccacggtccttgtgctctcgtactcacgtagacccacgggccggagggagtgaccgtccgtgttgtccgggacaaccgggaccctgtntcggactgaaccagcttgtctttttcatacaagttttggactcatgtctatagcatccacctgtcacccacaccagctgttgggcgaggggccacacacgagtccctgtcccgccggagtgggtctgggacccccatggacgggggcaccgtcacgcctcaacgggatgtgtcgagtgactcgcccagggtttctggtttggtcgaaataaactcttctaggacgtcgtaccctccgacgccgttccaaagaagaaaaaaaaaaaaaaaaaaaaaaaaaaaaaaaaaaaaaaaaaaaaaaaaaaaaaaaaaaaaaaa

SEQ ID NO: 28 - DNA, 587 bp, Canis familiaris
  misc_feature (246)..(246): n comprises a, c, g, or t, or includes no nucleotide
gtctggcctgagaccacagaatatcctgcaggtattactccgaaaaccacctagaatccgatccgggacggaacggacagaagtagtccaaacggatccaaccgatgttgatcaacgggactcacttcttaaaccgacaacgtgatgagcgacacgtatcacggtccaacgtctaacggagtcttaggagagactcttgatcagatgtcgtcgtcgtggaggttcccatgggtcggagaccttggngtcccgactccggatctggggagtcacatcaacatcgctcagacaaaagactccgtctctttccaacgtttacgggttgagagttcaattcctccttgttggacagtttgcctgacttgtttttcactaggccagttcgtcctcaaccacgacatctttttattgatattcataaaagacaaagtaacccacataggtgtgttgcttcccaaatttttagtgttgacaacgttccgatgatccattatgaatctctcagttttagtgtttgtggaaactcataaacaatttgattattactgaaaaaaaaaaaaaaaaaaaaaaaaaaaaaaaaaaaaaaa

SEQ ID NO: 29 - DNA, 629 bp, Canis familiaris
gcacgggactcagaggattcaaaatctgaaacggaaaatggaacagaaccacccgatgggcggtcaggacgacgctgtcatttttcgcccgaaagacgtacaacatccggcaagtgtctgacagtagaatatggacaaacactggaggttcgagttcctcgttgcggtcgcacctccgatgattcacggttgagtggcggacgtccgggacaaaatagaagtcgcagaacatcatgtcggcgaactcttatcgtgcggtcgagggggctcgtctgaagtcggcgaacaacaactcgccggagaggaagaaggtcgcggggaaaaacaacctgatataaccggggtggaggacgtcgttgtgttcgggcgacaacgcgcgggtgtggcgcgggcacagcgtgtgatatcacttgtctcccggttgaataaactttgggtttggatccagtccacgactaagtcctctgtctctccgtcctgtctggaagcaccacgtccttcgattctccctctgtgggttcccaagtgggtcttagttcattttctatacgggtgaacactggtctctggtttcccgtgtccttctgtgatgtataaactcgtatcctgggaaaaaaaaaaaaaaaaaa

SEQ ID NO: 30 - DNA, 580 bp, Canis familiaris
cctatgattgattctaactacgagattcgacgaagaatgatcgatatcaggaataggactgagtaccttctacttttaaacaaaatcaaacacgactattctggtccttttaaaggtctcatcaaattgtattctgtttattttaatacaatggatgtaaatagagtgtatacacaatatcaattttgatatagtcgtcttgatcttaatggtgtcttttaagagtaacctcagaatcagagaatgatatggatgcagcccacgcgaccttagtctcttcctttctgctctccctgttcctcccttttattttctggtttaccttttcttgtgagaacttttctccccatccacattgtacttttattacgtctctctggatgtctgtggggagtctcctcacgacaagatggtcttcggacttcgacggagttcaggtgtccgaagaagcccacatgggatgtgatttttagttttcaagcttccggttagaatgaaatctaacttatatatatttctagtcatcacaatttataatgtcgtttaagaaaaataaatcttgctcctacaaaaaaaaaaa

SEQ ID NO: 31 - DNA, 692 bp, Canis familiaris
ctatatttgctggggtgataccaacttgagcattccaaaactcttaaaacggacttctttaaatcagagatatataatctcttaacatccaccttcatgtcaccccaggactcacatcttacaatgtataccaatacttcatggtttggttatcttgttggttctgaggggtcttttgggtaggtgtgagagttctaaatctggatcaaaatctttttctacactatttcaagtctcttttgttctgtgcttcttccaactctttcatcactaacaaagactagaggagattttcctaatccctcgttagttgattttggaaataatgttgaaagtcaacatatgttccaaatgtcatgatttgcttttttgttttcacaaaaaaaactctcgaactttgaaatagattcgacttctttccaagtgtgattttctggtgattttgttactgaatcgggaggttggtcagactctttctctaacaaatagacaattcgcccatgggtccctccgagacgcctttacgcggtcggtttccgggacccgctcatggtccacagggcccatgcaatgggagctgcccgtgggcctcgatccacggtcgttgtgggtgtcggtctctgtgtcggtgtgtgtgtgtgtgtgtgtctcagtatgaataaataaacaaataatttaaaaaaaaaaaaaaa

SEQ ID NO: 32 - DNA, 575 bp, Canis familiaris
gatgtgtttaaagttcctaggacggcgtagataggttttattgtaacgtatgtacattgtgtaacaattcgtcttttcttccggatcaatcagggtaataaccgatgtcctccagtcgggagtcccacttccacacacgagatccgaggagaagatctctgattaaagatagtttctgtggactattgtcagaggcactctgaagtctcctagtttgttgaggtaccatattaattgataattatttgtttttcttcatccttcatagggtctggattcatttaaactcagagattatttttagtgcagatcgggcgctactggtctattggaaacggagtccaggagttcactagataactcggcgtctttaatcaaatctctatattgacctgtctaaaggtaagactctcagttcgacgcgttggtcgacatcattgtcagtcttcactatttagatccaggatccccatatggaaaacaaaatcgttttatatttatacattatttgagtcaagtatataaaatccctatgaataaatctatttagtggaaaaaaaaaaaaaaaaaaaaaa

SEQ ID NO: 33 - DNA, 459 bp, Canis familiaris
aaccccagacacttttctaatctttctgaacccgactcagttcggggtgtcttgaagtaatgtttagtcataattcttgttccgttttaaataaattaaccatcccaggatgggtggaagccggaaaggccgaccctatcaaagacctgtcaaccttcaaccgttttaggggttcacacacccctttctcttatttctacacgataaggtcaccttccacaccaggagtcccacggtctaaggacaagtacaacctaagttgtcccatccatccaccttgtgttcacagactcggaaggtaaatgtaggtgacctaactacttacactaagtttttgaacagttgacaggaaagaacagagttctattgactgtatctattggtatcgtttaatctttttcttttgggttaaattgttaaataaagatttattgtcaaaaagtggaaaaaaaaaaaaaa

SEQ ID NO: 34 - DNA, 410 bp, Canis familiaris
gtcatcggaggcacgtcgtgggtctcttgccccgggagggcccgcgtttccgtggggcgggggtgggggagagtgtgggaggacgatccccgacttggcgcggggtgcgttggtcgacgaggtccggggtgagtggccgggggacccggaccggctgggggcggtggggctctgtcggcgtcgtcacggcagagttcctcccaggagcgcagtcacaccgtcacgcctccgtgtcacttggatccgtggtctggtcccattcggagtgcggtcatttgattcgaggcctcgatccacacaaagctttctggtggtcttctgtctaaaggaaccaacggatgattaaagtctgttatttgtgggaaaaaaaaaaaaaaaaaaaaaaaaaaaaaaaaaaaaaaaaaaaaaac

SEQ ID NO: 35 - DNA, 646 bp, Canis familiaris
ctccagccgcttcggccaggggtattcggcgggacctgacgtgccgtggaccgcggatccgttgtgcgccccaccaatgccaacggcaccgccgcccctgcgccgccgccacaaagcccagaacggccgcacgccgaccaaccggctccaccaccgcaggctgctcatgcacgattcgagcacgtcagcgctgtagcccgcgaagcggcgccgggtcacggaccgcgtcgcggtccacaggggccacgtgggcctccacctcaatggccggaacggggccgccccgacgttgcacctcagcgtcgtcgcgggccagccgacgactctccacgtttccagtcccattaacaaccccgggggagcgaaagtgaacttgggtcacggtgaacacctcctcaaccgcgtcaacgacgaggtttgctaccctctttcccgacaactggtgctcgtcacgatatgggtcctcatcttccacgatttatcagccaagatccggaaagttgactgatctaggtcaacggatcctttgttgggtggacaaatcatccttgatttctcaccgacgggtgtactaaccgaatcaaaacttgttcctttctttaataaaacttcaaataaaaaaaaaaaaaaaaaaaaaaaaaaaaaa

SEQ ID NO: 36 - DNA, 635 bp, Canis familiaris
  misc_feature (139)..(139): n comprises a, c, g, or t, or includes no nucleotide
agtgggcccatacaacgcctctatcgcttctctcgagctcgagctctctctcgagtttgtctctttctctcttgtctctctcacccatttaagtctcccttttgggttctattgactatatcgtttttttttccgcganttcctgaaagctttcttagtattattacgttgtaagtttcgagtcactctgggtcgggttggttttcgtaatggtatagatcaaacacaattgataccagacccggcctcagaattgatctctaaatctttagtgaaccagtgtcttattcgctttaaaaattagactctatatgtgtccacaaataatatctataggtaggtttacgacgtttttattctccagtaatcgaacaaagtcattaggacactattcgaggctctttggatctccaatacaaactcacacacaacagacgtcttcgacaactctccggatacatggtgcgccacacggcatccgtggcgcccccaaagccacagaacgagttccagctccctcctcaggcgttttccaccccgggctcgtgacccgtgggaggtctttagacaggtttttttgtggttgacagtttaaaataaaaaaattttaaaaaccaatttaaaaaaaaaaaaaa

SEQ ID NO: 37 - DNA, 594 bp, Canis familiaris
gttgcgatgggcgaaagtgtcggtgaaagatgtctctcccccacactccacagaacaggtcagggcgcgccggaaacctcgtccacgacgtgagcccggacaggggactcttgtggaaaccggtacctagagccttacatggtttcctatgaccacaaatcaaaacattcgtctggaggtcgagactggctccccggaaacgacaacaaatggtccacaaaccttgtaaaccttcgcacactatcacttaacaataaaataagttgtgtgcatatgtccaaagtttcccttttcccattgaccacgagaatgtcatttccccatggaatatcaggggacggatcctattttagccccgtccaagtttttaattcttccttcgtcccctacgggactttgacgatgcgacagaacaacgcgaccagaccgtcgattccccggaaagagacaatgacgaaacaccaacggatcgcgtccttggacgacaactatcatcccatgatggttggtccgaaataaattgggctttgtatggaaaaccggaataaaaagttttgactcaaaaaaaaaaaaaaaaaaaaaaaaaaaaaaaaa

SEQ ID NO: 38 - DNA, 99 bp, Canis familiaris
tcgattgatttgacgttatccttttatgacaaacaaacaaaaaacacaaaacaaataaacacaaacagacacaacaaacaatcaaaaaaaaaaaaaaaa

SEQ ID NO: 39 - DNA, 658 bp, Canis familiaris
agaaaagacgtctaggcctggccattgggcccatgtgtggggtgtcgtagtcgagaacggacttcacaggagggagaccaggagccacacaggattcaacacggtcgtggttgtgtggattgtccgtcggttcggctccgacgtttctcgtagcaatgtgatcaaactatcccaatggtatcaaatttaatggggttgattaagaccacaaatcggatagatttatatgtggcgaagacacatccacacgtaaacgggaccacaccatgacacaaaggaggatacgggcggtatcacgtgtaaggcccaacggtctcatcagttgagacgtttctgcaagcgtagcgggtcctttaaccaaaggaaacgtcggtaggaatgcgtatttgcccgatgcggcaccaccgaaatcacattcaaaaaactgtgtttggttggacacggtcctcggtccttttctattggtttagactacgatgatgcaagtagataaagagatagaaattcgttatttgttaaatcttgttctgtccgtcttcgggtggttggtcggggggacatgaataacgactcaaaatcgaatctcctcaaacctgaaaacacaattaacatctctcattattattagataataaagtgttccatccataaaaaaaaa

SEQ ID NO: 40 - DNA, 645 bp, Canis familiaris
tctaaaaacgtcatacgatatattaataggtatctagagtccctcaaaatatccgactccaacactcctctgacagtattagggtaggtctcagttctatctgctacaaaagcgtcttaaagcttccagaccagttcaattgaaacgatcttcaactccatatgctagagctctcctccaatcgaacacatcgactcggtttggggattgattgggcatccaatgcttagactgccttaaactgtctaattttttttttgtacttctaagctctgtctgtcctaaatacctatggtattttccggttagcataggctaagaaaatcgatgattttcaaaataggtaatcggaactaagactcgatcgtttccaaatttccaacatccttgggtttaacaacgaaatagatatttcattcttgatatggacaaagtcagtcaatcttgtgaaaagcgtctttagactagtgcctcacctcccccccgacctcacccacacatgattcgggacgtcttgaactcttggtccttaactcgttttaaagtccacaccgtaaggtgaaagtattttttttaagtcgactgtataataataaatgacgagaatatcgtgtttagccaaaaaaaaaaaaaaaaaaaaaaaaa

SEQ ID NO: 41 - DNA, 597 bp, Canis familiaris
gtcccactcgtccacatacttggtgacacgccacacctgtagaggtcggaactccacgagggaactttcagaacgggtctgaggctccaatccacccgagactgtcattgtcgagacacgaacatcgtcactccaatgcccccgtttctggtccctgtcgtgttggttcgactccccgtcttgatgtagttgacaaatgacaacccagagtgtccagttgacggaagaccacgtggtcacgtcaactccacatcctcagggtgaacacaaaaaggttggtttggacgttgttgtgacactggaaacctttggacgttccgtgttattgttcgtagaaatagacgcgtttgatagaccatgtcctttcgcgtccgttagactcagggtcgagacgttctcttggggaatccgtgggtgtcgggtctggttccaggtccaagggggactcgtcagtcgactaggttatgtcgattcgtgtggttgcgtgttgtgtatcgacgggtaatctttgggttcgatcccaagtgaggttgtcgtgactctttgttataacgttttgtgaaataaatctccattcaaaatgaaaaaaaaaaaaaa

SEQ ID NO: 42 - DNA, 511 bp, Canis familiaris
caaccgtgacggtcccatcaatgacggatgccggatttgaacctccgtagggaccttgaaaacttgaagtgaccaacctcgaatatacagaaatccgatattataatctccaatcctcgtagtattggaaactaatttgtctaattcgttgtcttcgttttggggtcctatcttattcaaacgttattctaaatgacccgatttaaagtaatgtaacattcacttgaattaactcttttcactttctacttgtataaatactatttttaatatctttctagtattattatgtcgtaaaagtagtgttgatcgaactcgttgtagcaattaagattaatcagagtatatagaaaatatctctacttgtttaatgatagtaggtaagagtctatattatctttaatgaggatgatgtatttttatctcatgtttatctatgtatccattttatgagaaataaaatcgaaaggttgaaaaatcttataataaacaaaaaaaaaaaaaaaaaaaa

SEQ ID NO: 43 - DNA, 513 bp, Canis familiaris
cgaacagaaccgggactggtgtcggagatggtcgtccccccaggtgaccataacacaacgatgggatgtccccgggaatctcggattggcactcagggtcgagaccaggggtccccgctggtgaccgatgttccagtccacctggaataaaaccttacgaagttagtattaaatccttctttgacatgatattcatgtgtttggttctttggttttctggtttgagtctatcagttcaatgacttttcattgtatttctaactttttgtgcttagtaccgcggtcgatttgccttcgattttgtttccgactatctacccattgacgatggtccttttgaagggtggtcgaccgagtctccccttagcacccggacgccagggaggtgagttaggttcgtcgatcatcctgactacgtcatgtcttatccgattgagtgggacattaattttgtctctttcaaatatctcgatatctcgtttagacaataaaaggtgtcaatttaaaaaaaaa

SEQ ID NO: 44 - DNA, 692 bp, Canis familiaris
atgggccatgtatcgggcactgaggtcgcgtagtagctaccgagaccgaacttccagagcactttccactgcatttgccggacagccaaacgttacatagcgctagaagacgaattagaaaaaatcatctgatcatgacaaaccaccgttatctagagaacactctaatccaacaagtcaacaccattattcatcagactcaaattagaaaacaacatcatcgattctccggtgggggtcagacacttccggcagaccacgttcacattctaattccacatcaagagatttgttttaggagatgaaaaataccttgtgttattcatctaaatgactgaaaccatggtcaaccggttgcactattttagtatttcctagaccaggtcaaatctttactatttactgttattccattagatttgaacattaaaggaatgtaaattctatctttttcaacgtctttttatatttaattacccctttctgatttagagtattcccatttttataaatctcaaagttttttttctatcggaagtaaaaataacaaaatagataaataccgtaatccttattgtgagttccctggaactccttacagactggttagagatcaaattgtctaaataaaacgaaggttttcttcacactttcgtgtaataaaagatatgaaacggtcaaaaaaaaaaaaa

SEQ ID NO: 45 - DNA, 582 bp, Canis familiaris
attcccacgtcccgggttgtaaagtgaaggtatttgggtggtgaggggtcagatttaaccgtgttgacacttgaaagtggaaattgtctattttgagttcattgtgacttacctactgttctcaacgataacgactccgatacacaatgagaaagccaaaaaaaagaaagaaagggataattattttgttcaggttcaatatcatttattccagtacgtgggtgtacacctaatacgtcctctcattgggtgttgtcctcagagtacctcccgggccccgtcgtgtcttaggagggtctgagtcactgatagtagggaaacgtcagtccttggaagataacgaggtcacggaatgtactgaatgtcttttttgttctgaagaatttcaaatttcaaatccacacagggacactatcacaccgagtctacggaactgattaatccgacggaacaacgaagacggtggacgtcgtcgtgttctaattgggttactcaggttccatggttgtttgggatctgtcccgtctctataagaggtggtggtcggtgaaaagagggattatggggtcttaaaaaaaaaaa

SEQ ID NO: 46 - DNA, 503 bp, Canis familiaris
ggaaccttgtacaggttcttcctatttggactcatatttgggcttgggggggttcttgtgtctagatcttttggcttctccaagttctgaacttggcctttgacttgaggttttcgtgtttttgttcaatataattataagtaatttcccaactgactccaagtctgaaaatacttacttatgtgaataaacctcagttctcaattaacaataatatcaccagtagaatgagtaattgtagtctattaaatattaccacatatactttcataaagatccgttctatcaaaagtcacgaactaactctatctgcttaggtctactcttgtctctacttaggttattcgttactgtcgacacaataatcagttacatctgtcatttcgtttgagttattaaagttcttgaggatcccatcatctgtataaaaaatgacatagtcttatattacattaccatttaataaaaattctcaaacgttaaaaaaaaaaaaaaaaaaaaaa

SEQ ID NO: 47 - DNA, 602 bp, Canis familiaris
aaccctagaccctatgggaccaaccttgtccaccagaagcctcccggacttattggatgaacaagagagctgcaacctcgggtcaaataggacgggtagggtctgagcaacgggaggttgtccccggtactcaatcggtgtagaggcttcgtacctccggagtccttgggagaactgagcgtccgtcggctctttagtctcgtggtacacgggtctgatcgttgtacatctcgcgtcacgacggaccagacccgtccacacccgtcgtccggaaatatgttcagtgggactcccaacgattccttgccatcaaatgtgactctctgacggtctcaaatccatcggttcattggtttgtcggcattttgtactagttgatcatgtggactcattatgggggtgaaaaatattcctgtcgattttccttcttcgcctttgatttttgtccgatgcatcaaagactcaatccaaaagaaactcgtgtggggatctgtcacctcctctttttgaaccccatcgaggtatcgacattctgtttcttaataaaatttttgataatgtgtcaaaaaaaaaaaaaaaaaaaaaaaaaaaaaaaaaaaaaa

SEQ ID NO: 48 - DNA, 606 bp, Canis familiaris
  misc_feature (463)..(463): n comprises a, c, g, or t, or includes no nucleotide
gggcacaagggtgagatgtccgtcgacgtccaccccggggaaccacaagcggacgacacggaacctcaagaggggtgtgtcagggttgcccaagaatcagtgggtgggggagagacacggacaccacaccaccccgtcgtccccaccatgtgtggagtggttccttctgttagtccgaaggtgactccgtgtcacgtttcacccagtttcgaaatgtctatttatgtccacttttcctttgatttgacggctcttcacggaccttgtcggaacagttacagacctcattggagtgaaatgacgtctcgtctttcccacattccacataatggacttcccgaacgaccgggtaggaaccaattgagtcccccatcccaccggaccggcgattcgttggttggaggacaccttggactagacgtggaggaggtaggacgggtctcccccactgtgggatttggtnatgtatcaaatctcaataattcgactctggaggtgattaccgttagtctcaatcccataaacgatcacttgacgaaaacttacgaatcagaatgattatcctccaaataaagaatagatatagcgataaaaaaaaaaaaaaaa

SEQ ID NO: 49 - DNA, 455 bp, Canis familiaris
tgtatcagatctggtctgacctcctagagactgagtgtccgagacagggtacgtggaggtcatcctcacacgtggtatgagggtccggggaggcggagccgtggtgtgacactaacgtattcggaacaggtgaactggttgacaaggacagtaccctccggatgaccatccggagaggttggatcaataggtgcgtttggtgttcctggggacacggttccgaatttcccaaaggaaagaattgaacaatggttcggggaggggcttcgttggacaaaccctgttcacgggataggggaactgtcagagggtggtggggtgggcggcggtcggaccagagtgtacgaccagagtcctcgtttcggcgatagggtagtctcgtcgagttgtttgggaatttttgataaatataaatctatctatctatctctaaaaaaaaaaaaaaaaaaaaaaaa

SEQ ID NO: 50 - DNA, 516 bp, Canis familiaris
gaggttctaaagaccataagttaatttaaaaggatccccgtcgaatctcccggtcggtcggtgattcttttttttcgatccgtgtcaccaagaaaccaatcttgttaacatttttagatctaaaatctaaaaaaacagtcttacgttttacctcacaagactccgtgaaacaattcaccagattcggtgttcgtacgaatcggtaaaatatttactttgtccgggtttagacaagacctttcggaagtcgtcgtttttaggtatatgtcccagattcattaagtagaacctcaaaggaaccaacgttctacgttggatctcttaagattttcttttaagactgtccgaatagacccatcggtcccgccgtgactgacttcacgatggaattgttcatttgccgtgccctgatcatgttcccctttcccattcacgggtctctgcccgtggctcgtaccgacccattgtcgttcacattgtcggtgtggtgtggttttcggggtaatggaaaaaaaa

SEQ ID NO: 51 - DNA, 603 bp, Canis familiaris
ccccctttggtgaagggctccgtttggcaacagtctgcgtggtctcgcagagacgccacaggatcccaaaacagtctttatgatgaaaggttgtcaattgtatcagaccgcttttttcaatttaatcaaattgtagattttcttcagtcccattggactacgaattccgataagtttcctcaatctatttattcctcaacgtcacttacgacaaattggacaaccttagatgggacaagagtcccactattttaacgatggtatatgaacatccattcgggcaagtttgtttcatacgggtcaaaacaattatcaaaaaagaatccgtatggttgaaattcaacgtcaaaaccgtcatttagccttaaaccacgtccaactcgcaaccttcatcgctcgaacacctcatcctcgggtcctatgactatggaagtcttcataaccgagtcattcattattgtggaaaacgaagtggtcataagtaatgttttatttgtgtaatagaaagtctattgtgtttaccccaaaagtgaataaatatattgtctatttttcgtgagatcatcaataaaacatgttggattctaaaaaaaaaaaaaaaaa

SEQ ID NO: 52 - DNA, 566 bp, Canis familiaris
ggaccggaaaacataacgacccaaatgtggatccagacggtggacaactccggtgagtgtcggaacgtaagttgatgatccagaacggtagttgtctcaccgacatcggaaaaaactcgatgagtctccggggtgagctgcaccgtcaatgagctctacacggaacgtttaaggaccaacagatttagatgaggagacaaacggttaggagtaggcgtccggactgtcccagaagtcacacccgtctcacttgtcacatcggtctgggacagtataggtggattgagatgatggactgtggcgccccggttctcgtgaatcgaagtcggttcgggttcggtcagaaacactttgtgtgatgatctccgtagctcacgagacaggaagtcaagaaaatgatcggctacggtttgtttcctttgggagcacgtcgatatttaatcctcaacgctcccgtacccgctcactcgttaaaggaaaataatctttaaaggttttgccccccccatcccccactccattgtaaatcggttttggtcaaatcttcaaagataatattaaaaaaa

SEQ ID NO: 53 - DNA, 579 bp, Canis familiaris
taccctttcgaaaatatttctggtctgggttgtcttttcggagaagaataggagtcaatagatcaacaacaatctcaccaaactgtgaaaattaattcggaacctggacaacaaaacgaacgtgttcccaaaataaaaacctctgatctggttgactatttattccaagacaacaaatcagtcagaaaccagaatagaatggaatcgtgctctcataagattgatctgagttattcaatttccttgttctatctatattcgatagagataaacaaatttaaactacaacttctgaatcttaaaggatgatgttagattgatttaatcaaatgatccaatacaataaaaagtacgtgttcagttaataattataatatcctatttaaaatgacctgagtagactaccattgtaaatattcggaattcaaaacggaccaatattataagtcttcgaaaaagcttccgaataatgcattggaatacgattttaaatagttccatgggagaagtattttataaagggaactaataaaatccattttgtaattgagtttaaaaaaaaaaaaaaaaaaaaaaaaa

SEQ ID NO: 54 - DNA, 622 bp, Canis familiaris
  misc_feature (89)..(89): n comprises a, c, g, or t, or includes no nucleotide
cacctgtataataacgacacgtgctttactcaaggctgacctgcggtccacagcggatgggagcgtcttttcaggtggatacaacaganggcccaggcatggacggtggcccagtgtacggtaccggcgcccagcccataagaactttgagagaccaaagacgtatcaggattaccggtatttacctcagagtatacacagaactttctagaaaaaaacgaccgtcctaggcctggccaattgggcccatgaacgatctcctgtttccgaacctgaaccacccgatcaagatgctccaacggatccacgcgttgccctggaccaatccgaacaggacgaacaacatgaggatgcggcagtctccagacatgtcatcaatgttaagtggtcttttatgtcaagttggacaggcttggtttacgtgaccacacgcggggtggagggggaggtcgttcaaatacgggactgtggcgagtgtgagtcgacttgtcgcccgtggctccttggtttggggaccatacgtccattcgacacttgactttatcatcatcaaataaaatgtaaaggagaaaaaaaaaaaaaaaaaaaaaaaaaaaaaaaaaaaaaaaaaaaaaaaaaaaaa

SEQ ID NO: 55 - DNA, 665 bp, Canis familiaris
aatagtcccggtcaattttattacgttgattatagattgagtccaccgtcatatttagtgctgcctctctaacttttgtaactaagctgtctacgcccatcctatacatttgttctttgactcgtttccccagacctttcatcttatctgactgaatgaccttaaaattctctgttttgccttcgatacggccgaaataatttggaaaatcagaagcgagtgctcctctgcaccccgtcccccagactccacaacctaaatcaaggaaaaccgataaatgaacccttgacatccacgacttaatgatcttcaacttatctttgtgaggttattctgatctctttacagatttctgagatttttaaaatgggggttcttgttaaagtgtgcatatgttttcaggttagtatcattggacacaattgaatatacaaacaaaacaacaaaacaaaacaaaaaacaaaacaacacaaacagaaagagtctccgactccgatttaagaatataatatattctaaagagaataaaatacccattataatctatcagttttccgattccgttcaacgaatataatatattctaaagaacagagacgtgttagataatcaagattttatagtctttctataaaataaacctcgtcgtttacttttggcacaaa

SEQ ID NO: 56 - DNA, 506 bp, Canis familiaris
taatcttctctaaatcgaattaatcgtcccatccgacactgtcttttctttcgggtctcctgtgtgacaccagtcgatggtggctcgagtctcatctacatccctacatctcttgtttctaacgtttcaatggtatccttctgaacactaggatctccttggagtcttttcttttctttttttaaagcatcacgtcaccgtttattcgacgtccttttgaacttaaaattctcaaatagtcctttggttggggaggtgggtggggcgggagaggaaatattttactgtatttaaactagaaaaaaaaaaaatacttgtagttaacaaaagattcgttaaatctggtctcatttgtcctgaattttatatatatttctctctctgtctatctcgtttgagtttttaggttctttcgtgtgtaggtctcttaagactagtttgaggattcaaacctcaagatttttggtacgattaaaaaaaaaaaaacggaaaaaaaaaaaaaaaaa

SEQ ID NO: 57 - DNA, 520 bp, Canis familiaris
gaaccaacggcgcgtggaaaacggaggacaccaggaacaaacccatgaccggcgggggtccctggtggttgctggcgtggccgtgttccttcaggaggaggggtcgtcgggggccgggggtttcgcgtggggttggtctgcgtgtttggttccagacatccccgtgacctgccgaccaccggggcggtgccccgacacgggactatctcttctctccccggccccgactcggacccgagcttctttctccaccgcggctgtctggctatcttggtgtctctttgtacggatgtgcgggtcggacgggaagagtattcccaatgatcctcaacggcatctccgcgtcggcccctccccccggaccgcccccacgccgtccccggggtgtctcccatcgggagccggatggattatgttctgggttctgggggacggagcggggtggtgggacaggaggagggtttaagagactgtccatttaataaattgatatccctctttaagttaaaaaaaaaaaaaa

SEQ ID NO: 58 - DNA, 618 bp, Canis familiaris
aaagacgtatcaggattaccggtatttacctcagagtatacaagaactttctagaaaaaacgaccgtcctaggcctggccaattgggcccatcacgccacgtgacccgcggggcgtgggcgtggtcagtgaggcgtcttgcgtcaccaagaactgcctgaccaacggcgcggcgacggatccgctttaaacagagtcccaacagcgggctacaaggacacctccgcattgaggcaattacaattagtgtaaggacggcgaagctaaaatggttccccaaacctctctcgtcagttcaatgacacctcgaaaccaaaacaattgtgaaactcaaaccaggactcgccatcggtaggaacagtgtcacaatgagtagcacaaacagtggttctcctcaaccttgtaacagttcccatgcttttgacatcaccatggagaacgcagtgattcatgtcgagactggttgtcacattcttaacgacattaggtggatgactattcacggtccactgcaccttcaactgaggatgcgacatcgttaaatgaaggttttttaataaattcatattgtcttcttaaaaaaaaaaaaaaaaaaaaaaaaaaaaaaaaaaaaaaaaaa

SEQ ID NO: 59 - DNA, 537 bp, Canis familiaris
tccacaggtagtacatggaaatattcatctacaacattattttcattaaaaaaccgatttgtacaggcagtataattggaaatacgtaaactgagaataacctaaatcagtcgagtatttaataatcatttgaccaccaactattacaatacaatattccaaaaacatagctaaattatttcatgtctagaagagaaaagtcagtagttatctaaagctacccatttaatgtttgtcagttacgtttccacgacatttacgtaccttcttatgtagttacggaagaagttcctgtcctatctgacacacccatatcctttgaacacctttatacttttagacacacatatacgaatatgttatttcgtaatatgatttctattaatagtttctttagatttgtagacgtcttatcacgtcaaatgagtggttttgtctaataccggtatctgtcataagagtcgtatgaaaacttccttatattaaaaaaaaataaacacttatctcaagttaaaaaaaaaaaaaaaaaaaaaaaaa

SEQ ID NO: 60 - DNA, 588 bp, Canis familiaris
ctacgagaactgggaccggagccttcacacctcgtccgcggggaaatcgacacggccaagtctccccccaaccgttggttggtcaaccacgaccacccgattgcgaccgccaaaccaaacaacacgtccgggccgcccaccgggacgcacggtgcttcgacctccaacagacgggcaccgttacgcaccgtccgagatcccctctgctgcacccacctcaagcccaaacggtccgacccgtccccgaccacccggtccgagggtgcctcgggtggtagccttccccgttcatggtccccgactccccacggatgcaacagttggacagggacccccatcagacactcagtgtgatctccccttaagcctccttcgtcctaagaaaagaaccgaccaacttgattaacgggccaacccatcctcaggatgtcggttctcccatccgagacaccaaaaacacccccacagcaatggcaaacacaattgaccccgaacatccgtccaagatccccacccagcacagacagtctggaaaaccagtttgaaaaaaaaaaaaaaaaagaaaaaaaaaaaaaaaagaaaaaaaaa

SEQ ID NO: 61 - DNA, 665 bp, Canis familiaris
acaaccgcgtcgagctcgtgtcaccaccaaaccatcaatctcacgaccgagtccgtcgtcacggaaacccggaaacagggggtccgtgaggtccggagaaccccagggtttctcttccagcaaatttaaacgcgaactaagttggaaatcaccagagtttgagtctcccgagtccggctattttgtccccacgaagttgcataaccatccgtcctggggtctcctagcgtcacttaggcgttgggtcaccacgtgagtgacaggtttatcacttctaaggtgatgagtccaatcttggaagccttccagaacgtcaccaacaatcggtttcggactctgatggtgtttccaaggaagaagacgacgtggatttgtccactgtccctgttggcaccggaccacgttcggtttggcgtcactggacattccgacctccagtagcactggtatagatccgccaaagtccatggtccgacgcaccacagggacagcgtccttgcacactagttttggtcccacccccggttggacgatctcccgaaaaggttgaatgacccgaacatgttgaactaaagatgtgttctgatgatgcggtacgtcggtctaggtcgggttgacccacatccccctgattaaaccaaagtcaagattcaaaaaaaaaaaaa

SEQ ID NO: 62 - DNA, 628 bp, Canis familiaris
cggcgccggggcacacggcgacccgggccacggcgttcggtcccatgtcgttgggaaacatttccttgagacactagttgacttggagaaccctagcttggtaaaagatgagtcacttgaggaggttccggacaacttctggtcggacagggacgtcaccacaggacagaggatcgacacctgctccccaacctcaagcacgtcatgcggagaccggactatccgaccgtctttcgtctcctcgagttgcggacggaggactccaacctcaggtgtcaccaggtcattttaatgaagaagcaattacagattcgatctccacacaccatagccgtccacaacctggtattccttccacgtcagaagttgagcttagttccgaacggagtggttccaaaccatgtgcttgcactacaacggagcctgattcaaaacagacaatgatccggaaaaattaatatcaaatttaacaacaccaaaaagtagaccaacagaaaacttatgctcaagggagacagtctggttgccataaagaggattcacatgcgtggatctttctcgtcatggtcaacgtgatctttagacaatctaaaaataaaggggtcttttgtccaaaaaaaaaaaaaaa

SEQ ID NO: 63 - DNA, 607 bp, Canis familiaris
gggctgacgacatagcttagtcatgaaacatccgtgcataatggccaaacggtctcagcctgggattgggcacgtgcctcgggccaaaaagagtgtccgggcggccaacccgaccggatatcccgattcctaacacaaaacctagtcggaatcgtgcaatcggtcacaacctaagctccatcaccaccatcacaattgtagcgaccgtcgtgacaacataggctcaatgtaacaacacttcaggcggagagtactatgagtacggtgctcagagtcaccaacatcaaccccaaacccctgagaccaggaagccaatttgaacccagagaaggaaggaagtccaacggaacaagaaccgtgcgaacaacgttgtccgtcaggaccgtcaccgggcgacatgtaacaggaaccaccgggcgaacgcggctcaacaagccgtggaccggaacaaccaccaaatgatgaacagtgtctggaaccaccaacacaggaacaaataaaagtgggtgtgtgttctgtctagatactccggtgacgatcaatgacatgacttattgaataaaagaaaggtttatgtcggaaaaaaaaaaaaaaaaaaaaaaaaaaa

SEQ ID NO: 64 - DNA, 629 bp, Canis familiaris
acgggtaggtagaacaaggccaactatcacgtcccagcggggcgccggaagagtaacattccggggcggcgatagagagactagcactggccccaccgaataacaactaggcacggttcaccgtacagctccccaagttgtggtccccgtgccactcttctaggagcgaaaaggacccattatgcatcttctgtaataatcgatgggaagaatcaagtcctggcgaggaacaggggtcctcaacaagtcttatgctcgtgattcagacgagaggctaggcagactcctagcactgggagtagcgagtcgcgggtcccagacgaacaacccccggaacagtcagcggtcaccaccaacaccattttaaattaaaaagcatggaaccaaatggaccacaactatcaacaaaacccaaaaccaatcgggaaaatggaacggaacttgttgtccacccacgacttggaagacccgaacgttgttcgatcgatgcgttgcacaggaccggactcgccggcccgacatccgtatctcgtacacccgaaccacgtccacttgtatgtcaccaaaatgaaacgggccaaaccgaaataaatgttgtctgttgcctgatctaaaaaaaaaaaaaaaaa

SEQ ID NO: 65 - DNA, 558 bp, Canis familiaris
gtcaagcccaacgtgagtccgatccggttggctctggggaagggggaaatctatgacttctccatgtcaggtcggcggtccaccaaacgtcggaaatatcagcagatgaacaacctactcaacgaccgatgccaccaggggtgaaaccgatggtcccgtagagtcaccaggacctcctgtggtctcagttgaagactcagagggagtgttggaggttgcagcggccccgtccgattcgggtgaatcaggagtttctgaacgtgatttggtcctatcagaatcaatttccgtagacgaaggccctcctccaggtgatcctggagatccggtggaaccactaacacggtggtccaggaggacggggacgaacaagaacaccaacacacaccgggtgacgtcgtccccactgggtcggggaagttaatgggggaagagagtcacacaatgtggtcaggtggaatttagatggtacaggggaaccaaccccaacccgttccccacgggtaggttctgatctaggatgaataaactatagtctagggacgcaaaaaaaaaaaa

SEQ ID NO: 66 - DNA, 657 bp, Canis familiaris
tgataggggctacttcctagcaaaaaccagttagcattagccaatacttgtttcttatgtctatgacaactattctttgttttcgaccgttgttgtcacggtttttaggagtggacggtacggggtagtgcgtcaagttcccccttcgtcaggtggtaggccgattattggtgcttagggattacaactcggtttagtgagaggtgactggtggtacggtggccactatggtattagttccacgggatgatactttaatacaacctaattcgaagacatagttgaacgggctattggatctagaatcgtgtggttatcccctatatatttatgacgcatatatgacagcgtgtgcgcatatatattacacagagtatgtttacagatattgtgcgcatccccatatgcccatgtaggtttttaatacggagcccatttgaggcccataagaagcctaattatcccgtgtagattggtgatgctctcgttggtggcagacgtatagtaggagttgagatgaaaggaggagttgccatttcaacggcgtcgatcatattcagagtttcttcatctactgtccgtattgttctatctatgtatttattcatcaccatggtgaaaaaaaaaaaaaaaaaaaaaaaaaaaaaaaaaaaaaaa

SEQ ID NO: 67 - DNA, 630 bp, Canis familiaris
aaccccgagggatccaaatcgctcactcatcttcgacgtcattaaacaggccacagaaactcccacggacgcaaacgcgagaagctcctgaaagatcgtcaaagacggtggggggctcgtggctttcccgtccatgatcggacgacctcttttcataaatccgaacgatggtaggaaagggtcaactcgtccagatgagacaccaaagtgtccgattgtgcgttgttcccaccctctggcgaagcttcggacgcttatctgtcgacataccttagggcagtcttcgatgactcggggattgtatgatgaatccatagaacgccctggtccgtttctgtctccaaagtcattagaggtttggagttcgtcaaaacctgaaccggttgttccgtcatggatgtcgatttctccgtcgtcgtggtctccgtcgtcggaggagtcgtcgaggtcgtcgtcggcgacggggacggaaccttcaacgaaaccaacactgccaccaatgccagcaccatatcccatttcctgtgtttcagtaatgaggaaaaacgaaggaattgacggaactttatttctcaaagaaccaaataaaccgttagttgtgttaaaaaaaaaaaaaaaaaaaaaaaaaaa

SEQ ID NO: 68 - DNA, 623 bp, Canis familiaris
aggagtaacatgtgtacccccgaggatccaaatgttccactcaatctcgacgtcattaacaggccacagagactccccacggacgcaacggagagtcgtgaaagaatcgtccaagatgtgggggttcgtggtttcccgtcctgatggacgacctctttcaataaatccgaccgatttaggagggtccaactcgttcaagatgagacaccaaagtgtcgaattgtgcgttggtccaccctctggcgaagcttcggacgctatctgtcgacataccttagggcagtcttcgatgactcggggattgtatgatgaatccatagaacgccctggtccgtttctgtctccaaagtcattagaggtttggagttcgtcaaaacctgaaccggttgttccgtcatggatgtcgatttctccgtcgtcgtggtctccgtcgtcggaggagtcgtcgaggtcgtcgtcggcgacggggacggaaccttcaacgaaaccaacactgccaccaatgccagcaccatatcccatttcctgtgtttcagtaatgaggaaaaacgaaggaattgacggaactttatttctcaaagaaccaaataaaccgttagttgtgttaaaaaaaaaaaaaaaaa

SEQ ID NO: 69 - DNA, 615 bp, Canis familiaris
  misc_feature (368)..(368): n comprises a, c, g, or t, or includes no nucleotide
accatctcgacccgaaatagtcggtcagtaattttgatccgatccatgttagggctcagaaaatctcgtggatcctgaaaaaatccgacaggatcattcaacgtgatcttcatctaaacagtaggcatccttaatttcgttgctgtattttctcttccttttagtaaaaaagcggataatgacattgccaacaggtgttagcgtgacgaggaagacctggcggaaattgccaaaacatcatcccaatgatcagggcaacacctcggaaaggaaacacgttccaacaaactcctggattaaggcaatttgggacaggaccgaattggcccaaaaccaataattacaaaaaacgttctggacttgtattntatggagtggatcatctttttcttacaaaactaaaaatcgtcaacaacgggaactttcaattcccaaaagtgatccacgttgatcctcaacctactacttgtccaaaacgtagcccccatcacaggcctcgtaaacttcaagcacgtcatccatatcaaggaggactggaacaatgtctttaaaattgacagatttaatcctcaggaataaaaagatatttctcatctttaaaaaaaaaaaaaaaaa

SEQ ID NO: 70 - DNA, 581 bp, Canis familiaris
gcccgggacccgacaggtccgggattccggtgcgttgtccggggtccccaactcggttggctccggggtcctggacggaagaacgggtccgatgttgactcacaagaatacgctgagaatacggaccaggggtcacccccagactcaactcgttgggactcagttccggaatgggtttgacacgtgtttcaaggggccatcttgaaaagacggggacacgtagttccctcggggtcggtgtgagaccacgagtccccggatcaccctcgatggaccagccacccgacgtagtgtacccgtccccagacatcggcgttctgggcggggtcctggggacgtccctcgtcactccgtccgatgggtcggtcgtcgcagtggtcaacccggtctgtctgtttccggtgaggtctggtgaacacggttccttttgggagctttccagaacacggggaccccagtctcgtccgagacccgtccgttgtcaggatcgttccgacacaaataaagagtctgcgtgtcggctcgtaaaaaaaaaaaaaaaaaaaaaaaaaaaaaaaaaaaaaaaaaaaaaaaaaaaaaaa

SEQ ID NO: 71 - DNA, 630 bp, Canis familiaris
ctcagtcttgtctttgcttcgagagaagagcaatggagaccatgttttaaccgcgtcagttgttatttctgcaggatcttgaggaaccaccaagaagaacttcaatccaggtttttaaaaaaaaaatcccaaccaaagtaacaatcatgatgttggggaccctcttgtgtcaggtccagtctcatattacttatttatcaaaaacagttttaaatcgggtttgtcgacttccaaccttttgtttatatagtattgggaggatccccacgcaaaaagcttaaaatgagaaccaatttgggaatttaacgacagtttcggttttttgaaacctccacgctcaataggacaaccatggactattgacttagttaaatcaactgttttcctgacaaattaggtttttcagcgaacggtagtcaatcgtctctatatatttatatataaatatatatatatatatccactcaaaggttctcaagtgtttaattacacttttgttctatactccgacacatctctatttgtcgatagaaactctaatcatctagttattgatcgtaaagtttttataaaactttacttctaaagttaagggtttatagaaaataaatgctctctttattcaaaaaa

SEQ ID NO: 72 - DNA, 567 bp, Canis familiaris
gtaatctcccacgttcacaacaactgacgtctacgacataaagatcaattcgtgactgttcgtacgacgaatgatttccccaacaatgtagacttcgtcatccagacactccatcaaatcacggaacataatacttaaaaatcaagagatagatcacccagagcactaaaggagacgacgacacagatgactatgacgacgctgcggacgaccacaatatcgacgcggacactgccccacaagggggagtcggtcaccaccatgtctggaaagttttgaaaggaggtgacggtggtcggaaccatccaatttgtgtagtgattcgaccggacattaagagttagtcggacaagatgaaccacttgagtcgggaaaagttcccgaaagtgttgatccgggaccgtgttgaccaatagaagaagtcacaaaaccaactttggacaaaaccacttaagatccagtgttcacatgagattccccgaatggttccaacaaatagatttctctattcaaaactgtttgtacgtaataataaaataaaaataaaagaaaaaaaaaaaaaaaaaa

SEQ ID NO: 73 - DNA, 651 bp, Canis familiaris
  misc_feature (363)..(363): n comprises a, c, g, or t, or includes no nucleotide
agtcgttctcttgacaaacacgttgtctttggtcacccgatctacacgtttatcggcaaaacctccggaggacacctgttatctcgtattcggaccgacactgggtcgcttagaaagtggtaccaccggttgtctcgccacccggtcgtatccttctcgtcgccttgatgatccacactccccggaaaccgttctcactgctcctctgtcccaaagtggcaccagacacccgtaaatggatcaactttctccatccgttcatcattgagactccacagggtcttaagtagtagcttcagaggcgtctcgcggatctcgtcgtgacagaccctctcgtcccgatgaaactgaacatgatcgttngggtcccagggtactcctaacattccgggtaacaacggggtcggacatgatctcacgattctccaagggaaccatcacatagtcgggaggagggggatgtgccaagacaaccctcccaacggacacggcggtcgtatcggcgacggactagggagacgataaataccctgtggttccgacttccatgtccaccgtccattttagtgtctcaacaggtttaataaaatatttcactaaaagagctccgacaaataaaaaaaaaaaaaaaaaaaaaaaaaaaaaaaaaaa

SEQ ID NO: 74 - DNA, 580 bp, Canis familiaris
catccaatttagggacatagacaactgttcaggtacacaaagatgtcgaacctagccctcggggacgtaccgaacgaattggattcaaagacgcttatgtcctatgtctttcgcctttaatggggtctcactccgttccgaaagaaccatttctagatgaaacggttcctttgtttctctggctttattgtaatccaaacactgactcaaaataaatatgacaacgagaatcgaaataaatgttattttagtcttatagtcttaagtttacattctcggcgatcggtcgtttggtcaaccgtcacgggacccttttaattattgatctcgacgtatcttacagacgattttagttcaatatgtatcgtttcatttttctctctctcgtatattttttaccataaaagttcccaatagatctactaccaactatccaaagcttttcgtttttaaatctcgagctaagtgatttttggaatttttcataattctctagatccatgactctgttctgacgacacttctctctctctctctatctctaattaataaatcttcgattaagccaaaaaaaaaaaaa

SEQ ID NO: 75 - DNA, 469 bp, Canis familiaris
ctgccaccacttgacatttccaatgacaagtcgacaccacgacgtttgacggacaccgatccatcgttgtgtctgtgatgactgggtactacgagtttgacacaaattccgacaagtaaaagacgacagtataggtttcaacaaaaaattccactgatatttacatttaatcggcaagggatgggttcgtgacctcaaaattcaacaacgaaacgcccaattacagatgattcaacgtcaagttagaaacaacctacagatcatccaagtctcaggacactgaactatcgttgatgttgggtaaagacactaaattcaacaccagttcaaacaattcttttgtgttccgattggttaataagttaagtggtctcttgttacataataatctgagtcttcatccaagactactttggacttctatattcgatttgtatcgggaaatagatacttttgattttaaaaaaaa

SEQ ID NO: 76 - DNA, 606 bp, Canis familiaris
aaacgaccgtccaggcctggccattggggcccatcgtggttgtgtggattgtccgtcggttccggctccgacgtttctcgtagcaatgtgatcaaactatccaatggtatcaaattaatgggttgattaagaccacaaatcggaatagatttatatgtggcgaagacacatccacacgtaaacgggaccacaccatgacacaaaggaggaacgggcggtatcacgtgaaggcccaacggtctcatcagttgaacgtttcgcaagcgtagcggatcctttatccatagaatcgtcggtagaatgcgtatttggccgatgcggcaccaccgaaatcacattcaaaaaactgtgtttggttggacacggtcctcggtccttttctattggtttagactacgatgatgcaagtagataaagagatagaaattcgttatttgttaaatcttgttctgtccgtcttcgggtggttggtcggggggacatgaataacgactcaaactcgaatctcctcaaacctgaaaacacaattaacatctctcattattattagataataaagtgttccatccaaaaaaaaaaaaaaaaaaaaaaaaaaaaaaaaaaaaa

SEQ ID NO: 77 - DNA, 551 bp, Canis familiaris
atcttaactgactgaatgaccctaaaattctctgttttgccttcgatacggccgaaataatttgggaaatcagaaacgagtgctcctctgcaccccgtcccccagactccacaacctaaatccagggaaaccgataaatgaacccttgacatccccgacttaatgatacttcaacttatcttttgtgaggttattctgaactctttacagatattctgagaattttaaaatgggggttctttttaaagttgtgcataatgttttcaggttagtatcattggacacaattgaatatacaaacaaaacaacaaaaccaaacaaaaaacaaaacaacacaaacagagaagaggtctccgactccgatttaagaatataaaatattctaaagagaataaaatacccattataaactatcagttttccgattccgttcaacgaatataatatattctaaagaacagagacgttttagataatcaagattttatagtctttctataaaataaacctcgtcgtttacttttgaaaaaaaaaaaaaaaaaaaaaaaaaa

SEQ ID NO: 78 - DNA, 219 bp, Canis familiaris
ctacaagttagtagagagtatagagttcactcagtagagtccactctgggggtggataggagaggcttgcaacaaggtagatatctcatgggaaaataacaaaccaaccaatgcaagggggtaaaattcctttgaacggaatctgataaggattatctgtttgtgaatgacaaaaaaaaaaaaaaaaaaaaaaaaaaaaaaaaaaaaaaaaaaaaaaaa

SEQ ID NO: 79 - DNA, 517 bp, Canis familiaris
atcttgtcattggtacaatactcgtttaggattgttaatcaagtctcacaccaacgtgaaccgtctcttggtgaaggataagttgacacaactgacttgaaccaaatcagtcaacaaaaccgtccgtcatctttaacaaaatgcgtataaggatgacttagtcctttgacctcagaagatataaatcctttagtgcgtctgattccggaacggtaggacattatttattttctatttttccaataaaacaggattccaggattggttccaataggttcccctcggaacacgggatctaggggaatctagtcgtttgaagttaaatgagtcaccgatttttagtagtattgtcttaaaatgaccattttactctttcggatgaggacatcaaaacttaacgacggtttgtctccacactaacaataattctctagaaactacaaaaatatggaattatctcagaaggtttctctaataaaaatttctttaaacttaaaaaaaaaaaaaaaaaaaaaaa

SEQ ID NO: 80 - DNA, 605 bp, Canis familiaris
ggccatttccactccaacccaatgcgtggaaccgactcaattcgtgttgattcatgttgagagacgtggtcgacaatcctcaatttgttagaggacgctttcctatggtccactttcagggtactgtatcataaagtcgttaactttctagaattttagtttttctcttaatcatctctcgtgggtgtgggcgggttgggtgtggtgaggttttactggttgagttggaattttctccaatcatattttaccaaaaagacatttttaaacaacacaaaaacagtcaatttggttcgtttagttttcgatatagacagtccattttttttttaagacggctttggggaaaccaatctctgttcgttattagtcagatttcctatctttgattgattccaatatttgttattttgtatctcttcgaaaacggtctcacaaagagaccatttcataaagatttcaaccgaccaaaaatggacattctttcttgtttcacactgatcagtaggttgtcctctctacaaattcggattccaaaaattcagacttgtcattgttcgtcctatccttaaaaagtcaataaaacctattactacaaaaaaaaa

SEQ ID NO: 81 - DNA, 599 bp, Canis familiaris
ccagggaggtccggatgacctcccgaggatggattgacgtgactagatttgttcgggctacctgacttcagttgttttaggggaagagacacattttagcgtcacgacatcgtgtctgagccttctcgttctcgacctgtcttatggttcgaagtgctatcaaaaactaaagtatggtttccaaaacgaggacgcgatttgtgtgtggcggcgactaagctcccccctcctatgttaaagacgcaccggtgggcaagggactgcccgtcctgggggggggaacctggaatttccatatgtcgtccttcacacaaccccggttaccacccgtttctcacgttggacacggttgtctttgctgagtgacataggtcaagtccactgccccagaaactggcttttctgttttctctgtttcgttttgtggtgtgagtctcaaggctacgctggcggggaactgatagagtccagggcggcggtcgtcccagaccagtctccctttgttcctgagatgtctcttcctctttaatcgactctccagctcttttaaaataaaagacatcattcgctctaaaaaaaaaaaaaaaaaaaaaaaaaaa

SEQ ID NO: 82 - DNA, 564 bp, Canis familiaris
gtttttatgctatgacaactatttttgtttcgaccgttgttgtcacggttttaggagtggacggtacggggtagtggtcaagttcccccttcgtcaggtggtaggccgattactggtgttaagggattacaactcggtgtagtgtaagaggtgactggtggtacggtggccactatgtaattaagttcacgggggtcgatacctttaataacaaccctaaatgcggaagaaataagttgaaacggttaattgattagaatgtgcgttaccgctatattttagcgtattagaccggtggcaatagtatcacagatgttttagaatgtggcatcccctatagccatgtaggttttttatacggagtccatttgagccattagagagcctaattattccgtgtagattggtgatgctctcgttggtggcagacgtatagtaggagttgagatgaaaggaggagttgccatttcaacggcgtcgatcatattcagagtttcttcatctactgtccgtattgttctatctatgtatttattcatcaccatggtaaaaaaaaaaaaaaaa

SEQ ID NO: 83 - DNA, 570 bp, Canis familiaris
cctatctaaggcatatgacatcgtgatcctctcccaaaacgttgacctgagaactacgccatgtacgacggagagatggtatacacattgaatagagccgcatcaacgggtttaaatcttatcaatctcccaaaacatttattgacaagtgtgaggttattaacgaggactacatagggagagacctcacgacggatatagttctacgatatcgaccacaaattttacgaccgcctgaacggttgttacagaggacaaagtggagacaacaacccaatggtcttgactaggtggactgtcaactaactgaggatatccatgttcaggttacacctcatcaaacactataaaagtctcatagatgcatcataccaagttctgagggagaccaaatttcacacccctagatctggtcgtttagacaaaccaatgtaacgtctgtgtgttcttgactattctattgttggctcggtacgagaacagtcatagagaatcactagttcataaataaaccactccaaatataaagaatataaaaaaaaataaaaatgaataaaaaaaaaaacaaga

SEQ ID NO: 84 - DNA, 414 bp, Canis familiaris
gcggggatcttcgttcccgttggagaggcggggggggagggaacagcccggtcagacggcaccacgtcaaatgggtccatcagctgttgaagaaactatagaaacggaactaggggattctcccgtagagacgggccaccattgtgaagcaccagccgacggggaaggtccagttggacggtcaacaggacggggattttcagagaaaacatcacttttcatcttgtatgtcgacaacggtcttggtcatatctccccctcgcccgacccacaggtgatctcggaaatgtcgaaaagaccggaggtcacggtttcccgtggggccaggtcaataaacggcagcttcaagggccaaaaaaaaaaaaaaaaaaaaaaaaaaaaaaaaaaaaaaaaaaaaaaaaaaaaaaaaaaaaa

SEQ ID NO: 85 - DNA, 629 bp, Canis familiaris
  misc_feature (222)..(222): n comprises a, c, g, or t, or includes no nucleotide
gaccgcatgtttatttgcaacttgtacgattttccatgataatcaaccaactcctgggatacggtttcgggagaacacactcagaggatgtcttgagagtgaggagacccactgaccgtgaatctagatgatatttgattcaaggtctcgactccatccaatgtcgtttcttccctctcatccatccagacgtcgtttcgggggaatcgaatcggaacttcncttgtttgaattcctatcctcaagactcgtgatctccagcctccataagaggtcgtttgggaatagataacaatatcactccatcaaatcaacatcgtcggacttttcccatgagagaagcacaaaaatatcaagttctcagatttttcatacgttccaaacgaagttcgtcatagttcgttcgattcgttattctgattgatccgactttctgtactttataccgactgaatatttgatttcatctcagatccaaagtcgtttcttatgtcttaatgtgttatagtatttaactacaatagttttatccaaaggaaaaattctaatgatctaaattatattttatttcatattaaaattttgcatcaggggaaaaaaaaaaaaaaaaaaaaaaaaaaaaaaaaaaa

SEQ ID NO: 86 - DNA, 454 bp, Canis familiaris
ctcagggaccttgacgggaccccggtctccctccggggtcagagaaccagctctttacaggggaccactcgggggaccgggcccgacgtatctgacgctggtctttctgagcctccgaggtctgtgatcccggattttagagagactggggaaacccacgtctcactaattcgtctgagttcttcccccgggcactcccctcgttgacggggagggatctctgtgggacaagtatttttcccctgtcagacctcccggtcccaccaacatctttagatttttaaacctagagtcctatttatattcgaacgaaggttttctagtaacccaagcttttctatacttatatctagactttattcatattgaataaactccttaatttatctattaaaaaaaaaaaaaaaaaaaaaaaaaaaaaaaaaaaaaaaaaaaaaaaaaaaaaaaaaaaaaa

SEQ ID NO: 87 - DNA, 398 bp, Canis familiaris
tcgtgtagcacgttgaatcgaccggtcgcggaaagtcgcactagcacgtcgacatcgtcgccgagaccgagcaccgggtccgcacccgaccgctctgtccccccgggtcggagaggccgatgtcccgggccggggacggtgtcgtcacggacgactaggtcaagggcctgtgccgggtcaggggaggaaccataggatgattcatctcctcccgcgaggggtgagagggaattgcaccaacgcagcccaatgccggtggacgtggtgttgtctcaacaaacggaacaacggataacaccggagagcccctctccctcgtcgtctctaaatacaagtcgtcactgccaaaaaaaaaaaaaaaaaaaaaaaaaaaaataaaaaaaaaaaaaaaaaaaaaa

SEQ ID NO: 88 - DNA, 475 bp, Canis familiaris
  misc_feature (226)..(226): n comprises a, c, g, or t, or includes no nucleotide
gaccaatacgagggggccaccagagttagggttccaacccagttgaattggttccaaatacaacacccagaggttgtttgaatgggtcaagtggacttccaccttgagaaatcaccaaattaaatcaataatcacagtaggtttactggattaatggcaatttccacattcaactggaggtctttataaaaataataacgttggccaatccaacggtaaaatgaantggagggtcattcctgaccttcttctgaaaagaacggttatgcccatggttccctccgcgactcctttacgcggtcggttgacgggacccgctcatggtccacaggtcccatgcaatgggagctgaccgtgggtcgatccacggtcgttgtgggtgtcggtctctgtgtcgatgtgtgtgtgtgtttctctcagtatgataaataaaaattaaaaaaaaaaaaaaaaaaaaaaaaaaaaaaaaaaaaaa

SEQ ID NO: 89 - DNA, 405 bp, Canis familiaris
  misc_feature (61)..(61): n comprises a, c, g, or t, or includes no nucleotide
aacgctgttcttcgtcccaacactccccgcacgtaccggcctccttccgacgggcacgagngcccggtggtgtggacccgcgcccatgcgggaccggtggttggtcgccgacgcgggggagggggagaagagatacggggctcgtcttctggtttccgttcctctctatcgtttcggttccctaaaatccggcttgttttcagaattgaactcagtcttttctttagtataaggttcaaaagaaaaagtctaacaaaacattggaatcatgctcgtctccattttattaggaacatctttagaggtgggttttaggtctgattttcaccaagtctgcaatgttgtgggttaatccgttctactgtttggtatctgataataaacgaagattttgtgtcaaaaaaa

SEQ ID NO: 90 - DNA, 578 bp, Canis familiaris
ccccctggccccgagagccctattttaccccgagatgtcaccagtcattttaaataccgtttaaaataaaaccggaatattacgataagcgtataattgtagtaaaaccgttgacactccgacaacttgtcgttatctgttactaccttgacaaccgtcgaccaacctgacagataaaaagacctactacgagttttgggaacaaaaaaacaacggaaataaatcccaaaacaagatccaggtgatttgatgtattttactgtaataggattctaagatttttttagtggcggaatatattgggactaaatagatatacaaacactaccaccagtgaactgtacaaaatgttaattctttatcttttaacaaagcaaaaaaaaagtagattatttttctaaactatttattcactgattcactgttctcgatgaacgcattctcatatcaggtccttgtctactctccaagttaccagaaataaacactttcttcttatcgaatgtttagttcgaaaagtggaccacaacacaatatatagtaaaatgataataaaatctcttaggtcgaaaaaaaaa

SEQ ID NO: 91 - DNA, 624 bp, Canis familiaris
acattcttctagaccgttacacgttcgtgtcccagaaccgtagtctcgtggtcactattctgtaaacctccaaacgcgaaacagacgctctccccttgtccacctccagacgactgtcttaatgatgttcttaaacacattcatatcgtcgtcaaacactatttagtgtgtccacagatatgtcaacgtcaagattcggttaaccaattccaactaggtgattttgaggatcacgttctatatcaacggagttctaatccttttacactgaagtccacaaactagatttaacatcattttccatttattaaaatgtgtttccaaatgttgtaggattagtgtacaggaaatcaaaacaccttatcacacaatttagaatcaaattggccagattaatgtccatctgggagattgatagtgtctcgttcacgcatttctacaacaatcttttgaccgtccaataatttggaaagaagtgacacatgtttctggttgcaccccgacaaaagcttttctaactcaaccacatccacctgctgttaaaggacaaacgtagtcaatataacaagtgttagactgttacatcttattaaaaaatataaatatatgtcaattctaaaaaaa

SEQ ID NO: 92 - DNA, 587 bp, Canis familiaris
  misc_feature (47)..(47): n comprises a, c, g, or t, or includes no nucleotide
gagactaccttgtattgaggaaaatttcaccagtgtagcttggggtnttcctttgtccgtagaatgtaccttccaccataggaaataggttaattatttctttcttttttaaactaatgtggaataaaaaatgtgtatcgggaatctccccgttcaagtgacaagtgtcaaatgaacactgagatggtgtaggacgtcacggacggacctcgtgggaaaatatattaagtagttttaagatcttttgttgtggtatagacctcacgtcacacaagagtttcgagactttccggatctagcaaactcgagtctaggttttcagaaacacagaccatttgatacacctatcccttcccttgatttttgttgacaacaacatgttgacaatcgagtagaagaacaaaacgatattattcatcctctaaacgtggagattgaacgtgccgcagggaaacttttcgaaccccctgaaagatgtcatcaacacaaacatatttcacagtatgtgtaggtactaaataaactaaaaaaattaaaaaaaaaaaaaaaaaaaaaaaaaaaaaaaaaaaaaaaaaaaaaaaaaaaaa

SEQ ID NO: 93 - DNA, 250 bp, Canis familiaris
cctccccaaagtcaccgggccgaccagcagacacttggaactccttcaccgaaacggaggccacgtgggggtggaggggaggggtcggggggtagttctggtgattggtgtcggaactagtcgagacccagggggagtccacctggtggggccccagtccggggatggacgacgggacccaggaacacataatctcaaatctcagtctccaggaaaccgaataaaaaggtgtttttaccaaaaaaaaaaa

SEQ ID NO: 94 - DNA, 662 bp, Canis familiaris
gttcggggtgttcctcgggggctgctgcgatggacctgcgaggacctgcccttcccggacggtccggggtcgattttgtgtcccccggacaccttcaaacccagacatcgacctggagtcccgagcctttcgttcccgggagacttcaggttctccggtggcttagcacggggtgggggacgggtctgatctcggttcccgttggggtcggtgggatgtgacggaggccccgacccagggtggtagagtagacaccccgggcccccagggggtgtggggggtactcggttgggggggttcatgtggacacgacgttccgggacccacccccctctcccgcgtcgttacgtcatggttgggtcagggacaccaaaggtgtatttatttattacgttttctttagagggtccagttcaggggttggtggacccctgttcccacccccacgggacccgggttctcaggggtgggtggttggtggaatggggactttctatttacgtcggaaataacatggggagtccgtggggtttttgtgtcccccctgaccctcgtctgtggtggggtgtctttagatgtggggtggaggggcgtctatgcgatattcgtcacttttgtatttttcgaaaataaactcatccaaagtgaaaaaaaaaaaaaaa

SEQ ID NO: 95 - DNA, 558 bp, Canis familiaris
  misc_feature (32)..(32): n comprises a, c, g, or t, or includes no nucleotide
  misc_feature (168)..(169): n comprises a, c, g, or t, or includes no nucleotide
  misc_feature (241)..(241): n comprises a, c, g, or t, or includes no nucleotide
  misc_feature (271)..(272): n comprises a, c, g, or t, or includes no nucleotide
acctccactaaacatccacgacggcccattantctgtctgtaggtcccggtctctcccaagttaggcctgtggaaccgaatagtcacaacgcgaggtaaactaatctcggcccccgtgcgctaggacagagcacggggggacaagagaggaccggggaaccaagtccnnaaggccgttgagttcaggaaccgggatcaacaaacatccagtatctcccgagtccggaattctgcgcaccgnatccggggtcccgcgtccggcccggtccgnntccagttgatgtccaggttcgtctaatgggaactggaaatggtcaatcacaggagaggtggaggtgtcgggacccatatcttccacagtctacaccagactgcaacaccccccagggctggatggttcgtctggtttggctagggtctgagtcgggaggccggttgattgttgtttggggacacaattctggaagacggggaaaggatctcgtggccaatcactctaaataaaagtcccggttccgttcccaaaaaaaaaaaaaaaaaaaaaaaaaaaaaaaaaaa

SEQ ID NO: 96 - DNA, 646 bp, Canis familiaris
cacccacggattgtgtacgaccccagaagtcgtgattttgtgtacgatcttgggatcccaactgtactttcgtcttaatgtccgtcacaatgtcacttgtctcggttacacagaatttcgagtttaggaaattctcggtcccagacggctatcatttttgggaggaaatacgtatcgaaagacaaaggaattgaaacctccgacggatcgattacataaaaactcaaaccttaccgacgacgaatcggtttcaatccttttgtctacgtaattgtgttccactttctggtcgttttgttgtttgtcgactcgtacctcttttgactttgggactactattcgttttcacttatactataaggtcacttattggtgtcgtgtcagattcttcgtcaacaagtacgtgattcttacggacatctttcaaaccttcaccctccactcctttccgatttgtcttttaaataaagatttaaagtgtgactgactcgtatcggtcgcgatccaggttactgagtcccatcaaagagggacattgtaccggttgatcaatgtttcattgaatcactgtttatgtaaataaataaaacaggttctaagacaaagaagagaaccaagatttcgagaaataaaaaaaaaaaaaaaa

SEQ ID NO: 97 - DNA, 562 bp, Canis familiaris
tacaacgactgcgatacttaaggatccagtgtctgttttattcagatcaaaaacaaactaactgacaaactactgtaacactacaatcctacttcggaacgagtccggcccactccccgatccctacttactctttaatccctagacaattttacttccccaacgtctagaacttggacacagacatcatcctcatacttcgagaagagtctcaatatcgttaatcggagtcaagtctagattaaatccttagaatccgaaatttggtatatatttacgtataataaaaatttattccccacccagaaaaacccccaccaccccaaaaatttattaaatactgtaacacacctcaccaagttttgtaaaatctactcaaatatatgtaggatttggtagggaattgttatcaaagggaaacgaccaaattattccaaaacgatgtcttagtgtttagtcaagtctagggggtgtaggaagtcttacataaaaccacaccaccgatgtatctatttccaataaattcggagtcaaagagggaaaaaaaaaaaaaaaaaaaaaa

SEQ ID NO: 98 - DNA, 612 bp, Canis familiaris
tgttaaactcaggcctgtttctctttcacattgatcttctggatgtgtgtgtggtcatgcctcagactgagtacgttctggtcacgacatatttaattttcgtaagagtgacgtgtcgggtggggtcgggggccgtggggtggagagattggtgtcaaataacctttgtatatagatgttgacggtatataaatatttcttgagtatcgctgttgtctctatatatatatatatatatatatatatatatcatttatcatatatatcatcatttgtcgatataatatagagtttctatttgtgtctttttatatatctaaaagagaacggacacaaaaatatcacacatattgatagatatgtaatattgttgttggggttttttaattttaatatttcttatggatttaatttattccctcgtagtctttatggctaataattctcccccaaaaacatattaagatgagatgtttctgtgtactagactttttgcacatattggctactagatatttatttttaaagaagaagaaacaaatagacatatatgttaaaaaaaaaaaacgattttctattaaacaatttaattgtcaaaaaaaaaaaaaaaaa

SEQ ID NO: 99 - DNA, 572 bp, Canis familiaris
cttcggcataacctggggacataacgatctcacatcaaataatcaaacgctcaaatctgaacagtagtgattagttagatttcttttttataatgtaccagttaccctagcatacctaatacaagggatctttttggaaacgagtcttttgaattttttaagccacataaatcgagtctgacgggatgtcagagtgagtagatttcgtaactcgttactaagagatcaaaatcatcacatacaatcggacacgtcacgaacgccaatggagacacatcacattcacttggttcagcggtcaactctcctggctccacacagctgaggagatgagggaccacgttctgtctaggggaaggtcaccaatgactgtcgattttatgaacagtggaaccatttctatcgagattacgatttcacaacgagtccttggtaattaataatcttgtaaagttacacggtatatgtccagttattacaaagattactcttctaaaagatttattgctacagtagtttaataaacaggggacatgtattagggaaaaaaaaaaaaaaaaaaaaaaaataaa

SEQ ID NO: 100 - DNA, 631 bp, Canis familiaris
ccacacgatgtctgatcgggccccagtcgtcaattgtccatagcaatttcagcaaccctgtatgatgtttaatgccttgacctgtctgatgtggtagagacagacaacaaacgggatgttttgggttcacaaggcttcgaactcgtcacacgatcactatgtatcatcatattcaccgtcagctcgtcgacaattagggacaataggatttccggaagatgatgtagtattgtgtaaacccatggaggagcactcacgacactcggaccatcagacggatccagaatcgtacgaacaagcgttgtcacatcattcaggaagtcagtttcagcttgaatgcgagggcggaccgtctgatgagggaacacttcattcaaatgatgtgtcctcgacgacgtgtccattaatcaaaaggagactttgatggtgacataacacctaaacaacccaaattgacgggcgtcattttatttttacgttagtcgtctggtgatgacaacaaattcttcctggattctttaaagtagtaaacagacggaaatctttctaaattatgttagaataaagacgttagataacaaaaaaaaaaaaaaaaaaaaaaaaaaaaaaaaaaaaaaaaaaaaaaaaaaaa

SEQ ID NO: 101 - DNA, 510 bp, Canis familiaris
tggggcacaaagcacaacgaccaagaccacgaccggcgggtgcgacgacgggcccacggcgctcccggtccacgtatttcgctgcgcctgtcgcccccggggccccagcggcatcagaccggccgtggtccgcgttgcgggggctggcgcggcagcagagggggccgtggggaggcaccaccggggtccgacgctggcccggcgcctggtcggaggccccaccgggcctggggagaggcccacggcgaccggcgggaggcgggcgagcgcaccggcgacggaccgttctagggtgttgggtcagcccacggactcagtgtgccaggtcaccatggtttcatttgttttgtttaacccacatttatcgcccccgccccccccggcccgtgctctcgccggacctctcgacgccgccggctcccgagcccaacacgccggtcgccatcggacgtttggccccagacccggggcggctcttactcgaaataaaacataaacacataaaaaaaa

SEQ ID NO: 102 - DNA, 628 bp, Canis familiaris
gtactcgtcccggactactcggctggtcttgacgtggtcgtctccgtgggctggagctgttggggtgtggatcgagctgatcgaacgaacagccacagggtacaccctttcttacctcttggaaacggatacaaactacactgggtaatcacaggactggggaggccgccgccgagttgtaacgaactacgtgagtacatttccaacaccttccaaacaaacctactccacgacgggttcccacaaacggattgtgggccccggggtcgatgtggtcacgttatactgaactacggtgaaacagggtgaagcctgtcctggttccgatcattggtttttgaatatagcttttattttttctcgaggtgtcgtcatgatctcaatcaaacaccaagacgtccaacacgtctagtgagtttagccagtctgtctggggttagaagaaaagtccctcctggtcagggcagtccggtaggacgataatgactccaacgtgatttccccacaaaggccgtttaagtctttaaaactgagtcgttgagtgtgttaattgaagaaccaaaccaatcagtatcggaataaaagcttttgtgggttaaaaaaaaaaaaaaaaaaaaaaaaaaaaaac

SEQ ID NO: 103 - DNA, 659 bp, Canis familiaris
cgagatcggaagccaggggcaccggggttcgtgcgccgtcgagatggccttcggggcggtgcggcgggcggtccgggggccacgcgcgggtcgtggcggcgccgggaactggagagcgcatggtgggcctggcgcgtgggcggccggcagagggggcgcgcggggcgcgcggggtcgggcccggggcgagagagaaacggccccgggggggcgacgggggaccggggacggcggcgtcgggttgaggtcttgggcccaaaccgtcgctgtggcacggcaccgaaccggctcccggcccgaccacccacggcccctgggcggccccaccggcgccaccgtgcggcccggccggccacgggggcggcgggcgcacggctgtgccacgggcaccgtgtggttccgcacgtgtgcggtcggtgctggtggccgtgggcgaactgttaaagagtgagagcggcccacttgacgtgtataaatggtcgtggtgtttgggatatgataattaaaaaaaaggactaccccaccttttaagttttattcgcatttgtccacttcccgtcgccacgatatattaactttagcgttatcgcgtgtgccgccccaccctggtttaacaaataaaaatggatgttaatatggcgaaaaaaaaaaaaaaaaaa

SEQ ID NO: 104 - DNA, 628 bp, Canis familiaris
tatttacctcagagtatacaagaactttctaggaaaaacgaccgtcctaggcctggccaattgggcccatcggcggcgacggatcaacctgcacgtctcgactttgactccctagaacatttaggggccagatccgaccgcgtagcggaccaggcagcccaacctgttggactttgttaagcgaaaatcgcactgccggttggtttggaacaccaagggtgccgacatgaagtccagtctggtgtagacaacaaacgagaaaaacccagactgccaacaaattgacaacaaaacaagggcggctcgactgaaattggacacccggatgagtccccgatgtgttcgtcatataatccgtaacaccaatgacaaaggtcaacttaccaaccgtgaagcacaagaccggatgacccgtcggaaccaacgaaaaaaccgtaacgaacgatgtaaaaacagacgaatccgtcgtcgtaaccgtgggagaaaccgacgaggtaacgaaaacattctcaacggtctcaacctttggcgaggggcacttcctccaaaagcgtaacttttactccatgacatttttaaataaagatgtcagtgtaagtaaaaaaaaaaaaaaaaaaaaaaaaaaaaa

SEQ ID NO: 105 - DNA, 336 bp, Canis familiaris
gaggtccgtgttgaacttgtggattttccccacaaacggagttatctcctagcccgggggaattggggcgagagggttcaacaccattccctcgggaacgacaggaacaccatcgttccagatcaaacctgacgggcattgacccgttgtgacggaactcccagtagcagaacaatcactccaacaaataccacggtcggactgatggatgtcaaggtgaggctcttgtctttctgaggtggtccacgtgaagagattgagtccaaaggattatcttagacgaggactcgtaataaatcacgactgtagctcaaaaaaaaaaaaaaaaaaaaaaac

SEQ ID NO: 106 - DNA, 600 bp, Canis familiaris
aagtgaccattgccgaaacaaacgatccgaaaccccactcccaccaccaccaaccacgacaccaacacacacacacagtggtaacgccagtcgagaaggacgctccacgggaagataaccgttgattttaatcagggtcacatgatcagtcacgcaaatgaacactgacatctggtaaggaattcatggaggtaaccattgtgtcttctgtggtccactacctactggtggtttctatggacggagtttgggtattgttcaaatctccatgtgtgttgtgtagagatttttaggtggatcatttccatgacaaaaccgtcgttttgtttttcttggagttgtgacattgaaggttcacaacgtgttgtaccatcgaattctgttcgtgacttgtggaacaacaaacaacgaagtcaggtcgttcttgtcgttttttcggtaattataaacaaattattttccaacgtcaacgtcatcttaaatttcaaaggcctcgttttacatcttcctctttctcaattgtttaggttttcttggaaagaacaacagtaaataaatacgaactatccatcagaaaaaaaaaaaaaaaaaaaaaaaaaa

SEQ ID NO: 107 - DNA, 155 bp, Canis familiaris
agactgggatactggggttcccgggtacgacaatacggggtttgggatttacttcgttttctacaccaccaaccccgccccggacccatacgtctgactgaggacgggttaaataaacgacgcccatcgaaaaaaaaaaaaaaaaaaaaaaaaaa

SEQ ID NO: 108 - DNA, 501 bp, Canis familiaris
cggaacgaacttattacaaaaaacctccttgtgttgggggaaactccaacgggaacttgatgaaattaatctcaaccaattcgttggccatcagttcagggagaacaccgtattggagacatgtgtccgactccaccaactgtgttttaacaaaatactttaaagactttcttaaaattcttggctgttgtttgatttgtctaagacttcatatgtccgtctggtttttataatcgacactcacaagtttgggtaggctctgtcataaatcttctggaccttggagttcggaacaatctcttctggaaaatcggtctttactttttaaacatccaagtggagggtttcgttccttttaactatctatccaatcttatcataccagatactactactcctcctgacagaaatccaaatcctccccacagaaaaatatagatctcaaataaagtgactattttaataaactaaaaaaaaaaaaaaaaaaaaaaaaaaaaaaaa

SEQ ID NO: 109 - DNA, 569 bp, Canis familiaris
cagtcgtcagcgggctttagggttaggggggcatccgaaacacaggaaatcgacggcatggggggcgtcacaattgctggcgtgggcaccgtcacgacccgccccgtcactaaattggccgttaggatgtgtaggatgatggcccttactgatgggagatcaacaaatcaacatcacaattgggcggattaacacaatccaggaaacattccacgtcaacagggtaactcgttcgtttttcggggttcagggcatataatacacagtatgtcgattatgtatcgacgagtcccctttttattatttttaggttaacagctgtgtttttcctaatcataaagctcttttttataaagaaaaaaaaaaaaaacggtcctttttgtgaatagaggtttaaacctttttaaattctttgatatgtcctggacttcacatttttaacaaggtgatttttaatttctaataaaactttaggagttcattttttggaaaaactgaaggaagccggacgggggcgttaataaacctgttaaataattaaagaaaaaaaaaataaaaataaaaaaaaa

SEQ ID NO: 110 - DNA, 635 bp, Canis familiaris
  misc_feature (486)..(487): n comprises a, c, g, or t, or includes no nucleotide
gtttcatgcgcatcatctccgtttcaacgagtttcggggaatattttgtggaggaatgtgatcaccacacccaagatcgtcacaaagtcatcaacgtcgacaaggaagcacctcctgcaatgttggttgaccatattaacaaaggacaggctcagcattcccacaatcccgtcaatcgaatccactctcgattagagttccaaaacacgctcaatgactgagtagtccaagtcgagaaagtccggagtcataaaaatcagggggagttctctcagttgattcacagtgattaggtcaagcacgacctcaaatggatgaaacaattccctcaggatctaagggaggtcgcgagacatcccccgtggtgcgaatagatcgtgcatgcatgcagactactatgtgtttgagcgcgagagtctcccagagactacatactacacactgtaagggttaccgtctgttgggatacggcgaccctcagttggnntcctgaggcaccgactcgatcgatcttccccttaggtttaggttttgtataacttctaggcaaagatgtagttgtttgctttctatgattggttgaaataaactaatttcctaggggaaaaaaaaaaaaaaaaaaaaaaaaaaaaaaa

SEQ ID NO: 111 - DNA, 483 bp, Canis familiaris
gatggtggtccttagtcaactactctggataagaggacgatgacctctttcaaagtcaccaccaacccgatacttgtttaattttttataaaattctgataaaaaatgttcaggtccaagttaattatatgagacatctgatctttctattacttctcttccacttctagatttagacaggtttgttcggaattttctaaatttgactatcggtttaaaatacaaagatgtctataagaaccaaacctcaaaataatagtaatgggaatatctaaataccggtacggggtccggagcccgtggctttcattctttctaaattttcgtatcattaagtcggtagtctatttacatgacaacatgacaactgttgatctcgccatccctaaacgttctttttgtcaaatcgttaatacgtcacatcttcgtcggtgacaagatgaaaaaaaaaaaaaaaaaaaaaaaaaaaaaaaaaaaaaaaaa

SEQ ID NO: 112 - DNA, 622 bp, Canis familiaris
  misc_feature (18)..(18): n comprises a, c, g, or t, or includes no nucleotide
gtttacacatacaaaacnggtctcacttccacaatgtccgacattactacggacagatctccaagcatccgacggagtaattgggtattctggttgatatgagtgatcttcacaggtgacgtggacagtggcatagtaaaacctaatatccagtggctcctcgaactacggactcgtacgagacagaccatcagacaccatcgtcagaaccttggaagacggaaccgtaggtcgtatttcgaaccgtcatttatcatgaaaattatgtatgcatatcggttccctatcattgttacacaaaaggaaaaggaactccaaaaacgtacaatccaattgtgtcatgtagataaggagatttgtaacgggttcacttccttgtcccgaggacccatggatcaccctccctcctgaggtggttagctcgatgataggtaatttgattaactaattaataattggacgatttcggaacggttggaatagtgaattttaaaatcaaatcgattttcgtatagtattaaagtccgttaatctactatatggttattaagtacaatctaatgaaacgttgaaataaacttaatctcattctctttcgatgtcaaaaaaaaaaaaaaaaaaa

SEQ ID NO: 113 - DNA, 674 bp, Canis familiaris
  misc_feature (1)..(1): n comprises a, c, g, or t, or includes no nucleotide
  misc_feature (61)..(61): n comprises a, c, g, or t, or includes no nucleotide
nggagggagaaccctctggttgtagtgtgttcgacttgttaatcgacgtttctcccaaacntgtgtccctaccgaactcctatttcctgtcgtcgttcggaagggtctttggggggacccatcgtctcctgataaactgacaataagacgatattggcaatgtggaaacgtattctccggtcacgagacgtcaaatgtacgacactgtttgatatatacgtttacactaagtgttgtcgttgtttctgagtgctaattgagcttgtcggtttcgttgacaagatcacgacaacactggtgctcagcgtacttattattcgactgatccttcaaactgatttacccaaaccatttgaatataaacgtctccccgtcgttgtgggggattggtgggtaagaattgattctctccagttgtgtgatgtaaaaccttcctccgtttttcgttcccatgactcgtgtattgatctcttcgtcctgtgtcaagagattggtcttcgcttaacagttcaaacatttctacatctctcatcttgaccgaggaccatcgtaacacgtatcttagtattgttactttctaaattctggttttcataggatgttcttttgttttctacctataaataaaagagtcttcaggaataaaaaaaaaaaaaaaaaaaaaaaaaaaaaaa

SEQ ID NO: 114 - DNA, 681 bp, Canis familiaris
  misc_feature (529)..(529): n comprises a, c, g, or t, or includes no nucleotide
  misc_feature (571)..(571): n comprises a, c, g, or t, or includes no nucleotide
acggcgccagccataggaattgagagaccaagacgtatcaggatacggtatttactcagagtatacaagaactttctagaaaaacgaccgtctaggcctggcaattgggcccatggctgttgggcggcggcgacggatcaacctgcacgtctgactttgactccctagaacatttaggggccagatccgaccgcgtagcggaccaggcagcccaacctgttggactttgttaagcgaaatcgcactgccggttggtttggaacaccaagggtgccgacatgaagtccagtctggtgtagacaacaaacgagaaaacccagactgccaacaaattgacaacaaaacaagggcggctcgactgaaattggagcacccggatgagtccccgatgttgttcgtcatataatccgtaacaccacatggaccaaggtcaaaattaaaccaaaccgttggaagccaaccaaggaccgggattgaacccggtcggaaccaacgaaaaaaccgtaacgaacgatgtaaaaacagacgnatccgtcgtcgtaaccgtgggagaaaccgacgaggtaacganaacattctcaacggtctcaacctttggcgaggggcacttcctccaaaagcgtaacttttactccatgacatttttaaataaagatgtcagtgtaagtacaaaaaaaaaaa

SEQ ID NO: 115 - DNA, 610 bp, Canis familiaris
gtgtatggcgtggtttctgacgaacatctggggcgtacagatcaaccagccgttggtcggttggaagtacggcttagaagtggattagtagcacagcgggagtcccatgaacctcctgatcaatagtcagttccctctgccagggatggcacatctcgtcgatgatatgtagacgcgcgtctatctccacgtcctcctcaacaatggtgtctcgggcgtcccgggaagtctcgaaactcacgtgttggcgtgggccgtccagtggtatctggcgtgtgtcggtttgttgtgtcgggcccgtccgtcaaccaacgatggtaggtgaggggtgaccacaatgggtctgtaggtccccggattggtaaggtctttgatctcacccgggggagtcgatcggggtggagggggtggacgtggggacgacgggtggtccccgaatccggtagacgggagtgacctcgggtggggatgacaccaaccaactctagaccactgggtagaggtggagaggaccgggtgtggacttttatggggtaggtcctcgtcgaaactagacaataaagtttctgagggtgtcgaaaaaaaaaaaaaaaaaaaaaaaaaaaaaaaa

SEQ ID NO: 116 - DNA, 603 bp, Canis familiaris
aagacatttgagagacccaaagacgtatcaggggttaccggtattttacctcagagtatacaagaactttctagaaaaacgaccgtcctaggcctggccaattgggcccatgcgcctttgactgcggcagatcgacgtgtttctggcgcgggaccacgtagagagggtgcacctcaggccggaccacagcctgcggggaatgaaccgtgatctacggtgcgtccacccgatgcggggccaacatgaactggtcgtggtccgaccgtgcggtgtacaccatcaccgtagggtacctgactctccactccaccgtgtcaggagggtccacctacggccggcgatcgttccacctaaactggatccttgggtccgggctcgtcccaaactaacacccgacagtgggaacctccggaaagaccacaaaaacaacaacaacagaccggcacggaacgcagcaatcgactagaaggcagcgtttctgaatcttctcgggaggtttccgaacaacaacccggggatcggagtgttaactggcttctaatggtccgtgtggggaataaacggagttccttgactgaaaaaaaaaaaaaaaaaaaaaaaaaa

SEQ ID NO: 117 - DNA, 677 bp, Canis familiaris
  misc_feature (160)..(160): n comprises a, c, g, or t, or includes no nucleotide
  misc_feature (409)..(409): n comprises a, c, g, or t, or includes no nucleotide
  misc_feature (416)..(416): n comprises a, c, g, or t, or includes no nucleotide
  misc_feature (447)..(447): n comprises a, c, g, or t, or includes no nucleotide
cgatggcgcacgcggtgtccggcgtcgtccacgaccgggcgcacgcgaagcggaacctcccgcgggtccggagcgacggcgtcgtgcacgcccggcagcgggtcccggacgacgtcgcgcccgacgtccaccacatcacgacggcccgggcgccggaggntccaccacatcgcgcacgacatagaccacctcgccctcaacatccaccacgaccggcaggacatagcggaaaaccggcaccggttggaccgcgcgggtgaacaagatcctttgtcacgagggtgcggtctcacaccaaagagtgcatgagcggcggggagcgtctctcagtgcgcgcgcgttcgtctctctctacacaaaacacactcttcgtggaagacgacgcggccaaggctagagggagcgcgtnccttccncggcggagggaggagtagttgggggaggganggtggtttataacgcgtgcttctcacccacagggatctaccgcggggggcgaattgggagggttcttcccgggggggggaagtggttgggctcgggggtcggtcgtgggaggccggtggaccaccggtcggggtcgggggacgtctggtggtcaaacccgggtacgttaataaacattgaggaacgtggagacgaaaaaaaaaaaaaaaaaaaaaaaaaaaaaaaaaaaa

SEQ ID NO: 118 - DNA, 495 bp, Canis familiaris
tctcgagttttcttgtcagggtcaatattttaaaaacgacctaaggaaatgggacaatctccccgaccttttaaacatcagttcaaccaagtcagtaatccaccggacaaacccaggattaaatagataatttggtcttgacggagactacttacatcatgttgatgtcaagataattaaagtttcaaaacttttactctctggtgacaccggaatgtagcgtttcagatgtaagacaacgggaattggtaatcgccacacttcaagtcgactttaagcataggtgtcgtcgagctcagggacatgtctaggatgtgatataggacgagacgtaattttatcgtacatcttttgatgtttatctatccgaggaggacaaaaacctccttttgtagtataaatattcaattaaaagttttaattttctataataaattaacagtggttacaataaaagtcaaaaaaaaaaaaataaaaaaaaaaagaaaaaaaaaa

SEQ ID NO: 119 - DNA, 628 bp, Canis familiaris
ggtgtgtttgtgtaacccgaacagagaccagaggaactcttttcgacctcatggtagttatttaaacagtcgtagtcaagtttagttggaaaacccgagcccctcaaccaatccttcttcaccggtggttttatggatgggggagggtcaactcctccttactatagcctagttcaagacattaaatttgaacgaaagtcgtcagacccgtcccggaccaggaaactaggtcaattgtttttggtcaaattgtttgtggatgttaaattgattactggaggtgatgtttgaattgttgtctacttagggtagatccatagattttaaaccaggagttcggtttgattgtcacttcaacacgtagggaacctggggtcacaattatatgggaatcggacaaatcagacttttctttatcaggacctgaggagattacactgggaatctggatcacgtcaacatgtcatttgacagaaggtcatagaactttaggacggttgtttcgtatactcaaccggagtggacggaggaggtaccacccgacacgactttcacgaattgtatgggaaacgaaggagggttgtttgttaccggacgactaccgtctggatgttaggagaaaaaaaaa

SEQ ID NO: 120 - DNA, 650 bp, Canis familiaris
  misc_feature (494)..(494): n comprises a, c, g, or t, or includes no nucleotide
ggaccacaggtgactgtaacatttcagagcgcgagaggaaggttatattccagttgaaattccaggaaccacggaacgattgggacggtattggtaaaccatccagaacgttgatttataggatatgtccaaatctctatattcccggtcatcatcgcgaagaaaaatacaaggtgatgagagacgactctgtcccccaacctcagactctggacctccacaagaaccatggtcacacaacggagttgctcgtaattcgtccccacggattaacacaaggccttctggaagagcctggatttctcatcaagagggaagcaacacatttgtgaccgtattgttcatttgacaaatcgcaaaaatccctttcaaacacgggaaaggtcccaataggaacattcccaaagtacccggggaccaggcattgttgaatcggtttttaacaacttttccgggacttctcggatgctggattgacgagattcactttgganacgtcagtcacggcctcgttggaaacgattggagagtaaactcataagatctcataagctcgatttctacgaaccgagatcacatatttggtcctcgctcgaaataaaggtaattcttcgttgtttaaaaaaaaaaaaaaaaaaaaaaaaaaaaaa

SEQ ID NO: 121 - DNA, 675 bp, Canis familiaris
  misc_feature (93)..(93): n comprises a, c, g, or t, or includes no nucleotide
agctaatatttgtatattaaacgttaatctcgtttgttaaacaattcggaaactctaataacctgataagtcgatttatgataaagggtaaanatctagagattgtacttagtctagattgccgtctaagaaccgttgtccgaagtctacatttactttcatcgtcgggaagtcgatcacatagagggtagaagtaggaattaaaattgtccctgacagtttctgataatggtccagttcatatacgtctgtcaactacttcagaattttctgttttaatttggaggttccgttatctatgacatcagatcacaggtctctatcgtcaggaagtagcacaaagtttagatacgagtcaacacaagacaggtaccattgaacgatctcagatccaatttataagcaacgaagtcgttggataataatagtcatctgaggtttgacagagacctattccaaggatacgacaacttgtacaagtagaagttatctagagaggtacatacactctgacttaaatcaaaggtccgttgtaaatagggattttgtggaagtctattcgattttcgaatattagatgaacgaacggacaactaaataatcttgatttgtttgatggagaacgactcgatcgtactgggtacctcaaaccgggtcgttaaaaaaaaaaaaaaa

SEQ ID NO: 122 - DNA, 631 bp, Canis familiaris
ccgtacaggatgagggtccacctccacggggactcagaggatgcaaaatctcaaccggagacattggaccataaacacccggatggggcggtcaaggacgacaccgtgatgtttcgaccgaacgaacgttccaaacatccggcggagtgtttgtcaattaggagatggaccaaaacactggagttgtgggaggtccttgggtccgcggtcaccccgtcctattcggacatgtttgctcaaacaggggtcagtccgaacaggatgagggtccacctccacgggactcataggattcaaaatctcaaccggaacatggaccataaacacccgatgggcggtcaggacgacaccgtgatgtttcgaccgaacgacgtccaacatccggcgagtgtttgtcattagaagatggacaaacactgaagtgtggaggtccttgtggctgtcacccctccgtcttaattgttgaatgttcaattgttactcgggaatcatccgattcgtgtcgagtgtacggatttcggggaatttaactttacaaattaggactttgactaacacgtcaatgagtccttttgtgaatacgtcttggaaatcttaataaaacttttcttcgatcctacgataaaaaaaa

SEQ ID NO: 123 - DNA, 586 bp, Canis familiaris
ctctagagacagtgtggtgtcgcgtagctccaggattcggactgggtttcgaagagagaaacccacgtgagtgactccctgtcatctcctccatcgtacgggcccaactggtcgcgatcgctccgagggtttgggctcacgagggatcccaactgatcggtcatgtgtagttgtagagcacatggtcaacacattcaaaccaacaagaccgtcgtcgtcaaaaccgtctaagtaaccaccaatttgaccctcaatccagccgtgggacgtggtcacttgagtcgtagtgacggtcaacttcgacagtcctgtcaaccgctcgacctcgggtgtctcggtattgacggcttgggtagtcaacagtccacgcgtgacgggcggggtcaacattcctgtcgacgtgggggtcgtgaccggggtcaatccctaccaagagagggagtcactccttgttaacgtcgttgttggaggagcaaccacaggaacaatccacaataaccttcaggccacaaataaaagagcttttgtaaaacttgttataaaagaaaaaaaaataataaaaaaaaaaaaaaaaaaaaaaaaaaaa

SEQ ID NO: 124 - DNA, 554 bp, Canis familiaris
attggaccagcccctcgaggaacgacatgtcacgcgttccgggagactaggaggacatgggtgacaattcaaccaccgagtccctacgagtaccggagacttgcggccgacaacgttgacaagggggtcgggactaacctggacctccgcgagggtctcctggtcactgacgtgcttacaggtgtcgtgggggcccgacgtgaaccgggggacggggaactccgacccgggtctcgtacttacgtcgggtgtgggttggggctcatcttgtgaaacgttggttacaattcgtagacaacggacacttcagatgtccaagggtcgtcccaagggtacgtgtctaaagatctaattcctgggaatgattcgtttgtgaggtgagttggggggacgatgtccacggacctgtctgtatctaataatgtgagacctctgggggccggacatgggggctccttttatctcggacaataaaaaccggtggactcaggggataaaaaaaaaaaaaaaaaaaaaaaaaaaaaaaaaaaaaaaaaaaaaaaaaaaaaaaaaaa

SEQ ID NO: 125 - DNA, 554 bp, Canis familiaris
tcatcctcggggaccggggcgtgatccagacatggggagagaccatgaggtccgtgacaaggacgtgggacaccagtgacaagtgtaagccccgggcatgcaagtgtccccgggccccttcatgtcccaggggcagtgacagcttcctaaggtaaggaccgacatggaccagtagatgtcacggtcttgggcaggtcccggtccaccgggcatgggggtgtcagtgcccacaactggccaattcggggccaggggtcaaccccggggcatcctaagacatgtccaaggtgacggtccggacatcgaccgggtggggctggggggcaaacacccaacgggggtctggtcccggtcgaccatttccctggtcgggggtacgtcgagtcagcgtcggggtttgtgggtcggggagttggggtgaggtgacgtggccagatggcccagttatttaaagtgtcttcggactcggataaagggccgggcctcgggggggtcagggacaaaaaaaaaaaaaaaaaaaaaaaaaaaaaaaaaaaaaaaaaaaaaaaaaaaaa

SEQ ID NO: 126 - DNA, 561 bp, Canis familiaris
aaggaaggaaggaacttggataagctctagacacggtggatagggatacggtgttgagtaaaaaatggacaactggggggctatgatacatgagtgaatggggtacttggattaaagtttaataagtaggtggaggtgatgatggttgaaaatatacgaagaactgaagagattgacaaggaggaagggctaataaaacggcgtacaaggacgggttatttcaaagtgagaggtgaccctatttcgtgactacggatacgactttctataagggaatagtagtaatataggggccaataaatttaaaatagtatgaagggtaaaaacaaggggggaaattgacaaggatgcgagaagggatgggaggcgtaataattacgagaacgggaggataaataccacatcctttactccggaaagggaggaaagtgatgaggaaaagcatagttaaaataaataggatctatcttatgattattggtagatccaatttaaggatcagtaatcagatcaaaaatgatgcttctatttgaagtataacaaggattaaaaaaaaaaaaa

SEQ ID NO: 127 - DNA, 655 bp, Canis familiaris
  misc_feature (288)..(288): n comprises a, c, g, or t, or includes no nucleotide
  misc_feature (337)..(337): n comprises a, c, g, or t, or includes no nucleotide
gaatcggagggaaataagatcgaaagaactgttgtccatgacagtagtcctccttatgtcctctccactaactcgattaacgatcgtcagttcgtgatgagttttctagaactcccaattttccgagacatatactagaccaaagtggattccaatggtcaccagagaaccttagctcgttgagatcatgaggaggtcgacgacaatcctgtatctgattgtggttgtttccttttttggtcagttagatggctcattttgacaaaatttgtttagctctccaacggnatttagatccattaagggtgtatcagagtcgtggttcgggccttaaganatcaagcaagagccgtagtttgtacacatttatcatcaaccaatcaaatatatgtctcatcattatcattgtgacccattccccatatcttgatcaaacttggttattgtcgtggcagatttttaaggacttaatgaaccttcagactcatagtcatcaatagtcataatgaacaaatataaagaacggatttcataacttagtttgaaccgtatgttgaacaacaggatctaaaaagatatatcgggatagtttttttttaatgggacaaaataaaccgaaccagtaaaaaaaaaaaaaaaaaaaaaaaaaaaaaaa

SEQ ID NO: 128 - DNA, 591 bp, Canis familiaris
ggtccccgtcgggctatttccgggagaactagatcctcaaaacgtctccggaacatccttttgagatggcactgccgtggatgggttgggatcttatggctatgaagagacatcttctggtctcgtccacgtcagaccgtcgacagacctatcgcacctcggtttcccaacggggacccgaggactacggaccctggaggattccgggactgatgatctggatggctagggacgtcgacaaggaccacgatctcattcaccgggtagcgacccgggacttgaacttgggtccggcggacaacatggagatgtgggacaactccccgtttagtaactttaatcgccagcaatttcaacatatcctccggcaaaacgccgtgatgggacatccgtctcccctgaaatagatgggtaatgctccggggttccagaaatccacccgtgtggagtgatcacaaggttcgaggagggcaagggtattgatcgggggggataaatggtcgttggtctggaaaaaaaaaaaaaaaaaaaaaaaaaaaaaaaaaaaaaaaaaaaaaaaaaaaaaaaaaaaaaaaaaaaaaaaaaaaaaaa

SEQ ID NO: 129 - DNA, 558 bp, Canis familiaris
  misc_feature (319)..(319): n comprises a, c, g, or t, or includes no nucleotide
  misc_feature (384)..(384): n comprises a, c, g, or t, or includes no nucleotide
aaacgaccctcgtgttggtccgtcgtccgttttatcaaaacaaatggacgaaaatctattttctcaaacatgggtggatgtcggacactggactcccatcccacattttcgtagatcttgagggggggggatgtagcccaaactaaatattttttaaattaaaggcttgtagttacgtcgggacatcgttgtcaaaatccgagttttattaggctttgggagtattttttaaaaaataggagcttaagggttcactcatttgtagagttgatctcaaaattatttatttattacgggagcgagggagcatcggagtcancgtaattaatgtctcaattgggttcggttgtctttcgggaggagctgaagtgagttctttaaaancgttggacaaggagttgacgtcttcctctctaaaaaaaaaaaaaaaaaaaaaaaatcgattctattcatttctagtcctacttgctaaaatttaattaaaagggaccagatcaatccaacctaagattccagacgtaataaaatatcatttctccatataaaaaaaaaaaaaaa

SEQ ID NO: 130 - DNA, 607 bp, Canis familiaris
ccaaatgttacaccacccgtcattgaaggtccgggaccctttaaacaccagagtggtctcaccgatttccagggtcaacaaatcataacaccactacatcacttccaaaccgttacccaacacataacaacactaacaaagagactttctcatcatcgattccaacgaaacagattgagctacggctggttatggtctctcgtttaccggttcaattgttttttctgtcatattaaaatgtccggggtcgtttgtttgtcttacgcttttgtcatctatgtgtcagggttctctttagggttaatgatgtcctcccattttcttttacctacgttgggttcttagggaggatgtgagtccattttctattttcagggattggacacctgtctttttgaattccaaactttaagatatttcgatccaaatatattgattgtatattctaaactaaaagacaagaccttagacacgactatatttactaggacttgagatctaccattaaatggggaatttctctcgctctctctctatagatagatagatatatgaaaatttcagtcgttaaaaaaaaaaaaaaaaaaaaaaaaaaaaaaaaaaaaaa

SEQ ID NO: 131 - DNA, 632 bp, Canis familiaris
aacatttgatacgtggctgacgtgctttatccggcacgacacaagggcgtccaagtttaaaataggtacaactttgacacaaaacacccggaaggttacccccgtcaaccgggatcttgggacgggcctacatggatctctacaccagggttaccgggcttccggggctggtctttgaccacaccaccgacatcacattctacgccacaggggggggtggtggaccaaaccgccttagttgtggtgagggtcagtttttttgttctggattacgtaggactaagtctggtaggttcggttctccctaggtcgttatctataaggaccaaggaccggatttcaagttttcaaagtaaatctcattaggggttgatcgggagacggtgatgaggagcgcaattgtcctctcttcctcgtttgctaataacgaggtttcctaaaatatttataaagtcacgtgcgagattgggcatccaggtagttttgggtccatttttccgggctgtacatattctaacccccaccccaataatgtaggacaatatctgtgtaacgtaacaaatcgccatttagggattaaactcatatatcgacaacgctcaaaaaaaaaaaaaaaaaaaaaaaaaaaaaaa

SEQ ID NO: 132 - DNA, 514 bp, Canis familiaris
  misc_feature (71)..(71): n comprises a, c, g, or t, or includes no nucleotide
  misc_feature (130)..(130): n comprises a, c, g, or t, or includes no nucleotide
  misc_feature (137)..(137): n comprises a, c, g, or t, or includes no nucleotide
  misc_feature (149)..(149): n comprises a, c, g, or t, or includes no nucleotide
gacgggggaccgttcgttaccgcatggtcagcaataccaccaaccgtcccccgcgtcacaaatcggaaacncgtgaccaaatattgtatagaatgggatgttggggacccctttccctcatccccgagcncttaggnacaagaggcganaccaacgtttcggaggaaccaaagacgggatcccttgtggtcactgcccgtcgcgacgggacaaggggtccggagtcgcgggacgaccagaccgtctcggaagaccacgggacgagggacggtcgaccaatgggactctcggtctgggtcgtccggatccgtcttccgtcggactttttcgtcatagacctaccatcccaatgttgattaatatttcagtttaacaacttcctaaccatatattttttttctgtatcttgtctttgaagttatctacattattataaattcatctaaaggagctcacaccaaaatcttaataaaaaaatcgaaacggggagatttccgagagaaaaaaaaaaaaa

SEQ ID NO: 133 - DNA, 683 bp, Canis familiaris
  misc_feature (60)..(60): n comprises a, c, g, or t, or includes no nucleotide
cagtatctcactgcacagcggtccggaagacgaccttcgggggggctcgtttcagtcagngaccagacatccatacatggtgacggggacttctcggcacatcgttcttgtcaacaccaaacctgagacgcaacattgttttggctcgatctcgagggacggtcctcccaggccctggctgctacatctgtccagctgacaccaacccgaatccccgtcgtcaacggacgacgattgagaggagactcgttgtgttgggcaccgtcggctggggccccgtgatccacgcgctcctcggtttctcggcgggccccgtgagtcggtgaccagagccactggcaattccatgtggttgctcccctcacccgagttgtctgagacctcatcaaacggatgtcacatagatgccaaaacgtcgtctagagttgcgatatccgtcgtgtccctatttgtacaatgggacccacggggacacgttctatggtcccaggatccagaggctgtcatatcgttgtgtacatgattggacaaacattgtcgaccagtctcttcattcatacctgtctttacatttttgggaaagcttaatatcgggtgcttaaaccccgaccctaacaatggtagatctatttatacatctgcatccatgagtaataaataaaataattaaaaaaaaaaaaaaa

SEQ ID NO: 134 - DNA, 588 bp, Canis familiaris
  misc_feature (506)..(506): n comprises a, c, g, or t, or includes no nucleotide
tcaactcgatgatgatacgagggggatcccagtggaatcacaggatggtggtcaaggcagaggttgtttcacagggacagttcactccttggctgcggccgactggtttgtatgaccgatcaaccaacgtcgatcgagactgcacactggatgggggcggtggtgtcggtccgggtcggcgggtgccacggggtggtcgaccccctcgcgtgaggacgacgagcgaggcagctcattaatgacgtcgctctatgttgggggcagtggggggcctccttttggtctgtgcagagactcccgtgacgaggtgctccggtggggttgggtgacggcgggcagtcagggatccttcccccccccccctattgttaaaacaatcttggccgtggggtcggttgggctttttactgtctttgacatgttcacgaagtggcttgaagtctatttatttttcatcacaacagtggatttaaaatttttgtgggcggtgatttgagtcctccgtngaaccattttaaacaaagtttagtgttatcaaaaaataacaatgggaagtgaaaaaaaaaaaaaaaaaaaaaaaaaaaaaaa

SEQ ID NO: 135 - DNA, 658 bp, Canis familiaris
tgttcccgttgcgaccggaaggtcggacgaggaaagtcgaaacgttcgacaatgtgaaaccggtgttacccatacggtcgggggttccgaccgactgtgtggtccgtcggttggtaccagacgcgggggatggggaggggggaatgggactttgtctggtttggtgcattttacctccattcgttccaccgacaacgacggaaccaggcatgggaccgagtttgtctacgaaataacgtctcaatcctcagctgggatcgggttgttgtccgactatctcggtggtgtgtcaggactttccacctcagtcaacaaaccgccccctgatcgtcgtcgtcgttgtcagggtggtgtgtccacaccccgaacaagccacggtcctgacgctcggagatttgaaagggatcgaccgatccccaacgcagtccgagggggttggccggtgacacgggtgggtcgaatcaacttcccgaccacccaacaccggggacgattcccctttccattgtacaacccagatcatcagtgtctaaatctggggggccccccatacccacccatatgtactcttgaactcgacaaatgttgccgtttcgtaggacttgtctatcatcaaaaataaaacttgagtcaccttttcttttctaaaaaaaaaaaa

SEQ ID NO: 136 - DNA, 548 bp, Canis familiaris
atccgtttccgtaaggttgttgacattgacgctgatcactcattaggtcctaatcgttaaccgaattgcgattttcctagaccacgcggtcagatgaacatcgacttcgggaacgaaaggaaagaaaacacccgttcggtcttcgattacataaagagattgttccttttcagagaccacatcgacttgttaatcaacgtcgtgaaattgtcgcattcgtcgatatacaacacgtgacacacgtagacagggaaaattaatcaacggatactacgtcttgaccgaattattcgtcatggaaacagacaggagacagtccctaaacttccaacatcaagattttaccatttgacgttgtgaggtcattactagaattcccaaggatctagcgtgtccgatctctttccaaatgaaatctgagattttgaacccaacaatggtacaaaattcagtatcttgtgaacatttagtatgattctttttttttttgtttaataaacttgaccaaactccaaaaaaaaaaaaaaaaaaaaaaaaaaaaaaaaaaa

SEQ ID NO: 137 - DNA, 643 bp, Canis familiaris
aatgaatttaggtgtccacgtttccctgttgagatgtgtaaatcccaacggacggtggatgttcgaccctcacgttcaaaatctagataacataataaattcaacctcggtctaaatcggaagagagaccactcttctccaacagtcgagtccggaggacccgcctgtcggaacccgctccaactgggacgacaccgagacgagacacgatgacttttagtgacacccaaccaaatcttttattaaaatagaggatgatccaaacaaaaagtataggatgattcaccacaatctaaaattgagatgtattttaacagaaaagtacatcgggtgaaaatagtttctcgtcagaccacctcggttgggacggggtacacctctcttgcgttgtggtctgaattcaacccaacgtttccaacccttcccttgggaacaccggttcgtcctgatctccatcacaaactaacgagggggagtgtgcgtcaccgtccaaccttctccaccatcttttgactccactaacacccttgtcaattctccaactttcctccccaccttgtcaaggtgtctaaaatgacaaggaagtcattcgcacgttgtctaaagatgacttgaaacagtataatttaaacgaaaaaaaaaa

SEQ ID NO: 138 - DNA, 650 bp, Canis familiaris
atctatagatacagagacagaggtgtctcttcaacccggtaagcccttttcccactatgaagtcctgggttatgtgttaacctcaattgtttcaagcgtcttgatttaggaactcatggactctctggtttgtcttaactaacagtaaacactaaaccgccccacccccggacggtggaaatcgacggagccatctgttcgtcgtcgacgggttcggggatgtctggggtcgacagacctcacctggtgtttgcaatcggaaaagggagtattgagtcctcgtcagcagatacaatccccttcacacaacatgacgccccagttgagattctgattgaaaaggttctctttttttatctttctccaaaaggttgaactcaatccaatcattcggttcgtcctctgggtttctccaggacccctcccaacaccccataagtttcagggtcatcctcggtccctcatctcgtgacccaacgttctgtgtcccccttgtctccgactcaagagtttggagtgtgtcagagtttatggtcatttatctgtggaccatttccattttcatttttgaaagctacgttcaaatttgaataaagtttcgtgtttttcttttgtaaaaaaaaaaaaaaaaaaaaaaaaaaaaaaaaaaa

SEQ ID NO: 139 - DNA, 643 bp, Canis familiaris
cttacaaccctttttacttgaaaatccattcgttgtttgtgtcaggtcccagttacaaaacaaatcaacttctgatgtaaatagaactttataatctgtatatatagacaactgtacatctgtacaaaaatgatcatcttaaaagttggagtcatccccgacctaccacattacaatcaattgtcaattcttagtaaaactattggatattttttagattcccccgaaccgaccccatcctcttaggttaggttctttcaccctctccttttgttttttttctttcttttcttttttaatttgatgagttcttatgtgaacacaggggcacggactcatggttttatggtcgtagactgtttgaccaagtttaaaaaaaaaaaaaacaaaaaaaaaaaaaaccaggcggaaaagttaaatgagtgttcatttgtttatttgattgtgtaatacttgatcttttaaaatatatatctatgtattgtctttgttccataagattttaggaaccatgaaaaaaccaaaacaaaaacaagtgtacaattgaaatccgaacatgtatagaggacactcaatttgttgttaagtcagaatctttaccttttaacgaaataaactaggaattaatctcaaaaaaaaaaaa

SEQ ID NO: 140 - DNA, 466 bp, Canis familiaris
gggagtcgacactgtccaccggtcagggtgcgactgacgtgttgggggttggcggggcacaggacaggacggctaccgacgatcacaatctcacccccgcgggtctcgggacccgtcgtcgaccaccggtccttgtgctctcgtactcaccgacgacccacgggaccggagggagtgaccgtccgtgttgtcccgggacaaccgggaccctgtttcggactgaaccagcttgtctttttcatacaagttttggactcatgtctatagcatccacctgtcacccacaccagctgttgggcgagggccacacacgagtccctgtcccgccggagtgggtctgggacccccatggacgggggcaccgtcacgcctcaacgggatgtgtcgagtgactcgcccagggtttctggtttggtcgaaataaactcttctaggacgtcgtaccctccgacgccgttccaaaaaa

SEQ ID NO: 141 - DNA, 634 bp, Canis familiaris
ttcttttgaacgactcgttctgaaaataaatatgctcaagtattttctcaatcaaatctattatcttcaaacgtctgacgacttgaaaaataacgtttgttttttctttcaacagaaactctattacatcaaagtcaaaactaaaaaaaaaaaatgatatatacgaggtatttcaatataatgtcttgtttaacatttgttatacggttttgactcggaaccaacaatgtgtctctaatattttcttctaataatccgttcgtaagaaaatagatcctaaaactagaaacttccaacatctgaacctaagttccgaaaagttcgtcgaaacggttcgacaatccaccaccgtgtcggggggccctctgtgtgaaggtgtgtagaaggattcggtcgtgtcacatctggtattcgacgaacgtcgaggtcccctgagtgtcttcccatattttcagtttacagtctctgagaccgacaaaaccacttcatcacaatccagtgttaaaaagtcagatctttcaatgactcgtacacccaagacattctcaattttctttagacgatggaatatttccattttttttgttctaaataaaaacaacttatttttttgtaaaaaaaaaaaaaaaaaaaa

SEQ ID NO: 142 - DNA, 594 bp, Canis familiaris
tgatttaataagtcagatacctgaatagtttttgaacgagttttatgtaactacagtctgattttcatgtcgaaataatccgaattttctgtgttgtagtcgaataattttttgatatttattcggtcgaatacgaagaagaatatttaaacatatgatgtttcattttttatccctttcggtgtactctttgaggattctagatcctatttagtcttcctttgtatggtttatcatattaatcatatttcttgtttttggacattcgtgagtttttaaaaattaacaatttatcttaaagtgatattaaagagattttggatattttatcatctaattatagatattatgttatttaatgtattttaattaattaaaaaatttaatatagtcaattctataaatacatatggtaatcttcaagatggttctaaatttgtaaaatcgtggggagttcctgattatattctttttaatatcgtctcatttctaatctatagtttcgtaatattttatttaccctgattagatacaaatcaatcattaattataattattaaacatttatttgaaaccgaaaaaaaaaaaaaaaaa

SEQ ID NO: 143 - DNA, 608 bp, Canis familiaris
tggagagaggggctgggggcataattgtgaccgacccactctgtttaaaatactaacccaatacatatagtgccctagttattcaaatccagactaataaagaaatcgttttataatcgtaggtcctttttatcaaatctgtcttcagaacgggaaattgtagcctctacgcatgtccaaaagtgatttggtcccattaagttgtgaacccatttaaaagaaaaaaacttaatctcccaaattacgtcgatttgagtttagtcaaactgtttcggagctctcatgcaattaacttctgatttatagatccaaacgagttccttttcccctttctcacactagctctattatagaacgagaagaccctttcgagtaaacacattctgattctacttcaagaatatttcccccgggaaagttaaaaccccaattgtttaatccgaggaaaaactgaataatttctgaggttccccttttcaatctttcgtttaactcttccgtatttgtatcttttataaaggaaaagacaatttggaaaaagaatcaaccaagggaaaataaatatttgtcgatttgaaaaaaaaaaaaaaaaaaaaaaaaaaaaaaaa

SEQ ID NO: 144 - DNA, 604 bp, Canis familiaris
aacacacaacctccttatattgctttcgtctcgggtatgtcggggctcctcaatccatgtagtcgctaccccaccagtttctcgtgtagtcttttacgagactgagtccgaaagtccacacaaggttcagacttgagcacaaccatctcattcctattcgagatgagggtgatgaaaaggtcattcgtaggtagactcaacatccagtggttaaagttgtcccaagggtaatttggagttttgttttaaaagttcgttcacacgatctagttaactcaaccgataattgatctattcgtttttttttttttttttaacgtaggtttttgtaacgaagtcacttaccgagaacaataattttctccaaattgatcttgaactacgacttagggttttttaaatatttttaacctattgatttatgtctttgtaattccccgagttaatctactgttgtaggtcaaccctcaaagagtcgtctttgtacaaaaaaagtctagtttcatttcaaatcctcatttaaaaactaggtggtcgactaaaaggcctcaataactactaaaaaaaaaaaaaaaaaaaaaaaaaaaaaaaaaaaaaaaaaaaa

SEQ ID NO: 145 - DNA, 599 bp, Canis familiaris
ttgattaacattccgcccatatgtttccgtttctgagagacttaaacagtcgagctcatcttgtttcttaaaatcagttcgaccattaactctcgttatctttaaataatggtcctacggactgtggtgatatatctagctatagtctctcaagagacacccaccacggtgtccccttcgcatttacgaggtggagatctggtgatcaagacgaagacccctcttttaggtcggtagagggccggtatgagaaatctgagccgatttcaaacgtgtgggcctttggtaaaaactcagagaggttttgaccacccgacacttttcggtttctgttctccctcttcgtcactcattgtgaacatggactacagttaaccagagctctaaattgttagaattgttccggtctaatttaagccggacacgtttcagttgccgacatcacccgacgatttgaccattaagatttttttgaagggtttcatgatctaatgtctctcagacagtccaatcaatcatcggtttggcaaaataaaatctgacgaactcaaaaaaaaaaaaaaaaaaaaaaaaaaaaaaaaaaaaaaaaaaaaaaaaaa

SEQ ID NO: 146 - DNA, 613 bp, Canis familiaris
atgtcgttcaatcacttcttcttaagttatgcttggtcctgggtttcgaactcaggggtcgacgtgagggattgattgagtgaagttggttgattgacgaccacctggtattagggtgtggacgtcggagtcggacacggacattgagcccagtggtcgaacccactggaccgtcgacggagacctagtcgtctccaccgcactgtccgtctacttcccacaagactcatcccggggggcggctgccctgtcggggtcccgtcattcctcactcatgggtcgccgctggcagagaccccggcacccacaggacgaccgccacccacaagatcctaacaactcctcgtgagtttgtggattgggggactctcattgtaggaccgtagaacccagacgggcaaaaggattctttcgacgcagtcacgttatctcccagagtgccggacaggggtcaaggagatacgtgaacggaacatgattcgtttagtttctatttagtagtctctcactgaattccttggagttgacctgtgtcgttaaattggtccgataaatccaactctctttccttttaaaaaaaaaaaaaaaaaaaaaaaaaaaaaaaaaaaaaaaa

SEQ ID NO: 147 - DNA, 575 bp, Canis familiaris
cgtaaagtcctccaacgtccgacagaacgtccagatgtcacacatgtcaatgcggtcaaggggaacacccatccctgtcaaagctgccctggacccaaaagttgcactcccgacgagagctcctcaaccccgtggacccaagaaagggcggcgtccaccaccgtgtaaacgacgtctttaaccacgccccagtcagagtgtcacgacccgtcccacgggatgcccccggcccaggggaaggttcgggtccggacaaaccagtggtattgtccggtttgccccggtgtggatgtgggagggtaattccttggacgggacctttgacaccggcaaccagaggtctgtgttgtgagtgtcaatctcttgtcggtagtaacgtcacgggtccattctccaaatgacatcgacgggctggattggtgatcgagggagtcgggtttgtggacaggtgtcctgtgtttcgtgttgtcgaggccggaagtggccggggtgacccagttcccgttgtccaaagagtacatgataactgatccaaaataaactcttttccctcaaaaaaaaaaaaaaaaaaaaaa

SEQ ID NO: 148 - DNA, 638 bp, Canis familiaris
aacgaccgtcctaggcctggccaattgggcccatcaacttgaggaacgtgtagcagcacgttcgtcgactggtaggaccacaacatcttgaagagctggtgggtcgtcaacgacgtcaagcacgactttacgtccctctgggaagtccgtaaggtgagtgaaactcaacagggattgtatgtggacctgagcagcctcccttgtgacagttgtcagtggaatcttgggctcccgttgagtaacctccttctcaacgtgtttcattgtcaggggatgagcctcatcatgggacaacgactgtggaccaagaatggtaaatttatccacagtctccgacacaaccgtggttgagccactatgtcggagaaacgagggcacaccaatcacaatctcaagaattcgttttgggaaataatcccaacccgtcaacttggtttcagggggaacatcactcgtaccggggtacacacacgtgtcgatctgaggaactcaggaccggttcggtgcaccgcgtggtctgtggtaagggacgtttggttggtgtccagtggcgagtctaagcggtagctttcgtcatgatcccaacaagtggtctctcggagtaagtgaataaaaggcggaaccaatgtcaaaaaaaa

SEQ ID NO: 149 - DNA, 685 bp, Canis familiaris
acatttaggacgggccctgttttctgtacacgcacgttcgctcaagagcatcgtggttgggtcgctgtcgaaagtccgttgcgcggaaggcgggcgatccccggtcgctcggggacgctgcggcgtttgccacacggagatgttccggatgacgcaccccgttggaggtcagggttgtcccgcacgtgtcggtgtatgatgtcggcgaagtgccccgttccagggacacgtgtggacccgggcgacaggggttggtctcggtccacttggaacccgatgtctacgcccatcggagggacctgagaccgccacattccctgtccccgagtcctccgttggtgggacacccgatttggtccaaagtcataaatgacattctcggtgtttagtgttccgttttcaagaaatgcatcttgagatgtcgcatcccgatccagtggagacccgacgaggacagggaacggtggtaccaccccgtagagtcacgggacgaggcccctctcaaatacaatttattctccgtgtcattatctagagctcacatctctgtccggacccccggaccgtccgatcctttctagaataaaaagatgtctcccggtcgtgtggagacgtcgaacgcgggaaaaaaaaaaaaaaaaaaaaaaaaaaaaaaaaaaaaaaaaaaaaaaaaaaaaaaaaaaaa

SEQ ID NO: 150 - DNA, 563 bp, Canis familiaris
tctcaaccggccggacccaggatggggacactggggtcaacgacccgagacatccttctggggcgaacgggggaccaaaggcaaccaaacttggtgggaagtccctgggccgtccagcccgggtgtaaacagactcggaaccttcctgaccacgtaacgcgaaaccactcgagtcgatgatctggggtccccctagggccgggtcggagggtgcggaaacgggtggtgaacatggatggtcaccgtgacacccggattcaccgcggaggggaccacggtcacgacaaagcgacgaacgtccaggaacagccaaaacaacaaccaacgttccgacccgacgggcgggggactcggggccgccacccccacgggagtcgacatcgtctgaccgggcgcgtggtctacgtggtctacgtgttcgggagctctgtcgggttagccgggctcaagttcggtctcagtcgtgcagggacccagggacggcggaagtcattttgattgtgcaagagtctataattttttggaaatggacgagaaattagttttataaatacaaaaaaaaa

SEQ ID NO: 151 - DNA, 657 bp, Canis familiaris
ttccgttcggaaataatttgtactacagatacactttcacacacaagctcaatccccatttggttcgttcttgtcaaatacgatcacacgactacatcgggttataccaatgagattttatcacagtgagcatcccttcgttcgaccggatcttgcttagtacttagtattggcttttatactcgcattggtgataccacttttgtacatcacgttttggactttttagtcttgaacgagtggactgaacgttttgagtggagtcaaaggagatctgaacctgacgactcatcacgacattcacacctggactgttgttggtagtccagtttgactggtcttccagacccttcagtacttgttgttcaagtgagtttcttacgtttcttgtcgacccatctcgtagtttcgtggtggctgtgttcgtttacttgtcattgttttttggacccatttcttgttacagctgtgtagagtgatttggttcttcaaagggaggttgttttgatccgtttaaatatttctcgtcaacatggaaaatttatatgtacggtgtgtgtggtcaagtgtacacttctgaattcgttatttcgtattttcatttccatatgtaataaagatgtggatgttaaaaaaaaaaaaaaaaaaaaaaaaaaa

SEQ ID NO: 152 - DNA, 629 bp, Canis familiaris
taggctgccattggcccatgtgattcgcctacacgtcgccggggccaccaatggccactgaacaaatgtgtcggagagaggtgtctgcagtcgtcaactctataacataaagttgatatttggaaatcccacagaactatcatcctcagtctagaaccagatgttgtccaatgtttcacacaaatccaatacctattgataggagtggtaatcccattctgtagagaccaacgtccaaacatcagaacatcaatccttttccaacagttcacgatttttgcccacgactctatcaaccagagtttaaccagaatatctttgatccaagtccccagatatagatttggaagtccccgaaactatagtccaaagttgaatcaaaataccctccaacctcaaccagaatatagtcatatggaaccagtacaatcctctcctaagtttgatttgagtcgtcgtggaccggtcaaagtaaacgtggagatctactatattgtcgattaaacttttaatctcctaagtcaacgttttacttataaacaaaagttacttatgtcaaataagttgatagagtaggtgtctatgataattttcggaataaaaggatgattgaagctgaaaaaaaaaaa

SEQ ID NO: 153 - DNA, 633 bp, Canis familiaris
gtccacgacaaaccagtgttcaactatgacggtgtcgcgtccattcaattcaccgggaatctggcgtccgactaactcttccaccgagtctggtagacgacaccgggaaatcaacggtcgtttggaacataagctcgtggacaaagaactggacgttgacctcctggtggacgaactgacaccactcacacgttttcctttttactagtgagaaattacattctcagatgaagtggttagctgagaaaacgtggtaaaataaaaaaaatcccagcggtccctccgtgacgccttcacgatgttggttgacgttaccagctcatgggaccatggaccattcactgtgcgatgaccgtgggtcgccccacggtcggtgtgtatctctctctgtgctcaataaataataaatatttttaaaaaattctgatgcccccatgggtccctccgcgacgcctttccgcggtcggtttccgggacccgcgcatggcccacagggcccatgcattgggagctgcccgtgggactcgatccacggtcgttgtgggtgtcggtctctgtgtcggtgtgtgtgtgtgtctcagtatgataaataaataacaaaattaaaaaaaaaaaaaaaaaaaaaaaaaaaaa

SEQ ID NO: 154 - DNA, 611 bp, Canis familiaris
  misc_feature (328)..(328): n comprises a, c, g, or t, or includes no nucleotide
  misc_feature (529)..(529): n comprises a, c, g, or t, or includes no nucleotide
  misc_feature (536)..(536): n comprises a, c, g, or t, or includes no nucleotide
  misc_feature (542)..(542): n comprises a, c, g, or t, or includes no nucleotide
tcagaacagtccccacaatttggctgtaatgtatcagaggaccctgcgtttcgtcttgatgccattagaggtcaccaccggaactataacttctcgaaactcacaaacatgtttctcccaagaaaaccaatgggtgaggtcctcagtgatcatcgtgcgaggatggcgtatggtcatggggtgatgaacctcaatcataggattgacattcatttccacagtccaaacattagccatttgatgaactttcatagtcctaatgtctctatcctcagtccacctcggaaggtcccaacaattcctctcatgaggaaggcacacacagagngtccttgttttcatctacttgagctcaaacatcggaatccgaagacgtttcggaagggcaagttttggaaaggattttccttattcccggaaacccgaagaaagggatccactttgtgttggggctccaaaccctatggcggtgaggaatcgtcacccaacacaggaccacagttccggacgggaaagaccacgagctccnctaaaantcctgngatccctcagctcattccaactgtttatagttaattaaacattgtagacgagcgtaaaaaaaaaaaaaa

SEQ ID NO: 155 - DNA, 603 bp, Canis familiaris
ttgggtcaacgagtgcatacgttttcattcccggcaaccgagacaccacgtgtacatgaggtcatgggtaccggtgtgattaccccgtattcattggtccttgcggtttggtgttccctgggataccttgcaatggggttgtaggtgactgcccactagttctggtggaatcctcgttgggttggtgtggttaatctcccccaacagagatccccgaatcgatccgcgaccaggtcggtgggggaaacgactgtagttcgtggagccacacacaagtccctggagctcggacactgttcgggtttccgggacactacggtcctgttgatccgtctatcccacagaactcggttgtgtcgttgttcttctacctcatcgtaatgtggttaaggaaaggtttctgggacggcgtaatgtcttgtaagtgtgggtggtgtcattgtggtcgtgaaactgtcttgggtcccaggggacagacgatcaaccaacatctattgttgggggtcccgaagaaacgtatcagcgcacccaccaacaagatccaacgatctcaataaaatacgattcaagagacaaacaaaaaaaaaaaaaaaaaaaaaaaaa

SEQ ID NO: 156 - DNA, 667 bp, Canis familiaris
  misc_feature (255)..(255): n comprises a, c, g, or t, or includes no nucleotide
ttccaaacaaatttctggtcaacgttctatgtcattatgaccgagtccatttctacaagttcttcgtcatgtctcaggtgctatggaacctaagtctttgggttcctatatctttaatacgggctagatatgtttcatttaaagggttacgagatcgccgtgcctgagttgagccgtcaccttcacaagaatctttatcccacacaaatggagtcatttccacaatggagaacaggatgcccttgttcatgtctngaccctattgatctctaacaggcggtattggaccatttgtgtacaccgtccgaacactgtcaaggacttctgatttgtctgttcggcctgtaagacccttcccaacctggcacggttaccagggagtttggtctgttagggaatcttttggtcggacaagaggctccctccttaattcggttcacttccaaaagcctttcgatttagaagtctaaatttattgatggttttaatttatctaaccttttttctagagaattgtgaattgttttaacacatcagaagaaattttccttttgtagtctgatctcacaagattaccggggacgaagcgctgattctctcaccaaaataaactcgtcgactaaaaaaaaaaaaaaaaaaaaaaaaaaaaaaaaaaaaaaaaaaaaaa

SEQ ID NO: 157 - DNA, 530 bp, Canis familiaris
gaaggatcaactatttttctaacagttccaagttgaaggaatcaatttgttgaggattcatgtctgcttagctcagttaggacaattagttaagagaagtaatgttcccagtagactgtgtctctacgtcttataatagtagttgtccgagtcaatcgactccttccgtttttgtgagaaataatcataccattatattcgtaacctcgtggatcgccaattattggttaaccgggaatatccaaatctttccatatggaccgatttctttattatctagtatatacttcctgataagaaatcgattcagacaactccggacgtccaacttggaatttattccatccctatgaatctcccttacgtattgacgacgacgtcataattttttacaatgtagtcttttgatttggcttttcttgggctatcaaagtcgggaaagttggtaatctctgtccgatctagtatgttggataaatctgattcattgtaaaaaaaaaaaaaaaaaaaaaaaaaaaaaaaaaaaaaaa

SEQ ID NO: 158 - DNA, 679 bp, Canis familiaris
cagggacaccctaccatcacacattcaagcacagccaccgggacaacgggttctcggggaagggaacccccaaacgacccgctggccaacaggtgggggagggcgacgcagcgagaaagaacggttcggttccgttatccaggtttgcgacttcgcatccatctttagaccaagggacggacactgtcggtggggcgtgttgaggggcgcagtcgaggtcgttgtgggagttaatgttgccacaccatagttgaaagtcgccagagcgcgagacaccggagtgggacgtggatgtcgtcggactccacgggcaacgggccgggcgtttccgggcaccgtccgggtacatcgaaccattctttgacccacttaaatgacaaccacaacaacggcgacaagctctgcccgtcaaccctgctctgcccgtcaaccctgcccgttcagttatggatttgaacttggtgcttgttgaggaacttcggacaagtcatagatgagcggcacccccactcggagcttcgtggtggacggccaaagattttttcaaaatctcactcctctccatagttcatcctcataaaggttctaaaacgaatagttaccaccgtcagttgtttgaattaaaagatctatcgaagtggaaaaaaaaaaaaaaaaaaaaaaaaaaaaaaaaaaaaaa

SEQ ID NO: 159 - DNA, 679 bp, Canis familiaris
atttagtcactgatgtatttgttcgtttgttcctaacagtgtcgataacaacctgtcgttttgtgttcttcgttcggaatgttcacccacgcgttttaggatactattctactaatagtggtacaatcacgttcccttcatatttcaacttttaaaattgtttccctttgttttataaacaagggaagacatattgttacagtgtattgtgggtcgggaaattggtacgttctaaattgacagaggttgaaccattacaaagagtagactcgttccaattcgttcctttaaacaacccggaaagggagtgttagaggtcatgtgattacatcctggtaattgggttggggttatgggtctgttggttttttaccatgtgtgtttaggtaggtgtgaggggacccatttttttattctataacaaacttatttgaattcttctcaatctgttatgagtggtatttaattaggagtgccgcgaatgctacgtcttcgattttattaaaataatattacatttcgtttcttcgaatttttatttaatagtaagagtcaagtctctttatctcttcgtgtcataggaacggtctttagttaaaaattaataaaagaaactcccagacttaaaaaaaaaaaaaaaaaaaaaaaaaaaaaaaaaaaaaaaaaaaaaaaaaaaaaa

SEQ ID NO: 160 - DNA, 633 bp, Canis familiaris
cttggtccaaaaagcttgacccctgaaatccatgttatccaatgtggtatgagtttctcactatgtccatcaacgaaaatggacccaacaacgtcttcggccatcatgggtatcacaaacgttcggaaaacatcctctttcacttattttggaaccttggaatgtttcctaagaccgtttgtcacaacagaaaataaccaacatccgtgtccggtaaaacaacaattagccaaccaattgacgaacgtacaccaccttgtcaggaataacaacagaagtttgtttcctcctaattgtgtttgtatcattcattaggtgatgtccgggtcctttcaagccgtccaacgtgtccacttaaatcattctctacaggagagtggaaaagttaacgtgtccatccgacggatcacacaacatggtcggctatgacgggtggtgaatcaccggaagagggttgcaccattggtgaatgtgtagttcgacaagacggggcaccggtctcagtatcccgtgtcatcccccgaacactgacgaatcaaatctgtcatattttgtttgagtaaatctgtcatattttgtttgagtaatatcactaaaaatcgcgtttgattttaaaaaaaaaaaaaaaaaaaa

SEQ ID NO: 161 - DNA, 636 bp, Canis familiaris
acgtcgacgcacaggaaccggtttgggcaacgtgacaatggttgcaacactcacaaaaatccatcagttgaaccgtcaacagtttgacatgcacccctagaatggtgagggcagtattaaaatcccaaatccgtctctaaactcgttttaaaacacctcatattgactgtctaccccttcagtcaatcgggaccgtttgagtggatttcgggtacacccaccaccaccaagtacctgaaaaatgtgtgctcaggacgacgtattattgattaagttataacatcttcggagtccgaaagataatgttctccgttgtgttactaagggaaacgtttcactttccttcagtgagtaacctctcaaactcggcactttcccaataaactgaccaaactcaagagtcaaatagagttaaaatatctagatcgatttgaatggctttttatcaacctgtcgcaatttgaacaattagagatgacgtcttaaggggaaatttcacgaacgtcaccaagaggacgattgttaatctagaattctccgtatcaagatttaaacttatttcgtttatatattcttataataaacctctctattcgaaaaaaaaaaaaaaaaaaaaaaaaaaaaaaaaaaaaaaaa

SEQ ID NO: 162 - DNA, 640 bp, Canis familiaris
  misc_feature (59)..(59): n comprises a, c, g, or t, or includes no nucleotide
ccttccagtcgacgactatcccacataaaagggaatctttctgcgaaatccaaaatttntacgatatgtacgatatcaaaggctccgagacttactccaggttcgtggttgttctcaccgaccagatcctaaggaaccgaccaccaggggtttacggatcggatttgtcgaaggttgattgactatgagaagtgtcgtcacccctgttcgatcaactggtagggacaatgtggtcacaagagaggtggtggtagaggaagacgtggatgacgtccatgagacgagtgacccaaaagttcgatgaccatgggtccccaatcccactcgtccagaacagtgacgtaaaaggaaagaaaccaaaacaaaaaacacgagtcgccggtctcctcttcaccgtgagacgcatcggatggacgggtcggagatgacacaccggcttgcagcgtagccggagaacattccgggggtttggggattgagaactcggtaggcgaccaatcccatccgttttgtccggtcgtcatcccagtctcagtctaagaagaccaaaccgaatcttatattaacctcatttgtcttggggtgtttccagaaaataaaatagaactttaggttgtgtctaaaaaaaaaaaaaaaaccc

SEQ ID NO: 163 - DNA, 651 bp, Canis familiaris
ttgactaccagacaccctaagattcagcagtgcgttgattcctccaaatcggtggcgcccaaccgggccacccgcaacctaggcaaacgagactaatgaggcctcttcatattctgatcaaggatgagttcgaccaaaggacgttgaggaaacaacggtagagacaactagatggaacattagatccaatggatgagaaccggaagttcaaccaagacaccgggacaaacacttaacggggtttatccagaccccgtcgacaagaaatgaacgagatggttcgtaatttgaaaaagtaggacttgtttattcctcaaaagatcaatggacatccgatccttcgagtggtccagtaggctcaccagcctctcaggggttatatcattttgtttaaccatcctttacaaatccaaaaatcttaagcaagttccgtcttaagtttccatctatgaggtcttctggtaagtccgtcgtcgtgttgatggagagaagaggaccagttacagaaatcccagtcatctgatgttcacgtgtttattttcaggttcatttatttccacgccaccgattctttttaacaaaaaaagatctgatctaccttctgtaataataaaaccgatttaaagtgaaaaaaaaaaaaaaaaaaaaaaa

SEQ ID NO: 164 - DNA, 611 bp, Canis familiaris
gataatgataagaacgtgtatgtctgtggctgaaagacatgttaatgggttattcgatagtggtgacttactgatatccgagtccttatgctacgccttgttattgaaagaggatcaacttatatacctcgaagacgtgtaataattcgggatcctttaagatggtgaatagtattgtcgttacggaagtgggattagctagcaatggatacggctagtataattgtgcgagcaccagttgaaagtgtggttggggtcaatacgacggtcatcagtattacgaacggtgagaaatgtccgtgtgggtggaagaattaatgttatgccacaagtatttctactcatatggtgattgtgatcatgggagattagtattatggtaataccaattaagattatgatgaggcgggtatagtgagtttatatattaatgaggagagaagctcctaaatattgggaggatcatgaaaaatatgaaaggatgattgagagcacaaaatcgggtaatcaggttcgaggtagtcggggtagtggtggtatgggttaagggtaaaattatttgtgcctgggatgtagtaaaaaatagaaagaacaaaaaaaaaaaaaaaaaa

SEQ ID NO: 165 - DNA, 603 bp, Canis familiaris
acacatacccgaatgtccaggacacacacacgggggaccccaggagacttatctgagtcgggacacgcctccccgttaaacggaagcgggggggaagaccgtgagtcttaggtatacgatgacaagtctgagatgtgctggggttggccacacgacccgttcgagtgttggggtacaagtagtttcaaccgaattacaacgtttctttgatttggggtccctattctgtttcggaccatccttacctagaagaaccagcgtttattacatgagtcacaacaaaaacggaaagggcgttgtgtcctatcaagatgtactttcacacgaacgaaaagactaccgttctattactcgtttaatccactagtcctaagatttttgtttgttcataccaatgtcgttatatttacggaccgttgtatttgatagggtgtgggagtagaaagtttggctcgacttaggtttgatttttaaacgaatttgagtcgtaaatataaattctatttctccccttgatacttatataatcgtcaacccaaggagtgtttgcttcaaacctcataatagttaaacaaacagtctgtggagactaaaaaaaaaaaa

SEQ ID NO: 166 - DNA, 565 bp, Canis familiaris
caagatcgcgtttcggaacaacgagaagaacaacccggtcaacaacatcgaccggaagaatcggaaccggatccgtcgcgctcgtcaccgtatgaaccgtgttctgaacgggaaccaccttaacgggaacatgggaaacccgccgacggcgaacgtgaatgcagttcggtagatgcgtgaggggaacgtgcccaaagctcgtgctcgggcgattcggaaacctgtgaccgtgtcggccggaaaccggaaccggaaccgtgaaaggaaccgggaccgtcgacgtcgcaggggccgtggccgtggccgtggccgtggccgtggccgtggtcgtggtcgtggtcgtggtcgttgtagtggtcgacgcgaccgtgggaaacctcgggaccgggggagaaaccggggactctacaccgttgtcggtcggactctcaccagccaaccagtcctatcaggggtcccgttgtctgtcgatcccgggcctctggtggtctcgtatttctagaaataaaggtcgccgaccatgtctgacaaaaaaaaaaaaaaaaaaaaaaaaaaaaaaaaaaaa

SEQ ID NO: 167 - DNA, 620 bp, Canis familiaris
gtggaggaagtcatccgcgttcgctctagggacagtctcctccacctttccgtcccagacggaggctcggttgctccctgaaatagcgagtctcccgaccaggcgcacgtaaccggttcggaggtatcataaatcggtcacgtgaagggtgaagctccgggtgccgaacaggttgagtccccctcgggtctagttgcccccggtgttgaccgcggctgacggtccggaccggggtccaactccacgatctcctcccggacccgatggtcgaggccccgccggacgtcgatccccgggccgggatcccgagacctcacgcgtccaaggtgctgatgtccgttgcccggtttctgtctcgcgaaggcggtctcggggatctccgcgttcggcggaaagggcaaggttccttcccagcagcaccacccgttgccgcatccgttgagggcgcaccacgggaggcgtctccatctctcgatcgtcagttcacggacctgcccggagctccccctacgctccgaccggacccgtgtcggtggtacccttccctcccagaccaataaagtgggtgacgggtgaccgagttctttccttgaaaaacaaaaaaaaaaaaaaaaaaaaaa

SEQ ID NO: 168 - DNA, 593 bp, Canis familiaris
  misc_feature (126)..(126): n comprises a, c, g, or t, or includes no nucleotide
aatcggacggtcatttccagtcccttataagtgacagtgttgcaggaccactgaaagtcaggggtatgacgtttaatgcagccaaacaagttgaatcgaccacctgagaaccttccctttcccatntcaagtacaacgttaatctccttttcactaaacgatggcatttctggggccacctcaacacaagggagtatcttttccggttaaaattgttgtctcaaatttgaaaactctcaagtttttattgttggaaacaattctaatggtggggagactcaactgtacacatgcgaactcgatggtcacccacctagttcaaccgatcggtccaacttctgatctttctcggagatttgacttcacttggcgactcttattttaaatctcttggtgacgcagaatctactctgagcttagaaaccaaatcagggaagggtggactttctagatgagctggtcgatctgggagaggagtttttgatcaggttttaataatatattcctgtgtctcgtctactccaaatgtttccttttcgatgacactaaaataaaataaagggatgagatcttccagaaaaaaaaaaaaaaaa

SEQ ID NO: 169 - DNA, 300 bp, Canis familiaris
gttcggtggggtgggtcggaggggcgtggtacttattattttttttttataaggaggatctcattaacctgccgcgtcggtggcagggagtgacgaatcccaaatcaattccgttctgtacgggggactgtccctcgtctggacggggggagtgtcccgtgtcccctccctccggaaccccagtccctccttccccgtgcccgagggtaggggtggaggagtccacctgggaggaccgtattaaaccccaatcttagtcgaaaaaaaaaaaaaaaaaaaaaaaaaaaaaaaaaaaaaaaa

SEQ ID NO: 170 - DNA, 367 bp, Canis familiaris
tttgttgtgtgagcgtaacctatccttcctccctcctacgtaggtcggtatctaacacatgcattcatgtctgtttctactagggattatgagcgccctctttgtggtgcctgccttcgctcgcgagggagggtcgtcgctccctgatatctgggcgcagcgacagtcgacagattctgggtagaggtcggtcaaatgttcggcaacccggttttcgctttggtttctcttgtcgtctggcccgcaccctcccacctgccgtccgtgtcttgtctttattgaggaatttctagatcatttcttctggtttcgtagtctaaagactaaatatactttcgtaaaaaaaaaaaaaaaaaaaaaaaaaaaa

SEQ ID NO: 171 - DNA, 646 bp, Canis familiaris
gacacctcgatttgactggatcaaactattctcgatcgatttcggtggctgactatcatcatccatcgtaggttttgacgtctgtataagactttgacccgtctattccatctacgaaatgagttttgggcattaaaaatggatttgagaaaccttttttgacgttttcgattactgaccagtataacctatgtttatacagccttagactccatcatacctttaacaacaccgtgtcacaatcaccaggtatcccgacaaactcaaccaagtctccgttcggttcctcgtcaccagacacgacgtaagtgacgaaaatgttccggaatattgttcttgtttcgtcttatggttcctcctggttaggtgatgtccaaagtcgtctgtagggataatcatcaactaagacagaataggaagtcccgaactcctcaccatcaggagctacttcgtacacgacaatatcattttcgtcgtctatgtcaacaacaaatttgtttggctcgtcctcatatcgtaaagttacgtgtgaaacctaagaaaagatcaataaattccaattcatggatcaattttttcaatttctaaatctactattaaaaagtcgaataaaccatgttcttgattcttacttaagtgaaaaaaa

SEQ ID NO: 172 - DNA, 595 bp, Canis familiaris
cccacctaacaatcgttatgtacaacccgagtccgttggagtatgatttccgttttaacggaaatttaacattgtcctctttccggtgttgattgttcattcaagtttctacggtgcggctcccacctaggtcctgttcaggtcaccagtcaccacacgtccgtaactcttacagtcctatcgataacaaattaatacacaaacatgtcaaaagacaactagtggaaaacatcaaaatggccaagagttaaattaacgtttacaacggaacagtccgggccggtgggtggggggggcccgcgagacgtgactagtagacgatgacccggtcggtctcctgtttggatcgtgtcggagtgcacacgtccgagtttttttaaatacagaaatccctcttatttttatttaggtttttctaaactcattttgactgttgtctttcaccttgcccctcatggtctggtcgagttctctaaatagtccctatgagcgtgtcatgtagggcgttcggcgtgccctccgtctcgagtcaccagggttgatctgagcgattcgtctaagaatcgtaataaaagatgtgtttgtttgttaaaaa

SEQ ID NO: 173 - DNA, 573 bp, Canis familiaris
ctctggcttgggcctgtcggtctctttgacaggtgtgtacaacctatttttttgactcttcatcaatctcttcttattcatttttattatggttattattcttgtatgtatggtttatgtcgttacccatgaggttcaggtttcttatcttatttatcttctcccatcctatccctctctggcactaaccccaaatgacgcctctagaagatgtatatgatttctagtttaattagaactgagaaccaaagaataacttcaaatggtatataagacctttatatatatacaatatctatatttcaacgggtgtagacagtcactgtatcttttagtaattgtttcttgcgtctcttagggatgttccaatagcctctcactctggcgttggtgtgggtcaccggttggacgttccggggtgaccacacacgcatcgcggaaccttcactctttggcgagaaccgttttaggtgtcctgggaccacaatgacaaagtggacagattttccaatgttgaacccgagatagtcacaagaaaaataaaacttctttatcacgaaaaaaaaaaaaaaa

SEQ ID NO: 174 - DNA, 611 bp, Canis familiaris
tcgtccagtaccacagaatactttcttgatcggatgtcccacgtctcattacaactcgacttcccctgacggtcgccccggaccaaaccgtttgtcctgccccaacgtttgaacgtatcagttcaacgaggacgaccaatgagggacaacatacaccgcgaaactcaccggtgactttctcactagtggtaactacacgttcgggatgtatgttgaccggaccgtggtacacaaagacacggtatatatatagatatttagacacctcccgaaacggtgagatgtcgacccttactggtgaacgtccagacggaccacacgggctcctatacttaggttggacacctgacgacctgtcacagggacaaaaaaaccccatatttgacttgaacttgaaaccgactgaacgacccgacggggcctccgtgacgcctttacgcggaggttgacgggacccggtcctggtccacagggaccatgcattgggagagattcccttgggtcgatccacggtcgttttgggtgtcggtctctgtgtcggtgtgtgtgtttgtgtctttttgtgatcaatcaataaataaaatgtttaaaaaaacaaaaaaaaaaaaaaa

SEQ ID NO: 175 - DNA, 474 bp, Canis familiaris
cggttctcctggattgtcgactcgggtaaggtcctatctatcgttcaataactctgtggggaggggggggcatctggatcttgttatggggatcaaggtcccaagattagtgtatgcccgaaaccccagtttcgacatctaattagattaatcattttttccagaacctcagtggtccaataaggggctcccgttgatctaatggtccccattggttggttatcccaccaaccgaccacctgacacaccaactaccacatatactcccaacccctgacacgtctccaatcgaccggccgcgggagacaccgtacaaaaccgaagaaatccattgtgggttgacacgttggtcacccaaggacgggtcgtcagagtttcagtttacgggacatgttacaattgtcagtcggacaagtataacacaataaatagctcttcttttaaaaaaaaaaaaaaaaaaaaaaaaaaaaaaaa

SEQ ID NO: 176 - DNA, 652 bp, Canis familiaris
agtccgtcaccagattcaaccacctatgtgctggggcctcaacaacagatacatccagaactgaggtttgggacgggctgtggtgaccagtgagttgcggtgtggacgttgagcgacgtaggaggccggtctgagttcggctcgagacgcccattcgggccacgggtgaggggtggtgccgcgtcgagttggggaggagctggatggtcggggacagccggtggaggtagttgggcgagagccggatggcgtagggcggtgaggtgaagggggaccagggcgtgaaacatgtgctctgcgtccggtctcagggccggacggacgacggtccaggcggtagtgtagcgggccgagctggggtcgaaaggcttggtttctcccattaccaggaacccatggacgcccgatttatgaccgagactggtcctatgtcccataacaaacatttgctgggagcgggtcgtggttgctgcgcccaatgggaccccctgcgggacggccgggggccgggagcttttgcctccaaacttacacgcacgaacaagaggggcggcagtgggacggtccggcaaaacagaaaagacagagatagagagaccacccaaagaacgaaaacacaaaacaaaaaaaaaaaaaaaaaccgaaaaaaaaa

SEQ ID NO: 177 - DNA, 579 bp, Canis familiaris
ttaccggtatttacctcagagtatacaagaacttttctagaaaaacgaccgtcctaggcctggccaattgggcccatgcactgcgcgccaccgccaacgtggtctcgcctgaacattgccgtagagtgctaatggaggcggatccggcaccaaccgattcgtcgtccacctctaatccagcttaatagtcgtttagaacacctcgtcaacaggcgggtgatggagcatccggtacgagctccaattgcgcaacgtcggaaacggttacagaacgcggaacgggatgtttctctcgttcgatggaagtctcatcacggtatctatctgaacttcctccaccgggtttctcgtcaagaggaaatgaaggtaattaaccttcatcagaataacaaagtaccccaatccctaccggtgtctaaaattcagacacacccaaaaggggctaaactccttccttcgacttctctcctccttaaccagtatccgaaacaatgtgaccgcaaacatcttatgcaccaatagttgaaatcgaacaaatcaagaaataaaaaagttcctttttcttggcaaaaaaaaaaa

SEQ ID NO: 178 - DNA, 526 bp, Canis familiaris
ctggcaggaaacccttttaaatcttacatttttctttttcttccgacgggatcgtcttccatttcgtaaatctaatactgtcatggatcagcgtcaataaatctctgttttttttaaatctcgtctctaaacttactgtagtgtcaacggatgttcctaaagtaggggaagactctcaacttacaattggttgaccctcatcggaccttggagtgcaaatttatttcgaaggtcgttcccgagacaacggattctgtggagaaaggttcctctccttcaagtcagacttaatctcttctcaggtccacttgaggcttaaaaccctgagggaacgaaactggtccactttatttccttattatcattcttccgagatggtatcgaatatatgtaaattcaattatcctatgacataaaattatacatcccattaaacgttctctatgctggattatgatctctaatgaataaagcatttaatattgtgttcaaaaaaaaaaaaaaaaaaaaaaaaaaaaaaaaaaaa

SEQ ID NO: 179 - DNA, 623 bp, Canis familiaris
  misc_feature (187)..(187): n comprises a, c, g, or t, or includes no nucleotide
cccttcctagtctatcgttctgggttggtgttcggtgacatgggagggaactgtctggtggttcgagacatcgatagagtcaccgggtcgacgtcggtggtcacctgagagacggtatacccgagatacacgtccaagggagcggtcgacgaatgtggggagtttcgtcgtccgggatccgttcgangggtccccggtgatgtgggtgactcgagtttggttgggggagtggtttggggcaccggggtttgactgagttccagtgaccggttccatagtgttctgtggatgtgggatgggtctgaggtacaacgaatggaggggggataggtacacggacgaccttgttttcactctcaccgtcctctcccgaggtggaacccatgggtagggtcggcgttgaggactggtccccaccgtcccagtgggggagggggaggggaacggtcccggatacgttagattggagtagtcccacaacaaacaccgtccccgggacactctgtgtatgggtcccacggaacaggggaccccgtcctgtccccgaccactccacaccgcctcccggtggttttataaatattatagataacaggaaaaaaaaaaaaaataaaaaataaaaa

SEQ ID NO: 180 - DNA, 667 bp, Canis familiaris
agtgggagaatggttttgaactcggttgaccaggttgtcctcgtggaggcatcggtcctccgggggattctctaggactaacttaatccagcaatcacaccagcgtttcgtttttcaactagataaaaaacgagaacaaacgaaaatattaaaattcgtccctttggagtaatttttaacacccggattgaatccaaccaaggaagttgtccggaggttgttggacaacaaacaatattgttcgggttgttcctagttcccatcctattactagatgtcatccatagaatgacataaaaatctaaaactaaatgattgaaatctcatttttattgcctttttattcaagcttaaactcatcaactatattcatacgtgtttcatataatttcttttaaaaacttttgcatttcaaaaaaaaaaacttttgcatttctttaaattatcaaaggagagatttaaaaaggtaaaatctcccttattcttacaatgtcgaaggtgattccgaaattatttgaactatttttgtataatgagtttttggggtaaataaagagagttttaaaagaatgagattctgataatttaaagaaatcatcggtgtgaagatgttcaagtcgtgtctgtataccataaataaaggtcctggtgttcaaaaaaaaaaaaa

SEQ ID NO: 181 - DNA, 526 bp, Canis familiaris
tcacaacttgagaaagggatacctagtattgttcaacatccacaaactcatccgtttttaacatctgtatgtcgttaagtgtccgtccattttaagggggagtcgttctggtgtgcctcatcctattcgtgtccatttcttctcggagtctgcgtagacgtctgcacggctatcttgggtgtcacaacgtcactatgtatcctcagttccaatttctcaagcacaggaaacttataagacatatggatgttgttgtgttctccttcttacatgtaaaagtcaacaggagtcaacaacgacccggtgtaggtaggaaactcaatgttcgtgattgacaaatttaacgtttgtttttttttaaactaaacccttaattcagatgtaaatttggattggtgatacacgtttgtgaacatcctttgattccatatacccgttaaaaatgagtttaaaagaggaataaacttaggggaatgtctcaaaaaaaaaaaaaaaaaaaaaaaaaaaaaaaaaaaaaaaaaaaaaa

SEQ ID NO: 182 - DNA, 497 bp, Canis familiaris
cccttcgacaacctagacacggtcgcaacccggtctggccggcgaaaccgggccggtgcggcagagggagcggcctgaacggcggggcggttcccgggccggccacgcgtcagcccggcgggcgccaacggcccggtcgcgtccacgggaacggccactgacaaggcggagaccagatgcaccaacatggtcccacaggtccccgtcggcaacaacggcggctcgttgaaatacacactcgccggtcatccgtcctcgtctggcggtgtggtctcggtctgtatcggtaatgggaaaacaaatgtgggtgtgacaatcgacgattgagcgggaaataaccactgaatggtcgatggagacgggaagtgtccggtcggtttgggacttggttgaccggccggtctctggtgtcaaacaccacgaggagtgagaggtcgttcgactgaggctgaataaaactaatctgaggtaaaaaaaaaaaaaaaaaaaaaaaaaaa

SEQ ID NO: 183 - DNA, 655 bp, Canis familiaris
ggtttcccactgttggtgtccttttttttcttattttaaacatcgttaggcagatagatcttaaaccatgatatgttctctatacatcttattagaggattatcaaattattcgagttagaacaatcctttacgtttttattggacaggatgttaaatctattttcacatcgtcgtcaataattcatcagtcgagacgactttttgttggtgcgtcatctcaggggagcgatgattattaaataccttccttaaacccccacccacggtgtcccttcacccaaatatctcgagatatagtgctctgggagcacatttacacatatagagcacgtctatatactattattactcccaaagagaatattgtaacagcgttttttttgtattggaaacatcgtttgtatcccctcgggattaactgtacaaataggacataataggaattttctgattgtttctaattctactatgaataaatgatttattaaacatttcggtagtttggacagttcctccggaggtaatctaattgttcgtgtggtgtcccaaccagaatcaaatttattggtcttcggttaaaaataaatagggttgtggctcgattctcattctgaaaaaaaaaaaaaaaaaaaaaaaaaaaaaaaaaaaaaaaa

SEQ ID NO: 184 - DNA, 195 bp, Canis familiaris
cttccacttgtcctaataactcccgggaatgttcagattcctgacactttacacacatctaacagttgggattaatctgttatttagttgtttatcttcattactgtttcatagatctcgtcaatgtcaaaggtaaataaacataattttttaaaatcggaaaaaaaaaaaaaaaaaaaaaaaaaaaaaaaaaaa

SEQ ID NO: 185 - DNA, 581 bp, Canis familiaris
tgtcaatgacgtcgaacggaccttggccgcccggactccggtgatgtcctagtagatggtcgttgatcgacacagattgtcgaatcactcttgtgacgtccccaccccctcacaatcatttgttaggttcctaaatattttaaagtagagatttcccttatgtacggaatccacttttctttgggtgttccggaagtctctgaaattggaatggaactgaggttggagtcacccacaggtctcagaggtttctaataacttcacaacgtacactattcgaaaaacacgatggtaaatcggtaacaaaatattggtgtcatcgaaatacggttgaagggtatcggtctattcttcaacccacacaacagattttgttaaattataaagggacgacgttttaagtgatcctgggagggacggtttttcgtagacacaataatctctatgtaaggaaccatcatgtaccataactaattggtcttttatattccctagtttaccccctgtttaaaacagttcttttatatgtataaatttaccttattagaaatataacatttttctaggttaaaaaaaaaaaa

SEQ ID NO: 186 - DNA, 604 bp, Canis familiaris
cgacatagcaaagtcatgaaacatcccgtcataatggccaacggtcttcagtctggattgggcacgtgcctcggccaaaaagagtgctccgggcggccaacccgaccgatatcccgattcctaacacaaaacctagtcggaatcgtgcaatcggtcacaacctaagctccatcaccaccatcacaattgtagcgaccgtcgtgacaacataggctcaatgtaacaacattcaggcggagatctatgatacggtctaggtcaaactcaaccctaatctcttgaacaagaacgccattgtgatccaagagactggagaacgtcaaccgacagaaccgtgctgaacaacgttgtccgtcaggaccgtcacacgggcgcacactgtaacacggagaccacccgggcgaacgcggctcaacaaggccggtgggaaccgggaacaaccaccaaatgatgaacagtgtctggaaccaccaacacaggaacaaataaaagtgggtgtgtgttctgtctagatactccggtgacgatcaatgacatgacttattgaataaaagaaaggtttatgtcggaaaaaaaagaaaaaaaaagaaaaaaaaaaaaaaaa

SEQ ID NO: 187 - DNA, 644 bp, Canis familiaris
ggtttgtcttcgctcaaagtggtcacccggaaagtccaatgacacacttgtctcacccctgagcggtcagctcatctagttgggaccccggctttctcgtttcttggttggcttttcttaattggtagcaacatacgggatctttttatctgcctttaactctttctcacttttcccccgcatttttatataaacacaaagtatattgtgttggtaaatcaattaagagaggtcctttctactttatttgcaaggataaggtccaataagatttttaacgtgagacagggtcggtttttggaaagttcgtcagcgggaactcgttaaaaaaacttaatcaaatgaactcctgtaaaaataaaaataaaaaaaacaaatgaactcctgtatagtctctaataggtatcattcaaaacgggaaaaacattatactcttcaatgggacgaaatcatctttttacaaatcgttttatacagaacgatatctcaatcattattagagaaggattatttattttgtcgaagaaaacaaccaataaaaagttagcttctctctctttttttaaagtttctcttttccgaattcttttataagtaaaataaaatcaaacgtcaatataaaaaaaaaaaaaaaaaaaaaaaaa

SEQ ID NO: 188 - DNA, 559 bp, Canis familiaris
ccgaggatgacaaccctctgaaggaagaccccgtggacaaggatggggctcgccggtggtttgtcgggacgacgacgggtgagggtgggaaaagtcacgtctcggaaatatcgacttgtccccattccacatctctttgtacaacttaggtctccaagtgaacctttcgaaacggtttcagtgcccctgtcccgcattggacccggactctcgggtcgggaccctgttgtacgggatctttcgtgaactctaggaccgagtttctggagatggttcttttataacaacccaagttaggccaattggtcaaggacagggtgggacgcggatggtggccacgggctccggggttggctcggtgtgtcgccgggtcccctcgcccggagaggggagtcacggggcgggtcgatcgttgtacccacgctgtgttgtctttttcaacaatttgtcttgtccccgttctagttggtttcgacgtcttttcaatctactttttggttttgtatttatttcgagattaaacttaaaaagtaaatattcaggtaaaaaaaaaaaaaaa

SEQ ID NO: 189 - DNA, 639 bp, Canis familiaris
aacaagttcgacgtcacatggtgtttgatgaaacaacggggtctttgttaactgaggcaggcactcagactatccgaacactgagaagctctatcggaagtagctctgatctgaaagaaccaagacaatgggatttgagtcacggacacgagctcaggtctccatcaacgtttgctcctatccgttcaatacaaaaagattctcccggtttccctgaggggaacgatgaccgaccgatcaccggtgggcatgtgggaaaggtcggtctgaagactgtacagaggacctcagaatattttctttgacgaaaatctctttgatccgcgacacgtctttaccatccgaaacttgtccagtcccctcctcccaatctttctagaagagtctcaatctcgtgcctccgagtttaaaaatccttgaaaccccggggtcctccgtgactccttcacgatgtgggttgtcgtgaccttctcatgggcccctggtccaattcactgggagatgaccgtggggcgacccacggtcgttgtgttcggtgtgtgtggctgtgtgatcaataaatcaaatgtctaaaagaagaaaaattaaaattaaataaaaatccttgaaccataaaaaaaaaaaaaaaaaaaaaaaaaa

SEQ ID NO: 190 - DNA, 382 bp, Canis familiaris
gaacagaggaacccgcagtaggacaaacgcgtcgtctaggtctctcctccccatcagtcaacgggaggagccgatcacgctgtaccaaacctcggggtttctttcgacgtaagacttgtacaaaatacgttctcagtaagactggggttatcgggatgggtcgcaccatcctcttacgatacgggggtggggatggttattttacttaggtaacgattcggtcggtgtgatctgtactgtgtggttttacggaaacaaatcaagattggaaccacttccaactcaaatgtatcatctcaaagagtttcggtgttctctagtctctgataaagacatcaataaagtcaatttttagattataaaaaaaaaaaaaaaaaaaaaa

SEQ ID NO: 191 - DNA, 606 bp, Canis familiaris
cctgaacttcccccatcccgtccacttttaaatactccggttgaaataaataaataaataaataaataaataaataaataaataaataaataaacaataaactccggttgtgtttcacaacctaatatttcacgaaccaggtcaccccatcacacaatcaaggatagtcctattacccccaacacgattggatctccacccatgacggactcgaaaccggggcaccgaactctactggtcctcagttccacacaaagacgaaccacctggagctctgtccactccaagtcctcaacgacaacctacttcacgtgaatcgagattcgggttcggtcgtcacacggtcagagtcttgtcccgggagcccatttaaacaatggttcacctcgttatcatggaatccaaaagactgagaaccccatgggtccctccgtgacgcctttacgcggtcggttgacgggacccgctcatggtccactgggcccatgcactgggagaagcccgtggggcgatccccggtcgttgtgggtgtcggtatctgtgtcggtgtgtgtctcgatgtctgatcaataaataaataaaatgttaaaaaaaaacaaaaaaaaa

SEQ ID NO: 192 - DNA, 334 bp, Canis familiaris
acatctacacacgagggaacacaaatattgtcaccacatttgtatataaaacgggagtctcatcttaacaaaactggagggtctgtttattttacacatcacgtgtggattgaaaataatttcccccccccccccctatcccggaaaacccaaaaaaacgatattcgtctccaagatcacaatcaaaataaatcgatttgaatctttaataacctttcatacctcaataaacaatctgagttttttttatttaagtcataacctttttcgtattttcttatttagaattttcatcactaaagggaacaatatttcgattgtaaaaaaaaaaaaa

SEQ ID NO: 193 - DNA, 608 bp, Canis familiaris
  misc_feature (85)..(85): n comprises a, c, g, or t, or includes no nucleotide
ggggagttatctcccgggagatcctctggacatcactatcacgacgtgtggtgtcaacgggtccacgtcgggctatttctcggangaactaagatcctcaaaacgtcctccgaaacatccttttgagatggcactcgccgtggatgggttggatcttatggctatgtagaacatcttcttggtctcgtccacgtctagaccgtcgacagaacctattcgcaccctcggtttcccaacggggacccgagactatcggacccctggagattccggaaactgatgactctggatggctatggaacgtcgacatagaaccacgatctcattcaccgggtagcgacccggaacttgaacttgggtccggcggaacaacatggagatggtgggacaatccccgtttagtaactttaatggcaagcaatttcaacatatctccggcaaaacgccgtgatgggacatccgtctcccctgaaatagatgggtaatgctccggggttccagaaatccacccgtgtggagtgatcacaaggttcgaggagggcaagggtattgatcgggaggaataaatggtcgttggtctgaaaaaaaaaaaaaaaaaaaaaaaaaaa

SEQ ID NO: 194 - DNA, 501 bp, Canis familiaris
  misc_feature (218)..(218): n comprises a, c, g, or t, or includes no nucleotide
aactggagaagttgaatccgagaacgtatcaacccctgaggaaacgggatcccgaggatcaagacagacgtaaacttcggtgacatggacaacatgatcatccaattttcacgccgaccggcacatgatccagatcaaccaccaaatcatcaaatcatcggattcatcatcggatccctcatcaccaacatcaacaccacactcagcgtcttctatgngacctggtccatcacgtcccattcacggtcagacatcacgtctgaaaggtggggtggaggccaccgtgagtgactctccgtcggactcccaacaaacgacaccgtctgtcggtgacgggtactacatcggcagcgacaggtccaccacgccgtgaacaatgtcgccacccagtaatgagggtatagtaggatcactcccacctcccgaatgcatcgggacttttcgtctagtagttgtctaataaaacattccagagtaaaaaaaaaaaaaaaaaaaaaaaaa

SEQ ID NO: 195 - DNA, 537 bp, Canis familiaris
gtgatgtttcgaccgaacgacgtccaaaaatcggcgagtgtttgtcattagaagatggacaaacactgaagtgtggaggtcctggttcgcggtcaccctctctaatcgacatgttgcctcaacagggtcagtccgaacaggatgagggtccacctccacgggactcataggattcaaaatctcaaccggaacatggaccataaacacccgatgggcggtcaggacgacaccgtgatgtttcgaccgaacagagcgtccaacataccggcgagtgtgttgtcacttaggagaagtggagcacaacaactgaagttgtgggaggtcctttgtggcttttcaacccctccgtcctaattgttgaatgttcaattgttactcgggaatcatccgattcgtgtcgagtgtacggatttcggggaatttaactttacaaattaggactttgactaacacgtcaatgagtccttttgtgaatacgtcttgaaaatcttaataaaacttttcttcgatcctaaaaaaaaaaaaaaaaaaaaaaaa

SEQ ID NO: 196 - DNA, 608 bp, Canis familiaris
ggggaaaacgtcaattcccgtaaattaacttccggtatgagtaaaacagggagtccagtctccgtcatccctcctaaagtgtcactggattatctctggaggaacacagtcataaaaaaaaaaaaaattcaagtaaattaccactattacctccctcatattctcatttcctattacgtccgtacttctttctttgactttctagggtgacgaacgatttaattaagcagaagaatccgatggactgaggtcggtagtggatgtaggatttgtcgacataaatcgaccgatctctccgaagagtcctacagacttgaaggtaatccctgatgctacaccaaagtttagttatcacatgagacggtctcttcgtaataaattagtattaaggtgtaatggactatttgattagatatctttatctatgaaactagacaagacacgtacatcgattgttttaacactgagtaagagaacatatcaaacgatactaaaaccaaaagactctataaacaaggaataccagaacttttaccttaagatataattatttcattaatacataaaaaacgactttttgtttacatacttcattcttatttaataaa

SEQ ID NO: 197 - DNA, 693 bp, Canis familiaris
gcgcttggccgccctccgaggccgaaccatcttcccgaaggacactcttgacggtgattcccgaacgcccgcttttggaggtgcctctctctggcacgagatccaactcttctcaacactcaacagttgcgtgtgggcacttatctgcatgccgctcagtatggggtcggtcatctccgggagcttaacaaggtgtgtcggacggacaaccgtttcaaacacaaccacaaccgttggtccacgacggtgtggattcatcaaaaacttcaattctaggcgatgaacttgaagcacacgtttcgtcaaatcaagaccacgagaaatcaatccaacagccttctcccgaggcgggtcttgtttatgccgttgagtcgtgtgattgtgatttcccacaacgagtatctctagccggggatgggcgagaggtttcaacaccactccctccggaacgacaggaacaccatcgttcagatcaaactgacgggcattgacccgttgtgacggaactcccagtagcagaacaatcactccaacaaataccacggtcggactgatggatgtcaaggtgaggctcttgtctttctgaggtggtccacgtgaagagattgagtccaaaggattatcttagacgaggactcgtaataaatcacgactgtagctcaaaaaaaaaaaaaaaaaaaaaaaaaaaaaaaa

SEQ ID NO: 198 - DNA, 649 bp, Canis familiaris
gcgcacgccgcggcccacacggcccgggcgcgaacccgagacgtcgggacactctcgagctctgttgcggacgggtgtcgccgtcgacacggaggcgctctgcgagtgccaggtgaacgggttgagctcgccgcggtcgccgaaacggtctgaacgcgtggacggaggtctgcgccgaggcgcggagcgaggcgcgggcccgaccgggcggcgagaggtcgggtgtctcgggcgcggcgttaggaccagcggcggcacgtccgcgacgagctcgcggtcgagtcaatgggccaggctgccccggggcgcccggagagccgccatgggggaacgcgaggggcgagtggtggcgccggagtcggattagggccccggtccctctgtggctggcggggccccagacagaggattggttggttaggtagggcggatacgatcgctcatggggtgggtacgggccgtctcgtctcgcacggtttcgtcctcagagaaggtgtgggccggtgcctgttgtgactccgcaggccctctcgcgagccaacagttcagaaacacgagccgagcctgtccgtgctttgtctatgtgggagtttggattgaggggttgtggggttagtgaataaagattggcgagtggaaaaaaaaaaaa

SEQ ID NO: 199 - DNA, 401 bp, Canis familiaris
tccctaattctgtttcggtaccattcctttaccttagaagaacccagcgttatgtacatgatgtcacaactaaatggtaaggggcgttgtgtcctatcaagatgtacttttcacacgaacgagagactaccgttctattactcgtttaatccactagtcctaagatttctgtttgttcataccaatgtcgttatatttacggaccgttgtatttgatagggtgtgggagtagaaagtttggctcgacttaggtttgatttttaaacgtatttgagtcgtaaatataaattctatttctccccttgatacttatataatcgtcaacccaaggagtgtttgcttcaaacctcataaaacttaaataaacagtctgtggagactataaaaaaaaattaaaaaaa

SEQ ID NO: 200 - DNA, 519 bp, Canis familiaris
gtatatgaccaaagtaatacaacgtccaaaaataactataaaatttcccacttccttattaaatgttctgactgtttttgtaaacacttggttgtattcaactcaataacatccactcatgtcttatttctatcacaaatgtaacgatagctagtcccccaaaattatttatttatttatttacgggtgtactataaaatgacttttagttttgatggatttcctctacgatacggacccacttggttcttgcttgttgtgtctagggactccaagtcgagtgagtgtccaattatcttttaacattccgatttctttataatacattactactcgaatcaactgtgaattcatagtctgtttagaaatcagtttaattatgttaatcttataaaactaattattgtttattccaccgaatacacttcatatttgagactgaaataatcagacgaattcagtaaattttctataggttgacataaaatcttaaaattttaaaaaaaaaaaaaaaaaaaa

SEQ ID NO: 201 - DNA, 591 bp, Canis familiaris
cgactatgggtccgattcacatgcactgcgcggtccccccgagaccccggtttcacatgcaaatgaatccagacgtcctcttgtggaacgtccacaagcccccgtttggttatcacaaacatgtgattcaccggatggcaacacggactaagccacaaggggtacacaacatgagaaagacggctggtgggtcgctgatggtctaagcagatcccattgtcccttggtcgtgtcttgtccccgggaacggttcctgtggggtttcctggtcgtcacccggggggagtcggtttttggggtgagttccctgggactaacgtaacacagtgtccggtggagtttctggatttccctaggaccatccaatacaacgtcgtctcctgttccccctcccacacacacaggtggatccagatttggagacggcggttatagggggttgggtccatgactcgggaacaaactgtcgtggggcgtggacgtctagtcatgacatcggaggacccttgtaaggtgggttggagtacgggtccagaatctgacgaattccgaataaactccgagtagaaagaaaaaaaaaaaaaaaaaaaa

SEQ ID NO: 202 - DNA, 628 bp, Canis familiaris
gtggtccacgaattcgtgacgtgaactggttaacgcagaggatgcacaacgtgaaccatcacctggttaaccacagtctatgtgacgcgggtccacggagactggggaggcagtttcggaggttggggtgatgacgtttggttacccggaaccaccacgacgaacatcagagtctgtagatcccgaaactcaggttgtgctctcgacgtccggttccagacgcagaggccgtcctcgtcagggaccacgacgtcgaggacgttgatcctgcggtgatgtggtaactcgtgatgggagggagttgtagggtgacgggtcgtcctcggagtgtcggtcgtcgagacgggtctgacgtactggggatcctacacgtctctctcaagacgtcttgttcgggtcttgacgtttcggtggaggtctgatcgggtctgggtcggggattgagttcccttggggtctttggattggttccggtggacaatttcgtcttgacgtcgtgggtggttggtccccccggtgacccgatctcccccctaccgtcacagggaggaggaaaccttgactcacctgggggtcatacaccagttgaggggttcattaaacgaagttgtcgttgaaaaaaaaaaaa

SEQ ID NO: 203 - DNA, 587 bp, Canis familiaris
tctagtttatacgaccgtcctaggcctggccaattgggccccatgagtcccaggggtggttgactcgaccccagggttgtcaggcaatgtcgagggttatggtccagacacatctggtcccaccaacatcccactcgcacatccttaaccgaccggaagacttgtctttcaggaggaccaaaccaccccctaccgagggtccaccccccccgcgagagaaacaccaggggtgggttagaccttctttttgtgtcctcggaaggtgggtgtggggtgggaacgtgacacggtggtgttctcgggttcatgctcggacggaatcggacgggggagggtcccgagactgagagggtgggatagggagtacagggtcgtggagttgtggggggtgccaccccccgtgaacggagagtcgggtctttcgtcggatcaccggggggggacgaatatgggaccccgcccgggcatcgggagtctagatcaccgtcgatcatccctgtcgtccccgattcgtcacgggggacagggttaaataaatctttgttctgggaaaaaaaaaaaaaaaaaaaaaaaaaaaaaaaaaaaaa

SEQ ID NO: 204 - DNA, 669 bp, Canis familiaris
  misc_feature (60)..(60): n comprises a, c, g, or t, or includes no nucleotide
ccaactttaactcctagatagtcccgtgtggggactcgggtccgcgggctccttgtctcncgaattcgtatcgtgaaaatgatgctacaaaacaggggggacccaattaccatcgtcaccgttgaccaaaaaccggacgttccattgatcgtgtaagagttgattctaattttacttccggacctttatttggatttctttctcacctctttgaaattaattggtcatgattttctatccaaaattcatactagtagtaggactgtttcgactattgcgtttgttcaacttataaaggaccgagacccttgagattggccttttaacgagttttataagaatcacaactcggtttttccaattccctcagtttgaagactttcttaagtccagatgtgtcgggttttacttttgtcccgacattggagctctggtcgggggtggggttttcgattaatgaaatgattttatacacctccaatgtaactctttctctctggattttgtttcgatctcgacggtcttcgtctcgatcttgactctttcatcggtaattccagattcaatgaataactctaaatacacgttttcatgtctaatcgttttatagaaacttttttattttaataataaaagattttatggtaaaaaaaaaaaaaaaaaaaaaaa

SEQ ID NO: 205 - DNA, 496 bp, Canis familiaris
  misc_feature (14)..(14): n comprises a, c, g, or t, or includes no nucleotide
  misc_feature (41)..(41): n comprises a, c, g, or t, or includes no nucleotide
gtccggactcttcnctcaagttcaggacacgatggtatgcncagacactttgttcagtgattttgtcacgttcgctcggtttcagcaacgtttgttgtgcctcgaggagtccaagaggtcgcactaagctgcgtttgtgttcaaccaactctcaagggggaaggaccataaccgagatgaggggtccaaccacttccccggaggtcgtgttcccaattataacacaccacacgatatccgccaaattttggtgcttttccaataaaaattccaaccaatggaaaggattgggaaccgaattgggtggtggatttgtcaggagtggtcaaaatatatcgacggagaatagttctacatttatatttacgaaaatctttcgatctgtcacaacagaatcacactaattcgttcgtaagactctatcgaggaacgatttaagattacgtttcaaaataaaagtttaaaattaaataaactgaagatatcgaaaaaaaaa

SEQ ID NO: 206 - DNA, 642 bp, Canis familiaris
  misc_feature (44)..(44): n comprises a, c, g, or t, or includes no nucleotide
aatagtcagggggtgaccgatcaccggtgtgggggttcttcgtncctataaaattgtaaagtatgctcggttcttctcacaactaaaggtgtcgacgagtcaactattgtcttcaacgggtttattggtcattgttcccctacaggtttagtgtgttatgtctttttggactgtcgattaaataccgagaccaaatcattttcgaaatttcccaacaaatcgatggatattttgtggacaagtctttttaaacttcgctagagattgtacgttgccctaacagacaactttgagtgtctgacgatttccaaaaatagatttccactattagttagaccgctccgtattttatcttggtcttagatgtttattttttcaaatgacacaacgttttctgatacttccgaattgtagacatgaattgtaactttgtaaagtacctacaaagtcaaaatcgatttacaacaatgtaaacaaaattcaattaaaaaaatgtcaaacttgaacttgtaaatatgtccaactacctccaaaataactctattcttgtcaccatgagatcatccaaacgattattttcagaaaataaacgaatataagttcttagtataaaaaaaaaaaaaaaaaaaaaaaaaaaaaaaa

SEQ ID NO: 207 - DNA, 518 bp, Canis familiaris
gtataacgtccacatcgcaaccaaacaccaacaactgtcaccagggacgtgtcctttgccatgtgtctgaggtggcgagatttgtagggggactgagctttggtcgtggtgcttctggacatctccgaccggcggcgtgggcggcgatgtcgacggactcaaacggaggttgtgaactggggtgctttggtctcccagtttacatgttcacacgtggtcttgggacgccaaacacccaaaaggtgagtggggtggtcggggacccgacccggtttgaccggactgccacctgtgcgacatggagacgtgtccgggttagacctcccgaaggggacgaaaccccgacgacaatattgggtcggtgactcttactacccccgccccacacgcacttggccaccacccaagggtgaggtgtccgtcggggtcaactcgggccacaaggtcccgttggtcgcgatgattttctattcggcggttttcgattaaaaccaaaatggagtcgaaaaaaaaaaaaa

SEQ ID NO: 208 - DNA, 603 bp, Canis familiaris
acagatgggacgtacgagcgggcgatagcccacagctcgttaacaatggagtatccatccaaaagatttgattgttctaaaaaatattaaaaaatttctttttctctcttgtcgttgttggtcttattcctacttgtgtcaagcttacatattttttttttggatcccctgaaaacctaggtaactatagcattcgaactccaaaaataccccagacaaatgacctattccgactttttggattttgatttctctctcaatttttaatataaatcgccccagataaacgattaatcgaactggaaaatctttgactcaaagaagcctttgacgacttgaagtttataaggattataaataaaggtcttaaatttttgtccagaatcggacgatttccatttttttaaaaggaactaaatttgttattcatccgaagtaaatcctctttctacgatttttatgatagactacattggatggattgagtatagttttgtaagtcacttctggtagatcgaactagatctttttaatcttctgtctgttgtctcgtcttggtctaactttcgtattaaaatagattaaagtaaaaaaaaaaaaaaa

SEQ ID NO: 209 - DNA, 607 bp, Canis familiaris
tgaagaatattcacgagttagtgtccggacctagactagtcacgaaaaacagaaaaatggttcggtttatccacgttagattgtttggtgtaaatcttactaacaatttagattgtaccactcatgaagtactctttaatgacaaacttgagagtgggaaacgacgtagtaaaacggctgacaacgtattggtattagataagacatagtggtttaactaagacatcttacaaatcccgtgtttttcaaattcctcagatttcatagatctcaattcggtaaatattttcaacatattggggttagttacaaagaccagatacatgtcctaaagtttatattgtttgggtgttacaatccgattcagactcaaatctccaagtcattttcctacattttaattcggtcttcgggagtagaacctaagactaatcggtatcccctattcttcgatgtctgtccactcaaggttttatcgaaaaattcaacgagggaaacaaagagaaaagtcaaatttgattcactataggaaagactcgaaagtttttttcgtcactcgtaataattttctggaataaatctttattcggttcgtaaaaaaaaaaaa

SEQ ID NO: 210 - DNA, 584 bp, Canis familiaris
  misc_feature (267)..(267): n comprises a, c, g, or t, or includes no nucleotide
tccccggagaagtatcctatggtatagtctgaggcaggaccagggtgcgagacggaaccacattcgagttcggcctcgtttcatccgaaataggcatccgtggtggacactgatcaacacgaagctcccactccgggtgaggttaagtcgctacacacagacctcccggcggacactcggttggactcaggtggacacgggggggtgggccgggggtcggagaacgagtctgacaccaacactctggtgaaccacagacggagcccngtaataccccttccggaacgcgccctcacaaccgctccggtgtgtcacctttggtcccattcgtggtgacggtgtcacgaagtaactgatatcctagttttgttgggggaggtgatctcagacggattctcacagtcatctataaagtctgagttccttaatttaacgagatgtcttgtcctcgaatttcgttcttttgttgatcggtttagttagtctgtttaggggatcataggcattccgagctacgggggacacatctgaaaataaatgttttttctgttcttgtttaaaaaaaaaaaaaaaaaaaaaaaaaa

SEQ ID NO: 211 - DNA, 726 bp, Canis familiaris
acgaggcttgtttatgggagtatccaaacacttgaggaatgataggaagcggtcttcccttgatacgaaggatacgttgttcatcattaatcgactatgaaatccagaactggcacctcatactttagactcaaccttcggtcccctgaaagacctcgtgcgatttccgtgttgattcctttgatcgtccggtttccatgtgtcattcgatggatctccattgtgtttccaccttatcttcgtaaacaaaaacggatgctataggggtccaattcgtctatttttggagaaatcggttgatgttttttccaccagtcctttttaactttccggcgagtcaacagttatccgactcaaaagaggtcatttagttgtcgagacgacgggtcgctccctttttagtcgtgcgtgggaattttttctaatcggattttgtaaagtgatttttcactctactgtgacgttgactttctctaatagtaaaatgatcacaatttggtatctaaagaagaagaaaaatgtcttctctcgatgccattaagttataaaatcttcaaaatatcggagatcactaatttctattaacttttatgatcctctaatttctaaaaataaattagaaaaaaatattatccatcgatgttatagaaagatttctgatagggaacctggaaaagtataattaaactcgtgtcaacatttaaaaaaaaaaaaaaaaaaaaaaaa

SEQ ID NO: 212 - DNA, 551 bp, Canis familiaris
cctacaatcctctaccacactttgtcatttttgaaatggcatcaattagggttgactgtagaatttcttttaaacagaaaattatttggagtccttgacggggaactccaggttacctcccagtcgggcacaccccattgtgtcccggggcccggtcctccgccaggtgtccgaggtcgggtcgtggaggtgaatgaccctacacgcgtccaaccgacaaggacctgtactcctccgtccacacttggacgagcccctccccataactgggtgctccatcgttcgagaaaagtcggttaaaatctgactgaatagacatataggtatttttattttttagtgtctaacaaaacccgtgaaacacgtttgtgttttaagttctgtaaaaaatagtccgtagacaatcaacctacatcagagtagccttaataattgatcgtctatataacgattttcgtttctcaaaataaaatagtctactatcttctaaagagtgaaacgtttttggttgtataataaattgttttcaaagttcaaaaaaaaaaaaaaaa

SEQ ID NO: 213 - DNA, 601 bp, Canis familiaris
acacgtatccaaagtggtgccattgggacatatcatcatccaacaccgggaagacccaaagggtggggacaacatccctgcaattaatgatgaagctccgggtactggtggtggaatccgtcctccatcaccaacctaaactgtcgtgtaactacgacagaagtccagatcgagattgataagacaaccaaaggatgaacaactacactcgacaggatagtccagaactaattcaatctctatcgggaaagaaccattcgtgtctcggttgagacagccatcaccttctcgtaccaattgggtggggacccatgtccgatcagtcagatcgacttgtataaatcgagatctttctgtgattatgttttttctatactttatcaaactattaatatacttttaataactaaatatttttaccttagaaaagttcagttgagatgtttctataattaaagtggaaatttcaacaaaaataaaacattctctattgactagaattactctgaggtttttaagttgtcaaatagtattgattcttaatttcttgtgataaataaatgaggttctatttaaaaaaaaaaaaaaaaaaaaaaaaaaa

SEQ ID NO: 214 - DNA, 525 bp, Canis familiaris
gagccctcgtcccgatggggggacgagagagggggaacgttccggcgtcgacccggaagtcccgggccctttgcgacgtcgcgacggggaggggatgcagtaaatgaccatgtcgacacaaaacgggccacaatcaccgatgtggagcgcgaggttgcgtcacaacgctgggccaaaccggccggacaccgtcgcacaaggcgccggttgacacgagagagctcgcgagagctcgcgacggcagcgagcccgggtgcccggagtcccaccggaggaagattgctcgcggaaaaggtcaccgtccaccgaccatctagattgtggggctctgtgaggtcgacaccaaacgtcgcaagggctctgggcggcacccgagctgggggagagaccgtcgcgtccgggtcgacctcgggtcggggtgggtggggttgaggacggtcgacgttgtgttattggcagggactcggtcagagagacatcggtctctcctcgtttggacaataaaccttctctattgcaaaaaaa

SEQ ID NO: 215 - DNA, 544 bp, Canis familiaris
ctggcctcaactggggcgcgaccgggacctcatgccaagtggcggtcgaggagcggcccgctcgtcgggtcgccggggagcacgtacaagggccaggtggagacagtggctgaggtttgccagttgtgcccgatttcatacgactttaaactagtatcaacggttggtcgtgtgccagcggacggcgcgccttctgtttgtaggctttattggtcacaaagtgtctaagaccgtttacgccggtttctatggatagactgggcggctctaacatgattggtcggttcactctaccttcgtcacgtgggcgggtggagatggagagtctctatgtcatgggttgtcccctagtcacgggagcggacccaggtccacccgtctgtgcctggggagcgttttttgtcaaatacgggtaacacgacgtcatgtaaggtgaaccaaaggctcaacgtgacactcggttaattttaaggacttttgaaaaaatcctttaatagagagtttcttcaatagaaaaaaaaaaaaaaaaaaaaaaaaaaaaaaa

SEQ ID NO: 216 - DNA, 545 bp, Canis familiaris
gttgattatacaataattcatctcacgagtcttaaacaagtctcgacagcgtcctatggacaacaatatcaatttcgaggaaacaaccgtcggtgtgagacccgcgttcatcagattacgcaaacgatgaaacaagttgacttttaggcaaataagatgttgaacaacaaaagacatcaaaacaacaccaaaattatacaaaagccccaaaatcacaacagtctcacttcatccgactcgtgatcgtctgccgagatacttgtgcccaacgacgtcgtcctacttcgatttccttttgtcttttcttggtcgtcattcgttccgagacgaggttgtttgagttctctgtggacattattgaaagacagatgaggtcaaatatgatttttgtggtaagattgtcttttgatttatcagagacgacgatgtgtctaactaggacctgatctggatgggtgcctagatatgtcgatttcgttttacaggatttgttttctttaataataataataataaacgtacttgtattcaaatcgaaaaaaaaa

SEQ ID NO: 217 - DNA, 682 bp, Canis familiaris
ggggcagaggggcctagcacgcttgcccacctggtcgagcccaagacgcgacgcggccaacttttgtccacagctcccacgtcgacatgacggtcaacaagtattcaggggtgacaaccagaaagcgttgtgccgaggctgaccgttaacttggaggggggcggggaacttttgtctctctcttttcccccaggacgaaagagtctcatcaccggaaccgactccagattggggagatccagattcaacgcgtctaacaaagtgagaaccattaaaagtactgaaaaacgtccggaacaactatcatacggtttttccgttgacaatgtgtcatgaacgacattggagccattggtcccttggaccggtccaaattaacgtcccgaactttggtttggttcgtcagggagaatcacaagatcctccggaaactccatcaactcaactggaggatgaaattggacatcaacaacctcgtatctgtccgactccgtcttccggagctcaacatcagccagcatcacgttctctagaagatggagttacgtctgaatttggtcctctggttcgtgaacaacaattccgacaagctggcccgtttctagatgaacacgaggatcccgaaaggggacgcggtttagtcacaggatttaataaatggtactcgtaggcttaaaaaaaa

SEQ ID NO: 218 - DNA, 655 bp, Canis familiaris
cgtcgagaacggacccacaggaaggggagaccatggtgccaccacaggatcaacacgtttcgtggttgttgtggattgtccgtcggttccggctccgacgttttctccggtagccaattgtgaatcaaactatcccaatgggtaccaaactaaatcggcttgcattaagacccacaaatcggaaaagatctataatgtggcgaagacacatccacacgtaaacggacccacaccatgacacaaaggaggaacggggcggtatcacgtgaagggcccaacggtctcatcagtgtgaacagtgttcgcaagcgtagacggatcctttaaccaaagaaacgtcggtaggatgcctaattggcccattcggcaccaaccggaaaccaccatccaaaaaacttttgtttgggttggacacggtccctcggtccttttctattggtttagactacgatgatgcaagtagataaagagatagaaattcgttatttgttaaatcttgttctgtccgtcttcgggtggttggtcggggggacatgaataacgactcaaactcgaatctcctcaaacctgaaaacacaattaacatctctcattattattagataataaagtgttccatccatagtttgaaaaaaaaaaaaaaaaaaaaaaaaaa

SEQ ID NO: 219 - DNA, 780 bp, Canis familiaris
acgggtccgtcggcctgtcgtgattgtttgttttaaatagaaactaatatgtggtccaactttcatatcctaactgtgtcgtagttgaccatattttctgctacatagactagtttgttgggtcatacatcgatgattcgacggggtccccaaaccaccaccaactgcaaactttctccaatacaactagccccgttccttcacgtgataatattttttctacacgtttttggtcgcgtcgtccaaataagtgacgcgtccttaacgattttgtgatcgtgttataactggtttagaagccggattttcaccataatctgagttgtctgcttaagagggacagctctcttagacatcgctgtgttctctcgttgaggcgagatcgcgtgaagtaattgagcttcatcccaaatacttgccacactctggtcccgcttaatccgtcgaagggagtcagaatgtcacaattgatcctttgaaaacctgtggttatggatgagttcatcgttgtctagatacactattctcagaagctcggtgcggtgttaggagtaaagttcaggtgtcgagtatcaagagtactgtgattaatagttaaccacaacattatttcacccacctagttaagaacgaattgttcctatatgacatttacattctaacgtgcatccgacccagagtatattcttaaataacgttttatatacgaaggattcgactatagtgttcctcgttaataaatcgtgatcattattaacaataaaaaaaaaaaaaaaaaaa

SEQ ID NO: 220 - DNA, 546 bp, Canis familiaris
cctaaattcaacaatcaccaacactgtgatactcacgacaggggaactcaaagggaactccaaccacgttagtgactattttccaatgaatcatacctttcaggggggtcttaacaacaaaaaaatgcataactgcccggttcaaaacacgatacagaccgtctccaacaatccaagatgcacaaccgtcaccaagtgacgaaggacgtacgtagtgcacacgttcctcttaaaattcggaaacgacttcggtcggagaagtttctaaaacggaaaaaccatcgtcaaaattgcgaccttcgtgcaaaaaacaaaaaagttcgatccccctttcaacgaaacaacacatcccaaaggaacacgaagatcccatatatctaagttcggacaattggtgaacagatttcactgttcagttccctttttaggtcactgttgaagtcgtgaatttcgtcataatcttaagtatatgaccaaagtaatacaacgtccaaaaataactataaaaaaaaaaaaaaaaaaaaaaaaaaaaaaaaaaaaaaaaaa

SEQ ID NO: 221 - DNA, 552 bp, Canis familiaris
catggaggttgtcggtaagggcggataggtccacaccaaatggtcctgcctaaaatgccaagactggagataccgcctatgcgtcggatgtctatgcgtgtcgggcgatgacgttggcgccggtgtcggcggcggcgacggcgacggcggatgtcgctgccaataccgtcccacatgtgtcggctggggatggtacgggaacggggacggcgatcgatacctcaaccgcgacaccgctcaaatatggctccaccgatgtcggctaaacgggggatgacttcactgcactctgggacgtttaccctggcggggggtcaagtactccggaccgataacgttataaatgatcatctccttgagatatcgttctacttctcctttttgtttgttttttttttttgttttttttgtttttttttctctcttatgaaaaaatatggagtgatacaagaaacttatacataaaaaggaaatgtaaagacggaaattaagaaaacaagggttctaacacgtaaaaaagaaaaaaaaaagaaaaaaaaattgacaccattt

SEQ ID NO: 222 - DNA, 618 bp, Canis familiaris
tctgccacaaccttgaggaacgtgttagcagcacgtcgttcgactgggtaggagccacaaacatccttgaagagctggtggcgtcgtcaacgacgtcagcacgactttacgtccctctgggaagtccgtaaggtgagtgaaactcaacagggattcgtatgtggacctgagctagcctcccttgtgacagttgtcagtgggatcttgggctcccgttgagtaacctccttctcaacgtgtttcattgtcaggggatgagcctcatcatgggacaacgactgtggaccaagaatggtaaatttatccacagtctccgacacaaccgtgttgaccactatgcgggaaacgaggcacaccaatcacatctcaagattcgttgtggaaatatcccacccgtcacttggtttcaggggaacatcactcgtaccggggtacacacacgtgtcgatctgaggaactcaggaccggttcggtgcaccgcgtggtctgtggtaagggacgtttggttggtgtccagtggcgagtctaagcggtagctttcgtcatgatcccaacaagtggtctctcggagtaagtgaataaaaggcggaaccaatgtcaaaaaaaaaaaaaaaaaaa

SEQ ID NO: 223 - DNA, 614 bp, Canis familiaris
  misc_feature (35)..(35): n comprises a, c, g, or t, or includes no nucleotide
  misc_feature (161)..(161): n comprises a, c, g, or t, or includes no nucleotide
gaagaccagggtgaggaacatcggctgtgaaatcncaagatacggatccaaaggatcaacttgagcctttgagaactttcgtccccataaaccatagttcagaaaccaacaggtcacactagtgatccaaaaccaattgggaccatttttccaaaatgaanaacagggtgtccggctccagaaaataatcaaccaggtgcaggactcggcacatccgaaactcccgttggacacgttgttttgagtaattcgtcccgtgaggattcgatcgaatcagtattttctaatagagatcaacgacaacccgaacaaataccgaggattcacgaagagtggcgggccactcacctctgggaaaccctgtgaaccaatgtctgggagacgttgggggtctataaaccattggatcacgacatgaccagggtgacaaaatctagaaataaaatggaagggggatttcacaacgacacaaacaaaactgactaaaacaaacggacataacgttttcatttttatattcgttattcgatggtgttagggtgaataaagaaattggttttttacttggtgaaaaaaaaaaaaaaaaaaaaaaaaaaaaaaaaaaaaaaaaaaaa

SEQ ID NO: 224 - DNA, 658 bp, Canis familiaris
acgagagaattcttggtcaccagaggtggtttttggtcccgaacgactcggtctattagttctcaacaggggtaggggaacctgatggtcatcggactaatgatttaccatcaatcatcttgactcataatactagttacttattacaaattacgttaatcccatcgttccctccgtgacgccttcacggcggtcggtttccgtgaccctctcatgatccactgggagatgcccgtgggtcgatccacggtggttgtgtgtcggtatctttgtcggtgtgtgtgtgtgtgtctctctctgtgtgatcaataaataaataaaatgttaacataaaaaaaaaattatgttactccggttggttcggaatatcattcatatttcatcccttttaaaaaatgaacgtcattttcagaatgtgatcctggacacaataacaagatggactttctcgtttagtcaagatttacattttgtcttcagtgtactccaacaggtttccttaccgtctcggaagtctcgttagaggtcgtaaaacgagttcagatttggtttttccatccaatccattatctcacgaattgaaagaaatacgactagttagacagtcaaataaaatgttaaataaccgtttctttaatttctaaaaaaaaaaaaaaaa

SEQ ID NO: 225 - DNA, 649 bp, Canis familiaris
tcatgtgggacgtatcgtaatcacggtgtaccctttattttgttaattagactaccagcccttaagacctaattctgggtacgtaattgctggttacagatgcttgttgatcaaagatattatcttctacgtgattttgagtatctcgtttgaaataccacgactttttcggattatcccaccatttcgggagtcattgggtttattgtgaccttatagtgttaagcatagttcacgaaaacattgagtttagaattatctttctcccactaaatataagtttgttgggtgaagatttggtacctttatgtccaataggtgctgcatagtgtcagtagggacatcgatatagtaggtcaaataggctgtggtgtataccatgctttatgtgcgttagacgcctcatcgttataatttttatcatttcccaacggtttcgatggaaagcacaacttcgtatactacaagttagtagaagtaagattcactcagtagatccatctgggggtggataggagagcttgcaacaaggtagatatctcatggaaaaataacaaaccaaccaatgcaagggggtaaaattcctttgaacggaatctgataaggattatctgtttgtgaatgacaaaaaaaaaaaaaaaaaaaaaaa

SEQ ID NO: 226 - DNA, 624 bp, Canis familiaris
  misc_feature (120)..(120): n comprises a, c, g, or t, or includes no nucleotide
agagccaatattcttgctggataaaaacaagagtcttctaagtaagtccaatttaaagttaaacaatttctgaccaaaccggtgtcaccaataagatgacacgacaaacgtcaacccatncctcactgatgggcttctccatatgacacaacatcaggtctcggaacccggtccacgcacaacctctttccgagatggaacaactactagcaacctgtgtccgtccactcaggtcccgactcaccacacttttcgcaggacatgggacacgacccgatccagataatacaacaggtttccgtttcaaccgtttccacgagtacctcaactcacggaggatatcgtttagaactccttcgtctccgtctgatctctacctgacggtcaaaccaacaactgtcctcccagtcccacacaggactcaccacaggattagactactgtacaaaactaagaaatgatcattctagcagcgaatcaattgttaggaacgaacgaactggaactgtgggaggagacctataaagaatatggtaagtttcaagaggatcttgatagatctcttttcgtactttttcaaattaatctaactccaaatatatcgtctctattgggaaaaaaaaa

SEQ ID NO: 227 - DNA, 461 bp, Canis familiaris
cgcaagatctgtgccggtctgacaaatacaaacctgcttcattattgagactttgaccaatgtcatcatcgtcatcaacattatccaacacattgaccgggtggacgtaacaaaattgcatgatgtggggcacaacgtaaaaataacaccgcatgtccaaacaattgagaccaccatactcaccagtggcaacaaaaacatctcaacaggaacaaacatcattgtgagtgacgacaccatactcaacatcaaaaacaacatgataaaaatctagcggacgaagccgaccgacggtgtaaacgacgttggaaagacacacacatcgtgatccaacagctcccgactcaacaacacgaacaacaccaccatcaccgaggattggaccacaaacattgtccgacgcatcaacatttggtgatccaacatcatcagcatactcagtatccgacttgaaaaaaaaa

SEQ ID NO: 228 - DNA, 504 bp, Canis familiaris
ttctctcttcaatctctcttcccccctcctcatactgatataagttctgatttacgtgagacctgtgtccatgaacaaagtcacaaattagaggggatttgtcgttgacggagatgtcaaggttcatcgaccttgacagtgcacctggtccatttcacggtcatcgggatttcccatcacaactttccacctgttccaatcaccctcaagatatttttcgatcctctcctaatataaataattaatcaggacaaaatacattctcttacatacaaaaatcttagaaatttgtaggatgggtgtatctctctgggttttgaatgtttattttcgtttctctttgacttccaataatttgtcttaaggtatgttgaccttgatccattttcaggggtagggtcttgaatgtctttaaggggtagttgtcttacctgtagtcatcaagggattaaaccgattgttgatgtgaaaaaaaaaaaaacaaaaaaaaaaaaaaaaaaaaaa

SEQ ID NO: 229 - DNA, 603 bp, Canis familiaris
aggacccaccacaccgtggctggtgggcaccggcgagctttgcttacagtgatacgtccatgcacggtgagtccaactcgactcggtccacccaggacccgctctccctgggatgcaacgacgtcgggcaccgtcacccccagcaccgggcgtacggacctcgtcgtcccgaagtgcgcggtgacgtggtgggctgtgatgtggaccacgcagtggcatctggccccttacagctcctctacagatcaatggacaaggcacactccgtgacaagcaggaatttgaaggcacgagattgggtcttggttgtctcggcgaccggaagccctgtccagcttcattgtcccactcaggaaagtcgtactgttccctaaatttaccacggcgtcaatgggggcttacgagggctgggcatcgtcttctaaacgttcgcacttagttagtgggttcgataaaaaatcgtcaaggactccgggtgggtttctggtgctggtccgacgcatcccgcctcttggtgaatccgaatcatcgtcacaaactgttttcgataaaaatttcaataaagtttcactcatttcactcaaaaaaaaaaaaaaaaaaaaa

SEQ ID NO: 230 - DNA, 647 bp, Canis familiaris
gtggccgttcaggggggtcgagaggctcagtgtgtccgtagtggagtctggagggcctcttatggagtgactttgggataaaaaaacaaagacgtatccaccgccccggacaccgacggaaccggtgggactgaagaggatgatgcagctccaggctctccgtccgttccgagggcccgaactgacgacgatggggaccctcgccagacctggggacacctgagaccggactcccggggtcagatgacacgtggggacggtcacggggctgggacgtcccggtaggaacttgaaccggacggacgaggatcgaaggttgctgtcaccgcggtcaacggggatggggagtccgtctgggtggtcggcggcgatgtcacgtcggtgaggtccagagctctccaccggtctcatgtgctccccagacggggatatgaggtgcacccggttccaccccggatattccggaggagcggtttcccacggaaagtaccgcacccgacactccggtacggttccagcgtgcggatccgtccgtgacacccgtggtgacagggtcgggtcgtcggggtgccggtgtacggttgggtgaataaatgaagtttccccagggaaaaaaaaaaaaaaaaaaaaaaaaaaaaaaaaaaaaa

SEQ ID NO: 231 - DNA, 643 bp, Canis familiaris
ttccggagtagtgagcccaaacaattggtccaccacaagcttgatagtcgtggaccagttgtcacagataaccatggtcgacggactcatgacaccggcccaacgtcagattggatggtcccacgtgacctcaggtgttgacaaccaacacatcgtcttgtccgggtccacccgtcaaccggaacgggaccctttcagtggttcagggacaccattctctcagttggtgttgtgagtgttctggtagtacggtcttggatggtgttggtgtcgtgtgacatggtctacctggatccaccccgaacgaataacgaaggtcggggggagggtacgggggacagttgtgggtaataattcaacccaacacgatttttttgttcttaacgaggaccttaaccgtccccgactgggtggtgaggtcgtgattcgttcccgccaaagaggttgggatacttgatgtctctccgtgatgggtttgggaggaacacgggatgttagtcggtggtctgccgaggtccaccgttggtggaaccggagaacctgttcggtacggtcaccagttaactggttctcgacgtttactttgatgcggacaagaaattaaaatttttccacaatggaaaaaaaaaaaaaaaaaaaaaaa

SEQ ID NO: 232 - DNA, 542 bp, Canis familiaris
atgttgagccccggggtaaccagtgtcaggccgaggtccccaggtccccaatctggatcgtccgagtcattcggcacggatgtttgaccatacaccatcacgacgtcaacctatcccatctcattccggcaacggtcctgatgcatcaaccacaacatcatgtcccggtccctccggatgggttatggaacctgagaccaaagtgaccacacaccttccggtctccgatgatgcgagcgtgtcgtccggttttggacaagggtaacgacatgtcgtggtctcatccggttaggatgtcccaccacgcaccggccgggattcgtcctcacccagcaaaccacggacggaacgggggtcgggaggtgtcaagatccggtgacgttgccctttcttgtgggacgtctcgagtctgtagttggacacacaccccacccaccgggtcgttcgggactggtaccaccagttccctagaccctctcaaccttcgtctcatcttgggttcgaaattaaacttttattttggtagacaaaaaaaaaaaaaa

SEQ ID NO: 233 - DNA, 551 bp, Canis familiaris
caggtccacgggcgtggggggtcaggtcgtatccgctttggtgttagacccagtccgtgggacgttgagggggatccccttggtgtagggacataggacgtttggtaaggttagacacagggaaccggcggtctcggtcccccccgccgaccccccactggtggtgtttgagtggaagttcggtcgtcgggggtttctgttggtcgttggacgtcccgttcccactcaactcccacacacagggacgaggtgtttactcggtaacgggtccgaacaccggttcggtcaagcgggggtgttgggacaccgtcgggacaggtcccggtcccggctcgctctgatgctcttcgtcgactcgggaccaacccgtcacggtgacacaagtccggcggcggggaactcttttgtccccacagtcacctctcgtcgggtggtctgtgagggcgtggtggaaaggggggaaatggggggtccaacacaatataaaataaatgtccataggacccaaaaaaaaaaaaaaaaaaaaaaaaaaaaaaaaaaaaaaaaaaaaa

SEQ ID NO: 234 - DNA, 703 bp, Canis familiaris
cttgggcatcattgagggactctatcaacggtcgtgtgtgtggtgtaaaccagtccccgagtgatcgtcggaacaccgtggtccggtgtcccccgccccttccccgagccaccaacacggccgaggggggagacccacaccgtcctcggttggctggtggcgtggacggtcgggctttcggcgagcgtccccagccgggtcgcttcccctgccgtccaagtgtcgtctgcggtcttgtgaccacgtagaaacatgtgattgttcttgtcaacgtcggagaggggacgacggttcgattgacccggggagtgccctctctgtccaccccgacgtggctcggttagtccgtgggacgaccgacacaggtcgctcgcgacgtctcgaaggggtcccccaccacggaggagacactggagttgccgccagactccgctcgtgtccctaagggcactctgtcgtcctgaattgaccgaggtcccccagtcgaccggaccgtcctcggctcccaacaagtcgagtgcctctcttttgttgacccttacaatgagacatcccctctcctcacaaccgcccatcgaactctactacctcctctaagttttggttaaactcaataatccctaatttctgaataaacgattggtttctccaacacggggaaaaaaaaaaaaaaaaaaaaaaaaaaaaaaaaaaaaaaaaaaaa

SEQ ID NO: 235 - DNA, 676 bp, Canis familiaris
aataaccccaaaaatttgaatccgtattgctcgatgagtattactaaatgaagggatttcatctaaacatccatattatcctgatttgaaactcatttttccttttcctaactccctggtagacgattatctgttgatttttctcgcttattcgaggtccgtactattttgattcgtcggttatctttatttcgtcggaatgggtgtgaaaagtctctcgagtccttataatcctaagcaccaacataagtgaaagtaaaagtgaaaggatacgacgttgacagacacaccacacttaagtgagtttgacgatctcgaccgtagattatcgatcccatcaaatataataccgaaattcgacgatgataataaatactaaatttaacaagatataacggctccagactatttaaacgtccgcgttaaatggcttcaactacggagactattcttgttgattgatgtttggatggtgtgtgtgggactggtgttcggggacggttcacaccataatcatttgagaccactgtacagggaccacttaaatttgcgttcgtgtagtctgtgaaattaagctgtttcttcttagtcctgtctttgtcttcttctgttttagaactgtttcagtgaatactactacgaaatcatacacatgcttgaactctgttaaaaaaaa

SEQ ID NO: 236 - DNA, 594 bp, Canis familiaris
ctgaatgtatgtgaatttgtaaaaaacctatagtcaactgagattatctggggggacaacgtccatctttcgtcatgcacagatgtcatcaattattgtagagatgccgttactttcacattcatttgtagttacgaaacaaaagtaacaacgtttaaaatatgtcggttaccatccatatatatccaaataggtccgaatctttcccgaaacaaatttccattttatcactctttctcgatctaaaatatatttttttaggatcagtttaaaatttaaaatttaaatttagttacggttaagactaccttatgtactattatttcttgtagttgtctcaaaaatagtccgattttcatacccattcgatggaattgtctacattcttttccctaatatcaagattttaagaatatcccagtagagaaaaataaaaacgttttcttaaaaaaaaaaacgttttctatcctcaaccaaaggatcaagaaaagaaactcgagtcaatcccacaacatatttcgaaatcctatatgtaataacccatttatatggtaaatatataaacaagttctagaagtgacgaggaaaaaaaaa

SEQ ID NO: 237 - DNA, 607 bp, Canis familiaris
  misc_feature (16)..(16): n comprises a, c, g, or t, or includes no nucleotide
aaaatgtccacaaccncgtggtcaacgggtcaaactttacagaatagttcagatggggggtgggacaacaactccatcacaggactcgtcaccatcacccgatgtgagacaccaactttgtccatccgaatcacgtgagtgtccgtcagtcgaaggtgttcggaaagtggagatactagacctcctctctaacaaatagaccccattgtggatgggacacctcttggcgccactcgatgcctagttcgctaatcggtatcgtgcccaacactttcggtggaggtctggacatcatcaccacatgcacgtccgttatcacgaactccggaaccgggtgaaataactgggtggtcaccgtggctgtgtggtgtggattttgtggagaaacagaggacgtccttttgagctccgtagggaaaccagagagttgaaaatccggactcccgacacaatggtcaacgcgttgtagacccgtccgtccccccgtccaccccatcatccccaatgtacctaacatttttattctcccctcctcgccctacccggctctatttgactaataaaatagacattccaaaaaaaaaaaaaaaaaaaaaaaaaaaaaaaa

SEQ ID NO: 238 - DNA, 648 bp, Canis familiaris
gttgcggaactctttgacaataggcgaactagactaacgagcagatccaggaactttgtccatgtccacatcaaaacctcagatgcacaaatcggtgagccgtatgctcaactctcggagaacgaaaggtatcttgttcgtcacaacgttgatcaccggatcaacccttgtccaagtgctgataacagagtcatgacaattatcctttgggcttgacaaattcagatcaatcatatgaaacgatcgtaggacaacttctatcctctgtgtgtgtcggaacggatggtccatcaaaggaacccacattatcaaaaaatggtcctccgtgtgtcgccacagtaagtttggtttcatcatgagaacgttgttcatgacaacagtttttaatgatatgttttgattggatatgatacagttaaataccaaacttttgtgacgaccaatagactgtacgtaaatagtttgtaaaaaatatacggtataaattctttttatatgcgaagtggatctaactttttttaaaagtatatttatgggaaaatataaaaggtgataaaacattctggtaataagattaggtcacaaacatctttctcgactacaaaataaaatcatgttcgaccaaaaaaaaaaaaaaaaaaaaaaaaa

SEQ ID NO: 239 - DNA, 685 bp, Canis familiaris
ggacccgggccagtccctcttctgctaacagttatctcaggggtgccaccgggttgcacaatgcgcggtgcaggaccagtcaaagtcatgcctgcactagcccgtgtgccaagaaagctcacttgtccaccctgaactttaggtccggaacatggcgaactggcgggcccacgtcgtcagcgtccagctaaaccagggcgccgcggtcttgcaacctaatcgggtagtcgccgcagttctagcgatgcccctcgtccatcacccgaaaatcaacttccattagattgtcccggtcaacatgcaccatttgttacacacagcggtcgacagggacctgtttaacgtcccgttccggaactggatggaggatcgggctctcgtcatggcggacgcggatatgaccctggcaaacgacctactcaagatgggctggttgattctggcggtccagtgggacaacgagatgcagttgtgggtggcttgtggctatccccctccggcgggaccggcgctcaacaccaacaatcggaacaacccggaccctccccgtccacggcctcatcagcaacaccaccagtcaagggagggttggatgggtttgaccgggctccattatgtacttttggtaccggaataataaaagactcttttccaatgcttaaaaaaaaaaaaaaaaaaaaaaaaa

SEQ ID NO: 240 - DNA, 615 bp, Canis familiaris
cactacacactgggcgggcggtcggggaagcgcccgacgcggagggcgacatcagagagcgtgtggcggagggaaggaaaggagaagctcaatttcgaagaccccaccaaaaaacaagggaaagttggaaccggtcgtttttttgttaaaactagtttaaaaaccaaaatttctttctattttttatttagattcttatatttttctagatattcttacccctgacggatttttaatcatgtgccatcaggaaaggacggttgccacgcttgtgtctggtagttgtcagtttagttctcctctcaggatcttgattataatgtgaaaccacaaaaaaaaggttctaaaaaaacgaaaaagaagaagaaaaaaagaatgttattggcacgattggactaagtttttttctctatctagttacgtctagtataactacttcctttctatcacatccttaaaaaccggaaacataaaacctttgtttttttggttttttctgtatcaacttcgtctttattttttttccggtctttcatctatctctcaaagaatcttctggaagaataaaggccaattttattttcgtcacttcttgtaagaaaaaaaaaaaaaaaa

SEQ ID NO: 241 - DNA, 638 bp, Canis familiaris
tccccttttcaaattttcgttattattgatcacagagagacacaccgacagagggaccgacacccacaccgaccgtgggtcgcccccagggcaccgacagcgtgaaggagccacggaggccccgcgggaccctactgttcaatgggcaccgttcacgtacgtcctccgataaatttacggattaggttttggtcacggttaattttgttcagtatcaaatctacatgatggaggtgataaaatagattgtttaattactgaacccagatttattctccttagtgacccacgagttttctttatttggtactggtccaaatcagaagtctaagtaatccaaatgcctcatattaccctaggttacctatgaggatatcttaagattttattaaaggaccaatggtgtgtttgtgggtgttggttaacaaaaaacccttttcccatgggtccctccgcgacgcctttccgcggtcggtttccgggacccgcgcatggtccacagggcccatgcactgggagcttcccgtgggactcgatccacggtcgtcgtgggtgtcggtctctgtgtcggtgtgtgtgtgtgtgtgtgtctctcagtatgacaaaacaaaacaaaacaaaacaaaacaaaaaaaaaa

SEQ ID NO: 242 - DNA, 610 bp, Canis familiaris
cttctgtccaacccctaccaggtcaaatctttattgttaggtagtccagtcaaatcccgttggacagtccgtaaggaggtggacgtccgaggttaccatctgtggtcccgacaaccgtgtattcccacgtcgtcgtgtcaggcttttcgttataaacaatggtggatgactgcctgacatggatcagatgttgtagtggggattctcggttcaagagacctcgtgataaaaatagattaaatataggactcacctcaggtggagacgtgtggcaatcgaatctcgtttgacatttgtcaccggtaagtaaccggagttcctgtctctgtaattgtgtcactttgtacattttccctgacttctctatttattcgtatctagataccattctgacacttcaactcccccaaatggatatttgttgaggaggatactagttctacaacaatcgtctaacgacgtcatgatcgacagatcctcacagtcgtggattgatacaagtggatttttgaatcttaattatctttcgggagattaattttcgtagtttttacccccaaaggtttgagattgacctaaataaaaactcaatgaacttaaaaaaaaaaaa

SEQ ID NO: 243 - DNA, 649 bp, Canis familiaris
ccagggcctggccaattgggcccatctttacacgtaccgactcaactccatatgtgtcaaccacatacaaactgacattgtagtcgttagattaggctcatgggtgactcgataaaccaccaacatcggggggtgacataatcagactccgatgtctatcactggtcactggtatgttccctggggtgacgatacggggtgtaggtggaccccgtgtggaaataccacggtcgtctgtggaccttgggtgtctccttgtcgggcgggggaagggtatcagggtggtccacacaacaggcgaaaactaaaccttcacaaagtacataacaaagtcaaaaaaatccacgacaagaacagacgacggagtacctaggcggacaacaacacccgacacgaccaacgggtgagtcctcactctaaacaagtccaaaacaacaagcaccgtgtcaaccacacccgacattgtttacgtaaccacatggactatgtcaaacatttcatacaccacctgacaaaccggacccacaacaaaaccctggggtacttccccctctgaccaatctctcgttctagataccgttcgcgtcaacgtctcttctaataaattattttctactcaaactagttcaaaaaaaaaaaaaaaaaaaaa

SEQ ID NO: 244 - DNA, 617 bp, Canis familiaris
taacacctatgtccatttgtcaatattgataattctcttagtccccatcacaatattccaactttaaattgtacgggtacattttacaataaaattgagtgacgagttcattcaactagggaaaaatctttgggaaaaactcatacttctaacttatgtgaaaatctgttacagtaccttaaccttgtgactcagatcacaattgagtagaaaactatttagtatccactataattgtgtgacgtctattttgacttttggtaggggaataaacgatattcttttttaataagtctctaaatcagtaaagaaatctaacacagaactggatctcatacttttaattaaaatcactggtccaacttccattttcgatttcatatgtctttccacttttacacggagtctcttaaaaaaaaaaaaaaaaatagtatatctacgaaccaaaacctcgtttttagttttaatgggtttaatgaatatccgttttttggaaattccgtaatccatgaaaatcaaaggtctgaatctcaattgacttattcaggttcttagttctttttcgtacaaatcttattaatctaataaatatgaagctcccacataaaaaaaaaaaa

SEQ ID NO: 245 - DNA, 702 bp, Canis familiaris
agagaggataaatggtcttttgggccaaactatcagatgttaaatagttctacgaaaaaggttctgatcaagtcattttcaatctttctattttgtttctcggtctcagttttcatagtccgtttctaatctcgtgttttgatgatttctaatattactcccagattgaagtgtaggtaaatgataacaatttttgaagaataacttctgtcaacggattaaatcaagttccttccatttccgtccctctcaggcttcttccaggttaaatgaaaccagttgtaataactatgttgggaaacgaaatcgtacaatggtattgaactcgatatctagattctgagacacgaaactaaagtaattccgtcgtatattttatataatgatttgtcgaaaacgggacttttccatagtaatatttcagatccttaaatgttattaatttcttccaattctttattcttaataatcgaaatacataatttttaattatggttaactaagatttgagtattaatcctttcaaatccctcctaacgaaaggaatttcaaataaaatatcaagatctcggattctattataagagtatagagtttgttcagacttaaatttttttaaaatctttttttctacgatctattctatatctttatactatatctactaaataaaaatatccgggaaaaaaaaaaaaaaaaaaa

SEQ ID NO: 246 - DNA, 463 bp, Canis familiaris
gattccgaggtgacaatgatactccttgttcatgacctatcttcacagtcttctgtccccttctgtccctcccaccccattctcgtccggacggactgtttttttgtctgttggtttcgtaagttcccattttcacgaccttcccatctcggtctcattgggtcggagggtcccaaggagtatagggtggttcccgggacagtcgtcatggaccctaccctctctctctctgactccaccctcccctccacccccttcgactctcccaaactacgtgtcaccttcaggtgacgttgtgacgatacttctggtttccccacgttcaccaagtcccctgaccggaacgacaccggttcctcgtccttccccatccccggtcgacactgttacttagtcatttgattttgaataactgtacctttcttagattcctttgggaataaaaaaacaaaattcaaaaaaa

SEQ ID NO: 247 - DNA, 640 bp, Canis familiaris
gtcacctagacggccttatggaaaccgaatgggagaggtcccttttggtggaaggctcaacaaaattcatcgacgtcttttcataaccacaacaacaaaagctagttgttgctaccacagaaatagtccgcatttcatcacaacacagaatggatccacggaccgtttgggaacgaaatacgacaacagtttggaccccttcagtgcaaccttcatcgtcgctttcaacgatttcccttttagtatttgttgaatccatgttgagacttccactttcagggaaatcgaaacaaactcagagatcttttcaacacgaagacgtccttcaattcttcacgtcgtcacatcgagaagagactgatttcaaatcaacgtaataactgtttaggtaaatgtttctcaattcacgtcctttcttttgtggtcgatctctcctcagtcagactatcaccctgaggtcgctctgttcgtcctgaattgagattattattccagatttcacgatcgtcgtcacgtcctcgtttcatgagatcccataagttggagacaaccccaacgagtgatctcgaacaggactcagtctatatacagtatttagttcttatttaataaacacaattcctgacttaaaaaaaaaaaa

SEQ ID NO: 248 - DNA, 683 bp, Canis familiaris
cccttttccgaacatcatcactctggtcggacgagggtcgggggctcccactgtcatggaccaaattggacccggtcacgaaaccattccagggaacctgatttgtcgtcctccctgaccgtggatcgggtaaggtcgggtgttctcaactcttccgacgtctccggagacagttttggaccctttttgttcgggactgcacgtgatgtcgtggtagggttcggtggactgagtccgtacaaaggtcggtgtgtgtccagtcgggtaagaggtacaactccaccgaccgacacaacacacggacaatgtacatattttccccaatgtagggttcaccctgttgacacacgattgtgtagctcgtctctcccgagtgactgggagggtgaggagttcggtggacggaggtcctcattgaagacgggttgtgggaccacaacagaggtgacccaaggtcgtgtctcagtatgagcggtatggtatgaggtcacagtcacccagattgtactgagtgtctcatggatagtggagggtcccacgtctctctaggatcaacaagtcttggggtccgttgtactccgggatccgtctcttgtctctgtcttctattccaccataattacaaagatccgttttaaaaaaaaaaaaaaaaaaaaaaaaaaaaaaaaaaaaaaaaaaaaaaa

SEQ ID NO: 249 - DNA, 556 bp, Canis familiaris
cccagaattgtctcccgacggggatgagtctcttgagactctcacaatctacggacacggggtcgtcgtcgtcgttcgtcgtcgtcgatctgagcatgccctcccccgtcgctccccagaatgcatgatccacccttgtgtgacgtcacttggccatacaacagttcagccccatctgggtcccatctcccccattgtctagggacccaccggaggtgtccggagggaatgttcccggggggaggggcccggactcgaccccgacccagacatccacgggatgaacctatcacggaacagatcccctgaaccacgacctgtcgactttcacggagccaggtcccctccccctccccggccccggttttgtcggtgatttcgtttgactcaaacggcgaaacgacggaaaaggacggtgtggggggtggtccactttctatatggacaacgttttctagttgttcttgattaaatctttatttttctaaaaaaaaaaaaatgaattaataaatcagatttgatccgaaaaaaaaaaaaaaaaaaaaaaaaaaaaaaa

SEQ ID NO: 250 - DNA, 603 bp, Canis familiaris
taacattgtcaccgttgaccaaaaccggacgttccattgatcgtgtagagttgattctaattttacttccgggacctttatattgggaattctcttctcacctctttggaaattaattggtcatgatttctctatccaaaattcatactcagatagtagggactgtttcggactattgcgctttgttcaacttataaaggaccgagacccttgagattggccttttaacgagttttataagagatcacaactcggtttttccaaattccctcagtttgaagactttcttaagtccacgatgtgtcgggttttacttttgtcccgacattggaggctctggtcgggggtggggttttcgattaatgaaatgattttatacacctccaatgtaactctttctctctggattttgtttcgatctcgacggtcttcgtctcgatcttgactctttcatcggtaattccagattcaatgaataactctaaatacacgttttcatgtctaatcgttttataggaacttttttattttaataataaaagattttatggtaaaaaaaaaaaaaaaaaaaaaaaaaaaaaaaaaaaaaaaaaaaaaaaaaaa

SEQ ID NO: 251 - DNA, 577 bp, Canis familiaris
  misc_feature (335)..(335): n comprises a, c, g, or t, or includes no nucleotide
gaaagatatgaggtttcctcagatcagaaccggaatcgaaatgatccagacgtggatctggtcaacaaaaccggggactagctagtcctttgtggtcaccgaacttgaacatttcccacgtgtctcatgaggctcacctgcacacagaacaatgaccttctgcgtcgtcgtcccaccacttgtgtcccatgggccgtgtgtccccgggtcgagctgtagacggtcccggttcattaaacagttgaggctcttttggaagggtcgctcgggtgggtgctcggaactgacgtggaccctcacgattgtcctccatcaacgcccagatgaccccacgngtcccacatggtcgaacaccatcgatcggtgggtcccaagatcatagactgtgtggttggttcgttgggttctctttaacgttattgggaagttagtcggtctcgttccaggtcttctagaaggtgtttggtgttggagatcaataggtccctgtttgtcatcgttccaaaccgtgtctccttgttttaccaaaaggtgtctgaggatttgtggtaaaataaatctggttttaaaaaaaaaa

SEQ ID NO: 252 - DNA, 598 bp, Canis familiaris
cggctggagaagagccggctcgtgttggtcgacaagcagggtccgtttcggagatcccccggcagaggacacgccgtagaccaggtcactaggcggtaggccgactgacggcgacggagacgtggacgtggtggtcgttggtgccacaagaaccaggcccagtgcccggcgcaagacccgggtacggcgcacggtgaggggagctaagagatggtcgacccaccaccacggggaccctcgtcctatccagtcgtcccagtgaccggtgtgccccgtcacgacaggggaccagggtgggggtcacctccgtcgaccagtgaccgtcggacctgataccaacattatccgtgtcggacccgtgggggtgggtcgggcatgggggaagtggtgaggtgaaagtgagtggaagtggtctctaaatacatgggatgggtcgggttggcctgggtaggatgttattcggatgttctttgatttctaaaaccaaatagacaagggtcgggtgggggttcacaatctctcacccttgttcacccggaaaaaaaaaaaaaaaaaaaaaaaaaaaaaaaaaaaaaaaaaaaaaaaaaaaaaaaaaaaa

SEQ ID NO: 253 - DNA, 568 bp, Canis familiaris
attcgtataacaaataactataaacttgtttatataccataaaacctaatatgttaataactcccacagatcgaacgttggtcaagtaaacctaattcgcctgacaatttttcgtccatattttcaaagatattaagttatttaaaaatatatatggaaaaatatatatatggataattacttaacttagattaaaaaaataaaaaacaacaacaccctcaatacctcctaccagtaggacatagtcagttaaaatggtcgattatatcccttcagagaactcgacagaaatccattggcaataacctgtgtaccagaatatgatttatctaacgttagatttaaatttaaatctctgggataatagagagagagaaaaacctggaaatagattacaatacccctcaaaccaaatactactccacaatcaccatacaacaccatttaacccgaggtccctccgtgacgtaactcggtcatgtgccgtgacatgttaatgtgaacattctcacttgaacgttgagaggaccgtggctcgtgcatctccaccgtattaaaaaaaaaaaaa

SEQ ID NO: 254 - DNA, 625 bp, Canis familiaris
ccgtgagcaacaactgtcaggtcgctaaggggaaccccaggatcaacaatcggccgttgagtggggaacagcggaaccgtttccccaattcgtcgaccgtctcggcgtccgtcagactttaggccgaggtgtaggggtagagccggtagcgatataggttttccaggtagatcatcaatcgcgcatgggaaaatcttccttccgcggttcagtagttgttcttctgtgagtgtgtgttaggtcgattctctcagacgaacatggcttggaaccggtgtcccgactcaggagtctggtatgaggttataggtacgcgtctcagatcgtgggaaatcagtccaacggtcccaaataactggggggtggggaacgtacgtttaaaagttaaggtggagaaagttgtttaaaaagtcgtgtgtacagatatgtcgagtctatttgggttgtaaaaagagaaatggttgaaggaccgtggtactcatcgtttgttttaagggggtgggggaattttttcggttttttttatcttaacgaaaacgtagtagtcatcagttgttttcaagtctggagatcaaaataaacacggatactttgaaaaaaaaaaaaaaaaaaaaaaaaaaaaaaa

SEQ ID NO: 255 - DNA, 584 bp, Canis familiaris
ggatgcgtcccgtaacttctttacacagaacctcatctgacacttaataaccagttggcccacgactatcaacaattatgacaaatgaaggagagccgttgcatggtccagaccatcgaccaccattttaactcgtcgccccggcgtaagtagagacagtccgacaggctgtgtgtgatcgggaacccggacctgggtcagtggtcgtcgatgaatctgagcaaccagtctcccatttgtttgaatctcaacaatatgtagtgtcacccgtcgctccacaacattcccccgtccgtcacaacgaatctcgtcctcctccgtcgacgccgggtcccgattcggttgctccacctagtcccaattctgttgcggtcgtcggtgctcaacactatggcaactccgtatcaactgatctacccctgtcctgtgttgacggggttgatgtaacccactcccatactagagtggacctttttgaattaaagccattattttttgacagtcaaaaaatactgtgactttatgtgcaaaaaaaaaaaaaaaaaaaaaaaaaaaaaaaaaaaaaaaaaaaaaaaaaaaaaaaa

SEQ ID NO: 256 - DNA, 525 bp, Canis familiaris
tcaaccgatgtgcttgacccggtgtctatgattcatcataaaccctatggttgccgacatgagtctaaagcaggttggtcttcctgcgtgtctccatcacagagtcgcagtccttgaccggttggactttactcagaaccgatccccaactctcgggacgtccgtccaacggtccgactcataggatgaacggtcatctggacaacacgaaacaatatttgtcgtaacgacaactcacgcggtgcggattttacatggcccgtctactcccccatggatcaaaagacaatgtttttttctagtattctgatcgttataagaacagtttacagtgtcgacatctcctatctcctatcccagaacaggcgggtttggtcgaccccttccccaccggacggtttgttggtgtccacacaatcctgtcacctctcgtatccccgaccggaagtcatatctagactactacgaaccgatgagttttcatgttttcttctttgtattaaagttcaagtcacaaaaaaaaaa

SEQ ID NO: 257 - DNA, 691 bp, Canis familiaris
ctaaaactaagagtccgtctacggaagcttccctcagccgatgttcatcatctacatccagaaaggtcctcactgatcaacaacggatactccttgatgtgactctcacatctacaatatctttctttcgaacgtctgcaccaaagttggttaaatgtagtttttggtggtcagaaaagagaccactctgacaagttccgtttgggtaaactcgaacggttccggtgagccatactgaccagacaactggaggtcttagggtccaaagttaggttgtgggtgagtttttagggacacgttgtagcccacaaaaaacgatattccctttcccattgacgttgtgttaaccaagttagacaatttggaccactccataattcaagatttgtaagggttgtgtcccaacgtcattggcatgtgattatctgtctttggtccccggttcattgggactagtcttcctcgttttacgtcagacttattgttggttcgtttcacctgacacaacctgaggaatccgttactgatgactgtacaaacttattgtttggacagtcatttaattgaataaatactcacctggttaaacttgtttacggtttccatgtaatactcctactcgtttcgatttttcaaccatttggatttgtatttggagctcgattttgactttattgttattaaaaaaaaa

SEQ ID NO: 258 - DNA, 667 bp, Canis familiaris
gggacccacaacatcaacttcaaccagtaaagcgttaatcaggcacatagtccctgctgaacatccactggtcgaacagtccctgattcatcagtcgattcctaagtcctccacaggaaagtttccaggtggtgactatggatatattggtcgagatattagaaaggtaaccagataacaacttctttttccttgaagttgaacacaaacggttctttcgactgggtaaaaattagaacgttctacgtcgaggcttctttcaattctatcagaatcggggaccatatccagggatgatttgtactgtgggtgacgttgtcacgaccttgaattttatatagaagtcaattggtcgagactccacaactaaaacaacggctgtgtctcacgagacgtatagagactctacaataaaggtcctacaaaacttgttttcctttttatgtgtttgggactgggtaaattcgtaggtagtttgtcttctttcaatactaaacttaatatcaacaagtacatactcctctaaagaaatctcataatcttgaatttagttttccttgtagtgttagtttttctagaagattaaacaatatcacgttgtttgtatttctatttttttttggagattaaagttctaaaaaattaaaaaaaaaaaaaaaaaaaaaaa

SEQ ID NO: 259 - DNA, 576 bp, Canis familiaris
gtcgagacaaagtcctataagagcggttgactatagtagactgaataatcgtgacttttcttttctttttcttttccgacttcagaacaacttaatttcgtatactcaaatgggtgatggagggctttgtgtatcaatacgtgttggttcgtcttttaatctcctagagagtatacggtgcgacaggtattagtggactataatgtcgactctggtaagtaaacttagctcagttcctgttatgtcgactttttctctggtctttcgttgttcaatgtcattaagtacaagatttgtgttcgtggtttttaatatctcatctgagttcaggtaatttatctctacaacgatgtagaggattcctttggactagggtatctctaacatagagagttctctcgacaaactatgtgggttgaccgttctaatagggttgagctccaacatgaatcacccaaatgtttatattgtctataaaaagaaatgaaatttatatagtaaaatgatttctgtaaaaatttaacttcttttgacataaaaataaaaaacgatttgtcatatcgaaaaaaaaaaaaa

SEQ ID NO: 260 - DNA, 565 bp, Canis familiaris
aatgggattgtttctatcacgacaacttttttttacacggtctttcgtgacaacctttatctgaacaccggtcaatttattcttgtttctcaaagacctcctcacaactttttctaacaggtctacacgtccaattccccttcccaccccccgtagagactccactaaccggcatcaattggaaacaatccactaccaagagtctaattcaccatcctccggatcaacaggtagacgaccgtcgggtcacttggtccatttgttagtgtcctcgtccttggtcctgaggggacgactgtagggagactaaaggaacggtgaacttgagttcatatggggttgtgggttcgtctcgagtcacatccctttataattgggagacaattactgggtcaacggtctttgtctttgggtttcacggatgttccaatttggatggttgtgtggggtaatcaaatcaacatatttcctcttcccctgtggtcggggtgaatgtgctctccaaggtacgacttgtcttatctgggtgaggatgtttcatcaattaattaagtcttaaaaaaaa

SEQ ID NO: 261 - DNA, 503 bp, Canis familiaris
gaacgccgaacacctacaactgtgctcccacagtcatcatccgtccttcgggaccgcgggactcggcatacgtcatccaatgtccatgtatccccgtcaacggtcacgactccgatcttctcaacacgtatgctcctaagattcgtctcgctcggatccatccactaaggagtcacgtagttctcacgcctgactctcatacgcatttggtcccacacggggtctttatcggtcttctgttccctgggagcgactcttgatatttcgagtcgatttctgatttcttaaggacattctatgattaatacttctcttagaataacggaccacgaccctttacttcacgtggagcttttatttggacgttgtcggaaccattgatgtattaccatactcaactgtctctctcatcccccactcttgaaaataatgattaataaacatcagttagtttagaataaaaaaaaaaaaaaaaaaaaaaaaaaaaaaaaaaaaaaaaaaaa

SEQ ID NO: 262 - DNA, 531 bp, Canis familiaris
gagacgactcgttaccaaagtctcctacgattctcgtttgtcatcatcatacttaagtggatgctcgcatgcggaactcagatcctattgttcctcaacatccagccacactgcgataagtcttggttcctcatcacaacaataaactcagctccttgtatagtctcttgtcgtaacgagttcctcaatgtccctcgtttccgaactctgggtttttttggtttttctttccatattgtgtggttcgtagtgaaactctcctggttccatgaacacggtgactatgaggtcccacgatcacacaaatcgacactgttccccgcgggccatcagtgactgacttccctctgtcgtttgacgtgacatgatcatgcgaccctggtcccttgaacgggtagctacccgtggggtcgtgacgacccactttcgttgtgggtgtgggtgtcggggtggtgatctcgtgagtgagtgagtgtgtgtgtgaaataaataaaatgttaaaaacaaacaaacaaacaaacaaacaaaaaa

SEQ ID NO: 263 - DNA, 601 bp, Canis familiaris
tcccgatgtatggacgactccatggtgtccattgtaggtgtgcaatgatccatgggaagattcttccaaatcacgattatcatcttcgtgctcccctagaaaacattgtcgaccagtagaaatgtgtggaccagatgattcggatggtccctatccatcaagtttgtcaccaacagaacttcagtctctgggctcgagccaaaatagacgctttgttctgtgacggattggaactacgtcaccttttgagacctgatatccccaacgtcctaggtgtcaaccacaggatgaaaccattggacgacattttccgacctcaatatcaggatgttggacaagaccggttgtatatcctcccagggattcaacaacgtctccgaaaacgtcagaacgtccgtcaacacgattgatcaccacctggttttccgaaagtaacgagtcatgatggtgcctcgtctcgtcgttcggggtaatgtaacaaaaatgtctttcgtgtctaccggagatcaaacggtctcttgtctgtcaacactatttaaactttggaataaaatctagatgggtgaaaaaaaaaaaaaaaaaaaaaaaaaaaaaaaaaaaa

SEQ ID NO: 264 - DNA, 568 bp, Canis familiaris
ccttcgagtcttgtctcctgacgttgacggacctcgtcgtcgtcaacacgattgctgagccacaacgcactggacgggggacccgcctcgagtggtacctgttcgtctggtccggggaccgggtcggtcggaacgtcgacgccgtggggaccgccgggtccccgtggggcacccgactcaagagacctccggggggacgacggactcggtcgacacgggacgacgggctctccggggaaccacccgattgcctacccgacccgggatcctgtccgtctatcaccagggggactcgggactgttggtcccccgccgtgacccgcgttagtctcgtggagacactctccatgcgtcccgttctctctctggtctggtggatccaccccaacccgtatggatctccgtcccgtggatccacacgacaccacaggtgtcactaacgacgaacccgagtctccgtccctcgtcggtcacctcacttcgctcgagtgggacaccgacgagtgtcggtaataaaaagtaacgaccacggggatccaaaataaaaaaaaaataaaaaaaaaaataa

SEQ ID NO: 265 - DNA, 569 bp, Canis familiaris
tccggacagatcacaatttacgtgaaattaacgtcgtgatttaaatctttacagaggtaatttatattcgtaattcactgggacggtgtcatcgactctagtttacgtagtggtaggctaaataacgatattaattcttggagaggaccggatgacatgttaataaggcagacttatgtacaagtgactctgtggtaatattttgggtcgatcgacggttgattcattttcgacgataatatagactcatgattatctgcgttgtccattaaaaatttttgctctcttaacttcggttctaaacacgatcttcactaaatccccgacgctccggtttctcctacttcttaaacgaaaacaaacatcttccacgagtttcaacatacatgttttgaccaaaagtctactaatttaacttttttcacaaacaactcataggaataccaaattctgataatcaacttgttgatggacgacctctttaagactcttattttcggattttcggattaataatctataaggatgtatcactcatttagaataaatcattatcaatttaaaaaaaa

SEQ ID NO: 266 - DNA, 414 bp, Canis familiaris
tgatttgggggtcctcattctgttccggaccatccttacctagagaaccagcgttattacatgagtcacaacataaaacggcacagggcgttgtgtcctatcaagatgtactttcacacgaacgcaaagactaccgttctattactcgtttaatccactagtcctaacgatcttctgctttgttcataccaatgtcgtctactatttaccggaccgttgtatctgatagggtgctgggagcttagaaagtttcggctcgacttaggtttgatttcttaaacgaatttgacgtcgtaaatataaattctatttctccccttgatacttatataatcgtcaacccaaggagtgtttgcttcaaacctcataaaacttaaataaacagtctgtggagactaaaaaaaaaaaaaaaaa

SEQ ID NO: 267 - DNA, 673 bp, Canis familiaris
aagaaaagacgatcgaatgaggaacagagccggaaccgtccaggccccacagtcaccacgtcgatgatcaggctctcagtgtccacctcccgaacctcatggacgaccctgctgacacgaaccccgtcagggacaaccatttccgaagcaaaatgaagcaaaacggcgacctgatgcgccagtatcacacgccagcccggattggtaataaggaccttgtcccgaaaatgcacacacggatgccggtgaacgtcgcccccaaccatatgcccaacggcattcacaaccccggaacccgcaaatcaagagaaacggtgcaaatgactcgattggccgtcatctgcggtccgtccttcgggttcaggaggacgcggactcgccctgtgttcagctccggcgcgccaagcgccccgcggacgggtcgggaccaagggggttagggataggtcgtctgaaagaaagaaaaggttctatacgattcgttgtggtcaaattttttggtgtggatgtggactctgtcgggacagcccctccgtggggccccaggtgtcactcccagtaggtgaccttcctccccgtctcccatccccgaaggtcatgcccacacaacagggctgtggcctggccgttttacacaacggaataaagatttcttcgggttgaaaaaaaaaaa

SEQ ID NO: 268 - DNA, 139 bp, Canis familiaris
gtggagtccggttcaaaccacttggtgtttggtcgggacaagggaagaggtgattggtctctcgacgacacgaataaacacgacaggttgaggtggcttattttataaaaaaaaaaaaaaaaaaaaaaaaaaaaaaaaa

SEQ ID NO: 269 - DNA, 598 bp, Canis familiaris
cgtcgtcgttgacaacgcccaacgaggtcgtggactaacagtaatctccgactcccgcacacgaaccggaaacaattgttcacgccggtcaacgcggacaacgcagacgtctcccaggccagtgccggacacctggacgactcctatgacgacttggtgtatatccctttgcagcaacgcaaatttcaacatcagatgagttagtccgtcaagacacatgcaaatcccgagcagtatcattagtaggacgctgagtatcagcaccagcggcggatgcctggggacacggggtagacgttgaccgatccacggacgctgaagttagcatcagtagtcaggaaagaggggttaccgggttgcccccagggccggcgcccaccttccaagggagttccccgttcgggtttcgagggaagctccgttggcgtcccgtttagtggacgacatgttcggtagggggtttgtcgacggaccaaccaacacttaaagaatataaatcggtttcatatttgatcgaactcggtaagatgcgatttgatttaaaaaatacaaataaaacgactttcttaaaaaaaaaaaaaaaaaaaaaaaaaaaaaa

SEQ ID NO: 270 - DNA, 394 bp, Canis familiaris
ctcccggtgggcacgcaggcggggggggcgtgcggacggtcccggtgggaccgggtctgggggacgcgacccatgggatggtgtacgtcgttggtcggtccacggagggggaagaggccggaggacacccgggtggtcgtttgagccacgtgggtcaagtgacacaacctagtccaacctttccagcaaacgtgaggagactcgggggaggagggacggcctttggccctggacaacgggtcccaggtctcgccccgacgtcttcccttttggatcgtcagtttcagttggggcgggtgtcgtctgggggatggcacatgagtaaaattcgaggctcggtggggaaaaaaaaaaaaaaaaaaaaaaaaaaaaaaaaaaaaaaataaaaaaaaaa

SEQ ID NO: 271 - DNA, 611 bp, Canis familiaris
tttatcgaacaatgaatccgagactagtccaacacaaagcagaactactttgtacaactgtcaaattttccaaagggtcaaccaagtatggtaaggtgtcatcccccgtagtataaaccagaattttcttgacactacgactctttgtgttatacccaaatttcagtgacatcgacggacccatagaacaggattccaggtaagaccgttgagcttttatgatttgaagttaactagttttcgtcgtcatccatccaagacacacaagttagtattgaggtgaaatgtgtattaccgtccatgtctagtgtagtgtgggctgttcgggttcagggtctaggatcaattggggtggttttacgacaaacccgcacaccaatgatcacgttgggaccctccgacgactgtcgttccgaaggactgaatcttccgtagaaaacctcggtgagagcaactaggtgattctacaataagaccttgattcaacaacctcacgaaaagataccattaatcaataacaatggtcgtttccatcctcagttccataaacacttttaaattttaaaaaaaaaaaaaaaaaaaaaaaaaaaaaaaaaaaaaaaaaaaaaaaa

SEQ ID NO: 272 - DNA, 671 bp, Canis familiaris
ctggacgtcgcagacccagttactcattgggtggacactccgccactaccttgaggaacgtgtcaccatgcaccgtcgtccgactggtaggaccacaacatcttgaagagctgcgtgggtcgtcaacgaccgtcaagcacgaactttacgtccctctgggaaggtccgtaaggtgacgtgaaactcaacagggattgtatgtggacctgagcagcctcccttgtgacagttgtcagtgcgaactcttgggctccgttgagtaacctccttctcaacgtgtttcattgtcaggggatgagcctcatcatgggacaacgactgtggaccaagaatggtaaatttatccacagtctccgacacaaccgtgttgaccactatgcggaaaacgaggcacaccaatcacatctcaagattcgttgtggaaatatcccacccgtcacttggtttcaggggaacatcactcgtaccggggtacacacacgtgtcgatctgaggaactcaggaccggttcggtgcaccgcgtggtctgtggtaagggacgtttggttggtgtccagtggcgagtctaagcggtagctttcgtcatgatcccaacaagtggtctctcggagtaagtgaataaaaggcggaaccaatgtcaaaaaaaaaaaaaaaaaaaaaaaaaaaaaaaa

SEQ ID NO: 273 - DNA, 558 bp, Canis familiaris
ggccccactgtataacaactaggcacgggtcaccgtacagctccccaagttgtggtccccgtgccactcttctagagcgaaaaggaccattatgcatcttctgtataatcgatggagaatcaagtcctggcgaggaacagggtcctcaacaagtctatgctcgtgattcagacgagaggctaggcagactcctagcactgggagtagcgagtcggggtcccagcgaacaacccccggaacgtcagcggtcaccaccaacacattttaaataaaaaagcatgaaacaaaatggacaacaactatcatcaaaccaaaaacaatcgggaaatgacgactgttgtccaccacgacttggaagacccgaacgttgttcgatcgatgcgttgcacaggaccggactcgccggcccgacatccgtatctcgtacacccgaaccacgtccacttgtatgtcaccaaaatgaaacgggccaaaccgaaataaatgttgtctgttgcctgatcttaaaaaaaaaaaaaaaaaaaaaaaaaaaaaaaaaaaaaaaaaaaaaaaaaaaaa

SEQ ID NO: 274 - DNA, 647 bp, Canis familiaris
ctcaatgactactgatttttatcgttcaaaaactattgtcatctatccttatatgagactttcttatggattaagttctttccaacccgatctcacttcttcgtaactttttccgaattagcaatatcgtcgtataaagatttctctacagctttttctctcaagatctttaacttttgtaagtatatctttattacaaagtcggaacggatttgtcaataattctaggattttagattgatatttgagatagatcacgaatctatcatacttgtctatttttcgtcaaatttccaattctggatctttcatcttttacggattgtaatatttatatagacgatgtaatgatccttttactttctacttgtgtcatccgtaattaatttcaagatcttttgactctagttaattcgtatgtttatatgttctatcctcaaatttgtcttgcactgttgtgatttccagtcaattctttcttttgttagtcttcaattttctcaattgtttctctattgtcaatagaacaattgtgtcaaagatgattctaaatcctttgtgtgactgtacgttttgttttgttgtgttaacaaatcaaaactaaactttatcattttcataaaaaaaaaaaaaaaaaaaaaaaaccc

SEQ ID NO: 275 - DNA, 497 bp, Canis familiaris
ctttctggggaccaacaaactcaatgcgtcatagagccgacacaccggacccttcacccacaactccaggtacttcccatcctcaccgtcagacaaaggaccaacgggtcttctgggacactagaagggacaaaccaaggagtccgattaggcccaggtccaccgaatccggatctgtgagaccgcgacaggggatgttgatgcatcgacagttggacacgagactggggcccccagggattccacccgaaagcgcactgagtgtcaccaatcaagagatcgactagatggtgaggtcctatccggtgtctcgacgtagatggtaggtatcctttaacaaattggtagctgccagtggtcctctatcatgtagtcaactacgtggcgtggtgtggtcaataatgagtaactgagacattttgtaacgtttgtttttaaacattagctcccttacctatcactcctatcaataaatggatagactagaaaaaaaaaaa

SEQ ID NO: 276 - DNA, 643 bp, Canis familiaris
aaagcgcattatgacattgccaacaggttgttagcgtggcgaggaagaccctggcggcaactgcctaaaaacatctatcccaatgatcaagggcacacctgcgaaagaaatcagcttcaaacaactccctgaaataaagtcatctggacagacgatgcccaaacatatacaaaacgttctgactggtatttatggagtggatcatctttttcttacaaaaactaaacatcgtcaacaacgggaactttcaattcccaaaagtgatccacgttgatcctcaacctactacttgtccaaaacgtagcccccatcacaggcctcgtaaacttcaagcacgtcatccatatcaaggaggactggaacaatgtctttaaaattgacagatttaatcctcaggaataaaaagatatttctcatctttaatttgttatgattgtttttaaataatgaccgtgcctcaacgacatcttttcaagtcaggctctcaagttttgacaagtattctatccatgttatggattcgtgttccgtagtaaatacgtcgaaaaccctactcatgtattttaacgtctactcatgtccatccaactcttgtacatccttaataaaaccaaagttttttaaaaaaaaaaaaaaaaaaaaa

SEQ ID NO: 277 - DNA, 533 bp, Canis familiaris
gtgtagtgtcgggacgtaaacgttcagacttaatattatccaaagaacggccgacaaattcaaacaacactgtgtgagatacgtcccgtatattgtcgacgtccacttcaacaacgactgtttaaaacgtcctatcacgagaacggacgacctaaaaatttaacgtcgagtcttaacgtacattacacctttaaacaaaaagtacttttgatagtcccgaccgcttctggacttcctctacaattccaactttgaacaaacttactttaggtttcgttttacctgataactttgttatctcattcgtctatctcaagagagacgtgtttctaagattgtgtatttcctcatttcaaagtagtgaacataggactctggtcggactttaaccctagattctacacgtcaagtttcacttagtctcgaacatttttttgatcgtctgatttctaatatctttctcaaaatggttcccattaaacttttccttaggaaaaaaaaaaaaaaaaaaaaaaaaaaaaaaaaaaaaaaaa

SEQ ID NO: 278 - DNA, 596 bp, Canis familiaris
tgtggtcgccccacccagacccgcgcccacgcacgcgcgatcgcgcggccgccggttttgggagcttgagctccggtccccctgccagtcgccctgtggtccgcgctgccgccgccgccgtggacacgcactcccagtcgccgccggccaccgatccgacccgaccgctttaccaactttgttggggtgtttcaggcccttttactgcaaaccactcgacgtcaaagtctaaggaaaccacctatgatcgtaggacaaaaatgtgaacccaaactcttcgaacgaagactactccgtcttccatgcccttggaaaccaaaccctccacacattgaaggacttactctcaaacttccacataaacttgttgtgggacaatatccaccgaggaaactactggtacatcagaaccattatttgttatttacacatcctcagattgtgccaaactatctccagtcaaatgattgtttgttaaaagccgatcaacgcaacgtcgggattggactcaacttctcaaatgttcgatgatctaaataattttgatctgtgtgttttataataaagtaatcctatggaaagtaaaaaaaaaaaaa

SEQ ID NO: 279 - DNA, 565 bp, Canis familiaris
acttagcgttggtctttgatctagggctccgtggggttatatcggacacgtttcctcccgactcccccccgggtctttatggacgtctactacgtactttgttgatttctataggtccacgggagtcatggaattttaccactctctaatctttgactattaattacaacaaccaggtacttgagtatccttccatcccatcccgactccacaataacattaatagtcgtttcatattgtggaacacaaacttgtaagagttcgactagacttttttgctgggttttgtccaaaataaccaccaaatcgacgttgtcctctgtgagtttcacagaaactgtcgtttcggacacacgaaattcacctaaattgagaggggtccaattcgtttcacttgacacggttcactcccacccattcactctatacacatggttattacgtgtctacgttattgtctatgccttaagatttctagaatatgccttacagactcccacgtgataatctccagaataaaacagcaactcctgagtggtaaaaaaaaaaaaaaaaaaaaaaaaaa

SEQ ID NO: 280 - DNA, 560 bp, Canis familiaris
ccacaatgaaaacacccggtaccggtcgttgtattacctgggtcgacgaagccccgtcgtctggccactatgtgtcccgggttggactgtcgatcctccacaagtgtcccggaaacctcgttccccccacacccaccaaaggacgtcgactcaaacttaagaggacagcctcggggtgctgactctggttttaaacaaaaaagatatcagtctacttgactaacatacgaagtctataaaattcgtaaaatacattttacaatgatagactctctgtgttccttgatgttgaaaatgacagtcatgtttcaaagtacgactttttaatgaaacgtccgtttataccaccactataatctatcgagtagtcttttaaaagaattactctctctctctttttctatcattcacgggattgatgctaactgtaaagttcttacgcttaatctagggatctacagtacgaaactactatctacatctcattgtgacttctaaatacaaaaatgtaattgaataaagtgtctatgagggggtcaaaaaaaaaaaaaaaaaaaaaa

SEQ ID NO: 281 - DNA, 597 bp, Canis familiaris
tcttcaacgacatcgttttgacctatgaaccttagattcctcgacgggtacttttccccccactacatcttagtccaggtgaggtgtagacgatgtatggtgatccatgaagtcataacttcggttatctgaggatcccttgtccttggttccgacgaatccgtctctttcaacataactttaccggacatatccaccaacaccaacggaacaacgtcctaactcaacggattcgacgtccgctgttgaagcaggtcccctgtccaactaagattcatgtgtctctgatgacgaacacgaaagtccagttggtggcgggctagtgcctcgggaagaacaaccccagtacctttccggcctagacatctcacaaacccaggaggcgactggtgagtcaaaaactgaggagggtccacattcacctcgtccaacaaagacttgacagaatccagagttgctcaatccgatgtctccatccatccttagtcgtgtagaacattcccctcgccccccagactccaccgcggggggtgacaggttgatttccgactctgtcgtcaatcacagggaataaaagatcaaaaggacaaaaaaaaa

SEQ ID NO: 282 - DNA, 650 bp, Canis familiaris
gagacgtcgtcgggccgcacgacacgtctcccatctgttccaaatccaggcactgtgtcgagagagctctaacggatcccaccccccggctctgaggaggacgcccagaccgggaaccccccggacagagcagcactctggacacctgctcttcgatagtgatttcgagatgtcttctgtcccctccagctctcttgccgttgactctcaccgttttaataatctataggtctttatgaataaaaaaaaaaaatccttcaactccttcaagggtctcaaagttacgaactctctcgaaatgaacgctggtttccgctgagctttagaccaaataaacttcggagtcagtccggggaaagactcccctaactccgggacctggtgacccaggatgacgatcgtttccctccttccgtgttcggtcggtctgacgaggacctgtccgtcggcggcggggtggtcgggtctccagctacgggtcacatcgtggactatgttaatcctcgtccggagtcccgcgtcggttgtgccaggatgtgggagctttatatgtagtgcaactgcctctctcttctggaagtttattgcaacgattggtctaatttttttaactcgagtttcaaataaaaactttataaaaatgaaaaaaa

SEQ ID NO: 283 - DNA, 557 bp, Canis familiaris
cgcgggtgactgacgggactgttgtttgggtgggtgggtccgggttgtggtcatctcgacgtccgacgtgtccgtgacacactgaaccaccttttaggggatctcggagtcccgctgatggacacacaggtccggacaagtccgtctctacagttcaggatgagtaatgtcgttcacccacgtctacggttgatcggtcaacatatgagtcaacccagggactgggttgggagacggtggcgggggaacttggggacgtgtccgggcctcaggggtgacgggagacgggtgagatttcggaactggtgttcccgggccgaccacacggtagaccacgcaaacgaccgagtgtatcaatatcgaacaaccacattgacacacacagaccgggaccaccgtcagtcacgagaccatccgagggacacggcgaccagccaccgtcccccgacgggtgaggggagttagaagtccgtccaaccctccctcctaaaaacccacccatccccgtggggggaaaatgagattaaattgacccttttgagtgaaaaaaaaaaaaa

SEQ ID NO: 284 - DNA, 575 bp, Canis familiaris
actactgggactaatcatcaacgacgaatccgtctgattatcactgtgttccaacgacatgtcccgtccctcctggtcttcagttttacgcagttcggatccggcgtctaaagcgtagctctttcgtttccgaagacgtagactatgaaactcgattagtcctccacttttagactgtctcaacgttagtccataaccacacaagacgttttatctagtctgttgataaaacggattgtgacacggattcatagaactgaatgttagtatctctaagttgacagaaactccaagtaacggtcgtggactctttggtgatgattcattattcccgtacgtctccatacgttcgattaattctatattttccattgtctttctcttcaattttttaatgatgctcgagacaacgatgattcctacgttttatatcgaaatcctgatttgacatctatcctctttttagagtagaaacaactgggggatctccatatttgttatagtaattctatgataaacggctttattgttggttctaaaaaaaaaaaaaaaaaaaaaaaaaaaaaaaaaaaaaa

SEQ ID NO: 285 - DNA, 607 bp, Canis familiaris
ctttctttctgtttagacttaacttatttattgatcacacgcacacacacacacacacacacaccgacacaccgacactgacaccgaccgtggatagacccacgggaatctcccagtgcatgggccatgggaccatgagccggtcacggcaaccgacatcgggatggcgtcacggagggacctctgaacaaatcctctttaaactcaaaagaaacgaacgtaaggtttactatacactgaacccggccatcatataaatacaaggggttggggtctgtccactctgttgggtcccaccaccgaggaccacaccagtcggtccggtttgctatttatgaggggggggggttatgtatctaaaaatattcagaatatattcaaatagatgaatcttttcaaaacctagaagttggacgaaggaaatggaagtcttcatttccttggaaccaactggtcgtctagacagtttattcaaggttcgtgtttcgttgagagcttagtgccaaagagagacaacgccgtctgagcctgcgtctaatcggtcgctcatcgtggatcctcttttatccgactttattaaagtcttggggacatcttgaaaaaaaaa

SEQ ID NO: 286 - DNA, 537 bp, Canis familiaris
acggcaaacttctatcttagaccatgtctgagacttgacgtgagtctacatttatataccaggatggtcacgactgtaaagtttatatccttgttcgactgagcttttatgtttactatttctaggttgacaaatctgacaagtaaccggtacggagcattatgtgacgatctcgattaaaaaccatctttgatcaaatttgacattaaataatccgtaaagatactctctggggacttataagaggaattgatctcggatattgtagttcaaacagttttatgttggtctaacgttttgattcccgtgttggtcgggacacagtcatttataagtctgagttttacaatctcgtccgaggactttttacgatatcgactagacaacgacacgtacccggtcatgcggcaacatacgagtcgctttgacactttgttctcatcattctgaaataaatgctcggtagtcatataaggacgtgggaaaaaaaaaaaaaaaaaaaaaaaaaaaaaaaaaaaaaaaaaaaaaaaaaaaaaa

SEQ ID NO: 287 - DNA, 617 bp, Canis familiaris
cctttgacgtgacctgatagtggtgactcgtccttcccattcaccggcactgacccgtgtcgagggactgtgcactggcgttcccagtgtttgagtgtcgtgggtgtcgggggcctggtcggggctggactagagtgagtgtgtacaaaaataaatgttaaacagactttgaaatactcgtgtataaatatgacgaaatgtcacgttaaacttaagatataagatctggtgtcgttaaagtcgttcggaataagtagcagatcgatatggatcacaaaacgatccaaattccttgacattgacggggtcgtcgtgactcaggacgtgatttgttttaatgtgacgttgattttgaaactccaccaatttatcatcctgactagactcgtttcacagtgtcaacatatcttgacacgacacattaaacttctccaaagttaactacctcaaatgacaaatacggactgttccccgtggtcgatccgtgacttccttaactcggacatggttcattttccgtgacctgatcatgtgacacttctcacattagcactgtgtgtgtgtgtgtgtgtgtctcagtatgataaatttaaaaaaaattaaattaaattaaaaaa

SEQ ID NO: 288 - DNA, 630 bp, Canis familiaris
actgcccgcatctgaccggagcctccgactgtcactttgatggtgtggactcgccggaacgagactctccatccgcactggttctggactcaagtcgacgacgtccccgttgggaaacacgagcgccggacggtgtctgcgtcttatcaccacaaagaaacgggggtcgaccacgaggtcgcccggtcgacggtcgcactcaataccgtccgaccgctcccgtccgccctccagtagagggtcacgtggacggtcgtggcctggctccaacacgggatcctcgaggtcaccgtccacctcctccgttggtgccctcggggccgggacggtctccggatctgggtgtgccgacagaacttggacctggtggtccgaccaagtccacgaacccgtggaccaaggggttcaaccacaggaaaggtccccgtcaccacaaccggagggtggggagtggggagccggccgggccgtggcccagggtccaccggtccgttcgtcccttggggggtcacaagcgacgataaccattggccccagttgtggagcttcggttgggtgggggagcaaaccgagttctgacgacttttgagaacgaccaacaataaagtactctaaacgaaaaaaaaaaaa

SEQ ID NO: 289 - DNA, 657 bp, Canis familiaris
catctggggagacccaaacagcgtattggaacaagttaatatttcgaaaccacgatataccatagtttccacgatgctggttcaccaaaaatgagttaactgattttcgtgaagaccaatatttaaaatattgtcgatcaatggttctccgtctgttgtttctttattcttaaatccgtcgtcgtctcccattatcttgtgtgttgttcagataggaaatctaagtgtctaactcatccaaaagattctggtagcgacagaaggtgatcagtgttttccgactttaaatttactggtttttaaacggtaaaacgtcgattagtttgatggtatgtgaccatctactttactcaggacaattcacaacaatctcggaaatcacgatgaatgccctccagttttccgtctggtttgaaaactccaataaatgtatagatttactatggttacactaaagtctatggttacactaaaattttctcgttcataagacttattttttgtagattacaaataacatcggagagacccaattagattggacacttaaagcactccaaaccatagacaggattaaacaatacgaccttatgcttgatagttctaaacgaggttaaatgagacaaaataaacaagactcggttaaaaacaaaaaaa

SEQ ID NO: 290 - DNA, 692 bp, Canis familiaris
tgtgcttttttaccacacatgttcctctgctgtgccatcctgtcgaatcgatccccactgcgaatcgcgaccaggaggatgctcggaccggctgacacataccgatgtccaggaccacacacacggcgacccaggagactatcctgagtcgcggacaccgcctcccagaaaacggagcggggggacgaccggtgggccttagtatacgatgacaaagtcctgagatgtgtggggctcgcgccacacgacccgttcgagtcgttgggctacaaggtagtttcaaccgaattacaacgtttcttttgatttgggcgtcctattctgttcggaccatccttacctagagaaccagcgttattacatgagtcacaacaaaaacggaaagggcgttgtgtcctatcaagatgtactttcacacgaacgaaaagactaccgttctattactcgtttaatccactagtcctaagatttttgtcttgtctcataccaatgtcgttatatttacggaccgttgtatttgatagggtgtgggagtagaaagtttggctcgacttaggtttgatttttaaacgaatttgagctcgtaaatataaattctatttctccccttgatacttatataatcgtcaacccaaggagtgtttgcttcaaacctcataaaacttaaataaacagtctgtggagactaaaaa

SEQ ID NO: 291 - DNA, 596 bp, Canis familiaris
cgtccagtccgtcaattgtccatagcaatttcagcaacctgtatgatgttaatgccttgacctgtctgatgtggtagaacagacaacaaaacgggatgttcttgggtctcaaaggcttcgaactcgtcacacgatcactatgtatcatcatattcatcgtcagctcgtcgacaattaggaacaatagaatttccggaagatgatgtagtattgtgtaaaccaatggaggagcactcacgacactcggaccatcagacggatccagaatcgtacgaacaagcgttgtcacatcattcagaaagtcagtttcagcttgaatgcgagggcggaccgtctgatgaggagaacacttcacttcacaatgatgtttccccgagagagagttgtcccattaaccaaaagggaactttggatgggtggacataacacctaaacaacccaaattgacgggcgtcattttatttttacgttagtcgtctggtgatgacaacaaattcttcctggattctttaaagtagtaaacagacgaaatctttctaaattatgttagaataaagacgttagataacaaaaaaaaaaaaaaaaaaaaaaaaaaa

SEQ ID NO: 292 - DNA, 532 bp, Canis familiaris
gacgaagagtctcatcaccggaaccgactccagattggggagatccagattccaacgcgtcatacaagtgtagacaccatacaaatgtactgaaaaacgtccgggacaactatcatcggtttttccgttgacaatgtgtcatgaacgacattggagcaatggtccctggaccggtcaatataacgtccgaacttgggttggttcgtcagggagaatcacaagatcctccgggaactccatcaactcaactggaggatgaaattggacatcaacaacctcgtatctgtccgactccgtcttccggagctcaacatcagccagcatcacgttctctagaagatggagttacgtctgaatttggtcctctggttcgtgaacaacaattccgacaagctggcccgtttctagatgaacacgaggatcccgaaaggggacgcggtttagtcacaggatttaataaatggtactcgtaggcttaaaaaaaaaaaaaaaaaaaaaaaaaaaaaaaaaaaaaaaaaaaaaaaaaaaaaac

SEQ ID NO: 293 - DNA, 622 bp, Canis familiaris
gagactgagcggccgggggccggggcggaggagggtgggttgtgaccgactcatctcacgttggtgacccaagggcccaacccggcaccctggggcactgacacggcaccggtccccagagaggcccaccccggatccagggggacctgtccgggtgacctcccctccaaagctcgtcagccggagtatctgggacaaccagccgatcgtcgtctgcgaccgactcctctacgtgacgtctctccagaccctctgtctctcggggtctcgaactcggtctcgaactctggccggctctcccacggacacgcgcccgctgaccacaggtagcttccgacgccgtcacgtgggccccggggaagaagaaacgtcgtgttgggtccgattgatcgccgggagcgtgagtgagaaaggggttttccaacagccccttggagtcgatgtcccttgccagtcgtccagggaccactgacggaggggggacgtcggcgggggaggggtgggggcgatgacactgccggtcgtcgtttcctcggtgaaataaagagatcttggggaaaaaaaaaaaaaaaaaaaaaaaaaaaaaaaaaaaaaaaaaaaaaaaaaaaaaaaaaaaaaaaaa

SEQ ID NO: 294 - DNA, 681 bp, Canis familiaris
gggaatccgccgacggttgtacccgacacctttggccacattggcgtatcaccagcgacgtcccgggacccatctggtgacagatgtggaccacgtcggccagactccgtcacagggcatattgagagaaaccacgacattctccacatcgtcctcgaccacgacttggaccggctggtcggtcaccacgtgacacgtgcccgggacacatctgacggtcccctgacaatgagtccgtaactggtcggagtcccttgttcgtgacggtagatctcacaactaccgaaatcttgtgtttcttcgaacatggaaccagactgatcccccaaatctcaaggtgcctttttttcacgttcggtttcagtacttctaataacaatggatgaaaagggactgtccaggtgtgtccgtcaccgacgtgtaattggtcccagtcacgtgtacaaacacgttgtcttaccagaatgacggtcttcgttctttttcgtgtcgtcaatcggtggttttttcgagtttgtcagatcgtttaatatattcttatctatggaaacgactaattcgttgaagtttgacaattgttcagtgttcgtctcctccgatcaatccgacgttgtctaaggggaggactaagtgagttcacatctggttcaaatattaaactttcctggtgaaaaaaaaaaa

SEQ ID NO: 295 - DNA, 566 bp, Canis familiaris
tcaagctagtcttcaacgatcatataactttctccttgggaacggggcaactcaatcttgaaaccgacacgaagtccttctaagatttctacgaccttatatacgtccactgttgtctcgaattctttgtgatggtcgtcattgtctcctatgtctcttcaataaacacaaacctacgactcgttgtgaactggttgacacagtgccatttaaacctctatccaacccagtgtttcgtgctatgatgatcattccgagtgtcagtcgagtagactccttgatgtatcagtgtctcaacctgtagttgaccgtgggtgcgggaggtggaggtcaaatcggacactgtgtcaacaacaacgttcccttaagtgactacattcatgaaacgaaatctccagtcaatgtcgttcttcatgactcttcacaaaactcgaacaccaagttttatatatttcagactctaccaaattctgtattggtcctataattagtctactattgttcggtaaccgaacactttgaaagggagtcctcaaataaagggaagtattaatcaaaaaaaaaaa

SEQ ID NO: 296 - DNA, 483 bp, Canis familiaris
accaatcccaacccggggaaccaccggactcggtccacatcgggggataatccccgggaccaaatcgagttgggtccccagagaggatgcttgggagatccgggggttgaagaggggtcggtaaccggacaggtctgggagtgacaccagagtgtcgagaccgttgggagtcggtcaagtggtcccttccctgccctggggaggtaggtgggggtcccgccaccccccgacccgtgttccgtggtgacgacctcaggagagtcgggagagagtccctgaccacggaaatgaagtgcccaaagccccgttcttttttaaaatctttattttaaaagatcaaagggaacgtcaatacaaaggagacaaattagattcagcacatttttacttatgtcggaacaaaaataaacgggggaaacaaataaaaatgaaaggggaaagggcatacacaaaaaaaaaaaaaaaaaaaaaaaaaaaaaaaaa

SEQ ID NO: 297 - DNA, 590 bp, Canis familiaris
tgtacctcgctagagttgggtggcgtcaacaacaattaccagaggttgatgacgttggactcagagccgaccgtgatcgatatgtcttaccagactgctcgccacaatccgatcgtgctcaccatcgagatgtgatgatgactactcatcttgacacctcgacgatcttctggaacggaccttgagagagatgactggggatgcacccctatcgtccgatgagaggtccatcctctcggatgagatatgaggacatttaccccaacccgtcccctccaactatgactgatggatgatccctgtttctgagttccaacgtgacaaagagtcgtccgactgtcccgcctcccggggtcacggttgctgggttctcttaaccagtggatgggtggggccagagtatgggtggattacgtggtagttgggtggattcgggagcacctttgaacgttgattgtgaacatggaatccccacgatcctgtgtccgtgtttttcgatttaagttgtttttggtctttttgatgcatcctaaggtttcactgtctcaactcctaaaataaaaaaaaaatccttcaaaaaaaaaaaaaaa

SEQ ID NO: 298 - DNA, 717 bp, Canis familiaris
gcggcggaatcggccagacgtcccagaaccatctcaagggggcaacgggggccgccggcgagcggccgcgggtgcggcgaacagtgccctcgggaagggcgctaaggtagttcagcaaccggttgcatctggtgctccaggccggcctcagggtactcacacactttatacatgccgacgagcgaaacaagacctattagtagtaggaggcccacttggcggctctcggacagatgagacactcggaccaaaaccatctgttctcgatctttcaacgacaaatcgaatccacaacacagtataaactccatgaacaaatgctgaagattatggaccacaccgtcaaccggtctgacgacgcccaacctcacacgtagaccgacaagtctcggaaccacgtccacgacttgagggacctccggaaccggtaggaccaggcgtatgagcaggtcccacgggattattgtcgtaccaactcggtccgtaaagacaacgacgccatcgtccgacacacaaaacgtcgtaaacaccgtcgtcgtcggtaaccgacgtggttcacggtgtttagaacattatggtgaaaataaaaaaataacaaatgactttgtcctaagaggtttcatgtggaaggttcaggtagtaatcagttcctttatgtgggtttaaattgaagtagtcaacacaaataaacaaaccgagtattaaaaaaaaaaaaaa

SEQ ID NO: 299 - DNA, 535 bp, Canis familiaris
catcttccaaaactaggacgacccacagtttccgtagtctggggctctctagtctcacaaggacggaatcgttgggatgccggtttgccagatgggacctcaccggatcctcaacgtgtagtcggggaacttcgatccagctctagagagggaactgatgcaccgaggatgagagccatccgcggtagttgccgaggcctttgggtgagatcgtgttgatcctcgaggggcactaggccgggaacgccgggcgcaaggactttctcgggaccgtgtagcctttgaacatggatggaatccggtaggacgtcgacgtggaacggcggacgaagttgaacacgggactgaacagcattgcgtcattggggagggtaggtctgggtgactgtttcagatgtggcatggtttcgtcggagggtttgaccaagggtgtatcctttttactttaaattaaaccactgattattctcctcccaatatcaaataaactccaacaaaaccggatcaaaaaaaaaaaaaaaaaaaaaaaaaaaaa

SEQ ID NO: 300 - DNA, 544 bp, Canis familiaris
gtagtgacaaccatttcagtatggatagggagatgcttacgaggacgaagttgactcacaggtgacgtttgatcggacttgtgaaactgcttgtgagggaccggaataacgtccctctgtaaaaccagatgtttagtgggacgggacggattctttggaacacaaagatattttaaaaaatcttaacatatccaggaatggtgattacgatctttggatacgacggactgaacacgatttagagtatttgtcgacataatagttagtttacaagtcgtgaaaagggacctcgtttgttttcttttaatgttttattcgtgatcatcattttgatattgtcgaaatactctatttggtccattagagatactctcttttggtcaactattgtcataaaatctcctttttaaaaggtgactatagtttttccaaaaccacgatgtccttatcgataaaagacacgtaaaaggtaactttgtttgctctggtgggtagttggtggatctgaatgacattaaactatctaatggtaaaaaaaaaaaaa

SEQ ID NO: 301 - DNA, 678 bp, Canis familiaris
tagacatggggacattgctcaatgatcagagacaatttatgtgtgatccttggccaccgtccaactggatcatgaaacctccggacgacattttaccctgtcccgacacaggaggtggtcctttctacatccggatagtgtgagtctcgggtgagatccgaccaaccccccctctgagttttatcaactgagaaatgggatggatcacccgtggatggtcaacaagtaaagaggttggaaaccgtcggaggtggtaattatgctgcgagtcccccttaacaatttgaagatacaactttcccccacagagaaatattgactgtatcctacgatactatctttatttcgtacgaaaagatccggtccttgaactggtatcgggtcttttcgttgtctattttctatttttctattttctagtttgtgggtacaaagaaaaggaatacagtctagactactgggggattatgtctcaaccatatcttggaacagggtgactccatcggtcaaaggagacattacctagtaaggttatatacattatcgtggggggggaaatatagataggtatcataaactttaatttataagttaccgagacttaacaccttaagaagacgaataataaatacaagaattataagaatatagtctaaaaaaaaaaaaaaaaaaaaaaaa

SEQ ID NO: 302 - DNA, 576 bp, Canis familiaris
tcatgcccgtcgggggacaccatcagtccggggcacatctcttgtgtcggggcaccacggttttggggtacacccggggctggactagacagactcctaggtcacatccaccactgtccacgagacgtcgtcgtccacatcgtcagttttaagggagagaacgcaatgtgtcggttggcacgggtcgacgagtgttatgtagaaaaccgacaacctaagggacactcacgactccaatccgtcgaagcctacgaacaccacacaacgtctgttttgtgttggtttcaagagttcactccacacgtggggaaagtaacaaccgactgttcaggttgatgtgtcaccgtctccaaagaagtgggagtttttagacacaatattttcgtcggttaatcagattgggtttggaggtgtggttttcaccgttatggttgtggtcgggggtggtggggattttgatagaggaaccccctatctgggttcttgtggggtttgtatgttcatattcccatgttttttatagaccaaaagaaaagaaacaaaaaaaaaaaaaaaaaaaaaaaaaaaaaaaaaaaa

SEQ ID NO: 303 - DNA, 661 bp, Canis familiaris
gacgaggggagctccttcataggtgcaacgactgtaattagtgtctcaactcaaacacaacggtgatcgtgttagtagatggaataacccctcacggtcggttgtggctcagtagaggtcggtggggatcctgttgggatcttgagaggtcggttgtggtgatctgagaggtcggtttgtgaggattttccgtccaaccagacattctggatttttggggggacaaaatgagtatgatttttttaataacaaaaatagtggtaaaattacgtgttggacattttacaggggattatggggatcgggtcatggaaaaaagtctccaaaagaaaccggaaagttgtggagaggttagcagacggtatatctcctgtcaggtcgaggatttgtccgagggagtcaaacaggtgtctgtttgaactctgtctgttaggggtggaacttccctacatactcgacagtagacaaatatccatttttcgggacgagttgtagatgtggaaactgttaaaatccttcctgcctgggggttccccagaattctgacttagaactgtgacacttcccaatccaacaaacgacacccactgtactttgattgatttttgaataaatatttattcactaggtaaaaaaaaaaaaaaaaaaaaaaaaaaaaaaa

SEQ ID NO: 304 - DNA, 642 bp, Canis familiaris
cgtcccagataggacggtccactaccagagacacacacccccacaagtcacaggtcggggttggcactccggatgtatttaggtccacaaacggaggaggtggtcccgtggtgtgccgtcggggtgacagtcgacaccgcagtgaacgggggacaaagggggagggccgatggacagggtcacagtggggtaagccggacaaacctggctttgtggcacaaactgtgtctggatgtggtccgtctgtcccgaccaggccgtgaccgacgggcggcgccagggtcccacgacgtgcgggcacatgctactgcgttgcgggccgccatgcgggaccgggaccacgacgtcccgggggtctgtgaggggtcgtcgggcccggacccggtcccgagcgtcgcccaagggtaggggtggtgtccggaggagaggtcgtggtcgggacagtttaggactgtggtggatggacaggagagggttcacggatcttccccgatgtgggtggattggtctctgggtatggggtccggtccaggtgactcccaccgctccgtaacatgatctactttggtatttatatcaagtatttattttctctctctcctttgatagaacaaataaaaggttgtcatttctacgaaaaaa

SEQ ID NO: 305 - DNA, 635 bp, Canis familiaris
gaaatagggcggcacacttatccaataagtattcatcgaattcaacacacttcaacacatgaagacaacgccggaacgtaaatcttataatcaatacattaaaccaaaataaacaattagacaaacttgaccagatgaaacaactgaacgaaaagattgatgttatggcccggggtgttcgaccgaaaccaaacgacgtccaacaaaaaatcctcgacaaattagaacaccatctccagatccaacatatttgttaaacaaaaatgtgagtggatttgtataactcgctttcaaaatgttaccacggtaacaagttataaattatgaatttatattttaaataacctgagtgaaatcaaacctaattaaaactagatgtgttctagattcgtctgtctacaagatgacatattctccatcttacattcgatgttgattcttaaaggttgagtcatacttagatttatctaactgatcgaaattttttttataaatagacactcaaatctccagataaaatccttgtcggatttccatcctccgactacctcctagttatctaacaagtaatcagaaaattgatccgtacgaatatctaaaataaattttgtttcgactaaaaaaaaaaaaaaaaa

SEQ ID NO: 306 - DNA, 495 bp, Canis familiaris
actcatgctgtttgtccatgaaaccacctaaaattctttaatcatcaggactgattgtatcgacagatatagatccaacatcccttcatgaacgaaataccccaaaaggtcattctcagaccacccctcaacaggattcaacgggattgtaccatcctcatgggtccacccattcatctggatagggcgttggacatcggtcagcgaaccaatcaggtggcgtcatcagttgtttgaaccgaggaaccgacgagtccgtcccccaaggaggatcatgattcaggatctgctcgggcacgggcccagaacggtcgtccgacggttgcaggactccacccaatcccgtctcttccacgacaccaacacacagacaccattcgatttatgggttaagcttggtcaaatgtcgaatgacgaacaggccgtaacgcaacgccttcgaggttttggacccgtcgaaaaaaaaaaaaaaaaaaaaacaaaacaaaaaaaaaa

SEQ ID NO: 307 - DNA, 570 bp, Canis familiaris
gactgacgtgctttatccgacacgacacaaggacgtccaagtttaaataggtacaactttgacacaaaacacccgaaaggttacccccgtcaaccggaatcttggacgagcctacatgaatctctacaccaggattaccggacttccgggactggtctttgaccacaccaccgacatcacattctacgccacaggagggagtggtggaccaaaccgccttagttgtggtgagggtcagttttttgtttgattacgtagactaagtctggtaggttcggttctccctaggtcgttatctataagaccaagaccgatttcaagtttcaaagtaaatctcattagagttgatcggaaacggtatgagaccaatgtcctctcttcctcgtttgctaataacgatttcctaaaattttaagatcagtcgactggactcagattttggttcatttttccgactgtacatattctaacccccaccccaataatgtagacaatatctgtgtaacgtaacaaatcgccatttaggaataaaactcatatatcgaaaaaaaaaaaaaaaaaaaaaaaaaa

SEQ ID NO: 308 - DNA, 544 bp, Canis familiaris
tgagtgcaagctcagcttgatccgacgggtttcgggtgacattaaaggtcaacttgtttaagtctctctttaaacgtgttccggtcctgagggggctttgatgaggggaactgggtctgtagagtgaacttctcctggtttacagtgtactgttgtactggtcgtaagactcttggttggtctccatatttcttgagatactttggtggtcggtttgggtggttgtggaggtctcgactggtcgggatggttgtatggtcgggatggttgtagggacgtgttgcctggtcctggggactgacgggtctggtccccgaggtggggtcgacgacgagaacgggacagggttttctcccggtttcacatacgattgtctgggtgtgacggaggtccggtatctagtccatggtctctttttcccccgtcgccgtgtaccaaaaatccaggcgacagacttactttctccattggaaccattggaaccattttccccaccgtgtaatgagatgggggacaggaggtgaaataaatctgatttaaataa

SEQ ID NO: 309 - DNA, 597 bp, Canis familiaris
gggacagggagcgggctcgggaggcgggcccgccgggggcggtgcacgggggcggggcgttggacgggcgatgctgagggtgggaggggccggggcgcgggggccggggcgcggggggcgctgcacgggcccgtggggacggggcgcccgagtctggtggtgtggctcctcgtagtgacagtgagggacacctgggcgagatcgacagaggacctgtggacctctccctatcaactgaccaacccaccagggggagggacgggacggggcgacaccatgggcggagggtcgaggggtggtctggggggatgccggaggggacgggtggagcgggagggtcccggggacaccgttccgacccgtggcctccggactcgtggacatggtgatcccgagccgggtccgtgggggccggttcgtgacgggacggggatgggtccagtggttccggggtgtccgcgggggcacctgtggcggtccggtgtccacctgagctcagggacagtcacggcccagacgaccgggtcgagaggggggagaggggctcgagatcgggactggaataaactgtttcaagtcggaaaaaaaaaaaaaaaa

SEQ ID NO: 310 - DNA, 649 bp, Canis familiaris
gaggtcgactcaattgtcttgtgcacctaaaactgttgcatgtgttgcttatactttttttcatacgacacatcgttattatgggcaagggatgtttttgctgatgtcccatcaatgtctacaaacaatttaacgtcaaacaccagaaaccaagaacgtgtctcaaaaccaaaaccaccaaggtggttgtttgattacacgataagtcactcaagttgttactctcccgtactctccgtgatcgtgggacactgggacggttgtgtctggtttaccctccattcgtatacttgaaactgaacgtttacaccatcccaaaaccctcaactgacaaggttggtaaacgacacccgagaatgactctcaataaattgagttgacaatgggagacacaaatgagttgttcttcttttcaagaacaatccatgattagtctctagtaaaccctattacagtcggtgacctcgactgacactccgtagacgacttggaagatactctacagttctagtttagggttggtatattggttggattgttagtcctcaagagacatcctacatttacgtcgtgtacaattgaataaactataatatttgtattagtcaaaaaaaaaaaaaaaaaaaaaaaaaaaaaaaaaaaaaataaa

SEQ ID NO: 311 - DNA, 579 bp, Canis familiaris
gttggggatcggggtccagcgacggacgtcccgggtgaatcagtctctcaccacggcggtggcggttggacgtcgatggggtgttcgggtccaggtgcctgacggtgtcaacgtccgggaggacatgtcggtcggggtggccggggtcctgggacgtgttcggaaacacagtaaactccaacccggcgacccgacccgactcatttccactccccacttgtgtccccatacagtccagggactgttgtccccctcgtatctccccatggacgggagcttgtccagccccaaccgacaccgttttgtccaaagtcgaaatccagtgacacgacagtccgttggtcgacacgggatcccaacggctcctggctgggagttccggatacatcccgtcgccacccggagatcggtgtgggagtgtgtgggagggtgtggtagtgtgtggtaggttgtggcagggtgtgggaggatgtggcatggtctggcagagtgtgggagggggccccccgtggtacggttcatggtttggtgtgatccaataaagactctctgcacaaaggaaaaaaaaaaaaaaaaaaa

SEQ ID NO: 312 - DNA, 508 bp, Canis familiaris
gggatcaatattctggcaagtggatgtcttcgtgacattccaatttgactccaattattccagactttccgtgaagacagtggactaccgaatcgtcgtctatggtgacctcagtgattgagtgacttgagagaaaacatcttccagaagttgtagaattttcgttgatgatttcgtctctgtgaccgggacatcagaggaactggatgtcaaatcttgattggacgaaatctccttgtcaaatcctatcaaagtttgaaacagcagtacgagacagggtgtgttttcccaaagataatttcaataaaataatttttcatccattggcaaatttctgatcttttcaacacaaatcggtggatttaaaactagcaactgaaaaccatgatcaacggtaactttaacaagtagttattcagtcaaagttaatcaaagtgtttataaaaaattaaaaagatcccaaaatcaaaaaaaaaaaaaaaaaaaaaaaaaaaaaaaaaaaaaaaaa

SEQ ID NO: 313 - DNA, 625 bp, Canis familiaris
ccatttactgatgtcttcgattggtacatctatcaacaatctttaactctatttcactatatatgtctcacccgtaatctagaaaactatgtttcctaatcaaccaatactcttgtgaaccttatattattttgtttttatcgttcgttttacttgtatcttttattttctaaccaaggatgtgttcctttcctgatagtatttgagaacgacggatttcttttgaacctgaaccgtatcccgaccttcttagtccgactctacggtcttcctaggtcgactagtccactagtagtctaatctcttttccacgaatctgtatcaatgattctccttttaatatccaacgtttatttcaagaataataggtttcgtatcatttggtttgtctacaataatactctttatttggaaaaatagacttgtgatctatattgacgatgtaaaaggaatattttccagattttaatcaaggattcgtatctttacaattgtttttgacttttgtgaggaaatattaaattcatttttatctaggagagattttttaaattggatcaatttcaaattttaagacgagggttagatataataaactgaaactttaattgtctaaaaaaaaaaa

SEQ ID NO: 314 - DNA, 676 bp, Canis familiaris
tgacgtatcccaatatgtccccctcaacttcgactaaggggccttgaccatgtacacggattgacactcctctgctcctctggcattttgaggtattacgcacgaatgggatgattctgtggtcctccttcccagaaattcctagaaccttatccaaggtccgaaagtcgaatcgtcacacaggaatgagatgccggagagcccttagcttctcagaggctccaggctgtgtggccatccatgtgtgtctcgttcgtccacccaaccatccggaacggatcgttctcccatgtgaatcaaccgcacgaggtttatagagttcatcctccacagatgatgaatcgggtatcgttgactggtaatggcatagtccgtatctcgtcggagcccggggacgatgaacatgtcccagttccaaccgaacatgattctacatcaagtaaacgaacaacttatgactaggacgacgaaccgacacggaggggactctaggtgtgtccggtcctgtcgtcatccggacagtgtctttcgtccgtagaggcagaaggtcctcgctctctccgacctcaggatgccgagggcgtacaaatcatccgacaagtttaccaataaaagattccttttgtcaaaaaaaaaaaaaaaaaaaaaaaaaaaaaaaaaaaaaaaacaaaaaaaa

SEQ ID NO: 315 - DNA, 564 bp, Canis familiaris
  misc_feature (150)..(150): n comprises a, c, g, or t, or includes no nucleotide
tcaaaccgggcaacatcattagaaccagtatccactgaagtctcagaacatccgatgccaaatgcaacatgatatgtaggaccacgtgaacacgagccagatcaactaggccaaggccctcgcgactgcaatgacgaaggtgaaccaggngaccaaggggacggtcaccaccaatctcgtgactccacggatgtgtcgtcccgtgattcggaacatcagacgacaccaaatccggacgcatcacgtcacccaagtcaccaatcggatcagggaccaacgtatggctcacgatgacatccggaacagaccgccgaggaggagtcaggttttggactcgacgaaatcgaacaacaacaagtctaggtataaggacctcgacagagcgactcgtcatcacgggatcagtaggtttctgttatcgaatcaatctccgaatgcgtccaacttgtcgtcatacaaggcggacggaccatttgactcaagaacctcaccaacaagaaacacagcgagtaacggattctacgtccacaaaaaaataaaaattaacatcaacaaaaaaaaaaa

SEQ ID NO: 316 - DNA, 580 bp, Canis familiaris
tctgtagtatgaacagagttcaacaccgtctcccgaatagtgctcaaattggtcccaatcgatggttctcacacctgacaggaactcggacataaggaccagagggagagattcgttgtccgtcctctgcttggccccacctgatcatatgttcctcgcgtggacagtcgctcgttttccagagactaagaatcgacctcagacggacaacttgacaccacgtcgggactacagatgatgttccgatgtctcccgtaaccccggacagtcgatccagggtcgtggtagggttttggggtgaagagtagcgacaactgaacggttgatggtcaattgggatccaaagtggttgggaacggtgtcgattggaaaagaagtaccaatgagtccccaaaaaaaaaaattttttttgggtcgaccagtcgtaccccataagttttttctttggtttttattaaataccccatcattttacgttctggtacaaggtcttcgggttgttctgaccctaccagatgcgaaatcaataaatcgtgcgaggtggtgttcaagtttaaaaaaaaaaaaaaaaaaaaaaaaa

SEQ ID NO: 317 - DNA, 462 bp, Canis familiaris
cgagatattttgtccgattaactgtcatctattttggagttatggtgattatcctcctgaacctccaagtttctaatcccgacatgtcccccaaaaaacgactatgttaccttgtttgtaaacacatcctactgtcaagtacctctgagtaaatcaattcaactgaacaactcttccaacttagagtaaaggaaattcagagtcttatgttggagtgtgagggatcattcgatccatgattttgtgtttctttaaaaggaaaagaaaaaagaaactagtccaacaaacaaagttaaccgtcttgtataaccttttaccacgaccaatattcgtttacattttaaaattaaattttccttttgtcatttctactaatgaggtccatatctgaatggaaatcgggatttctaaacgatattgaataaaatttccaatgattaaaaaaaaaaaaaaaaaaaaaaa

SEQ ID NO: 318 - DNA, 650 bp, Canis familiaris
tgtgaatcccggtgtttctgacgtgtgtcctctgtgcgacggtcgtccatcgaaaactccacggaaggacgtaatgaacattgtcatgttaccaacttccgggttctcccaatccgacctcgggtcaaccgggttctagtacaaagtcgtgttatataatataagtcatgtcccttcgtaaagtgatactctatacgtgttcgattttggtccctttttatggacgtattcccagggtgttcagttggtttcaactgtctacctttacttggagtagtggactgggaccagttttttttttttttttttaattcaggacacaaatctacatgtgtagaccgaggagtgtctcgtcctgtcctccgggaaatctctgatttctgatcgaaatactatttctgaaagagttatctaggaccaagtctatttaagaccacgagaccccatgggtccctccgtgacgccttgacgaggtcggtttccgggacccgctcagggtccactggtcccatgcactgggcgatgcccgtggcccgatccacggtcgttgtgggtgtcggtctctgtgtcggtgtgtgtgtgtgtgtgtgtgtgtgtgtgtgatcaataaataaataaataattaaaaaaaaataaaattaaaaaaaaaa

SEQ ID NO: 319 - DNA, 516 bp, Canis familiaris
agagttgcctgagagaacgatggtttattatcaaaccaacgatttaaacccagatgagagtacaaaggatgacagaccgacccaaactacaggagttttacaaggatcattgaaccaaaacctcattccaaggataaattgcggagttaccttttgtacgagtacacctgcaaaccatagtggtatagagaattgtcttttgtcaaaaggaagttgacccattgtggtgtcgacaatgtcggagtttttcgatctctgtggttctatgacccagagtaacaaagatatagaatctgttacttctctccccctactcaatccccggttgaccaagtttgaactgatcctctgtctcattctggtgttgtcccggaggttgggggtgggacgtctcacgacttcggactacgggaaaccaatcctattctccatctctggtctccaatccaaacctcccacggttaaggataaatatgacgagttgaaaaaaaaaaaaaaaaaaaaaaaaaaaaaaaa

SEQ ID NO: 320 - DNA, 615 bp, Canis familiaris
ggttctgatccggactgcacaccttggaatgttgcccctgagtttaacagaagagctcaagtcggaccggatgaaccctatcgatattgcaaacggggggactatgtcaacatctgagtttcgacaacggctctctgggattggctgcgtagaatcctccacttcctacctctcgcgaccgggaagactccccgtccagagaccctgcctccggggacaacactcgtcactttttagtcgagatcgttaaaaatcgccacactaatcgtcaagttaaccctttacatctacattgtgtcctgattcacgagatggacctcaataaacggggggacatcgcagctacaaggtagagcccgtgatccggccattaatggatagatcacgtgtgggtcggagaattcacatcattgttagtcaaaaacacggacattcttggtaaagggcaacaccaccttcgagacaacaaaaacatatgggacaacaaagtcaacaaaggaaaagttatccgggcccactaaattgtcgatacaataaatcggaaataaaaataaaaaaaaaaaaaaaaaaaataaaaaaaaaaaaaaaaaaataataaaaaaaaaaaaaaaaaaa

SEQ ID NO: 321 - DNA, 630 bp, Canis familiaris
cagtctcgagaagttgtaaggacgcgtcatgttcgaacgagtattttcacgagtgactttccactagaccaacgacgtggggtcgatgtcgactcacgtgtggagttcctacgtcccacagtcttgccacactcaggttcgatgttccatataaaatgatcctctctggtgaccacaatctcgaataggtttcttattataatcgacattacccgtggagtctcatgagaagagttgcttaatcaacatcataaaatccgctactcaggacgtccccgaggtcgacgatgtttcagtctctgtggttgacactgatctcgttgtccgagaccaaactctccaacaaggttcactgtatctgtagcggccccggtcccacaagttcttgattgggtacaagaccttcttcaatctgtctccaagacccacgacccatgatccatcagagggagaccaacggagtaggtcatcagagttccaactcattctgttgaagatgagaccgatcagagtttcaagcatatacacatcgagcgacttcaagttacaactacgactattccgtttatctaataaaccaacgatttttaagttaaaaaaaaaaaaaaaaaaaaaaaaaaaaaaaaaaaa

SEQ ID NO: 322 - DNA, 154 bp, Canis familiaris
tacgacaccaacggggtgtcgggtctgtccggagggtgtccggacggcaaacgagtgacaaaggcacgggttggtatttggtgttggggagatcctcgtcaccgtgggtcgtcaaatcgaattaaacggattcattttgaaaaaaaaaaaaaaa

SEQ ID NO: 323 - DNA, 594 bp, Canis familiaris
ggcttgtcggtcctcctgtggtcgggttgacgatggtcattgtgatggtcgtctttgctccggagtttccagaactggtctccagtgtgggccccaaccactgggtcaatgtgtcctatcaggtcgagatccaagaatcagaagtttagatccggtcgactaatctgacgcacaatccgtccgtgaaccgccttgacctggtgatcctcgtttgggtgatggtgtcgtcggtctggttgatggtcttgatcttggacgtctataggatcgccgcaccacccgtgttgtatcggagtccggtgtcggacgtttcgaggacgctccgcctctttaggccccgcgtcatgtagcggattgagcggcaccacatggtccagccacgcgggcggccccccgacgttgccttagtcgttgcgcgtccgttccctccggttgggggtgcgggtccggacgccgctgatgtagatggaggtcgccaacgcccactcacccggggcgctgcgacgtcggcgagggtcgggcggggtgcctgtgacggggcaacgggggcgggggccggtggtggacaaaataaaaggctttaaggcggtcaaa

SEQ ID NO: 324 - DNA, 689 bp, Canis familiaris
ccctacggcacatccctcgctagaactagatgaccacgtatccaccaacaagactggcagctgatcgcgtttgttgtggccctcgcgtcgtccgaatatgcggacgtgtgtcgcgtggagacccggggggcgggaagggccgggcataaacgcgcgacagtcccgtagaaccggaacgaaccttatctgatatatgccattgctctcgctgctcctccggcgaaagcgggacttggtaaccctcgtaggtatccgaacggtctggatgatcctcttaaggacgtaaactttcgggcaacggttgactgtcttcgacaccacgcacgtccagcggagtcgccacgtgtcacactgttcaattgttattcccttccgcaacattggagatagaaattgtttcaccttatggtgattcatggattggataaacgtatgacaacaaatggtcagagggactccatgaggaaaggactggagaaagagacccacatcgcacccgtcaggtgtcgaccggcgaacactgctccggttcccaaccctgagaacttggaggagagtattcctccttgtgcggctcgccgatccacaaccgcgaatagtgtggacgtggaggcttaggcgtaatataactaatctttctaaaattgttaggtaataaagatttaccagactgaaaaaaaaaaaaaaaa

SEQ ID NO: 325 - DNA, 676 bp, Canis familiaris
aattccgaacgccgggtcgaggtccatcgggtcgcggcatcgggtcgccgggtggggccccccgggcaggtgcgatctgtgacccatgtgctgacacggttcctcgttaacacgacaccacggagagtccgtgtcgagatgcttcggtcaaggactctctgtcggggacggtgggggcccgttccaggccacaacgccccggctccgtcgcggtcgcagggtgagtggacgttccacctgacggacccggggtctccggccaaccgacgtggacccggggcaccaacacgagtttggaaccaaagccttgagacacgcgttttgtcaatgtccagggctgaccagggagaaagggtgactggagtggacggggacgagccggtggcgtggcccgtccgtcaggtcgtcccctgtcgagggggcggcggggagggggagggtgaggggagtccctcgttggatgtggagctgacgtccgtgggggaacgttatcttacgctcccctgggctccccccacctctagattcgtgactccttgggaccagcgccggagggactcctaggttttgtggttcaatttgagaaatcatagtctaatcaggtttgggcatcaaaacgacgaaattaaactcattttattctttggtaaaaaaaaaaaaaaaaaaaaaaaaaaaa

SEQ ID NO: 326 - DNA, 621 bp, Canis familiaris
acatcacagggacctgacgacggaagggtgagctgcctcaggcggcgaagttgattaggcagcgacagcgggacttagggtaaggaggacatccggaacacaggaaacgacggcatggaggacgtcacaattgctggcgtgggcaccgtcacgacccgccccgtcactaaatcggccgttaggatgtgtaggatgatggcctttactgatgggagatcaacaaatcaacatcaaattgggacggataacaaatccaggaaacattccacgtcaacaggttaactcgttcgtttttcggggttcagggacataaataccagtatgtcgattatgtatcgacgatcccctttttattatttttaggtaaacagctgtgtttttcctaatcataaagctcttttttaaaaaaaaaaaaaaaaaacggtcctttttgtgaatagaggtttaaacctttttaaattctttgatatgtcctgaacttcacatttttaacaaggtgatttttaatttctaataaaactttagaagttcattttttggaaaaaactgaaggaagccggacgagggcttaataaacctgttaaataattaaaaaaaaaaaaaaaaaaaaaaaaaaaaaaa

SEQ ID NO: 327 - DNA, 574 bp, Canis familiaris
acctaaaatctaacaagttcctgtctttgttgtgatataaggttcattttgctagctatattaatgatccaccagtctacaaaaactttaacgcatgttcggcttttacagttaaatcggatatttgagatcgtatttagaatcgacacagtgtgttttttcactaattgtacggtttaaaaatcaagcaactggttgtaatcgttaattcctcagcgtcggcgatactcactcggagtcacaacctgaagacgtcgacgttccacttctcccgaggatagagggcgaacagtttcatagttgactctcaagttcggagttctgttctcgtcagcacgtagaggcacgatcatgttcttaatcgattttttccatcccaaccaaagctaaatctttaccaacaccgtttatcataaccatccaaacgcagttgttcgttctagatagcccccgtatagtcgtatattatttacggtcttaagagtctttaaaactttaaccattttgtgttccttctacattcctgtacaattcgattgtcaatcaataaaacttaaaaaaaaaaaaaaaaaaa

SEQ ID NO: 328 - DNA, 626 bp, Canis familiaris
tcctctcctggacgttaggttggtcgccgtcgtgacgctgtgacgggaggaacatctgtggtagggatcgttcccctccgggcacaccctggggtcaacgtggccccccggaatcaccatcacgtcacgttccacaggacggggtatctgaaccaattgacacatccgtctgacagagacgaaccggccagcctcgtccacctcgccagtggtctcgtccacgacgtaggcctcgtccagcggtggttgtgacaggtcccccgggggggaaccgccccacccctcgtcttccccggtctctcgttgatcccgtaccaggttgtgtcggtcagtgtctggcggcaaacgaccgggagggccaatgtgagacgatgacgtgtctcggaggtgggaacacccgtggtgaggatgtacacccgtttcccggacccgaggcacacgggggactgtccccgagaggaacccaccctcaacgctcggcccgaggggaccccacccctccgaggtccccgtgttccgggtgggagggccacggtctcaggtcttaccgacggcccagggttatttaaaagtgaggtgggcatgcggggtaaagaacgacaacacaacacaaaccaaaaaaaaaa

SEQ ID NO: 329 - DNA, 639 bp, Canis familiaris
tgcccttggccaccaaatcgactcgagtcaaatcattcgacgaggtaacaattgatgttgacgaaagtttgtcaaatagacagaatattttcttttaaaataggttcttttcatattaaggatatcctaagtcatacctaaaattagggtttgggtctattttgttatcttgacaatttatattgaggatgaagatattgagatgtagtagatattgaatgaagtagtaaaactggtcccggagttttcaagagttaaacgatttgatttatggttgaaagggaaatcctcgtcaaatagttgaagttcaatctaaaatctattaaatgttacgtgagaccatataaagatttaattaatatataagtcgttcgtagaaagtaacgcagatcttatgtcctattctaatctttttaatcaacttttaatttgttggaaatttttgacctaaggtatttctaaaagatttctaagtttttgtcaacacgtgttattttaaatcgggacagagtccgtttatactgttgtttagagtgtgagattgttttattatatcgttatattatcattcgaacattatctaaaaatcggttcaataaatcatttgaactctgaaaaaaaaaaaaaaaaaaaaaaaaa

SEQ ID NO: 330 - DNA, 555 bp, Canis familiaris
gatgaagagccacgactatatcgagtgtgtcagctccgacgaccgcgtgaggcccgtcgtccacgcgatcgacagctaggaccatcgtcactgcgccgacctcgtccgtcggtccatcaaccacgcggaccacgtcacctcgatgaggaaccgcgtcttgaagcgtgactttcccacgatgtttgcgaggttggagaaggggagttagttgtgagccgcggttctcgcgttgtgtcaggtgtagatccggtgggtgacgtctgtcgtgaagtaggccctacagttgaggttgtagggagcggcgagcggggtcgacgatcaccgaggcgtgtccatccaggacgtgtcgagtccgtcgatcaacagcgggtttgttacgcagatccgggagatggcttcacccgaggtttattctggagacgacctggtaaggggtggtctgggagggagagtcccgtggactggacccgcccgaataaaactcctgtgggttttcgtgggaaaaaaaaaaaaaaaaaaaaaaaaaaaaaaaaaaaaaaaaaaaaaaaaaaaaaa

SEQ ID NO: 331 - DNA, 688 bp, Canis familiaris
cgcggtgtgcccgtaaccgctccggggggttgaccaaatcaacgacacggtgaagagatcccagtgatgggcgtccaggtcccacagagtcacggtcgacacgacacgtcggaccgtcgtgaacgcgacgaaccggtggatgtggtgttggtggtgagtgacgggtactcatcggacgaggtggtggttgggactgacgtgtcatccggtgtgtgggttgtggatcatgttgaggggtcaggggacgaacccgtgtcaggggaaccgagaccctaacttgtcaccgggccattcacaagacggtccccctcaatgggacgtctctcaggtccccgttggaccccggtgtgtcttgttgaagttcaaaagacccctaataaatcactcctcaatagccccacgaggtaggagacctgtcttaagactagggatgattacgatcagaccttgtgtctgtgtctggtctttcggcttgtcaagagcaatttggaaaatgagatccgtttttcgtaattgacgaggagaggtcattcaagacgaaaatgtcaggtaaacaatagcaaccgtctttatactgttcggaaatttgatttaccctcaagactgattgttttccgtagccgtctctcttagagtcaaggagatcataggtttctgtgtctaactaaaaaatccttcaaaaaaaaaa

SEQ ID NO: 332 - DNA, 592 bp, Canis familiaris
ggtaccggcgccccagccataaggatttgagaagaccaaagacgtatcaggattaccggtatttacctcagagtatacaagaactttctagaaaaaacgaccgtcctaggcctggccaattgggcccatgaaactgtctaccgattcatagactggactgggagaacatccgcaggactgcttctctcgccgtcatcttaatgacgatccggaatcatttcaaacaactttccattcgccatgagggttttttcttcctcctatatttctccgaatatatcggaaggtcccgttcctccgtaaggaagatattacccaacaaaacaattcacaagtttaacaatcctttccatcgacatatgtgttagtttaaaaggtccaacaggaaagatcattcaaccactcgttcgatttttttacaggcgtccacccacaaatcaaaagtcgaatgttgttatagagtcaaaattaagttgccattttatttttgactacataaacgttttgtttgaagatctaataattaataaataaaacgttcggagcaatgttcgaataaacatattaagagatcgtcggaaaaaaaaaaaaa

SEQ ID NO: 333 - DNA, 597 bp, Canis familiaris
atatgttaggagattgtcctacttctataataggtccggtgtcatatttaactttctaacaaacacgttttctcataaacaattatttcttggagaaattctattggtcaggaaagtttcaaaaactcttgattgtatcgtcctacaaaacttattgtactcccaactcttcataatttcctcaaaaaaagtctagagtttcacaaagttcctattttccccctcggtccctccgtgacttccttaactctggagtgccctgataatgtgaccctggtcacatgcacgggacttggcgagtgactctccactggagttcacattgtgtgtgtgggtgtctgggtgggggacgttcgagaacgtgtgcgggtgtgtgtgtgtaataaataaataaatgtttatttcacaaacacactagagagaggacctccaccaacctagccacccacacccaacacgacagtggatcgtaccgacccacgggaatctcaccgtgaatgggacctgtggaacatgataaggtcacggaaccgacatcgttaatccagtcacggagtgaccgagggtaaataaatgttaaaaaaaaaaaaaaaaaaa

SEQ ID NO: 334 - DNA, 512 bp, Canis familiaris
gtgtccacgtttcacattaaaagttgtcctcgttttcgattgggaaaggttctgtttcgggcaacactcttcctaagtctttccttattcctttctctttctttttaaactgtatatcaatatccaactattcgagtctctttcaatacaggatctaaatccctaccttttgaggttgactttcgggataactcagtccatagtttcgtctataaactatctttttcttgatgacactaccaggacaacacattatttgtacttatgagacttaaacccattttaacaatttctctttgtttaaaaaaatgacaatttttttcttttcttttgttaaacttgtttaggtgaaccattcaaatattttcaatccatttttgaaccccccaagcgttcttaaaataatcaagggaaacagttaagacaaaatgctgacgtcttgtcaggaaaataaagattttaacacagtctaaaaaaaaaaaaaaaaaaaaaaaaaaaaaaaaaaaaaaaaa

SEQ ID NO: 335 - DNA, 606 bp, Canis familiaris
tcaaggagttaccatctcatgagttgcctccggaccaatctccagtctgtttccttgacttaatttaaaaaatcatgtatgtcaaatggtgacacttctagatcctctgtacgacgagaccatgtcgatcttgagtttgtgtggcggagagtccggcctccggagggctcttgttcctccgcgacattctgttcttctttccaaaattcgtggtatccttgtttgtctggatgactcttaagatcacttacccaaagcagagttgtgtaccctgaagcagagtggtatcaaatcgttctgtgtttggtcttcggcaaatacgccctggtttttgccaaaatttcatctatactctcttttctatctaaagctttgttatacctcggaggagcacggaacatctattttgtatttatttattatatatcgagttccacaacttattctgacacaaatcaacaattctggtaactctgcgctctccccactctagggacacggtggtcgcccgacgacaccagcgtcagtgtcctttccaaaatgttcgtctaggatactaaagatagaaaccatgtgaaaaaaaaaaaaaaaaaaaaaaaaaaaaaa

SEQ ID NO: 336 - DNA, 529 bp, Canis familiaris
ggcgaacatgaaattcgcaagggacttccaaccatgttggtcatactgaccttaggatgagtccatgtcgtcggacgattacggtccgtgaaaatgtcatgaatctgaccgtttggtgccacagccctcgaatccccacgacgtacaaggatcggacattgatggataatgggtttgtcgtcttgaggaggagggatcatggatgtctctactttgtcaagactgacgcattggaccttttaaatactttctaaattttgactttgtagagagtttatgatggagtgctcattttttaattaaacgcttttaattggtttgtgtcttgacgtcttaatcgtcacatggatatttacttttataacgttgtggggggtttttttttccgtgatcaatttttgtctttctgatccaaatctaacactccaatattaatagatttgactttacttgtctaatctgaccaatttttggaaaaaaattaaaacatccagtccacgtttttgtttctcaatacaaagtccaaaaa

SEQ ID NO: 337 - DNA, 236 bp, Canis familiaris
ctctgtcgtgtctgtggtcgtttgtcccccgagacgtggacgtgtcggtccgggggagcccaccgtccaacccacgaccctgtgggtgcccgtcgaccccgcgcctgggacccgacggggaccatcccgttggtcatccccccccttccccccatcgctggtcttgctcgcggggaccatcccctccgggtttgttgttttatagaataaagattgtggaggaagaaaaaaaaaaa

SEQ ID NO: 338 - DNA, 618 bp, Canis familiaris
gatctggtatcaactaaacagaccgtgttttaggaagtgaagtcgttaaaatatcaatcaagggtgtatccgtgttttaaaaagctcagaatctcaacaaacgtagtacattaagtctattgtgactctaaatatttagtttaataattaactacatttactccagtggacatctggtgttttgtcataccgatcttcccataaaaacatataatcccgatgatgttgaattgtaggttttgactttgaaggtcaacaccaaagtcacgacctcataccggattaagaccaattccccacagtggtaagtcaccgggtcggaaatcccgatctaagtctctcgtgggttgtaggactttctactgatccaggtcatgatggttttgaccttcgtttcaaataaaagttcggtttggatcgaagagtgatattcacctatacacattttgatataactcttggatttcctgttgtacaaaaagtataacaagttaaaaatatatctaagaatagtaggattcgtaggaaaatgaatccttattgttgattattatttaatataatgtaataataaagttttaaaatagtttttaaaagaggaaaaaaaaaaaaaaaaaa

SEQ ID NO: 339 - DNA, 605 bp, Canis familiaris
tgaaacactcaatatctcctgactttcatgacacgtggagcaactttggtctaatgtcccacggttgtcgtatcatctacttgtcattacacagttcatcacctccatcggagaaaacacaaggtagcttgggtgagaaacatcgtgctcgtttaatttataaacatgttggagtttcaaagtgtccaactccaacgaaaactccgattacaaatatttgacgagaagaactaggaaatccatttgatacaacacaaccgatgtgacaagggtcacacaatacctaacgtagagacatttcctcagttgattcatctcactcaccctggtgtgattggaactagtactatttctttggactatcaactatgacgacttgataatgttgaacggaaggacttcaatgttctagcaacattggaccctgtctgtttaggtctagagttaacacgagattttagtatatccgataaagtattccaaacatgtgccaaaatcctaagtcaacatgaaagtaaaggtagacaccaaactcgatgcaggtactcagttggtaaaatttaaatatctatactaaattaaaataaaacttttgtatcaaaaaa

SEQ ID NO: 340 - DNA, 656 bp, Canis familiaris
ctgaggattgcgacggccggagaggactcaggattcccgacgaggaggtggcgtctggcccggctgagtgaaaagcccaacgatcgcctggggagaaagactttacgtccgacgagttagcgggtgagcacggggttcgacgtggtcgccgggaccgtacttgatggagcggactcctcctgagagccctctcgcacctccccggtcaccacggccgacgccgacggcggaggggacgaaggtgacggagacgtcggaggtgtcggtgttggaggccccacgggcacctgaaaacctgcgctctccaccacgggactcccagtctcagccgcgaccggcccctcattcgacgtcgtccgggcgacccaggcccaaggccccactcaactgcggtcgcactcccggcactcccatcgtgcgggaaacccattgtccacggcccgggtcaggcgtccggtggtcggaggtccccaggcgaagcaccaccgtggatcgtcaggtcgcgagctcggaacgccagaccagccggtggaggtcggtcgagggccagagagtgctggtggttcttgtctgtggtcggggtcgtctcctttaaaagaaaagagataaagaacttgacagacgtaaaaaaaaaaaaaaaaaaaaaaaaaaaaaaa

SEQ ID NO: 341 - DNA, 471 bp, Canis familiaris
tataatagattatacgtctatatcgacttttatattccggtaggatctctcaatattttcggtcggattttgacaattgttctttcaacctttgtcttcatcttaagtcacgtattcgacatattctaatttgggtatagcttaatttccactaaatatatatatatattgttcagatatatctctctctctctctctatatatatatatatctatactatatatcagagatcatatatctgtagcattgactaaacgttttctttaattttgacaaccaatggaataatagcactatggatgttgtctacttgctaccctcttacctggtttaagctaaactgaaagttgaaattggatgtacgtgctctcttaatgggtcttattagtcctaaacgttgatttcaatatctaaattgactttaccgtatctaaaatttttcgtaatctgatgattgtcaaaaaaataaa

SEQ ID NO: 342 - DNA, 535 bp, Canis familiaris
  misc_feature (125)..(125): n comprises a, c, g, or t, or includes no nucleotide
ccacgacatccagtgtatgggggaccattcctcgcagtcccggatcattacgaaccggttatacgcaggtagactattcgttccacgattttcgacaacgatttccggtcccgttggggaatggntcccgacaacacctgatgtttcacagtgaggacatggagtttcggaagtcgtgagtcctcgacgggaggttatgacaggggggacaccatctagtggtccggatcatgatacgggggatgtcggtgatggggttggtgctgagggttctcctatccaccactaaacagaatcaacgggaccggtaccctcctatcacgttttgttccaacggattttagtggttttgggtcgtaggaggacctgtgtgttggggtgggtcggtggttttgttagtgggagggggaggagacatggttccagtcctccaaatccaaagggacgcctctgagacgagaacttgtctagtgttgtaaataaaactttttttttctaaaaaaaaaaaaaaaaaaaaaaaaaaaaaaaaaaaaaa

SEQ ID NO: 343 - DNA, 631 bp, Canis familiaris
attgcacaggtttcattcagagaaggacaacatttgtggatagtgaacaggtcaacgtagaaataaacctatatcgatctcttcggacggacctcttgagtgtcgttgtcaggaccgttggagcaaactatagttggatctatcgtttttccagagatcctagacgatcgtctttgagtttgtggtgaaggacagagagacacacaccgacacagatgccgacacccacaagaccgtgggtcgacccacggggatcgaccagtgggaaggaccaggggcccattcccatgcgtaggacacgggaaccgacatcgtgaaggggtcaggggggagctcgtggcaaatcagattttaattttaaagtgtgaacgatctgagacggtgtcgaccaacattgcatccacgggttagtgtctggggttctacaaccatgggtgtcggttggaccaaggaccaggtgtccgggagggtacaggaaacttctccccctcccaacggggaattggtgaactgatttggtcatgtatcgcttttaacggccacaagttcttggaattaaaatccagtatcagctccatggaaaaaaaaaaaaaaaaaaaaaaaaaaaaaaaaaaaaaaaaaaaaaaaaaaa

SEQ ID NO: 344 - DNA, 611 bp, Canis familiaris
ctaggagttcgtccacgtgggccacctggtcccctttcccaccggacgtccgacaccacttggacgtcctcttgggattggggaccgtggtcgtccattagaccgggtctggcacccttcccccaggatggggagacctaatcagtggggagcccaacaccaagtctacgacgccgtcggcttcgtcgtagtcggacgattcgtccccggggagttgaatagggaggaccagcccccaggggagggagtggtctacccgcacgaagaggaggtggaccgattatccgtggtggaaggtcctatcacagggggtatcccgggggggattcccgttggcggtcgtgcacccagcggtataccgatcgggggtggaccaatcacagggggtggaggaccaattacacctggaggtgggggaccaatcgctggagggacagggtaccatagtcttcatggttgttaactgggttttttgggtcgtatctctgttctcaaagtctctcattctttctcacgttttcttgggtggttcatcaattaatattacgtaataaatcgaggaacgggattaaagtcggaaaaaaaaaaaaaaaaaaaaaaaaaaaaaaaaa

SEQ ID NO: 345 - DNA, 491 bp, Canis familiaris
gtcgaccagtcttctggggactaggaccaggacccgaggtatcaccagtagctgcaaccggttgccctctttcagaaccaacccaatccgaggctgatccctcgtcaaatggccgagcttgttctgagcggtccctcacaacagtcaggccaccaacaagctacagcatcggtcctctggccccgagtcaccagagcggatccttctatgagagtaatcaacgctttcgtcaccgatattgggctgcccctcaggccggggtccccgccacgtgctggctatcctcgtcaatccgtcaccaggcttggtcctctcgggcacggggctcggttgggggctctcacagtcgatctacggggcaaccgctggtacctggtgttctgagacgaggtttcggacgttctgtgtgttccatatttcgtatgacgactgagggaataaagttcgtgtctcggggtaaaaaaaaagaaaaaaaaaaaaaaaaaaaaaaa

SEQ ID NO: 346 - DNA, 628 bp, Canis familiaris
  misc_feature (301)..(301): n comprises a, c, g, or t, or includes no nucleotide
gttatcaccacatgaggaactctaggtcccttcaactggatcttgtgacaggagactcgtccgagaggggatgtctgaaccagaaatttaagcaacgagttcatatgatcaagacccgactctggtggaatcttcctcggtagatcgatcgggccacgagcccacaagatacggtaggtgagggagagacacatccaccaaacagttgggactatcaccgggattggaccacggcaggcccaccgtccacaaggatccgggaacaccccggatttcctctccggcggaacgtgtctcgggnatcaagtttaaccatgtgagttcacaggagactggcaccacgagaagatgcttttgatcggcctgatgcccaacgcagatcaacccaacgacgtttagaggtttccggcgatgctgatgtagatgcaggccccactgctctttctggacccgcacaacaggtccctcgggaggtgggtcgaacggtcattcagatccggagactacacacccgaccgtcgacgaccgtccagagttccagtcgacaccccatctacttctaaataaatcctattttaaaggcgggaaaaaaaaaaaaaaaaaaaaaaaaaaaaaaaaaaaaaaaaaa

SEQ ID NO: 347 - DNA, 617 bp, Canis familiaris
accatcaccttcaatttatggctctcggtctggggcaatttcgacagactcatggtcggaagattcttgatcagttgaagaacaaagtgagacggtatttacatgttaatgtccataactcgtatctcattggagttcaagagttggattcttatcggtgggacaaaggtattccacttagttattaagataaaccgtccaaggtatttcggtgactgataggtcattgagcacgagatccttatgaggcatgcgattcaaaatatgcatgaggtccctttgtttatttaggcagtctcggatcagagaccaaagttataaagtcgaagcgacacaaaggatgacacctattgacaaagctcaactgacgagttctcttaggattgccgagttttcacaaggaatttcgtctccaaagtctaatttctggttcaagactgaacaaaaatattatcccaacaaaatgtaatatgcgacgataaggggagggtttctattttctcgactcattattttttaacatgttgtttgatctaactacggaagacccgttgagtgtgttttgatgtgattaattgaattaaaagggttaggttttaaaaaaaaaaaaaaaaaaa

SEQ ID NO: 348 - DNA, 591 bp, Canis familiaris
tattgtctactggcctcaccggactcttcggcccgtgtactgattgggctccaacatcaatctaaggtcgagcctcattaaacgagttatttggggtgtcagggggaacacgtccgtggacaacattcccatggatgtcaatctgtttatctcttcgatttagttttaggaaataaaaaataaactatatatatatatagagatatatatattaaaaataggataggaaaggggagtgtcccctttgtactccgccttcaaatattgggagatctcatgatgggaaaataacggattggtgagagggagctcccataaagtggttcagttggaccggtaccacttgatggtcgtctctcttttacaatgggtggggtcggttaatcttttatccgactcaaatcggtgttcatgatctggactctctgtttgaagtctatgtatttgtcatgatcttggacttcgttccgggtcggagtccccgggactagtggttctcacgataagtctagtaaatgttttttggacatgactataataaaccactcatctcggaataaaaaaaaaaaaaaaaaaaaaaaaaaaaaaaaa

SEQ ID NO: 349 - DNA, 247 bp, Canis familiaris
aggctattccaggaaggcaaggggtacggaggtggtcctcgtacgggagtggtgtcatctagtacacaatctgttgtggtgtgtccgccatcagaactatcatctccgaatcaatgcacggaccaggtactacaagtccagggtcaactccaccccaggaacgagactcggagacacatcatgtcccgtctcgtccgacggttgaataaatggtaaaagggacaaaaaaaaaaaaaaaaaaaaaaaa

SEQ ID NO: 350 - DNA, 617 bp, Canis familiaris
ggtctgttttgtcgaatactggaagatcaaattacacaacaggtcggtctttgcagtaggtgaaggtcctgacaaatagacatccattgtacaactggtccaacatcaaaaatgataaattacggataatttggtaaaatattcataaaaaactatactagcacaatttaaacaaaaaattgttttaaatgtagcattttaatgttccatatggagtcgttttaaacctcgttttgtggtttgttctgattcgtcaaatcctggacattagggaggtttcccaaccgtttaaacagagatcttatcctcgtaatctagtttgagtttaaaaagtggacctgacaattcttcggttcgattggaaagataaatcgagaggatgtttggaaaaaatttattcggctctgagttgaccccagtgtgtgtgggttcatggtctaaaactgaagaagaagaagaagaaggaggaaaaattatccccgtcgttttctgagactaaggggcacaatctcgtcaaatttaagtttctaacgttctatctccttcttcctgtttttttttttttggtggacagagggataataaaatatgataataaaaggaaaaaaaaaaaaaaa

SEQ ID NO: 351 - DNA, 280 bp, Canis familiaris
cctaatttcggagctactttccacgattgtgtttaatccgagtttcgtttagtcaaactctttccaccaggtcgttgtcgtttggtagtgtacttggtaaaatattcaactgttctagagttttctcaacttggagtatatattttcgttaacctaataaaagtactttcgatgatctactgagtcacttcccctccacataggacgtaaccatttaaaattcagggtaaataatacacaatttcgtataaagtactgttctttctaaaaaaaaaaaaaa

SEQ ID NO: 352 - DNA, 649 bp, Canis familiaris
ggacagagtattccggcggtcgaccatccacattgacgagatcaaccaacaaatccgtgctggaggttgcccactaggaccaggtcgtcaatcttaacatccgtgtgcagattcacattcggaggtagaccaacgtcgtccaaccgcaccacacgaaccattcgtgtcggtgttgggaagttttgttgggtcaaggtcacccaaagggaggtccattgagtgggtgtccttcagagtgagtggaaaacaagcgttgtcattaacagccttcaaagtacccatccagagccttatgaagcaaagttgtgacgatgagtcatcagggttcactcaacgttcgggacattgcctcgacggattagtaggacggacaataaaaaaaaaaacaaattgctatgttaaacaaagacgtttgaactcggtttgtcgactttttgaccacgcggacatacatttccaattaccactaaggtgtacttgttaacaagggagagtgttaaaacatttaccacaaactttaggagataatgtactttagcaacaaaagttctcgtacaatagtttttaaaaactatttttcaatagggattaaaagtcgttttttgggaaaaaaaaaaaaaaaaaaaaaaaaaaaaaaaaaaaaaaaaaa

SEQ ID NO: 353 - DNA, 568 bp, Canis familiaris
  misc_feature (311)..(311): n comprises a, c, g, or t, or includes no nucleotide
ggtggtcaccatcatcacaggaaccaactctagacatcatatgggtctttcccagggacattggtcaaacttcagggaaccaagggtttttcaagttacttttccgtctccagtagtttaccaggatggaaccctttcgttcatcttaggtcgggaccagtctttcggggataatcatgaaccccaaaagtggttcacccaacatgggataaacaggttgaatatggaaaatcagtttagtcaacaacaccaacgtcacctttcggaacacaaggagctcctctcaacacaactcacatcttatcgggaangagtctaagacgtctaaccattcttgggaatagtacttcgagtcttctttataattcttaatattacaggaacactacaggaatcgacgacggaatgagcttcttttactacaatattctattggttcgatctctactttcactatacattgggaacttatccgtcactttgttgtactatcatgactttgttttttgtttcgtgtgaataaagtcaagtctcccttgtgtctaaaaaaaaaaaaaaaaaaaaaaaa

SEQ ID NO: 354 - DNA, 675 bp, Canis familiaris
  misc_feature (84)..(84): n comprises a, c, g, or t, or includes no nucleotide
ggtagtcgggcgtggttttgtaaaaacgtggtgatttcgggacaaagtaatatatctagtaggatcatttcaaggctccctttntttcatagtataagtagggggctacatactagattattatttttagtcacactagatgtggagtccatcttgtgagtgtccatatccaatgtgtggaaaggtcaaagtggaaccacttaaacaatggccaacaataataggtcaaatatgaggttttttttttttttcgggttcggttccacagggacacgttttcgaggttggagagtattgtgtttgtaaaatctatgagtctctacacaaaagatatctaaatatacctgacttagatatgttgattacacaaataataattccaaaagatattttcccaattgcgaaataatttaaaataccatctggatttaacaaagtcatcacgtcaaactcagctaattaacttcataatacaaaaatatgtattcagatacgaggcctttcctccgacatcataggaagtctttttcataatgaacctactataacaaataggggttccaaataatgtatcttctaagtcaatgtaatcaaatatctataaaaatatctattgtgtaagggacgttaattaaatacattgataacgatataaaaaaaaaaaaaaaaaaaaaa

SEQ ID NO: 355 - DNA, 547 bp, Canis familiaris
  misc_feature (235)..(235): n comprises a, c, g, or t, or includes no nucleotide
caaactggatatattattctccgtctaacgaaggtcctcgtaaacggtccataacgggggagttgtcgagggaagttgcgagtttcgaattgttgttcggggtgccagcaccgggtgaccccacgagacgtggtcccctgggttcaccggacccccgatttgtcgtggtcgcaaatgtaaagtcttttctttgacgacggaaggaagaggatgatgggattcggggatgtacatngactgtcgttggagcttcgtgggtcgccgtctaacggacaccccattgaccccaacttgagtttagacgaaatggggtcgtggggtgtcgggactcgtcagccaacggggtggtggataacgaacttgattgtttgactcggattccgatgtagatacagacctctcacactacatctctaccttagtgtagaaccatgtcctggtttgttgaaagggatcttaagtttctcaaagcagttttagagtggagagcgtttagacgacaacaaataaaccaatatcaaaaatatggtcgttcaaaaaaaaaaaa

SEQ ID NO: 356 - DNA, 202 bp, Canis familiaris
gtcttcacaggggcggagcccagggatatttctattggatttaggtttgatcctttggggttctttgaggatcacttgtaataaatcccatttactataataatgggactatcagatacgtcctatcgtttgatcaatctttttatctacattttggtggggtcaaggtcactaaataaatgtctttggtcaaaaaaaaaaa

SEQ ID NO: 357 - DNA, 603 bp, Canis familiaris
ggaaggaacccggagtcaacgagcctcgggcctaggggtcaacgtccaattccgtgactatgctcaccttcgtcgttttcggggcttgcctctgtcaggttcatcgtcggggtgacgacgtgttcactgctccgctcgcattcagtcacttcgtcaacgggaccaggatattgtgggagtccgtattcaacaaggactccgtcttatttatcgtcctctaacaccatatgttcataaattccacgggacgaacatgaggaactttcacgatcggttgttccgtgatcttatgacggacgaggaacgggtgttcccggatataaccaggcatccaaacatgtgacaagactgacatcgtaacgtcaaacacattctaaggaagttgttccgtccatttcaacgttaaagtggtctccatttagatgacatcgggactttccttttctgctgagttattgtactaatgacttggatttctaaaaccagttagtgttatcgtggacatctaggacaaattagggttaaaaataaaccttggatattccttcctccttaaaaaaaaaaaaaaaaaaaaaaaaaaaaaaaaaaaaaaaaaaaaaaaaa

SEQ ID NO: 358 - DNA, 631 bp, Canis familiaris
taaagggtataggacgtttttctgttctcttatttttagacaatcgtcgatctagacccgtgtttgatagttctttcactatcaattggctttggtttcggtaacggtttcgatttctaggtgtagggtcggttcgtccagaccagatgtatacggactgattcgactgtcctcttctcccttgttttcttctttcttttctttttttcttttttctttctttttctttttttcctagatctgtagttaggttttaatactttgtccgcaggatgtaccttgacggacgacggaacgtgcgggttcttgtgggtttaacccccccaccccctattgtgtagaggttttgttttttaagttgcgagtttgtttatataatactttgcgagttttccttatttcgtaggggtccatagtttgagccaacaatcaattaaatattgagccctcactcacttacctataacatgtcaacttttgacgtctcaaaaggccaaaaatatataagattttaagttcagtctccaaaatcagccttcgatctttgtaatttctatctttgggtgtttctcataacatcgtttaataaatgtgttaaatattcaaaaaaaaaaaaaaaaaaaaaaaaaaa

SEQ ID NO: 359 - DNA, 597 bp, Canis familiaris
agatccagaacacccggagaaggcaacaggcgaagagacggttccacagcgtcgaggaaagacgatgagtgaactctgtatttatcacctccagagacgaacagtctgcgaaattttcgagtagtccgatgcatccacggatcaggatttcccatttgaacaggttacactgttggatggacccggttgccataatctcaacgtcactcacggtgggacatggacgatcaggaagtcagacagtcagaaagtcagaaatctcgtcagagacggggaggctctcgatcctcctcaccacacggacggcgaaccaaagagtcaacagagagtttccgcgggatatgctttctctctttttttctttcaatataactcctcaggctcttccttttttaaaacggcggctcatttccccctttttttctttctttctttttttctttttcgtatttgattgggttgttcagggaacgttgtgtttaactactttattatccaaaattctgagagtaagttaaaccaaaccctcccaaatatctaaattctgtcgtaaaggaattaaataaaaatagtcaatctcaaaaaaaaaaaaaaaaa

SEQ ID NO: 360 - DNA, 712 bp, Canis familiaris
gcccagagactgggacatcatcagtacggtccggttgatgtttcccgtaggaccagacgtggacgttttagctccttatctccaaagacatccagacagatagtccgaccgcaatgggttgaccccggctacgtctcagggccgattgacgtgaaccgtctcaactggtggagaccggggccccacgacgtcgccaatcgagtgtccgagaggaccccagagacgatgagacctcgccgtcgtctccaaccagggggcgaagctcccttccaaccaggacagatggtaggcgtccttggtcgacgatgccgggggactcccgtagatgacactcgccttgtagcaccctggtcacgtcctccggcagacggagctcctggtccagagaagggtcgcccctccggcggtccccctgttttcgttgtggggacacaagatgatgtcccgggatgtcgcgtaggcctcggatcagaggataggagcaccagtagcacagtgacaccgttgtcgaccggtacccatccccctccccaggggttcgtccaacatccgagggtgctccgtagggtgagtcgaaggaaggcccacgttccgggggccgtgggacacctacgtcgggtacaccccgtgacaaaccaggaaataaactctctctcctccaaaaaaaaaaaaaaaaaaaaaaaaaaaaaaaaaaaaaaaaaaaaaaaaaaaa

SEQ ID NO: 361 - DNA, 640 bp, Canis familiaris
cgacgtggcagtccagactcaacatgtcccaggagaggatgacaggggatcttgatgtatcatgtaaattgacgtctcccgcatctccggtcccgaggatagtgttgtaggctctttcgccgactgaggaggaatcccaacagggatctatttcagttctggatgaagaactatcaccggatgtcgacggacgggctcctcaggaaaaacaacaagaacatgagggagctcgacttgaatgggatggaggggatgatgattctccctcatcaggctcccgagctgatttcggtgaacgtgtgagggaagttcgcgaacatcggcaaccaaaacaaccccgaccacctagacaaccctggacgtctccaaatgcgaaaattccataaagtggtcaaggtcctcacccaactcaaaaggacaggtcactgggtctgtgatttttgcaagggactagttctaagtggtcagtcacctaggaacgggacggttacgagggactttctcaggggaggggtcatgacctggtacgatgtaggatgacgagtgtctttgacggtcctgggacgcgttgaggggtgaaggattatggtctggtagtttcgagaaataaagttctctttccaacgtgagaaaaaaaaaa

SEQ ID NO: 362 - DNA, 685 bp, Canis familiaris
gcacaacaggtgtttgttggaccgtttaccgattagggggtaaacatgttgtaccccgaggaattcaaaatgttcactcatctcgacgtcattaacaggccacagaaagtcccacggacgcaacggagagtgcgtgcaagatcggtcagatgtgggggttgtggtgtcccgtccatgatggacgacgtctttcataatcagacgatgttagtaggggggcatactcgttcagatggaatgacgacaccagtgtcgactgtattgctgcttttcgctacactcctgtggcaggatttgggggcgatatcgtggagatatacctatgaggggcgatgtccgcagagtagactggggggattgtgatagtgtagtgaactcacatagaaggcccttgtgtccgttttctgtctccaaggtcattgaggggtttggagttcgtcaaaacttggaacgggttgttccgtcatgggatgtcggatttctccgtcgtcgtggtctccgtcgtcggaggagtcgtcgaggtcgtcgtcggcgacggggacggaccttcaacgaaccaacactgccaccaatgccagcaccatatcccatttcctgtgtttcagtaatgaggaaaaacgaaggattgacggactttatttctcaaagaaccaaataaaccgttagttgtgttaaaaaaaaaaaa

SEQ ID NO: 363 - DNA, 589 bp, Canis familiaris
  misc_feature (340)..(341): n comprises a, c, g, or t, or includes no nucleotide
cgtcgtcactaaccccgattggtcgtaggcagggaccaccagtcctacacaccaacgcgaaatgtcttgccccttcggttctccatcgggatgtgactcttgtggatttccttattctcaaaaaaccccacaaccatattggtccagtgagccatagtagtctcggtgctgcggtccccggggaaacacggacgacaatggcaaacgtttttaatgtctgcaaacaacagcatctggcggactatcttcttacaaacggggtaaaggaacaacctaacaaaggtacaagggaacgagggaacattgacgctgttcttagtggagctctggtggaagagannagctgccgctattcgtttcaacaaagacgctagtaacaaaaataaccaacaccgtcgacaatatcgtaaagttttccgggacacaatcaaccaccgggaacaaaaaggcgggcccagggcattcgggacacaggcaccgtctggtgtgtcacacgttgtaggtttaacttgtcaattgggactggaaaaatcacattttgtaacactcagaaaataaataacatgacagagggaaaaaaaaaaaaaaa

SEQ ID NO: 364 - DNA, 529 bp, Canis familiaris
  misc_feature (355)..(355): n comprises a, c, g, or t, or includes no nucleotide
tcgaaggggcccgagatcacggactttatccaaatagtaggaatagtttgtttctcacttagcagacggactctaatttcgcatcccaaatctaaccggtatggaatttctcggattttcactgttcatgatatttggtaggaacattcggtgacaggagattatataaacgagggatggttaaactatttgagggctttctacaaaatcgacggttcttgtctttgtcacatggctttctctcaattcttagataaatgtttctcacttacacgcccggacgggaaattggtacgttccgtttgttttttataatggtggaatctacatatttctaagaggtttaaatgtttangtagagtgcaatatattggaagtctgggttagtacaatcatctgtccatctcaatatgtcatgttgggactttatatcggtaatttatagtgttctagagtgttcaaattaggaatttataggataaacggaatcatttgtgggaaaaaaaaaaaaaaaaaaaaaaaaaaaaaa

SEQ ID NO: 365 - DNA, 557 bp, Canis familiaris
acgttggtgacccaagggcccaacccggcaccctggggcactgacacggcaccggtccccagagaggcccaccccgggtccagggggacctgtccgggtgacctcccctccaaagctcgtcagccgggagtatctggggcaaccagccgatcgtcgtctgtgaccgactcctctacgtgacgtctctccaggccctctgtctctcggggtctcggactcggtctcggactctggccggctctcccacgggcacgcgcccgctgagccacaggtagctgccgacgccgtcacgtgggccccggggaagaaggaacgtcgtgttgggtccgattgatcgccgggagcgtgagtgaggaaggggttttccaacagccccttggggtcgatgtcccttgccagtcgtccaggggccactgacgggggcgggacgtcggcgggggaggggtgggggcgatgacactgccggtcgtcgtttcctcggtggaaataaagaggatcttggggagaaaaaaaaaaaaaaaaaaaaaaaaaaaaaaaaaaaaaaaaaaaaaaaaaaa

SEQ ID NO: 366 - DNA, 568 bp, Canis familiaris
ctaggcgtagtattaacccgaggcgtttccggcgtattcatcctggacccttgttcgttcggggggggggtctcaacctgtgagggtcccatcaattgatggattgtccgatttgatctccgtaggattttggaacttgaagtgaccaacctcggatataaggaatctcgatattataatctccaatcctcgtagtattgggaactaatttgtctaattcgttgtcttcgttttgggtcctatcttattcaaacgttattctaaatgagcccgatttaaagtaatgtaacattcacttggattaactcttttcactttctacttgtataaatactatttttaatatctttctagtattattatgtcgtaaaagtagtgttgatcggactcgttgtagcaattaagagttaatcagagtatataggaaatatctctacttgtttaatgatagtaggtaagagtctatattatctttaatgaggatgatgatgtatttttatctcatgtttatctatgtatccattttatgagaaataaaatcgaaggttggaaaaaaaaaaaaaaaaaa

SEQ ID NO: 367 - DNA, 673 bp, Canis familiaris
tttcggaatcacaatccaataatgattatcgtcacagatggagtccgtcttctttcgtccatgatgcgttcctaaagcacctctaaatcgacagaaccttccaattcaacgtcgtcaaatcgtattacgagaatgttacagatcctcctcgtcttcatcactatttcgagacaggacttcatgattttgatccgattacgttctccactttggacaataaaagagccaggacttagagtggatagaggaagacgtatagagttttcgtcaaggattacggaaccgtaaattgtgtctcaacaaatgacaacatcaacaacatcgacgtaaacatcgttatattattcactcggagaccaattcccatcaggaatgggtatgtataccatatttcggggtttaaataatagttggatcatctcattcgaggtaattgagtttgagtatatagttccaaaggagccaccaccacttaggtttttaacccgggcaaggataaataatcccaccaatcaactatacactcttctacatttcgccacaatcgttgatgaaattaatgtgagtttcagtatgtggtaacataaccaggatcaaatataacacttcatcactatctatcatccgtcatttggatattaaactattcacatccaaaaaaaaaaaaaaaaaa

SEQ ID NO: 368 - DNA, 503 bp, Canis familiaris
tgtaaattgtccccctaaacgaacagggtcaagattttccagggtttgtcgtcacgtacatgatgtttataagaatcccgtggatgatcatgttatctcccaataactaagattggtctgaaattgtcacccggttcgggtcgtccctcaggaacgaccacgcggtctcatttccgtgaacagtggtatatcatcggacctcggattcaaaatcgtcgtgttgtaactggtttctccgttctaactccacaacaatttgatggaaatcttagggtctaatagtccgatttaaaattgttagttaaggttggtgggttgatgttggttagggtttttagactccaacaaaccgtcttaaaattattcgggaattataataaatcccagatggcgggggtgtctggggaggttggttgggtaactgggttttgttgtttgggaggtatttgagggtgttgttggtagtttattggtggtcgggtaggtggttcaaaaaaaaaaaa

SEQ ID NO: 369 - DNA, 136 bp, Canis familiaris
taacttatttaaattatccgtcccctcccccaccctctccccggggtcccaggtccatttctttttgtaaataaacttccaaaaggggaaaaaaaaaaaaaaaaaaaaaaaaaaaaaaaaaaaaaaaaaaaaaaaa

SEQ ID NO: 370 - DNA, 631 bp, Canis familiaris
ctgatgaccatgagcacctatgagatcctctcacgggagaccttgcaaacctcttcgagcgttgttgcggttgtcggagcatgttggaatccgaggtgttcttaacgctggagagaccgttggacttaaggatacgttaaccagtttctccacaggcgtcataataacggattcccccttagaggggcaaggtgccacattgggcttccataccaatcacattgaaggagaccggttcctttattcgggacattggaagggaccaaggcaattccgggtcaggacataagaggttcattcgtgcctgtgttcctaaatatccgatgatgtcgagtccaccatgtcattgagcacatgtataggcgttccaaaagctttgaaacaacgggaggagtttttatccgggttgagaattatgttgtggaggctccgccaatcaacaaaaacaggagggggttttctacaacctccacatcgtccggagggcccaacaggacatggataccgttattacaaccatcaagtaacctatgtaggatcattatttttctaatgtcctggacttaataaatcagtagtttggaatccaaaaaaaaaaaaaaaaaaaaaaaaaaaaaaaaaaaaaaaaaaa

SEQ ID NO: 371 - DNA, 655 bp, Canis familiaris
cgtcgtctcggtcccgggcctccgatttaatcccataaagtgaacgtcgtcgttgacaaggccccacggaggtcgtgggaacgtaacagttaatctccgagttcccgcaacacggaaccggggaccaattgttcacggccgggtctacgcgggaacaacgtcagatgttctccagggccagtgccggagcacctggaggagtctcctatgagaacttggtgtatatccctttgcagcaacgcaaatttcaacatcagatgagttagtccgtcaagacacatgcaaatcccgagcagtatcattagtaggacgctgagtatcagcaccagcggcggatgcctggggacacggggtagacgttgaccgatccacggacgctgaagtagcatcagtagtcagggaggaggggtgccgggtgccgcggggccggcgccacctcagggggtcccgtcggttcgaggagctccgttggcgtcccgtttagtggacgacatgttcggtagggggtttgtcgacggagccaaccaacacttaaaggatataaatcggtttcatatttgatcgaactcggtaagatgcgatttgatttaaaaaatacaaataaaacggctttcttaaaaaaaaaaaaaaaaaaaaaaaataaaaaaaaataaaa

SEQ ID NO: 372 - DNA, 465 bp, Canis familiaris
  misc_feature (20)..(21): n comprises a, c, g, or t, or includes no nucleotide
tgtgaacacagggggagggnnacagggtctatatgagaggtgtcgcatattgtttaacacacacaaaaagtgctcctctatataacactgagtattcttataacacagtgctcaggagatctccatatcacgtttcttctttttacaccattcggggttaatcattgggaaggtccaaggagttttgttacgttaactattggttccactttgggaaggtcaatcttggaggaattacttcactaacggaacctaatcgacccctcatctaaccattcttacggtatataatattgaacattagtttaaaatttgaatcttttatggtcatttttaacagttaacacctcctgtctaatccattgaaaatcttgatttctactataatcaaatctttaggacaaacataagtttttggattaaaatatttttacaaaaaaaaaaaaaaaaaaaaaaaaaaaaaaa

SEQ ID NO: 373 - DNA, 639 bp, Canis familiaris
tgtttacattgtgtgtgtgtccggtttccatcctttgggtgtcctgataggtcccagagtttgaatccccacgtcccgttcggaggacccagtgttaggagagtcctaaacgattctcatcaagcaaagtcatagtttcgtcacatggtacttaaaaggcattagaacgattactgatctaataagaacgacgacaataattgtgagttcgtgttagttcgatcaaggtctctagtacccaattaacgagtttatgtcatattctcaagacaatgcacatatttggattcctctaacaacgtcattggacgtgggtttagttttgaagttaggtcgaaacctatacctacaagtgtcgggatcttgtaaatcatcagaacttggtcctgggtttctttcgtgggatttgttagtgtgaccctctcgacaaattttaatgagaaatggctaaccgcggtccctccgtgactccttcacgctgtcggtttccgtgacctggtcatgggtcctggtcacatgcactgggagatgaccgtgggtctacccacggtcgttgtgggtgtcggtctctgtgtcggtgtgtgtgtgtgtctctctgtgtgatccataaataaaaaatttaaaaaaacaaggaaaaaa

SEQ ID NO: 374 - DNA, 650 bp, Canis familiaris
  misc_feature (164)..(164): n comprises a, c, g, or t, or includes no nucleotide
tataggatcgttaggttatgaacaacggcctatcgttctattaatatgatagaactacatttgacagaaacaatattcacacacaataaaaacccctgacttactattcatcaactcatgactgatgaaccacagataataatggtaaatctttagagaaggantcatacaggttttaaatagatcaaattaacggaaatcatacacttatccccacaaatacagaaatggagactaagattccaaattttgatagtgttgggtgaataagtcatgcaagaactacgtacaaaatgtttgacaacagttgaagaagtatgaacgacgttcatgtaaggaggatttatacaagagttcatttacgaaaacgagtttgttttttaagtggatatccaataagtcggaatatacaggataatttcccggacaaaagaaatgagatagatgaacactagtgaactgacccgacgggccctccgtgacgcctttacgcggaggttgaagggacccgctcatggtccacagatcccatgcactgggagctgcccgtgggtcgatccacggtcgttgtgggtgtcggtctctgtgtcggtgtgtgtgcctctgtgtgatcaataaataaataaaatgtttaaaaaaaaaaaaaaaaa

SEQ ID NO: 375 - DNA, 592 bp, Canis familiaris
  misc_feature (152)..(152): n comprises a, c, g, or t, or includes no nucleotide
gagggctgctcgtatggccggacaaaacgaccggggtccccgtcctgtcccggaccaggcggacctgggagtgtccccggacgtcgtggtcttggtcctgtttcgtcggttggtcgtgtttctttagtagtggatcgaccgtcaccatccgnatgggttgtccagccacgggtcaccccgtccgttgctccggacgtcttgggccaactggtccgtcagtcggttactactctgtcgtcccccaccccctcccccgttttgtctctcttgtacgttgcctctcgtcccgttccgggacccgactcgttcgtggggtcggtgcttgtcgggaccacctccgacgggaccgggtggcgccgatccgcccgggcccgaccggttggtgtccactgtggtcctggtcgttcggtgtcatggacccgggaccaccctaacagggttgtggtccacaccacaagatccttcttctgattcgatcggtggtctgtcttctgaggtgctgcccccccattaagggaccggaggggtcagtttcttttgctccagaggaataaaaacaggatttatttttaaaaaaaaaaaaaaaaaaaaa

SEQ ID NO: 376 - DNA, 646 bp, Canis familiaris
ctttgctttgttaacgggtttcgtgtccactaagttgtgggcgttgacgtgaagtgagacgttgtgggacgatgaagggtcccactcttttcacagttttgtgataaatcacccggctagattgggcttttcgtggcaactattgactaggcgtgactattttaaatcaaatcattgtgaggttctcatttcctttcccatggatacccaacggggccgagggagggagatataggatctattcaaatcattttgtgacaatttcaactaccaaacttaggggaagagttgtcgttggagttaagtccggtcggatattctaacaatccgatatggttcttagtctcatatttaaaatatgggggctctggaggttttgggaaacattgtactaatcatgtacaaatatgtttgtgttatgtcttatttatggatttttggggactatttttatatccaaaaaattctattcaacgaggatttactatgcggacttcataacaccaatttcctataattatccttcctcattattttttatagtctatctcgggaacgtttagtagtctccaaacaggagtctttaataaaacatttagattggggaaaaaaaaaaaaaaaaaaaaaaaaaaaaaaaaaaaaaaaa

SEQ ID NO: 377 - DNA, 640 bp, Canis familiaris
ttgtcgaagagtcctttttacggtttattcctatcagcggacgtcactttaggggggtcggatgaggtgatcctcaccaatactagaggacggacctcgtcgaggaacaatctaggtaatagtcggtgtacaagtcgatccacacctaccacaacccgacatcggttctgaccctgaggttcacttgatcataaggacctgtctgggttttcagaccaataacactgactcctactcctcctagaatgaaccggtgttaaatgggaactatcccccatgggtccctcagtgacgccttcaccatgtcggttgccgggaccctctcattgtccactggtcccatgaactgggagaggaccgtgggtcgatccacgctttgtgggtgtaggtctctgtgttctgtgtgtgtctctctgtagacaataaatacataaaatgttaaaaatgggaactacccatgggtccctccgcgacgcctttccgcggtcggtttccgggaccctcgcatggtccacagggcccatgcaatgggagatgcccgtgggactcgatccacggtcgttgtgggtgtcggtcactgtgtcggtgtgtgtgtgtgtgtctcagtatgataaataaataaaaattaaaaaaaaaaaaa

SEQ ID NO: 378 - DNA, 474 bp, Canis familiaris
acaactatacacagtacttggtagtagaacgtcctttggtcgaagtgaatcatcggatgatcatcatgtagtttctcaatgtactttagttagaatccgtttgaacttcctgtctccggtctattctcatttcgggaaatactgtccccagacgtcttgtatagttcgtgtaggaacgattaaagatctatgatggtcaagaaataaccacttttgtacttaggtctaccgtaccaacgtgaggacctgataggcactcctgccacactggggaatatactacaaagaaattcctaccaaatctttacctttttacaattgcttgaaccgacaattgaaacctacatagtggacaacaggattgaccgacgacgagaagtaggtgtgttgtggtcctgaatctgtttaccctgactacagtagaactcgagaaataaaactggaactaaataaacctcgcctccgtaacaaaaa

SEQ ID NO: 379 - DNA, 535 bp, Canis familiaris
tgcctcgggggatcggacatgtcacgcgttccgggactctggtagggcatggtggactcattctacaccaagttcccttacggaccgggacttttgggccggactacgttggaccaagggggttccgggaacttaccttgggaaccttccggcggaaggggttcttccttgggttccaatggacgttgctttacgggtgtcgtggggggcccgacgtgaaccgggggacgggatactccgacccgggtctcgtacttacgtcgggtgtgggttggggctcatcttgtgaaacgttggttacaattcgtagacaacggacacttcagatgtccaagggtcgtcccaagggtacgtgtctaaagatctaattcctgggaatgattcgtttgtgaggtgagttggaggaacgatgtccacggacctgtctgtatctaataatgtgaacctctggagaccgacatgggggctccttttatctcgacaataaaaaccggtgactcagggataaaaaaaaaaaaaaaaaaaaaaaaaaaaa

SEQ ID NO: 380 - DNA, 549 bp, Canis familiaris
accctgtaataacgattataactacagtctaggagaaaactagcatacggtatattggtacatcggaacaacaaatatctaagaacactatctccggttcgagtttgcaaattcatgttaaacaacgagaaacattttttcgtgaaaattgtggtctcctcggtgactaagaccacaccatcaaatgatgattgacccacagtttagacatcagataattcatctgattgaccaaaaatccggacacctccatcatcatactatgcaacatgttccacaactaaacaactcattttcaaaatttctgtgtatttaatcatgtcaagtcacacttaatatccgggaacccacacaccggttttcaaaatatatatttatggtagactaaaagtctacagtagggtgagggttccgattttgagtcttgtctataaccgtcgttcttttttttattcgggaactgtaataaagcccacagtctgatcgttatcgatcaaatacaatttactgaaataaaaatttttcctgatttcctagtcaaaaaaaaaa

SEQ ID NO: 381 - DNA, 515 bp, Canis familiaris
ccacggcccctcctagatgacttgtgtccaatggccggaccggctgtcccccttccatgatggagagggtctacccgttgtggggtggtacgtctgtttcccataagcgaccagtcccaccgtcttttcaggacacaccgggacctgaacacgggacctctatcgaaaatgtctaaaatacaaaaactcctcttcgctcaattccttttcttttctgtttcttttcttttgaggagtttccatacgtctgagggacacctgtttgggtgactttggacgatcttgttggttttgtgggtttgtgagctttttggtggtattaatggacacaaagttggaactgggtcccatcctgccatgtggggccgtcacaagtgcttgaggtgggacggtttgatcaaaaacgtcgttgttattaatgctcggaagtgttcggggcatctccccactttcaggaatgtttgaaaataaaaactaatcagttacaaaaaaaaaaaaaaaaaaaaaaaaatcaa

SEQ ID NO: 382 - DNA, 739 bp, Canis familiaris
  misc_feature (160)..(160): n comprises a, c, g, or t, or includes no nucleotide
gccatcagtcgaatcgattccaatagggaatgggactcaggaggatggtcggacaggctgacacatacccgatgtccaggacacacacacggggaccccaggagacttatctgagttcgggacaccgcctcccgtaaacggagcggggggaggaccggtnggtcttagtatacgatgacaaagtctgagatgtgtggggttggccacacgagcccgttcgagtgttggggtacaaggtagtttcaaccgaattacaacgtttcttttgatttgggggtcctattctgttcggaccatccttacctagagaaccaagcgttacttagcagtgagtacaccatacagatacaaccggcaaagggggcgttggtggtcctagtcaacgattgtaacgattcaacatcgagaacgaagaaagagctaaccggttactcacttatctacgtattaagtctcacatacgtccttaagatttaatgtgttttggtctatacgcaatcgtcattgtatgattatattgacggttgtatttgtatagaggtggtgtgggggagtaagagaatttgtgtggcgaggatctgagggtgaagattttaaaagggaattgtgatgtcggataaaatataaatccaatttttccccttgatacttatataatcgtcaacccaaggagtgtttgcttcaaacctcataaaacttaaataaacagtctgtggagactaaaaaaaaaaaaaaaaaa

SEQ ID NO: 383 - DNA, 555 bp, Canis familiaris
gacatcatttggagttcaaaatgttaaaccatatttgctctcaatttgtttgtaatatttttgaccttttaaggaaccacagtctccgtgccccagtaaaccaaccgggcttaacggagggcaaatcttggtctcggtttggaaatgttgttggtttttatactgggctcatacaacattttgtggaaattgtagatcaacttcataacagtgttcgtcatcaggtccaacaaacgttggggaatttcaaccttgacagttaacaggtcaattcaactttgttgtcggggataaatcaagtttctttgttgagtccgacttcaaattcagggataggtaaacgttattccagggtcattctatcatattatagggatcgggttgtgggtctgttatgtgagtttgattgccgtttccaaggtccacttttcggtcgtctgaaattgaagggggtggagagagaatttttttgatatacttttctcttatttctggtgtttacctaaacaaaagacaaataggaccttatgattcaaaaaaaaaaaaaaaaaaaaa

SEQ ID NO: 384 - DNA, 631 bp, Canis familiaris
gatattaattacataactcaaataccctagaatatcggaactcttgacgggaaaatctaagccctttctcgtataatccttttcttcatacatcagactggtgaggacaggagttcgaggaatattttgtgattttcttgtgtctaagtttgaccccgtgtaatggtgattacatatcccaacaaattcaacatgtcatgtctgagttcgttaacagggaaactgggcagagacgttctctacacgaatacatgtcgtccgtcaactgtaccgatatttatatctatgatcgtaagaatggtctttggatgttccctcggatatataccaggtaacgtatcgtcacaattggagtatttaaatttacgtcagtagtcacatcatcacttctcgtgtacaccttgtggaaattgatccgtgagttaaaatgcgtgccccacccgacgtgccctccgttccgcctttgcgcggcggttgacgggacccgctcatggtccacaggtcccatgaactgggcgctgcccttgggtcgatccacggtcgttgtgggtgtcgggctatgtgtcggtgtgtgtgtggggtgtgtctcttggtgatcaataaataaataaaaaatgttaaaaaaaaaaaa

SEQ ID NO: 385 - DNA, 559 bp, Canis familiaris
gagacataagtatcggtgattatgtaaaaatcagacgggttcgactaaggatgttccctttgatggtccgagtacaagtaaaggttaggagagaaccagtgaaatttaagtatggttgtaattagtttaaattgtggacggtggttccgtagtatggaaggattatcgaggcggtgagaggtaaaagaactttaaggattacggacaaatgacgatgtatagttgtccagtggatgtcagtacaaaagatggtagggaaatgaatgtgatatttggaaataaaatgttgtagggttatttgaaatgaaaaacctgtgatgaaagtgtatttggtatgcttgatagtacgtataatggtgactgtagtaatggttaattaggagccctaagttggatcataaggaagagcgggattaataatcatgacggtctaagaaggaggaaggaacttggataagtctagacacggcgatagggatacggtgttgagtaaaaaatggacactgggggctatgatacatgagtgaatggggtattggattaaagtaaaaaaaaaaaa

SEQ ID NO: 386 - DNA, 639 bp, Canis familiaris
ctctcgtgacatcacgggtccgtggcaaccacgtggtccaacaatgagaacaatcaaaccatgggaacaatttttagacaatatgcacttgtcataataatctgttcacccacgatctagagagagaaatcaggtaatcaacaacacttttcataaggatcggttgctctagcccatggagacgttcatcttgtcgctcgtcaaatgtcgtgggaacggaaattctacttacggactttgacaatatattcgtcaatatcggaacaggaataatttggatctaacagatctcattcaccctaataacccaaaaccctaaacaggaccaattgggggtttgtgaggtgttgaataaaaaatacgttacttaccgtctacttatgtatccatccatttatgtttttcggtagtcatagcgtttgtttgttcccccctaactggtaaactgatttagtgaggaacaaattaatcctccttcattgagtcattatactacgtcttggactcatctattgtcaattttaaaactataacttcttaaattctaaaaaaattggaacgggaactgatatgtgtcttcttcgggaactagatctgatcatcacgaaaaaaaaaaaaaaaaaaaaaaaaaaaaaaaaa

SEQ ID NO: 387 - DNA, 597 bp, Canis familiaris
cggtacaacgtcggtaatactataacacgtagatgggtcttgtcacggtgaacacctacagaaccttaataaaagagtaccgtcagacaaccttccctgtacaacagtcttgggtcgagggcgagggtggaaccgatctccgtcttccgacctattactcgaaccagcgtccgaagacgtgtgctgggaccatagagactccaacttctcgaccttagagaccagccccgggtccatgaggtccgttgtctcgtggagggtgttctcagtcaggcctcgtccctgtgtctctacgttggtaatcactccagtgggacatcgtcggtcccctctgagtatttaatctctgcgggacatgaagacctactgtcacagtcaaaatgacagggtcagagtataaaaacgggtcggttcccgacgggacctccgtgactcctttacgcggcggttgacgggacccggtcatggtccacagggcccatgaactgggagctgcccgtgggtcgatccacggtcgttgtgggtgtcggtctctgtgtcggtgtgtgtttgtgtgtgtctgtgtgctcaataaataaataaaatgttaaaaaaaaa

SEQ ID NO: 388 - DNA, 547 bp, Canis familiaris
ccgcaccaggtcagagctgaggatcatcacgtgtcacggggaccggggacccgcgggagtagcacggttctacggggagaccctcagggaaccaccccgggggctccggaccggggggtggggatgtccaggtctacgatctccagaggtgtatggagggtctctgggtgtcgggcacgtgtgacccagagacgacctgaagttgtggaacatagtcgacgagggggacgggttgggaggggagggtgaccaccgtgacacaggggaaccctaactcaagatgtctttgtgattccgacaatgatggacgggacgggacccgtggggggaataggaacgtgacggtggaacacggtggagtcacgaggggacgtgggaatgtcacggtgacatgagaggacgacacaaagaggggaggtgagtccggtgacagtgcggtcggggggccgggtcgggggaccatcggtggtgtgtcggacccaccgggataaagtgggctcgtcaacaaaaaaaaaaaaaaaaaaaaaaaaaaaaaaaaaaaaaaaaa

SEQ ID NO: 389 - DNA, 582 bp, Canis familiaris
gttgaaacatcaacccccgggaagggttgttggaacccgcgtctcctggagatcttggtaaaccccgatcccccccggggtttgctcgtccttgtctagcagcacgttcaacaaactgatgtacaggttggtggtggacagagcccccgggagacccaatgagctacaatggttttaagtcttagccagggttcatgttgcacaaattggactctggttctgggccggacatgagctacagacccgtccccaaccttggaaacccccgtgattctcatgcatgatgccgaggaccttggatcttttcattggccccccacccggatgatcagctgttgctccctggagcccgtccgacgtggcggcgtgacaggatacactggacctcgttctcccagggcccttctctttaactatttatttaaaaaaaacaatgatctgtggatttctagttaacgagtcttgtgttttcgagacggcaatatttcggattatcttggagatgcccggttgtcgtcggaaagggataaaaagtcccaggggacaaaaaaaaaaaaaaaaaaaaaaaaaaaaaaaaaaaac

SEQ ID NO: 390 - DNA, 268 bp, Canis familiaris
atcggatgttgtcttataattgatggactttttcaacacaacgatacaacacagttttttttatttattgtacgagtgcgacaaatcagtagaggtctcgtatatatagtaggacaattgggatacaaacaacgttataagtctaaggtgttagattaggttttgacgatcaacaaagacttttttttaatcaggaaggttcttcggttggtaacaaggttgttcaataaagtgattttaaaagtggaaaaaaaaaaaaaaaaaaaaa

SEQ ID NO: 391 - DNA, 619 bp, Canis familiaris
  misc_feature (160)..(160): n comprises a, c, g, or t, or includes no nucleotide
acggtggccagtgtacggtaccggcgcccagccataggatttgagagtccgaagacgtatcaggattaccggtattgtgacctcaggagtatactagaacgttcgaggtctaacgcccgtcctaggcctggccaattgggcccatgatggtctgattganggtcaggaactgtcgactcccgatccgactcaggaccccacacacgtgtgacaggggtcatggacggacggatacacccacctcagaggttacaaatccctcccatagagacatcgccctccctgcggagcacccttccgggaggcagggggtgcggaaacgtcgagggaaaaattgttgacacaccataaggaagcaattttcgaaatgattgggtacatagcgttccgaccgaacaaaccaagcgattcgatggatcacgatatagaccatatttccccccgacaccataaaaacttcttggcttgagtgtagatttagactttggacaacgatgggcaggctccaccgtgactcggtggggctgatggtcgtgcacgcttggcgttggagttggtgtggtgggctggaagcgttaataaaacaagatcgttcaatatcaaaaaaaaaaaaaaaaaa

SEQ ID NO: 392 - DNA, 612 bp, Canis familiaris
acaaaagggcggagttgtagctcgggtcgaccaaggggaacttcggagtctctgatggaccatgacacttatgaatcctctcacgggggaaccttgcaaacctcttcgacgttgttgcggttgcggagcatgtttgaatccgaggtttcttaacgtggaggaccgttgacttaagagtcgtaaccattctccaaggctatatacggtccccctaggggaaggtcaactggactcaatcaattcatgtaggacgctccttatccggacatggaggacaacggcaattcgggtcaggacattaggaggattcattcgtgccttgttgttcctaaatatccggatgatgtcgatccaccattgtcatttgagcacatgtataggcttccaaaagctttgaaacaacgggagaagtttttatccgggttgaaattatgttgtggagctccgccaatcaacaaaaacaggagggattttctacaacctccacatcgtccggagacccaacaggacatgataccgttattacaaccatcaagtaacctatgtaggatcattatttttctaatgtcctgacttaataaatcagtagtttggaatccaaaaaaaaaaaaa

SEQ ID NO: 393 - DNA, 560 bp, Canis familiaris
cctacggtctcaaataacatgctcgggggggactaataatactactatagtatacttaaaatccgtctaacaatacttttataaaactccatagaggcatgtattctatttcaaaggataagtatttcaggattattactctcagggaactattaccggcttttgatagggatttttgaggttctaggaaattgtcaattggatttgtgttggaccgtccggaccacatctccccttcaaatcgggtgtaactcttattttccttcttgtaagttaggaagctcattttcaataacaaatatttcctcttgtttttataagggctttttcattcctaagtcttttgtctattcttttaaagccatggaaaaatctaactgtattcctacacattaactatttattcgtaggagttacttcataaattcatcttattctaaacggatatcttgtcttaaactgttctttcgttcaaatccttattggtaggcctcaaagagtacagtatttccactctaaaaaaaaaaaaaaaaaaaaaaaaaaaaaaaaaaaaaaaaaaa

SEQ ID NO: 394 - DNA, 630 bp, Canis familiaris
tccattataacaacggtttcttctacaacaatccctcaaccaaagagatcgtcatgtctccggacggaacgactagggagttctgagcggaaatcaacaaacaaatcttatccaacaccgaaaccgtttgacgggtgaacatgtcgacgtgaagaccaagttcatcccaaaggtcgttgtggtagtggactaattctgaggtgggagagacggaaggaacaacaaaacactttactgcaagtccaactacatgtccataatttacaattacaacatattcagagaagacagatgaaggtccatcaacatattttccatcattcactctaatctttgttcacaaggggagtagagacatgattatcatccagacctatgcatgcggagggtcaggagactcgtttacagtgttcacaaggtggttacattttatatccaaaccgtctttctccgggaggtcccacgagagtcgtgttgtgatgttaccactgatttatctcgacgatgtaaatgattctttggtgattaactaaagggactctcccgtttcatttttttttgatagtctgattacagtcttatgtggataaaatgtgtttcaattaaggaaaaaaaaaaaaaaaaaaaaaa

SEQ ID NO: 395 - DNA, 665 bp, Canis familiaris
gttcagggggacagacacccatactagttcaagatgtcgggttaaatccaggaaccggatcccctatataagttcttttcatcttagatgttgaatatacaattttggtaaagagctgacatccagaggacggtctatagggaggggaactgtctcgtcgtgtctgagtagtttgacgtgattcgggaaagggaggtgtccgttcaccaattttcatttgtctggggaggcggcggagggggtaggaggacgtactggtgggatattctgggaaagatttggttggacgttggaaagatttggtcgtgtgtatgtattcgactaagtgacaagggatcaaatttacagcgaggaggaatttgtcgccatattttcgtgtaacaaatggattcttagtgacgataatcacgttttaacctatatccaggatcgagtgtgctcgggatttatatacaaccataggattgttttttagctcattcagcaaatcttagctttttgattaccaaagagtaaatgctctaatatttgtctttctcgtggtttgaattggtcagccgaaatgaacataaagtattcgtttctgtgtttcacgacggtcaaacgcccatcaaataacacccatcgattgatttaaagatcgtttcgtctagcaaaaaaaaaaa

SEQ ID NO: 396 - DNA, 382 bp, Canis familiaris
tttgtggttagagttacggccactgtgttgtattttaccccgaattaatttgatgagtagtattatgaagattaaagggggtcgaatatgggactatggaagtggggtctttctatcatgactagtaattagacgagcttgtagtgttagtatgggtcggtctagtccgtcgtccaattaggatagttttaagagcaggccaatgttaataggagattttttcatggggcgtccaccaccacagggtatggtatatgaagaggtattgtcattgttgcccgatggtcaactttagattgttatggtcgggccattgccaataatttgtgagattctgagttagtagtgacccaaaaaacacggaaaaaaaaaaaaaaaaaaa

SEQ ID NO: 397 - DNA, 544 bp, Canis familiaris
aggttgttcaacaaaaactccgtaatagacgctggacttgaacttcggtcatctctatcccctcttggactttaaactccattagaggccgtaccgtagagcgagttagagtgttggagtgacctctggctcaccggcgtggacgagagcgactagcacgcgttgatggggtgccggtaggggtagtagcggacgcggttgtggatcatcgtccccgtgttgatgttgacgagactgttgttagagatcaaccacaaccacaaatgtcagtcaaccccgacacggaccagtggtcagcagaccgagttcccacttgtcgcccggtcgctgttggtgagacgcccgtttcttgtcttcttaaacgtctcccaggctccgagacggttaggtgaccccacatcgccgagtcactaggcacccacccccctccccatcaattttgtctcactttttggaggtaatcgtaactcctatttttgatatctcctgagtttgatttgtaacataaagattcgggtggtagtggaaaaaaaaaaaaaaaaaa

SEQ ID NO: 398 - DNA, 304 bp, Canis familiaris
ccttacgagttcaacctcctatccaaaacggtcgatcgctcttgacttgtttctttgttgtggttgggtttggggttcccgggggggttgggtggttgcgtgcgtgaaggtgttttcttgactatctctaagttcaacgtaatttctagtagtccatatgtcagtccacggggacatagacaatgtctattcttgttagtcaaagggacgatccaattaagattaaagttaaataaaaggaaggtaaattaaaaatcgggaataaaaaaaaaaaaaaaaaaaaaaaaaaaaaaaaaaaaagaaa

SEQ ID NO: 399 - DNA, 631 bp, Canis familiaris
gacggaggttcgccagatcgtagaatcttcttggaaaacaaatccatcgcagtgttctagagactataagtcaaactcaacttcgagcacgggaaaatgttgtcaaaagaagatcttcttcgacgttcagccttggagtgggatgtctcaacatattcctaccggaatcttatcgtataagacaacaattgggatgggtcacgttcaacgaacaattcatcgtctaaatcgtcacaggattgaacaactctcgaggaaatatatttatcataacactggacgtgttcgtcgtcttcctgggattcaaggagtcggacagtttaaggacattgcgaccaagatctcgtccgttgctcattaaaatcgtggtattgtaaatattttccagatctatatttataaacgtaagtcatgtcggacttttaacgtaggactgggtaaacaaaaagaatagaaaagatctagttccaaatttcactcaaggagtagtcgatgacagtttccaaccataacagggggggactcaatcctagatgagagtttgaaatgatgagtataatgttaacaatcaaaatttctagatattttgacttttattataaaaatcgagagagtaaaaaaagaaaaaaaa

SEQ ID NO: 400 - DNA, 584 bp, Canis familiaris
  misc_feature (128)..(128): n comprises a, c, g, or t, or includes no nucleotide
tgccaaacagttcaacctaaacgctattaggggtgctgagttcgagttcgtattgctccacatcaacaattccattgggtgatgaaccgtaggattcgtcctcctcctcttattggagagatggaganatgtgtcattcccaacaaaccagaggacaacagtctttaaaccatcggtccattggttattatgtgaccagtgtaaatagtgttaagacgtctggagctcttcctcattggagctccagtctatgtgtctcaaaaagaggattttcggtttttctaattgtatttcacggacttccaactttaattacgtttggaaggaagggaatttgtcgattgcactgttaaggatatttaactcttagtctccgttggaacaacggtattcattggtcaagctagctcgcctgtgttcaagttgcagcgttcaggtctttgttaaagaagaggtctgttccatgtttaagttctcagtcggagcaagcgttagtactaaggaagagtttccttttctagacagattatttggagtgggctccataacgtgaataaacctgatatggggaagtaaaaaaaaaa

SEQ ID NO: 401 - DNA, 451 bp, Canis familiaris
  misc_feature (69)..(69): n comprises a, c, g, or t, or includes no nucleotide
ccccggtgtccgagtcacgacggtgtcgagggggacgtgggacgggactcgggacggatccgctcgggngtccatgacgcggattccggtggtgctccggatgttggataactagtgcccgaaccaaccgcagaacaagaagtgtcacgaacaaccacgtcaaccacgtcatggacaaccacgtcaggattccgggcaacgtcgaccatcgtcagattcgaaacgtcatccagcaggtccaggcaaagaaccaggacctcctcaagttggaccactagctgaggttggtcccccggttccgtgtcatgtataatcatcgggtgaacccgtcacgatagacgaccaacctccacagaggagggtggatgcccggtcggtaattgacatggactcgtccctaagtcttgaataaataggtttgtttcctgaactgaaaaaaaaaaaaaaaaaa

SEQ ID NO: 402 - DNA, 613 bp, Canis familiaris
cgggaacaagaagaacccggtctgaactcttcttccccaacaggttgcagtggctcctcatccaggggaacaaccagctggtgatgcacttgtagcgggggtcctcgcccgagtcgaacgacgtccacgggcactagcgccgcgtgccgaacaactagaacaaggtcgaacaaggtcctgatgcggaacatccagcggagccggaagcagatgaggacgcaggcgtagacactgcagcccttggggaggatgtagttgcggggggctccccaggaaaacaagggcattaaatttcaccagccaaaggcacatgtccaagagttcacgaacttgctacaacaagagcggagcaaagtcacgaccaggacccaacaagtgtcaaccgggcccgccggcaccgcgcgcgaccacccaggcgggccacgggccacgggacgatgccccggtgcctggacccgaccctgtgttccccgttaccccttttctagtgtcctatgtgaggtgatcgtgtcaatagtcactacacaacaatcagtggatacattacgggacatttttagacacaatagatgtatttttaggattaaaaaaaaaaaaaaaaaaaaaaaaaaaa

SEQ ID NO: 403 - DNA, 336 bp, Canis familiaris
actatatgttcctttaaaataggaacggggagaccttcgtagtatcttttttttttttgggaattctctttacaaatagtctaataaatatctactaataatataaaaacaattccatgaaacataatataaactgattataaagtgatggatcgttgattttcgataacttttctgttctcatgtgtcgttgagttactatgttcctccatcgtcatatctggctgattgtcaacaggtcaattactaattctaagatttgacaaaatctgttttagtttccatgaattaaaaaaaatcgacaataaaaaaaaaaaaaaaaaaaaaaaaaaaacc

SEQ ID NO: 404 - DNA, 562 bp, Canis familiaris
  misc_feature (249)..(249): n comprises a, c, g, or t, or includes no nucleotide
  misc_feature (262)..(262): n comprises a, c, g, or t, or includes no nucleotide
  misc_feature (297)..(297): n comprises a, c, g, or t, or includes no nucleotide
  misc_feature (331)..(331): n comprises a, c, g, or t, or includes no nucleotide
tcccagtcacttttaagacgatgtggcgtcttcagaatccgagtgtacggtagagtggtgatgtcacccacgttgagttccagaagaataacgtgatgacactagggcctcccgtccgccacgataactagatggaccttctgtaggttgataagaagaatatatgtcgactgccatgtaatcagttgtcgggaggtccatagaagaggaaaaaccgttgttattgacctctcacggttttgacgaagnggactcgactagntcccacattggacggatgtgagggtttggcctctnccttgtaagcttcgctgtgtcggagcttgacgtntccaaattataaataattgggaacaaacgggtgctttttataaggtccgaaaatgggattaatatgattcgtgaaaaaaaaaaaaaaaatcaaacgtacatagtccaaagttaagtcgaatctccatgtttttgggagatcatttataatagataaacggcaatatcgactttaaataattcggtagaataaaaaaatattttcggtcggaaaaaaaaaaaaaaaaaaaaa

SEQ ID NO: 405 - DNA, 682 bp, Canis familiaris
ggtacaacatggaaccaccacgtcaccctgaaccaacatcagaacatgtaggccccgatgaataattatgacaaatagatcaacgggaaccatagctgtatcccgaagcgatggtggccaatcctcaccaacccggggatggcacgtgggcacgatgtagctcggaggctcgcgtcccattaggacgggcagatttctaaccagtagaaccacagtccgttttcgccgttgccacagacgtcgaacttggtggatcaggcttgacattagaacgagccctccgacattcaagctcacgttcatcaccctgcgtatcctctgtatcaccagcaaaagtatcaactcccaacgcatcatcaccaaataggattgaactctttgatgtctgcggacaggttggacaatggacttctgaggaactcgaccgattatttgtcgcacacgtctcgagtcgacgatttggcgaggaggggtgcgtcgtatctgtctcaggacgacaggaatccgctgttgaatggacgcaaacaattcattcgtaaattccacaacgatgcacgtcgacaacaccctcctcgttggcatttgggacaacaggggcatcaccctggcatggggatgagttaattttggtattattgtgagaggtgaaaataaatgtttctttccaaatgttaaaaaaaaa

SEQ ID NO: 406 - DNA, 607 bp, Canis familiaris
cgtggggatggcaaccagtgggtcaggtctcctttgtctcggaaacggggctggagcggcgtccgagacacccccgccaaccccccgtcccgatggtgttaccgtgggtcacggtgcgtcacggtgtgtctgtcctgttggttccacaagattggtggcccgttcccaaacaaaaggccggtggaccccaaatgtcctgtgttggtggtcgttgtacaaggaaggcgatgacccagacagtcatgggcgttaagagcacccacccctttgtcaatcgtggtcggtgaatgttgtggttgagattggtgaacccactcaacggcggttaactggtggtataaaaagaaacggaggtggtaatttatgtacgttccaaacagggtgttggttgactcacctctctctcgacaacgagtctcctgacggtctggggacataccacatggtctgtcgttttcccggctacggttaatgaggatgctctctctatctctctcccccgatctctctttgtctctctcccgatctctcttttctaataaaatattaagttccgggacttaaaaaaaaaaaaaaaaaaaaaaaaaaaaaaaaaaaaaaaaaaaaa

SEQ ID NO: 407 - DNA, 427 bp, Canis familiaris
  misc_feature (2)..(2): n comprises a, c, g, or t, or includes no nucleotide
  misc_feature (23)..(23): n comprises a, c, g, or t, or includes no nucleotide
  misc_feature (44)..(44): n comprises a, c, g, or t, or includes no nucleotide
  misc_feature (60)..(60): n comprises a, c, g, or t, or includes no nucleotide
  misc_feature (74)..(75): n comprises a, c, g, or t, or includes no nucleotide
  misc_feature (93)..(93): n comprises a, c, g, or t, or includes no nucleotide
  misc_feature (99)..(99): n comprises a, c, g, or t, or includes no nucleotide
ancgtggtctgccgccgtgtcgncctcacgaggacgtcccgcgnacacggggtccgtggngtgcagtgcccggnnctccacctcggacagggncggcgngttcaggaactgagtcggtacgacgggggggtctgggttgtttcctggagatcgtggtgtcctctgacgtgggtctcggtgtctcccaccccgccgtcgggtctcttctctggccccggcgtcgacgtccccgatgtcaacgtcggacgacgggtcacccgcctatggggagtgtcctgggcacttttcaggacaggtcactggaggtcctggggtctcttctcttgtcctgacaccggtttcgtctcaaatcgactctttgatagcatgggatgtttggtactcgatcacaaataaacattatttaactaaaaaaaaaaaaaaaaaa

SEQ ID NO: 408 - DNA, 602 bp, Canis familiaris
tgagagagcgacttgtgaacaatgaaccgtggttaaaccactcgttcaaatgggttccgttctgtatcgtccagtgccggtcagcggttttgatcgttttcaagaaaacatccgtctttatacgtgcaagtggagacgggtctttcctataaactaatagattcactattgaccaataccgaatatatttctttaattagggaacctggtggttggttctgacttttggtcttttgattacacaataataaaacaccacacaacaaaccccctcaatttttccggttgatgtccgagaggagtagaagacaatattccgatattttgtaccaaacaaacggtcttttcggataaaattttaggtgagaaataataactcgtaggtattctagtgacttccagacgttttctatacaacaagtaaagtgcccgacgggacctccgtgacgcctttactcggaggttgccgggtcccggacatggtccacagggaccatgcactgggcgctgcccgtgggtcgatccacggtcgttgtgggtgtcggtctgtgtcggggttggtgtgtggatgtgtgtgtctctgtgatcaataaattaaaaaa

SEQ ID NO: 409 - DNA, 481 bp, Canis familiaris
tcccgtggacaccaacctggacggtaccgggggagaatccgtctgacgagggggagagatcggggtcccggcggttcacaacgagactgtaagtgaggagaccgtggtcacggtcggtgtcggtcgttggggatgttgcggaatgggtttgtgtccttgactggaccttagtttccgggttccttttgttgggacattccaccttgggaacaccgggtggaccccactcctaatcccgagttgggttctccctacgtcgaccccggatcggtgtggtgggtgtgtccgacccgggtatggtcccgacccccggtccccgtcccgggatactggacggatggacggcgtggtttcggactgtcaattgaataaatggctggaggggggttttctccccctcaagcttttaagacgggaaaaaaaaaaaaaaaaaaaaaaaaaaaaaaaaaaaaaaaaaaaaaaaaaaaaaaaaaaaaaaaaa

SEQ ID NO: 410 - DNA, 636 bp, Canis familiaris
tgggaaccctctacaattgctaccctgtctgattgggagttgttggtgattcacaagatgtctgttgtcgacagggttgtcggaacggaccccatcatgacgttccgtccacttcttcccgtcccgataacccacgttgtggacacggaccgttcaactttcgtgtaaggaagatttaaaccgtgggacacaggacacggacatacgtggtcggggactcggttcctgcagaggtggtgaaactccaggacgagtctgttctgtcacttgaggggacgggatgggtcgaggtagtaattgtcctgtggttgtgggttgttggaagaaaactattcaatagtctgtggaatgcctatgtgaaccacctttgtcacagacttctacaaccgtgaacatcaaccgtccggattgacgtagaacggtcataaccggtctctttgtgtcaggacacctccaaggggcacccgggacgaccggtttgggacccggtggatccacgaacgtcacggaggttccaaaagacacttaaagccaatatttttctagggcatctttagacatcgtcttcccaacttatgaataaaaacagtgtcttattaaaaaaaaaaaaaaaaaaaaaaaaaaaaaaaaaaccgc

SEQ ID NO: 411 - DNA, 526 bp, Canis familiaris
cacgggggtggacgggggtcggtccacgatgtccgacggggacaggtcgggatccccctttgaccgtcgggggttggtcggacaggccaccccgtccccccatgggacgacccccacccgaatgggttgaggggacttcggaaagacgggggtgagggggtccaggttggtggtgggtgtatgggtcagccttgtccgtttgggaaaggcgttttcatgttgtcattggtgttcccttcaacgacaggacttggggggaccgaggggactttccccccccggtctattttttttaagcagaggggacttggtgaggtcttggtgggttttgggatcgtcggaagttgtaaggcgaatactcagtgtctcgttctgtctttacttgtctctataaatccaatcttctccacatcagggttggttcgcggaggtccttggggtggggttttggggtcctgttccgagtgatccaaagaccaggactaacccaggttgaattaaaaaaaaaggaagaagagagaaaaaa

SEQ ID NO: 412 - DNA, 549 bp, Canis familiaris
atcgaaaacaatcaaagtccaggagtttgttagatgatagagcatcaagtggaatccattaaacaagtaaatctaacaggggacatgataaagtggtctttaaaaaaaatgataaggacgaaagtggtccaggtttcgggccgaaaacttttggacctgactgtggtgaacgaacccgacgaaaacgtccagaaagaccgaaataagtagtccaagtagatcaaaggaaaacgttttttcgataatcacccagaaaagaagaaaccgaagaaaagagaaaccgaaggtagcactccaacaaaatctttcgaaatcatatatggaaaaaatcctaaatatggaaaatatattaaaaagtgttagaagtgaataggaaagagtgaaatttaaaaatcccgacacaagtcaatacagattttgggaaacaacagacagccatcaggaatacatatataaaaacctagtgaagatgagtaatgactcaaatcgaaatgaaaaggagaatattagtttcgacgactgacaatccttacgatgaaaaaaaaaaaa

SEQ ID NO: 413 - DNA, 652 bp, Canis familiaris
ttcattatacaccaaccaataactaaaaactttctttatactcttaataggcagactctaaaaacaaaatctggaatgtgtccgtccccacagcctacgtctcaaggttccgttgtctagatgttcggtgcccaaaatgccgacttcgtcgttggttgtcactaaatttccgcttacataactcttaagacataaaatatacgccttttatccattccacgccaactcatcaaaaaaaaaagacggaccaaaggttaaaactaagatacattcagacacctagacctcaatgatgagactgttaaagaccgtaagtagtgttcttcaaaacattggacttccctgaaaaatcagtgtcaaggtcaaatctcatcttgagctttctataaaagagaaccattaaaccactttaaacataatcaaaaggtttaactgatacaaattcaactaccaacgaagatttctatgacaatttaacgtataagaaactatagaagagactctaccatctacgatttaacaatgtttcctaaataagcgcttgatatcgacagtcttgactatgttcatctcactcctaatttttaaaaatacttgattttacctatttaataaactaatttgtttttttaaaataaaaaaaaaaaaaaaa

SEQ ID NO: 414 - DNA, 584 bp, Canis familiaris
tggcccgtgcctttgttccgcaaggagggggttggtctttgttgataacagtgacggataggagagcatggtgttgtctccgaacgttcggtgtgggttaaagaacgacctgttcacgaaccgtgacactgagacaccaccccgacccagaaagggatcagttagacgacttgatgggtgagagaggtgtctaggtgagtgtcgtgatgtcgaaaatccccgtaccgtgtgtgtgaagttacaggttcaattcctccaggttaacattatacaaatgatccaacaacctagatttatcaaaaacgttgtgtccttgtcttatgtttccccggtgatctaaaccatatgtccctcagaatgaactgaaccacagtaaatttaaacccttacatttctttcagttctagctgtctatcatgtgttcaggacaccaatgtaggttgacaaaacgaatttcacccgttgaagtttcctttcatttttaaatattattttggttcgatctagaagatgatcaattttacttgaaaattgtctattgagtctaataaagagataaattcgtttgaaaaaaaaaaaaaaaa

SEQ ID NO: 415 - DNA, 610 bp, Canis familiaris
  misc_feature (376)..(376): n comprises a, c, g, or t, or includes no nucleotide
cccacccccccttaaggtttagtaggattactatctatcctcggacaatttgatcgaaatcacctctcggacgactctcctaatttaatgctatctaaagtagtaggttaaactatcgagaaagttcgtcgtcgttacatgaggtcgacgttgtaccagggagctttgttttagtcatttaaaaagtatagatataaaaataaaaaacttctcggtcaaatcaatgttcttttttttataactacggcggtccttggtctctggtctcaaatagaccgagttcagggttcctctacggtgtcttgcagtttatatgagcccaagccattcctgtcatttgttccgggtgatgttcaattccggagatggacccggngtccggactccagtcaaccgtttctgtaacatcagaacccgacgtgaccccatctcccccacccgcgttttatgttggggcttctgatttcaccttttcatgttgtgtccctaaacaccggctttatgtttctaaagagcaaagatttttcgtttgtggacttttgtcttaatccgcaaacaatccaacgcaataaacttttagtcatttttcacagtgtaaaaaaaaaaaaaa

SEQ ID NO: 416 - DNA, 347 bp, Canis familiaris
ctcaagcccgaccacgtctcgatgagctgggagtggatgcggaccatgtgattgcggaaccacggggagcttccacggacatgagggcaaaattgaccgtcaattggcaacgcgaaagtttcaagacaggctgtggatccgcaggaggagggacgggatcagtgacgatgtggagatgaggtagaacaccctcaggggctcaggggcactctctgctcagggttgccgtttctacagcgggcggcgacctcgcccgcccggcgcccgtgctccctgggacactgcggatccctgggtctaagccgctaccaaaaggaaataaaaccggtttattttttaaaaaaaaa

SEQ ID NO: 417 - DNA, 491 bp, Canis familiaris
cataaactaattccggtactttgatgtggctttaaagttgaccaatccggaaagtcaacatttacttatctaccagtttaattggttgttgaccagggacttaataaaacagggacaaccaagtggtccattaaaagtccatatcccactaattttctaccggacccgtcggaggattttcccggtttcttctaatttgtcgtttgttcattaagatgtgacacgtcaaagattggagattggggacgactctcccccggaagtgaactttagaatcgtcagaaaattagggtcgttgtacgttatggaaatggtgtcggggtgagtggtatttattaacgatgagagtagggaaacctagagtacgaaattctcgaattcaataaaagggagttttgatttacattgttcgaagtctatgatatctaatactatgagtttttgtagattttcctgaaataaatttttagataaagtataaaaaaaaaaaa

SEQ ID NO: 418 - DNA, 225 bp, Canis familiaris
acgagacagaccatgcgacccacaccggctattacgttccgtggtcaccttgtcgaagacgttttgttgttctagggactcttagggtgattattttctaaggttggaagtggtcatgagggaggcccttttttctctgccagtatctaattctaaggatatgtgtccttgggattaaaaaggatgcttttacttaaaaaaaaaaaaaaaaaaaaaaaaaaaaaa

SEQ ID NO: 419 - DNA, 625 bp, Canis familiaris
aacgagttaggtcctccgttttcgataggaatagctcaaatttcttgtgaagaggaacttacgagacaacacccaccatgtcttttgggaacacactcagtgcaaaagtgtgtcaacgtcattaggcaacatctttgcaaaccaaaacatcaacaattttctccaacaacaatcaacttcgtcattatcaacgtagaagattttggatgttgtataaggagagggtattggtcctgttcctgattcttcggtggttgtttatattcaacaagttgaagggaagcctcaagtatattttctggataactcgttgatgaccggtgatgcgggttgtctgtagtccgtggagactacagtctaggccgtttccggggtccgtttctatgtatccctccggtctcctatatccaaaactaagaccctcctgacaatcacacagagagaacatctttttatactgtcgacttccaccctttcaaaaaggggaaggaaaatctaattggactatttctttattccgtgtttttttcaggacattcttcaaattaaatcaattcaaacccaaaaaaaaaaaaaaaaaaaaaaaaaaaaaaaaaaaaaaaaaaaaaaaaaaaaaaaaaaaccc

SEQ ID NO: 420 - DNA, 588 bp, Canis familiaris
ttcttataaataacgtcgataatggataaatacaagaacccagtttttctttcataatgggaatagtgaaactttagctaatcacaattatacgcgctctcgagaagtgttcacccttcattatcgtcgaatttacgatcttccaagctgtacacacaaccttcagtttttcgagttgtctatatactgaaaacacacaaaggtctataatactaacatgttattttcaataaaaagctgtataattagaaccacttttcttaaccgtaataaaatcagacagtcacgaaaattcgttcgaaaactccgagacacttacgagtggataggggttgaaagatcttcgtttcgtttattctccagacgttctactttcggaccattttttgacgtccaaacatatcggatggttggcacatgtgatcagtcagaaaaagtggattcccggaaatgtcggtcaacatgattaggaaaaatacgacctagttgaaggattaacctcaaatgatccatgacatattggctagatttttgaaaagtagtcgatctttaaaagttgaagccaaaaaaaaaaaaaaaaaaaaaaaa

SEQ ID NO: 421 - DNA, 640 bp, Canis familiaris
gacggcggtgtttcaggacttgttgccacacgaggtcttccactggcatgtgttgggaagttgtagttgggtcacggggttgtaggttgccggagggtgattggtcgcccgagggacgtccattcagaggcccgtgtgacacatcgctgtccacaaccagacattgtgtctgaaggtccatctcaacgagttgtggggacaccacgtgaacctgaacctcttcccacatctcattcacctcgatccgaaagatcaacacgcggaccatcaagatcctttgatgtgggcccacttggagaccaaatagaccatgggacggcatctccatggtgttcggattagttgatgggtctgatgtcatcccctggtgagtctcaatccaggaaccaacgaccggtgaccgggtcacgcgaggattgggatgagggctcaacaaaacggtcgactgagtcgacgggggaacaaatacatcgggtttgtgtaagtcgattttttaaaagaacaaaatttggggaggactcaatcaaaatgttctcattactcgtcaacgttattaatcgtaacccgaccgggaaattattaacgtaataaaatagtattgacgaagaaaaaaaaaaaaaaaaaaaaaaaaaaaaaaaaa

SEQ ID NO: 422 - DNA, 535 bp, Canis familiaris
tcgggcatgtgtacaagcgctgctagagagcacgaagaactgggggaggcagtcctcctacctcaaacgactagtgccgctgatggagggggcgcgaccacactacggagggaagccacacactatcaagaggactactatatcctctcactgtggggaaacaccgggagatctcccaaatgtgggagggctcctgagaccacggcacacccaggaaacagggtgtccaaccacgggacaggaccaaacagcggaaaaaccatgaacagtgggcatgtcgaggtcacggaaacaaaggtcaacaaaatggacgttggaacttgacttgtcgaacgaactatcgtcgtgtgtggattcatcctcaacatcacaagcacccacaacattagaggcaatacaggtgtcgatggtctcgtttgtggtactgtgtggagggtccaagattgcacacgaaatgaaaggtgtatggacagaacagaataaaagtgaggatgtggtccaaaaaaaaaaaaaaaaaaaaaaaaaaaaaaaaaaa

SEQ ID NO: 423 - DNA, 545 bp, Canis familiaris
ccgtggtggcggtcggcgtttcatccaccacctattctaacgtttggattttgtataacatcaaaaaacctccccccagattacgcgtcatccgtctctctcgtccgttctatatattttttaaaggatgtaggtcttggtcagttgaaagaagatagttaggtataaagtaggtttttataatcgagaagtcttcagtccgcccgtctatactttttactgtctctacttaatttaatttagtgtttctctccgacacgcatgtcgggacatagttcaagagtctcttttattctcctaattatcttttctcagtgaaagttgtctcgtccctcatcgagggcttctcattctcaaacgttacaattgaatttgaagtgaccttcttcatcacccacaaaaagacttcgatacactatacgtgtctactccaatatctgttgtctatcagtaccgtcttgaggtttcagtctaaagtacgtctaaccatttgtgactcaaataaaattttaaaacaaactcttgtgtgaccaaaaaaaaaaaaa

SEQ ID NO: 424 - DNA, 415 bp, Canis familiaris
  misc_feature (41)..(41): n comprises a, c, g, or t, or includes no nucleotide
  misc_feature (81)..(82): n comprises a, c, g, or t, or includes no nucleotide
  misc_feature (181)..(181): n comprises a, c, g, or t, or includes no nucleotide
tccacatagttgccccgcacatctcgctcctccccgcaganggtgtcccccgcagagcggggtgtccgcggggtgttgggnngtgtggcacaccgagacccggggcgcatctccctctaaggcttctataactctctccatgtaaccctcctagagatacccacggctccgggggtggggncgggccacccgtcccgtctatttatccgtcctcccaccggactccctccccatggtcgtcgtggggtgatgtcggtccgaggaccgtgtgcggttcgtgagtccggtgttcagattttggtggtgtcaaatggtatttaacaagttttccaacgttacggatttttagttattaaaataaaaaggtttttagaggaaaaaaaaaaaaaaaaaaaaaaaaaaaaaaaaaaaaaaa

SEQ ID NO: 425 - DNA, 716 bp, Canis familiaris
agtctccgtgagtgatctcatgatgaccaaaccatggacgttggttgtcaaaaccgatgttggtctttctccataacagactgggagactggacggtaagtatcccagacgtttatcacaaccaaaaacatcaacatccattgttctatctccggtagactccacacaagagttttccgttgtcacccggacgcgtcccgtacctcgaggcttggtcgttctctatgttctaaatactgccggattttgactttggacaggtgttgagatacaggtattactcgatttctaagtccatttatttgttaatatattccaaccttttctttggttacattactaaattatgatagacacttttattttgacttttggttttctcgagtctggtgatccgtctggtgtggaccccagatcttggtgtccccatgatatttaatcaacatatttggatattaaactcacctacctcccctattaagctcaaacccacccacatcatcgatttgttgtccattatctttcaactcttaaacatccgtaactattaaaacgaggaaaattaaatggttacgaatgacaagagttcgttgagtacattttcggaagtcggaatgatcttccagtcacgtaatgtcttggtgtttgtcaaagtattaacctaaataattaagaataaaagttggtgttataaaccgaaaaaaaaaaaaaaaaaa

SEQ ID NO: 426 - DNA, 583 bp, Canis familiaris
ggttgaatcgaccagagggttaggagagaccaacccccaaacgatcagatttcagggtacagtccaatgagcaaccaatgtcgtctatacaatcgacagccacgtagagtgattcggacaacatgtctcaagggtccccccgtagtatggatccggttataattatgaaccttcggcatgacggtcgacacttctgatcggttctacgtcctccctccgggcgatgttccctatcctctcaaacgtgacttgctatagggcctcgttctatgataaaaagtgaacacagaaggacactatcaccgatgttcatcgtcaacccaggagaaactattttatagtgaatttgacgcatcgtattgaacatagttttaagacgtgtgaattcgtttagacaagttgatggacaatctcgaaatctagtcaaaccctactttaactgtaaaatcgggtaagaatgggtttattagtccgtatttttaatttcgtttcgtttcggaataaccggtagttagaacagtaagtttggaacgtagtttcaaataaagatcaaaaaatgagatctgacacataaaaaaaaaaa

SEQ ID NO: 427 - DNA, 610 bp, Canis familiaris
accatgaatccagatctgtcttcggaccaggtagattcgactcaaccacaactatcgggactaggtcggggagacttcgaccggcgtatcgaaggggaccgcgttggctaaccgaggactcgggggttctccaccgcggtccagggaagtgaaatcatcaatcgatccggcctaagaaatccgaacaacgtgatcagtctcgcgattctgaacgatcggttgcacatgatggatgtcgtgagtcctcacaagggggtcgacctggtcctcaatcggattattaagactcctggggcccaacagtgaagggcgattcccgcacgtccaagactcaccgctgaccgtctgcatctctggggggtagcggctctcaatgaccggatttccgtcgtctcgagacctcgggctcaccggcggttggccaagatgaacagtattcgtcactcggtacgacatcacgtgatgaatcgacggacccgtgttggaattggtatcgtatgaacaacaaccatcacgtccaagctctccggaactgtaaggcttcatgaggtccgtctccgttgaataaaggtctgtcgggttccccgacggtgaaaaaaaaaaaaaaaaa

SEQ ID NO: 428 - DNA, 398 bp, Canis familiaris
ggcgcctggggccagagtcattggacgacgttcggagggagggggcgccaccccggccggacggtttgcggtggactcacagggcttcgaggggtgtggaggggacacaggtgttgtcgtggtcggacatccggagggacctgggagcccctcggtccgagctgccctggactgaggtgcttttggttgtggtctccaggtctcgcttttcgggaccttggtttgtgaattgcgacgtctgtgtgtcatctctcggttttcttgaagagaataattaaggggtcgacgtgtcgggacgggttggagagtaggtccagaaagctgttttggttgtttagaataaatctgacagcgtattaaaaacaaaaaaaaaaaaaaaaaaaaaaaaaaaaaaaaaa

SEQ ID NO: 429 - DNA, 653 bp, Canis familiaris
gtggcgcacatccacgtcgtgcgtcggtccaccagatgcaccaccgcgtctctcgggggcggcggggtgtgcggccgcggggcgggtgggtgcatcacggcaccaggcgccggtggcccgaaccggggttgttgtccagggccggctccgccccgaccgctcgtcccgacggaggtagttcctcgtagtgtttcactctagataccttttgtgacgacgtccacgggttggccaccgtgacggttctctcgctccgacctctctctctctcgctctcgcgcgcgctctcatgggcacacaccttcactctcggaccacgggaacgttctccgtcgacacataccaccgcgggtcaggggggagggattttcccgttacacaagggacacaccgccgtcaccccggtgtccccccgaggtcccggtttttgagactagataacgaatgtttctatgaatcatcttagagtaatccaaagtcattcgggttgtcggagtcgttccagaacgagacaccaacgtcaagccttggaaccgaccccgaacgagacaagaatccccggcggacgtccacgactccagttttctaaatagagtaaaagtttccaattaaactcgtggtccaacccaaaaaaaaaaaaaaaaaaaaaaaaa

SEQ ID NO: 430 - DNA, 603 bp, Canis familiaris
tggtccgggggaggacactccaatggcgtcgaaatgtggacgcttattgttcgttgaccagggacaggcctctgttcgtgtacccgacgggacccgacaccccggacctgtcgggcgctttaggagtcttctgaacggagccgggtgtccggactagagccggatggtgactcaccgccggggcggtaccggggggccggaacgtgtcatgggcaacaccggggggagcgcgggtgggacgggtggtgaccggggaggcgtgtcgtttcaccgacccatcccaacgaccgtggggccccacgggactccgagaggcccgtgctacgggatcttgagctggtcatcctacacgtccccctccccgcacccgttcttggggtcgactatgtcttgtctcaactttcttaaatctaaccaaacgttaaattgttctatgtttaaaacacaacatgttatttaagggttttctcttttacatttagttagagagatacggtacacgtgacttttacttttaagattctcaaaatattaaaacaatgttctaagtttattgttttttgtggtcgtcaaaaaaaaattaaaggagtgctatcaaaaaaa

SEQ ID NO: 431 - DNA, 588 bp, Canis familiaris
gcctggtcagggccaacaaggaggtcgagggttcccacgcgtccacggcaagcccggggaggaggccttatgcacctgatgcatcccggccacgacggcggtgagtgaccccacgaaagccgttgccaggggcacgaagagggccaaggaggcgccgaacacggtcgggcaccggcagtctccccggtcgtcaacgtggtcccggtcacctcatgcacggcctgggccgtcgtcctcgtcacacgtaccggtcccagcacatcagccgtcgtcacctgaacggaacctaggtcctcctgataggtgacattgagtccgggcaggtccaccacggaggtcgttgttccggaggggacaaccaccacgacctgggccgcgtccgtgtgcacttgatgcaacccggacacgtcggaggtcggtgactccccggagatccgtgccgggggcacgacgacttgctcatccgtcgacgagaattcaacggtggggtggggtttgcttctcgtctttgtctattttctctttttgataatttgttgatcaattttatttctaataaaccataacttaagtttaaaaaaaaaaaaa

SEQ ID NO: 432 - DNA, 667 bp, Canis familiaris
tcaccaaggtaagaccagtcctacaccgttttttgacgattagtctattctcgtggtcggaacaatctccgaacatgaggattacaaatcccaatagattcaaacggattacagttgtacctcatcgaacgatgtaacacacaccttaatgagagtatacaccgattctcctatgacttttggttcttcgtaattctttaaatgcaatttataggaatcttaaaaattaattccatcttacgttcaactccttaaacattctttccacacttcttataatccttttcgtctaaaaactcttcgccaaatcttcgtcaaaacgatcctcgtcctaagacttgaagaatggctccgtcgtgattgttcggtagttttagtgtgggttgtaaacgaccttacgattcaacctcctatccaaaacggtcgatcgctcttgacttgtttctttgttgtggttgggtttggggttcccgggggggttgggtggttgcgtgcgtgaaggtgttttcttgactatctctaagttcaacgtaatttctagtagtccatatgtcagtccacggagacatagacaatgtctattcttgttagtcaaagagacgatccaattaagattaaagttaaataaaagaaaaaaaaaaaaaaaaaaaaaaaaaaaaaaaaaaaa

SEQ ID NO: 433 - DNA, 287 bp, Canis familiaris
tatatatatatatataatgtgggttggattaattgttattggacttgattttctttaaatcctccatttatcgaaatcataccattattaaaatattgaacgaaaagaggagaaattgtaggagttacaaatacgtactcttgagatttcctcaagcttataggacagatttgtttatcgatctcgattcaaatccaacaatccatacaattttctaaaaatacatcctctctctcatttataataaaaactattagcataaaaaaaaaaaaaaaaaaaaaaaaaaa

SEQ ID NO: 434 - DNA, 704 bp, Canis familiaris
caaccaaggctctcccacaaagcttggaggacacgttgcgttgttgggcccaggttggacttgccacagtgctgaactggggagccgggccgtgctgctcgtggccgttgaggggtaactgtgcctccggcgcggtgtacctgggcacctggggggctcttcacaaaacaaggatttcgaaagatctgggccatgcaaaacatcacgattttcccgctcgccacttttccaatacaccagaaacataacgaaattatgagttttttgacgggggtgagaattttccttccagggaagccccgccccaacagcaggatgattcaatctgtaaaatagatttctagtccgcattttggtggtccaaggaaaccaaatagatttcttgatcatgggaaccgagagactcacacacacacaccgacacagagaccgacacccacaacgaccgtggatcgaggcccacggtcagctcccattgcatgggccatgtggaccatgcgcgggtcccggaaaccgaccgcggaaaggtgtcgcggagggacccatgggtggagtcactttatattgtatactttattgacttcagggtgtcttcatcttgatttaacctcttcggagtttaatctcagtaaacctaagtctaattattaaactatttataaggtttaaaaaaaaaaaaaaaaaaaaaaaaaaaaaaaaaaaaa

SEQ ID NO: 435 - DNA, 641 bp, Canis familiaris
gggcgcgtggaagttgccggtccttgggcttagagcggcccgccaggagggagacgggcggcggcgcccggcggtggcggacagtcaggcggaccggtcgacgcgcctcggaccacagacagggtgcggctccgtcggcggcggcggcggcggcgtcagcggggggaggctcgcggaggaggacagtcgccggtggacgcatgtcacgtgacggaccaactatggcacggccggcgcctggggccagagtcattggacgacgttcggagggagggggcgccaccccggccggacggtgtgcggtggactcacagggcttggaggggggtggtgggacacaggtgttgtcgtggtcggacatccggaggacctgggacccctcggtccgactgccctggactgagtgcttttggttgtctctaggtctcgcttttcccgaccttggcttgtgaatttcgacgtctgtgtgtcatctctcggttttcttgaagagactaattaaggggtcgagtgtcgggacgggttggagagtaggtccagaaagctgttttgtttttttgaataaatctcacaacgtattaaaacaaattgactgttcaaaaaaaaaaaaaaaaaaaaaaaaaaaaaaaaaaaaaaaaaaa

SEQ ID NO: 436 - DNA, 669 bp, Canis familiaris
agggaggtattagaaatctctctacttcttcgaaaatgtcctattaaaatcaccattttgtcatgtctagtttctctttacgtaggttcttgtaatttaaaaaattaaaataaaacttatcttgttattacgttaaacgttcatttcaggtctttaaatcggaaaagtctagttaaatcaattatttacaatcggataaatttccagacttttgatatatctatataatgatcttgatctagatttacatagatataatcgtttgaaatcacttttcgtgttaaatgatttccgttcgtctttagtgggttttctactttttaatgtaaccaattttaactgtaaatttaaaaataatgagatttaaacgtttgtgttctcgaatgtcactatatctcacaaatgagaattccgataatttctgttacttcatattgacccgtttacaaccgattatttgtcccactcctaactcaatttaactcatgtagtcgtgtacaaactatacatccgggaaccaggattttctatgctttggtccttagtactgtcattatagtctctctcgtaatatagtgtattgtttttcttatacattctgttaagactaccttaactataataaaaaaacattaaataaaaaaaaaaaaaaaaaaaaaaaaaaaaaaa

SEQ ID NO: 437 - DNA, 615 bp, Canis familiaris
atcctcgactctcatttaacaggcaccagaagacttcccacggattgcaaacggagagtctgtgaagatcgtcctagatgtgggggttctggttctcccgtcactgatggacgaaccctctttctatatataccgacgatatcagaagggtcaactcgttcagatgagagcacctatgtgtcgagttttgcgtttgtctcacccttctggctgagagcttctggaccgctaaccttgtcgaacaataccctaagggcaagtcttcgaatggactccgggggatttgtaactgatggaatcccataggaacgcccctggtccgtttctgtctccaaagtcattagaggtttggagttcgtcaaaacctgaaccggttgttccgtcatggatgtcgatttctccgtcgtcgtggtctccgtcgtcggaggagtcgtcgaggtcgtcgtcggcgacggggacggaaccttcaacgaaaccaacactgccaccaatgccagcaccatatcccatttcctgtgtttcagtaatgaggaaaaacgaaggaattgacggaactttatttctcaaagaaccaaataaaccgttagttgtgttaaaaaaaaaaaataaaaaaaa

SEQ ID NO: 438 - DNA, 620 bp, Canis familiaris
gtccgggacggctcaccagacagatccagaactggaccacgttgtaacagatccggttgaattggtcgatccacggtcgttgtgggtgtcggtctctgtgtcgaggggggagggggggctgggcggctgtgtgactcaataaataaacagatcaggttgagggagaacagtagaccgggttctcccacctacgtcgatcaaagtcacgtctcccccggtcagggggggaggtctctgacccctccccctcgtcaccccttaccttttaaaacaacccgaagactcgtcaacctccggcaacctcgtggtaatgagtcctgatgggtccccggaactcgattttcagggatgatttgatgttgggaaacctgagacgaataaccacgaaacgatacagttcaagggacctgtaaccgggtcctctggagtcataccccatcttcggtgattcgatgatgtctaccaatgagatctgtttctaattgaagaaacgagagccactccgatctcacatcaatcatcgcccgagaaccgagccccgacttactacggttgtatttacttcccacatcctttgttctagttaaaaaaaaaaaaaaaaacaaaacaacaaaaaaaaa

SEQ ID NO: 439 - DNA, 588 bp, Canis familiaris
tcgtccagaagtctagcggtgccggtcctcgggagcgcgccgtgcgtgcgcgttcgcagtgcctgaggcggtgccggttgtcggcggcggcggtcgggaggctcgtcgtcaacgtcgcgatccgcgacgaggtggaccggcggctccggttgctccacgacccggagctcgcgctcccggggcagctcctgaggcaggggcggttggtgctgagcgcgacgatccaccagttgctgaggtccctccagtgctgggccatggccgcggagctcgtccactagaagcaccacgcgcagcagttgcaggtccaccggtacgcggctgggtggggccccgcggcgggcggcagcggttgggcttcgtgcaggggttttcattgcactagtgcgtgttcttgccccttaacgccgcgagccagggtccacaattgcacgtgcactttcgagacatcgccccgcacccgcctgatcccttactcgcgtctcgcgggtgcgcgcgccacaccacggctgggaatcggactaaaccccggacggcgtgccacgctcaaaaaaaaaaaaaaaaaaaaaaaaaaaaaaaaaaaaaaaa

SEQ ID NO: 440 - DNA, 647 bp, Canis familiaris
atgtactatgtatacgatcactccggtactcactttctcaaccgagattctttttgaaacttaaatttaacattaaaatatatcgtatattatacatatgtacaaaaggtcctttctcctcgagaacttaactcttccatgagtaaataattcttcgaccctaggatttcctctaagattagtgatttgtctatattggttttatccaaacatcttcggatcctaagtaaagttttgaatttacttgtagttttatcatctcaatcaatcgtagattttattaaatattaggaactgactagtatttttatagtttattaacgcagaccccattttactttaataccgtgaacacgtgttaatcaaagaaattagtaagaattgtttagatcaaaatggggagtaatactcggagactaatttgtatacaaatatgtaccctgattcatacatttttttaacagaattgtggattctctgacaatcaggtttgttatgatggttaagagaaagttctgctcgggatgattatttctaaggattcaaggatagtaactatctttctaaggacgattctcatatattgtctagttctattcgtaaaaatcaattattcaggtaataaatatactcttggtcgaaaaaaa

SEQ ID NO: 441 - DNA, 592 bp, Canis familiaris
cttctcccgcgcgctctctctctctatctctctctttcttttggttagtggttaaacagagttaacgtaaaccgaagtggtaggggacaatgggaacagacaaagaacgctttacgtgtggaagcgattttaggaggctgctgcttcgaaaaaggagctccggaccggagtgatctccggacatccagggcgccactgcataacaaatccaagttcaaaagttattttttttttgttgttgtgttgttgaaacgcacgatccaccataataacaatgctctcaggactttcgtgaatgtgtgtcggtctttccagtttctaattattttttacgactaattaaacaaaaaaaaaactggtgtctcaccaatattgtgtattttaaatatttttactatctagtctctatcattgattaggattttcaccccatttatagatatttttacataaacaaattaaatcgtgttatttttggatagacgtaaaaagtagttactgcaagactctcgggtacgttttggtcgaaggacactatttttctagacatctcgtgtgtgttagaaaaaaaaaaaaaaaaaaaaaaaaaaaa

SEQ ID NO: 442 - DNA, 593 bp, Canis familiaris
attctggttccaatttctccaaccaaaacaacagacatcaacgaaataaaactatacatacaatacaaaattacgaaaccagattcatgtaccaaggtttaaaagaagttttcgaaaagagtgtgacctgttcttaggagataattacatttcaataacgactgttcgaatatcttaaacacttaacaaggaccaaatgacatctacaggatatttcggtccatttactttaactcttatgtacgaaaatggttggcgtctgtgatggtctaccatttcactcaggttcaatatttaacttcatagattgttgtcgtgattctcattgggatgtcgacttagaccaatcctatcactttcccgagtttaaaacatcggtcatttatatgtgatggaaatcaatcaatctaccaaaagccaggttaattttacccaaaaattaaacgtcgtatacaaacttcacctttattctttttcttctaaggtttagttagtcggacaacgtctaattcaccaaaggattgtgtcttttatattttaccataatttaactaactaaataaaaatttttatgtagtctaaaaaaaaaaaaa

SEQ ID NO: 443 - DNA, 659 bp, Canis familiaris
cgtgcgtcgtttggttccacactacgagcttcaacatccccaaggtgccataagtgggtctttctataaacgtcggtcatacgttctcctgccctctctctcgtgctgttagtgtcaagtgtttccaatgtggatggtgatggtggggtccagatggggactcgagctgggacacggaactcacttaatgggttgtcttgccaggcgacacatggaccgggtcaaccaaggcccggaccggctacccgacgaactctgtgctccccaccgtctctggaacgaccggcacggggtgcccaaccaaccccccacccgtccacacgacggtcgccacgctccccaccccccgttgcgggcgtctgtccctttaggattacgttccgcgtcgatgtctcccaagtggtcccgaccgctttacggtggtgaacaacgacgggtaaaaaaaaaggtaatgaaaggcatgaaccgtcgtttcaggacaaacggaagaccctgtttccgatcccctcccctccccggtgcttatattttatttgggctcttcaaataacggtgggttaaaggttacgtggactggtcacacggttcacacaagttcaaatgggttgtgtaataaactgtaaatgtctcacaaaaaaaaaaaaaaaaaaaaaaaaaaa

SEQ ID NO: 444 - DNA, 574 bp, Canis familiaris
gtcaagaaagaactggctaaatgtttcgaaactcagtccaaacattcttttcaatgattgaattcatttgacgtcgataggccataggtcatgtgttgcaaagattttgcttgtttgtttaagggatcctaggaactgtcaatctagtgtctgaacgctatgggtttaacgacgtctgttggtagtcttcttaaactaattgtcatcaacgtcacagctacagtcaaatctcaactgtcaccgaggaaaataggaggatcacgatgggtaggagttttacactagctagttttttttaaaaggtaacaggtgtacaaatcaatctatgacacaatctaatcaaaatgtgttagtttaaaaaactggttgatttccccacccagatcccaatcgtcgatttcttccggtgtttgtttgtcaaaccaggtttggtgtcgttagggttgaagatcgttgaattttatgaagcgtatcttttctatttttgaacgagactatgaagtgtcgaataaacacatctactttttttaaaaaaaaaaaaaaaaaaaaaaaaaaaaaaaaaaaaaaaaaaaaa

SEQ ID NO: 445 - DNA, 683 bp, Canis familiaris
cgcgtttgctggtggggcagcacccgacaatccaccgactccaccggatcgtcgtgggacacagcgtcaccacctccagagattgggtcgacatcaccaccatacagaaggtgtaggtcggaaacttttggatgtggacgacgtataatgtccaacatctggttggggacgtcccgctcacacaactgttgaggaaggaccggcaggtctgcacactgagacccgagaacaaggtccgactttgggacatactggagaacagggtcgtgcatctcaggcacttcccgagacaacggcgtcggcggagcccaactaaatttctttttttttggccaaacatgccgggagtcctgagtcttgctttgaagacagggtttgtcttttcgatagaggagaaacatagccacaagatggtgttgtccccgaacctgaggaaggggaatgaacggtaccggtggggggcgacacctccccggggtttgacacctgtctcgctcgacggtccggtgtgtcgaggcaccacggagctcggaccgtgtcgggtcgtgatggtttacaacctcggactcagtaggtcctccgttggacccacggtatcccgtttttcatgtcaccgggtcacctgtggacagacgaataaagtatgtttgttccagtccaaaaaaaaaaaaaaaaaaaaaaaa

SEQ ID NO: 446 - DNA, 685 bp, Canis familiaris
gatgatcgacgaccaaccatcactagcctcgaataacatattttccacacacagaggagactgcgataagttttctaagactcttataagtcttgtatttctattattaattcttcgtcttaatttgttattatcggtaattctataagttaaagtttatgagacctatctatctctaccaagaaaagactatatatacccttgactagtctgtctcctttgaccgatggggccacctgttcctatgtgtgatccataaccctcaacttaaagatttcagaaccactactataattatttcatgttattcttggtttcttcatccatctccatctttacgatgttataactggactcataacttaagaactgttactcccctccataaaataatccactaaacacttgaccaaaatgtaccaacgacttaacgtttttcacgttcatattattaacctattcgtaggttggttaacaaatcacccgtaacccgacggggcctccgcgacgcctttccgcggcggtcgacggtccccgctcatggtccacagggaccatgcacttggtgctgtcccgtgggtcgatccacggtcgttgtgggtgtcggtctctgtgtcggtgtgtgtgtctgtgtgtgtgtgtcttcgtgatcaataaataaataaaatgtttaaaaaacaaaaaa

SEQ ID NO: 447 - DNA, 655 bp, Canis familiaris
cccgttgtcacgcaccgaccccgtcggtggctccgccaccagggcacccggtcgcaccaaaccgaaggggttgagtctcaaaacgtcgggtgcacgaatcgggtttggttggctcagcccaccacgacctcaccaggcgcccgggtcgtgccgggggtgcccaccacgtctcaggcttggcctcgtctgctgtcgggaggtcgggcggggcggtcccacaggcgacgacacggttcgggggaggttcccgatgagccaaggagggcgtaccattcgggcgattgggctccaaattcaatgttcgtctgcggaaacaaaactgtccgtgccaccttgtttccacgggaccatcggccgatcgcggaatcagtgtgagatttctgtgttggaaacgaaacggatatggcacccgtcggagctcctcgggtctccctcttctgtacctgatctcattggcttttcgttggtgctgggtggtcaccgggggctgagcgtctgttggtgagggtgtccggggttgaaaagtcttctgatttctagtcaactgaaatctctgggcttgtggggacaggagttgcgtatcctatattcgaataaaaattagttgttatatttcgaaaaaaaaaaaaaaaaaaaaaaaaaaaaaaaaaaaaaa

SEQ ID NO: 448 - DNA, 528 bp, Canis familiaris
tcgtctttttcagtggaccgaaggctctctccacttgactgtgttcgaagtcgtcgtctttcttgtattttggaggagtgcttccgatgatggttgaccgtccttcggaacatccgtcgtcgattggtcggatgagaaggacagggacaggtcccataaagtacaggacgctcttgtccctcaaattggggacgacggtgttttgcccgatgattccggacgctgatggagtcgtgaaggaatgggtacgggacacaacaccagtcgttcccaccgttccaggagtgaccaggtctggtgtccccttacccaacacgggacaccaaccgtcgacaacccaggagacaactgtccatgtgtcctatttattacgactcagtgtgtccctacttccaacatcagtcaatcttagtgttttttttttcacgtgatagtctttaaattttggatattaaagggttcagttttaataaatcggaaaaaaaaaaaaaaaaaaaaaaaaaaaaaaaaaaaaaaaaaaaaaaaaaa

SEQ ID NO: 449 - DNA, 591 bp, Canis familiaris
  misc_feature (373)..(373): n comprises a, c, g, or t, or includes no nucleotide
ttttgagcgacatggtggcactgaaccaggcacagcatttggggatgctcttccttcccaagaaccgtcatgtccacagagacgcggacctgggggcatgtcaacggtgtcggtttccgcggtgggaggagctccggtagttgcaccggtgacggaaagtcgcggtgaatctccagcaccggtttcacgacgtcctcgcccgtctggccaactaggaccacgaccacgtgggcgggacgggagggactcgggggaccaacaaacagccaccgtctgggtcgctggtggtgtacgggccctcgaaaaccacgacggacgatcacgtgtgcccaggacgtcggttgagtcacgtgtttggggttgtccctttggnaccatagagtagagagggatgggaaattggtccggttgtggaccagatgcggagtctctcggttgtcggcaacggttggttggggagggaacggggtccctcaccccgtgggcccgttgtccctgagtcgtctatataagtggggtgtgtagggggacccaaataaagctgagtcggaatctgaaaaaaaaaaaaaaaaaaaaaaaaaaaaaaaaaaa

SEQ ID NO: 450 - DNA, 627 bp, Canis familiaris
  misc_feature (158)..(158): n comprises a, c, g, or t, or includes no nucleotide
gaagtgggaaatgctgatgacccggaacttgctccccaggcgacaactgaaggacaggcagttaaaggccgcttatcacatgaacatcaggaacatcttgaaccctttgacgcggtttccccaatcggtgccagatggcgttgctgcagagggggcgngtccacacgctgtcgccatagttcgagacctgggacaaggcgacgcaccactttgtcctgcggccaaaggtcgcccagccagagttcgacatgaagaggtcgactttgctccggggctccacgacggtcactaggcgtgacgcggccccgttgaggaacaggtatcgtcgtccgtctcacccctcgagactctttaggtcttgatggatggggtcgaaagtcgacactcagagtgagtcgttctccagccaggacttggtgagaccgtgtcagaaccctttggacacggcggaggtccggtcggtcggaacacacggacccatatcgaggtccgactgggtcgccggggccatccggtaaatggtagtggggctccaacggaaacggtcgagactcttgaggggagttgggagtggtctgtttgtttatggaaaagaatcaaataaacaagtaggatggacgaaaaaaa

SEQ ID NO: 451 - DNA, 603 bp, Canis familiaris
tgatcctcagattaccatggtctgaagaccacccaacacttacgcgactgaaccgtcatttcccgaaaatgcttttcagtaatggtctctcgaggacaactaccacaaaaattcggggtacggcaacacttcacaaagattccgctttaattccttcccctgaaataacaacaccactcagagatgaacggaagactacatcatcagtcaacaattggaccccaatgagagatttccatccacttccaatttcgtgattagaaggtacccctatattttgaaacgaatagtcccaaattaatttgagacgtgattaggttactcctacgtctaaccttattgtgattttttcctcatcaaaatttaaggtgtactcgtaaaataccctgtagaataaatctaaaaattccgataatcttacattgaatgtagattttacgacaaattaatgattgggaaataatctgtaatttatagatgactagacctttcaaatcaaagtatttcgtacaaggacggtcttgtctacgagagctatgaaaggtatttgaaataaacattttgttgttagtttcaaaaaaaaaaaaaaaaaaaaaaaaaaaa

SEQ ID NO: 452 - DNA, 574 bp, Canis familiaris
cctcactgcactccaaggacttaggctctctcacaatgctcttgttgtttgtaactctcccctgtttttatgtcaattactacttcctatcaactgataccactatacatagagcttgaggatacatgttatctcttaccaacaagttaaatcttgtctaactgacttatggacatttttatctttcaattatcgattttggacaacaccccttatgtgaacaataatgatatatatcgatagctaaaaatcccggagactcagttattactacttcttacgtcgggtcgtagttactttcttacacgatttcacgagagattttaattttaggtaattaaaaatctcgactattttgactctgatatttaagtatttacactatcatttggaggtgcatcttttaatatggtacagatgtcgtctaataatattttacaaaatctttccaatttaacccataagttctcttagtaatttctataagggctatgtctcgaatcccaatataaatatgagcaacttctttcaaaaaaaaaaaaaaaaaaaaaaaaaaaaaaaaaaaaaaaaaaca

SEQ ID NO: 453 - DNA, 620 bp, Canis familiaris
ggaccttgaaaccgtagatttttactctaaaaaaaaaaaaaaattccctattgttgagtatgggaaaacataagggacaacaaatatctatgatctctcatgtatgtgaaaatctcttttgaacacgatgtcaaattttctttctagctctatgttcatgatttataaacgtagtatcatggataattgaacaaaatttctgttcggatttttaaaagtgaaaattaacagctggctaatttgaaacttacagattaaaatctatctcaaacaagacagtatttgtcatagtgttagatagtacacaacttcttttagttcgtgtgtttctttttgatttaagttagacctcaaccagtttccttcaagttgataatataacaagtcttaaactcaaaatctgaactaaaaccaaacgggtagatggaaaaacaaacagtcaagaattatcgggtgaagggttaaaaccttttaaaaggtcgggacaaatggaggtgactatgtcaactttgggtgtctgtggtggtgtaattagcgttctgattccttatcgaggacgattgcacataataaaatttgttcttgtctctaaaaaaaaaaaaaaaaaaaaaaaaaaaaaa

SEQ ID NO: 454 - DNA, 644 bp, Canis familiaris
tttggaaacgtacattcataagcacccaaaagagcttgggcttgtacttttcacaagttggtgttccgtgggaccaccacccattggttcatcttcagagagatcacggaggttcctcctctccaaaaaagtaaaattgatttttttatctggtgttgtgggtgtgctcggttgaagatacagttcagtggttaaagggacacaggtcttccaaggtcatgggatcaaatccttgggactatctgaccgaatgtccagtttagcctctgaggagtcacatccgctgggtgaaaacacttggtttttttacgttctccatgttgacattcataattgtcggattttgatttgatttggtcaaactgaccctgccgttctcaaaacttcttaaagaagatcgtaaatctcaagtctgaagggtgagtgtaaagtttgggtcttgacacgatgagatcaacagttgattcccttttatactccgtttgtcattttcctactggattcaacaacccactttcaaacttcttctatagtcttaagcatgctggcgggatctggtcggtcaaataggatcattctttatcaaaactatgtttaataaacgtccatagactttccgttccaaaaaaaaaaaaaaaaaaaaa

SEQ ID NO: 455 - DNA, 660 bp, Canis familiaris
  misc_feature (7)..(7): n comprises a, c, g, or t, or includes no nucleotide
ctattgntcagtgcccatcgagatgcacgaccagttgaccaaccccaggaactggtacgtctcaatcatctccatttggaacatattcacgagacgaccgtcttcacatggtcaacagacgggcgcaaatgacgatcgcgctggcgttgtttgggtagaattatgatgcggaaaaccacaccagtctagagtacacacttcgccgggctacgggtggagatcaaatgttgtgccagaacgtccttaccggtgacccaacggtgttcccaaagtagtgtgaggggagggtccgacactacactcacctacccagagactaaccgggtcgaggcactgacggacggaagtcgattagtgaaagtctcgtcgagtttttctttggtgcttttctacctcacatgattgggtcaaagaccaaaccgacgtcagatttattcaataggatctcgtacagaattagagatctcttctatgattttgattacactgtacaaatggagacacaaaaacaatgttcccccggttggatgtggtgggattgttctagtaggactgtgatagattggacacagtgtgtccaaggattgtggggagggggagggtgtggggagaaaactaaaaccgaatcgtcaccaaaaaaaaaaaaaaaaaaaaaaaaaa

SEQ ID NO: 456 - DNA, 578 bp, Canis familiaris
agatccctgagcggactcccaaactaaacaaacgggtcaccgtcatcccctgaaatcaacctcaattgaaccgtcaaccaaagacggaattgagatagagactggtccaccatccttcgagtaaagagagtccccaatccccggaaagacttgttgcaataggcaagagcgaaccgtctcacagtaggtattatacatattcgagggtatcatcttcctcctggtcatgaacaatttcctctccagcttccgggtctttcgtttttataaagggaagtgtatgtcaaaggggacgaaaaaatttgagagtggatatctcttggtgtgcttgtaaggttctcgaaggactagaactcaggaagtgaattggacttatttatttgggaaacttttcccaaaaactataatttccggaaaaaaaaacataggtttttttttttttttcgtcttagaggaaatagacttgaaatcgtttttcttgtatttttttaggaatttgaatttgaaaatctgtgaatcctcgtataataaataaagttgaagagtgttagaataaaaaaaaaaaaaaaaaaaaaaaa

SEQ ID NO: 457 - DNA, 604 bp, Canis familiaris
gtagataggatgtagggagagttgagtggcttggtgtgagagtgcatcaaacatgaactatcttctgaggttcatcctttgaaacatggttgctatagggtttatgttcttggttccagttcttgtcggtccgtcccactcctccgtttacgaaattacttcctccttcactaactcattccaagtggtgaaagaacgacggtgagaatgtcttacggtcccacctgtctcatctcagtccacattgtttatcgtcaaaagacggactgggacacatcagttctgtccatttaacaagtcaaatactattgagtagtcgttattcgagacgacttctgagtcaatgcgtggagtgttaaaccatcgttgtccaaaagactagaagtacctactacgtaaatagaaaatgtatcccatttcctgtctctgtttttgtactagacattttaacttagtagcaatttgactactcttgttgaacacgaaaataatcttaacaaatatttcaaatgtttcccaaatgatcaaatttctattatgtttctattttttataaaaattgaaaataaatttgaaaatacgttttaaaaaaaaaaaaaaaaaa

SEQ ID NO: 458 - DNA, 529 bp, Canis familiaris
agtacccctccggacgtgccctcacaaccgctccggtgtgtcacctttggtcccattcgtggtgacggtgtcacgaagtaactgatatccctagttttgttgggggaggtgatcctccagacggattctcacagtcatctaacagtctgagttccttaatttaacgagatgtcttgtcctcgaatttcgttcttttgttgatcggtttagttagtctgtttaggggatcataggcattccgaggacacatctgaaaataaatgttttttctgttcttgtttaaaacaaatagaacaaagtcaggattcataaactgactccggatgaagcaaaatctggttggtttatttttcgacccttttcgtgaggtgtaggctaatcataatgtcatcttaaacagggaataaggaatacaaacgatatttgttccggttcctgtatcccatctgacgaaccggtgtatgagactggcgagatataaatcctcctcaaataaaccaataatgtagaataaaaaaaaaaaaaaaaa

SEQ ID NO: 459 - DNA, 481 bp, Canis familiaris
gccgctccagggtgaggagttgggtctccgtcaatcgcccgggcaagtctgaatgtttctcccgaagtcccacaaccgaaccgtcgtctggtcaacgccattttccaccagaaccaccacaagggggtggggcggcgggtcctggacggggagagacccaaagtttcgtccttggtccagcaccgacgtcgggcagtggtcagtctcgggtttcacaacgattggagcttctacgtccggggaacccagaggcgacgccccaggagaaaaacgggttctcccgacccaggttggtcccgcccatgggagtcggatgaggagtggaccgttgattttgaccaacgtagctcctcgtcgtccaacctgagaccatggacggctgacgggtcgggtcccctcgtgacgggaggacggctccgtgcccctcaggacatattaaatccacgatttcgttcaaaaaaaaaaaaaaaaaaaaaaaaaa

SEQ ID NO: 460 - DNA, 635 bp, Canis familiaris
ctgtttgacgcacgaaccgattaagcactttgtgacccacgtgtgttttcccgcgccatgtagacgtggtctgccacctccccgtttggggaggatgacgaggacacacggttcccatccgaaccatccgcacgttgggctccaacagcagattcaggtgactcagctccacgtccagcatttccaaacacatcacgtctcacaccgttccgagacagttgacttttgttttgttcccacgacatttgtggacgactcaaccaagattgttgagagtgacatcactgtaggactccggtttttaaggaacaactacgagttcattcctgatctcaaaagagtcgaagactcaagtttcgatgtgaacaaaagaatcaaaaattgtatcaattcttctacggacgcaattcccttctgttatgaactaatattttcaccaaaagtcatcccgtcttcagatagttttgggtgggtgtcagtcgtcgttcaatcttgttccaccgtctttgttatattaacttttttaatctcattgtttgctttcaatattaatccgttttttggattaaaaaataaaataatattttccagaatcgggaaaaaaaaaaaaaaaaaaaaaaaaaaaaaaaaaaaaa

SEQ ID NO: 461 - DNA, 575 bp, Canis familiaris
cccggggaacgatttcccaccgtgttagttaggtgggggatgactcggactcggtcctccgtcaccgttgacagacgggtgtcggggagacctgtccggtgtcccccaggtcccccaccactgacaccccctgtcaccgacgggatccacgcacaggtatatctcccagatcggtgaagacatccgtttggggaagagggacgtggggcgggggaggggccgacgtctcgggtctggtctcagtctctatactcggaggagacgttatcctatgtgagtcaccaaaaacacaagtcgagaataaaaggaacggtgtccacaatcggttggtcggtttgtgtcgtttcgtgctggctgtctgtggaccggtcggtgggttgggttacgtctcgatgtaccacatgaaaagtcggaggttcaagtgggggtgtggtgtcggtttatgacgggttgggtcggggtcgtcggtggaccctgacgatccaccggattcgatcgtccagttttgaccagtagtgaaagatccgagatttccggaaataaatcaatcttggatgaaaaaaaaaaaaaaaaaa

SEQ ID NO: 462 - DNA, 496 bp, Canis familiaris
ttattaaccacctaacacaccaaagataaaaatattaacaccaatcgatgtcggttgaattgacctgatcatgtgaacctggacccatcaacggggatttgcccgtgggtcgttgtgggtgtggtcgtcgtgggggtcgttctcgtgtgtgtgtgtgtgtgtttgtgtatgaaataaataaaatgttttttaaaaattaacagtttcactattcatataagtagtcaaaaattttctagttttttttaaaggtgtgtattacaaattttatttgaaccgggcattgttaatattaaccacaatcgacgatggaaagtcgtaattggtgtccaataacaaatttcaagaagtgtcgatcctatgtgacagtgaaacacctcaagtttcgaaagaagattctaagttttaattttcctattatttgacagttagacaaaaattaattaaaaatttctcacaaacggttaaaaaaaaaaaaaaaaaaaaaaaaaaaaaa

SEQ ID NO: 463 - DNA, 703 bp, Canis familiaris
gggcacatccagcggaggtcggcggggcgttgacaggacggtcggaggaccactgtcgcttggaacacatctcggaccccgtcgtccaccactgacagccccaccaacacgaccgcaccgggccagagactcggccaccgtccaccaaacgacagtcaaccacgacacagatgcgggagaggtctcgcggtccggcggatccacaacaacagacacgacgacaccgccgcccacaaccggcgggacaacatcgccctagacgaccgggaccacgcccgtcgggccgtggccgaggaccacgtgttggccgtagcgcccatgaaccgggacctccgagccgccgtccgccacgtccgagccgccgcccacgacgccgcactcgccgccgtccgccaccgacagacaggggcgaccgtccccgccgtgaactatgaccggggtcagatccagctcgacgtgacgtgccacgtccgtcagtgcgtgaccagtgtcaacgggcaaccgaagattgtggctcaggctttgaacacgttggacaacaccaagatcattcacggtgcccacacacggaacttgaacgcgaactagaaactcaacgtcctccaaaacgcccgcttggcgcacatggacttatacggatgagtcaatcgtccacgtgggagggtagaataaaagaggagtcatgcagaaaaaaaaaaaaaaa

SEQ ID NO: 464 - DNA, 627 bp, Canis familiaris
ccgtgacgctcaccgctcactctggtctggtgtggtaagcggtgcggcggtctgggggggggggggcggggcgagacggtttggtccgtccgggacccggcgtgacctggggaggaaactcggggtgcggagtcaccgaactgaagggtcggtccggtgtacaactctcaggccaacgacggtcgggaaacgaaaagtgtggtttttgtaatcttttgtagctagggtacaactggctctccgttttcgcttggatttgagagctggcacttccggttcgtctagagataaatcttatagtggccaaacgggttcggctctttgtgggtgactgagatcggggcccatagagcccgggacctccggaatacgaaggggaggggagaacgtccaaggttgtattatgtctcacaggttagagacctgagttgaggtgtgtcacggaaccgttgttaacaacacccggggtgggtagttgaacccggtttcccaagagagagccacacaaggtcacaaatcgggagagccacgttcctaaagccttcgtctgcgtcagatctattgttttgtaatttatttgattgatttaatgagaataaagggatctgtgaatcgtaaaaaaaaaaa

SEQ ID NO: 465 - DNA, 403 bp, Canis familiaris
ccgtggtgtcggtcggggagggggaggggaggggtcgggtgacggggcccctcagtactggtcggacctaggacgtatcgttcgtttttgtctatgttatttacagaacacatcccaatcacctcccacaccccccaacacaccttgtttgaccgtcggtgaggtccaacgtccaacggtcccgtgtcgtgactgagtccacctgaacctgaactccctctaccctacaatccacacccaccctactacagaccctcccacggccgtctccaacaccaacctcacaacacctacaccctctctctggctccttttccgaaagagtaaactggtccggtggggatttgggatgtcgattgggtttgtggggggacatgaatagagtacttatttgtaaaaaaaa

SEQ ID NO: 466 - DNA, 644 bp, Canis familiaris
ttgactttcgtcgtatgtgttttcgtcattcgattgtccgggagtgaagggtgtgtttccaggagaacttcaaaaatcacaggatgtcctaggtgaactatgattccggttcaccaccaacaggtcgtgtggacgcgtgactgattcacctgagcaacacaattggtgtacatcgaaaatgaagtggaaagggacaggcggttgtttcagttcggtattttccggatgacgtcggttaaagattgagaggatatttcaatatgttattgtagaatcgactattttttggtcttcggtttttttagattttcatcaattatctcggtagttaaagtctcgtcagtggataaaatctttatcgagtgttgtcacatacaccctcgtattgttgtcacaaatagattcgtgtgtggttccaaggtctcaatttcaacatcagtggtcggtcctgagaagatcacaatgacgaaactctttaaaaagtctgagaacagaaccgactgactaccacacgatcttgacacccaatatgtctgggaagacaattagaggaaactatattttgaccatcagtttgttatttgtcggatgtagtccaataaattatttttgacgtttgtctccaaaaaaaaaaaaaaaaaaaa

SEQ ID NO: 467 - DNA, 615 bp, Canis familiaris
cgtcttccggatggcctgatgggtggcgtctgagtggccccagtcaggacgtcccgatcttgagagagaaccactttcacgacgtccggggtctcgtccatccgttgacggtgatcaggtatcagtaggggagacgagacgacggtccggggaatcgaggattctggtcccttgcacggtctctggacctggtccaggggaactggaactccgccacgaacatggtggtccccgtgaaggtgtatccgatccagtatcgacggtggacccatcgagcgcacgggctgattccccggacctagatggacatcgtcaaccaggagaccggggccatgatttcccagacggaccgacgacacgagttgttgcactagaacaaaacggctcctcccaccgagatgctgttgtagggaagtgtcaactgtctcgacctagccgtccacgtccgggcccacgtcccgctgccactctggatctcccacgtcccggacccggtgcagtagttgtatcaggtcgtgtaccggtgcgtggaacgacatacctcgtttggtaatgcttccactgagttcagatcgaaaatagacagtgttgtcttttggaaaaaaaaaaaaaaaa

SEQ ID NO: 468 - DNA, 699 bp, Canis familiaris
ctgaaaactcaataggcctctttgtataggtcccatataatcttctttatttagtccatctctaagattttcccaaccgaaagatttttctttcttaaaaaaattagtttctaatttcttcttggtaacatttttataggataaggaaagttcttgttttgtgatcaatttcgactttgtaaataacagaacgaactataaaagtcccccacaagacagtttattaattaaattatctgttcatttttgtaaagcacaccagtatttctaagagtaaatatcccacgtatttgttaagaaagttctttccaaacattgatcttatcttctctattacattcgtggatgttctctatcaacgacatttcctgtttctgttaacttggtgtagtttatacttctccatctagtttcttaaaaaaaaggaagaagagagagagacaaaggtagatttgatctgtttaaaaaatctttaaatcttatgttgccaagagttcgaaatcattaaaaagaaaataatctcaaaatagtagccggtaagtcaattgttaatctgaggactcttttagtttcctaatctcggtttcatttaatttcccagagttttaaaaccatagtttatttctctttctaataatgttccatcacgttccaaataaaatttgtcgttcattggaaaaaaaaaaaaaaaaaaaaaaa

SEQ ID NO: 469 - DNA, 709 bp, Canis familiaris
tgggtagtattgtacctacgtagtaaccacaacgaggactccactcatatccagacataagccatggggatttttccatatttcaattattcaaactatgaatacaagattccttcgacgtccacaacaaccttcaaaaaaacgacaccgtccatatttaacttcccatgatattactaaataaaacctcttttcttaactcaaagagtccaaacaagtgtgacgactttcactaaaaaaattccccccaaagaagattttaccttttcatacagacaccctttctcaacagtatacaaccaggacacaacgatcctatgggaacacgtacccaactaccctttgaacaacaatcgtcacgttcgaatagctcgacgtgaaggaactcctttctctggaatgtatattgaccgttgtttccctgtaggttttggcgttcaccgtcacttgtttacttagactactcgtaatccgttttatattctgtgtcatgaaatattgtgttagggtgaatcgctaatgtcacgtgtcgtcaaagggagaacactagttatcctggaggagacgtgaccggtctgtagaggttggatggggagtaacccgtctcgtctttgaacgggacaagataggagaggaatgcgatagtcgtactcgatttttggtatagagaattaggaattctcttttgtactatagttaaaaaaaaaaa

SEQ ID NO: 470 - DNA, 549 bp, Canis familiaris
cgagattcagacggtataacgtcagggggactccgtatcaatccctgcggacaagagacataacccgaagaatgggaacccgtatgtagggtgagattagcacaccctggacatcgtcgtctgacatgcgttggttccgttttttatcctgggtcggggactggtgatccaagtagaattttatccctctggccgatcatgggaagatcaactatcacgtcgacgtccgaaatggtaaacacttgtaggagcacctcgagacaggttgggagttggtgaagttgcgtgtgttcgaacaccctcacctgtagtgtcgccaggcacaacaggtgtatcggtacttctttggtgaggtgggggttgttgagagtggggaacagtccacggttttagaaaaggggaaaaacaacgtcctcagattgacgacgttccttggttttgtgggtctttctcgttgttctaattcatgtgtgctccgatctactggtcacgaaaatctaataataaattttctataaataccaaaaaaaaaaaaaaaaaaaaaaaaaa

SEQ ID NO: 471 - DNA, 584 bp, Canis familiaris
ttttgatattcaaaaccattaacactctctctctggttttcttttataattctaattcccctaatggaagtttaatgtatgatattcattttcaaagtattgtgtaataggagaaaccggtcttaaaagtctcgtctcatccagtgaaaggcattctagtagatagtcatttaaggtattttaatcgaagatggtttgacttcttataaacaactttaccatctcttgttcctctcttccaaaaatcaacttcaatattcttacactactagtttatcaccctatttttactttaaaccggacatttagaagttccactattttcatttcatactattgactgtcaatttttaaaaattgtttcaccaaaactttgattgaaaaaaacggattgaatatcgtttttccaattgatccatttttgatttttctgttggaatgatttcagatcttatttctaattaattcctaacttctcgcgatcaagtaggactcggataaatttttaccaaaatcacaaattcttatatcttaacataacaaaagagtgatcttccaacgttcaattagttaaaaaaaaaaaa

SEQ ID NO: 472 - DNA, 676 bp, Canis familiaris
atatttcgaatggcaacggttttgtccaaaacaacaaaacttgaaggaggtgacgacagtattgagtcccgtcaagttcatcaaaaaattactcgggtgaaagaacgggtcgtgacaaaatgaacacaacgacaatgcgtccgtagtgaggaggttggctcaaaaagtggtgtgattgttctgattttagttttttatatatagatctaagttaaagtcgaattaagaaactccatatctatttatgaatctacagttgggtgtcaactgaacctttgttttgatctcactttacggtcgaagaacttatgttgaaatattggactcaattttcaaatccttaacctattacaaagacgattctgacaatctattgggttgtcttttaaaccacctatttccaaattcaaaaagttaatttcaaacgagatgtctctctctctctctctctctctctctctctctctaggagacaacatttattttcaatactcatattcaaaaccagtttatatttctaagatgactcttaaggaatttattactttaaattactagtttctatttaataccgattgaagaaaaatctatgaagtcaaatcaattttaaatcaatcgatagttttttttgaaatctgaattttaatctaaataaatactacatgggaaaaaaaaa

SEQ ID NO: 473 - DNA, 595 bp, Canis familiaris
ctctctctctcacaatccacttcacatctgacacaaaataagttttttggacatttcccatatacctgtgaggtgttgaccttgtgatcataggaggtttagtctcgttatttttttaacaaaaaaaaactctttatgaaggattgcaggtataacaacggttaatttcgagactcgctcagttagccaaagtcgatcaaacggcatcccggacgctttgcgggtacgcttcgagttcccattggtcgtgtccccctcgtcccttccggtgtgactcgtcgaccagaccacccgccccggagtctggttgggtccgtcttccgaggtttgttcaactctttaatcaatcagttttgtgcaattatacaattctatatacagtgactcctattgatctagtcaaaacgaaagtagggtagacaattggttcctttctagtgcctttccgtccgtaattttcatttgaagatcactctattttttaaaattcatttgttgtgtgatttttttgaatgcaatttagtctaatataaactattgaataatttgaataaaacataaattattaaaaaaaaaaaaaaaaaaaaaaaaaaac

SEQ ID NO: 474 - DNA, 545 bp, Canis familiaris
cccctgaatcccctcacgcccttgaggatccatggagccgtgttgtcaaaccctccatcggtcctctcccaatcgttcggtcataggagatgttggaaggtgggggacgggatcaccgacggtctccattgcagtccggttcggatgtcggggcccgaccaccggaccgttcggtttcttggacggtgaactccggaccagacaccgacgattccgtcggggagtttcttcgccagaccggtgtcaggtcttgagatggagtgtgtggccccaacgtcaccccaagcgctctacaatggttcttggatttgatgattagtccactgttccccgacgtcgtaaaaggagtgccttttactattggctcgacccactctccgactttgggatcctcccgtccggtcccaggttctcgtctcgtggcttgtctttctgagggaattagtctacatattttgtaggttggtcgataagggaccttggaccatagctcatgtcttgtgccttgggttaataaagtaactgactggtggaaaaaaaaaaaa

SEQ ID NO: 475 - DNA, 555 bp, Canis familiaris
aatcgtatggtcgcgagatgcgtgcgaacgagaaaatctctcctcacagtcaacaacaaacaattgcactccagatgatccacaagggaataatccatttggcgatagacgctcccagaagtctcgtagactggtcacggttcaaaaagtcaacggtgcctagttccaagacgtaggtccagaagtcaaagacttgtggttcttggtccccaaattgtggtcctttcgaccacaaaacgtgaggtttctccatttggtgagttatcatctgttccatgacaaggctatctttcacgggaactcggtccatcaatttggaaatgtcaaccgtttgatctcggcttttcaccgtttccacaacatacgtaagtagatcgactgtcaggcgttggtcaacatcgggatgaagaagaacatccgggtctccccgaataacacaatatcgtcacgaccacctccagttcatgtcgttcttttattggatggtctcggtacccacggtctagtgtgtgttgtgtcgtgttttgaataaatacgctttaccgtaaaaaaaaa

SEQ ID NO: 476 - DNA, 577 bp, Canis familiaris
acatcgtaggtagctgttgaaagtacactcgtaaggttcactttcatgtaaacacgtcaatgacctttctttaacatgtttatcacaagtcgtccaattggctaagactttgagattcgagacaaaattttaaatattagtctgggagtctcgttgactttaagggaagagtgacccatttcatcatagattcgttgaagtgtatcataaactagtacaataaggaccccttaaaataataagccccgtttactgaccgttcactgtccaaaaaaaagaaaacaatcacttaaatttttgctgtctttttcggttaccgtataccaaaaatactagtacctatggttctgtctattacgtctgagtatcaatcaacatccacgtagggtaacgtagggtgaacagttactcctaaattcattcactgtctttatcagattaaaaaaggggttcccaacttacaacgattaataaacataacgacttcacgtttaatggattttcaattgtacatgtgtgtgtgtgtgtgtgtgtgtgtctctttatatagacagaataagttatttaccagaaaaaa

SEQ ID NO: 477 - DNA, 1121 bp, Canis familiaris
atgtctgggaagatgactctgtgcatcccccgaggcttctggacagcagctgtgatgatgatcctggtggtgctgagcatcccagtggctgagggcagagactctccacaggatttcgtgtwccagtwtaagkbcgagtgctatttcaccaacgggacggagcgggtgcggcttctgactaaatacatctataaccgggaggagywcgtgcgcttygacagcgacgtgggggagtwccgggcggtcacggagctcgggcggccckvsgctgagtactggaacssrcagaaggacgagatggaccgggtacgggccgagctggacacggtgtgcagacacaactacgggdkggaagagctcwmcacgttgcarcggcgagtggaaccgacagtgaccatctyyccgtccargacagaggttctgaaccaccacaatctgctggtctgctcagtgacagatttctatccaggccagatcaaagtccggtggtttcggaatgaccaggagcagacagctgkkgtcgtgtccactccacttattaggaatggggactggaccttccagatccttgtgatgctggagatgactccccagcgaggagatgtctacacttgccatgtggagcacgccagcctccagagccccatcacagtgcagtggyggscacagtctgaatctgcccagagcaagatgctgagtggcattggtggcttcgtgctggggctgatcttccttgggcttggccttatcatccgtcacaggagccagaaaggatctcgggggtctccaccggcagggctcctgcactgatgcctgaggataccggggattccatcctttgtagtgtccgtctgtccctgcccagaattcccagctgcctgacagactgtcccccacatagatcagagtcctacatgactctgaggactcttgaggatctgggtgttgattctgcttcctgcattgacctgtgtgctccctgctacaggatctactcaggccccaagggattttcctgtttccattcttccttcacagattgtgcaagagaagcacattgaagccatttacctgaagatagagattttatcataattaaatgtgattatgagttctctgta

SEQ ID NO: 478 - DNA, 19132 bp, Canis familiaris
atgtatgttatcattattcctacatggaatttaaccatgactaatgacatgaaaaatcatcgttgtatttcaactataagaacattaatgaccaacattcgaaaaacccacccactagccaaaattgttaataactcattcattgacctcccagcgccgtctaacatctctgcttgatggaacttcggatccttactaggagtatgcttgattctacagattctaacaggtttattcttagctatgcactatacatcggacacagccacagctttttcatcagtcacccacatctgccgagacgttaactacggctgaattatccgctatatgcacgcaaatggcgcttccatattctttatctgcctattcctacatgtaggacgaggcctatattacggatcctatgtattcatagaaacatgaaacattggaattgtactattattcgcaaccatagccacagcattcatgggctatgtactaccatgaggacaaatatcattttgaggagcaactgtaatcactaatcttctctctgccatcccttatatcggaactgacttagtagaatgaatctgaggcggcttctcagtggacaaagcaaccctaacacgattctttgcattccatttcatcctccctttcatcatcgcagctctagcaatagtacacctcctatttctacacgaaaccggatccaacaacccttcaggaatcacatcagactcagacaaaattccatttcacccttactacacaatcaaggatatcctaggagccttactcctactcctaatcctaatatcactagttttattttcacctgacctactaggagacccagataactacacccctgcaaaccccctaaacacccctccacatattaaacctgagtgatattttctattcgcctatgctatcctacgatccattcctaataaattaggaggtgtactcgccctagtattctccatcctaatcttggcattcattccactcctccacacatctaagcaacgcagcataatattccggccccttagccaatgcctattctgacttttagtcgccgatcttctcactttaacatgaattggaggacaaccagttgaacaccctttcatcattatcggacaagtcgcttcaatcttatatttcaccatcttattgatcctaataccaacagttagcgttatcgaaaacaaccttctaaaatgaagagtctttgtagtataatcattaccttggtcttgtaaaccaaaaatggagagtaaccgccctccctaagactcaaggaagaagctcttgctccaccatcagcayccaarsctgarattckycttaaactattscctgacaccccctacattcatataktgaatyacccstrmtgtgytatrtcagtatytccagrtaamccctyctyccctccyctatgtamgtcgtgcattartggtttgccccatgcatataagcatgtacataatattatatyctkacataggacatayyaactcaayytcayarytyaytgrycydycaryagtmayyraatgcatatcacytagtccmataagggcttartcaccatgcctsgagaaaccmtcaayccttgctcgtartgtycctyttctcgctccgggcccatacyaacgtgggggttactatcatgaaactatayctggcatctggttcttacytcagggycatracyywatttactccmatcctactaattctykcaaatgggacatctcdatggactaatgactaatcagyccatgatcacacataactgtggtgtcatgcatytggtatcttttadtttttrgggggggaatytgctatcactcayctaygaccgcaacggcactaactctaacttatctyctgctctcagggratatgcccgtcgcggccctaaygcagtcraataayttgtagctggacttattcattatcatttatcaactcacgcataaratcaaggtgctattcagtcaatggtttcaggacatatagttttarggtacacgtrcgyacgcgcgyragacattaagttaamttatacaaaccccccttaccccccgtaaactcatgtcatctattatacacttatttatgtcccgccaaaccccaaaaacaggactaagtgcatacaatactcacaagctttatttaaattrtatacaaatgtattgctactctagytaacttaacacaacagtcttacacgcatttggtctcgtagtctatctatagatagcattccctttttttyycctctcatatttactatgtattttatttattaygcacactacaatttcagtataagttaatgtagcttaaytaataaagcaaggcactgaaaatgccaagatgagtcgcacgactccataaacataaaggtttggtcctagccttcctattagtttttagtagacttacacatgcaagcctccacgccccagtgagaatgcccttaaaatcaccagtgatctaaaggagcaggtatcaagcacactcttaagtagctcataacaccttgctaagccacacccccacgggatacagcagtgataaaaattaagccataaacgaaagtttgactaagccatactaaatagggttggtaaatttcgtgccagccaccgcggtcatacgattaacccaaactaataggcctacggcgtaaagcgtgttcaagatmytttdacactaaagttaaaacttaactaagccgtaaraagctacagttatcatraaataaaccacgaaagtgactttataataatctgactacacgatagctaagacccaaactgggattagataccccactatgcttagccctaaacatagataattttwcaacraaataattcgccagrggactactagcaatagcttaaaactcaaaggacttggcggtgctttatatccctctagaggagcctgttctataatcgataaaccccgataaacctcaccacctttcgctaattcagtctatataccgccatcttcagcaaaccctcaaaaggtagaacagtaagcacaatcattttacataaaaaagttaggtcaaggtgtaacttatgaggtgggaagaaatgggctacattttctacccaagaacatttcacgaatgtttttatgaaattaaaaactgaaggaggatttagtagtaaattaagaatagagagcttaattgaatagggccatgaagcacgcacacaccgcccgtcaccctcctcaagtaataagacacaaccataaccawawtaacttaactaaaacacaagaggagacaagtcgtaacaaggtaagcataccggaaggtgtgcttggattaatcaaagtgtagcttaactaaagcgtctggcctacacccagaagatttcattacttatggccactttgaacaaaagctagcccaactaaccccaaacttaagtattacagacacataaaataaaacatttagttaaacaataaaagtataggagatagaaattttaattggagcgatagagatagtaccgtaagggaatgatgaaagacatcttaacagtattaaacagcaaagattaccccttctaccttttgcataatgaactagccagaaacaacttaacaaagagaacttaagctaagctccccgaaaccagacgagctacccataaacaatctaaaaggatcaactcatctatgtagcaaaatagtgagaagatttgtgggtagaggtgaaaagcctaacgagcctggtgatagctggttacccacaracagaattttagttcaactttaaatttacctaaaaaaaataaaattttaatgtaaatttaaaatatagtctaagaaggtacagcttcttagaatcaggatacaacctttattagagagtatatactaatatcaccatagttggcttaaaagcagccaccaattgagaaagcgttccagctcaacaaacaatataacttaatcccaaccatactacatcaactcctaattataccccctgggtcattctatttaagtatagaagcaataatgctagtatgagtaacaagaaccattttctccycgcataagcttatatcaggaacggatagaccactgatagttaacaatctgataatatcaacccaaaaatgaaatacttatccaccccattgttaacccaacacaggtatgcattcaaggaaagattaaaaggagtaaaaggaactcggcaaacacaaaccccgcctgtttaccaaaaacatcacctccagcatttctagtattggaggcactgcctgcccggtgacacttgtttaacggccgcggtatcctgaccgtgcaaaggtagcataatcatttgttctctaaatagggacttgtatgaatggccacacgagggtttaactgtctcttactcccaatcagtgaaattgaccttcccgtgaagaggcgggaataccacaataagacgagaagaccctatggagctttaattaactaacccaaactyatggatactagatacctacaaggcataacataacaccattattatgrgttagcaatttaggttggggtgacctcggaatataaaaaaactcccgagtgattaaaatttagacccacaagtcaaaatacaacatcacttattgatccaataatttttgatcaacggaacaagttaccctagggataacagcgcaatcctattcaagagtccatatcgacaatagggtttacgacctcgatgttggatcaggacatcctaatggtgcagcagctattaagggttcgtttgttcaacgattaaagtcctacgtgatctgagttcagaccggagtaatccaggtcggtttctatctattatacaacctcccccagtacgaaaggacaagggatgtaaggcctacctcacagaggcgccttaaaactaatagatgaagtcaactcaatctaaccagtttatctcctcataagcccgagaaaaggggctttgttagggtgcagrgcccggtaactgcgtaaaacttaaacctttactatcagaggttcaattcctctccctaacaaaatgttctttatcaacattatctctcttattatcccaatccttcttgccgtagccttcctcaccctygttgaacgaaaagtcttaggctatatacaacttcgaaaaggacctaatattgtaggcccctacggcctccttcaaccaatcgcagacgcagtaaaactcttcacaaaagaacctctacgaccacttacatcctctatatcaatattcatyctagcccccattctagctctatcactagccctaactatgtgaattcccctcccaataccctacccmctcattaatataaacttgggagtcctattcatactagcaatatcaagcctcgccgtgtactccatcctctgatcaggatgagcctcaaactccaaatacgccctaatcggagcccttcgagcagtagctcaaacaatctcatatgaagtaacgctagcaattattctyctatcagtcctcctaataaacgggtcatttacactatccacgctaattattacccaagaacatatatgattaatctttccggcctgacccctagccatgatatgattcatctctaccctagcagaaactaatcgagcccccttcgacttaactgaaggagaatccgaactagtctctggatttaacgtagagtatgcagcaggtcctttcgccctattctttctagcagagtacgcaaatattattataataaacatcctcacaacaattctgttcttcggcgcattccacaacccattcataccagaactctactctattaacttcactataaaaaccctcttattaaccatctgcttcctatgaattcgagcatcataccctcgattccgctacgatcagttaatacacttattatgaaaaaattttctacccttaactttagccctatgcatatgacatgttgccttacccattatcaccgcaagtatcccaccccaaacataagaaatatgtctgataaaagagttactttgatagagtaaataatagaggtttaaatcctcttatttctagaataataggcttcgaacctaatcttaagaattcaaagatcttcgtgctaccaaacttacactatattctacagtaaggtcagctaaattaagctatcgggcccataccccgaaaatgttggtttatacccttcccgtactaataaaaccccctattctcattatcatcatagcaactatcatgacaggaaccataatcgtcatactaagctcgcactgattactgatctgaattggattcgaaataaacatgctagccatcatccctattctcataaaaaagtacaatccacgagccatagaggcctctacaaaatattttcttacacaagctacagcctcaatattactaataataggagtcactatcaacctcctttactccggccaatgggtaatctcaaaaatctcaaaccccatcgcatccatcatgataaccactgccctaacaataaaactaggcctatctccattccacttctgagttcccgaagtaacacagggaattacgctcatatcaggaataatcctactaacatgacaaaaaatcgcacctatatccatcctatatcaaatctctccatcaattaacactaaccttcttatactaatagcccttacatccgttctagtaggaggctgaggcggactaaatcaaactcaactacgaaaaatcatagcatactcctccattgcccacataggctgaatagccgctatcattacttataaccctacaataatagttctaaacttaactttatatattctaataacactatctaccttcatactatttatattaaactcatccaccacgaccctatctttatcccacatatgaaacaaatttcccctaatcacttccataatcttaatcttaatactatccctaggaggactacccccattatctggcttcatccccaaatgaataattattcaagaattaacgaaaaataacataattattattccaacactaatggctatcaccgctctacttaacttatatttctacctgcgactcacatatagcaccgcacttaccatatttccatccacaaacaacataaaaataaaatgacagttcgaatacacaaaaaaggcaaccctattaccccccttaattattacctcaactatactactcccactaacacctatattatcagtcttggactaggagtttaggttagaccagaccaagagccttcaaagctctaagcaagtgctacacacttaacccctgatcaaatcacctctaagggctgcaagaatctatcttacatcaattgaatgcaaatcaaacactttaattaagctaagccctccctagattggtgagcttctacctcacgaaattttagttaacagctaaataccctagtaactggcttcaatctaccttctcccgccgcgtagaaaaaaaaggcgggagaagccccggcggcgtctaggctgcttctttgaatttgcaattcaatatgaaaattcaccacggagcttggcaaaaagaggacttaaacccctatctttagatttacagtctaatgcttttatcagccattttacctatgttcattaaccgatgactgttctccactaatcacaaggatattggtactttatacttactatttggagcatgagccggtatagtaggcactgctttgagcctcctcatccgagccgaactaggtcagcccggtactttactaggtgacgatcaaatttataatgtcatcgtaaccgcccatgctttcgtaataatcttcttcatagtcatgcccatcataattgggggctttggaaactgactagtgccgttaataattggtgctccggacatggcattcccccgaataaataacatgagcttctgactccttcctccatcctttcttctactattagcatcttctatggtagaagcaggtgcaggaacgggatgaaccgtataccccccactggctggcaatctggcccatgcaggagcatccgttgaccttacaattttctccttacacttagccggagtctcttctattttaggggcaattaatttcatcactactattatcaacataaaaccccctgcaatatcccagtatcaaactcccctgtttgtatgatcagtactaattacagcagttctactcttactatccctgcctgtactggctgctggaattacaatacttttaacagaccggaatcttaatacaacattttttgatcccgctggaggaggagaccctatcctatatcaacacctattctgattcttcggacatcctgaagtttacattcttatcctgcccggattcggaataatttctcacattgtcacttactactcagggaaaaaagagcctttcggttatataggaatagtatgagcaataatatctattgggtttttaggctttatcgtatgagctcaccatatgtttaccgtaggaatagatgtagacacacgagcgtactttacgtccgccactataattatcgctattccaacgggagtaaaagtatttagttgactggcaacacttcatggaggcaatattaaatgatctccagctatgctatgagctttagggtttattttcttatttacagtagkcgggttaacaggtattgtcctagctaattcgtccttagacatcgttgcttcatgatacatagttatgtttgtggcycatttggtcactatgtgctttcaataggagcagttttttgccattatggggaggatttgcccactgattcccgkttattctcaggttatactcgttracgatacttgagcaaagattcactttacaattatgtttgtgggagtaaaatataactttcctttccctcaacatttcctaggtttatctggaatacctcgtcgatactctgactacccagatgcatatactacctgaaataccgtctcctctataggatcgtttatctcgcttacagcggtgatgcttataatttttatgatctgggaagcctttgcatccaaacgagaagttgctatagtagaacttactacaactaacattgagtgactacatggatgtccccctccataccacacgttcgaagaacctacatatgtgatccaaaaataagaaaggaaggaatcgaaccccctaaaattggtttcaagccaatgtcataaccattatgtctttctcaatcagrarrwawwartaaaacattacatgactttgtcaaagttaaattataggtgaaacccctatatatctctatggcgtacccattkcamswsgsaykacasgacgcaacctcccctattatagaggagctacttcattttcatgaccatacactaataattgtattcttaatcagttctttagttytctatatcatttcactaatattgactacaraattaacccatacaagcacaatagacgcacaagaagtggaaacagtatgaaccattctacccgccattatcctaatcctaatcgctctaccttccctccgaatcctttatataatggacgaaattaataacccctctttaaccgtgaaaacaataggccaccaatgatactgaagctatgaatatactgactatgaagacttaaactttgactcctacataatcccaacacaagaattaaagccaggagaactccgactattagaagtagacaaccgagttgtcctcccaatagaaataaccatccgaatacttatctcttcagaagacgttttgcattcatgagccgttccatcactaggtctaaaaactgacgctattccaggacgactaaaccaaaccacccttatagccayacgaccaggactgtactatggccagtgctctgaaatctgcggatctaaccacagctttatacccattgttcttgaaatagtccccctatcttactttgagacctgatctgccttaatagtataacctagactagatctactmawwaaraarctataaagcattaaccttttaagttaaagactgggagttttaacctctccttaatgaaatgccacagctagatacatccacctgatttattataatcttttcaatatttctcaccctcttcatcctatttcaactaaaaatttcaaatcactactacccagaaaacccgataaccaaatctgctaaaattgctggtcaacataatccttgagaaaacaaatgaacgaaaatctattcgcttctttcgctgccccctcaataataggtctccctattgtggtactgatcgtcatattcccttccattttattcccaacacccagtcgcctaatcaataatcggttaatctccattcagcaatgactaattcaactaacatcaaaacaaatactagcaattcataaccaaaagggacgarcmygagctctcatacttatatcactaattctatttattggctcaactaatctacttggactattacctcactcatttacgcccacaacacaactctctataaacctcggaatagcaatycccctatgagcagggacagtaattaccggtttccgctataaaaccaaagcatccttagcacactttctaccccaaggcacccctctycccctaattccaatactagtagtcatcgaaactattagtctatttattcaacccatggctctagccgttcgattaaccgccaatattactgcaggacacctcctaatccatttgattggaggggctaccttagctcttatcaatattagcgcgaccacagcttttatcacttttattattctaatcctacttacgatcctagaatttgctgttgccttaattcaagcctatgtttttaccttactagtgagtctatacttacatgacaacacctaatgacccaccaaactcacgcttaccacatagtcaacccaagcccatgaccgctgacaggggccctttctgccctccttataacatcgggtcttatcatatgatttcactataactcaatagccctacttacattaggattcacaaccaacctgttaaccatatgccagtgatgacgagatgtgatccgagaaggcacattccaaggacatcatmcccctattgtacwawarggaytacgatacggaatagttcttttkatcgtatcagaagtatttttctttgcaggcgttcttctgagccttttaccactcctagcctagcccytgactcgctgaacttgggggttgctgacctcstagcgcggcattattccgtcttagacccattagaagtgcctctactcaacacctcagtcctcctagcctccggagtatctattagcttgagcccatcatagtttaatagaaggtaatcgcrracagtatacttgcaagccttattcattacaatctccttaggcgtatattttacgctattacaggcctccgaatactatgagacatcttttacaatctccgatggggtatacggatctaccttttttatagccactggatttcacggattacacgtaattattggctctacattcctcatcgtgtgcttcctccgacagctatactaccacttcacatcaaaccaccacttcggatttgaagccgctgcatgatattgacactttgttgatgtagtctggctattcttgtatgtatctatttattgatgaggatcctatttctttagtataactagtacaattgacttccaatcagttagctccagatcaacctggaaagaagtaataaacgttatattaactttgataactaatgtaaccctagcatccttacttgtactaatcgcattctgacttccccagctaaatatctatacagacaagacaagcccctacgaatgtggttttgaccccatgggatctgctcgcctacctttctctataaaatttttcctagttgccatcacatttctgcttttcgacctagaaattgcactcctactcccacttccctgagcgtcacaaaccaacaagctaacaacaatacttatcatagcactcctactaatctccctcctagctgcgagcctagcgtatgaatggaccgaaaaggggctagaatgaaccgaatatgataattagtttaagccaaaaacaaatgatttcgactcattagattatgatttatctcataattatcatgtccatagtatatattaakmwckwkctggcattcattctttctctaataggtatacttgtttatcgatcacacctaatatcatcgctactatgcttagagggcataatattatcactatttgtaataatatctgtaactattctcaacaatcacctcacattagccagcatgataccaatcgtactactagtatttgctgcctgcgaagcagcattaggactatctctactagttatagtatctaacacctacgggactgattacgtacaaaacctaaaccttttacaatgctaaaaattatcatccctactatcatactaatcccccttacatgaatatcaaagcctaacataatctgaattaacacgacaacatatggtttgctaatcagcttaatcagcttattctacctaaaccaaccaaatgataatacattgaactcctccttaatatttttctctgattccctatcggcaccactattagcactcacaacatgacttctgccccttatacttatagcaagtcaacaccatttatcaaaagaacccttaactcgaaaaaaactatatatttcaatactaattcttctccaattgttcctaattataactttcacagcctctgaactcatcttcttttacatcctatttgaagcaacactgattccgaccctgatcattattacccgatgaggaaatcaaactgaacgactaaacgcaggactctacttcttattttatactttaataggatccctcccactcctagtagctctcctttatatccacaatttcatgggctccctaaattttctcataattcaatactgaatccagcctctgccaaactcctgatctaatattttcctatgactggcatgcataatagcattcatagtaaagatacctctatacggcctccacttgtgactaccaaaagcacacgtagaggcccctattgccggctccatagtacttgccgctgtactcctaaaactagggggctatggcatgatacgaattacaaccctactaaatcccctgaccaatttcatagcataccccttcataatattgtctctatgaggcataatcataacaagctctatctgtctccgtcaaacagatctaaaatccctaattgcatactcctcagttagtcatatggcactggttatcgtagcggttcttattcaaacaccatgaagttatataggtgcaacagctctaataattgcccatggtttaacatcctcaatactattctgcttagccaactccaattacgaacgaatccatagccgtactataattctcgcacgaggacttcaaactctccttcccctaatagcagcctgatgactattagcaagcctcacaaatctggctctccctccaacaattaatcttatcggagaactatttgtagtgatatcctcattctcatgatccaacattactattatcctaataggaattaacattatcatcaccgccctatactcactttatatattaatcaccacacaacgtggtaaatattcccaccatatcaaaaatatcaaaccatcattcacacgagaaaatgccctaatgaccttgcacctactgcccctactcctcctatcccttaaccctaaaattattctcggtcccatctactgtaagcatagtttaacaaaaacattagattgtgagtctaacaataaaagctcaaacctttttgcttaccgaaaaagtactgcaagaactgctaattcatgctcccatgcataagaacatggctttttcaacttttataggatagaagtaatccgttggtcttaggaaccaaaaaattggtgcaactccagataaaagtaataaatatattttcttcatgcataatcacagccctagttattcttactttgcccatcattatatcctctactaaactttacaagaataagctatacccatactatgtaaaaaccgctacttcttacgcgttcataattagcataattcccacaataatattcatctactcaggacaggaaacaatcatttcaaactggcattgaataacaatccaaactataaaactatccatgagtttcaaattagactacttctcaataatctttgtacctgtagccctttttrtcacgtggtcwatcatagaattctctatatgatatatacactccgatccttacattaaccggtttttcaagtaccttctcttattcctcatcactataatagtcctagttaccgcaaacaacatattccaactaktcattggttgagaaggagttggcattatatcattcctacttattggatgatggtacggccgaaccgatgcaaatacagccgccctacaagccgtcctctacaaccgtattggagatgtaggcttcattataaccatagcatgatttctactaracttaaacacatgagaccttcaacmratcttcattacgacaaacgataattttaatctgccactacttggcctactactagcagctaccggtaaatctgctcaattcggcctacatccctgactcccctcagccatagaaggccccactcctgtatcagccctacttcactcaagcacaatagttgtagcaggagtatttcttcttatccgctttcatccactaatagagcataaccmaactattcaaaccctcactttatgcttaggggccattactacactatttaccgcaatctgcgctcttacacagaatgatatcaaaaaaattgtagcgttctctacctcaagccmactaggcctaataatagtaacmattggmawwaammarmmctacttagccttcttacacatctgcactcacgcattttttaaagctatactattcatatgctcagggtcagttatccacagcctaaacgatgaacaagacattcgaaaaatgggtggcctatttaaagtccttcccttcaccacaacctcccttattatcggaagcctcgcattaacaggcatgcctttccttacaggattctactccaaagacctgatcatcgagtccgctaacacgtcgaataccaackcctgagccctcttaattacactcgktgccacatccstaaccgctgcctacagcacccgaatwatattctttgctcttactaggccagccccgcttctcccctatgaatccttatcaacgagaataatcctctcctaattaactctattaaacgactccttatcggaagtgtatttgcagggtatattatctcccacagcatcacacccactaccatcccacagataactatgcctcattatctaaaaatgacagcccttgcagtaaccaccttgggtttcatcctggcactagaactaaaccttaccwcacaaggactcaaatttaactatccttctaattactttaaattctccagcctccttggctactatccaaccattatgcaccgcctcacacctaaaacaagttkaaccattagccagaaatcagcatctatacttctggactccatctgactagaaaacatcctacccaaatcaatctcatatttccaaataaaatcttctacccttatttcaaatcaaaaaggtctcatcaaactctatttcctatcgttcatactaactataatcctcagtctactaatccttaattaccacgggtaacttccatgataaccaacacaccaattaataatgatcagcctgtaacaaccaccaaccaagtcccataactgtacagagccgcaatacccatagcctcttcactaaaaaacccagagtcccccgtatcatagatcactcaatcccctattccattaaactttaatactacctccacctcgtcatccttcaaaatatagcaagcagtcaacaattcagacaacaaaccagtaataaaagccgctagaacagccttatttgaaactcacacctcagggtattgctcagtagccatagcagttgtataaccaaatactactaatataccccccaaataaattaaaaatactatcaaccctaaaaaagaacccccaaaattcagaacaatcgcacaaccaatcccaccgctaataattagcacaagcccaccataaataggagatggtttagtggcaaaacccacaaaactcatcacaaaaacgatacttaaaataaatacaatgtatgttatcattattcctacatggaatttaaccatgactaatgacatgaaaaatcatcgttgtatttcaactataagaacattaatgaccaacattcgaaaaacccacccactagccaaaattgttaataactcattcattgacctcccagcgccgtctaacatctctgcttgatggaacttcggatccttactaggagtatgcttgattctacagattctaacaggtttattcttagctatgcactatacatcggacacarscacagcyttttcatcagtcacccacatctgccgagacgttaactacggctgaattatccgctatatgcacgcaaatggcgcttccatattctttatctgcctattcctacatgtaggacgaggcctatattacggatcctatgtattcatagaaacatgaaacattggaattgtactattattcgcaaccatagccacagcattcatgggctatgtactaccatgaggacaaatatcattttgaggagcaactgtaatcactaatcttctctctgccatcccttatatcggaactgacttagtagaatggatctgaggcggcttctcagtggacaaagcaaccctaacacgattctttgcattccatttcatcctccctttcatcatcgcagctctagcaatagtacacctcctatttctacacgaaaccggatccaacaacccttcaggaatcacatcagactcagacaaaattccatttcacccttactacacaatcaaggatatcctaggagccttactcctactcctaatcctaatatcactagttttattttcacctgacctattaggagacccagataactacacccctgcaaaccccctaaacacccctccacatattaaacctgagtgatattttctattcgcctatgctatcctacgatccattcctaataaattaggaggtgtactcgccctagtattctccatcctaatcttggcattcattccactyctccacacatctaagcaacgcagcataatattccggccccttagccaatgcctattctgacttttagtcgccgatcttctcactttaacatgaattggaggacaaccagttgarcaccctttcatcattatcggacaagtcgcttcaatcttatatttcaccatcttattgatcctaataccaacagttagcgttatcgaaaacaaccttctaaaatgaagagtctttgtagtataatcattaccttggtcttgtaaaccaaaaatggagagtaaccgccctccctaagactcaaggaagaagctcttgctccaccatcagcacccaaagctgarattctycttaaactatyccctgacacccctacattcatatattgaatyayccctrctgtgstatrtcagyatytccaggtaaacyyyyctycccycccctatgtacgtcgtgcattrrtrgyttgccccatgcatataagcatgtacatrwtattatatycttacataggacataytaamtcaayytcayarttcrytvrycydtcarcrgtaaycrratgcatatcacytagtccaataagggcttaatcaccatgcctcgagaaaccmtcaacccttgstcgwaatgtccctcttctcgctccgggcccatacyaacgtgggggttactatcatgaaactatayctggcatctggttcttacytcagggycataacyytatttactccaatcctaytaatyctykcaaatrggacatctcgatggactaatgactaatcagcccatgatcacacataactgtggtgtcatgcatytggtatcttttawtttttagggggggaatctgctatcactcayctayraccgcaacggcactaactctaacttatcttctgctctcagggratatgcccgtcgcggccctaaygcagtcaratracttgtrgctggwcttattcattatcaywtatcamctcacgcataaartcarggtgctatycagtcaatggtttcaggacatatwgttttarrgtacacgtrcgtacacgkmsgtacacgtacgtacacgtrsgtacacgtrcgtacacgtrcgtacacgtrcgtacacgtrcgtacacgtrcgtacacgkrcgtacacgtrcgtacacgtrcgtacacgtrcgtacacgtrcgtacacgtrcgtacacgtrcgtacacstrcgtacacgtrcgtacacgtrcgtacacgtrcgtacacgtrcgtacacrtrcgtacacgtrcgtacacgtrcgtacacgtrcgtacacgtrcgtacacgtrcgtacacgtrcgtacacgtrcgtacacgtacgyacgcgcgyaagacmttaagttaacttatacvraccccccttaccccccgtaaactcatgtcatctattatacacttatttatgtcccgccmaaccccmrwaacaggactaagtgcatacaatactcacaagctttatttaaattatatacmaatgtattgctactctagttaacttaacacaacagtcttacacgcatttggtctcgtagtctatctatagatagcattcccttttttttycctctcatatttactatgtattttatttattacgcacactacaatttcagtatraaaaaaaaaaaaaaaaaaaaaaaaaaaaaaaaaaaaaa

SEQ ID NO: 479 - DNA, 712 bp, Canis familiaris
  misc_feature (282)..(282): n comprises a, c, g, or t, or includes no nucleotide
  misc_feature (338)..(338): n comprises a, c, g, or t, or includes no nucleotide
gatctccgccaaggtccatccmaactggagtgatgtwagcagacmccatcktagagdgkttcyytyyktaarcccyttgctstbgagtramttytccagcttmagctcwaytcwcagcttctccragcatcrmyytgggagtgttttgagactttyctcataaatgaggsmmgtacattcctgttttgctccgaagtattyagtaccgctcagtatkttaaatgaaatgattctcacttgtgatwtggtttgggatcmatagggaagcacwggcacchaccnacatatacvatgtattgamatgaktttctcagaatttgaagtaggaaagttacycndacacttctgcttccacttaactggcctgcaatattgtaagaatggcatatccttgttactgtgatatttaaaatatccmcagtgtccmccktttccvaaagattctagtaatgatctagaaatatctttctcttatctgttatttatcvatttttcccmgtatttttatatggraraaattgtattgaagacatttagtatgcagttgataagaggaatttggtataattatggttggtgattattttttatactgtatgtgccmaagctttactactgtggaaagacmactgtttaataaaagatttacmttcchmhmhwdrmaawawaaaaaaaaaawwaawaaaaaaaaaaaaaaaaaaaaaaaaaaaaa

SEQ ID NO: 480 - DNA, 749 bp, Canis familiaris
gcacgagagtacttgccgctgyackmgctaaaactaggggkctatggcatgatacgaattacaaccykactaaatcscctgaccaatttcatagcataccccttcatratawtatctstrkgrggcataatcataacaagctctatctgtctccgtcaaacagatctwrratccctwattgcatactcctcagttagtcatatggcactggttatcgtagcggttcttattymdacaccatgaagttatataggtgcmacwgctctaataattgcccatggtttaacatcctcaatahtattctgcttagcchactccmattacgracgaatccatagccgtactataattctcgcacgaggacttcaaacyctccttcccctaatagcagcctgatgactattagcaagcctcacmaatctggctctccckccracvattaatcttatcggagaactatttgtagtgatatcctcattctcatgatccmacattactattatcctaataggaattaacattaycatcaccgccctatactcactttatatattaatcaccacacaacgtggtaaatattcccaccatatcaaaaatatcaaaccatcattcacacgagaaaatgccctaatgaccttgcacctactrcccctactcctcctatcccttaaccctaaaattattctcggtcccatctactaaaaaaaaaaaaaaaaaaaaaaaaaaaaaaaaaaaaaaaaaaaaaaaaa

SEQ ID NO: 481 - DNA, 977 bp, Canis familiaris
  misc_feature (880)..(880): n comprises a, c, g, or t, or includes no nucleotide
  misc_feature (920)..(920): n comprises a, c, g, or t, or includes no nucleotide
  misc_feature (942)..(942): n comprises a, c, g, or t, or includes no nucleotide
  misc_feature (961)..(961): n comprises a, c, g, or t, or includes no nucleotide
gcacgagattgywckvsackartcacaaggatattggtactttatacttactatttggagcaygagccggtatagtaggcactgccttgagcctcctcatccgagccgaactaggtsagsccggtactttactaggtgacgatcaaatttataatgtcatcgtaaccgcccatgctttcgtaataatcttcttcatagtcatgcccatcataattgggggctttggrmactgrctagtgccgttaataattggtgctccggacatrgcattcccccgaataaataacatgagcttctgactccttcctccatcctttcttctactattagcatcttctatggtagaagcaggtgcaggaacgggatgaaccgtataccmyscactggctggcaatctggcccatgcaggagcatycgttgaccttacrmwykwstycttacacttagccggagtctcttctattttaggggcaattaatttcatcactactattatcaacataaaaccccctgcaatatcccagtatcaaactcccctgtttgtatgatcagtactaattacagcagttctactcttactatccctgcctgtactggctgctggaattacaatacttttaacagaccggaatcttaatacaacattttttgatcccgctggaggaggagaccctatcctatatcaacacctattctgattcttcgggcatcctgaagtttacattcttatcctgcccggattcggaataatttctcacattgtmamttactactcarggaaaaaagarsctttcggttwtwwaggaaagkatgagcaatatatctattgggkttttaggcttatcgatgagctaccatatgttaccgaggaatagatgtngacacaccagcgtctttacgtccgcactataatatcgttnttcaacgggagaaaagtattanttgctggcacacttctggngcaatattaaagactc

SEQ ID NO: 482 - DNA, 1272 bp, Canis familiaris
acaccccctacattcatatattgaatcacccctactgtgctatgtcagtatctccaggtaaacccttctyccctcccctatgtacgtcgtgcattartggtttgccccatgcatataagcatgtacataatattatatccttacataggacatatyaactcaatctcatarttcaytsatctrtcarcagtaatcraatgcatatcacttagtccaataagggcttaatcaccatgcctcgagaaaccatcaacccttgctcgtaatgtccctcttctcgctccgggcccatactaacgtgggggttactatcatgaaactatacctggcatctggttcttacytcaggsccataactytatttactccaatcctactaattctcgcaaatgggacatctcgatggactaatgactaatcagcccatgatcacacataactgtkgtgtcatgcatytggtatcttttaatttttagggggggaatctgctatcactcaymtacgaccgcmacggcactaactctaacttatcttctgctctcagggaatatgcccgtcgcggccctaaygcagtcaaataacttgtagctggacttattcattatcatttatcaactcacgcataaaatcaaggtgctattcagtcaatggtttcaggacatatagttttagggacacgtrcgtacacgtrcgtacacgtrcgtacacgtrcgtacacgtrcgtacacgtrcgtacacgtrcgtacacgtrcgtacacgtrcgtacacgtrcgtacacgtrcgtacacgtrcgtacacgtrcgtacacgtrcgtacacgtrcgtacacgtrcgtacacgtrcgtacacgtrcgtacacgtrcgtacacgtrcgtacacgtrcgtacacgtrcgtacacgtrcgtacacgtrcgtacacgtacgcacgcgcgtaagacattaagttaacttatacaaaccccccttaccccccgtaaactcatgtcatytattatacacttatttatgtcccgccaaaccccaaaaacaggactaagtgcatacaatactcrcaagctttatttaaattrtatacaaatgtattgctactctagttaacttaacacaacartcttacacgcatttrgtctcgtagtctatmtatagatagcattcccttttttyyycctctcatatttactatgtattttatttattaygcacactacaatttcagtataagttaatgtagcttaaytaataaagcaaggcactgaaaatgccaagatgagtc

SEQ ID NO: 483 - DNA, 677 bp, Canis familiaris
tcacctccccggaccmatcytctgatcaggatgagcctyaactccwatacgccytawtcggarcccttsgagcagtagctcaracmatctcatatgaagtaacgctagcarttattctyctatcagtcctcctaawaaackggtcattwacackatccacgctaattrtwacccmagdacatatakgattaatctttccggcctgacccctagccatgatatgattcatctctaccctagcagaaactaatcgagcccccttcgacttmactgaaggagaatccgmactagtctctggatttaacgtagagtatgcarcaggtcctttygccctattctttctagcagagtacgcaaatattatyataataaacatcctcacracaattctdttcttcggcgcattccmcaacccaytcataccagractctactcyawtaacttcactataaaaaccctcttattaaccatctgcttcctatgaattcgagcatcataccctcgattccgctacgatcmvttaatacacttattatgaaaaaattttctacccttaactttagccctatgcatatgacatgttgccttacccattatcmccgcmagtatcccmmccccaaaccataaaaaaaaaaarwraaaaaaaaaaaaaaaaaaammaaaaaaaaaaaaaaaa

SEQ ID NO: 484 - DNA, 669 bp, Canis familiaris
cctataatcctcagtctactaatccttaattaccacgrgtaayttccatgataaccdacacrccmaktaataatgatcagcctgtracaaccaccaaccaagtyccataactgtwcagagccgcwatacccatagcctcttyactdawwwwyccagagtcccccgtatcatagatcactcratcccctattccattaaackkkaatactacctccrcstcrtcatccttcraaatatagcaagcagtcaacaattcagacwmcwaaccagtaataaaagccgctagaacagccttatttgaaactcacacctcagggtattgctcagtagccatagcagttgtataaccmratactactaatatacccccymaataaattaaaaatactatcaaccctaaaaaagaacccccmaaattcagaacaatcgcacaaccaatcccaccgctaataaytagcacaagcccaccataaataggagatggtttagtggcmaaacccacmaaactcatcacaaaaacgatacttaaaataaatacaatgtatgttatcattattcctacatggaatttaaccatgactaatgacatgaaaaatcatcgytgtatttcaactataagaacattaaaaaaawaaawaaaaaaaaaaaaaaaaaaaaaaaaaaaaaaaa

SEQ ID NO: 485 - DNA, 723 bp, Canis familiaris
tactcttaaattaggggctaatggcatgatacgaattacaccctactratccystgaccatttcatagcataccccttcataatattrtctctatgaggcawaatcatwacaagctctatckgtctccgtcwracagrwytvaatccctaattgcatactcctcagttagtcatatggcactggttatcgtagcggttcttattcmwmcaccatgaagttatataggtgcaacagctctaataattgcccatggtttaacatcctcratastattctgcttagccractccaattacgaacgaatccatagccgtactataattctcgcacgaggacttcaaacyctccttcccctaatagcagcctgatgactattagcaagcctcmcaawtctggctctccctccracmattaatcttatcggagaactatttgtagtgatatcctcattctcatgatccaacattactattatcctaataggaattaacattaycatcaccgccctatactcactttatatattaatcaccacacaacgtggtaaatattcccaccatakcaaaaatatcaaaccatcattcacacgagaaaatgccctaatgaccttgcacctactrcccctactcctcctatcccttaaccctaaaattattctcggtcccatctamwaaaaaaaaaaaaaaaaaaaaaaaaaaaaaaaaaaaaaaaaaaaaaaaaaa

SEQ ID NO: 486 - DNA, 751 bp, Canis familiaris
cctattacttcgatatccctacttacatttaggattcaccaccaaccctgttcacccatatamccaktgattgrcgacgatgtrwtccgagaaggcacattccaaggacatcatacccctattgtacmmaaaggrctacgathacggaatagttcyttkkatcgtatcagaagtattkttmyttscaggcttcttctgagcctttkkaccastycagcstagcccctactcctgaacttgggggttkctgrcctcctaccggcattattcctcttaacccmttagaagtgcctytactcwacacctcagtcctcctagcctccggagtatctattacttgagcccatcatagtttaatagaaggtaatcgcvaacatatacttcaagccttattcattacvatctccttaggcgtatattttacgctattacaggcctccgaatactatgagacatcttttacmatctccgatggggtrtayggatctaccytttttawagccmctggattycacggattacacgtaattattggctctacattcctcatcgtgtgcttcctccgacagctatactaccmcttcacatcmaaccmccmcttcggatttgaagccgctgcatgatattgacactttgttgatgtagtctggctattcttgtatgtatctatttattgatgaggatcmtaaaaawaaaaaaaaaaaaaaaaaaaaaammaaawaaaaaaaaaaaaaaaaaaaaaaaaaaaaaa

SEQ ID NO: 487 - DNA, 675 bp, Canis familiaris
  misc_feature (302)..(302): n comprises a, c, g, or t, or includes no nucleotide
agttgatgaacgagatgtgatctcgagaggcacatccaaggacatcatacccctactgtacaaaagacctacgatacggkatagttctgttkyatcgwwtcagaagyatttttcttgcaggcttcttctgagccttttaccactccagcytagcccctmctcctgaacttggggtykctgrcctcctaccggcattattcctcktaacccattagaagtgcctctactcwacacctcagtcctcctagcctccggagtatstattacttgagcccatcatagtttwatagaaggtaatcgcnaacatatacttcaagccttattcattacaatctccttaggcgtatattttacgctattacaggcctccgaatactatgagacatcttkbwcaatctccgatggggtrtacggakctaccttttttatagccactggattycacggattacacgtaattattggctctacattcctcatcgtgtgcttcctccgacagctatactaccacttcacatcaaaccaccacttcggatttgaagccgctgcatgatattgacactttgttgatgtagtctggctattcttgtatgtatctatttaktgatgaggatcctawawaaaaaaaawawaawaawaaawaaaaaaaaaraaaaaaaaaaaaaaaaaaaaaaa

SEQ ID NO: 488 - DNA, 823 bp, Canis familiaris
ccgggctrmagbwmdkcrcsmrckarcccaaacttaagtattacagacacryamrakaaaacatttagttaaacaataaaagtataggagatagaaattttaattggagcgatagagayagtaccgtaagggarkgrkgrargacatcttaacagtattaaacagcaaagattaccccttctaccttttgcataatgaactagccagaaacaacttaacaaagagaacttaagctaagctccccgaaaccagacgagctayccatraacaatctaaaaggatcaactcatctatgtagcaaaatagtgagaagatttgtgggtagaggtgaaaagcctaacgagcctggtgatagctggttacccacaracagaattttagttcaactttaawtttacctaaaaaaaataaaattttaatgtaaatttaaaatatagtctaagaaggtacagcttcttagaatcaggatacaacctttattagagagtatatactaatatcaccatagttggcttaaaagcagccaccaattgagaaagcgttccagctcaacaaacaatataacttaatcccaaccatactacatcaactcctaattataccccctgggtcattctatttaaatatagaacgaataatgctagtatgagtaacaagaaccactttctcctcgcataagcttatatcaggaacggatagaccactgatagttaacaatctgataatatcaacccaaaaatgaaatacttatccaccccattgttaacccaacacaggtatgcattcaaggaaagattaaaaggagtaaaaggaactcggcaaa

SEQ ID NO: 489 - DNA, 701 bp, Canis familiaris
aaagtattttagttgacggcaacacttcatggaggcaatattaaatgatctccagytatgctattgagctttagggttatttcttatttacagtaggcgsgttaacaggtatkgtcctagctaattcgtccttagacatcgttcttcatgatacatattatgttgtrgcycattttcactatgtgctttcmataggagcagtttttgccamttatrggaggatttgcccactgattccctttattctcaggytatactcttaacgatacttgagcmmaagattcactktacmattatgtttgtgggagtaaatataactktcttccctcaacatttcctaggtttatctggaatacctcgtcgatactctgactacccagatgcatatactacctgaaataccgtctcctctataggatcgtttatctcgcttacagcggtgatgcttataatttttatgatytgggaagcctttgcatccaaacgagaagttgctatagtagaacttactacaactaacattgagtgactacatggatgtccccctccataccacacgttcgaagaacctacatatgtgrtccaaaaataagaaaggaaggaatcgaaccccctaaaattggtttcaagccaatgtcataaccattatgtctttctcawycagwaaraaaaaaaaaaaaaaaaaaaaaaaaaaaaaaaaa

SEQ ID NO: 490 - DNA, 630 bp, Canis familiaris
gatttcgtgtwccagtttaaggscgagtgctatttcaccaacgggacggagcgggtgcggcttctgacgagagacatctataaccgggaggagcacgtgcgcttcgacagcgacgtgggggagtaccgggcggtcacggagctcgggcggccsgacgctgagtactggaacgggcagaaggagctcttggagcggaggcgggccgaggtggacacggtgtgcagacacaactacgggagggaagagctcaccacgttgcagcggcgagtggaaccgacagtgaccatctccccgtccaagacagaggttctgaaccaccacaatctgctggtctgctcagtgacagatttctatccaggccagatcaaagtccggtggtttcggaatgaccaggagcagacagctggtgtcgtgtccactccacttattaggaatggggactggaccttccagatccttgtgatgctggagatgactccccagcgaggagatgtctacacttgccatgtggagcacgccagcctccagagccccatcacagtgcagtggcgggcacagtctgaatctgcccagagcaagatgctgagtggcattggtggcttcgtgctggggctgatcttccttgggctt

SEQ ID NO: 491 - DNA, 719 bp, Canis familiaris
  misc_feature (25)..(25): n comprises a, c, g, or t, or includes no nucleotide
  misc_feature (149)..(149): n comprises a, c, g, or t, or includes no nucleotide
  misc_feature (294)..(294): n comprises a, c, g, or t, or includes no nucleotide
  misc_feature (298)..(298): n comprises a, c, g, or t, or includes no nucleotide
acccgagtacagcatggatctcccncagagttccatccaactggagtgatgttascrgmccccatctwagagtgkttctytcttaagcccyktgcyyykggaktaacttctccagcttcagctcmactcacagcktctccvmgcatmancytgggagtgttktgagactttkctcatamatgaggrcagwacattcctgttktgctccgaagtattcagtaccgctcagtatkktaartgaaatgattctcacttgtgatttggtttgggatcmatagggaagcacmggcaccnaccndcatatacmatgtattgaaatgattttctcagaatttgaagtaggaaagttacccvdacacttctgcttccacttaactggcctgcmatattgtaagaatggcatawccttgttactgtgatatttaaaatatccacmgtgtscaccttttccmmaagattctagtaatgatctagaaatatctttctcttatctgttatttatcmatttttcccmgtatttttatatgraaaaaattgtattgaagacmtttagtatscagttgataagaggaatttggtataattatggttggtgattattttttatactgtatgtgccvmagctttactactgtggraagacmmctgtttaataaaagatttacattccammmhwwraawarwwwwaaaaaaaaaaaaaaaaaaaaawaaaarmaaaa

SEQ ID NO: 492 - DNA, 1071 bp, Canis familiaris
  misc_feature (438)..(438): n comprises a, c, g, or t, or includes no nucleotide
  misc_feature (443)..(443): n comprises a, c, g, or t, or includes no nucleotide
  misc_feature (446)..(448): n comprises a, c, g, or t, or includes no nucleotide
  misc_feature (465)..(465): n comprises a, c, g, or t, or includes no nucleotide
  misc_feature (688)..(689): n comprises a, c, g, or t, or includes no nucleotide
aaaccggccaatattactgcaggacacgctcctaaatgcatctgatttggaggggctacccttagctcttatcaatattaggcgcgaccacagccttttatgcactgtgtgagtagtttcgaatcctgacttacgatctctagaatttgctgttgccttaattcaagcctatgtttttaccttactaagtgagtcttatacttacaatgacaacacctaatgacscacsrvacwsacgckyassacrwrgtcaacccaagcccatgaccgctgacaggggccctttctgccctccttataacatcgggtckyaysakatgattkcactataactcratagccctwcttacaktaggaytcacarccracswgktraccmwrtaccagtgatgdcgagvbgkgatscgagaaggsacawtccmrggrmmtsrdabscbnrkkknvmnnnrrgsvstwsgathsggnatagytbbkbdbatcgtatcagwagtatkkkkyktkgcaggcttyktskgassckkktaccmstccagcytwgcccstactcstgvrcttkgggbttbctgrcctcctwccggcattaktcctcktraccmmttagaagtgcctskactcdwmvcctsagtcctcctagcctccggagtatctatkacttgagcccatcatagttwaatagaakgtaatcgcnnacatatacttcaagcctkattcattacvatctccttaggcgtatattttacgctattacaggcctccgaatactatgagacatyktktmcmwtytccgatggggtdtayggatctaccbttttyatasccmctggattycmcggattacacgtaattattggctctrcattcctcatcgtgtgcttcctccgacagctatactaccmcttcacatcmaaccmccmcttcggatttgaagccgctgcatgatattgacmcyttgttgatgtagtctggctattyttgtatgtatctayttattgatgaggatcctaaammmamaamaaawavmammaamvmawwaaamaadaaaaarrmaamrmaaaraaaaaaaaaaaaaag

SEQ ID NO: 493 - DNA, 632 bp, Canis familiaris
tatgtacaaagtctacgatacggatagtcttgtgatcgtatcagaagtattttcttgcaggcttcttctgagccttttaccmactccgcctagcccctactcctgaacttgggggttsytgacctcctaccggcattattcctcktkraccccttagaagtgcctctactcaacacctcagtcctcctagcctccggagtatctatttacttgagcccatcatagtttaatagaaggtaatcsccaacatatatcttcaagccttattcatgtacratctccttaggcgtatattttacgctattacaggcctccgaatactatgagacatcttttacmatctccgatggggtatacggatctaccttttttatagccacctggatttcacggattacacgtaattattggctctacmttcctcatcgtgtgcttcctccgacagctatactaccvcttcacatcmaaccccmccttcggatttgaagccgctgcatgatattgacmctttgttgatgtagtctggctattyttgtatgtatctatttattgatgaggatcctaaaaaaaaaaamaacaaaaaamaaaaaaaaaaaaaaaaaaaaaaaaaaaaaaaaaaaaaaaaaaaaaaa

SEQ ID NO: 494 - DNA, 793 bp, Canis familiaris
ggtatccgtctcatgtcgcccgcccgtccgttacggcgttgcccctatactcggtctatctaggttcctatactcgtgcctacctaccttggattccgccacttggtacctatacctgtgttgccgagatgtgatccgagaagccaccttccagggactcatacccctagtgtccatgaggtcgttcgatcggatagttcttttttatcgtatcaagaagtatttttctttgcagcttcttctgaccttttaccactgccagcctagcccctactcctgaacttggggktyctgacctcctaccggcattattcctcttaacccmttagaagtgcctctactckracacctcagtcctcctagcctccggagtatctattacttgagcccatcatagtttaatagaaggtaatcgchaacatatacttcaagccttattcattacmatctccttaggcgtatattttacgctattacaggcctccgaatactatgagacatcttttaccatctccgatggggtatacggatctaccttttttatagccamctggatttcacggattacacgtaattattggctctacattcctcatcgtgtgcttcctccgacagctatactaccmcmttcacatcmaaccmccaccttcggatttgaagccgctgcatgatattgaccctttgttgatgtagtctggctattcttgtatgtatctatttattgatgaggatcctaaaaaaaaaaaaaawaaaaaaaaaaaaaaaaaaaaawaaaaaaaaaaaaaaaaaaaaa

SEQ ID NO: 495 - DNA, 661 bp, Canis familiaris
tcattgttctctaaatagggacttgtatgaatggccacacgarggtttaactgtctcttactcccaatcagtgaaattgaccttcccgtgaagaggcgggaataccacaataagacgagaagaccctatggagctttaattaactracccawacttatggatactagatacctacaaggcataacataacaccattattatgagttagcaatttaggttggggtgacctcggaatatdaaaaaactcccgagtgattaaaatttagacccacaagtcwaaatacaacatcacttattgatccaataatttttgatcaacggaacaagttaccctagggataacagcgcaatcctattcaagagtccatatcgacaatagggtttacgacctcgatgttggatcaggacatcctaatggtgcagcagctattaagggttcgtttgttcaacgattaaagtcctacgtgatctgagttcagaccggagtaatccaggtcggtttctatctattatacaacctcccccagtacgaaaggacaagggatgtaaggcctacctcacagaggcgccttaaaactaatagatgaagtcaactcatctaaccgtttatctcctcataagcccgagaaaaggggctttaaaaaaaaaaaaaaaaaaaaaa

SEQ ID NO: 496 - DNA, 697 bp, Canis familiaris
acccatataccacgtgatgacgaggatgtgatctcgagaaggcacaattctcaaggacatcataacccctattgtacagaaaagggactacgatacggataggttcttttgtatcgtatcagaaagtatttgtctttgcaggcttcttctggagccttttaccactccagcctagsccyctactcctgwacttgggggttgctgrcctcctaccggcattattcctcttgracccattagaagtgcctcttactctaacacctcagtcctcctagcctccggagtatctattacttgagcccatcatagtttaatagaaggtaatcgcaaacatatacttcaagccttattcattacaatctccttaggcgtatattttacgctattacaggcctccgaatactatgagacatcttttacaatctccgatggggtrtacggatctaccttttttatagccactggattycacggattacacgtaattattggctctacattcctcatcgtgtgcttcctccgacagctatactaccacttcacatcaaaccaccacttcggatttgaagccgctgcatgatattgacactttgttgatgtagtctggctattcttgtatgtatctatttattgatgaggatcctaaaaaaaaaaaaaaaaaaaaaaaaaraaaaaagagaaaaaaaaaaaaaaaaaa

SEQ ID NO: 497 - DNA, 450 bp, Canis familiaris
ccgggcwssaggaatwcrkcacgasctgatttattataatcttttcaatatttctcaccctcttcatcctatttcaactaaaaatttcaaatcactactacccagaaaacccgataaccaaatctgctaaaattgctggtcaacataatccttgagaaaacaaatgaacgaaaatctattcgcttctttcgctgccccctcaataataggtctccctattgtggtactgatcgtcatattcccttccattttattcccaacacccagtcgcctaatcaataatcggttaatctccattcagcaatgactaattctatttattggctcaactaatctacttggactattacctcactcatttacgcccacaacacaactctctataaacctcggaatagcaatccccctatgagcagggacagtaattaccggtttccgctataaaaccaa

SEQ ID NO: 498 - DNA, 718 bp, Canis familiaris
gacacatttcgcagggacatcattaccccctcagttgttaaccacaaaggacttactgatactggaatagtttctttttgtaatcgtattcagaaggtatttttttctttgcaggcgtttctttctgagccctttgtaccaacatcgcagccctagccccctacgtccctgaaccttggggggtttcttgacgctcgctaccggcacttatgtcgctcttttgtacgccctttaatgaaagtgcctctatctcgcacaccgctcacgtgcctccttatgccttctcggaagtgaaatttaagtaacttgaagccccattcaataaggtttaaataaggaaggttaattcctccaaacaataataactttccaagcccttaatttccattgaccaattctcccttaagggccggataattttgacgcctattacaggcctccgaatactatgagacatcttttacmatctccgatggggtrtacggatctaccttttttatagccactggatttcacggattacacgtaattattggctctacattcctcatcgtgtgcttcctccgacagctatactaccacttcacatcraaccaccacttcggatttgaagccgctgcatgatattgacactttgttgatgtagtctggctattcttgtatgtatctatttattgatgaggatcctaaaaaaaaaaaaaaaaaaaaaaaaaaaaaa

SEQ ID NO: 499 - DNA, 1042 bp, Canis familiaris
tacaaaaagtactacgatacggtaattagttcttttttatcgtattcagaaggtattttgtcttgcaggcttctttctgagccctttaccacttccagcctagcccctatctccctgaacttgggggttkctgacctcctacccggcattaktcctctkracccmtttagaagtgcctctactctacacctcatgtcctcctagcctccggagtatctattacttgagcccatcatagtttaatagaaggtaatcgcwwacatatacttcaagcctgtattgcattgacmatctccttaggcgtgatattgttacgctattacaggcctccgaatactatgagacatcttttacaatctccgatggggtatacggatctaccttttttatagccatctggatttcacggattacacgtaattattggctctacattcctcatcgtgtgcttcctccgacagctatactaccayttcacatcaaccaccacttcggatttgaagccgctgcatgatattgacactttgttgatgtagtctggctattcttgtatgtatctatttattgatgaggatcctawwtctttagtataactagtaccattgacttccaatcagttagctccagatcaacctggaaagaagtaataaacgttatattaactttgataactaatgtaaccctagcatccttacttgtactaatcgcattctgacttccccagctaaatatctatacagacaagacaagcccctacgaatgtggttttgaccccatgggatctgctcgcctacctttctctataaaatttttcctagttgccatcacatttctgcttttcgacctagaaattgcactcctactcccacttccctgagcgtcacaaaccaacaagctaacaacaatacttatcatagcactcctactaatctccctcctagctgcgagcctagcgtatgaatggaccgaaaagggactagaatgaaccgaataaaaaaaaaaaaaccaaaaaaaaaaaaaaaaaaaaaaaaaaaaaaaaagg

SEQ ID NO: 500 - DNA, 627 bp, Canis familiaris
tcttcgattctgtatagttctttgtatcgtatctgaagtatgtgttctttgcaagcgttcttctgagccttgttacacactccagcctagcccctatctcctgacttgtgggttttgctgacctcctkaccggcatgtagttcctcktgaaccccttagaagtgcctctastcracacctcagtcctcctagcctccggagtatctattacttgagccccatcatagtttaatagaaggtaatccscwacawatacttcmasccttattcmtgtaccatctccttaggcgtatattttacgctattacaggcctccgaatactatgagacatcttttacmatctccgatggggtatacggatctacctctttttatagcccctggatttcmcggattacacgtaattattggctctacattcctcatcgtgtgcttcctccgacagctatactaccccttcacatcaaaccmccmccttcggatttgaagccgctgcatgatattgacmctttgttgatgtagtctggctattyttgtatgtatctatttattgatgaggatccctaaaaaaaaaaaaaaaaaaaaaaaaaaaaaaaawaaaaaaaaaaawaaaaaaaaaaaaaaaa

SEQ ID NO: 501 - DNA, 730 bp, Canis familiaris
tacacgtagccgggttaaacaaggtatttgtcctaacgtaaatgtcgtccttaagacatccgtttcttcatgatacatattaagttgtagctcatttttcactatgtgcttttgcaattaggagcagttttttgccatttactgggaggacatttgacccacctcgattcgcctttcattcttcaggttaagacttctttaacgataacattagatgtccagacgattgcactcttcacaatctaaatgttattgttgggaggtaaattataaactatttctttcctctcctacattcattctagtgagtgttattcatggagagtaaccatccttcggtatgatcttctgtcatgtaaccaccacgcaggacgatcatattaactcaccgctgaatatcaccccgcttctcttcttataatagagtactccgttatattctcgcttaacacgcggtaagtgctatataatttttagtgatttggraaccctttgcatccaaaccgagaagttgctatagtagaacttactacaactaacattgagtgactacatggatgtccccctccataccacacgttcgaagaacctacayatgtgatccaaaaataagaaaggaaggaatcgaaccccctaaaattggtttcaagccaatgtcataaccattatgtctttctcaatcagaaaaaaaaaaaaaaaaaaaaaaaaaaaaaaaaaaaaaaaaaaaaaa

SEQ ID NO: 502 - DNA, 619 bp, Canis familiaris
  misc_feature (560)..(560): n comprises a, c, g, or t, or includes no nucleotide
  misc_feature (578)..(578): n comprises a, c, g, or t, or includes no nucleotide
  misc_feature (588)..(588): n comprises a, c, g, or t, or includes no nucleotide
tcctccctaatataccgggttcactttaccactatcgcacgtctaatgtattaacccccaggaccatatgatgattaatctttccgggcctgacccctagccatgatatgattcatctctaccctagcagaaactaatcgagcccccttcgacttaactgaaggagaatccgaactagtctctggatttaacgtagagtatgcagcaggtcctttcgccctattctttctagcagagtacgcaaatattatyataataaacatcctcacaacrattctgttcttcggcgcattccacaacccattcataccagaactctactctattaacttcactataaaaaccctcttattaaccatctgcttcctatgaattcgagcatcataccctcgattccgctacgatcagttaatacacttattatgaaaaaattttctacccttaactttagccctatgcatatgacatgttgccttacccattatcaccgcaagkatyccccccaaacataaaaaaaaaaaaaaaaagggggggcggttttaaggatccaagtttacttncccgggctgggagggaanagttttttanggggccctaaattaattactgggcggggttt

SEQ ID NO: 503 - DNA, 1021 bp, Canis familiaris
  misc_feature (376)..(376): n comprises a, c, g, or t, or includes no nucleotide
  misc_feature (509)..(509): n comprises a, c, g, or t, or includes no nucleotide
atgttctttatcaacattatctctcttattatcccaatccttcttgccgtagccttcctcaccctcgttgaacgaaaagtcttaggctatatacaacttcgaaaaggacctaatattgtaggcccctacggcctccttcaaccaatcgcagacgcagtaaaactcttcacaaaagaacctctacgaccacttacatcctctatatcaatattcatcctagcccccattctagctctatcactagccctaactatgtgaagtccsctcccrataccytacccactcattawtataaacttgggagtccwaytcatactagcwatatcaarcytcbccgtgtactccatcctctgatcaggatgarcctcddactccndwtacgycytwatsggagcccttygascagtagctchmmmvwtstcahakgaagtaacgctagcmrtwaktctyctatcagtcctcctdataaamsggtcatttacackatccacgctaattattmccchrgnmcatatatgaytratytttccggcctgacccctasccmtgatakgattcatctctaccctasmmgaaactmatcgagcccccttcgacttwactgaaggagaatccgdactrgtctctggatttaacgtagagtatgcagcaggtcctttygccctattcttkctagcagagtacgcmaatattatyatmataaacatcctcacvacmrttctrttcttcggcgcattccacaacccaytcataccmgractctactctattamctycactatmraamccctcttattaaccatctgcttcctatgaattcgagcatcataccctcgattccgctacgatcmrttaatacacttattatgaaaaaattttctacccttaactttagccctatgcatatgacatgttbccttacccmttatcmccgcmagtatcccmccccmracawaaaaaaaaraaarrmaaammharaaraaamvraaaaaaaaaraaaarrarraaaaaaaaaaaaaaa

SEQ ID NO: 504 - DNA, 559 bp, Canis familiaris
tgctcggggccgggttgacgggcatcagagccgggaggccttcaggtttctcgggccctggcgctgccccagaggcctgccagggcggtggccgctgcttgggctgagcggtggaggcctcactggcccggctgtctccccgcagaggatttcgtgtaccagtttaagkkcgagtgctatttcaccaacgggacggagcgggtgcggcttctgrckarabacatctataaccgggaggagttcgtgcgcttcgacagcgacgtgggggagtaccgggcggtcacggagctcgggcggcccgacgctgagtactggaaccsrcagaaggacgagatggaccgggtrcgggccgagstggacacggtgtgcagacacaactacgggrkggaagagctcwmcacgttgcagcggcgaggtgagcgcaccctcctcgcccccgcgggctccccacccaggtcccctcgcgggacccggcccaggtgggcacagggaggcagggcgcgtccccagcgaggggccagagctgggggactgagcccggccctctgccttctcagca

SEQ ID NO: 505 - DNA, 634 bp, Canis familiaris
gctctggtagtaactttctcccagcgttcaggctcaaacttcacaagctttctcccaagcattcacccctgggagtgttttgagacttttcgtcataaatgaggscagtacattcctgttttgctccgaagtattcagtwmccgctcagtattttaaatgaaatgattctcacttgtgatttggtttgggatcmcatagggaagcacaggcaccwaccvacatatacamatgtattgaaatgattttctcagaatttgaagtaggaaagttacccvracacttctgcttccacttaactggcctgcmatattgtaagaatggcatatccttgttactgtgatatktwraaatatccacagtgtccaccttttccmaaagattctagtaatgatctagaaatatctttctcttatctgttatttatcmatttttcccagtatttttatatggaaaaaattgtattgaagacatttagtatgcagttgataagaggaatttggtataattatggttggtgattattttttatactgtatgtgccmaagctttactactgtggaaagacaactgtttaataaaagatttacattccacmamwwrwaawaaaaaaaaaaaaaaaaamaaaaaaaaaag

SEQ ID NO: 506 - DNA, 1040 bp, Canis familiaris
  misc_feature (816)..(816): n comprises a, c, g, or t, or includes no nucleotide
  misc_feature (870)..(870): n comprises a, c, g, or t, or includes no nucleotide
ggacgcgtgcttgatcccctgaccaatttcatagcatacccccgtcatgatagtatctctatgaggcataatcataaccagctctatctgtctccgtcaaccagatctgaaatccctaattgcatactcctcagttagtcatatggcactggttatcgtacggtttcttattccagcaccatgaagttatataggtgcaacagctctataattgcccatggtttaacatcctcatattattctgcttagccaactccgattacggacgaatccatagccgtactatgattctcgcacgaggacttcagaccctccttcccctaatagcagcctgatgactattagcaagcctcacaaatctggctctccctccaacaattaatcttatcggagaactatttgtagtgatatcctcattctcatgatccaacattactattatcctaataggaattaacattaccatcaccgccctatactcactttatatattaatcaccacacaacgtggtaaatattcccaccatatcaaaaatatcaaaccatcattcacacgagaaaatgccctaatgaccttgcacctactgcccctactcctcctatcccttaaccctaaaattattctcggtcccmtctamwrwaarmatagtttaacaaaaacattagatcgtgagtctaacaataaaagctcaaacctttttgcttaccgaaaaagtactgcaagaactgctaattcatgctcccatgcataagaacatggctttttcaacttttataggatagaagtaatccgttggtcttaggaaccaaaaaatnggtgcaactccagataaaagtaataaatatattttcttcatgcataatcacagncctagttattcttacttgtgcccatcattatatcctctaactaaactttacaagaataagctataccatactatgtaaaaaccgttacttcttacgcgttcataattaagaataattcccacaataatattcatctactccggacaggaattatatttcaaactggctgg

SEQ ID NO: 507 - DNA, 1040 bp, Canis familiaris
  misc_feature (171)..(171): n comprises a, c, g, or t, or includes no nucleotide
  misc_feature (225)..(225): n comprises a, c, g, or t, or includes no nucleotide
ccagccagtttgaaatataattcctgtccggagtagatgaatattattgtgggaattattcttaattatgaacgcgtaagaagtaacggtttttacatagtatggtatagcttattcttgtaaagtttagttagaggatataatgatgggcacaagtaagaataactaggnctgtgattatgcatgaagaaaatatatttattacttttatctggagttgcaccnattttttggttcctaagaccaacggattacttctatcctataaaagttgaaaaagccatgttcttatgcatgggagcatgaattagcagttcttgcagtactttttcggtaagcaaaaaggtttgagcttttattgttagactcacgatctaatgtttttgttaaactatkyttwywktagakgggaccgagaataattttagggttaagggataggaggagtaggggcagtaggtgcaaggtcattagggcattttctcgtgtgaatgatggtttgatatttttgatatggtgggaatatttaccacgttgtgtggtgattaatatataaagtgagtatagggcggtgatggtaatgttaattcctattaggataatagtaatgttggatcatgagaatgaggatatcactacaaatagttctccgataagattaattgttggagggagagccagatttgtgaggcttgctaatagtcatcaggctgctattaggggaaggagggtctgaagtcctcgtgcgagaatcatagtacggctatggattcgtccgtaatcggagttggctaagcagaataatatgaggatgttaaaccatgggcaattatagagctgttgcacctatataacttcatggtgctggaataagaaaccgtacgataaccagtgccatatgactaactgaggagtatgcaattagggatttcagatctggttgacggagacagatagagctggttatgattatgcctcatagagatactatcatgacgggggtatgctatgaaattggtcaggggatcaagcacgcgtcc

SEQ ID NO: 508 - DNA, 668 bp, Canis familiaris
caaatattaaatgatctccagcttatgctatgagctttagggtttattttgcttatttacagtaggcgggttaacaggtattgtcctagctaattcgtccttagacatcgttcttcatgaatacatattatgttgtggctcattttcactatgtgctttcaataggagcagtttttgccattataggaggatttgcccactgattccctttattctcaggttatactcttaacgatacttgagcaaagattcactttgacaattatgtttgtgggagtaaatatgaactttcgttccctcaacatttcctaggtttatctgsaatacctcgtcratactctgactacccagatgcatatactacctgaaataccgtctcctctataggatcgtttatctcgcttacagcggtgatgcttataatttttatgatctgrgaagcctttgcatccaaacgagaagttgctatagtagaacttactacaactaacawtgagtgactacatggatgtccccctccataccacacrttcgaagaacctacatatgtratccaaaaataagaaaggaaggaatcgaaccccctaaaattggtttcaagccaatgtcataaccatkatgtctttctcaatcagaaaaaaaaaaaaaaaaaaactcgaggggggaag

SEQ ID NO: 509 - DNA, 537 bp, Canis familiaris
agccgcaatacccatagcctcttcactaaaatccagagtccccccgtatcatagatcackcaatccccgagtgtccaggtgaaacgttgtaagagctacctccacctcrtcatccttcagaaatatagcaagcagtcaacaattcagacaacaaaccagtaataaaagccgctagaacagccttatttgaaactcacacctcagggtattgctcagtagccatagcagttgtataaccaaatactactaatataccccccaaataaattaaaaatactatcaaccctaaaaaagwacccccgaaaattcagaacaatcgcacaaccaatcccaccgctaataattagcacaagcccaccataaataggagatggtttagtggcaaaacccacaaaactcatcacaaaaacgatacttaaaataaatacaatgtatgttatcattattcctacatggaatttaaccatgactaatgacatgaaaaatcatcgttgtatttcaactataagaacattaaaaaaaaaaaaaaaaaaaaaa

SEQ ID NO: 510 - DNA, 716 bp, Canis familiaris
aaccgacctgttgaccaatatacccagtgatgacgagatggtgatccgagaaaggcacattccaaggacatcataccccctatttgttacaaaaaaggactatcgatatcggaatagttctttttatcgtatcagaagtatttttctttgcaggcktcttctgagccttkttaccactccagcctagcccctagctcctgaacttgggggttgctgrcctcctaccggcaktattcctcttaacccatttagaagtgccttstaactcgaacacctgcagtcctcctagcctccggagtatctacttacttgagcccatcatagtttaatagaaggtaatcgcmaacatatactgtcaagccttattcagttacaatctccttaggcgtatattttacgctattacaggccttccgaatactatgagacatcttttagcaatctccgatggggtrtacggatctaccttttttatagccactggattycacggattacacgtaattattggctctacattcctcatcgtgtgcttcctccgacagctatactaccacttcacatcaaaccaccacttcggatttgaagccgctgcatgatattgacactttgttgatgtagtctggcgtattcttgtatgtatctatttattgatgaggatcctaaaaaaaaaaaaaaaaaaaaaaaaaaaaaaaaaaaaaaaaaaaaaaaaaaaa

SEQ ID NO: 511 - DNA, 804 bp, Canis familiaris
acccgtcaggaagtcacatcagactcagaccaagttgccatgtgtcaccctgtagctacacacatcaaggatatcctaggagccttgacgtcctactccgtgatcgctgatatcactagttttattttcacggtgacgtagctaggagacccagataactacactccctgcaaaccgccctgaaacacccctcgcacatattagaacctgagtgatattttctagttcgccgtatgctatcgctacgatccattcctaataaattaggaggtgtactcgccctagtattctccatcctaatcttggcattcattccactcctccacacatctaagcaacgcagcataatatgtccggccccttagccratgcctattctgacttttagtcgccgatcttctcactttaacatgaattggaggacaaccagttgaacaccctttcatcattatcggacaagtcgcttcaatcttatatttcaccatcttattgatcctaataccmacagttagcgttatcgaaaacaaccttctaaaatgaagarwmwwwrwagtataatcattaccttggtcttgtaaacccaaaatggagagtaaccgccctccctaagactcaaggaagaagctcttgctccaccatcagcaccccaagctgaaattcttcttaaactattccctgacacccctacattcatatattgaatcacccctactgtgctatgtcagtatctccaggtaaacccttcttccctcccctatgtacgaaaaaaaaaaaaaaaaaaaaaaaaaaaaaaaaaaaaaaaaa

SEQ ID NO: 512 - DNA, 501 bp, Canis familiaris
ttgctgttgcctaattcaagcctatgtttttaccttactagtgagtctatacttacatgactacaccttttgacccaccatactcacgcttascacrwrgtcaacccaagcccatgaccgctgacaggggccctttctgccctccttattaacatcgggtcttatcatatgatttcactataactcaatagccctacttacattaggatgtgsrsrrccaacctgttwaccatataccagtgatgacgagatgtgatccgagaaggcacattccaaggacatcatacccctattgtacaaaaaggactacgatacggaatagttctttttatcgtatcagaagtatttttctttgcaggcttcttctgagccttttaccactccagcctagcccctactcctgaacttgggggttgctgacctcctaccggcattattcctcttaacccattagaagtgcctctactctaacaaaaaaaaaaaaaaaaaaaaaaaaaaaaa

SEQ ID NO: 513 - DNA, 630 bp, Canis familiaris
atttcactaatattgactacaaattaacccatacaagcmcatagacgcacaagaagtggaaacacgtatgaaccattctacccgccattattctctaatcctwattcgctctaccttccctccgaatcctttatataatggacgaaattaataacccctctttaaccgtgaaaaccataggccacccmatgatactgaagctatgaatatactgactatgaagacttaaactttgactcctacataatccccaacacaagaattaaagccaggagaactccgactattagaagtagacaaccgagttgtcctccccatagaaataaccatccgaatacttatctcttcagaagacgttttgcattcatgagccgtcccatcactaggtctaaaaactgacgctattccaggacgactaaacccaaccacccttatagccatacgaccaggactgtactatggccagtgctctgaaatctgcggatctaaccacagctttatacccmttgttcttgaaatagtccccctatcttactttgagacctgatctgccttaatagtataacctagactagatctactaaaaaaaaaaaaaaaaaaaaaaaaaaaaaaaaaaaaaaaaaaaaaaaa

SEQ ID NO: 514 - DNA, 624 bp, Canis familiaris
atcatttcagcgtaatagtcgacgtacgagaattgacccatacaagcatctatagacgcacaagaagtggaacagtgatgaaccattgtacccgccattatcctaatcctagatcgctctaccttccctccgaatcctttatataagtggacgaaatttatgaccccgcgtttaaccgtggaaacaataggccaccaatgatactgaagctatgaatatactgagctatgaagagcttaaactttgactcgtacataatcccaacacatagaattgaagccaggagaactccgactattagaagtagacaaccgagttgtcctcccagatagaaataaccatccgaatacttatctcttcagaagacgttttgcattcatgagccgttccatcactaggtctaaaaactgacgctattccaggacgactaaaccaaaccacccttatagccayacgaccaggactgtactatggccagtgctctgaaatctgcggatctaaccacagctttatacccattgttcttgaaatagtccccctatcttactttgagacctgatctgccttaatagtataacctagactagatctactaaaaaaaaaaraaawraaaaaagaaaaaaa

SEQ ID NO: 515 - DNA, 695 bp, Canis familiaris
ggcacacttcatgaggcatattaaatgatctccagctatgctatgaccttaggtatattctcttatttacacgtagcgggttaacaggtatgtcctagctaattcgtcctkagacatcgttcttcatgaracatattatgttgtrgctcacttttcactatgtgctttcacataggacmgtttttgccacttatrggaggatttgccccctgattccccttattctcaggttatactcttaacgatacttgagccaagattcactttacmattatgtttgtgggagtaaatataactttcttccctcaacatttcctaggtttatctggaatacctcgtcgatactctgactacccagatgcatatactacctgaaataccgtctcctctataggatcgtttatctcgcttacagcggtgatgcttataatttttatgatytgggaagcctttgcatcccaacgagaagttgctatagtagaacttactacaactaacacttgagtgactacatggatgtccccctccataccacacgttcgaagaacctacatatgtgatcccaaaataagaaaggaaggaatcgaaccccctaaaattggtttcaagcccaatgtcataacccattatgtctttctcayatcagaaaaaaaaaaaaaaaaaaaaaaaaaaaaaaaaaaaaaaaaaaaaaaaaa

SEQ ID NO: 516 - DNA, 687 bp, Canis familiaris
taagccctttgctctggagtaacttcttccagctttcagctcaactcacagcttctccaagcatcaccctggggagtgttttgagacttttcgtcatcaatgagggcagctacattcccgtttttgctccgcaagtagttcagtaccgctcagtatatttataatgataactgattctcacatgtgtgatattggtttgggatccaatatggggaagacacacggcgaccccacccacactatacccatgtgatatgagaaatgagtattttctcacgggatttgtagagtatgggaagtgtacgcccaacacactcttctggcttccacacttttaactgggcccctggccataattggtaaaggaatgggcaaaatccttggttaactgttgtataatttttaaaataatccacagtgtccaccttgttccaaaagattctagtaatgatctagaaatatctttctcttatctgttatttatcaatttttcccagtatttttatatggaaaaaattgtattgaagacatttagtatgcagttgataagaggaatttggtataaktatggttggtgattattttttatactgtatgtgccaaagctttactactgtggaaagacaactgtttaataaaagatttacattccamaaaaaaaaaaaaaaaaaaaaaaaaaaaaaaaaa

SEQ ID NO: 517 - DNA, 743 bp, Canis familiaris
  misc_feature (355)..(355): n comprises a, c, g, or t, or includes no nucleotide
actcgatatccctacttacattaggattcacaccacctgtaaymataymcmratgatgrcgagatgkkgatccgagaagbcacatkccaaggacatcataccccywdkgtacmmdaargdytwcgatdcggdatagktctytkkatcgtatcagaagkwttkttctktgcagsyttcttytgagcctkbtwmmrctccagcstwgcccctrctcctgracttgkgggttbmtgrcctcytaccggcatkattcctckkdacccmttagawgtgcytctactcdacacctcagtcctcytagcctccggagtatctaktacttgagcccmtcatagttdaatagaaggtaatcgcnwmyatatacttcrrgcctkaktcattacmatctccttaggcgtatrttttacgctattacagscctccgratactatgagacatctkttdcvawctccgatggggtrtayggatctaccyttkktatagccmmctggattycacggattacacgtaattattggctctacattcctcatcgtgtgcttcctccgacagctatactaccmcttcacatcaaaccmccmcttcggrtttgaagccgctgcatgatattgacmctttgttgatgtagtctggctattyttgtatgtatctatttattgatgaggatcytmhaaaaaaarwaaaaaaaraaaamaaaaaaawaaaamaaaaaaaaaaaaaaaaaaaaaaaaaaaaaaaaaaa

SEQ ID NO: 518 - DNA, 683 bp, Canis familiaris
tgtcgtgtctaagcccttgctctgggaggtaacttctccagcttcagctcaactcacagcttctccaagcatcagccctgggagtgttttgagacttttctcataaatgagggcagtacattcctgttttgctccgaagtattcagtaccgctcagtattttaaatgaaatgattctcacttgtgatttggtttgggatccatagggaagcacaggcacccacccacatataccatgtattgaaatgattttctcagaatttgaagtaggaaagttaccccaacacttctgcttccacttaactggcctgcaatattgtaagaatggcatataccttgtgtactgtgagtatttataaatattccaccccgtggccacccctttcccaaagagatttctaggtaaggttctaggaaataattcctttcttccttaattccggtaatttaatccaagtgttgtccccagtatttttatatggaaaaaattgtattgaagacactttagtatgcacgttgataagaggractttggtataattatggttggtgattattttttatactgtatgtgcccaagctttactactgtggaaagacaactgtttaataaaagatttacattccacmamwwraaaaaaaaaaaaaaaaaaaaaaaaaaaaaaaaaaaaaaaaaaaaaaaaa

SEQ ID NO: 519 - DNA, 748 bp, Canis familiaris
tcaagattcacataactcggtatccctacttcattagattcacaaccaacctggtaaccatatacccgtgatggcgagatgtgatccgagaaggcacatttccraggacatcatacccctaktktrbacvavaaggrytwcgatmcggvatagktctkkttatcgtatcaraagtawbyttctttgcaggcttyttckgasccykkkaccactccagcctagcccctactcytgdacttgsgggttdctgrcctcstaccggcrktawtcctskdracccmttagaagtgcctytactcdacacckcagtcctcctagcctccggagtatctattacttgagcccatcatagtttaatagaaggtaatcgcvrrcatatacttcaagccttattcaktacmatctccttaggcgtatattttacgctattacaggcctccgaatactatgagacatcttttacvatctccgatggggtdtmyggatctmccttttttatagccactggattycmcggattacacgtaattattggctctacattcctcatcgtgtgcttcctccgacagctatactaccacttcacatcaaaccmccacttcggatttgaagccgctgcatgatattgacmctttgttgatgtagtctggctattcttgtatgtatctatttattgatgaggatmmwmaaawamamaaaaaaaaaaaaaaaawaawawaaaaaawaaaaaaaaamaaaaaaaaaaaaa

SEQ ID NO: 520 - DNA, 457 bp, Canis familiaris
ccgggctgcaggaattcggcacgrvbryrmrdssasvdgmwbbabkrbamkmktttcaatatttctcaccctcttcatcctwttkcaactaaaaatttcaaatcactactacccakwaaaccckwtwaccaaakstgckrrrrktgstggksaacataatccttgagaaaacaaatgaacgaaaatctattcgcttctttcgctgccccctcaataataggtctccctattgkggtactgatcgtcatattcccttccattttattcccaacacccagtcgcctaatcaataatcggytaatctccattcagcaatgactaattcaactaacatcaaaacaaatactagcaattcataaccaaaarggacgaacctgagctctcatacttatatcactaattctatttattggctcaactaatctacttggamtattacctcactcatttacgccca

SEQ ID NO: 521 - DNA, 766 bp, Canis familiaris
ttacgtccgcccctataattatcgctattccaacgggagtaaaagtatttagttgactggcaaacaccaaacttcatggagscmaatattaartgatctccagctatgctawgagctttavggtttattttyytdattyacvstagsbgggttawcmggtatkgtcstasctaaktcgtccytagacatcgttcttcatgawacatawtatgttgtrgcycatkttcactatgtgcttycmataggascvstttttgccmttatrggaggatttgcccmctgattccybttaktctcaggytatactcttmacgatacttgagcmaagattcactttacmattatgtttgtgggagtaaatataactttcttccctcracatktcctaggtttatctggratacctcgtcgatactctgactaccsagatgcatatactacctgaaataccgtctccwctataggatcgtttatctcgcttacagcrgtgatgcttataatttktatgatytgggaagcctttgcatccmaacgagmmgttgctatagtagaacttactacaactaacmtkgagtgactacatggatgtccccctccataccacacgttygaagaacctacayatgtkatccmaaaataagaaaggaaggaatcgaaccccctaaaattggtttcaagccmwygtcataaccmttatgtctttytcmatcarwaraaaaaaaaaaaaaamaaaaaaaaaaaaaaawaaaaaaaaaaaaaaaaaaaa

SEQ ID NO: 522 - DNA, 767 bp, Canis familiaris
acttacgtccgccactatattatcgctaatccaacgggagtaaaagtatttagttgactggcaacacttcatggaggcaatattaaatggatctccagcctatgctwwtgagctytaggstttawtttcktabtwacmgtagkcgggttaamaggtatkgtcctagctrattcgtccytagacatcgttcttcatgatacatattatgttgtrgcycattttcactatgtgctttcmataggascmkkttttgccmttatrggaggatttgcccmctgattcccbktattctcaggytatactcttwacgatacttgagcmaagattcactttacmattatgtttgtgggagtaaatataactttcttccctcracatttcctaggtttatctggaatacctcgtcgatactctgactacccagatgcatatactacctgaaataccgtctccwctawaggatcgtttatctcgcttacagcrgtgatgcttataatttttatgatytgrgaagcctttgcatccmaacgagaasttgctatagtagaacttactacaactaacmttgagtgactacatggatgtccccctccataccacacrttygaagaacctacatatgtratccmaaaataagaaaggaaggaatcgaaccccctaaaattggtttcaagccmatgtcatarscmttatgkctttytcmatcagaaaaaaaaaaaaaaaaamhhvdrvvdwrmaaaaaaaaawaaaaaawaaaaaaaaaaaaa

SEQ ID NO: 523 - DNA, 703 bp, Canis familiaris
gattctgagcgctttctcagtgggacaaagcaaccctacacgattctktgcatycmatktcatccyccckkkkcatcatcgcagctytagcvatagtacacctcctatttctacacgaaaccgkatccrrcaacccttcaggratcacatcagactcaracaaattccatktcacccktactacacmmtcaaggatatcsyasgagccttactcstactcctaatcctratatcactagttttatkktcacctgacctaytaggagacccmgatwactacacccctgcdrmccccmtdhacaccccyccacatattawacctgagtgatattttctattcgcctatgctatcctacgatccmttcctaataaattaggaggtgtactcgccctagtattctccatcctaatcttggcattcattccactyctccacacatctaagcaacgcagcataatattccggccccttagccmatgcctattctgacttttagtcgccgatcttctcactttaacatgaattggaggacaaccagttgarcaccctttcatcattatcggacmagtcgcttcaatcttatatttcaccatcttattgatcctaataccmmcagttagcgttatcgaaaacmaccttctaaaatgaarammaaraaaaaaaaaaaaaaaraaaaaaaarrmrrmmaaaaaaaaaaaaaaa

SEQ ID NO: 524 - DNA, 267 bp, Canis familiaris
gatttcgtgtwccagtttaagttcgagtgctatttcaccaacgggacggagcgggtgcggcttctggcgagagacatctataaccgggaggagywcgtgcgcttcgacagcgacgtgggggagtaccgggcggtcacggagctcgggcggccsgacgctgagtactggaacsggcagaaggagctcttggagcagaggcgggccgmgstggacacggtgtgcagacacaactacgggttggaagagctctacacgttgcagcggcga

SEQ ID NO: 525 - DNA, 630 bp, Canis familiaris
cttctccagcttcagctcaactcacagcttctccaagcatcacctgggagtgttttgagacttttctcataaatgagggccgtacattcctgttttgctccgaagtattcagtaccgctcagtattttaaatgaaatgattctcacttgtgatttggtttgggatccatagggaagcacaggcacctaccctacatataccatgtattgaaatgattttctcagaatttgaagtaggaaagttaccccaacacttctgcttccacttaactggcctgccatattgtaagaatggcatatccttgttactgtgatatttataaatatccacacgtgtccacccttttcccaaagattytagtaatgatctagaaatatctttctcttatctgttatttatccatttttcccacgtatttttatatggaaaaaattgtattgaagacactttagtatgcacgttgataagaggaatttggtataattatggttggtgattattttttatactgtatgtgcccaagctttactactgtggaaagaccactgtttaataaaagatttacattcccaccaaaaaaaaaaaaaaaaaaaaaaaaaaaaaaaaaaaaaaaaaaaaaaaaaaaaaagc

SEQ ID NO: 526 - DNA, 1165 bp, Canis familiaris
cgactgctcccctgcaccctgtcctttctgttttccagcatggtgtgtctgtgttttcttggaggctcctggatgacagctctgatgctgatactgatggtgctgaaccctcccttcgcttgggccagggacaccccaccacatttcktgkasvwgkywaagbccgagtgcyatttcaccaacgggacggagcgggtgcggttcgtggaaagatacatccataaccgggaggagwwcgtgcgcttcgacagcgacgtgggggagtwccgggcggtcacggagctcgggcggcscgwcgctgagtmctggaacsggcagaaggagmtcttggagcrgragcsggcmrmggtggacacskwstgcagacacaactacggggtgattgagagcttcacggtgcagcggcgagtcgagcctacagtgactgtgtatcctacgaagactcagaccttgcagcatcacaacctcctggtctgctctgtgaatggtttctatccaggccacattgaagtcaggtggctccggaatggccaggaagaggaagctggggttgtgtccacaggcctaatccgtaatggagactggaccttccagatcctggtgatgctggagatagttcctcagagcggagaggtctacacctgccaagtggagcacccaagtttgacaagccctgtcaccgtggaatggagggcacagtctgattctgcacagagcaagatgctgagtggaatcgggggctttgtcctgggtctgctcttccttgcagtggggctgttcatctacttcagaaatcagaagggacactctggacttcagccaacaggactcctgagctgaagtggagatggtgaccctcaagaaaaaaccttcctttccagcttcttctcagagtccaaaggtttccagcttggctcttattcttctacaaatacagcgcctttctcaggatctggtttgccctggcttcagtgaccctgcacagcttgtgttccccaatggctccctctgccgtgtccttgacctggaacccccagtgctgactgcagtaccttatctgcattctctccttcctcttcctatgcagcccttatgtttcccttgcatgggaactcaccttctgctcatgtttctttataaacttttctcaaataaatgtggattg

SEQ ID NO: 527 - DNA, 771 bp, Canis familiaris
tgttttcttggaggctcctggatgacagctctgatgctgatactgatggtgctgaaccctcccttsgcttgggccagggacaccccaccacatttcktgragatggtaaagkycgagtgccatttcaccaacgggacggagcgggtgcggywtctgrygagagacatctataaccgggaggaghwcstgcgcttcgacagcgacgtgggggagtwccgggcggtcacggagctcgggcggcscrwcgctgagtmctggaacsggcagaaggagmtcttggagcrgargcgggccgmggtggacacskwstgcagacacaactacggggtgrkygagagcttcrcggtgcagcggcgagtcgagcctacagtgactgtgtatcctacgaagactcagaccttgcagcatcacaacctcctggtctgctctgtgaatggtttctatccaggccacattgaagtcaggtggctccggaatggccaggaagaggaagctggggttgtgtccacaggcctaatccgtaatggagactggaccttccagatcctggtgatgctggagatagttcctcagagcggagaggtctacacctgccaagtggagcacccaagtttgacaagccctgtcaccgtggaatggagggcacagtctgattctgcacagagcaagatgctgagtggaatcgggggctttgtcctgggtctgctcttccttgcagtggggctgttcatctacttcagaaatcagaagggacactctggacttcagcca

SEQ ID NO: 528 - DNA, 771 bp, Canis familiaris
tgttttcttggaggctcctggatgacagctctgatgctgatactgatggtgctgaaccctcccttggcttgggccagggacaccccaccacatttcttggagatggtaaagtycgagtgccatttcaccaacgggacggagcgggtgcggcttctggtgagagacatctataaccgggaggagcacgtgcscttcgacagcgacgtgggggagtwccgggcggtcacggagctcgggcggcccgacgctgagtactggaacgggcagaaggagctcttggagcagaggcgggccgaggtggacacskwstgcagacacaactacggggtgattgagagcttcrcggtgcagcggcgagtcgagcctacagtgactgtgtatcctacgaagactcagaccttgcagcatcacaacctcctggtctgctctgtgaatggtttctatccaggccacattgaagtcaggtggctccggaatggccaggaagaggaagctggggttgtgtccacaggcctaatccgtaatggagactggaccttccagatcctggtgatgctggagatagttcctcagagcggagaggtctacacctgccaagtggagcacccaagtttgacaagccctgtcaccgtggaatggagggcacagtctgattctgcacagagcaagatgctgagtggaatcgggggctttgtcctgggtctgctcttccttgcagtggggctgttcatctacttcagaaatcagaagggacactctggacttcagcca

SEQ ID NO: 529 - DNA, 1167 bp, Canis familiaris
tgttttcttggaggctcctggatgacagctctgatgctgatactgatggtgctgaaccctcccttsgcttgggccagggacaccccaccacatttcttggaggtggcaaaggccgagtgcyatttcaccaacgggacggagcgggtgcggttcgtggaaagatacatcyataaccgggaggagwwcgtgcgcttcgacagcgacgtgggggagtaccgggcggtcacggagctcgggcggcccgacgctgagtmctggaaccsgcagaaggagytcttggagcggrvscgggccgcggtggacacctactgcagacacaactacggggtgrkygagagcttcacggtgcagcggcgagtcgagcctacagtgactgtgtatcctacgaagactcagaccttgcagcatcacaacctcctggtctgctctgtgaatggtttctatccaggccacattgaagtcaggtggctccggaatggccaggaagaggaagctggggttgtgtccacaggcctaatccgtaatggagactggaccttccagatcctggtgatsctggagatagttcctcagagcggagaggtcwacacctgccaagtggagcacccaagtttgacaagccctgtcaccgtggaatggagggcacagtctgattctgcacagagcaagatgctgagtggaatcgggggctttgtcctgggtctgctcttccttgcagtggggctgttcatctacttcagaaatcagaagggacactctggacttcagccaacaggactcctgagctgaagtggagatggtgaccctcaagaaaaaaccttcctttccagcttcttctcagagtccaaaggtttccagcttggctcttattcttctacaaatacagcgctttctcaggatctggtttgccctggcttcacgtgagaccctgcacagcttgtgttcccccaatgggcttcccttctggccccggttccttgacctggaacccccagtgctgactgcagtaccttatctgcattctctccttcctcttcctatgcagcccttatgtttcccttgcatgggaactcaccttctgctcatgtttctttataaacttttctcaaataaatgtggattgaaaaaaaaaaaaaaaaaaaaaaaaaaaaaaaaaaaaaaaaaaag

SEQ ID NO: 530 - DNA, 1125 bp, Canis familiaris
tgttttcttggaggctcctggatgacagctctgatgctgatactgatggtgctgaaccctcccttggcttgggccagggacaccccaccacatttcgwgtaccagtttaagcccgagtgccatttcaccaacgggacggagcgggtgcggttcgtggaaagayacatccayaaccgggaggagttcgtgcgcttcgacagcgacgtgggggagtaccgggcggtcacggagctcgggcggcccgwcgctgagtcctggaacgggcagaaggagctcttggagcaggagcgggcaacggtggacacctactgcagacacaactacggggtgattgagagcttcacggtgcagcggcgagtcgagcctacagtgactgtgtatcctacgaagactcagaccttgcagcatcacaacctcctggtctgctctgtgaatggtttctatccaggccacattgaagtcaggtggctccggaatggccaggaagaggaagctggggttgtgtccacaggcctaatccgtaatggagactggaccttccagattcctggtgatgctggagatagttcctcagagcggagaggtctacacctgccaagtggagcacccaagtttgacaagccctgtcaccgtggaatggagggcacagtctgattctgcacagagcaagatgctgagtggaatcgggggctttgtcctgggtctgctcttccttgcagtggggctgttcatctacttcagaaatcagaagggacactctggacttcagccaacaggactcctgagctgaagtggagatggtgaccctcaagaaaaaaccttcctttccagcttcttctcagagtccaaaggtttccagcttggctcttattcttctacaaatacagcgctttctcaggatctggtttgccctggcttcagtgaccctgcacagcttgtgttccccaatggctccctctgccctgtccttgacctggaacccccagtgctgactgcagtaccttatctgcattctctccttcctcttcctatgcagcccttatgtttcccttgcatgggaactcaccttctgctcatgtttctttataagcttttctcaaataaatgtggattgaaaatcaaaaa

SEQ ID NO: 531 - DNA, 624 bp, Canis familiaris
cctagtagagctgwacacaccccggwgaagctgttcatccgagggtacttgcgtcatgctgggcctatctggggtgagcccgagaagaccaaggaagtcaattggaccaagacaagtggtatcggacaggagacatcgccgcgatagacaaacagggcttctgcaagatcgtgggccgctccaaggatatgatcatccggggcggggaaaacatctaccccgcagagcttgaggacttctttcacaaacacccgcaggtgctggaagtgtcaggtggtgggagtgaaggacgctcggatggtgggaggaaatctgtgcctgcattcgcctgaagaagggggagaagactacggaggaagagatcaaggctttctgcaaagggaagatctcccacttcaagattcctcgatacatcgtgtttgtcacagactaccccctcaccgtctcagggaagatccagaaattcaaacttcgagagcagatggracaacatttaaacctgtgaataagggattgaggggtcctcacaagccctccctgcccttcccccacatccccatctgtctttgtgacttgacataaagagcttctctgttwwmaaaaaaaaaaaaaaaaaaaaaaaaa

SEQ ID NO: 532 - DNA, 802 bp, Canis familiaris
atggccgtcgcggccctgggagcttccgctcgtgctctgcgctcgcggagcgggcgtttgggcccttggcagacacagatgagagagactcaccagcgagctgcgttactgtccttctgggagctcattcccatgagagcagaacctctacgaaagaagaaaaaggtagatcctaaaaaagatcaagcagtwaaggaccgtttgwrraaaaggatcagacgayctggagaaagctagccaggagctaattcccattgaagattttattacacctgtgaagctcttggataaaacaagacagcggcctaaggtggagcttccctttgaggagagtgakcggagagctctgcttctcaagaagtggtccctgtacaagcatcaagagcacgagaaggagagggatgccatcacttctatgcttgagtcccagcaggaagctctggaggagctgaaactcatatccccagagctacatgaagaggctaccaagcgggaccccaatttgttcccctttgaaagagaagggccagattacacaccacmaatctccagctaccagccccctgagggcaggtaccatgacatcaccaargtgtacacacaggtggagtttaagaggtagagctgcaggcacctgtctgcggaacacagtgccctttcaagccagaataaccagggcacaggcctgcttgtcacagaatccggcatgctggtgaataaatacgtttaatcaagtgtcaaaaaaaaaaaaaaaaaaaaaaaaaaaaaaaaaaaaaaaaaaaaaaaaaaaaaaaaaaaaaaa

SEQ ID NO: 533 - DNA, 677 bp, Canis familiaris
  misc_feature (6)..(6): n comprises a, c, g, or t, or includes no nucleotide
acaaangcatctggtcgggaacgtcgttatgaaggaagagacmagaccckscctgaggaggcacatatgagaataacagaaaaggagcctgtggataaatacagaagagcagctgaggaggcctggaaactgagttttggaaggattcagaaacccgacaagcaaccaccacactgcgggtacacggcagaggtgtccgccaagcctgtctgcccagagtcaagcccttctccactgtctacggttttgaaagtcttcggcgctgagtgaccagcacagaaagctctcgccagccagggagcacagggctctttcctctcagtgttgggtgatggaaatgtgctggaacgatgggagaagctggtaacttataggaagccaagatgacaagaattcttttacataatcaaaggaagacggcgggggcgccatgaggtgagcgcccagagccgccccgtgcccctgccacgcacgtcccccccccgccggcatgaggccggccagcatgggtgcgccgccgcgggaccgctgacccccgcccgccgggaccatgaaggaggtggagtactggtcccccaagaaggtggcagactggctgctggagcacgccatgcccgagtactgtgagcccctggagcacttcacaggccgggacctgatcggcctgacccgggagg

SEQ ID NO: 534 - DNA, 659 bp, Canis familiaris
cgcaagggcctgtcgagccacgcgcggctcccacctaccggcagatgggtgtgaccgagtggtccgttcaacgggctcgcccatcgacacactgcggggagatcctcaagaagaagtccaaaccgtgcctcatcaagaaagagccgccagccggagacctggcccctgccttggctgaggacgggccccccacggctgctcctgggcctgtgcaggcccccctgccattggtgccaatggctggccgcccaggcaaaccaggagctgggccggcccaggttcctcgagagctcagcctggcgcccatcactggtgccaagcccacagccactggctatctgggctcagtggcagccaagcggcccctgcaggaggaccgcctcctcccagcagaggtcaaggccaagacctacatccagaccgaactgcccttcaaggcaaagaccctccaygagaagacctcccactcctccactgaggcctgctgtgagctgtgtggcctttacttcgaaaaccgcaaggccctggccagccacgcgcgggcgcacctgcggcaatttggcgtgaccgagtggtgtgtgaacggctcacccattgagacactgagcgagtggatcaagcaccggcctcagaaggtgggggcttaccgcagctacatc

SEQ ID NO: 535 - DNA, 645 bp, Canis familiaris
ggcatgagagtagatgatgtgccccctctggacaagaaagggtatgacgcaaaagaatattatgaagcacttccagagctgaagctggccattgatcaaattgacmatggcttcttctctcccaagcagcctgacctcttcaaagatktaatcaatatgctattttatcatgacaggtttaaagtcttcgcagactatgaagcctatgtcaagtgtcaagaaaaagtcagccagctgtacatgaatccmaaggcctggaacacaatggtactcaaaaacatagctgccgcagggaagttctctagtgaccgaacaattaaggaatatgccagggacatctggaacatggaaccttcagatctcaagatttccctatccaatgaatctagcaatggggtgaacaaagccaatggaaagtaagttgtaaaatgtctctagaaaacaataacaacaacaaaaaaaaacttcttactggatttaaacacttttacaacattctttgattttgttttgttttgtcagctcataacctaattaagaatttctgggaattgggaaggaaagtatgtgactgtatttagggctaaaaataaagtgtcaatttagcaagggcwaaaaaaaaaaaaaaaaaaaaaaaaaaaaaaa

SEQ ID NO: 536 - DNA, 660 bp, Canis familiaris
awgwmgcacgcagcccascggagcacsgagactgycckgtacckgaawatgctggsmaamcccagccggctgcctgccaagtgtcctggcaagggtgcctggtccatccmctggaagtggctctttgggkcgactgctgttgccctggggggcgtggctctctctgtggtcatcgctgccaggaactgaccacccaggckgccaccaccccctcgcacaccatggaccccaccccgcgctccctaacttccccaggctccctgtcyactgccctgtctgatctagccccctcctctggggcgagagcagtgagstgtggggsccatgtggccccagtgagccaggagggactgtggccctataggaggaaagtgaggcagggcctgggcttcatatccagccaggagggagggggccctcattcctccagacccaattcccacccccacccccttgggttaggtctcaacagaggccagtttctccttcccaacaggcctgggggcagccctttcccaactcagtccctgtccaagcgtcaacccctgcccacaccgcctgctgccctctgtccaggttctccttctgacccctcccgtgaaataaagcctcctaccccgcaaaaaaaaaamaaaaaaaaawaaaaaaaaaaaaaaaaaa

SEQ ID NO: 537 - DNA, 621 bp, Canis familiaris
ttgctcagcaatactatctcgtttaccwagaacccattcccacagctcagctggtacagagagtagcttcagtgatgcaagaatacactcagtcagktggtgttcgtccatttggagtttccctactaatttgtggttggaatgaggggcgaccgtatttatttcagtcagatccatctggagcttactttgcctggaaagccacagcmatgggaaagaactatgtgaatgggaagactttccttgagaaaagatataatgaagacctggaacttgaagatgccattcacacagccatattaaccctaaaggaaagctttgaagggcaaatgacagaagacaacatagaggttggaatctgcaatgaagctggattcagaaggctcactccgactgaagttaaggattacttggctgccatagcataataaccacagtgactgaaaaatctggaatttcagataatccctctacctaaacatgtttaaagtatgttttgttttgcagactttttgcatacttatttctacatggtttaatggactgatgtttttmaaatgatacttataaatcataataaactgttaaatccmaaaaaaaaaaaaaaaaaaaaaaaaaaaa

SEQ ID NO: 538 - DNA, 697 bp, Canis familiaris
cagcttgcatctgaagacatcagccacattacacctacacagggktttaacatcmraagtgtacmatctcaaggttttaaactgaatgtatgggacattggtggacagagaaawatcagaccatactggagaaattattttgaaaatactgatattctcatatatgtcattgacagtgcagacagawaaagatttgaagagacgggtcaggaactagctgaattactggaggaagaaaaactaagttgtgtgccagtgctcatctttgctaacaagcaggatttgctcacggcagcccctgcctctgaaattgcagaaggactgaacctgcacaccatccgcgaccgtgtctggcagatccagtcctgctcagctctcacaggagagggcgttcaggacggcataaactgggtctgcaaaaatgtcagtgcmaagaagaaataaaatctagacgaacggagagacgcaggagctgcgggagctgaattctgtcctgaaaaacactaatttgctgctttctgaccaaatgtttttccatctgtgtacagctacagctgtttgaagagagggaacaacacagtttaaaaagaatccccattccagcagtagatttaactgatctctgaggttcagtatcatttttcaaataaaggaattatattatttcctctgcawaaaaaaaaaaaaaaaaaaaaaa

SEQ ID NO: 539 - DNA, 4561 bp, Canis familiaris
agcaccaaggcggcaggagggttcagctaagttggaggtactggccacgactgcatgcctgcgcccgccaggtgatacctccgccggtgacccaggggctctgcgacacaaggagtctgcatgtctaagtggtagacatgctcagctttgtggatacgcggactttgttgctgcttgcagtaacttcgtgcctagcaacatgccaatctttacaggaggcaactgcaagaaagggcccaactggagatagaggaccacgtggagaaaggggtccaccaggaccaccaggcagagatggtgacgatggtatcccaggccctcctggtccacctggtcctcctggcccccctggtcttggcgggaactttgcagcccagtatgatggaaaaggagttggccttggccctggaccaatgggtttgatgggacctagaggtccacctggtgcatctggcgctcctggccctcaaggtttccaaggacctgctggtgagcctggtgaacctggtcaaactggtccagcgggtgctcgtggtccacctgggcctcctggcaaggctggtgaggatggtcaccctggaaaacctggacgacccggtgagagaggagttgttggaccacagggtgctcgtggtttccctgggactcctggacttcctggtttcaagggcattaggggacacaatggtctggatggattgaagggacagcccggtgctccaggcgtgaagggtgaacctggtgcccctggtgaaaatggaacgccaggtcaaacaggagcccgtgggcttcctggtgagagaggacgtgttggtgcccctggtccagctggtgcccgtggaagtgatggaagtgtgggtcctgtgggtcctgctggtcctatcgggtctgctggccctccaggcttcccaggtgctcctggccccaagggtgaaatcggacctgttggtaaccccggtcctgctggtcccgcgggtccccgtggtgaagtgggtcttccaggtgtttccggccccgttggaccccctggtaaccctggagccaacggcctgactggtgctaagggtgctgctggcctgcccggtgtcgctggggctcctggcctccctggaccccgtgggattcctggtcctgttggtgccgctggtgctactggtgccagaggaattgttggtgagcctgggccagctggttccaaaggagaaagtggcaacaagggtgagcctggctctgctggtgcccaaggtcctcctggtcccagtggtgaagaaggaaagagaggccccaatggtgaagctggatctgctgggccctctggacctcctgggctgagaggaagtcctggttctcgtggtcttcctggagctgatggcccagctggtgtcatgggtcctcccggccctcggggtgccaccggccctgctggtgtccgcggtcccaatggagattctggtcgccctggagagcctggcctcatgggaccccgaggttttcctggtgcccctggtaatgttggcccagctggtaaagaaggtcccatgggtctccctggtattgatggcaggcctggaccaattggcccagcgggagcaagaggagagcccggcaacatcggattccctggacccaaaggccccactggtgatcctggcaaaaatggtgataaaggtcatgctggtcttgctggtgctcggggtgctccaggtcctgatggaaacaatggtgctcagggacctcctggaccacaaggtgtccaaggtggaaaaggtgaacagggtcctgctggtcctccaggcttccagggtctgcctggccccgcaggtacagctggtgaagttggcaaaccaggagaaaggggtctccctggtgaatttggtcttcctggtcctgctggtccaagaggggagcgtggtccccctggagaaagtggtgctgctggtccttctggtcctattggaagccgaggtccttctggaccccctgggcccgatggaaacaagggtgaacctggcgtgcttggcgccccgggcaccgctggcgcgtccggtcccggtggactcccaggagagaggggtgctgccggcattcctggaggcaagggagaaaagggtgaaaccggtctcagaggcgaaattggtaacccaggcagagatggcgcccgtggagctcctggtgccatgggtgcccctggtcctgccggagccactggtgaccggggtgaagctggtcctgccggtcccgctggccctgctggtcctcgtggtacccctggtgaacgtggtgaggttggtcccgctggccccaatggatttgctggtcctgctggtgctgctggtcaacctggtgctaagggagagagaggaaccaaagggcccaagggtgaaaatggccccgttggtcccacaggccccattggatctgccggcccatctggtccaaatggtccccctggtcctgctggaagtcgtggtgatggtggcccccctggtgctactggtttccctggtgctgctgggcggactggtcctcctggaccctctggtatcactggccctcctggtccccctggtgctgctggtaaagaaggactccgtgggcctcgaggtgaccaaggtccagttggccgaacgggagaaacaggtgcctctggtccccctggctttactggtgagaagggtccctctggagagcctggtaccgctggacctcctggcacaccaggtcctcaaggtctccttggtgctcctggcattctgggtctcccaggctctcggggtgagcgtggtctaccaggtgttgctggatccgtgggtgaacccggacctcttggcattgctggtccacctggggctcgtggtcctcctggagctgtgggtgcgcctggagtcaacggtgctcctggtgaagctggtcgtgatggcaaccctgggaatgatggtcccccaggccgcgatggtcaagccggacacaagggagagcgtggttaccctggcaacattggtcccgttggcgctgtgggtgcacctggtcctcatggccctgtgggtcccactggcaaacacggaaaccgtggtgaacctggtcctgctggttctgttggtcccgtcggcgctgttggtccaagaggtcctagtggcccacaaggtattcgaggtgataagggagagcctggtgagaaggggcccagaggtcttcctggcttaaagggacacaatggactgcaaggtcttcctggtcttgctggtcaacatggcgatcaaggtgcacctggttctgtgggtcctgctggtcctaggggtcctgctggtccttctggccctgctggcaaagatggtcgcactgggcaacctggtacagtcggacctgctggcattcgtggctctcagggtagccaaggtcctgctggccctcctggtccccctggccctcctggccctcctggcccaagtggtggtggctatgactttggttatgaaggggacttctacagggctgaccagcctcgctcaccaccttctctcagacccaaggactatgaagttgatgctactctgaaatccctcaacaaccagattgagacccttcttactcctgaaggctctaggaagaacccagctcgcacatgccgagacctgagactcagccacccagagtggagcagtggttactactggattgaccctaaccaaggatgcactatggatgctatcaaagtatactgtgatttctctactggcgaaacctgcattcgggctcaacctgaaaacatcccagccaagaactggtacagaaactccaaggtcaagaagcacatctggttaggagaaactatcaatggtggtacccagtttgaatataatgttgaaggagtaaccaccaaggaaatggctactcaactcgccttcatgcgcctgctggccaaccatgcctctcaaaacatcacctaccactgcaagaacagcattgcctatatggatgaggagactggcaacctgaaaaaggctgtcattctgcaaggttccaatgatgttgaactggttgccgagggcaacagcaggttcacctacactgttcttgtagacggctgctctaaaaagacaaatgaatggagaaagacmatcattgaatacaaaacwaataagccatcccgcctgcctatccttgatattgcacctttggacatcggtgatgctgaccaagaattcagggtggacgttggcccagtctgtttcaaatataatgaactcaacctaaattaaaaaaaaaaaagaaatctgaaaaaactttctctctttgccatttctttttcttcttttttttttaactgaragttgagtccttccatttcctctgcacatctacttgcttaaattgtgggcaaaagagaaggagaaggattgatcagagcatagtgcaatacgatttcattcattccccctccctgcccccaaraatttggaattttttttcaacactcttacatccgttgtggaaaatgtcaacctttgttagaaaaccaaaataaaaattgaaaaataaaataaaaaccatgaacatttgc

SEQ ID NO: 540 - DNA, 639 bp, Canis familiaris
aatggttggtgaactggttgttaaaagcctccagcacaaataayctagtaattgggagtatctacaggggtcatattgtttgcccacaagtagcacagaggtggtgttgtagtcagtggctactgcctgtgtgtgtacaatagcagagccagcctccgcctcaacgtccaaccaactgctgcaagcagctcacaaaatatagcctgagcaagtctctaagccaataactcgatgcgagcattattcccttgctatctagcagctggtwakttttattcggagcaacaaacaattaggaacttaattggacaaacacaaagacagaagatgatcatttgagatcaatcgaataatttgasatttgaacagggactaaatgtgaaaacaaaattttgtactgtcagccaaaatgccaaaaatttttttcaaactaaatataatttaagtgtttcagataaaccaattacggttacaatgccaattttaatagtttaaccaggttgagaataattacttgaaagcatcatttaatttccagtttttaataggaggaagctaacttttgtaatgattgtttatttctaaaccaacccccsagttttttttttttttttttttttttttttttttttttttttt

SEQ ID NO: 541 - DNA, 639 bp, Canis familiaris
ttaccaaccacttgaccaacaattttcggaggtcgtgtttattrgatcattaaccctcatagatgtccccagtataacaaacgggtgttcatcgtgtctccaccacaacatcagtcaccgatgacggacacacacatgttatcgtctcggtcggaggcggagttgcaggttggttgacgacgttcgtcgagtgttttatatcggactcgttcagagattcggttattgagctacgctcgtaataagggaacgatagatcgtcgaccawtmaaaataagcctcgttgtttgttaatccttgaattaacctgtttgtgtttctgtcttctactagtaaactctagttagcttattaaactstaaacttgtccctgatttacacttttgttttaaaacatgacagtcggttttacggtttttaaaaaaagtttgatttatattaaattcacaaagtctatttggttaatgccaatgttacggttaaaattatcaaattggtccaactcttattaatgaactttcgtagtaaattaaaggtcaaaaattatcctccttcgattgaaaacattactaacaaataaagatttggttgggggstcaaaaaaaaaaaaaaaaaaaaaaaaaaaaaaaaaaaaaaaaa

SEQ ID NO: 542 - DNA, 650 bp, Canis familiaris
ccaaaaagggagttgtcaaggctgaaaagagcacmgmaaagaaggaagakggaggaasacgaggaggatgaagagsatgaggaggaggaagaagatgaagaagatgmagatgaagaagaagatgatgatgatgrataagttggttctagcgcmgtttttttttyttggtctataaagcatttaacccccctgtacacmactcactccttttaaagrawaaaattgaaatgtaaggctgtgtaagatttgtttttaaactgtacagtgtctttttttgtatagttaacacactaccgaatgtgtctttagatagccctgtcctggtggtattttcmatagccactaaccttgcctggtacagtatgggggttgtaaattggcatggaaatttaaagcaggttcttgttggtgcacagcacaaatymsttatatatggggatggtagttttttcatcttcagttgtctctgatgcagcttctacgaaataattgttgttctgttaactgaataccmctctgtaattgccaaaaaaaaaaaaaagttgcagctgttttgttgacattctgaatgcttctaagtaaatacmattttttttattarwaaaaaaaaaaaaaaaaaaaaaaaaaaaaaaaaaaaaaaaaaaaaaagg

SEQ ID NO: 543 - DNA, 659 bp, Canis familiaris
gtcggacccscgaagtccgmacmacagtgctcagtacaagcccccgccgagcgagtgtaacccggccttggacgacccgacgccggactacatgaacctgctcggcatgatcttcagcatgtgcggcctcatgctcaagctgaagtggtgcgcgtgggtgccgtcctactgctccttcatcagctttgccmactcccggagctctgaggacmctaaacmaatgatgagtagcttcatgctgtccatctctgctgtggtcatgtcatatctgcagaacccgcagcccatgacacccccctggtgatgtcagcctaggacttctctctacacattcccccaggcctggccmctggctgctcagcctctgccctcagctgctgtcctgggctcccctgaatgaggtagtctccgggcttgcagctgaatggagggaacctgaccctttccctgggattctacttctgctgggcacgaggggaataccttaggcctaccctcctgcctgccttccccmccctgcctgctgctgggggagatgctgtccatgtttctacgtgtatctactcgtcttttttgttgttgtttaaacccagttaataataaaattttgcmttctggctgttccaaaaaaaaaaaaaaaaaaaaaaaaaaaaaaaagg

SEQ ID NO: 544 - DNA, 691 bp, Canis familiaris
cgtggtttatccatcgggacactgcaaaaaagctgggtgaaatgtggtctgaacagtcaccawagataacaaccatatgacagmaagcagctaagytaaaggagaaatatgaaaaggatattgctgcatatcgcgccaagggcaaaagtgaagcgggaaagaagggccctggcaggccaacgggttcaaagaagaagaatgaaccagaggatgaggaggaagaggaagaggaggaagaagatgaagatgatgaggaagaggaggaagatgaggaataaatggctatcttgtaatatgtgtggagtgtgcgtgtgtgctcaggcaattgttttgctaagaatgtgaattcaagtgcagctcaatattagcttcagtataaaaactgtacagatttttgtatagctgataagattctttgtagagaaaatacttttttaaaaatgcaggttgtagctttttgaggggctactacatacagttagattttaaagcttctgatgttgaatgtttctaaatatttaatggttttcttaatttcttgacttgtgtattgtagcacagcagacttgtaggaattagtatcmatagtaaattttgggttttttagaatgttgcattttgttttttaaaaaaaattttgtaataaaattatgtatattaaaaaaaaaaaaaaaaaaaaaaaaaaaaaaaa

SEQ ID NO: 545 - DNA, 683 bp, Canis familiaris
agtggaaggtgatagatctggcctgaagcatgaggaccaaacgtggaggtagcggatctcacaactggggavctgtcaaagacgaattaactgacttggatcaatcaaatgtgactgaggaaacacctgaaggtgaagaacatccagttgcagacactgaaaataaggagaacgaagttgaagaagtaaaggaagagggtccmaaagaaatgactttggatgagtggaaagctattcaaaataaggatcgggcaaaagtagaatttaatatccgaaaaccaaatgaaggtgctgatgggcagtggaagaagggatttgttcttcataaatcaaagagtgaagaggctcatgctgaagattcggttatggaccatcatttccggaagccagcaaatgatataacgtctcagctggagatcaattttggagaccttggccgcccaggacgtggtggcaggggaggacgaggtggccgtgggcgtggtggacgtccaaaccgtggcagcagaactgacaagtcaagtgcttctgctcctgatgtagatgaccctgaggcattcccagctctggcttaactggatgccataagacaaccctggttcctttgtggacccatcccatctgaggttttgcatgcttaaggatcccmaacgacttaagaatttaaaaaaaaaaaaaaaaaa

SEQ ID NO: 546 - DNA, 748 bp, Canis familiaris
tatgactttggatgagtggaaagctatgtcggaagtagaggatcgggcttaagtagaatttaatatccgggggccgggatgaaggtgctgatggscagtggaagaagggatttgttcttcgataaatcmaagagtgaagaggctcatgctgaagattcggttatggaccatcatttccggaagccagcaaatgatataacgtctcagctggagatcaattttggagaccttggccgcscaggacgtggtggcacggggaggacgaggtggccgtgggcgtggtggacgtccmaaccgtggcagcagaactgacaagtcaagtgcttctgctcctgatgtagatgaccctgaggcattcccagctctggcttaactggatgccataagacaaccctggttcctttgtggacccatcccatctgaggttttgcatgcttaaggatcccmaacgacttaagaatttaaaaaaaaaaaaaaaaaaaaaagactgtcattcataccattcacacctaaagactgaattttatctgttttgaaaatgaacttctctcgctacacagaagtaacaatatggtagtcagttttgtatttagaaatgtattggtagcacgggatgttttcataattttcagagattatgcattcttcatgaatacttttgtattgctgcttgcaaatatgcatttcccaacttgaaatataggtgtgaacagtgtgaaaaaaaaaaaaaaaaaaaaaaaaaaaaaaa

SEQ ID NO: 547 - DNA, 644 bp, Canis familiaris
tgggcggtgttccgcgctgcggccgagaagctgcctctgcttccggccgcggtggatccgcttccctgtscaccccccgtcagccgtgagagctcctytcggcagcagctcccttctcccagcggctctggctccgcttgcacgtgccgcgcttggtaccctatggcgtccgccccggccccgcccgcggccctgagcgccgaacaagccaaggtggtcctggccgaggtaatccaggcgttctcggccccggagaacgccgtgcgcatggacgaggctcgggacaacgcctgcaacgacatgggcaagatgctgcagttcgtgctgcccgtggccacgcagatccagcaggaggttatcaaggcctatggcttcagctgcgacggggaaggtgtccttaagtttgcccgcttggtcaagtcttacgaagcccaggatcctgagattgccagcttgtcgggcaagctgaaggcgctgttcctgccacccatgacactgcctccccacgggcctgcttctggtggcagtgtggctgcctcctgaggcttggccctcctctgcaacactgcccaggaagggaagatcttgacattccggaggataataaacgtgcctgtgacarmmaaaaaaaaaaaaaaaaaaaa

SEQ ID NO: 548 - DNA, 599 bp, Canis familiaris
cccgagtgatcgatctgtgggacctggccaagtccgccaacttcactgagaaggagctggagtcattccggggaggagcttaagcactttgaagccccaaattgaaaagccacaaccactaccagaagcagttggaaatctcacatcagaaactgagaacatgtggagagctttggggaccgggagcacgtgagccggaacaaggagaagtatgccatgctggaggagaagaccaaggagctgggctacmaggtaaagaagcmcctgcaggatctgtcgggccgcatctcgagagctcgccacaacgaactctgaagactgcaggagcccgctggcgggaagaagttggggccgggggccaggcgtccgcctgaggacaggccygggtgcttcggggcggcacctgacacggacaggaccctggaggaggtgtgaaggggacyggccaggcgtccttcatgcagaaggacagtgagcagtggtgtgccagatcgtgtgactctgcccctggaagtactgtgttcttaaaaacatgtcaccggggtttaaatggtcatgatctaacctgtcactcgatggtcwmmaaaaaaaaaaaaaaa

SEQ ID NO: 549 - DNA, 662 bp, Canis familiaris
actctagaaacccgctggacctcatagcccagcagatgatgccagaagtacggggaccttatttgggcaaatgccaacaggaagtttttggactaacctttggagcggtagagttcatccactgctctcctgctgtggcatggaagtttctgacatttgaagaaacgagatatctgtgtggcttcctcttccctgttctcatagtctgtatttgtcagtggatactctgtgtaactaatgcccttatcctaattgttgacacatagagaaagtttcacttcatataatcaggaaagttcctttttagcttatctaaaagtagcacaactttcatcggcttgtgtagtgtgaaggtgagggtatcagatggtggtcacaggggcttcaccaagtctccgctcttcctccagtcttccagttcttgagcctagaggggatgtgtacggtgatctctgacatgaagtctttgctcttaggcttaaagtgcatgggggccgtgcattcctctccagcagtagatcgcttcaccactaacctgtttgggcctagaagtgttcctcatctgtaaatgtgatttaaaacctaagccatgaatatgtcttatttattaaaaccaaaggtttaaaaaaaaaaaaaaaaaaaaaaaaaaaaaaaaaaaaaaa

SEQ ID NO: 550 - DNA, 704 bp, Canis familiaris
tgcaggccgagatgctgcagatggacctgatcgacgcgcggctgacactcccggcgccgaggacgacgacgacgaggaggaggagcgcgcggcgcggcggccgggagcggggccgcccgaggccgagccccgccaggagccggcgccccgcgsccagggccagggccagggccagggccagggccagggccagggcggcggggacacgtaccgggcccaagcggcccaccacgctcaacctcttcccgcaggtgccgcggtctcaggacacactgaataataattctctgggcaagaagcacagttggcaggatcgggtgtctcggtcatcatcacccctgaagaccggggagcagacgcctccacatgagcacatctgcctgagcgatgagctgccgcccccgagcagccccaccaccaccaaggaccgaggcacctccaccgacagcccttgccgccgcagcaccgccacgcagatggcccctcccggcggcccccccgccgccccgccgagtagccgcggccactcgcatcgagatcgcatccactatcaggcggacgtgcggctagaggccaccgaggagatctacctgacaccggtgcagaggcccccggaccctgcagagcccacctccgccttcctgccgccggccgagagccgtatgtccgtcagctccgatccagaccactgccacctacccctc

SEQ ID NO: 551 - DNA, 689 bp, Canis familiaris
gacagcaatagtatggtggcaatggtgcatcaattctcaaaacgtagttaggatccaacacgagttgtgtggttcttttatctgagaaaaagcttttcaggagaaatacctgccctatgctaaccaccaggagaatgagtgcttctcctactgaccagtaggccactctggtatttagatcttctgctcgacttcggccctgagcttctctcaaacggaaatgagtctgatagtcgatgacagactttagagcttcgtgaatggagacacaggcagattccatctgggtaagagcgctgactcggttctcgctaggaaacaaaggtgggtcttctccaacttgaaaatcaaaatacacggttttgtgtgtgaaagtagaaaattcattgctaaaacaaaatttgtatgtcccatttttggaggctgtgaaggtaaagctatcatactgtttcttcatctctttatacaacacattaccatcgggatcttctaatcggcagtctacatcatagtgaccgccagtaatcacctggaactcgagggtgcacttggtgccctgcgtgatgtcctcgtagaagcactgcttggcgttgtccggcagctcgaaggtgatctctgaggcgccgccgggccccggcagcagcagcagcagcagcagcgcgagcagcctgcagccccaacggcccgcg

SEQ ID NO: 552 - DNA, 639 bp, Canis familiaris
acgaaggccggtccttggaggccaagggccctgtgaccgacktggcgtattcccacgatggcgcctttctcgccgtgtgtgatgccagcaaggtggtcacggtgttcagtgttgccgacggctactcggagaacaacgttttttatggacaccacgcgaagatcgtctgcctggcctggtcaccggacaacgagcactttgcttccggtggcatggacatgatggtgtacgtctggaccctgagtgaccccgagaccagggtcaagatccaagatgcgcaccggctccaccacgtcagcagcctggcctggctggatgagcacacgctggtcacgacctcccatgatgcctccgtcaaagaatggacaatcagctactgaggagccccctcctttggacagaccgaatcagggactagagcttaaccgcagcagaacacgtcatttctctaaatatttctgtaatgcgcccccatgccccccacccgctcaggagggagggccttcactcgagtgccctcatctctctgcagggtgttcctatctgtacacgtccttctgaaagctttagacagtgacagtttgcacatgaaaaataaaacaagcacttaaacaaaaaaaaaaaaaaaaaaaaaaaaaa

SEQ ID NO: 553 - DNA, 641 bp, Canis familiaris
gaacacgtggttgctgcgtccaggctatgaagatgggcgactggaagacctgtcacagttgttatcatcgaakgaaaagatgaatggcaaagtgtgggaccktttrccctgaggctgacaaagtccgaaccatgctggttaggaagatccaggaagaatcactgcgaacctacctcttcacctatagcagtgtctatgactccatcagcatggagactctatctgacatgtttgaactggacctgcccactgtacactccatcatcagcaagatgatcattaatgaggagttgatggcctctctggaccagccaacgcagactgtggtgatgcaccgcaccgagcccactgcccaacagaacctggccctgcagctggctgagaagctgggcagcttggtggaaaataatgagagggtgtttgaccacaagcagggtacctatggtggctacttccgagaccagaaggacggctaccgcaagaacgagggctacatgcgtcggggcgggtaccgccagcagcagtctcagacagcctactaatggcctcgcttctgtgcctctggcccagaccattcagcctttaagtcgtagaccacatcctgagttattaaagttctgtttaaagttaaaaaaaaaaaa

SEQ ID NO: 554 - DNA, 758 bp, Canis familiaris
agagactccagggcaggacccaaggctccttgggctacagacatggtttctgggactgtgaagtgaagccctccgagggagcactgcatgggagctctgttgtctaagtgtgcggtcaggacgccgggatgtgtgaccccacatctgtgcagaaagaatcctgtagctcgaaaatccgaagtgtttactctgatcctgacagggattctcggtacctgtcgatgttgtgcgttctgtaacattcgggagttgggcagctgtgctggtgttgagggttcgagtgtgccatttcatgtgccgatgttggagggtgggaacaggggtcagagtggacaggaaacccagtgacctcattcatccctaaaacatttttctttgatgaagtgcctaaatctgtggtgtttttgtacggtactaacatgacgtgccacctgtttgtgtcggattttgctgttcacggacctactctaagtaagattttatttgcagaatttatatgcaagtgtcatttttaggaactaaaattatttgtatgaaacttccattgtgattttaacmaattaaaactagcacatgtacgtggttagaaatgttactgctgagggaaggtacaaaatgacatgtgtgcctaccccctgccactgcctcctcttgggggaagctcctgtagatttgtttccaggagggaaaaaaaaaattcacttagcttcttgtgaaaaaaaaaaaaaaaaaaaaaaaaaaaaaaaaaaaaaaaaaaa

SEQ ID NO: 555 - DNA, 653 bp, Canis familiaris
agtacctgaggaacaggcarcttggctggcgccaatggtgtgggcccctggacctggacgacttccggggcaccctaatgtggtggggctgcacgcttccccctcaccagtgccattcaaggatgcgctcacggcggcctagcctgtgtcctgctcacagggggggcagggatgccctcgcccttggctctggctggccaggagcctatcgcccgccctgctgagcaccccccagcctcagtctccctgccttgggcccccgtagaggagcccccagctcagctccggtgcacaagcgggtagaggggggccctgggcagctggggcctggggagggcagagcgcgggacacagctcagcaaccccttcggattcgtgaaaatgctcgatggccccagccccacacggaggtgccttcgaccccctccccaggcgtccttgccaaagaaggccatttggccagtgctgccccacgcagccaagcacgtcccacgaagcagccgccgcacgaatcgccctctcagggcccaacttgaaaccctgcggccaggaacatgaccatgtcccaccacttccccttcctaattccgcagccgcggctcaataaagcaccagggctttcgcgtgaaaaaaaaaaaaaaaaaaaaaaaaaa

SEQ ID NO: 556 - DNA, 701 bp, Canis familiaris
tttatggacatgaaagttcgggaagtgctcccacaccagaagaaatcaagaaaagaaagargccgtcattttttgtctcagtgcagacaaaaagkgcatcattgtagaagaagggmaagagatcttggttggagatgttggtgtaaccataackgatcctttcaagcattttgtgggaatgcttcctgaaaaagattggtcgctatgctttgtatgatgcaagctttgaaacccacaggaatccacgraaagaggaattgatgttttttttgtgggcaccagaactagctcctctgaaaagtaaaatgatctatgcaagctccaaggatgcaatcaaaaagaaatttcaaggcataaaacacgaatgtcaagcaaatgggccagaagacctcaatcgggcttgtattgctgaaaaactaggtggatccttaattgtagcttttgaaggatgcccctgtgtagaccatcattcagtgccacaaatcgaaagcttccatgtttaatsttatcctcttgctatataagtaaagcaactatgtttaggccagggtctcactgagggggagctgtcttgtcatctgttaaagtaaactaaatattctaaaacatgtgcagatggccctaaataaatctaaaatataaagtgttacaaaaaaaaaaaaaaaaaaaaaaaaaaaaaaaaaaaaaaaaaaaaaaaaaaa

SEQ ID NO: 557 - DNA, 673 bp, Canis familiaris
cccagctttagcaacatcgggagaaaattcacgagcgagtcatacacgtgsstggacgaggcasgcawtgaatttggggagcatgcaccgtgccgaggtgatccggctcatggccgagcgggacctgaggctcgtgaagagggacagcggctcggagcctccacggtaccagctyctctcgggggctgcagattcacgaggagcggctgcgacttcgggagatggagaaggcccacccgaagcctggacctgtcctgactaaggaactcactctttcttcaaatattggacmacatgatctggacacmaagagtaaacagattcagcagtggattgagaaaaaataccaagttcaaattactataaaraaagggaagaatgtagaggagcccgaacataagatggaggatatctgtaataaaatactccagactatgccggggatagctaccttcttatcccggccacaacctgttagaggaggaaaagctgtaacatgtgttcttcgtcatttgagcaaaaaggaagagaatgcatatagagaaactcaagaaacccagaaaagagattctttggacamagaaaacagagacmatagagaatcagatgtgcatcagtgattttaataaagaaaaacrtggttctgagargaaaaaaaaaaaaaaaaaaaaaa

SEQ ID NO: 558 - DNA, 618 bp, Canis familiaris
  misc_feature (31)..(31): n comprises a, c, g, or t, or includes no nucleotide
cccgaagttgccgcggggccttccaatcccntcgccatctcccaagtctggccaggctgatggggccagcaaggattctctgcgccttgacattcagaaactgaaggagaagagggatctgctggacaaggagatcacccamattaatatctgaaggctacagtgtggatgaactggaggaccacatctcccagctccatgaatataacgacatcaaggatataggccagatgctgctaggcmaactagccatgatccgaggtgtcaccaccaaagagttgtatccagaatttggcctggaaatgaacgactgaaccacaggctcacagtcctttgtccacagcctratgggacaggtggatttgaacatgagaggcagtgagagcccagccagcacacccacaggcttcccagtgagaaagtttcagaagccgttttctagagarctcaatctgagtcaggagggagcctggagaagaggcagatggtgtggaagcactattacctgctccacatttcctgaaatgttctggtgatasgtacatgtgtgtatgtctgccgtttgtaaataaacatacaagccawctwrrwrwraaaaaaaaaaaaaaaaaaaaaaaa

SEQ ID NO: 559 - DNA, 644 bp, Canis familiaris
aagtaagacagtgttccagaagaaatggcacagtgacagctgccacgcaaagcacgctgaatgatggtgctgcggctgtggtgctgatgactgcagatgcagccaggaggctcaaggtgaaaccgctggcaagagtagcagttgcacctgcgtatgctgtacctaaggttcttagagatgcaggactgaagaaagaggacattacgatgtgggaagtaaacgaagcctttagcctggttgtactagcaaacatcaaaatgctggacctggacccccaaaaagtaaacatgaatggaggagctgtttctctgggacatccgattgggatgtctggagccaggattgtcgttcacttggttcatgccttgaagcagggagaatatggtcttgcaagtatttgcaatggaggaggaggtgcttctgccctgttgatccagaagctgtagacaacttgtgtcatccaaagcacaacaatactacatggattctgtaatcattatgactgaccacctgggtcaggttattcaatctgtttcrttttctatttttttctaatatttttataagcagataagatcagttctcaaaccttctgaaattataagtttttcttcctgttttaaaaaaaaaaaaaaaaaaaaggg

SEQ ID NO: 560 - DNA, 2202 bp, Canis familiaris
ttttttttttttttttctaagatgactctttattcacacacaacaaaagcctttatttccacctctaagattcccttccagtgaatcagtacaggctgcaggcaggaacgtcccaggcggccacacgcggtccatggggtccgtggacgtggtcccttcccctccggggcagacagaggcttcagagggcgaacgggctgttttccaaacactgggacttggccgcggaccggtggtgcccggtttcattggcaagtttccagtacctctctcgcaaaaggaaggccgccgctttgggttgtctctggcgagtgaagatgccctttctgttccctactgctctctgtggtgactggtcagtcataaaatcagcaaaattccagatgagctctccaaccacatattctttgcgtttctgatccagcaccaagtgatactgctcgagcagacctttctggtactcctcactgaacatcagaggtggatcctggtggaagcctgcaattgtctctgccccgtactcgctctggattattggtttctggtaggtcctataccagttctcaaactcggtggccagctgcagctgaatcacctccatgtgcccatagtcgtgataccaagagtagtaactgttgacacagatgacgtccacatacggcgcccccaggtctgcttcatagttggaattggtcacaaaggtcacgggccgggaggggtccaaggccttggtgtgagcaatcagcgtcttgaagtagtaagcagcaggcttcaggaaggaagtgggctcattggctacagaccacatgactacagatgggtgattcttatcccgacgcaccagctcccccatcacctccagatggtgctgcagggacacattgctgtagctctggaccagcatgatgcccacaccagggctctcgtcgatgaccacgatcccatagcggtcgcagagctgcatcacctcctccgcgtaggggtagtggctggtgcggaaggcattggcgcccagccagcgcaacaggttgaagtccttcaccagcagcggccagtcaaagcccttccctcggatatcggcatcctcatgtttgttgaccccatggaaatagaaaggtttcccgttgatgaggaactggcgctctgtgacggccacggtgcgaatccccacggggagagtatagaagtctgacacaggcccagcggccatctgcgcagtcagcctcacctccaacgagtacaggtaggcggggtgctcatgcatcaggtacggccaccagaggtggacattgggcacctgcagccggccctggctccctgtcccctgggccacgaccttgccttcctcatccagaagatacacttccagctggaagtgttcactgccctggacaaaaatctggtaatccaccagcccagtgtcttggtccacgccggtggtgacggtgatgtcgtcgatgtaggtagtaggtgtggtgtagaggagcacagggcgatgcaggcccgcgtagttgaagaagtcaaagtatgtgttctggacgaagtaacccttggggtacttggaagcgtctgtcttgtagacgatggtccctggcggcagagtgtgkggggtgagcgtgttgttgatgscaagggtaatacggcaggaggacaggggcccgctctggaccaacttgctgattgtcagcttcgaaggggaggtgacccccctcgtgcttctgccacatggacccccattcacccacacgatggcatagtagtgggcgctgccaatcctcagcaccactctcgtgcccgggtcctggctccatcgccggggcagggtggcctcccgctcgtaccacacccagccgacaaagctgcgcagctgcctatcctggcccacatcattgaagctggacggaactggcatgtccagggtggggcccgactcgcgcagcggcgcccggtaccactgctgctcgaagccctggcgccggccgtcggagaagtcggcgcggaagctccagaggccgtcgaggtccttgcgctcccgcgacgggctctcccgggggtacagcatcccgccctccagcgccagcccgcaggtccaaagcagcgggccgagcgctacccaggcccccgccggcccccgagacatgcttccgtcgcggccgcgcgtggccccggcgcgcagcccgcagcccgcagcccgcagccccg

SEQ ID NO: 561 - DNA, 672 bp, Canis familiaris
ttcggttacatcacggagctgaacctgccgcagctagagatgctcaagaaccagctggaccaggaagtggagttcctgtccacgtccatcgcgcagctcaaggtggtgcagaccaagtacgtggaagccacaggactgtytgcacgtgctcwacaagracammcgaggggaaagaactactcgtcccmctgacgagctctatgtatgtccctgggaagctacatgatgtggaacawgtgctcatcgatgtgggaacaggctactatgtagaaaagacagcggaggatgccacaggactttttcaagaggaagatagactttyttacgaagcmaatggagaaaatccmaccagctctgcaggagaagcatgycatgaaacaggctgtcatggagatgatgagccagaagattcagcagctcacagccctgggggcaactcaggcgacggccaaggcctgaaagctcggttcagaaacggttcagaaacgggccmagtgctcctgcggcgggagctgggaccttgtgggcgtggcttcccggggcccaggacgggaggggcttgcttygtgctaataaacgtgcccscggggccccaaaaaaaaaaaaaaaaaaaaaaaaaaaaaaaaaaaaaaaaaaaaaaaaaaaaaaaaaaaaaaaaaaaaaaaaaaaaaa

SEQ ID NO: 562 - DNA, 677 bp, Canis familiaris
gtgcttctctcagtaagctggaaattagccattggggggtctttgtgcttcagaaagtctcctgttaactggagtggaaattttgggggaaggktggggactcagccaagtgcctcagtgtgccctgttaaaacttgggtttttccacacaattggattgtatcctaggaggactttttccttgttcccctggttttttggttcctcctgtagaagaaagaggtgattttgcttggtggcctggtggggcaccagacctgccacctgccacttaaaaacctcccaacctctttacttttgcgtcttttataaaagtagttgtagatgagggaggggggagtgggcgggaagtggacggyaagacatactacagttgattttgaattgctaagtagtttcacagagctaggtctgtgtgtctgtgtgtatatgtatatatacctatctagggctagtactttcgtctcacacccgggagctgggagaaaaaaacctgtacagtcgtcttttatttttaataatataggaaaatgcgcacttgcgcgtggtccgccccccaccccccttttttttaaacaagtgttatttgtgccgggaagaatttgctgtctttgtaattttaaaactttaaaataaaatagaaaaaaaaagcgaaaaaaaaaaaaaaaaaaaaaaaa

SEQ ID NO: 563 - DNA, 625 bp, Canis familiaris
aggattcagatcctgttcctctgaagaacggtacagtgaagacattgagctgcttccctcctggttttctgtgagatgcagccagtcctggagagcgaagaggaactttattcctcctgtcgccagctgcgaaggcggcaggaagagctcaaccatcagctctttctgtacgacacacaccagaacttgcgcaacgccaaccgggatgccctcgttaaagagttcaatgtcaacgagaaccacgctccacgctgtaccacggagaagtgcaaccggaggttgagagagaagcgagtcagcaacagcacggttttactcctagaagctggggtacatgtgtcggggtgtcccacgcgtgtgtgtctgtgtataggagaaagtcctctcttcagaccctggatacatgctcatccgtgaggtcatcctctctgcaatactggcatcaagatgacaatttctgaagatctgactggcatgagttggggttatttcctaatttttttcatcttggaccaatttcttaacttatattttctatagaggatcataaaaatatgttccaacctcccttaataaaagccagtgaaaatcytrawraaaaaaaaaaaaaaaaaaaaaaaaaaaa

SEQ ID NO: 564 - DNA, 719 bp, Canis familiaris
ttgatggtgatggtcagttaactatgaagagtttgtacaatgatgaccgccaagtgaagactkgtacagaatgtgtwaawtbtctkgkacmaaattgtttattkgccyykttctttgtttgtaactkatctgtaaarggtttccccctgctgtcaaaaaatatgcatgtatagtaattaggacttcattcctccatgttttcttcccttatcttactgtcattgtcctgaaaccttattttagaaaattgatcaagtaacatgttgcatgtggcttactctggatatatctaagcccttctgcacatctaaacttagatggagttggtcaaatgagggaacatctgggttatgccttttttttaagtagttttctttaggaactgtcagcatgttgttgttgaagtgtggagttgtaactctgcgtggactatggacagtcaacaatatgtacttaaaagttgcactattgcmaaacgggtgtattatccaggtactcgtacactatttttttgtactgctggtcctgtaccagaaacattttcttttattgtwacttgctttttaaactttgttttagccacttaaagaaaatctgcttatggcacaatttgcctcaaatccattccaagttgtatatttgttttccmmataaaaaaattacamtttammmmaamaaaaaaaaaaaaaaaaaaaaaaaaaaaaaaaaaaaaaaaaaaa

SEQ ID NO: 565 - DNA, 691 bp, Canis familiaris
tatgaagagtttgtacaaatgatgacagcaaagtgaagacattgtaccagaatgtgttaaatttcttgtacaaaatgtgtttatttgccttttctttgtttgtaacttatctgtaaaaggtttccccctgctgtcamaaaatatgcaatgtatagtaattaggacttcattcctgccatgttttcttcccttatcttactgtcattgtcctgaaaccttattttagaaaattgatcaagtaacatgttgcatgtggcttactctggatatatctaagcccttcgtgcacatctaaacttagatggagttggtcaaatgagggaacatctgggttatgccttttttttttaagtagttttctttaggaactgtcagcatgttgttgttgaagtgtggagttgtaactctgcgtggactatggacagtcaacaatatgtacttaaaagttgcactattgcaaaacgggtgtattatccaggtactcgtacactatttttttgtactgctggtcctgtaccagaaacattttcttttattgttacttgctttttaaactttgttttagccacttaaagaaaatctgcttatggcacaatttgcctcaaatccattccaagttgtatatttgttttccaataaaaaaattacaatttacccmaaaaaaaaaaaaaaaaaaaaaaaaaaaaaaaaa

SEQ ID NO: 566 - DNA, 620 bp, Canis familiaris
cctgccccacaggaagatgagggtccagtctacagaaccagctggccctgctgggcctcccctgtgcctggctcctgcctggccccacgccccagcccgtgacactctcccaagaccccaggcctctggcttcagccttccagcctcagccccctagtaagtgccttcagtgtcctccctcccaccccaggccccgaggacccagatctggggtgggagggaggccctcctggtgaaagactcgccacgggcccagctcccgggcacgccagcccccgggttgggctgggtacggctggggcttctgcagggctctgctcccctgcggcgcccccgggtgcttcctgcctgtctctggcgggagccttacccttcgtctggcgccgggacaggcagcccagcccagggccacccctcccgttccaccttggtggcttccacccctgcctccaccctctgagctttgcatgtcccactaacccaggcaggcggcgggtggaggcgccaggcttccggcagcctccatgaacactaacccgaccatgggtgggcctgcagcgctcaccccaataaaagcaattccaacctcaaaaaaaaaaaaaaaaaaaaaaaaaaagggc

SEQ ID NO: 567 - DNA, 696 bp, Canis familiaris
agggcccaccccggccsstctccctgccgcgcgctgagtgcccctgtgtcysgccccctcggcttgccmactggagaaagggtgcytacgtctttcctctgctgcatttataaacgagaaagtccattttaaacagtatttgccacctctcccccttgtctctgagagggagtggaagtggaccggcatgctccaggggccttcccaggcactggaagagtgtcyctggccgagggcaggctggaaggattgtcatgacccccccgcacttgtcctctascctggaagccattagaatccaccaggcgtgcagatggatcacccttgcctgagcttgatgagcagcccttggtctccgattcaaaggactgagagaccmaacacctctgtcttccccctccccaagcctctgccagcctctggctgcacggccaggccctgcttcatggcaggcctaccagagcttggcccgagggcccatgccacctctggctccctgacaagctggatgtaacttgtgtcttctggccccttcaggagcccaggtgttgtgaggaatgaattggtcactgcatcctgtatcggttttggttccgagaaaagcaaatatcatttttggctgcattaaaagaagcatcatgtataaaawaaaaaaaaaaaaaaaaaaaaaaaaaaaaaaaaaaaaaaaaaaaaaaa

SEQ ID NO: 568 - DNA, 692 bp, Canis familiaris
acatcctggtaatttgaattctagtgcccattattcattatcaccttgttttcattgtgccgatttttcggtgatcaaacctcagccccccttcatattgcccyttccckttttwaaaaattacatgtgtgcacagaggaggccaccttttccagggactgtgcattttcaggcttgtgataaataagatcgaccaatacaagtgttcatgatgactttccaattggccctgaagttctagcatgtgattgcttcactcctggactatgactttcagtgggagatggaagtttttcagagaactgaactgtggaaaaatgacctttccttaacttgaagcttcttttaaaatttgagggtctggaccacaaagaagagaaatatcaggctggagtcgagaagacagagatgatgagagtaaatgactaactccmaagatggcttcactgaagagaaagcattttaagataaaagtcttgtcagaagatcccagaaaagttctaattttcattagcagttaataaagttattcatgcagaagtgtattcaacagaacactgctctttttgattttatttgtactttttggcctgggatatgggttttaaatggacattgtctgtaccagcttcattaaaataaacaaaatatttgtaaaaaccgtaaaaaaaaaaaaaaaaaaaaaaaaaaaa

SEQ ID NO: 569 - DNA, 716 bp, Canis familiaris
cagctgactcctaaactgatgaaggttgtaagagaaggatttttctcctgaagcattgaaaaagggaatatcacctttgagcacatgtttgaagaagtgccgattgtaattwaaaactcacatctgatcmacgtcctaatgtgggagcttgagaagaagtcagctgtagcagatwaacatgaattgctcagtcttgctagcagcamatcatttggggaagaatctacagttgctgatggacagagtggatgaaatgagccmagatatagttaaatataacacatacatgaggaacacgagtaaacaacagcagcagaaacatcagtatcagcagcgtcgccagcaggagaatatgcagcgccagagtcggggagaacccccmctgcctgaggaggatctgtccmaacttttcaaaccacctcagcctcctgccaggatggattctctactcattgcaggccagattaacacttactgccagaayatcaaggagttcactgcccmaaacttgggcmaactcttcatggcccaggctcttcaggaatacaacmactgagaaaaggaagtttccagaaaaggagttaacatggactcttgagatcacattggggcaatccttggaagaaatacatttgtgtattgaaaagtctttctagctaataataaaataaaaataaaacmamaaaaaaaaaaaaaaaaaaaaaaaaaaaaaaaaa

SEQ ID NO: 570 - DNA, 624 bp, Canis familiaris
ctgctgagacctcacgtcgtgtggtttggagaaaacctggatcctgccattctggaggaggttgacaaagagctgaccctctgtgacttatgtcttagtggtgggaacttcctctgtggtttatcctgctgccatgtttgcacccccargtgtctgcccggggagttgccagtggccgacgattcaacatggaaaccaccccagccaccwacagattcaggtttcatttccaggggccatgtggtaccactcttcctgaagccctggctcctcatgaaactggcaatgtttcttagttgtcctggggaaagaagaaattgtagtatgtctaagtacttgggccacacacagaggagaactgatcgtggggaccgtgagctaaatactggaaaatctagaaataccatcagmttccctggctggaatcccccctgatgctaagtaaagcaacaatagcawacactcttaggagaagttagagaacagccaggttaatgcatgttctttcatgtgaacttaaacctaagctctctcctatgtgtttggttggctattggaaacattttgtgattagattatcttttgaaaaaaaaaaaaaaaaaaaaaaaaaaaaaaaaaaaaaaa

SEQ ID NO: 571 - DNA, 695 bp, Canis familiaris
gggaagagccttgctttgcaggggagaagctcacctacgtggatttcctggtkttacgacatcsbtgaccygcaccgcatattkgagcccacttcsctggacgcgttcccgaacctgaaggagttcawggctcgctttgagggcttgaagracawatctgcctacatgaagtccarccgcttcrtcccaggccctctgtttctaaagattgccatgtggggcaacaagtagggggggcataggaggagatgccagcaaggagctggagctgtgcttgctccatgtaccagaacaggtgtcctgctttttcccckttgtwacattttttttgtccccatgaaatacctattgactcskktktctccttcccaaccctattttcatcaatggcccttgacgtcagctatccacttcagcmattttcctcctcccccagtgttacccctcctacgctaaagccmaccagatcattcttccctcggtgcttgtgccacttgcaggaactggcctggacttctggcctgcagagcctgcccctgagctctggagcmctgccctgaagcctggtgtgacctggtgtgcccatgttgctccccygggstggtcccygcccagccctgctaatccccagtaaagccttgagcactawraaaaaaaaaaaaaaaaaaaaaaaaaaaaaaaraaaaaaaaaaaaa

SEQ ID NO: 572 - DNA, 709 bp, Canis familiaris
ctccttggactggaatcgagctgttcaccatggacctgaaactctcaagcagctgtgacagaggccttgtccggctccatgagggagvgaktcatctaaccgcagtacccgccttgtcaattgktcctgcaccctcaattctgccatctcygacatcgaggtggataagaaggagctgacyggtcgcactctgctctccgtgcctggctataaggagaaggtggagtttggggtccttgtctcctttgcctayaagatccaaggctcagacggtgacgaggaggtggtggtggcaacaactcggattgaaacaatgctgggagacgtggccgtagctgtgcaccccaaagatcctagataccagcacctgaaggggaggagtgtgatccacccattcttgtctcggagcttgccgatcatctttgacgattttgtggacatggagtttggcacaggtgcggtgaagatcacccctgcccatgaccagaacgactacgaggtcggacggcggcacaggctggaggccatcaccatcatggactcccaaggggccctcatcaatgtgcccccgcctttcctgggcctacccaggtttgaggccaggaaggcggtgctggcagcgctgaaggagcaggggctgttccggggtgttgaggacaaccccatggtagtgccgctttgcaaccggtccaaggatgtggtagagcct

SEQ ID NO: 573 - DNA, 660 bp, Canis familiaris
ttctattaaacaccaggtgagccacttagtccttggtcaactcaaagagaacctgraatctgtcactagtctacttttacacactttcckgtttatagcmatattyagccaggggaacgatgctgkccggtgtctccgcagctaaggacacaaggtccctgcggggaatatttaaagcaacgtcaggtttaaaaatgcagccctgacattgacccgccagcggtccgtgtcccggaggaaaggggaagcaggatgcgtggctgaggggcctggtcggggcggcactcgggcgaccgaccggttacccacgtgtgtcttaacccmaccctgagcactccaggtctcaggagcatcccgggtactgaaggggttcggctcttgctcagcsacctgcagcccaccaaagtggtgtccragccmatgacagtcaaagacacaccgtttgccacccggacaccacaccctgccatgcttmtgtgwggagctgggagggactgtcgtggaagcttgttccttggcttcaccctgggaaaacgctggccgcatgatgaaaataccgccttgttgccttatcttcttccmaatgtgctgttaaataaagagtcgcccmggcmraaaaaaaaaaaaaaaaaaaaaaaaaaaaaaaaaaaaaaaaaaaaa

SEQ ID NO: 574 - DNA, 622 bp, Canis familiaris
cgtaactatttgacgaaggccttcgatgtcctcgtggaccggccggtgaccctagtgagagagtttatagatcggcagcacgcaaagaacaggtattactactaccaccgggagttccgccgtgtgccagacatcacagagtgccaggaaaaggatgtcttgtgcatgtttgaagcagaaatgcaatggagaagagactataaagtggatcaagaaatcgtcaacattatccaggagaggctgaaggcctgtcagcagcgggaaggtgagagctacaggcagaactgtgccaaggagctggagcagttcacccaggtggccaaggcctaccaggaccgctatcacgacctgggagcccattattctgctaggaagtgcctggctaaacagaagcagcggatgctggcagagagaaaagctgctaaagaggctgctgctgcctaaggcagctccttgagcctctttacaagattatcctcaaaataaaaaaataagaaatcagtttctggtaacacctttgatctccaaccttgacctactaatgacttggtttatctccctttaaattcaactactgaagagaaataaagaaaggcactattaacaagcaaaaaaaaaaaaa

SEQ ID NO: 575 - DNA, 662 bp, Canis familiaris
ccggaatttccmgrsmkkatccctctcctytctgccagctcgctcgtgcgccgcgctccgcttcctckgcaamcmatgtctgacaaacccgatatggctgagattgagaaattcgataagtcgaaattgaagaagacagaaacgcaagagaraaatccmctgccttcgaaagaaacgattgracacggagaagcahagcaggcgaatcgtaatgaggcgtgcgccgccmatatgcactgkacattccacaagcattgccttcttattktacttcttttagctgtttaactttgtaagatgcmaagcggttggatcaagtttaaatgactgtgctgccccttttcacatcaaagaatggagaactactgacmacgaaggcgcctgcctttcccatctgcctgtctggctggctggcagggaaggaaaagaacttgcatgttggtgaaggaagaasctgggtgggaggacagtgagatctagagtaaaaaaccmagctggcccmaggtatcttgcaggctgttaaaatgcagtttaatcagagtgccatttttttgttcaaatgattttaattattggaatgcacmatttttttaatatgcmaataaagttttaaaacgtgaaaaaaaaaaaaaaaaaaaaaaaaaaaaaaaaaaaaaaaaaaa

SEQ ID NO: 576 - DNA, 634 bp, Canis familiaris
agagtaatactggtaactttttttttktwaakaawgkttatcatgcagtgctgcatttkttttaagkttttattwaktcatgagagacagagagaggggggtggscagagggagaascaggctccatgcagggagcccmacctgggactccgtccagggtccctaggatcmaacgccgggctgcaggcggcgccmaaccgctgcgccattggggctgccccmawactggtagcttttaattctgtgcctcttcccttaaatttaattttaaaatcccccaatacttgttgcctctgggatttgtcttctgggttatttttaakgtttaaaaacatgttggtattgtccagtttttaatcagtgacttagtatgatgtaattgctgttacacgaatttaaagagtaggagtcctgcatgtatggggcaatgtgtttgggtgtgctgttgtgaaattgaagctatggttaaagtatttgtgttgctctgtggtaagaactagccctgttgcatcatgtacattactaatcatttttcctccctctttacagcacaaataaaggcttgagttctaaactcmaaaaaaaaaaaaaaaaaaaaaaaaaaaaaaaaaaaaaaaaaaaaaaaaaaaaaaaa

SEQ ID NO: 577 - DNA, 2807 bp, Canis familiaris
gctaagactaaaagagtggatcatgacccatgaagagcaccatgcagccaaaaccctggggatcggcaaagccatcgccgtgttaacctctggtggagatgcccaaggtatgaatgctgctgtcagggctgtggttcgagtgggtatctttactggtgcccgtgtcttctttgtccatgagggttaccaaggcctggtggatggtggagatcacatcagggaagccacctgggagagcgtttcgatgatgcttcagctgggtggcacagtcattggaagtgcccggtgtaaggattttcgggaacgagaggggcgacttcgagctgcccacaacctagtgaaacgtgggatcaccaatctgtgtgtcatcgggggtgatggcagcctcactggggcggacaccttccgttctgagtggagtgacttgctgagtgacctccagaaagcgggtaagatcacagcggaggaggctacgaagtccagctacctgaatatcgtgggcttggtgggctcaattgacaatgacttttgcggcactgacatgaccatcggcaccgactctgccctgcaccggatcatagagatcgtggatgccatcaccactactgctcagagccaccagaggacgtttgtgttggaagtgatgggccggcactgtggatacctggcccttgtcacctccctctcctgtggggctgactgggtttttattcctgaatgtccgccagatgatgactgggaggaacatctttgtcgccggcttagtgagacaaggacccggggttctcgtctcaacatcatcattgtggctgagggtgcgattgacaagaatgggaaaccaatcacctcagaagaaatcaaggagctggtggtaaagcgtctgggatatgacactcgggtcactgtcttggggcatgtgcagcggggtgggaccccatcagccttcgaccgaatcctgggcagcaggatgggtgtggaagcagtgatggcgctcttggaggggaccccggacaccccggcctgcgtggtgagcctctctggtaaccaggctgtgcgcctgcccctcatggagtgtgtacaggtgaccaaggatgtgaccaaggccatgaatgacaggaaattcgatgaagccatgaagctgagaggccggagcttcatgaacaactgggaggtgtacaagcttctggctcacatcagacctcccgtctcgaagacatcggctaccatgcacacggtggccgtgatgaacgtgggtgccccagccgcaggcatgaatgctgccgtccgctccaccgtgagaattggactcatccagggcaaccgggtgctggttgtgcatgatggcttcgagggcctggccaagggtcagatcgaggaggctggctggagctatgtggggggctggactggccaaggcggttccaaacttgggactaagaggactctgcccaagaagagctttgagcagatcagtgccaacatcactaagtttaacattcagggcctgatcatcatcgggggctttgaggcttacactgggggcctggagctgatggagggcaggaagcagtttgatgagctgtgcatcccgtttgtggtcatccctgctacggtgtccaacaacgtccctggctcggacttcagcgtgggcgctgacacagccctcaacactatctgcacgacctgtgaccgcatcaagcagtcagcagcaggcaccaagcggcgggtgttcatcattgaaactatgggtggctactgcggctacctggccaccatggcaggcctggccgctggggcggatgctgcctacatttttgaggagcccttcaccattcgggacctgcaggcaaatgttgaacatctggtgcaaaagatgaaaacaactgtgaagaggggcctggtgttaaggaatgagaagtgcaatgagaactataccacggacttcattttcaacctgtactctgaggaggggaagggcatcttcgacagcaggaagaatgtgctcggccacatgcagcagggtgggagcccaactccatttgataggaattttgccactaagatgggcgccaaggctatgaactggatgtctgggaaaatcaaagagagttaccgtaatgggaggatctttgccaatacgccagactcgggctgtgttctggggatgcgtaagagggctctggtctttcaaccagtgactgagctgaaggaccagacagattttgatcaccgcatccccaaggmacagtggtggctgaagctgaggcccatcctcmaaatcctagccaagtacgagattgacttggacaccacagagcacgcccaccctggagcacatcagtcggaagcgatctggagaaacttctatctaaccctctttggagtgagggtcatggattgtctgatcatggtcagctcaccccctgatagatccaagtccatgtatccccaagtattttagctcatttttctttaggtttccttttattctgcaactgtagccatgaccagctctggccagggagctggggcagcgggcagtgagtagaggctccttttaggtggaatttatcaacttctaccccagcttcatctgtcacacaagactgggctcctctagtgctactgctagatttcagctactcggttagaattttcctgaaaataagctttatttatttctttgtgataacacaagtcttggttcctctattacttttactgcagtgacaaacaatagctacactaataaatgccmactggtcactgtgaaaaaaaaaaaaaaaaaaaaaaaaaaaaaaaaaaaa

SEQ ID NO: 578 - DNA, 627 bp, Canis familiaris
agaagatccacaacctgatccccatcatgctgaagcacccggctcgtcccgccccctgaggagacctactccctgcacagaaagatggggggctccktcctcatctgctccaagctgaaggcccgcttcccctgcaagtccatgttcgaggaggcttacagcaactactgcaagcagcgggctgagcagcagtagctgggctgccccctggggtcctgggcgcccccgcaaccgtccctggcgcccggaccctctccagctgtccccggcacacccaacctctccacagccagactgccgtytcagccctggctcctytggggtctgctccgtgtgcgcttagcctctgraatggagtgragacagcaggtttcccccttttccttgtaatggtggttctcctcctgggaacgtgaggagcccttggattccctgccaccagaattagagaagcccctttagattttaccgaatgttcgtagagggtaaggcttgcgtgtctctgggatgaggtgtgtgtttcctctgcctgtgctccgagccgtgccggcaagtatgcttccccatgtgaggcctggcctgctcgctggctgggctcaatgctctggacagtggaagtttctggag

SEQ ID NO: 579 - DNA, 679 bp, Canis familiaris
cagcagcckgktccaaatagtgatgctgtcttgaaktgccctgcstgcatgrccacactawgtctkgattgccaaaggcatgaatcatacswaactcagtatagagcaatgtttgtgatgaattgttctgtcaacaaagaggaggttctaagatacmaatcccagrgwacaggaagaaaaggcgaggccataagaagatgaggtctaaccacgaagacgctgcagagcagacagaggcacaagcagaagagatctatcaccccgttatgtgcaccgaatgttccacggaagtggccgtctatgacaaggacgaagtctttcatttkttcaacgttttagcaagtcattcttgaatagttcagttggcatttaattgcccaatacagtataaggcaaacacggacagttattaccctcttgcctattcatatcaagtaacattctgagcggttatctgaggatacagtgtttatctttttgaaagagaatggttgtcagccttcatccctccaccccctttaaaaatttttcccccagctctgatgggactgataattcattccctctttgatgggcatttggaaactatggggcttttcatgtattaaagctctttagaattaaaatgttctgcagttataagtaaaaaaaaaaaaaaaaaaaaaaaaaaaaaaaaaaa

SEQ ID NO: 580 - DNA, 646 bp, Canis familiaris
aagcaggaaaggacaaatgtgtgggagatcctggtgtcagagcgggatgtaagagcccttgtcccactgccaaggccgaggagctggtgaacacagctccactgaccggagagccgaggcacgtgcccatacgcctggtcaccgtggacaatgggggggcccctggtggaggygacagagcacattggctgtgagtcgaccaacacacaggtgctgcaggtgtccgagacctgtgatgctgtgtttgtgtctggcaaggagagccggggtgcccaaggggtgcaggtggacttctggtggcgccgtctgagggcctcgctgcagatgacagtgtgggccccattgctgcccctgcgcattgagctgaccgacaccaccctggagcaggtccggggctggagggtccctggccccactgaagggatgccagagcctgaggctgctgctgaggaggctgrgaggcgcccccgaagctgccgcctgcagtaccagcgmgcyggcgtgcgcttccttgtcccctttgcggctcacccactggacggtggccgccgcctcacccacctgctcggccctgactggctgctggatgtgacccacctygtggcacctcacgcacgtgtacaagacccacgcgtagcctcgctgg

SEQ ID NO: 581 - DNA, 2614 bp, Canis familiaris
agtcagaaaactttctaactaaacaccgataagacttcatacaactcacaatactttatattgtaatcatcacaagagccaaggctacctaaaagaagagagtggttgagctcacatttggccgccagctttttacctttctcttcaccatttaaaacttgagacttcctgctttcctggggtcatggataaagtccaatacctcactcgctctgctattagaagagcttcaaccattgaaatgcctcaacaagcacgtcaaaatcttcagaacctatttataaatttctgtctcattttaatatgtctcttgttgatctgcatcattgtgatgcttctctgaagttctgctgcaatctccagtgatgcaacttgtcaccatcaacttaatatctgccatcccatgaagaggggaaaataatactatataacagaccacttctaagtagaagattttacttgtgaaaaggtcaagattcagaacaaaagaaattattaacaaatgtcttcatctgtgggattttgtaaacatgaaaagagctttattttcaaaaattaacttcaaaatgactataggtgcgcataatgtaattgctgaattcctcaacaaagcttgtaaaagtttctatgccaaattttttctgagggtaaagtaggagtttagttttaaaactgctctgctaaccagttcacttcacatataaagcattagcttcactatttgagctaaatatttatattgtactgtaaatgcctatgtaatgtttattaagatttttcaagtctccgctaagtacgaaaataatcatccaaatgaagtcatcatttgaaatagcctactgattccttacatctgttatctttataattatcattcagaagtctttctagtaatagtaactctcataacctacattttgaaatataaattgtattctttctctgtacaacactaacatctttttttaagtttatgagaatcaagtaggaaaaaataagaccatactcttacataaataaaatttctcttaactttttcaaagaattacagagttgtagtgtatgaaggcaaaccataaatctgctctctgtagtacattatgatcaagagacaaaaacaattggttaatttaacagctgagagtatgattagccaattactaatacactaacagaacagagtctaacataaggcactgtagttgatcacctaagtacataacttaccacattatgtctttgaaatcatgaaatcttaagactttagaatgattttatagattgtcttctattcttaacctcatacttaatataggcaaggaaaagaattttaaaaataaaaggagaaatactctttcaagcattaaaaaaataaaatttggggttccccaatattaattccttgatcatattttgacatgaactctttgtcctactgtttataacaagatatagctattttccttaatctatcaaccaaatgttcaatacctatttggtaggcaatcctaccatgctaaattataaacccagtaatgtcaatctacaattttttccttaaatacattttcaatttcccctctgatcatttaaaaatatcttctaactcataatagaagtaaaaattggtattggaaaatatattcaccaaaatttggtaatttaacttgattctgtttaaaattaggtttaaagtggtttatacctatactgcataatccagtaattttaacttcaagacatattactaatatagcaactactaagagaataaagaacatattatttactgtattatttgtggaaatgtggctactaaaagaatttgaaaagtcagtactgatcttggtttatatatatatagtacaagtgctgctaacagattagtaaaggagacactgcttttggattttttctgggtacctgacaggtaatggggatgggcaggggaataattttggttcacagatacctgaggaacagagggaaaagaatctcataccaacagggagatttcttcagcaaagcctcatctaataccaaatagaacacttatagatagtaagcaatatattcaacattaccagttattagtaattatttgtgaaagaagtaaccaagttctatagctgcactgatgttaataagtgggaaatctgaaatgctaaaattctattcctttcattttaatgttcattattacttatatcaacaccaaactataaaatgtgaagctatgggttatttccctaagtaaaataaaaataagtttttgtttttcattctgccttcaatagaaattaaaacctttttcttgaagattacggaatactagaactcagattataatgtagaacaaaaacctaacctttaaacggaacttatttattctgttttcatgatatgtaaagaataagatataataagacaatttatttaaaatttttaaataccaatattctttctacttgtagaataaattctactaatcttaatttacagggtactaaaatgaactcatttttaaatgtttaatgttgccttttatatactttagttggttcaaaatgtttatttaatgcaaatcacctatattaaaaaaagaaccttcttg

SEQ ID NO: 582 - DNA, 699 bp, Canis familiaris
tgaggcggagcaggaggcctacctgcgtgaggattgagcgctggagaccgttgcccacatctgccgggtcagcctgaggagagcaggggtggccaccatccggcccaagggcagcaggsccttctctgcaccagaggcggtggcacatcctgcctggcccatgaaggccttagtgagctgtgagtgcctggcctctcacccctgtggacctggctcttttgccctggggcactgtcaccctgtttaacatttgaccccactctagcaagctctccgctcagccatcttgtttacctcccacccagagcatctcggcagccgtagccagagagaagggtccttgtttgtcacagcccacaagtgtcggtagctgtttaacttctgtttccaatcgttactcacattttcaaatatgatttagtctttgctccctccataggaatgtgtgttttttgggaaaggggagcttgtttataagatttctttttaagtgttctttaatgccttctgtgatctggcctcgttgcctgtaaggacagctgaagcccaggagccagaagtccattattgtgtaaagaactgaatggcagtgtgttacctggtgctcaacatggacctattccaaccacamwwmtttccttctttccttacaagttcctctattgtatatgaaggagaataactttattttgttttata

SEQ ID NO: 583 - DNA, 645 bp, Canis familiaris
ccttagaaacatwractctctcctktcccagcagcgtctccgggtgtagaatcagagatgcagccatcacaaatgacaktkktaacctgtaaagttgtgtgaggatgcttataatttggaaatagagggatgagaatctggccccatttcaccagacatgaatttcgagtagagtakttggcttttcagagttggtgtcctgatgttgccggcccggcccacctgtccscgcatcactgattgtcactagcgggcagcagaagacgtttcgcgttgctgtgtcagccagggtcacgcagttcacgttggaaagctggttcagtaggtcccgagggcggccggtgagctgcggcggggggctcgtgcgcttcgcggcctggcacccggagtgcagcagacmatccgagtcagaagcagagccagcagccgccagtccscggascgggatggaatacggaagctttctcgagggcctttgtttttgttcttcttttcattgagactggaatcmagcttacgtgtaaactattgataatttaagtttccttttgtgtcattcagtgtaaaactgtctaatttgaaaaaaaatgtaggttatgaaaaataaagatttaggcactgttmaaaaaaaaaaaaaaaaaaaaa

SEQ ID NO: 584 - DNA, 3081 bp, Canis familiaris
gaattcggcacgagcagctgccggtgctgctggtgctgctgctgccgccttgtgcacccgtcctgctggttccacctggcacaggacagagccgctgcactcacgggggaggaaaagtttgggaacccagtgcggaggacagagctcaaacctcaggtccccaccccaccccatgccaggcgggcacccaagccctggctcctgccgcctgcccagaggccaccccgcctcctagacaggtgctggacatggaggagctgaccatttgggaacagcacacggccacgctctgcagggacccccggcgaggctttggcattgcgatctctggtggccgggaccgggccagcgggtccgtggtcgtgtccgatgtggtgccggggggacccgcggatggcagactgcagacaggcgaccacgtcgtcatggtgaatggggtttccatggagagtgtcacctccaccttcgccatccagatactcaagacctgcacaaagttggccaacattacggtgaagcgtccccggaaaatccagctgcctgccaccaaggctggcacctccggccggggacgccagggcttggaggaggaggccgactgcggccagggctatgacggcgacacgtccagtggctctggccgctcctgggacaagcgctcccgccgggcgaggacgggccgccggaaccaggctggcagccgtgggcgcaggagcccgggcgggaactcggaggccaacgggctggcgctggtgtccggcttcaagcggctgccgcgccaggacgtgcacatgaggcccgtgaagtccgtgttggtgcggaggacggagagcgaagagttcggggtcaccctgggcagtcagatcttcatcaagcacatcaccgactcgggcctggccgccaggaatcgcggtttgcaggaaggagacctcatcctacagatcaatggtgtgtccagcgagaatctgtccctgagcgacacccggcgcctgattgagaagtccgaggggaagctgacgctgctggtgctcagggaccgagggcagttcctggtgaacatcccgccggccgtcagtgacagcgacagcgacagctccttcctggatgacatctcggccctgggctcagagctgtctcaggcggtgccgtcccatgtcccaccgccacccccgcatgcccagcggagtctggactccgacggaaccgactcccccagggacagtcccccccttcggcgggaaaattctctggattccagaaccatctcggaacccgacgccccgaggcacagcagctatgacatctacagggtgcccagcagccagagcgcagaggaccgtgggtacagccccgactccagggtggtccgcttccacaagggcacgaccatcgggctgcggctggccggcggcaacgacgtgggcatcttcgtgtcgggggtgcaggagggcagcccggccgacgggcagggcatccaggagggagatcagattctgcaggtgaatgacgtgcccttcaggaacctgacccgggaggaggctgtgcagttcctggtggcgctgccgccgggcgaggaagtggagctggtgacgcagcggaacgaggacatcttccggaaaatggtgcagtcccgcgtgggcgactccttctacatccgcacacacttcgagctggaggccagcccgccgtcgggcctgggcttcacccgcggggacgtcttccatgtgctggacacgctgtgccccggccccgggccgagcggcgcccgcgggacccactggctggccgtgcgcatgggccgcgacctccgggagcaggagcgcggcatcatccccaaccagagcagggccgagcagctggccagtctggagtccgcccagcgcgccgtgggggccgggccaggtgcctccgtgggctccagcgcgagggccgagttctggcggctgcggggcctgcggcgtggagccaagaagtccacccagcggagccgcgaggacctatcggctctgaccaggcagggccactacccaccgtatgaacgcgtggtgctgcgagaagccagcttcaagcgcccggtggtgatcctggggcccgtggcggatatcgctatgcagaagctgactgccgagatgcctgaccagttcggaatcgcagacagcgtgttgaggaccgacagcccctccaagatcatcaagctggacaccgtgcgcgtgatcgcggagaagaacaagcacgcgctcttggacgtgacgccgtcggcggtcgagcgcctcaactacgtgcagtactaccccatcgtggtcttctgcgcccccgagagccgggcggccctcaaggccctgcgccagtggctggcgcccgcctcccgccgcagcgcgcgccgcctctacgcgcaagcccagaagcttcggaagcacagcgaacacctgttcacggccaccatccccctgcgcggcacgagcgacacctggtaccaggagctcaaggccgtggtccgcgagcagcagacccggcccatctggacggcggaggaccagctggacaactcgtccgaggacaacctggagctccctcaccgcggcctggccgacagttcggcggatctgagctgcgacagccgggtcaacagcgactacgagacggacggcgagggctacacggacggcgagggctacacggacgtgkacgaggggccgccggcgcccgctctggcccggtcctcggagcccgtgctggaggaggagccccggagcccgcgggatcacgggagagcctcgggtgcccgaggagcccaggtggacaggcacccctaccacagccaggggcgacaggacagcatgcggacgtatgggcaggaagccctgaagaagaagtttacacgagctcgagatgtggagtcctccgatgaggacggctatgactggggcccggccaccgacctgtgacccctcccaggttccctggggctggacctggtttcccactcagaacccagaaccccgcgtccttctgccagtcattaataaataagagtattttcacmammaaaaaaaaaaaaaaaaaaaaaaaaaaaaaaaaaaa

SEQ ID NO: 585 - DNA, 652 bp, Canis familiaris
cagctctgagtcacgtggtcractatttgawycctccacacactgtataatttaggtttggaggagagttaaagcmttaaagtaggaaaacaggaaatttactattgattgccctaattttaggaactatatccctaaaattaactgaaaacacmaatgctaggtgggaatgataaatgagaaagatgtatttatttcagtggaattttgcacatgtgaaaattttgttaaataggaccttraagatcctaaggtttgcttttatggtgggaaacmaaagtctcgctaatgatgacattttgaggtgatagatgtcagagattgtttccttggggttgaaatagcagccmaaacattttctctacttaggcacttgggatgtggctgttggcaacacattttatggtgggatctttaatccagtgataaaatttaaactaaaaacaagccgaaaatgataggtttctttattttcactaaacaggcaattgaaatacatggtacmaaaataagtggtaagattattgtaaaatgaaatggacagaataaatattcaatttaattttccatctatgagaatttcacaataaaatcatagtttactttgtatwawaaaaaaaaaaaaaaarraaaaaaaaaaaaaaaaaaaaaa

SEQ ID NO: 586 - DNA, 4739 bp, Canis familiaris
caccaccctcaccccacactgtaggggtacacagtgaggggtacacggaacatctaaaagcacaggggctttgggtagcgcaaagattacttcgattgcttcagctgatcagtgcccaaaatgtacatgaccttttactgagagagacaagatgaggtacaagaagtacatggccatcctggaagccgcagtgggtatcaccccacttaacaaaagagagcttcttcctgagagcagaagacatgtgaatctctggcagcaccccggggtgcggagtaccacgttattatcgtctccctgcgagtgggattggcccttcggctgtacctcctggcacgagcattccacagagcacagacgtgcgctggcaggcagcctgcttttccaggccccaggcatggaagaactgatatgggagcagtacactgtgaccctacaaaaggattccaaaagaggatttggaattgcagtgtccggaggcagagacaacccccactttgaaaatggagaaacgtcaatcgtcatttctgacgtgctaccgggtgggcctgctgatgggctgcttcaagaaaatgacagggtggtcatggttaacggcacccccatggaggatgtgctccattcatttgctgtccagcagctgagaaaaagtgggaagatcgctgccattgtggtcaagaggccccggaaggtccagctggccccgccccagggcagcctacccgtcgatgaggatgaccgtgcttttgaggtgatggatgagttcgatggcagaagtgcccgcagcgggtacagcgagaggagccggcgcagcagccacggtgggcgcagccgcagctgggaggacagcccggagagggggcgtccccatgagcgggcgtggagccaggagcgcgagcgcagccgtggccggagcctggagcggggcctggaccatgacgatgactaccggcggcctcgagagcgcagccggggccggagcctggagcggggcctggaccatgacgatgactacgggcggcccggagagcgcagccacggcatgagcactgacaggggctacgaccgtggctacgaccgtggctacgaccgtggctacgaccgcacctatagcccagaggccgagtatggccgcaggacccagcctgatgcccggcacgcagggtcccggagccgcagccgcgagcacttgcgctcccgcagccccagccctgagctgagggggcggccggaccatgcaggccagcctgactcggacaggcccatcggggtccttctgatgaaaagcaaagcaaatgaagagtacggtctccggcttgggagtcagatcttcataaagcaaatgaccagaaccgctctggcaactaaagatggcaacctgcacgaaggagacataattctcaagataaatggaactgtaactgagaacatgtctttaactgatgcccgaaaactgatagaaaagtcaagaggaaaactccaactagtggtgttgagagacagcaagcaaacgctcatcaacattccatcattaaatgacagcgactctgaaatagaagatatctcagaaatagagtcaaaccgatcattttctccagaggagagacggcagcagtattccgactatgattatcattcctcaaatgaaaaactgaaggaaaggccaaattcaagagaggacatgcagaacagatggtccaggatgggcgccacacccactccctttaagtccatgggggatattgcatctgtggttggcacagagaacagcaaggaacccagataccaagaggaaccaccagctcctcaacctaaagcagccccaagaacttttcttcgcccgagtcctgaagatgaagcaatatatggtcccaataccaaaatggtgaggtttaagaagggagacagcgtgggactccgattggctggtggcaatgacgttgggatatttgtggctggtattcaagagggtacctcggcagaacaagaaggccttcaagagggggaccagattctgaaggtgaacacacaggatttcagagggctagttcgggaagatgccgttctctacctgctagaaatccctaaaggtgaaatggtgaccattttagctcagagccgagctgatgtgtatagagacatcctggcttgtggcagaggggactcattttttataagaagccactttgaatgtgagaaggaaactccacagagcctggccttcagcaggggggaggtcttccgagttgtagatacactgtatgatggcaagctgggccactggctggctgtgaggattggaaacgaattggagaagggcttaatccccaacaaaagcagagctgaacaaatggccagtgttcagaatgcccagagagacaatgctggggacagagcagatttctggagaatgcgtggccagagatctggcatgaagaagaacttaaggaaaagtcgggaagatctaacagctgctgtgtcagttagcaccaagttcccagcttacgaaagggttttgctgcgagaagctggtttcaagagacctgtggtcttatttggccctatagcagatatagccttggaaaagttggcaaatgagttaccggacctgttccaaactgctaaaacggaaccaaaagatgcaggatccgagaaatctagtggggtggtccggttaaatactgtgaggcaaattattgaacaggataagcatgcactattggatgtgactcctaaagctgtggacctgttgaattatactcagtggttcccgattgtgatttttttcaacccagactctagacaaggtgtcaaaaccatgagacagaggttgaatccaacatccaacaaaagttctcggaagttgtatgatcaagccaacaagcttaagaaaacgtgtgcacatctttttacagctactatcaacctaaattcagccaatgatagctggtttggcagcttgaaggacacaattcagcatcagcaaggagaagcagtttgggtctctgaaggaaagatggaagggatggatgatgaccctgaagaccgcatgtcctacttaactgccatgggcgcagactatctgagttgcgacagccgcctcatcagtgactttgaagacaccgacggtgaaggaggtgcctacactgacaatgagctggatgagccagctgaggagccactggtgtcttccatcacccgctcctcggagccggtgcagcatgaggagagcataaggaagcccagcccagagccacgagctcagatgaggagggctgctagcagagatcaacttagggacagtagtccaccccccgcattcaagccagagccgcccaaggccaaaactcagaacagagaagaatcctttgacatctccagatcccatgactataagtcaaacccctcagccgttgctggtaatgaagtttctggggcatctaccagaagctgtcctcctcctattgcagcaaaaccttcctttggaaggtctatactgaagccctccactcctgtcccttccccagagagtgaggaggtgggagagggcagtgaagagcaagaaggcgctcccaagtctgtcctgggcaaagttaaaatatttgagaagatggatcacaaggcaagattacagagaatgcaggagcttcaagaagcacagaatgcaaggattgaaattgctcagaagcatcctgacatctatgcagttccaatcaaaacacacaagccagaccctggcctgtcccagcacacaagttccaggccacccgagccccagaaaggcccttccaggctctaccaggatcccagaggaagttatggcagtgatgctgaagaggaagaataccgccagcagctgtccgaacactcgaagcgtggctattacagccagccttcccggtaccgggacacggaattatagatgcctgatagtcggcgtgtccgtctccccactgccaccacctcggagcagcgctcccactgagcatgcgacggttctttctagggaaagtgcactgcggagatttgggaccctgaactcccatttcctcaaggggagccccgggggcagccaatgcaaataaaaactgagggctctgtttgtggaactgggtcttgagagttgatggctttttgctcagaatcmagagaaacactacagtctgatactgttacctgcttcagtggaccaaaatttgtattaattctgtttgcgtatttttaacatgtatattaagaagtgataactattttccctcattaatatctgcctttgaggactgtttcaatgagagatggaatgtgaaaaaggaattaaaatgctgttggactcccaactaaattcaaagaaatattttattacaactctaagtgcctttgatgagaagtgtcttaaatattcttcctttgaagctttatgcmaagccataatggactaagactattttgactaaagttttataccagcttaataactatggttttctytgcactgtgtcatcttttcaaggcatttgtctttgtaatattttccataaactctgtatatatagtagctacatgtggtagttcagctaccagtgctaaatagcttgacgaccaagaaatyggtatagaaatttttgtttaaaccatgtgctccagaaaagcagatacttggaaaaactgtatttccamaagtgtgtgtattgacaacagttttataatttaataaaaaggakattgaaatcaaaaaaaaa

SEQ ID NO: 587 - DNA, 656 bp, Canis familiaris
cgggagcggcatcccaccctgagattggcagatgcgtgtgcggttgccagtgtgatcaggtcaccagcagtggagtgttggagtgatgagcgctgatctggtctccaggttttgtgtgttgaggttctcaagaatggtggtcagcagtggtggagttttaaagctgcagcccacagaagaggctatgttcctagagcatgctcagccttgctgcagcaggggaagaacttcaaaggttcaaggaccagtggtcacccatcagtttggactgaaaacccagcttcaacagtttgtggaaacactgcytaccttgtgctgggattcatagaggccattttcttatcaacggcagagccaacaaatgtgtttggcaacatttttttaggataggcaatgttggttgtcattaaattgagttttctagtaatgtattacaaatattgtagccttcttatctcccttgtgcaaacagcttttgtgtttacttgtaagaatttgttctgttgggtaaggttctctttaagctggaaacttactactgagactaatatttccatgtaatcaccataagcccaatactgcaataaagaatggtctttagtamwrrwwrwwaaaaaaaaaaaaaaaaaaaaaaaaaaaaaaaaaaaaaaaaaaaa

SEQ ID NO: 588 - DNA, 669 bp, Canis familiaris
ccggctcactccgtccacgccgcggcgcgcaggatggccgggtccacgtggttgctccaggacgccgcgttgtgcgccggggcgaaggtcccgcasgtctcggacgcggtgctagcgaagctccactagtaggacacgaagtatctcttgctcttggtcccggtgatggtctagtcgctcctcagctggggtatcgtcgtcctccgtgtccgtctgttgtttccgcggtcttagatggtgtatgtggcgaggattcggactggaactttctcgtctttccggcacacctcacggggacgggatggactatcgtgtccggccccccgctgtggtttgggttgttgtccgtccgtcctcgaccctgtcgtctgttgtcccttgtcccacggagggtgctcctgattccgtgggatcggcggttggaggacatccaacgtctccatccccaacacgtcgacatccacggtctctcaccaggtcgcccggtgtccaatgccgtcggtgatgggtcttggggggtcggggcgttccggggcaccgggtccggaaaccggtggttgggatgtgcacgggacccgcccattggacgtctccaaataaacgtcttagacttctgattgaaaaaaaaaaaaaaaaaaaaaaaaaaaaaaaaaaaaaaaaaaaaaaaaa

SEQ ID NO: 589 - DNA, 669 bp, Canis familiaris
ggccgagtgaggcaggtgcggcgccgcgcgtcctaccggcccaggtgcaccaacgaggtcctgcggcgcaacacgcggccccgcttccagggcgtscagagcctgcgccacgatcgcttcgaggtgatcatcctgtgcttcatagagaacgagaaccagggccactaccagatcagcgaggagtcgaccccatagcagcaggaggcacaggcagacaacaaaggcgccagaatctaccacatacaccgctcctaagcctgaccttgaaagagcagaaaggccgtgtggagtgcccctgccctacctgatagcacaggccggggggcgacaccaaacccaacaacaggcaggcaggagctgggacagcagacaacagggaacagggtgcctcccacgaggactaaggcaccctagccgccaacctcctgtaggttgcagaggtaggggttgtgcagctgtaggtgccagagagtggtccagcgggccacaggttacggcagccactacccagaaccccccagccccgcaaggccccgtggcccaggcctttggccaccaaccctacacgtgccctgggcgggtaacctgcagaggtttatttgcagaatctgaagactaacttttttttttttttttttttttttttttttttttttttttttttttttt

SEQ ID NO: 590 - DNA, 680 bp, Canis familiaris
cacatagggtagtggaggagtttccttcagcatggggcagctactcctactatggaggaggtgtctcagcctcaagcagagcctttaggktctctgtggtatttgactgcctagagtgctcagggggaggagcgtgaaatgttcacaaggttggatttgaccaaccaggggaggtagcacactgctgagaaatgatcaaaccagccaaaaggaaccagagctctgacccattgacttccatgctcaagcagctacacaccaaggctaatgcattttacracccactcgacttgtaactgcatgaggccttgtgtagctgatcctggttcccaatttctggcgctctgctacactgmaccacaaatcagctcccaggtaaagccatctaacaactggtaccctaaagttaaacaatgagtcatttcctaagagctaacatgtgagctatataaatataaaagccagaatgttgttttagtgcagagaaggcaaaacaaaaagttgatgcaataacagtaatatgcagagactaagaaactcatcactgataggtttattgtagtttaaccttaagatggatggatggttgtctttgaaggagtacataatttacttattttgatacctcagtttcggtttttttttttttttttttttttttttttttttttttttttttt

SEQ ID NO: 591 - DNA, 680 bp, Canis familiaris
gtgtatcccatcacctcctcaaaggaagtcgtaccccgtcgatgaggatgatacctcctccacagagtcggagttcgtctcggaaatccmagagacaccataaactgacggatctcacgagtccccctcctcgcactttacaagtgttccaacctaaactggttggtcccctccatcgtgtgacgactctttactagtttggtcggttttccttggtctcgagactgggtaactgaaggtacgagttcgtcgatgtgtggttccgattacgtaaaatgytgggtgagctgaacattgacgtactccggaacacatcgactaggaccaagggttaaagaccgcgagacgatgtgacktggtgtttagtcgagggtccatttcggtagattgttgaccatgggatttcaatttgttactcagtaaaggattctcgattgtacactcgatatatttatattttcggtcttacaacaaaatcacgtctcttccgttttgtttttcaactacgttattgtcattatacgtctctgattctttgagtagtgactatccaaataacatcaaattggaattctacctacctaccaacagaaacttcctcatgtattaaatgaataaaactatggagtcaaagccaaaaaaaaaaaaaaaaaaaaaaaaaaaaaaaaaaaaaaaaaaaa

SEQ ID NO: 592 - DNA, 701 bp, Canis familiaris
cccggcctgacggtgcccgagctcacccagcagatgtytgatgctaagaacatgatggctgcctgtgacccccgccatggccgctacctgactgtggctscagtattcagggccgcatgtccatgaaggaggtggacgagcagatgctgaacgtccmaaacaagaacagcagctactttgtcgagtggatccccawcaacgtgaaaacagctgtctgtgacatcccaccccgggggctaaagatgtctgctaccttcatcggcaacagcacagccatccaggagctgttcaagcgcatctcagagcagttcacggccatgttccggcgcaaggccttcttacactggtacacgggtgagggcatggacgagatggagttcacagaggccgagagcaacatgaatgacctggtgtctgagtaccagcagtaccaggatgccaccgccgaggaggagggggagttcgaggaggaggcggaggaggaggtggcctagagctgataacctggtaaagcgcgtggaagctgtgtgaactctttattcgctcacaacctgttctctgatagccgtgtctctgtgtgcactcgctctttttcctgtctggacgtcacatgctgtacagatgccaccattaaagcattttcatagtgtcaaaaaaaaaaaaaaaaaaaaaaaaaaaaaaaaaaaaataaaaaaaaaaat

SEQ ID NO: 593 - DNA, 691 bp, Canis familiaris
actcggatctatcacatcgccgcgccggccccacagctctgcatcagcctgagccggccctcctcctcaaggcgaatgtcatggtgacctgctatcacaaggkkgccggggggacagaccggacccttgtgtttcgagtccagttccacacgtgcaccatccacggaccacggctcactttccccaaggaccagctgggacgaggcctgggctgatgagaggttcccattccaagcctccgtggagttcgtcttctcctccagccctgaaaaggtcaaaggcagcaccccacggaatgacccttcggtctccgttgactacaacaccgcagagcccgccgtgcgctgggactcctacgagcacttcaatcagcaccacgaggacagcgtggacggctcccccacccacacccggggacctctggatggcagtccctacgcccaggtgcagcgggccccccgccagaccccgccggcaccctccccggagccacctccgccccccatgctctccgtcagcagcgaytccggccactcgtccacgctgaccgccgagccggccgccgagtcccctggccggcctcccccgacggccgccgagcgccaggagctggaccgcctcctggggggctgcggggtggccgggccgggccggggcgccgggcgggagacggccatcctggacgacgagg

SEQ ID NO: 594 - DNA, 672 bp, Canis familiaris
gcagcagctcttgcatcagccctggagccggccctcctcctcaagggcgatgtcatggtgacctgctatcacaaggktggccggggtacagacccggacaccttgtgtttcgagtccagttccacacgtgcaccatccacggaccacggctcacttgtccccaaggaccagctggacgaggcctgggctgatgagaggttcccattccaagcctccgtggagttcgtcttcgtcctccagccctgaaaaggtcaaaggcagcaccccacggaatgacccttcggtctccgttgactacaacaccgcagagcccgccgtgcgctgggactcctacgagcacttcaatcagcaccacgaggacagcgtggacggctcccccacccacacccggggacctctggatggcagtccctacgcccaggtgcagcgggccccccgccagaccccgccggcaccctccccggagccacctccgccccccatgctctccgtcagcagcgactccggccactcgtccacagctgaccgccgagccggccgccgagtcccctggccggcctcccccgacggccgccgagcgccaggagctggaccgcctcctggggggctgcggggtggccgggccgggccggggcgccgggcgggagacggccatcctggacgacgaggagc

SEQ ID NO: 595 - DNA, 642 bp, Canis familiaris
aatcgctctggtgggtcagtgtacagatttgtatatagtgtcaatttttacggaaacccctttcggcgtgcataaggaatcactgtgtacmaattggccmagtgcttctgtagataatgtcagtggagtaaatatttgacaggccataacttgagtctcttgccttgcctttattacawgtaaattttgaattctgtgatcagtgatttgggttttattttgtatctgcagggtttgccacttratrataattactgcccctcttatggracactcctckttatacctccacagatgcagactcccctcttgtttgcccmatgacccttttggtacacgtagagatgatttcctttcatttgatggtactgtttcttagtgttttaaattggaacatatcttgcctyatgaagctttaaattattattttaagtttctccctgataaagtgctctcgtcttaacatttgtttgaaattgtgccactgccaatcctacgccagctctgccgtccttcccagtatgattttctcttgctccttggagtgagacccgcatatcatcttgcccacctaaaaatgtctgaatgcttacacaaataaattttataacacacwmaaaaaaaaaaaaaaaaaaaaaaaaa

SEQ ID NO: 596 - DNA, 687 bp, Canis familiaris
cagtactagcgacgttgcaagtctgcttcctgcaccsttatcttaaagcacttacagatagaccttcttctkgtgatcttgctctatkttctcaacacattcagcggccccccmttctgggccctttgtcccgcctcccggcccagcccatccagttcatttcctccttttcctccccgcagaggctgtgttccacatccctgaggaggagaagaagaaaatgagcttctccacagatgtcccatttttttaagactgctttaaaaaaaaaaaaagaaaaaaagaaaaagaaaaagaaaatctaatctgctgtgcttgaatgccacgcggtacaaaggaaaactatcatggagatattatgcaaattcccagatttgaagacaaaaatattctaattctaaccagagcaagcttttttattttttatacaggggaatattttattcaaggtaaaattctaaagaaaatataattgttttttatcttttctacagcaaatttataattttaagattccttttcttgtttatcggcagttgttattacatccttgtggcacatttttttttaattttgtaaaggtgaaaaagcttttatgagctcatgtagcaatcaaattatcctgtggattgataataaatgaatatgatatatagttaaatttttaaaaaaaaaaaaaaaaaaaaa

SEQ ID NO: 597 - DNA, 639 bp, Canis familiaris
ccatctggatttttggaagatctcatctcattgagsttttagcagmtgtgctgcgatttgggattaggtgaaccctcatcggcaccctgctcctgggttgggctgagagaatttgggacagtttgcctgcagtaccatgggaagcgcccagaaattccaagtaccttaggatttgtcgrtgctgtcccmatagctgttgctcatcgacctctagtggtgaatttctagaatgctggtccmttaaatgggattttccaagatcccaaagagctttatcacgtctgggtggtcatcagcataaactggaatgtagtgtcagatgatactgtggcttgttttattattttttttctttgtcaagaagaagaccmaggaataacacttctgtagttcctaaaaatactgattcttttgatttactactatacataaagggaaaattttattcttttatggaacaattcagcagtactcatgtattaaaataggaatgtgaatgctatatactcttcttatatcaaatgtctcaagcacctattttcattctatgcattgtttgtcttttatataaataaaatgtttattagatggaataaagccaaaaatactcaggtcmaaaaaaaaaaaaaaaaaaaaaaa

SEQ ID NO: 598 - DNA, 644 bp, Canis familiaris
ctcaggagttgctggtggcatttgtacagagaatgtttgggggggtaagaggatggcttatttgtggratgaacctagaaaggaccacatgggatcagatgaagagctctgtttggggcctttggtgggagaacagagcagagagctgaagggtgtggtgagcacagcaagctctccttttagaaaggcctgcgagtaggaattgagctagctcttttagaaagttagttcagaaatgacagtcttgccmaattcctagtgaagaagcagttcagtgttaccatatgcctcttgtacttcttgaaatgtttctaggggacagcattgaaaaacccccttcccccatgtctcctgctacaagtgaagattgagggagcagctttgattcttctcaactgtcccctgcatggggagatacactaacccccagaaatgaccgctaagcctcttgccttgtcttcagtagctaatgatcagagagattttttttttaaattaccatgatcccaaggttccatcctgaaatttatttttctttgtatgaatatgtgtaaatgatttaaaaataaaactgtatgaataaagtttgtatgaagaataaaaaaaaaaaaaaaaaaaaaaaaaaaaaaaaaaaaaaaaaaaaa

SEQ ID NO: 599 - DNA, 699 bp, Canis familiaris
ggtaacatccatccagtggaagctactgtaaagggtaattgtttcctggtttcccgtattaagtatcttaccaacttratacatagaatacactgtggcttttatctattaattggracacgttttactttggtcttagaaaacacactgttaccaggggatccaggaatgttccaaaattggttactggtcaccgaagacctcttgtgttagggcatgatcggatcgggcagccaaactgaacacttgatctgaaagctggcttttgctttttgtttttttaaattggcttttgcttcttgaatgtgtacatctgagtagtactactcatttggaagcgtgtactaacgtgacagaccacacctggccacttcaccaggaagatgcggtacagtgccaactgcagtgacataacgactccctgttttgcatcacccatctgaaaagaccccttcaaagatgcgatacataaaatctcattacmaatcagcgctaataggtgaacatttgcagttgatgatggggactgctgacttgaacactaattaaaggagatgtcatcctcgactcccaaagaaagacgtattattaaagaaaaattgctcmactgttacagtttcgacttcgttaataaaaattttgtggagawammaaaaaaaaaaaaaaaaaaaaaaaaaaaaaaaaaaaaaaaaaaaaaaa

SEQ ID NO: 600 - DNA, 693 bp, Canis familiaris
aggactcactctgaccagtttctggtgtccttcaaagaagtaggaagaracctcctacttttkggagawgcatctgtcamttgycctggaactgctgaattctggatacgaatttgacgaagggtctatcatctttaatcggttcaggtctgtcatctcctacaagacagaagaaaagcccatcttttccctkgaaaccgttgcaagtgctgagagcatgagtatctatgatgatattgatgctgacgtgctgcagaattaccmagaatacmatttggccaacatcatctactattctctaaaggaatccaccacgagtgagcagagtgccaggatgacagccatggacaatgctagcaagaacgcttctgagatgattgacaaactgactttgacgttcaatcgcacccgccaggctgtcatcaccaaagagttgattgaaatymtctctggtgcagcagctctggattaatgaaaaccaagtttcatcctcagataagaggtaaagaagggaaattcagcccgctgattttatttttagcttactgctgtcctcatcagaagaaattgttggtccattgtttaaactactaaagacagccaaatgtttgtaaattatcttacmaataaacagcttacataagaaaaaaaaaaaaaaaaaaaaaaaaaaaaaaaaaaaaaaaaaaaaaaaaa

SEQ ID NO: 601 - DNA, 130 bp, Canis familiaris
gaagmgmkwstggagtagttggagcaaaaaagtgtttggtcctggcacaattctcagggttacagataaaagtcctgaagacatttcccccaagcccacaatttttcttccttcgattgctgaaataaaa

SEQ ID NO: 602 - DNA, 646 bp, Canis familiaris
gggctcctcataatcgtgactattattgctccatcragctgtgaaaagaaawkgatggaccttgctggraactaaagcttagcmaaaggatttttgtgcaatgcccacagttggggrtccagaaatttatagcattggaactgataccgataccgcttacgggatcaaaaatcctatcttcgcttctgtgtcttacagtgttttgtttggggcaaaattatttaaatcacattctacgtagtcgaaccgcctctcatgtttcatggtttttaaagtcttggggccatcatgaatatatttttcaaatctgaattgttgataacccggagtgcgaaatgccaaattttgaaatatgatcaaaagtctgagtttttataaaacacgaaaggcgaatacttccagtgcttcgggttgacccttgtatgccacagctctgctctatttattgttattttgcaaaataataatcattttaacatttgataaagcatatttatgaacatatttcttaataggaaaaatgtccattttattaccattttctatctttttcagaatatgcgagtttttacctatatgtcttataataaaaagaaataaaatctttgggraaaaaaaaaaaaaaaaaaaaaaaaaaaaaaaaaaa

SEQ ID NO: 603 - DNA, 694 bp, Canis familiaris
cctctcctggacccacctgctcaacccagcaggaagggctttccagagcggacccttgtccagttaggcttcggcatctactctgaggaggagtggactccatcttatgaggcctccaacctctatggcatctcagccatggatggtgttcccttcacactgcacccccggttcgaggggcaagarctgttggccccctggccttctctgctttttgccgatctgaccatcaagtcactggcggatattgaggaggagtataactacggcttcgtggtggagaagactgcagctgcacgcctgccccccagtgtctcgtagctcttcgtcagccccagggaaagcccgctgcccagcacccctgacacaccccaggactggcagctaccccascctgcagcatcttgggaaccttggtggtgcagggctttctagactaagccacccagtggaaccacagccctggagaaggagcaagacctgtctgcttggtgatggggtctctggcctgcctcgcccccgggccctacaaggcagaggtgggggctggatggaaaccagtgccttcaagtcatttgtgtcaaaacgttccggtgcccggaggccactcaggcatcctcccggcaataaacattgccctgtgcccacaaaaaaaaaaaaaaaaaaaaaaaaaaaaaaaaaaaaaaaaaaaaaa

SEQ ID NO: 604 - DNA, 686 bp, Canis familiaris
atgtcactmatagaatatttccsaagctagattgataacgagggaaaaacacgtgtccccttctagttttgagaaacttcctcttggctcccaggaggagggattccttgatgttgacacacatgagccaccttggtggtgtggaaaaactwaaattcatttktttatgtcctcttctccctctctgccttcaacatagacttgactcccttaaacccmgagacctgttggaacctgatcccmtgaaatggttcccagtatgtcaggcmatctggactttacggtgtcaccactgagatggcgtccctcmaaagagttccyttttttagcttgtggatcttcagattgataattctgccmttttcatttcatttcctgaaagtcagggtcggcttgtgaaaagttgttaaacmacatgctaaatgtgaactgtcaaccctcactctaaactttccctgttcagagcatcacatgaagacttcattgggttttatagtggctttctgattttggtagtccmttgaagaagggagtttgaaagttgttgtatactgttaacgatcgtccgcccatgtcctgcctgaaataccmtgattgtttatgaaaagtatctttaataaagctggatacmgtttgrmwwrraaaaaaaaaaaaaaaaaaaaaaaaaaaaaaaaaaaaaaaaaaag

SEQ ID NO: 605 - DNA, 993 bp, Canis familiaris
  misc_feature (985)..(985): n comprises a, c, g, or t, or includes no nucleotide
tatgcttcccggtacaagcggccccagctgtggctggccctcctgccccgggggactgcaacgaccgtgggcgctgcgtgcaggggtgtgtgcgtgtgccgggccggcttctgggggcgacgactgcagcctgcgctcctgccccgggggctgcagccagaggggacgctgcgaggacagggcagctgcgtgtgcgaccccggctacgctggcgacgactgtgggaagcgcagctgcccccggggctgcagccagaggggacgctgcgaggacagggcgctgcgtgtgcgaccccggctacgctggcgacgactgtgggaagcgcagctgcccccggggctgcagccagaggggacgctgcgaggacgggcgctgcgtgtgcgaccccggctacgctggcgacgactgcggctcgcggagctgcccgtgggactscggcgaggscggtcsytgcgtggacggccgctgtgtgtgctggcccggctacgcgggcgaggactgcggcgcccggacgtgtccccgagactgccggggccgcgggcgctgcgaggacggcgagtgcatctgcgacgcgggctacagcggggacgactgcggcgtgcgcagctgcccgggggactgcaaccaaaggggccgctgcgaggacggccgctgcgtgtgctggcccgggtacacggggcccgactgcggcgcgcgcgcctgcaccccgcgactgccggggccgcgggcgctgcgagaacggcgtgtgcgtgtgccacgcgggctacagcggcgaggactgcggcgtgcgcmgctgtcccggggactgtcgcggccggggccgctgcgacaatggccgctgcgtgtgctggcccgggtacacgggccgggactgcggcacgcgcgcctgccctggcgattgccggggccgcgggcgctgcgtggacggccgctgtgtgtgcaacactggcttcgcgggcgaggactgcggaagtcgtcggtgacnctggggac

SEQ ID NO: 606 - DNA, 642 bp, Canis familiaris
ccccatacagtggccttcgtaggacacaggggatccytgatgctcccagacttcctatksccaggrctgggccccagctgtgctgttggagtgaaggagtgaaggagaagagacagccttttcttccatccccgtccctcccaatccccccctccagcatcttctcccccatgcccctggtccagcagggctctctttgcttggtccttggcaatctctcctatccccctggatccccttctcccaaactgctaaatgcctgcggcttccagctcctttggcctcgtcttcaaacggttcccttcagtcgcggctcagcagttcccccccgagtggatgaggcctgtccaagaggcagggagccaactgagtggacagggtgcctggcctcagacccactgggagtgagtgtgcacgtgtgagagtgcgagtttgtgtaggagcgtgtgcatgtgtgcgtgtgcccgcgtactgcttgcaggcgagcagggttccccatgtagcctggaccccgtgctgggcgtccgccacggttgctgctcatttccgcacggtctgcctctgatgaaggtgaatcgcagtgacattccaagctcccaataaagactgtcccmaactttraaaaaaaaaaaaaaaaaaaaa

SEQ ID NO: 607 - DNA, 658 bp, Canis familiaris
tgaaagagaaatgcttttagaaaagttcattaatggcgctaaggaawttgctatgctcttcgagctgaaggctattgggctgactttattgacccatcatctggtttggcattttytggaccatatacvrvsacactctttktgaaacagatgaacgctatcgacatttaggattctctgtggatgatcttggctgctgtaaagtgattcgtcataggctctggggtacccatgtggttgtaggaagtatcttcactaatgcaacaccagacagccatattatgaagaagttaggtggaaaccracagtaatgtcmatgtattggctgtactattgatatgtaccactttgggttgatctataaacactgtcaaaagcttcmatttttaaaatttacttatttctgggtatttatttcmacatttatgaatttacagcattggcaaatggtataatttttaaatctcaaatgtttattaatactatcattgaatacatgttgatcacatccacatcgtatagaatgtgataattaacatgtaaccaggacatgatctcatattgttatttctcccctttattggaaaaacttgagttttatttttctctaaaaataaatcaatcacacatttrrttaaaaaaaaaaaaaaaaaaaaaa

SEQ ID NO: 608 - DNA, 640 bp, Canis familiaris
gataggacacaccgactcakctgatggccgcccccggcaccattcaggggggacttcagtgtccacatcagcaggaacatcattcatgccakcgactctgtggagggggcccggagggagatccagctatggtttcagagcagtgagctggtggactggkcagactgwwaaccatccacagcagcatcttacgcagcctgagcactcgggctgccctcagccaccctgcggccacccaggatcaactacctctgtgtgcagaccccgagcccatccccggcggtctgcccttctgtcccagaccccgtctaccttccgctccatgctaccctgaggagctgagcaaccaactctatgtgccttttactatcctgagccagtaagaaattggaccmaatcctttctatgccaaagtgccagacaacctttgggggggtctccaaaattacgtagtgtaagcgcccttcccccaaggggggtgagacatcactgtgttgtggcgggcgggagttgtttgttacagttcctgccatctttcagattaggggtgaggacttcatgcaaagccgtaagagtttgagagtagaaataaagcttaccttaagctcwamaaaaaaaaaaaaaaaaawaaaaaaaaaaa

SEQ ID NO: 609 - DNA, 626 bp, Canis familiaris
ggagccacctggggttgcagagacactccattgtccaaatggaggctcttaatcactgtctttgtccctagttttcccaacctgagacctaacaggagtggggttttggctctccaggcccaggkcagagaagctgaacagagattgtcttctgcctccaggcccacagtcctttgtcacatgtgtctcccagcctatccccttgtggatctgatgtgctggaatagctcacccaagtcattgcgctaagagtggcatctgttgagagcctgctgtgccgggctgcgtgcttaccactttacgcacatcagttcttctacttctcaccatgcaaccatatcacccccattttacagaaggctaaagggtggaaaagttcaatagtctacccaaggtcctgcagctaataggaggctgaacagggacttgagccaggctctctgctctgaagaccaggccctggatttctgccctagaacttcctcattagggttctgtgtgtgctggaaggttaattctccgcccttggggtgtgtcatgttatggaaaggttgggagtactgctttctgataaaatggaatgcattttaaaaaaaaaaaaaaaaaaaaaaaaaaaaaaaaaaaaa

SEQ ID NO: 610 - DNA, 626 bp, Canis familiaris
acctttgccagatattggtgacgtgtgtgcaaagcagcagcaagtgaagatggtttgtgttcctgttgtcgtgcacttcaggatgcgctggttcacaccaagcctcatcagtgccctgcctgtcaaggattcatgccttcaggcttatgaaaccttatgggcttttccagagaaagcctgacagctgttttccataaaatgtttaaaagatcaaattagcccmaatgctggattggcgcgacaagatgaacagtccaccgcgctttatttatgtggagaggtttctgtttatttcctcttgcagttgtgcgtatgattttggtagatcatgaaatgagaaatggttttcagagtattagatggaacttgcccccactgaagtttataagggtgttctggggaagggggaggggagcgttcgctatctaatcagttctgcacataatgaaaattaaagccctctccaggtgcagctttrgcttaaaactggttacttcagagaaaagccatgtgaggtcctccccacccgtctcattgtttatttgattgcttattgcttaataaaatacaactaaatgtggttgcmaaaaaaaaaaaaaaaaaaaaaaaaaaaaaaaaaaaaaaaa

SEQ ID NO: 611 - DNA, 632 bp, Canis familiaris
gcttaatgtgaaaggaaaatgtgttctgttttgtagaggractttcaagtattgttgtaaatacttgggacagaggttgctgaactttwaaaaaaattaatttattattataatgacctaatttattaatctgaagatgaaccmtttgttttttgtcttagaatatccaaaagaaaagaaaaaggtgttctagctgtttgcatcaaagaaaaaagatttattatcaaggggcaatatttttatctatgttccsaaaataaatttgttaatgatactatgttacccaaatagatctacatcaacctgattagtataaaattttgttgacmatgaatccattcctggcataaaaaaatatatatagatcmaaaaaaaagttgtaaatgcttgctttttgttttttcaatcatggccatattatgaaaatactaacaggatataggacgaggtgtaaatttttttattattattttaaagatatgatttatcctgagtgctgtatctattactctttactttggttcctgttgtgctcttgtaaaagaaaaaatataatttcyctgaagaataaaatagatctatggcacttggaaaaaaaaaaaaaaaaaaaaaaaaaaaaaaaaaaaaaaaaa

SEQ ID NO: 612 - DNA, 3324 bp, Canis familiaris
gttgtggaagaaggaagatggccagagctgtatgtccacttaatgccctctggcttctggagtgggtgcagctgttcttgggacctggtgccatccctctaggctgggccttgaacttggacccagtgcaactcaccttctacacaggccccaatggcagccactttgggttttcactggacttctacaaggacaaccatgggagagtggccttcgtggtaggcgccccgcggaccctgggccgcagccaggaggagacgggcggcgtattcctgtgcccctggagggccgagggtggccagtgcacgtcgctgccctttgacctcaatgacgagacccgacacataggctcccacaccttccaaaccttcaagtctcggcaaggactgggggcgtcggtcgtcagctggaacgacaacattgtggcctgcgccccctggcagcactggaacgtcctagaaaagaccgaggaggccgagaagacgcccgtaggtggctgctttgtggctcagctccggaacggccaccgcgcggagtactcgccgtgtcgggctaacaccatgagctcggtttatgtgaaaaatcggtttaaccaagacaagcgctattgcgaagcgggcttcagcgctgcggtcactcaggctggagtgctggtgcttggggcccccggcggctattttttcttaggtctcctggtgcggacgcctattgacaatatcatctcgagttaccgcccgggcaccctgttgtggcacgtgtcctcccagagcttcacctacgactacagcaagccagagtactacgacggctaccgggggtactctgtggctgtgggcgagttcgacgggaatctcaacactacagagtatgtcctcggtgccccgacctggagctgtaccctaggagcggtggaaattttgaacgagtaccaccagacgctgcacaggctgcacggagagcagatggcttcgtattttggacactcgatagccgtcactgatgtcaacggagacgggcggcacgacttgctggtgggcgcgccactgttcatggagagccgcgcggaccgcaagctggccgaggtggggcgcgtgtacttgttcctgcagcctcgaggtcaccaggcgctgggcgcccccagcctcctgctgactggcacacagctctatgggcgattcggctcggccatcgcatctctgggcgacctcgaccgggacggctacaacgatgttgcagtggctgccccctacggaggtcccagtagtctgggccaagtgctggtgtacctaggtcagagtgaggggctcagctcacgcccctcccagatcctggacagccccttcccagcaggctctggcttcggcttctccctgcgaggtgccacagacatcgatgacaatggatacccagacctactggtaggagcttatggggccagcaaggtggctgtgtacagagctcagccagtggtggtggccaatgtccagctgctggtacaagattcactgaatcctgctgtgaagaactgtatcctgcctcagaccaagacaccagtgagctgctttaacatacagatgtgtgtgggagccactgggcacaacattcctcagcagctgyccctaaatgccgagctgcagctggaccggcaaaagccccgccagggccggagggtgttactgctaaattctcagctggcgagcagcaccctgcatctggacctgggcgggaggcacagccccatctgccacaccaccaccgccttcctccgagatgaggccgacttccgggacaagctgagccccattgtactcagcttgaacgtgtcgctacagcccaggaaggatggagtagcccctgccattgtgctgcatggagacacccatgtccaggagcagactcgcatcatcctagactgtggggaagatgacctgtgtgtgccccagctccagctcaccgccatcgtgatgggctccccactcctcattggagccgataatgtactggagctgcagatggatgcggccaatgagggcgagggggcctacgaagcagagcttgctgtgcacctgcccccaggtgcccamtacatgcgggccatcagcaacattgagggctttgagagactcatctgtaaccagaagaaggagaatgagaccaagatagtgctgtgtgagctgggtaaccccatgaagaggaacgcccggataggaatcaccatgttggtgagtgtggagaacctggaagaggctggggaacatgtgtccttctggctgcaaatcagaagcaaaaacagccagaatccgaacagtgaggctgtgctgctggatgtgccagtgcgggcagaggcccatgtgaagctaagagggaactcctttccagcctctctggtggtggtggcagaagaagacaacagggagaacagctcagagagctggggccccaaagtggagcacacctacgagcttcacaacaatggccctggtaccgtaagtggcctccacctccacctctgctttcctggggagtcccagccttctgacctgctctacatcctggacatacaacctgaggggggacttcaatgctccccccagccctctattaaccccttcaagctggactggaggcagcctacccccagcccttcccccacttccccggggtatcacaagcgggagcgcaggcaggcttctctgccagggtccagccagccctctgggcttcaggatccagttctcctgagctgcaagtcggggccgcatacagtggtgcagtgtgagctgcaggagatggcgcgagggcagcgagccatggtcaaggtgctagctttcctgcagctgcccagcctccagcagaggccgctggatcagttcgtgctggaatcgcaagcttggttcaacgtctcctcccttccctacgctgtgccctccctcagcctgcccagtggggaaactctggtgcagacacacttgcttcgtgccttggaggagagggacattcccatctggtgggtgctggtaggcgtactcggaggcctgctgttgctcatgctcctggtcctggccatgtggaagggcggcttcttcaagcgcaaccggccaccgctagaagaagaggaggaggagtgatggagcagctcacgctctgtcctaggaggaaggctggggacctgcctgctctgccctttcttcagtgtgcgccccccagctctgctcacccacgggttggagctgtgccatggaggcctcctgatacccccctctacctcatcccccagagctggccactcctttccctgctgccaaataaagaggctgagtccca

SEQ ID NO: 613 - DNA, 746 bp, Canis familiaris
gtcctggaaaccgacggtaaaggaaagagggcgttgatggcgtcgggcgccccgaggactttgggagccgytgktggggccccmgagcgcttccgggcccggacaggcacgagctgtgctgctgactgccgcgccgccccgccacmccgcccaggcscctgtgcctacgcggcccatggccgtggggcctggctgaggctgcccgccgttgcctccacgacatcgccctggcccatagggctgctgctgctgcccggccccccgtgcccccgccagcaccacagccacccagccctgctcggagtccccctcggcctgccccggccagggaggatgacgaagaagacgaggaggagcggacagagacggagacctctggggagcggctgggtgtcagcgatgatggagggctctttgtaatggacgaggatgccacactccaggacctgccccccttctgtgagtcggaccctgagagcacagatgatggcagcctgagcgaggagacccctgctggcccccccgcctactccgtgcccccggcctcagccctgcccacrcagcagtatgccaagtccctgcctgtgtccgtgcccgtctgggccttcaaggagaagaggccagaagcacggtcatcggatgaagagaatggrccgccctcttcgccggacctggaccgcatcgcggcgagcatgcgcgcgctggtgctgcgggaggccgagracacccaggtcttcggggacctg

SEQ ID NO: 614 - DNA, 657 bp, Canis familiaris
aatgcgsmccctgcgagaagggaatcagtttatgtaaaccccacagggactttccckaccctgattggggcactctggatattgcratcacaaactggggctctggaggccctgctgcacactcaggacatccagaggctccagcctctccccctgccccctccaccaacatcagatctgggaggcctcagtgctggggtatatgtgtatgtgtgtgtctctcaccgaatcttccccagttctcaattcccattcccacccaaggctaggaaacmaagatggagaaatagtgtagtaatgtccttctggacattattacagggcacagggcacaggtcaccacgtggatttctgccctctttgagggaaaggatattccmatgggtagctggctyctttgctggtcatttttgtggctgagtgtgtgtgtgtgtgtgtgtgtgtgtgtatgtgtgtgtgtgtctggtgactctacggtaatcccaccctgtccccaggacctctgttccctctacagtaacaaacactccaggggaccctgttggggtgggggtggaggcgcaaggacaaagactgctgtcactccmaaggacatttttgagcaataaaattgtcaagtataaaaaaaaaaaaaaaaaaaaaaaaaaaaaaaaaaar

SEQ ID NO: 615 - DNA, 683 bp, Canis familiaris
ttgcttgcatgacagctccagcagggagcatgtgtggtgcttttggacggttggggttttttttttgtgtttttgggtttttttttgttttgttttgttttgttttctttagactgtaktaagaaacacgtacagcacaagctggccttgtgttgctggttcctgttcagtatttcctggggattgtttgcttctttaagtaaaacacttctgacccatagtacagtatgtcttaatggcacaggtcacatcagcatctttctgcttttgagactctctcggctggctgcttcacctggattcaggggagacccgtagcctgtgcttgggtttccacgtgctgcgatgtatcttgtatagataagcacmaaagagaaggtgctcactaacagaggtacattactacmatgttctcttaacagttaaacacagctgtttacagtttcaactgctgaatactatttgagctatttaaagcttatattttagtatgaactaaatgaaggttaagacatgctttagaaaaatgcactgatttctgcattatgtgtacagtattggacaaaggatgttattcatttttgttgcattattttgaatattgtcttttcattttaataaagttataatactatttatgacaccgttaaaaaaaaaaaaaaaaaaaaaaaaaaaaaaaaaaa

SEQ ID NO: 616 - DNA, 748 bp, Canis familiaris
ttcctgggctcctcataaccagaggatgtgaacccaggtcaagtgccaatgaccatgscttaaagaaaaaggagcaccctggtggctccctggggacagtctggggtccctttctcgcggctgcaggggcccacagcctgctgcatkgktkgtggcccttcttgcgagtcatgbccggggcctcaagctgctgcttaccasygggagcgctaccacccargcccaggccgctggccatgctgctcggggcatcttgggccaggcttagctggctgctcagctggctgcgtccacactgctccagcctctctaacccacggagtgggagcacacaaggggaagggctggggctgcacactgagctgcccagagagcggggcaggcaccacctgggtccacaactggcttcccggaccgggcagaggggaaggtctgtaaaggccccagctcagagcccttctgggcttctttgggatggggaaagaaaactatttgcaaggctcaactaaaaccattcacagctttcccacacatagactgtagttgtttttgtctccmaaacttttggctttttgtattttttaattttaatttcactgttatccttgattatttgtcttttttattgagttgttggagaagcaggagctagtcgtgcctcatctattattgcmaaatgtaacmataaacttcctcyaaaataaaaaaaaaaaaaaaaaaaaaaaaaaaaaaaaaaaaaaaaaaaaaa

SEQ ID NO: 617 - DNA, 639 bp, Canis familiaris
ccggggtaacgttgctagggtttcacagggcatctctgccccacaagaataggaagtktkccacagatgctgcggtcctctcagtcccagctgtgacgttgtggcctaagctaggaggaaamcraaaarmagcagttttcacccagtttcggttccctgcccgaggtgctgacccmattcgctgccmaaagagagtcaatcagaatatacmaaccctatatggttgtgtcatcctctcktaatcatttgttactaattctaataatcagctctagcttgctttcataactttcatggctttgcttgatctgttgacgctttttctcatcaagacattgcagcattttagccaggcaatatttactcatttgttaggaaaatcaagatgtggctaaagatcagaggctcagtagcaacctgtgttgtagcagtgatgtcagtccattgattgtctttagagagttaatgttggaaaaaaaaaaaaaaatcttactgatcagacaaacatgatctgctgaagacacatgcgcttttgtagaatttaacatctggtgtttttctgaaaaaaaaaatatatacatatattgctttatttgaaacaaattaaaatatgctgcatttgaaaaaaaaaaaaaaaaa

SEQ ID NO: 618 - DNA, 668 bp, Canis familiaris
gcagcttctacgaaaaattgttgttctgttaactgaataccactctgtaaktgcaaaaraaaaaaaaagtgcagctgttttgttgacattctgaatgcttctaagtaaatacaattttttttattagtattgttgtccttttcataggtctgaaatttttcttcttgaggggaagctagtcttgcttttgcccattttggatcacatggattattacagtgtttatcttttcatatagttagctgatagaaagcttttgtctgcaccctgcataytcatgatgagggtaataaaagtygaattgagacagttttcatccataactgaaactcaaatcttgatcaattgataccagatctcacatagcccggtcacatttataaagtgaagagtaaccagtctattcacagcatgggattagtagaatcaatcattttgaaagtctgtccttgaaggactaagaaaagtatgttctaatctttacatgaggactctacattctttaactcccattaccatgtaatggcagttatatttgcagttcccacattaaagaagacctgagaatgtatccccmaaagcgtgagcttaaaatacagactgccatattaaatgttttgttgacattagtcccagcaaaggctctggaaaacagaaaaaaaaaaaaa

SEQ ID NO: 619 - DNA, 737 bp, Canis familiaris
gtagatctgaaatagacatctcactgggataattaattgtatgtagcactgtgctgtgtagatagttcctattggaaaaatgagttgaagtttatgaaagccagaaggtatgagattctattatgtttarattcagtaagggaaatccasaatccctcgttttattctgtctttttaggaaagctgtattgtggtgaaaattgttaacataaaagtgattatttagttctagtagtcttttatgattacactaatgtagcctagaaatagctatgtccttaggaaagtgtggtttagtttttgattttttacaggtaagtacagaggagaaaggatctcacgaatgttctgatgtgtaatatttgccttcagcttttgaaatggaatgggtctgagaaattcagaaagtatagctatatattcttcatattcttttataataatttgaggtccmaaaagactgcatttttaaacaagttactattaatgcattggcccacgtagcaaaaagatatttgattatcttataaattgttaagtacctttttcatgacttttctcagtattgtaacagcaacttgtcaaatccaagcatatttgaatgtgagctcccataatttgaaattgaaatagtactgtggttctgtatattatgttaaaatattaaataatggaaacctttmrwmatgtgtgaatgttttgattaaaagaaagtaatggtaraawwrmwaaaaaaa

SEQ ID NO: 620 - DNA, 700 bp, Canis familiaris
tcccacaggtgtcgcgagtaggacaargaaacttctgttgtcaacttwgccagatatctgtaaactattacatcgtcagccccaaacattcttcttgcatttttattggctgaattggggtacaagtggttctatagatggtaataatcaacttgtaatcaaaggaagattccaacagaaacagatagaaaatgttttgagaagatatatcaaggaatacgttacctgtcatacgtgccgatcaccggacacaatcctgcacaaaggacacccgactctatttcttacagtgcgaaacttgtcattctcgatgctctgttgccagcatcaaaaccggcttccaggctgtcacaggcaagcgagcacagctccgtgccaaagctaactaattggctaaccaccactgattttgcaaagtgtgttgtggagatttggctggacaggtttaccatcagagtggatataccactgtattaaaaacaagatagaaaagctgccaggttctttggcgtgtggctggttggtctgaaatccttgcaagatgctgatgctcaagctgttgacatactcattgcctactttaacaactgtcagaaaaacatgatggggtaaggcggtgcttttttaaaatcgttcatagacttatgtaaaatgcaagataaattaaagttattataacagtgaaaaaaaaaaaaaaaaa

SEQ ID NO: 621 - DNA, 699 bp, Canis familiaris
tatgctgcctcctagggaaaatccaactgatgagtatctggatggccattgatgaatgaggctcctgggccccataaattttamcatgtttctcacgatgtttggtgaaaagttaaatggcacagatccrgaagatgtcatcagaaatgcttttgcttgctttgatgaagaagcaactgscaccatccaggaagattacytgagagagctgctgacaaccatgggagaccggtttacagatgaggagktggatgasctgtacagggaagcacctatcgacaagaaggggaatttcrattacattgagttcacgcgcatccttaracacggagcaaaagacmaagatgactgaaaagaycttcraattccagccaaacgttccttgttgccactttgggtatttctgagactttctcttagagtctgttgcatgcccttagctttgcagcttttgcctttcttgttgtatttattctcagccatttggggcacatgcatctctataatcagactggaaatgggattttttatgatttttcagaatagaaaatagsgcmatttaacttwccmgcccccctccccaaawtamccscagtctacacagagtcagtatattttttcagagaaagttattcactcaattttttctgaaccataattaaactttatgataaaaacttaaaaaaaaaaaaaaaaaaa

SEQ ID NO: 622 - DNA, 781 bp, Canis familiaris
caacatgatgaatcagaacagagatggtttcattgacaaggaagatttgcatgatatgcttgcttctctagggaagaatccaaccgatgcataccttgaggccatgatgaatgaggctccagggccccattaatttcaccatgttcctcacgatgtttggtgagaagttaaacggcacagatccggaagatgtcatcagaaatgcttttgcttgctttgatgaagaagcmactggcaccatccaggaagattacctgagagagctgctgacaaccatgggagaccggtttacagatgaggaggtggatgagctgtacagggaagcacctatcgataagaaggggaatttcaattacattgagttcacgcgcatccttaaacmcggagcmaaagacmaagatgattgaaagaactttagctaaaacttccagttgctttgtctttgttttaattctcagacactttcccccaccctcatagacctgttgcatgcaacttagtttcacagcttggcctctttttttgatctatttattctagatctttctgccacttagcacttgtataatcagactgcaaatggggttgaggttgtaaattgtgctgaaaaagagattgagaataaaaatcaacaaatgtgaaagcccaggaaaawawatctggtatttctggttttgctggatttttacatttttataataataaaaacactattttgaaataaagattatgctgagtccaaaaaaaaaaaaaaaaaaaaaaaaaaaaaaaaaaaaaaaaa

SEQ ID NO: 623 - DNA, 671 bp, Canis familiaris
cggtgtgcgagaaaattgccagcattctaagatcgtaacagcaatggccaaggagtccgtgaacgcagcttttgaaatgacgctaacggagggaaacaggctggagaagaagctcttctacgcgactttcgctactgaagaccggaaggaagggatgaccgcgtttgtggaaaagagaaaggccagcttcaaagaccagtgagcgcctccgcctctgccttgaaccctcgactcgaagacaggaattacggtctgacggtcttagaagcmaataaattctctagtaaagggccctgtaggcggcacgcagtctctgacgcacggggctctcgctctcctgagtgggggcggtcttcacccggcggtcctgagactccgtgtctggagcctgttctcattctgactgagcagattcttaatcaaaaattctcacacacacacacacaaattcttacgaggggagcttgggcggcgcagttggttacgtggctggcactgagcccaggtcatgatctcagggtcgtggggctgagccctgcatcgggctccctgcttggtggggagtcggcttcagaccctccgtctgctcctccccacactcgtgtgcacacttgagcgctctctctctctctctgtcaaataaataaccctaaaaaaaaaaaaaaaaaaaa

SEQ ID NO: 624 - DNA, 699 bp, Canis familiaris
  misc_feature (51)..(51): n comprises a, c, g, or t, or includes no nucleotide
ccttttcaccccgagggagatggcttccccctacgcagcaggcaggtttgngagttagatgtcaaagcatctgcstgaatgagttgttgttaacttatcgttcctggtcccttgtgcaagtgacgccctgcagctcacccattcattcamstcgaacttccttcattcagcaggaggtcctattaccctctgccagcgtgccactgccagagccagattcaacgggactcctgcaagggagtccaggctgcagccacaggtactgctgtggaggcgagtctggctgtagttgggagaacagtgatgggccccccgccgtcgggtctgcmctgggctgattggtgagtgatccctgcggcgtccgacacaggggccgagggagaccaagcaggcggagggagaacatggtaagaagtggtgctcactttctccattcccccagtgtgattctaccaggctacaagggacagcccgaaaaccattgtttgcagcgactgagcttatgtgggacactcggccagacaccctgaaccacatagctcaagccaagatcattgctttactttgtatttactactgtgtgagtcaattggttccacttcaggtctctgcttaaattcctggcataaatggaagtgtgtttggttttaaatttactgaatgytyawawwrmwawaaaaaaaaaaaaaaaaaaaaaaa

SEQ ID NO: 625 - DNA, 685 bp, Canis familiaris
gctgccaaatggtgtcaacttaccatactgggacatatcaagaccggctagcaaagctacaagatcatcttcgccrctttccattctcttcaggaagctgagattggtctatgacaaatgcaatgaaaactgcggaggaatggatcccattccagtggagcaactaattccatatgtagaagaagatggctcaaagaatgacgatcgggctggcccacctcgttttgctagtgaagagaggcgagaaattgctgaagtgaataaaaaactcmaacagaagaatcaacagctgaagcmaattatggatcaattacgaaatctcatctgggatctaaatgccatgctggcaatgagaaactaagctggtatttaaatttccggctttacacatgttataccattttttccccctcaagtattttttccctttgaaaaagattatttatctgcttttattctacttaccagaagtaaagttcctatttttacattgcagttttacatcagtgttcactggcagtttgtttttttttaagctattaattctacagaagattattgtaataaattttgatggggtttatgttttgattaatcttcatgaattgaattttttaatcaaaaaaagttttgtaaataaatttttcaatttgaaaaaaaaaaaaaaaaaaaaaaaaaaaaaaag

SEQ ID NO: 626 - DNA, 633 bp, Canis familiaris
ttcacmatgttttgcmaatactaataaatacaaggctaagacctgtcagtctaatctgtaggagcmgaacctctgattgaccmaaaggcatgtggatttaggttyattttttttgtgtgtcagacctctctatactgaccmtggcmagtttttctggtcagtggctgaggttgcmagtggcagagagctttgggcctgtgtgtactgctgtcgtgggccatctccctctgccmgtaggggctgcagaawgcctagtaaccagcmaagacggggccctttgggggcmaaagaattttttctaatgtgatgttgcttgggagggcccmaatgttaaggtccgtgtcttcactgtaatttctggaaaaagttaactcagacctccctgaatggagaggtctaagtttggtagggaaatttgacmaagccttcatttgagggaacgggtgagtgtgtgtccatttctctggtggtaccmagaaactgaattccttgtattaagtgcacttcatgtatttctaataagaagactttccagagaagtgaaatttgttatgtttctggcttttaaatggtgaaatataaataaatttcataatttatctgaaaaaaaaaaaaaaaaaaamaaaaaaaaaa

SEQ ID NO: 627 - DNA, 649 bp, Canis familiaris
tacaccccaggaagggtctctcaagtctctgctgtttctggaagtttcttcagtaggcagatgatgaagagtgtattggggcagagggacatggttkggggactttggccagtctggtggcatttcccatgagactggcctctcagatgggggttctgtgtttagaaccctgggcctgtgccctaccctgtagccagagcctaatgcagacggcttgctcagtgctgggctaggagccgagcctgtctggggcmctggaaactggtttctgttggggcaccattgtgccttcagtgcctgccggcctctctggcagtcagggaggggcccttcctgggatagaccctctgccctgccccagggctgctccatggtggctrttaagccccaagctcatgccctccttagccccaggagtcctgaagtcctgccctcccagggcaagcccctgcccaacacagaccccaggaacccagggcccacacagaacmcctggagtggaggctttggtgtttggtttctgtacgttttttcgaagcccctggtctcggctctcctttcmaaataaagcmstgaaamcrkttcttgttcagactgagaaaaaaaaaaaaaaaaaaaaaaaaaaaaaaaaaaaaaaaaaaaaaaaaaa

SEQ ID NO: 628 - DNA, 835 bp, Canis familiaris
tggtgagtttctactcagataaggawacggagtgaggggaagactttagataataatgccagacttttggtaamatgcttttatatttaagacmwaaatgttaccaccmaatacacctctgttcataagtgaattactggtgtttctatacctggaatattatgtttgttttatytactggatgtttacattttgggaaggcmaacatttttgtttgttaaaaaattatttgtaatttgttgttcctaagatttttataccataacmmaacttgttcttttctcatgaatttgcagtttctaaataagacmmwgcmagtataaaactgggggagaacagactttattaattaaattatgtcttgatttttctaaacgagaggactatttgtracactaaatatgggagctatttcttaacmaacttgtttggaaagattcatgttatgttgtgtattagattgctccatcttgtgtatgaagcagatttggtctttgtcttaagttcctctactttatagttgtggatgtactttgttaaaaaaaaccaacaacacacacacagaaacctacatttcatgtctttaaaaaatgtttaaatgttatcttcggracattgcaaatgattawaaacmaaataatgtgaaaatamwamrrmmwaactgaattcttaatgtcacaagtgttttactttggtaatgtgcctttgatttaatttgggacacttttaaaaggatactttatttgtgtttgtaataatcttggatgagcttggaaataaaattttctgcttgattcatcmaaaaaaaaaaaaaaaaaaaaaaaaaaaaaaaaaa

SEQ ID NO: 629 - DNA, 712 bp, Canis familiaris
ccttgagattagaagtcagagggtgcggtaccttggactcgttgcccgggtctgtgctcccgaaagctgaggatgacgggggtccccccgccggagcctgagwgcgcgcctgccccactcggggaggaccgagrgatgcccgtgctgaagcagctgggccccgcgcagcccaagaacggccggagcgcggcaccctgtccatctccgcgccactcggcgacttccggcacacgctacacgtggggckcggcggcgacgccttcggggacacttcgttcctgagccggcacggcggggggccgccccccgagccccgggcgccacccgcgggagccccgcgctccgcgccgccgcctgcggtgccgcagcccccgccgcccgccctccgcgcgcccgcgcccgccgacccgctgctgtccttccacctggatctgggcccgtccattgctggacgcggtgctcggcgtcatggacgcggagcgcccgggggccgccgccaccaagcccgacttggacctcagctccgaggcgcagcatcccagggcgcactgccgccccagcgcggatctggagctggacgatgtcatcggcctgtaggcaccccagttcccatgcttttaccttccggcatcctgcttctgtatacataaacgccacgtctgtgccccggraaaaaaaaaaaaaaaaaaaaaaaaaaaaaaaaaaaaaaaaa

SEQ ID NO: 630 - DNA, 728 bp, Canis familiaris
tggttctatacaaagatgagtgtattccgtcaccagtaggatgtaacttgaggtatttcttcagtggctttgctcctgtccccgtgggtgaaccagcactatggatttttgagraaactggcagacccagggggaaactgtggaatagatactttgctgcatagttaattcttgagaaaccacagcctgtgccaagtgctttcctkaacyatattaagatctcagatactatcatacgtgcttttaagaaatattcatgtatatccgyttgtataactctaccacttgktccagcattggttttggatgctgtatgcaaccmgtcagtgttctattagacacgtgttcagtttgcttggagggtagctgggtaatccaaaaatgtctactctctgattcaatgtgaaccataagaactttatgagccmagagtctgagaaaaactttctgttaatgctgtctagcatttgtttgatatcattacttttcaccttttgagcctgaaaaagagttctggattgatgcaatggcaacmataaacttgccatttaaatttattcaataaccctacatcaccaaggtgtctgtctgtgtcaaacctgtggctactctatatgcactttgtttactctttatacmcaataaatatactagagacttmmaaaaaaaaaaaaaaaaaaaaaaaaaaaaaaaaaaaaaaaaaaaaaaaaaaaaaaaaaaaaaaaaaa

SEQ ID NO: 631 - DNA, 668 bp, Canis familiaris
cggaggtcttgacatatatcctatgcaacctgcgtatcggagtcgggtttattgtcgtcgatgcaaagacaataaagtccaagaactacaaaaccaattcttcacactacgagaaatgttcaaccaaggtaaaatccgtcgttggattatcaatgggtagataaacgcttggctcaaactcaaaacggtaaatcagatcagacgaaaacacaccttgtgtggtatgagatggaaggtcatgaatttcgttcgtcacaagcctgcgttcaagaataggggtccactgatttgtcggttttggaggatcatcactctcgaggctccacaactcggctcgagactcaggaggcgctgtggtttccatcaacggagtgttagtcaagtaaaaagcctggtcaacacgttggtaacgaaaccggaactattcaaattccaacttaaccttcatggctgaatgatccccccaatcattctsgctattccacacaaatatcgtcatatctgtcgaaccaggaacattgacaacgtcacgacccggatcgcccaccttttgtcaaactattcattatgtctgactcaaaagtggtaaaagttccacgaagaataaaatcgttggtcaaramaaaaaaaaaaaaaaaaaaaaaaaaaaaaaaaaaaaaaaaaaaaac

SEQ ID NO: 632 - DNA, 668 bp, Canis familiaris
gcctccagaactgtatataggatacgttggacgcatagcctcagcccaaataacagcagctacgtttctgttatttcaggttcttgatgttttggttaagaagtgtgatgctctttacaagttggttccattttaggcagcaacctaatagttacccatctatttgcgaaccgagtttgagttttgccatttagtctagtctgcttttgtgtggaacacaccatactctaccttccagtacttaaagcaagcagtgttcggacgcaagttcttatccccaggtgactaaacagccaaaacctcctagtagtgagagctccgaggtgttgagccgagctctgagtcctccgcgacaccaaaggtagttgcctcacaatcagttcatttttcggaccagttgtgcaaccattgctttggccttgataagtttaaggttgaattggaagtaccgacttactaggggggttagtaagascgataaggtgtgtttatagcagtatagacagcttggtccttgtaactgttgcagtgctgggcctagcgggtggaaaacagtttgataagtaatacagactgagttttcaccattttcaaggtgcttcttattttagcaaccagttytkttttttttttttttttttttttttttttttttttttttttttttg

SEQ ID NO: 633 - DNA, 708 bp, Canis familiaris
cacatcctttgacccattctagcttcatctggcatagattatgacataaagatctggtcaccactagaagagtcaaggatttttaaccgaaaacttgctgatgaagttataactcgaaacgaactcatgctggaagagaccmgaracaccatcacggtgccagcctctttcatgttgaggatgttggcttcgctgaatcatatccgagctgaccggtttggagggtgacaggatcagaaggctctggtcaggagaatgaaaatgaggatgaggaataaccaactcttattggccaagcacttagatgttctgaaatttgtataagacactttattatatgtttttctttacagagctttagtgcaattttaaggttatggtgttttggagtttttccctttttttgggataacctaataacattggtttggaatgacttgtgtgcatgaatttgggagagtgtgtaaaacaaaactagcaaaatgttttaaaaaccttttgccatgtatgaggagtgctaggaaaatgcaagtgcaatattttccctaaccttcagatatgagagcttggatcaatgtggaagagtaattttcattatagtgaaaatattggttcaaataaatttctacacttgccatttgcatgtttgttgctttctaattaaagaagttggttgttttaaaaaaaaaaaaaaaaaaaaaaaaaaag

SEQ ID NO: 634 - DNA, 689 bp, Canis familiaris
cgcgccgcgcccggggccaggtcgcgctggtgctgtcggatgcggggtctacgacgggacggagctgcaggagsycgcagcggtgctggttcacttgagtcgtggcgggsycgaggtgcagacctttgctcctgacatccctcagatgcacgtggttgaccacaccaaggggcagccttctgagagcgaaagcaggaacgtcctgacggagtccgcaaggatcacccggggcaagatcaccgatctggccaggctcagcgcagccaatcacgacgctgccatcttccctggaggctttggagccgccaaaaacctgagcacattcgccgttgacgggaaagactgcagagtccacgaggatgtggagagggtcctgaaggagttccacaaggccggcaagcccatcggcttgtgctgcatcgcgtctgtcctcgcagccaaagtgctccatggcgttgaggtcaccgtgggccacgagcaagcacgcgaaggtggcaggtggccgtatgcggggaccgcggaagccatcaaagccctgggcgccaagcattgtgtgaaggaagtgaccgaagcccacgtggacaagaaaaacaaggtggtcacgaccccggccttcatgtgcgagacggagcttcaccacgtgcacgacggcatcggggccatggtgaagaaggtgctggaactctgyg

SEQ ID NO: 635 - DNA, 7137 bp, Canis familiaris
  misc_feature (5940)..(5946): n comprises a, c, g, or t, or includes no nucleotide
  misc_feature (6633)..(6634): n comprises a, c, g, or t, or includes no nucleotide
cagctggagaccaaactctaggatctaggtcacccccttggcagcagagctgatttatggtgcccctgacagcctaatatcaccaaattaccccacacaatggagagaggctgggctgcctcctggcagtcgctaaaggacgctgagcctggggcagccctgccgccttctgatcccagacctcctttgggtctgtgagagagggggctggtgcagacagaggcacacccaggcatgccatcatcaactgggggtataagtaggaagccttggggacagctctgtaccctgcactcgggagccagtagcactcggacgactacttcctgtcccacaagctgcaacagagccagccatgaattgcagacagttcttgtcctcccactgcagccgtgacagctctgggggtggtgggggcagcaagatgttctcctgcaaccgcagcagcttttcaggggctagtggaggagggggccgattcagctcttctaggagcttcggagggggcagctctggggcctgtgggaggggaggtggtggcagttttggctctagctacggtggaggatctgggggcggttttagtgctggtagctttgggggacattctaggggcttcagtggtggttctggaggaggctttggcggtggatttggaggaggctttgggggctttagtggtggttctggaggaggctttggggggcctgggggatttggcagtggctttgatagtggtgctggtggtattctgggtgctgatgagaagaccaccatgcaggacctcaattcccggctggcctcctacttggataaggtgcaggcactggaggatgccaacaaggaactggagagtaagatccgggagtggtatgacaagcaggggtctaggaccttccatagggattactccccctactatgacactattgaagacctcaagaaccaggtaggtggggaaactctgacccctctctcctggtctctctgcctcacactctcacacacacacatacacatacactcacatggtttatcttccaaaaaagtcagatgctagactctaggcttagatcatcgtcaaggaatccattttttaaagaaacattatactttcatcagaaacagagtttgtttggttcttgatggcaccagagctgggactttggcctgtgctctaggctttaatcaccatgttcccaactttcagagtatgagcagagcggtgaagaggcttagattaacatgggtgagcctgagactggatgtgggggtctccttttggagcctggccaagaggtagtggggtagtggggagggaatagagatgggggcactcccgtttatgagccagggatgtggtcctgggtctgtcatcagttcactatgtgaccttgggaaacctgatgcctctctggacctgttctatgcatttaatacagaggatgggcagaccagctcttaggtctctgctggtttaaaacttctgtaatcatgcaaaaaagaggtaagagagctactgccccaaattggtagatcatatggctcaagggaggagaaaatctgttcctgtttctcctctcactccctaagaatttaaagcagaaaaactagaagctgtatctattccttcctacctctcctgggctcctatagaggcctgtcttgatctttccagttttgttggacctaggtacacatgctagttgtttaaatgataacaggatctagaactctggggatggaagtaatctatccacgtttccatctccccacacgctgcctccatatcaccaatcctctcaccatccatccatatatcaactcatctatccatccacatgtccatctatccatttattcattcattcactcaatttaatgaataattgccttccatgttgcccgtggcagacatagtgatgtatcagacttggtctctgtcttgaggagctcacagtctagctatagtttgctgttcccacctatctcccttgcatttacaacttctgctaaacagcctctagatatcctgtttcttctatcccacacctttcccgtctactttatccatgtgtaatcctagctatccttcagggatcaattctattgttacctcctcctgaagtctttcttacagtgccatagccatatgtcatctctcctttccttgagctcttctatgatactttggatgtggtagttgactgtgggttccctgaggagcaatatctcattgatgtctagacctcacagtgtttgttgtagtaaatcttcaaatatttgttgaatgaacactgaacatccttgctgaagcctgtgagaggtctgtgctgtgtaccagcttttggaagctccttctacctcttaagcatcttcctggatggggttctcatctcttatggctttgcctggcttcttgccctgctagcaatgagtcatagaaaaggagcatgagttccatgccatctcctctttttcttagattgtgaacatcacagcggacaacaataagaccctcctggatcttgacaacactcgaatgacattggatgacatcaggatgaagtgagccctgctcccactccctatgctgtcatcaatcttcctccaccccctagtgctctgaaagtccctttgggactggtgtcctcttgcttattccctacctgtggctgttctgcaggtgtgatatagagaacaacttgcgactagcagtgaatgctgacatcaatggcttgcggaaggtgctggatgacctgaccatgcaaaagtctgacctggagatgcactatgagtctctgcaggaggaactgattgccctcaagaagaatcacgaggatgtacggtcctggcttcttatggcttattgagaaaaaggaggaacagaagttgcagagacagtgaagggatagctatgggcactgcctgggtgacacccttttcctgacttttgaggacactcccagtgcctccttaggagtgtctatggtggtggttgggctttgccttcacaactgtgcctcctttttgtatctctgaggaagcagagggggacggctaagacctggtggagaggatcccatcctttgacctcatatctccttggttcctggcaggagatgagccagctgactggacagaactctggagatgtcaatgtggagatgaatgctgctcctggcagagatctcaccaagatcctcaatgacatgcgtgaggagtatgagcgaatcagtgctaagaatcgtaaggacattgaggagcaatatgagactcaggtgagcagaatgggctgcccattcaacattctctttctcttccatagatctctccattcctccaccccatctctctattcccccatccctccatctcttagtymakctgttatctatccatcttcattcattaaccacaaacacaattattaagtagcttgtcagtgccaggttttatgtgaagtcctgatgtyccagagatgagccaaaatgagactgctgtcctcaagagggtcattacatatgtgaacagtttgttacatactgaacatttactttcaattatctattacatttgtgaatacatatgtgaacaaaggccgagcatgaacaactcatgtaaggctatgtgccatcagaatctagtagaggtacatggtgtgcctctcatgccacacggaacctccctgggcctccaatgcctagcatagaccatagcccctggcctatgagagcatgatctgtggtgtgtgtgtgtgtgtgtgtgtgtgtgtgtgtgtgtgtttgggggtcaatttgaaataaggttagraaggtggtttggggacaagtgtgaagagtcttgaagccttgctaagagggaatgctaagttgagagaattggatcaccttggctggctagcagacccagaactcaggatgatttgtccttagttttgtctcactcttggctacagaggcaaaggtcctggtgagtggggcagaacttttcccattgcagcctctggtccagcctgattctcactgagttcttgggttttcagatgagccaaatggagcaggaagtgatgagtagtggccaggagatggagtcccaaccacaaggaggtgacccagctccggcacagcatccaggagatggagattgagctgcagtctcagctcagcaaggttggtagttctgctctagaacctcttccaggatggggcactgaaggtgtggtatgatccctaggaagtgggaagggaagagctatgatgtagcatccctcttatagcctcttcctccctcctagaaatcggccttggagaagtccttggaggacaccaagaaccactactgtggccagctgcagcagttgcaggagcagatcaggagcctggagggccagatcactgagatccggggagaaattgagtgccagaatcaggaatatagccttctgctcaacatcaagacacggctggagcaggaaattaagacctaccgcagtctccttgagggtggccaggaggacttgtaggttccccaggactctgtggaatccctgtaatttctaagtccctggcaccatattgtccctggtgtctggggaagttcctgtacacaagggttctgatgggttggggacttcttcatcctaggaagaacctcaaaggctttggaaaaggaggttggtaacaaagagagaagggactagtccttactccagggagagggaggctctcctcttaaactgtggtgccagcccagcctgttctctgccttggagaaggaaaacttagagagactcacatttgggtcttgactctgtccagatccacccttgaatatgtatgtagggtcattcatttttctctctgtgttatctttccttctcagcgaatctcatgaatctggacaaagtcattttggaagtggcggaagtagacagcaaggtggaattggaggcagtcatggaagaggatccaggggaggaagtggtggcagctatggtggaggaagtagttctggaggagggagtggaggcagccatggaggaggaagtggtggcagctatggtggaggaagtagttctggaggaggaagtggaggcaggggaggaagtggaggcagctatggaggaggaagtggatctggaggaggaagtagtggcagctatggtggaggaagtagttctggaggagggagtggaggcagccatggaggaggaagtggtggcagctatggtggaggaagtagttctggaggaggaagtggaggcaggggaggaagtggaggcagctatggaggaggaagtggttctggaggaggaagaggtggtggctgtgaagaaggaagtggatctggaggaagaagtggtggcagctatggaggaggaagtggatctggaggaggaagtagttgcagctatggtggaggaagtagttctggaggaggaagtggtggcagctatggtggaggaagtagttctggaggagggagtggaggcaagggaggaagtggatgcagctatagtggaggaagtagttctggaggaggaagtggtggcagctatggtggaggaagtagttctggaagaggaagtggaggcaggggaggaagtgcaggcagctatggaggaggaagtggttctggaggaggaagaggtggtggctgtgaagaaggaagtggatctggaggaagaagtggtggcagctatggaggaggaagtggatctggaggaagaagtggtggcagctatggaggaggaagtggatctggaggaggaagtggtggcagctacggaggaggaagtggatcaaaaggtggaagtggaagatcatctcaggtccagtcctcttcctccaaatctggtgaatgtgatgatacacaaggtaagggacaattctagcttgtggggtcagggaggcacagatgttaagctgtcaaggtacnnnnnnngcatatctgaagagtactagattttagggaggtcactagtgaggtgtctgacttgccttgtttctgaattatcattaatttttattgagctttgggtgaggatagaacaaaatctacacatggcctgagtctcaatggcataggagatgggttgggagttgtgcgttatcttacatacttcccaccacatcctaaaggtgggtattgttattatacccattttggagataaggaaaatgagtttcagagaagacatgtagcttattcaagatcatacaaaaaataaatgagggactcagctctgtgggtcttcacagccagcacttttaatcatcacgaggatggggagatctggatcagcaacagttcaagtagaaatgaggttcaggtgttgttgtcagtggttagctcatacaagtcagttatctggtgcaaccgtctaaaagggcatatactgaacacaataatctcaatgtaggagagtcacacagtgaagtggtctccagctcagagaaagtttccccttgtgtatgctgaaatttataaaacaagaatttaatatgaaattgtagtaaaagtctggataacacaactgggaatgtttaggtccaagaagccttcaagtgcacgggagctgtccttctttgggtgggtggtgtgatttttgtgtgtcaagtggcactgcanntcaagtggcatgcactgcagggcatggatgtgcatgtatgggctggggcaatccttgcctcaatatctaagaaatttactaatagatctgttgaatggaggagggaccaggctcatgagccttcatcttcagaaatgggagagtatctgttagggctgcaggacagctttaggaatgagatggaggccactgggatcccaaggttcttccaactatttgagctccaatcttcttgctcccagtttgtccacctttctttaagtcccagtctccctgtctcttgttctaggttctctcttcacactcttacttctcttctgtctctccacaggctaccacattcaatactagagctcctgtaaactctcctggccctgccccagccaagtattctccagacaggcagcccccagatgaagcctgctcattgtcttctggcatcagaaatagctggccacaaggcccagagctcatgtggaactgggctgagtgggcatgtgtac

SEQ ID NO: 636 - DNA, 666 bp, Canis familiaris
ttaatttattgcctgacgtaaatagatgcctttgtaaatagtcatcataatgagcraatgcactgraccatttctaagcacatgttccctaataatagtagagtgttagacgcctgcaggaacgacggcctttattctggaggcgtacccggtgccacctgaacagagggtgaaaaacatactgatacatagactggttgctgtgaaaacctatcgtcgagtaataaggattttgaggaggagactttcttttctatatgtatatatatatatacgttcgtgtatagatatgtatatatatatatatgtatgttgccttttaatgatagtatcttttaaattaaaaagatgcttggctagttgcgtgtgtgcggcgttattttgcagtctgactctctggcatacctattttcttagtgtttctcttctcttccccaaaacctaagagtaaatgatatgaaaacctgtatcagatgtgtgaaaagcacaacaacatgttttttttgttgttgtttttcttttcttttttttttttttttaacgtacccagtaaaaaaggaactctgtagaggtagctggtgttcagggctggcgcagtctgggttttgagtgggcagcgtgagtaactggattttacagacctgcgtagcgcgcggcccccaggac

SEQ ID NO: 637 - DNA, 669 bp, Canis familiaris
agcaacattgtaaaagaggctatcgagagtgccattggtggcaatgcctatcagcacagcaaagtgaatcagtggaccacaaatgtcgtagaacaaactttaagccaactcaccaagctgggaaagccatttaaatacatcgtgacctgtgtgattatgcagaagaacggagcggggttacacacagcgagttcctgcttctgggacagctcgactgacggcagctgcacggtgcgctgggagaacaagaccatgtactgcattgtcagcgccttcgggctgtccatctgaccgtcggcggccctgccttccccctctgctgcgctcaccgcctctcctgacggccacggatccggtgaacgctgttcttgtgctctttcagagtgtcttgtggcgctctcacaacgtggagaaaaggcaggtgactgccctgttctgtgaacggcgcatcccgtcagaggctagtcatcccagcagccaggcctgtgctgccacttgtcttaactctgaacatttcttcccaaaggtgctaaaaactgaaatctgctagtttgaagctttctctctctctgaatgactcagatacactaattttccatactttgtactttggttagaataataaattattccacctttaaaaaaaaaaaaaaaaaaaaaaaaaaaaaa

SEQ ID NO: 638 - DNA, 1080 bp, Canis familiaris
ttccctgtctccctggccgatggattccaggggcttcctctccctgcgctgcctgctggtcctcgccctggcgtccaagctgagctgtgggacaggtgagagcttgatgaattgcccagaagtccctgggaagttgggaagcagtttgcagctgtccttggcatccgaagggataagcaagaggatgaacaagagcatccacatccttgtcacaagggcggaatcaccgggaarcagtatcaagaagaaaatagtgtctctggatctgccagaaggggggtctccacgctacctggaaaatggctataaatttcatctggaaaacctgaccctgaggatcctggaaagcaggagggaaaatgaaggctggtacttcatgaccctggaggagaacttttcagttcaacacttttgtctgcagctgaagctctatgagcaggtctccactccagaaattaaggtgttgaactggacccaggagaatgggaactgcagcatgatgctggcctgcgaagtggaaaagggggacaatgtggtttacagctggagtgagaaactggggattgacccactgatcccagccaacagttctcacctcttgcacctcagcctcggccctcagcatgtcaacaacgtctatgtctgcaccgtgagcaaccccgtcagcaaccgctcatggtccttcaacccatggtccaagtgcaggccagagtcttcggtgccaagacaatggagactgtatgctgggctcttcttagggggtatcgttggtgtcatcttgattttcgaagtggtattactgctgttgagaagaagaggtaaaacaaatcattacaagccaacaaaggaagaaaaaagccttaccatctatgcccaagtccagaaatcaggttctactcagaagaaacctgatcccttgccagctgaggacccctgcaccaccatttatgttgctgccacagaacctgtcccagaacctgccccagaacctgtscaggaaccacattctatcacggtctatgccagcgtgacgttcccagagagctgacaccacaggctcagtgaagggactttctgaag

SEQ ID NO: 639 - DNA, 632 bp, Canis familiaris
ttgttgraawaagakttggatcagatctcccattgcaggaattggatatcatctataaggtgcctcactgtgtacccatttctgcccatcaccgctggaattttgatgacctattggaaaagatctgggactatctgaaactagtgaggatttacaccaaacccaaaggccagttgcctgattatacatctccagtggtgctgccttattccaggactacagtggaggatttctgcatgaagattcataaaaatcttatcaaagaatttaaatacgctttggtttggggtctgtctgtgaaacataatcctcaaaaaagtgggtaaagaccatacgttggaggacgaggatgtcattcagattgtgaagaagtgaaaccttctgcccatctgctgggccaaccatagcagcttttcccgtgaccaagcaccctatcccaaaaccccttccggctttggcagccagtggatcaggattcaggggagggagatggaggccctcaaactggaactttacttgtcttatcttggtgtccccttataaattcaactgcataaaggacctggtaggccagccagctatgtgcaaaaaaaaaaaaaaaaaaaaaaaaaaaaaaaaaaaaaaaaaaaaaa

SEQ ID NO: 640 - DNA, 661 bp, Canis familiaris
ctgagccacgggggaagtgtccttcatcaacatcaagacactcaacgagtgggattccaggcrctgtaacggcgttgactggcgtcagaagctggactctcagcgaggggctgtcattgccvctgagctgawawachacagctacaagttggcccgatggacctgctgtgctctkctggccggatctgagtatctcaagcttggttatgtgtcccggtaccacgtgaaagattcctcacgccatgtcatcctgggcacccagcagttcaagcccaatgagtttgccagccagatcaacctgagtgtggagaacgcctggggcatcctgcgctgcgtcattgacatctgcatgaaactcgaggagggcaagtacctcatcctcaaggaccccmmcaagcaggtcatccgcgtctacagcctgcctgatggcacattcagctctgatgaggatgacgaggatgaagaggaggaggaggaagaggaggaagaggaagaaacttaaaccggatggtgacgtggagctggagtttgtgattccactgagcttagaaggctttggatgcccagtggaatgcttgtctgattattgttgaggtttgaaggtggaataaagtctaaccatttagtctcctaaaaaaaaaaaaaaaaaaaaaaaaaaaaa

SEQ ID NO: 641 - DNA, 686 bp, Canis familiaris
tccgccggagccttcggtcgcgaatagcgccatgggagcctgcgcggcctgcgcmrgtgcsggaagttattttaggttatatgaaagaggtgcttctttcatccctaagacttaccagaaactctgctttgaagagaataaatggatattgtgccmaaccacaagaaagtccaaagctccatcctacacttacagccacagagtgccattacacaaacctacacattgggagaagaagatcctgctgtggtcaggtcgcttcaaaaaggaagatgaaatcccagagactgtctcgtttgagatgcttgatgctgcaaagaacmagatccgggtgaaggttagctatgcaatgattgtcctgacagtggcaggatgcatctggatggttattgagggcmagaaggctgccmaaagaaacgagtccttaacaagcctgaacttagaaaaaaaagctcgcctgagagaggaagcagctgtgaaggccaagacagagtagcagtggtatccatgctggctggactttgaaaatgcaggaataatgttgcagcattagcctgtattaaaagaatatggtatgaggattcatttcatgaatccaaagtgtggtttgcacagacttataatttccctatttctgctataatggtacaaataaatttcctttaagaaatgtcaaagaaaaaaaa

SEQ ID NO: 642 - DNA, 636 bp, Canis familiaris
accacagtgtgcctcgatgggacactgaaagaagacagactttaamsctkatcacaatgctggctatccgggtgctagctgaccrraatgtcatacctaacgtggctaatgtcacttgctattaccagccggctccctatgtagcagatgccaacttyagcaattactacattgcacaggtccagccagtattcacatgccagcaacagacatactccacttggctaccctscmattaagaatgatttacaaatgtcctgtggggaagccatttcagacaagatagggaaaataaataaaatgaataaaagattaagtmaaaaggctgagtgacccagccctgaatmaagatgtgttttgtgcaatgatgatctgctcctggttttaaacttggcaaagctcatggatcttttcataggtatgggagcacgatctcaaaacaaccctcctcacccaccaaccttctcacctgttcctcctactcagttggattctattctgaaacaaaagagacctgtcattaaaagcaaccaggttctcctaaaataacaagggaaaaaaaaaaaatgcttgatgacaatatgggtttgcagtacctgctcccatagctttgccataggaaaaaaaaaaaaaaaa

SEQ ID NO: 643 - DNA, 682 bp, Canis familiaris
  misc_feature (2)..(2): n comprises a, c, g, or t, or includes no nucleotide
gngtttctgtgcaactgttggtcctttcaataaaacacccscatgtcaagttcacttctgaatcctcgatagcaaactgttccctggttaatgcacgtgtctacatatgtggagtggctaaacmaagatcacmaaatgcttggagcctactaacagtgttttcaaaccatgtgtttcagcccattagtgaattgtgaaatcaaattgatggccaccggcattacmaaactgaagtagaattaaataggtaaaaattcatcacgtagtaaaggcaaatattgttttgtgaaacttttcagccatatatctacctggttaccaatgtaagatgtatttctcactcagaggctggagggtcatgatcagaccaggctgaaaacaccagtaaagtttgatgagatgtgtctgcctgggcaagcagaactttactccttgggctacataaggtgatcttgatttttgcatctaatctcagattacagcatagtttctgttgcctgagcataaacttttaactgcttcttgtagattaaactggtgcctctttctgtcatggtgtttgagcaggcagtctgttacaatgatgcccaaatcacagaagtttaacataataaaggatttatttcttgcattcamawraaaaaaaaaaaaaaaaaaaaaaaaaaaaaaaaaaaaaaaaaaa

SEQ ID NO: 644 - DNA, 652 bp, Canis familiaris
gtcatttcaacaaatatttgagcacttactctgggccaggtacagtactgagcmwaaagaccaaatccttgcctttatggagcttacattctttgctctaaatgttagtaagaatttacattctaggagtgatcaactagtgtttaatcagaaagttcacactcccmaagcagctactaaaagccgtcagaagctattcctattacataacagatactcctttaagtaacagatgttagaaatgggctctttttgaaattggtgacatttgatacatgtgaattgcctaaatattttgaagatattccccttacttagaaacaggacatagatctggtaaactttatattctttccctcttagaatggcattgacrgtgaaatgtggaactgattttggtagattttaattgcctgttgcccactacaaggtaacagtaatgcctatggggtattgttgcatctgtctggagtgaaccttttatgcaaaawmttgaagcacccmmaagaaacacaaaactgaaatttcattgagtataccmaacagtgcaaactttttttgctgagtgctaataattttgtcccaataaatgtttattgccttgcwaaaaaaaaaaaaaaaaaaaaaaaaaaaaaaaaaaaaaaaaaaaaaa

SEQ ID NO: 645 - DNA, 643 bp, Canis familiaris
aagaggagcaggaggaggagagcggcggcgaggcctccgggaggccccgcgggcagggccgcgcagccgagcccgcgggtcagtgttgctgcggcgctgggcctggccttctggccgccggcctcgggcttcttggagcacmctggkctggsmcttcaccaacccgtgctgcgcgggggctggtgctcttcctgggctgcagcatccccatggcgctgtcggccttcatgttcctctactacccgccgctggacatcgacatctcctacaacgccttcgagatccgcaaccacgaggcctcccagcgcttcagacgcccctggcgctggcgctcaagtcccagttcgggtcctgggggcgcaaccggcgcgacctggccgacttcacctccgagacgctgcagcgcctcatctcggagcagctgcagcygctgcacctgggcaaccgctctcggccggcgacccggtccccgcgcagctgcaccccgggggcgaccccaggccacgagccacctgccgggcgcggggggcgtgttcggcgcgaggccccgcaccccgcgggaccaggcagccaaccagggcgaaggcccgctgaatcggcggcccgagggggggcggtgccgacgcagcgccccgccccccgc

SEQ ID NO: 646 - DNA, 690 bp, Canis familiaris
tattgctaaatgctggtgtcaacacatcagatcacacagcttgaaggagaccgaagacagaacctcctgggatgaactcgtaactcgagagagactgcttgtggcatcttttaagaacgagggtgcaraaccggatctcatcaggtccagcctgatgactggaggggctaarcgagragttgccaacccyttggctctttgaggagccagaggagaccagaggtttkggttttgatgaaatccggcaacagcagcagaagattatccaagaacaggatgcaggcctggatgccctgtcctctatcataagtcgccagaaacagatggggaaggaaattgggaacgaactggatgaacmaaatgagataattgatgaccttgccaacctggtggaaaacacagatgggaagctccgcaccgagaccaggcgtgtgaacatggtggacagaaagtcaacgtcttgcgggatgatcatggtgattttattgctgctcgtggctatcgtggtcgtggcagtctggcccaccaactagtgacagcaaggggaccgccagctgtgacacctgccggtgatggagaaaagcccagcaccccagtggtacatgaaactgctctcaataaatccctccccmaagctctgaaaaaaaaaaaaaaaaaaaaaaaaaaaaaaaaaaaaaaaaaaaaaaaaaa

SEQ ID NO: 647 - DNA, 692 bp, Canis familiaris
ttcgaattgcacaggccaaccagaaggtttctgcagacagcggcgatccccagcctccccaysgggctgttcgtgagcgccaagggtgaaggctgctgcctgatgcagatcgatgtcacctaccatgtgccagacccggtggccaaaccggccttccagctgtccgtgagcctccaggagcccgaggccaagcagcggcggaccccgggtcccgccgcctccgctgatgacgatgacccagcggccgaccagcatcagcaggagtaccaggtcaccctggaggtgtgcaccaggtggctgcatgcagggtcctccaatatggccgtcctggaggtgcctctgctctctggcttccgggtggacatcgagagcctggagcagctgctctttgacaagcatttcacgctgaagaggtacgaggtggctggacgcagagtcctcttctactttgatgagatccccagccggtgcctgacctgcgtgcggttccgcgcgctgcgtgagcatgttgtgggcaggacgtctgcgctgcccgtctctgtgtacgactactacgagcctgcgttcgaagccacgcggttctataacgtcagctcgcgcagtccgcttgcccgggagctgtgcgctgggcccgcgtgcacgaggtggagcgcgccccggctcagggccccgggtggtccccgggcgagcga

SEQ ID NO: 648 - DNA, 640 bp, Canis familiaris
cggtktaaggcccytkggctggaactgagcggggcccttcattcacaacaggcttgacttgagtacgaagtgattccttttttgagttggcccagtgcccatcaaggtcagcccttgagtatatttgcagtcagctctcagtcctaaccttgtggctggtgattgagcagagattgagaatttcttcctccacctccgtgtcctcaggtctctttctcccactgattgaattaaagtagccmawagggcaccacagacaactccaacatccaattgcaataccacaaggtttctcatcttgatttctcagctcccagcagaaacatcttattcctgaaccatggacacmaaatattatttcagtcacagaaagccttctttgtctctggatacctctggcattttctactctttgatctttcctattcacataatctttattgtaactcctttcctaattattagtaggacttgttagaaactgtctgggtctgcctctttctgagcaggtgagtttgaatatggataagtcagaataatgagaactattgttaacctctttaatactaaaaataaacttgtcctctatttcagggactttggtcatttaaawwrrwaaaaaaaaaaaaaaaaaaaaaaa

SEQ ID NO: 649 - DNA, 678 bp, Canis familiaris
agatccagagcttgaataaaatgtgctcaaaccttctggagaaaatcagccaaagaggaacgggaatctgagagtggaggtctccggccaaacaagcagacctttaaccccgcagacaccaatgccttagtagcagctgtggcctttgggaaggggctgtctaattggaggccttccggtagtagtggtcctggccagcccgkccagccaggagctgggccgatccttgctggagcctcaggattacagcaagtacagatggcaggagctccgagccaacagcaaccactgctcagtggggtgcagatggcccaggcaggtcaaacagggaaaatgccaagtggaatawaaaccmacatcaagtctgcttcaatgcatccctaccagcggtgagtgtggccggcaacttttcccaaagctggactagatgggtacaataaagagaacatgggctttcagcgccagacaggttccagctgcaccacagacgagctgagtgaccttgggcaagtgacctgatttttccgagcctgttttctttgtaaatggtgatacctacctcatagggttgttgtgaggactgaaatgagaaaatgaatgtaaaacagtacagcctatgaaataatgagcattcaataaatgatagtttctacmaaaaaaaaaaaaaaaaaaaaaaaa

SEQ ID NO: 650 - DNA, 632 bp, Canis familiaris
agcagcttgatgccccagaagaaacccagacagcctggagctgatacggagcaagcagggcgagtgtttggacggtgtgctgggctcctgatgacgctcaagggacttccaagcacttacmataaggacttgcaggaggacaaggaggctgtatttgaagtgtcagacaccatgagcgccgtcctccaagtggccactggtgtcatctctacactgcagattcaccgtgagaacatggcacgggctcttagtcctgacatgctggccaccgacctcgcctactacctggtccgcaaagggatgccgttccgccaggcccatgaggcctcagggagagctgtgttcctggccgagaccaagggggtggccctcaaccagctgtcgctaaaggagctacagaccatcagccccctgttctctggcgacgtgagccgcgtgtgggattatggccacagtgtggagcagtacaccaccctggggggcacagcgcgctccagygtcgactggcagatcggccaggtgcgagcactgctgcgggcccagcgggcctagagccctccccaccccgcttctcaataaagctggctcaagaggaaaaaaaaaaaaaaaaaaaaaaaaaaaaaaaaaaaaaa

SEQ ID NO: 651 - DNA, 646 bp, Canis familiaris
catgatccggagactctgcttcgctgcattgctgagcgagcccttccttaggcacctggagggaggctgcagtgtgccagtggcagtgcatacagctatgaaggatgggcaactgtacctgactggaggagtctggagtctagacggctcagatagcatgcaagagaccatgcaggccaccatccacatcacagcccagcatgaagatggccccgaggatgatccgcagctggtggggatmactgcccggaacattccacgagaagcccagctggctgctgagaacctgggcatcagcctggccagtttgctgctgaacaaaggagccaagaacatactggatgttgcacggcagcttaatgatgcccactaactgctctgtggggcaccggtgtctgggtggctattgtccagtgcctacctcccagccctcagtgccccatcctcactgctgactgaggtgatcaccccagggagttgaactgcaaggtcagagacttgcctcaccttgaggctgtgaagagtgccttgctgccgcagtaggcggaggtttcatctctttagagaaagttcaagccacggcctttgaatgtaaccaactcaactaataaaccagctctgaaggtgaaaaaaaaaaaaaaaaaar

SEQ ID NO: 652 - DNA, 636 bp, Canis familiaris
agtctcctcccctgcctcccaagctggccacacccatgccgttcccctrggaatgatcctgcccatctratatgcctgtgaagctttgcacaatwattctctctgtctagtctccacttcctcactgcttaggagaccmsactgttactcttggaggtcaaggatggtggagttgctgggcatttaggaatcgctttttatagtataggtagaatttgaaatttttacagagcmagatcttgctctgcgtcttagatatttctctgttaagatatcattcattcttttgtgcmatatattgtttttctgaaagagtttctgttccttgggtgtggacctgggcaaaaaccaggttcctggaacttagaaccttgaatgtttttcatggggctccagacaatctcacacattagtcattcccagggaaccccaggacaactgcctttgttctaaaatatgtttctagtatgacttgagacgtaacagaagtgaggccctgcacatggggctgttttctggctggtatgttagaggaatagtcctgttcagaaagaggcccttctgagcagatgtggctaataaacttcgtgctgacctagaaaaaaaaaaaaaaaaaaaaaaaaaaaaaaaaaaaaa

SEQ ID NO: 653 - DNA, 763 bp, Canis familiaris
catgagcaccggctaccaacatgtgtactgctacaactgggacaactttcttcaaattacctggtggtgagcttaacccaggagaagatgaagttgaaggactaaaacgcttaatgaccgagatactgggtcgtcaagatggagtcctgcaagactgggtcattgatgactgcattggtaactggtggagaccmaactttgracctcctcagtatccatatattcctgcacatattacaaaacctaaggracataagaagttgtttttggttcaacttcaagagaaagccttgtttgcagtccctaaaaattacaagcttgtagctgcaccgttgtttgaattgtatgacaatgccccaggatatggacccatcatttctagtctccctcagcttctgagcaggttcaattttatatacaactgaattcctgcacagtggagaagtaaaagaagccgtctctgtgagcacagctatacacagtgtagaataaacctggtagaaaagttcttttggtttttatctctttcccagtccctaaattgctacctactttctgttgtttgaatagtaaagttaatatgaagaactagatagtggtgtaaacaaatgtgataatgtttaatttacttttggttctactcttactttttgtacaacattaaagaatatgagcttctttctatttgtatttttttttccacattaaacttgtaaaaaattmwwaaaaaaaaaaaaaaaaaaaaaaaaaaaaaaaaaaaaaa

SEQ ID NO: 654 - DNA, 679 bp, Canis familiaris
ggccgagtacgagaaactctcggaccaggtgaagatcagcgaggaagccctgagagcagatggcttcggagagaaacctttctatcactgtttggtggcggagcttctccccggccctcggggagcckcaggggccctgtggtggtgggctatgggctgtactacttcatctatagcacgtggaaggggcgcaacgtttatctggaagacatctacgtgatgcccgaatatcggggtcaagggattggctccccaaatwatcaawaaggtggctcagtgtggccctgaacaagggctgctcccagttccgcctcgctgtgctggactggaacaaatcagccatggatttgtacaaggccctaggagcccaggatctgacagaatactgagggctggcactcctttcgcttcgaaggagaggtgatgagggagctggcaggaaagtgacaccatgccttggggggaatctctcttcgttgatcctctccttccccaccagctcaagcactcagagacttgtgtcccctggcagagatctccctgaggaacgggaggttgggtgtgcagaatcgggggagaggcctttccacctccttgttgagggtgaaaaataaatgagaattactataarmawrgtaaaaaaaaaaaaaaaaaaaaaaaaaaaaaaaaaaaaagggcc

SEQ ID NO: 655 - DNA, 637 bp, Canis familiaris
aaatcacttcggctattgacmamttcaaattttatagcaactattgagcagtactctctgacttcaggggagaattctaatctttataagttagtcatacmatgattatgtttttaagttctttttcatgcatttattattttattaattggcctgaataagaccagaccactatctacatatttccattggtagaaaaatctaagtagaaagtttatgccctttttacaataatgacgtctttttcaaaatcagcctaaatataagcctgcaaagcaatcctgttaatcacaatcacaaactatattatttaagaaaactattgtgaagcgtttacctctcccccaaattatcacgtttccattttttggagtagcatgttaaggggtgttaagttttaattcttcattctgtcaatagagtcatgctacataagctttttgttttgtttttatattcttaaaccattccatatttgctcatcccataatatagttttatgcaggaagattaagattatgtaaatgggctttctggaaattatcagttataatagtttaaagggatagagtggcatctttgtttatagaacatttgtaaataaagttaaatttctaagtcaaaaaaaaaaaaaaaa

SEQ ID NO: 656 - DNA, 696 bp, Canis familiaris
taaatgcgcattacgacgggctaacctgcgaccgacggctcgaatttctactgcagccgggacaccaaaacgaagmscmaccccaaatggtttgttcttggtgtttgggcaaagtcataaaaggcctagacatagcgatgatggatatgtgcccctgggagagaaacggaaagtgattatacccccttcatttgcatatggaaaggaaggctatgcagaaggcaagattccacccgatgcaacattgatttttgagattgaactttatgcggtgaccaaaggaccacgaagcattgaaacattttaaacagatagacacggacaatgaccggcaactctctaaaactgagataaatcactacctgaaaagggaatttgaaaaagatgagaagccacgtgacaagtcatatcagaatgcagttttagaagatattttcaagaagaatgaccatgatggtgatggcttcatctcttccaaggaatacaatgtatatcaacatgatgaactatagtatatttttatttctaagttttcttagctacttactgtactttatatataaaacaaagtcccttctctagaacttgtattttctgttttcctcccacgagaacatattttaatatcctcaatacatgtaatttggcataataaatgtgtgttattttgcaaatttaaaaaaaaaaaaaaaaaaa

SEQ ID NO: 657 - DNA, 641 bp, Canis familiaris
tgtaaatttcactcccactwrggtaatgccttgtagaagttttggactttgcccgaratatcgggatagagacyatcattgacgtctggaactcaccgagagaacccaggaaagtcctaaatacgcatattttgcactcagcatgatggattgggagctccggctccacaagagcaggtgcccwaagcagaatgccccgtaatagagcttcgcaaggagaaaaaggaactcacagctcatagtgtcgacgtagggttgctcatccggggactcaggcctcaagtgagtggttttaagacggcggcagtggttcccacggggagaggaaggtcccacggtgcctcttgactgtcacaagagatgcatggccggtgcacactttgtgcatgtgtgttccggtgtgagctcctttcaactgtggttagaagtgggtgtgaatgtgtgcacgtgcacgtgtgtggacgcgcgtgcggacacacactcccacacgttcacatacacacctacatgcattacgaaacacacacatccttctggttggcttatttgtttgtttccctgtaactctcataaatacatcttcgtcacagccaataaatgtcaagggaaaaagaawaaaaaaaaaaaaaaaaaaaaaaaaa

SEQ ID NO: 658 - DNA, 702 bp, Canis familiaris
atctgagctcggcgccacttgcccaggaacccgctgcgctatcgtcccgcgacacccggggctccttccmgaacccgaggagtcacctgaagggggaagctatcctggcamcctgtccgggccctatgagggactggagrcggaggagtgcgggatcctggacggctgtgcccacggccgctgcgtgcgcgtccccgagggcttcacctgcgactgcttcaccggctaccgcctggacatgacccgcatggcctgcgtcgacatcaacgagtgtgacgaggccgaggccgcctccccgctctgtgtcaacgcacgctgcgtcaacaccgatggctccttccgctgcgtctgccgcccggggttcgcaccgtcgcaccagccgcaccactgcacgcccgcccggccgcgggcctgagcctcggcggccccaggctctttgctcggcgcctgcgcccgcgggtccccgccgccgcgcaccctcccgtccgcttgcgcccaggagcgccgggtgcctgcggggcagagaggagggacccgaaccatggaaggggcgaggcccctcgctgcccctgccgccctggcccgtcctgccgacgccgcggggccccgggactagcccaccgccccttcacgttccctctcctttttataaaaaatttcaattaaaaaacacctattttgtammwwmaaaaaaaaaaaaaa

SEQ ID NO: 659 - DNA, 643 bp, Canis familiaris
ccaacaaccgyttcgagacaggggaagaaaaactgcagtatcttgagcttttggagactttgccttctgtgctgagctcatgatycagwactggaccctcggagccgtcgactcccaagtggatgacatggacgtggatctagacaaggagtttctccaggacttgaaggagctcaaaatgcttgtggcttgacaaggaccttctggacctgcacaagagcctggtgtgtactgctcttcggggaaagcttggtgtcttctcggaaatggaagccaacttcaagaacctgtcccgggggctggtgaatgtggctgccaagctgacccacwataaggatgtccgagacctgtttgtggaccttgtggagaagttcgtggaaccctgccgttctgaccactggccactgaatgatgtgcggctcttcttgaatcagtattcagcatctgtccactccctagatggcttccggcaccaggccctctgggaccgctacatgggcaccctccgtggctgcctcttgcgcctctatcatgattgaggtctgctcccgccaccctacccacattgacaataaagctgctgtgactttggaggaacctgtgcacggacacacaggarmmmamraaaaaaaaaaaaaaaaaa

SEQ ID NO: 660 - DNA, 642 bp, Canis familiaris
acgagatccgggcctcccgggctcgagccykgccagaccrggccctggtgaactgtccagtatagctctgcgaccttcagcacaggcgaacgcaagcgacgaccgcaatggggaccgaaagtcttgcgagatgggcctgcacctacgtcagaacattttgaggcagccatcctaacacagctgcacccacgttccccagatagatatatatgtgcaggtgctgcaggcagatggtgggaccttacgcagctttgtgtgaatgcagccacgctggcagtgctggatgcgggaatacccatgcgggactttgtgtgtgcctgctcagctggctttgtggacaacacagccctggcggacctcagccatgtggaagaggcagctggtggcccccagctggccctggccttgctgccggcctcaggccagattgcactgcttgaaatggatgctcggctacatgaggaccacctggaacaggtgctagaggcggctgcccgggctgcccgtgatgtgcacactgtgctggaccgtgtggttcggcagcatgtacgcgaggcctctattttgctgggggactgagcatctggccccccatgcccagaataaaactcacatacmaaaaaaaaaaaaaaaaaaaaaaaa

SEQ ID NO: 661 - DNA, 644 bp, Canis familiaris
agaactggagtaaggcatagccgttcggggcttaatgggaggarratcgctgagcccatctttgaagaatgtgattgatgtcatyccsggagccagttagaagatatgaatgaagagtttgaagaccaccatggttatkgatctggccccccattcaagaaatcggcgagagagagctgagcctgaggccagatttctttgattctgcaagctatcatagaagatgattcaggatttggaatgcctatgttctgaagtctgaagaaaatttgacraatctggaactctattatttagagctagaggcctatatactgtgatagcttgtatgggggaaaaaaacacttttgatgtgatctgatttgttttttaatcaaatgattgaggtcaatccctttttgtagtgacagaakaggagcatgtaaattacccaagggaatsttggtgaatgtcacctcagaaagactgacctgaaaaatcatttgtgtcctaatattggacttatcccaatacagatgtgtgtgtttttctggagggaggaaaaaattttaaatttttaaaaccgctgtcaagataaacactgttatacacctgttttatgaaaactcagcattgagtaaaaaaaaaaaaaaaaaaaaaaaaaa

SEQ ID NO: 662 - DNA, 2333 bp, Canis familiaris
gttcgcgtgctctgggcgctgctgctgccgctgctgctgggctctgcgcgcggcctgcggaatgcttcccagaggacattcacaattgactacagccacaaccgcttcctgaaggacggccagcccttccgctacatttcgggaagcattcactattcccgcgtgccccgcttctactggaaggaccggctgctgaagatgaagatggctgggctgaatgccatccagacgtacgtgccctggaactttcacgaaccccagccgggacagtaccagttttctggggagcaggatgtggaatattttattaagctggcccatgagctgggactgctggtcatcctgaggccgggaccctatatctgtgcagagtgggacatgggaggattacctgcttggctattattaaaagaatctattattctccgttcttctgatccagattaccttgcagctgtggacaaatggttgggagtcctcctgcccaagatgaagcctctcctctatcagaacggagggccgattataaccatgcaggttgaaaatgaatatggcagctactttacctgcgattatgactacctgcgtttcctgcagaagctcttccaccaccacctgggcaatgatgtacttctgttcaccactgatggggcaaatgaaaagtttctgcagtgcggggctctgcagggcctctatgccacagtggactttggaccaggtgccaacatcactgctgctttccaaatccagagaaagagtgagcccaaaggaccattggtgaattctgaattctataccggctggttggatcattggggmcagccacactcaacagtgaggactgaagtggtggcttcctccctccatgatatacttgcccatggggcaaatgtgaacttgtacatgttcataggtgggaccaattttgcctattggaatggggccaacatgccctaccaagcacagcccaccagttacgactatgatgccccactgagcgaggcaggggacctcactgagaagtattttgctctgcgagaagttattcggaagtttgaaaaagtaccagaaggttttatccctccgtctacacccaagtttgcatatggaaaagttgctctgaagaagttaaagacggtggaggaggccctgaatgttctgtgtccgcctgggcccataaacagcctttatcccttgacgtttatccaggtgaaacagtatttcggttttgtgatgtaccgaacaacacttcctcaagactgcagtgaccccacacccctgtcttcacccctcagtggagtccaygaccgygcctatgtctctgtggatggggtgccccagggagtcatggagcgaagtaatgtcatcactctgaacataaccgggaaggctggagccactctggacctgctggtggagaacatgggacgtgtgaactatggcagatatatcaatgattttaagggccttatttctaacctgacccttgggtccagtatcctcacaaactggatgatcttcccgttgaacactgaggatgcagtacgcagccacctgggaggctggcatggccctaacaatggccgccatgataaaacctttgcccaccgctcgtctaactacacgctcycggccttttatatggggaacttctctattcccagtgggatcccaagacttgccccaggaacacckttatccagtttcctggaatggaccaagggtcaggtgtggattaatggctttaacctcggtcgatattggccagcacggggcccccagatgactttgtttgtgccacggcacatcctggtgacatcaaccccaaacaccatcatggtgctggaactggagcacgcgccctgtggtgacagtggcccagaagtgtgcaccgtggagtttgtggacaggccggttatcggtgcccctccaacccctggtcatccccctccagacctgtcccatcgagacttgagactggactatgtctgatgatgaaacactgtgacccgttggagtttcagccttgcacgtacmtcacctatccccctgtgtaatgccaacactcactggaaagttcaactggaaaatagatttagagtgtgcattttctcctgaggtttccaggcagcctggtagtgcccaagcctccactggcaggggccaccatgaatgcatgatgagggcagtggcacacagtttggaatggaagctttgaaggtgttcctgatttttattttggaggaatcatgttgtctttctgttaaataaaatttgtattcaaatgawaaaaaaaaaaaaaaaaaaaaaaaaaaaaaaaaaaaaaaaaaaaa

SEQ ID NO: 663 - DNA, 778 bp, Canis familiaris
ttgctcccctccttggagctcaggatccttggctccgtgctttcttttacagctgtttacagacaagacaggccacaggcagacggccactgctcttgtaatgtttgctcagaggaatatgaccattgttatttttgaaaagggatgatgtgtttktgtgccaggtgttkataattkaatccgtttgaatakttatgttcattaacctcttaaaatgagtgacttttcgattgttttaacacagtacctaagactaatgctttctgtggacaccactgagctctgcctcaaactccaccctctgggaccagagacctctgtacmctggttaactgctatcagtgtggaaactgagctggttgtatattctaaaggagtagaaggacagttccctgagacagggtcgttgtctctgcaggaggaacagtggccttgcttctagacggtcttcactgtgtgttttaaaatgacaacaacaacacaaaacttttgacctgtaacttaaagatcataaacttcaggcaataatattttctgtgtaagcttttaaaattatttttggggatcatagcttgttttattttgtgctataaaattaacagtattaaatgacttatattcttaraamawmrarwrwmttttcttaacagattagtgcctttttatttttgtattcattttacgttactggtcccggcatcagaacccttgtttccatggcctgtttgtacattgtctcaataaaacttgcatcagccaaaaaaaaaaaaaaaaaaaa

SEQ ID NO: 664 - DNA, 644 bp, Canis familiaris
atgacaggaggatatgatcgaggcttatgatgatctgtgactatctataccagatcatacagaggagtgtggaggagaaggakgatrgwagarctgctcaagatagggatcagattttacagaaggcggtcaccttcgtcctgtactataktcgtggaggataacagatcgcgttctagatcgtcgatcatactcacctcgtcgctattaaagcatgaagatgwagactttctgaaacctaccctagaagttgggatattgtttgtggacmatattttttattgtctcctgtttagaaaagtgaacagtgcctagtgaagttaggtgacttttacaccttttatgatgactacttttggtggagttgaaatgctgttttcattctgcactttgtgtagttcggtgctttgttcaaagttaagtgttttcagaaaagtatgttttgcatgtatttttttacagtctaaattttgatctgctgagaagtttctattgtacaaaacttcatttaaaaggtttttctactgaatccagggtattctgaagatcgaagcctgtgtgtaaaaatgttaccaaatggtaaaaagcaacaataaagtttggtttttacttttctttctaacatcaaaaaaaaaaaaaaaaaa

SEQ ID NO: 665 - DNA, 661 bp, Canis familiaris
tgtgcatcctgggcttctcagaccttgctatcattttgctgcggaagttcaagtggggcaagggcttcttggacctgaaccgccagctcctggacaagtatgcagcctgcagtggcccggaggaggtgctgcaggcagagcaggagttcctggcccacgccagggagcgccccgaggaggaggaaattgatccttttgacgtggattctgggcgggagtttgcaaaccccaacaggccagtggctggcgctcggctgctcccagacagtggtgacagtgacagtgaggatgagtccgaggagcggggacctgatgccgaggacagaggagagagcagcagctgccccgaggaggaggagcaaggggcagaggccggggtccccccagaggtttggaaaggaatcaagaaacggcagagagactgaagtttgcagacacgtgtatttcttcacgacggascaataaggaactcaagatacagcaggactcgtggggacacagacaggcctggcagcctcagccctcgtggcactggactctatccccatgcttctgacacggctgtgctctggggcctccgagcccgcccagtgaagctgcaggccaaggacaaaaaaaaaaaaaaaaaaaaaaaaaaaaaaaaaaaaaaaaaaaaaaaaaa

SEQ ID NO: 666 - DNA, 682 bp, Canis familiaris
gacagaatttcgggagggcccccggccgcggaatctcggtattgtggatggtgaggactggctccgccggctggggggctggggctckggcggatctgctccttcctgacttctccgtcctcgggggtccaagccgttggaggacttccgcgtgtgtcccacacctgggcccttgccagcagcgaggtgattgcggacgggtgtccccggtttggtttctaatcagtgttaaacggtttgagactctcctgtgtgtccgtgtttggtttgcgtgcgagagtgagcacacccgtgtgtgcatgccgcgtttccccgttttctcccctccctccgacaagccgttcatagcaaatgtaagaaataccttgccacacctgcccgcctcctctgcaggagaaacagagtaacccggcatcctccccatcccctggctgtgtatttatatagatggaaatatcctttctattttgtatcgtcgtgcctataacctctgccaccttgtataaaccctgacctgcgctacttcccctggatatgaatgtattgtacaccgacgccggcccatcctgtacagctgctttgtttctttgcaacccmttgtatggctttataaatgataaagcgaaagaaaammmwraaaaaaaaaaaaaaaaaaaaaaaaaaaaaaaaaaaaaaaaaaaaa

SEQ ID NO: 667 - DNA, 7145 bp, Canis familiaris
atgcaagtagagctctacacctgctgctttctgtgccttttgcccttcagccttagtgccaccagaaaatactacctcggtgcagtggaactgtcctgggactatatgcaaagtgacctgctcagtgcgctgcacgcggayacaagcttttcttccagggtgccaggatctttgccactcaccacgtcagtcacgtacagaaagactgtgtttgtagagtttacagatgaccttttcaacattgccaagcccaggccaccgtggatgggcctgctgggtcctaccatccaggctgaggtttatgacacagtggtcattgtccttaagaacatggcttctcatcctgtcagccttcacgctgttggtgtatcctattggaaagcttctgaaggtgctgagtatgaggatcagaccagccaaaaggagaaggaagatgataatgtcattcctggtgaaagccatacctatgtctggcaggtcctgaaagagaatggcccaatggcctctgatccaccatgtctcacctactcatatttttcacacgtggacctggtgaaagacctgaattcaggcctcattggagccctgctggtttgcaaagaagggagtctggccaaagaaaggacacagaccttgcaggaatttgtcctactttttgctgtatttgatgaagggaaaagttggcactcagaaacaaatgcgtctttgacacaggctgaggcccagcatgagctgcacaccatcaatggctatgtaaacaggtctctgccaggtcttactgtgtgtcacaagagatcagtctattggcatgtgattggaatgggcaccacccccgaagtgcactcaatttttctcgaaggtcacacatttcttgtgrggaaccaccgccaggcctccttggagatctcrccaattactttccttactgctcagacattcctgatggaccttggccagtttctactgttttgtcatatcccttcccatcaacatgatggtatggaagcttatgtcaaagtagatagctgcccagaggaaccccagctgcgcatgaaaaataatgaagataaagattatgatgatggtctttatgrttctgacatggacgtagttagctttgatgacgacagctcttctccctttatccaaatccgctcagttgccaagaagcatcctaaaacttgggtccactatattgctgctgaggaggaggactgggactatgctccctcaggccccacccccaatgatagaagtcataaaaatctgtatttgaacaatggtcctcagcggattggtaagaagtacaaaaaagtccgatttgtggcatacacagatgagacatttaagactcgtgaagctattcagtatgaatcaggaatcctgggacctttactttatggagaagttggagacacactgctgattatatttaagaawcaagccagccggccatataacatctaccctcatgggatcaattatgtcactcctctgcacacagggagattgccaaaaggtgtgaaacatttgaaagatatgccaattctgccgggagagatattcaagtataaatggacagtgaccgtagaagatggaccaactaaatcagatcctcggtgcctgacccgatattactcaagcttcattaatctggagagagatctagcttcaggactcattggccctcttctcatctgctacaaagaatctgtagatcaaagaggaaaccagatgatgtcagacaagagaaatgtcatcctgttttctgtayttgatgagaatcgaagctggtacctcacagagratatgcagcgcttcctccccaatgcagatgtagtgcagccccatgacccagagttccaactctctaacatcatgcacagcatcaatggctatgtttttgacaacttgcagctgtcagtttgtttgcatgaggtggcgtactggtacattctaagtgttggagcacaaactgacttcctgtctgtcttcttctctggatataccttcaaacacaaaatggtctatgaagacacacttaccctcttcccattctcaggagaaactgtcttcatgtcaatggaaaacccaggtctgtgggttctggggtgccacaactcagactttcggaacagaggcatgacagccttactgaaggtttctagttgtaacaggaacattgatgattattatgaggacacatacgaagatattccaactcccctgctaaatgaaaacaatgtaattaaacctagaagcttctcccagaattcaaggcaccctagcactaaggaaaagcaattgaaagccaccacaactccagaaaatgacatagagaagattgaccttcaatctggagaaagaacacagctgattaaagcacaaagtgtctcctctagtgatttgttgatgctgttgggacagaatcctactccacgtggactgttcttatctgatctccgagaggccacagatagagccgatgaccattcacgtggagcaatagaaagaaacaagggcccacctgaagtggcaagtctcagaccagagctccgtcacagtgaggacagagaatttactcctgagccagaactgcagttaagattaaatgagaatttggggacaaatacaacagtagagttgaagaaacttgatttaaaaatttctagttcatcagacagtctaatgacttcaccaacaattccatcagataagttggcagcagctactgaaaagacaggttccttaggacccccaaatatgtcagttcactttaacrgtcatttaggtaccattgtatttggcaataattcatcccaccttattcagtctggtgtacctttggaattgagtgaagaagataaygattccaagttgttagaagcacctttaatgaatattcaagaaagttcactgagagaaaatgtattatcaatggaragtaataggttatttaaagaagaaagaattcgtggacctgcttcattaatcaaagataatgctttattcaaagttaatatctcttcggtaaagacaaacagggcaccagttaacttaacaactaatagaaagactcgtgttgctatcccaacattattaattgagaacagtacctcagtctggcaagatattatgttagaaaggaatactgagtttaaagaagtaacttctttgattcataatgaaacgtttatggacagaaatactacagctctggggctaaatcatgtgtcaaataaaactactttatcaaaaaatgtggaaatggcccaccaaaaaaaagaagaccctgtgccactacgtgcagaaaatccagatctatcatcctccaagataccgttcttgccagattggataaagacccatggcaagaactccctaagctctgagcaaaggcccagtccaaaacaattaacatctttaggatcagaaaaatctgtgaaagatcagaactttttgtcagaggagaaggtggtagtaggagaggatgaatttacgaaggacacagaactccaagagatttttccaaacaacaagagcatattttttgctaacttggctaatgtccaagaaaatgatacatacaatcaagaaaaaaaatctcyggaagagatagaaagaaaggaaaaattaacccaggagaatgtggctttgcctcaggcacatactatgattggcactaagaacttcctgaagaaccttttcttactaagcactaagcaaaatgtagcaggtttagaagagcagccatatactccaatacttcaagacaccaggtcattaaatgattcgccacatagtgaagggattcatatggccaatttctcaaaaataagggaagaagcaaacttggaaggcttgggaaatcaaacaaaccaaatggtagagaggtttccaagcactacgaggatgtcttctaatgcaagtcagcatgttatcactcaacgtggtaagcggagtttgaaacaacccagactctcacaaggagaaataaagtttgaaaggaaggttattgcaaatgacacttcaacccagtggtccaaaaacatgaactatttggcccagggaaccctcacacagatagagtataatgagaaagaaaaaagggccattactcagtcccccctatcagattgttctatgaggaatcatgtcaccattcaaatgaatgactctgcattacccgttgcaaaggaatcagcatctccatcagttagacatacagatctgaccaagatcccatcccaacacaactcttctcatcttccagcatcrgcctgtaattatacctttagagagaggacttctggagtccaagaaggcagtcatttcttacaagaagccaaaagaaataacctctctttagcctttgtaaccttaggaataactgaagggcaaggaaagttcagctccctggggaaaagtgccacaaaccaacccatgtacaagaaacttgaaaacactgttctcttgcaaccaggcttgtccgaaacatctgacaaagttgaattactttctcaagttcatgttgatcaagaagactctttccctacaaaaactagcaatgattctcctggccacctggatctcatgggaaagatcttccttcagaaaacacagggacctgttaaaatgaataaaacaaatagccctggaaaagtgccctttctgaaatgggcaacagaaagctctgaaaagattccctccaagctgctgggtgtccttgcttgggataaccactatgatacccagataccaagtgaagagtggaaatcccaaaaaaagtcacagacgaacacagcttttaaaaggaaagacaccattttgcccctgggcccttgtgaaaataatgattcaacagcagcaataaatgaaggacaagataagccccaaagagaagctatgtgggcaaagcaaggagagcctggaaggttgtgctctcaaaacccaccagtctcaaaacaccatcaaagggaaataaccgttactactcttcagccagaggaagacaaatttgagtatgatgacaccttctcaattgaaatgaagagagaagattttgacatctacggcgactatgaaratcagggcctccgcagctttcaaaagaaaacacgacactatttcattgctgcagtggagcgtctctgggattatgggatgagtagatctccccatatactaagaaacagggctcaaagtggggatgtccagcagttcaagaaggtggttttccaggaatttactgatggatcctttactcagcccttataccgtggagaactgaaygaacacttgggactcttggggccatatataagagcagaagttgaagacaatatcgtggtaactttcaaaaaccaggcctctcgtccctactccttctattctagtcttatttcttatgacgaagatgagggacaaggagcagaacctagaagaaagtttgtcaaccctaatgaaaccaaaatttacttttggaaagtrcagcatcatatggcacccactaaagatgagtttgactgcaaagcctgggcttatttttctgatgttgatctggagaaagatgtgcactcaggcttgattggaccccttctgatctgccgcagtaacacactgaaccctgctcatgggagacaagtgacagtgcaggagtttgccctggttttcactatattcgatgagactaagagctggtacttcactgaaaacctggaaaggaactgcagagctccctgcaatgtccagaaggaggaccctactctaaaagaaaacttccgcttccatgcaatcaacggctatgtgaaggatacactccctggcttagtaatggctcaggatcaaaaggttcgatggtatctgctcagcatgggcagcaacgaaaacattcattccattcacttcagtggacatgtgttcactgtacggaaaaaagaggaatataaaatggcagtctacaacctctatccaggtgtttttgagactgtggaaatgctaccatcccaagttggaatctggcggatagaatgccttatcggcgagcacctgcaagccgggatgagcactctgtttctggtgtacagcaagaagtgtcagactccactggggatggcttccggacacattagagattttcagattacagcttcaggacaatatggacagtgggccccaaagctggccagacttcattattccggatcaatcaatgcctggagcaccaaggatcccttttcctggatcaaggtggatctcttggcaccgatgattattcacggcatcatgacccagggggcccgccagaagttctccagcctctacgtgtctcagtttatcatcatgtacagtctggatggcaacaagtggcacagttaccgagggaattccacggggaccttaatggtcttctttggcaacgtggattcatctgggatcaaacacaatatttttaaccctccgattattgctcagtacatccgtttgcacccaacccattacagcatccgcagcactcttcgcatggagctcttgggctgtgacttcaacagttgcagcatgccgctggggatggagagtaaagcaatatcagatgctcagatcactgcctcgtcctacctaagcagtatgcttgccacttggtctccttcccaagcccggctgcacctgcagggcaggactaatgcctggagacctcaggcaaataacccaaaagagtggctgcaagtggacttccggaagaccatgaaagtcacaggaataaccacccagggggtgaaatctctcctcatcagcatgtatgtgaaggagttcctcatctccagtagtcaagatggccataactggactctgtttcttcagaatgrcaaagtcaaggtcttccagggaaaccgggactcctccacgcctgtgcggaacsstctcgaacccccgctggtggctcgctacgtgcgcctgcacccgcagagctgggcgcaccacatcgccctgaggctggaggtcctgggctgcgacacccagcagcccgcctgacccgcgcctctgcggccctgtctcccctgcctccctgccctgtccccgcggcttcccgggccctgacccccacctctccagcctgtccccgtggcctcctgggccctgtgccc

SEQ ID NO: 668 - DNA, 688 bp, Canis familiaris
accttccttgtaccgcagtccagcttcccttgtttggaatccaactttatacttcagccytgkgactccyycagaccagccttgtgtcttcctggggccactgccgggccccctctcaccttccctccactctggtctgtacctacctgtggaaggccacgttctcaccgggctcttggcccacattgccaatcccagccagcttccagcccggtcacactcaccttctcctccctgttctgtccttggtcctctgttgccaccactttggcttttggagctttaacttgagcttctgaaaggtgggcggcatccggccagactgctgtgatggggagggagcccactgcttccctccatttttggtttttgtttcccttggccttctctcttctccctctagaaggggcttctcagactggaactggagaatgcatgttcattccatcatgccgtgttggggctgctgggtgctgacccctggggcctggcctgagcctgtgtgtgctgtccgtgacctcctcaccagcccctccccctgcccttgtccatttaagcttcatgcataattggtgatatgccccctggatgcaytaaaatttgctttcatttgcttctggactggccgagaagggaggagatggttatttaaaagagaattccctatttatttgacaaaaaaaaaaaa

SEQ ID NO: 669 - DNA, 657 bp, Canis familiaris
ctctggagcagctctcctgctacagcccctcatcscctgraaatgtacgcctgtgcaaagttcgtctccacccccttcktggtccggagcacctctcagctgttgagccgatcactgtctgcagtggtgctaaaaccaccagagacactgacagataagagcctcagcagcttgacagccccacatcccctgacctcacttattcctagccgcagcttccaaaccagcgccatttcaagggacattgacacggcagccaagttcattggggctgggggctgccactgtaggggtggctggctctggggctggaattgggactgtgtttgggagcctcatcattggttatgccaggaatccctctctgaagcaacagctcttctcctacgccattctgggctttgccctctcggaggccatggggcttttttgcctgatggtggcctttctcatcctcttcgccatgtgaaggagtcgtctccacctcccataggtctttctcccatgtcttgtctgccctgtatgccctgtatgttccttttcctatacctccccaggcagcctggggaaagtggttggctcagggtttgacagaggaaagacaaataaatactgtattaataagaaaaaaaaaaaaaaaaaaaaaaaaaaaaaaaa

SEQ ID NO: 670 - DNA, 661 bp, Canis familiaris
gttccaagaaggacctgagtactcctgctcagtacctgctgatggagaaggatgccctcaaggtggcccaagagatgaaggctgagtactgggctgtctcttctctcactggtgaaaatgtccgggaattcttcttccgtgtggcagcattgacctttgaggccacggtgctggctgagctggagaaatcgggggcccggcgcatcggagatgttgtccgcatccatagtgatgacagtaacctgcgtatctaactgctcgccaagaagaagcccacgtgttgcccgtgagcggtaaggggactcgtccagagcctcgcccagccctggggcactgtgccaccttgactcccctagacttcgaccctggacatttgcactgattgtttttccagaccaaagagctgcctgttggtggcagtacccctggaggggtagcggggaccatgactagtcgcttcctgccgccaggcaccatgccaaagactggatgttccccctcctccaggggctctccagggtgcccagcagtggggaggtaatccctgctgcttttgcttagacctgactgggcccattttgagtatgaggatgcttaatgatcccagcctcacactgtgccttatgcattaaaatttctattattagcaaaaaaaaaaaaa

SEQ ID NO: 671 - DNA, 687 bp, Canis familiaris
cccmagcagagggtctaataccctgtagcttctcaccacaattactckgtatttymaaagtgagagacacctcttctgtttaagctgtccctgtagcattttctacmcmwwcvaaccmawatggtctkttyccttgtctgtaataagattgtaaacccamttttctgtgtgtgttctgtagtaggcatgattgtgggtgtgtggggctgcgcacatgcgtgccagtcttttcgtactgtaactacctcatggcgtgagtgatggttgtactgccggttgtgttaacagagcaagttttgttgggcgaattgtgtgtgtgtgtgacctttttttcctgtttgttttatctgggggttgttcatgaaactgacagatgtttttctaaaaaggactattatcagtttccraatacaatacttctctcttctggtttttcctgagtgagcctgattttgttgctgtttttcatctatcagggtaaaaagagtacccttgaaaatccctgtggccagtttgaacacccctgttgtattcttttctctgttcaatgtgttggcgatttatgaacatgcttagatgtatagttttgataaccacagttttcagtcctttatctgtgcataataaaaaagatatatatcaatttawaaaaaaaaaaaaaaaaaaaaaaaaaaaaaaaaaaaaaaa

SEQ ID NO: 672 - DNA, 664 bp, Canis familiaris
tctaataccctgtagcttctcaccacaattactctgtattttcaaagtgagagacacctcttctgtttaagctgtccctgtagcattttctacaccaccaacaaaatggtcttttccttgtctgtaataagattgtaaacccattttctgtgtgtgttctgtagtaggcatgattgtgggtgtgtgggkctgcgcacatgcgtgtccagtcttttcgtactgtaactacctcatggcgtgagtgatggttgtactgccggttgtgttaacmgakscagttttgttgggcgyattgtgtgtgtgtgtgtgaccttttttttcctgtttgttttatctgggggttgttcatgaaactgacagatgtttttctawamaggactattatcwcgtttccamataccatacttctctcttctggtttttcctgagtgacgcctgattttgttgctgtttttcatctatcacgggtaaacaagagtacccttgamaatccctgtggccmgtttgaacacccctgttgtattcttttctctgttcaatgtgttggcgatttatgaacatgcttagatgtatagttttgataaccmcmgttttcagtcctttatctgtgcataataamaaagatatatatcmaywwacaaatacaaaaaaaatataaaaaaat

SEQ ID NO: 673 - DNA, 647 bp, Canis familiaris
agcccgagccgcgcaccccagttcaggtaatggaaccagcacgcggccmagcccaacccascccatccagctgagcgaccttcagagcattctagctactatgaacgtgccggccgggcctggaggcggccagcaagttgacctggccagtgttctgacgcccgagatcatggcacctatccttgccaacgcggacgtccaggagcgcctgctgccctacctgccctctggggagtcmctgccgcagacagcagaggagatccagaacactctgacctcgccccagttccagcaggcmctgggcatgttcagcgcagcgttggcctcggggcagctgggccccctcatgtgccagtttgggctgcctgcagaggccgtggaggcggccaacaagggcgatgtggaagcatttgccaaagctatgcagaacagtgccagatccgagcaggagggtgacgggaaggacaaaaaggacgaagaggaagacatgagcttagattaattgtctgctgtccccaaggggttgggattcgcgkctggcgacctcagtgatggggctggtggcgcacgccctcacctccattycagcttgctgagaaataaaggtcttgtcktttacctgccmmaaaaaaaaaaaaaaaaaaaaa

SEQ ID NO: 674 - DNA, 2718 bp, Canis familiaris
aattcggcacgagtgattcggaaaactasccattgcacatgtctaaagaaagggaaaagatcaacgtatttattatttaaaaaagtcaggactgggattttgacaatgtcaagatttacactatatccctgtttattttggatacaccactgacttccgttcctagaagacacagatatattgcctaagcaaccaaagatattaaactaaccatgaagaaaaatattatcaatacatggtactcttttgtaaacattcccaatgtgattgttccagatattgaaaaggaaataagaaggatggaaaatggggcacgcagctccttttctgatgatgatggtgatgatgacagtgcctccatgtttgaagaatcagagaatgaaaccccccatgcaagggattcctgtagaaataactcacagagaagggatccatcacagagggaacagtacctgcctggtgccatcgcgcttttcaatgttaacaatagcagcaataaggagcaagaaccaaaagaaaaaaagaaaaagaaaaaagaaaagaagagcaaatcaggagataaaaatgaaaataaaaaggactcagagaagaaaaagaagaaagaaaaggaaaaagagaagaaaaataaagaggagaaaggcaaagataagaaagaagaggagaagaaagaggtcatggttattgatcctgcaggaaacatgtactataactggctgttttgcatcactttacctgttatgtacaactggactatggttattgcaagagcatgttttgatgaacttcagtctgattacctagaatattggatcatttttgattacctatcagatatagtctatcttcttgatatgtttgtacgaacaaggacaggttacttagaacaaggactgctggtgagggaggaggctaagctcatagagaaatataaatcaaacttgcaatttaaacttgattttctatcagtaataccaactgatctgctgtattttaagctggggtggaactatccagaaattagattaaacagactattaaggatctctcgaatgtttgagttcttccagagaacagaaacaagaacaaactacccaaatatcttcaggatttccaaccttgttatgtatatcgtcatcattatccactggaatgcatgtgtttacttctctatttccaaagctattggatttggaaatgatacgtgggtgtatcctgacgtyaacgatcctgaatttggccgtttggctagaaaatatgtatacagcttgtactggtctacactgactttgaccacaattggtgaaacaccacctcccgtgagggattctgagtatgtctttgtggtggttgatttcctaatcggagtgttaatttttgctaccatcgttggtaacataggttctatgatttccaacatgaatgctgccagggcagaatttcaagcaagaattgatgcaatcaagcaatatatgcatttccgaaatgtaagcaaagatatggaaaagagagttatcaaatggttcgactatctgtggaccaacaaaaaaacagttgatgagaaagaagtcctcaagtatctacctgataagctgagagcagagatcgccatcaacgttcacttagacactttaaaaaaggtgcgcatttttgcggactgtgaagctgggctgttggtggaattggtcttgaaattacaaccccaagtctacagtcctggagattacatttgcaagaaaggggatatcggacgagagatgtacatcatcaaggaaggcaaacttgctgtggtggcagatgatggaatcactcagttcgtggtcttgagtgatggcagctacttcggcgagatcagtatccttaacattaaaggtagcaaagctggcaatcgaagaacagccaatattaaaagtattggctactcagatctgttctgtctctcaaaagatgacctcatggaagctctaactgagtacccagatgccaaaactatgctagaagagaagggaaagcaaatcttgatgaaagatggtctactggatataaatattgcaaatgctggaagtgatcctaaagacctggaagagaaggtcacccgaatggagggatcagtagacctcttgcagacaaggtttgctcggatcctggctgagtatgagtcaatgcagcagaaactgaagcaaagaytaaccaaagttgagagatttctgaaaccaattattgacacagaattttcagctcttgaaggaacgggagatgaaagtaggcccctggactccacacaggactgagaagcyggtcattaacaaggacgtgcctcatgatccttttggtttaggcaactctaaattggaagaagagggagattcagctgggggagtgtttccataaggaaaatgggctttggtgcagtatacaaggcccgcgcacccacttgggaggtactgtgattaacaatcatcgtccttaggatttttcagagtggataatgtgcaaagatatagaatgattaagttgtcagtatctacatttcctgatttttttcatatatgctccttttatgtaatactctataaaagcgaacaagtatccctcactttcaggcattttacattgtggaggagcagctgggaattaccatgtatgtcatgttcaggataccattttaaaaaggattagaatgcaataaagtaaaataaatcctaaaaaaaaaaaaaaaaa

SEQ ID NO: 675 - DNA, 686 bp, Canis familiaris
cttggttccaagaatcgtagaatgamaatgmaaaagatgagcaaggagaaatgcccsaaaggagactgacccggcgcggcgccgkcgggaccactctgtsctgcaaaggcagtgggkttttttttgttgttgtttgttcgtggatgcttgatttccagaaattctccagcgattcggacatktcctctcccccatccccgccctttttaggtagaagtgactgtgtggttggtctctgtgaggtatttgggggactctgtatttgctcgcttatgtgtccragaaacgaagtggctttggggttttgccttttccccgctccctcccttgactgaaccgttggttccgtaggaaatgctatattttgtgagtgcacgctggattgaggggccctctcctgtgtaaatgttccctaggtttctgaaaagtgctgtagtttagcaatcccagcgttgctcaagcaggggccaagtgcgccccacttctgaggatgaaggcagagcgaccgcagtgggaggcccacccgggggcccactagttaccagggtcccctttcctcagggagcctgggggccctccactgagaccgggaaggaggcctagaggggagcccagggcctctggtggstcggggtctattctcagtgcactggaggagccactctctcctcggagggctcggcttg

SEQ ID NO: 676 - DNA, 684 bp, Canis familiaris
ccagtagtgacatgttttaatggacctggacaacccacctctatgtgtagaatctaaaggtaaatgtgggcctcctccacctattgacaatggagacattacktcattcccattatcagcatatgctccagaatctacagtagagtacaaatgccagtccttgtatgcacttcagggaaacaggattgtaagatgcagaaatggacagtggacmaaaccmccsaaatgcttagatgcctgtgttgtatcagaagacatcatgagaagaaataacatacgatttcgatggtcttctgagacmaaactgtattctcaaacaagggatactgttgagtttgaatgtatsccctggatatcattcaaagacaamcatcaagtattccgagcagtctgtcatgaagggaaaatgacatatcctgtttgtgtataggttatggttaagatgcagttttataattaaagtawatacatttactgagaatttttattatcagtccaattctcagtttattttgtcaagtattgtgtaactcatttatattcataaatcagaatttgtattaaatatgatgtggatgatgtaattataatcagaggaatgaataaatcacttcttaaaagcacctcattaaaacttggcaagcccaaaaaaaaaaaaaaaaaaaaaaaaaaaaaaaaaaaaaa

SEQ ID NO: 677 - DNA, 657 bp, Canis familiaris
ccagcaggtgatcattgtwagtcttacgttagttgggatggatatcatcaagatcatgttggttgcatatttttgtggccccaaagagcccattaaatcttgcactcgtttcagagctcgaatcctcatctttaatattgaaattcctattactaaaggatttcctgtgctgttacactaccagactgtcagtgaacctgctgttattaaacgattgattagtgtcttaaacaaaagcacaggtgaagtgacaaagaagaagccaaaattattgaccaaaggccagaatgccttggtggagctgcagacacawaggccagttgctctggagctrtacmaagacttcaaagagctggggaggttcatgctgcgctacagtggttctacgattgcggcaggcgtggtcacggagataaaagaatgatgagtcagaatttctaccatgtttccaaatgcaatgaaatagctaagctttgtttttaaagaattcagttgttcagttaaaggaacmatgtgcaattggtatttttttaaaatgagaaccttaaaacgatataatcagcggcaaagaagtattaatcatcgctcctgcaaaaatttcaagttgccaaatgacaaagaaaggctaatattgcactttcattaaaaaaaaaaaaa

SEQ ID NO: 678 - DNA, 738 bp, Canis familiaris
gtatctatatatttttgtggatcttgacctgattctaatttctaagttacctgacttaacagtgtggtccagggctctttgggacatacctcttttctataccacaggctgtaaagagaggttgcattattctcaatgtgttttcctaaaatcaggagtgggtgctttggttcccratatacttagatgcagagtagaaggatattttttaacttttgattgctgagtcacttaattagaatttggggagaaactttgttatttatttatttaggtccataagaaaaaaaaatgtcaagagtggggaaaaaaaaaaratctgggttgttttagaacaagatgtgtttcccaagtgatttctctggttctctgtcctttagacagtaagcatctcagccatccagaaccaagaacattccttgaagcattttgggtacaaatagtcaaaaagaacctggttatctgtattttgacattagcttgagaccatttattcttatttgatgtctycmtgaagtgaactagtgtaatggaaaraatgttggaattccaaaaacatgasaaaactacmtccmmmcacctcagattcagaaaagccatggttgtttaaattgaccctaaggacctgatcagccttmgygtgttatatctcttwacgtgctaaaaattacgcagagaagmctttcatttgcatttgcccctgyttcattttatttatgcaagtttttctytttacag

SEQ ID NO: 679 - DNA, 644 bp, Canis familiaris
aaatgaaagtaaagactttacgtcctcatcacacacgcagttctcaagaatcaaggctcctttaaaggagtgcttgaaatcccttggcttgtctatgctggactcggcctgacgccttttcatgcttttggaacaaaagatgggctgtttatagctcgaactccacagccctgttttggtataaagtaatacatttgagtattcaggaataggcaatatatttgtttaattacccaaggtcctccttccttgtcagttttcctgttttcattagagaataataaaagaggagagaagaaagggggtgaatttttggccttcatctggcacaccactacaacagaatattggcatattttctaggaaagaaagcctgttttgccataaaattttacctcacaaataataagtgctacctattgtactcagttggacagcttttgtatagaagaactaaactcgggcagcccaggtggctcagcggtttagtgccaccttcggccctgggccagatcctggagacccaggatcgagtcccgcgtcgggctccctgcatggagcctgcttctccctctgcctgtctctgccccttcctctctccttctctctctgtgtctcatgaataaattaaaaaaaaaaaaaaa

SEQ ID NO: 680 - DNA, 667 bp, Canis familiaris
tcccctgagtcaaatgagacgacaaaagcacgacattttgctgtttacaaaccaaggacaacaactacgtkgggtccaagaaggttcctcttcctccgggtcatttgttttgcatttttgtacttcratttctcccttcactttttttttttttaaataagcacagtaaaagctgcccctggaattggatcggggtgccgttgaataggcacccmaatatccatgactaaattttakttatcttttttgatagtaaatgatctcagagactgaatgatttaggtagagctcaacaattttgtattccatgtttgtgaaaaatatttttcccttgaacctgggcgagaaccccgctacagtgaacacggatactatgtgtagaaactccacttgtggtgacatttcctggccattctcattttgtctgtgctgacagtggaccgtgtccccctcctggagtgagtccagctcctggtgtgttgaagtcttagagagtcattggttaggagtaaaccaggagcagatatgtgcatgttttttctctgcaacatttggctcatttctctttttgttctcttttgatagagttccatttcctatgtatgtaaaataaaaaataaatttggaaaaaaaaaaaaaaaaaaaaaaaaaaaaaaaaaaaaaaaaa

SEQ ID NO: 681 - DNA, 642 bp, Canis familiaris
aaacttatctgatgattctaagagaaattctacaaatattcctaattttgtagttaaatggttaaaaatattaatttagagttaatgttggctttgttagatgagggagggaacccaagtgcttctctttgttctccaaatgtttcagaattcagttgtgaaggaataggcgttttatactatgaagacattcttttcagaatttttttcagttcctatatcataagcatttttcaagtttcttttttaattttacatggtattagcttttctgattcttttgtaaatacaatgtacttcaatataaggcatcaggaaatttatataggaatcattttcattccacttgtgtaagttaaagtcttgactctttgaaatcaagacatctattttatactttgatgaaattatgatttcacttagattgactttagttggtcgcactctataaggaattatgactgtgtaaaaaataacatgaaaaattcgaaaatgttcgtgacagggctgaaccttatttcagaagcgggatagtacaaaagcatcagcctaagagtggctctctgcctaactagttgtgtaaccttgggcaaagccactggatctttttgggcctcagttctctcaaaaaaaaaaaaaaaa

SEQ ID NO: 682 - DNA, 647 bp, Canis familiaris
agctcctctacggaatcgcgggaccagtaaccgcaggcaggacggacggtcagcctgcgacagcggagcctgctccccgcaccacaggcaaccgaccctcacgtgctgggagacgcaggtcccgtggttggagaaaacggaagtgctcgcttatytagtgcaatccgcacagtctagtaatgctctcggcagcctcatgctttagagtgtgtgtattatctcgtcgatacttaattggaggtgggagagattgaattacactactgctaaactacttttagcataactgaaaaccatgtttttatgggtgcccaggtttgctagaaggttctggcccctcagtgttcactcttgcacagcgaggatttgggcaggcctgacgcgctcgggagtccggctctgtgtgtggctgtacagtctgcgcgagcccgttagagactgttcacttcccacatcactaattctgggctacgaacaaacctttgatactttacttcactaagggggaggagccagctttgctttttgtactttttacttactatttcactttattaaaataattgtacaacgatttgtatataaagcttatgattaaaacctattttgaaaataaaaaaaaaaaaaaaaaaaaaaaaaaaaaaaaa

SEQ ID NO: 683 - DNA, 671 bp, Canis familiaris
tgttaaaagtcactgaggtagaaaagctgttgagcaggaagatcattgaagtactgggctaacttgctcgaaatgggaaccctaatggcaaggatctgcccctctggcctgtgttcgaccaggaagagcagtacctgcagctgaacacgcagcctgcagtgagtcgggscctgaagtctcacaggcttcagttctggatgaagaccctaccccmgwagatgcaggagctgatggaggcggagaagaagcacacagagctgtagctccctgcgtctgggggtgaggggccagggggctgggcytgagggcatatgccggatatgcccccccacccmctgaggagccaggggcttttccctcagtcacacagtctttcattcattctgccagccagccagccagccagcattcattaagaacctactgcattggggtccccgggtggctcagcggtttagcgccgccttcagcccacgggcgtgatcctggagtcccggatcaggtcccacactggggctcctgcatggaccctgcttctccctctgcctgtgttctctgcctctgtctctcttcttctcaagaataaataaaattcttaagaaaaaaagaaaaaaaaaaaaaaaaaaaaaaaaaaaaaaaaaaaaaaaaaaaaaaaaaaaaaaaaaaaaaaa

SEQ ID NO: 684 - DNA, 674 bp, Canis familiaris
tgaagattattctaaatcactytctgcttccctagttctgatttcaaagtgactagtaatttctkgatttgaaattgtgagtatctagttcataagactatctatccmatttgctattttgcatgatcatactttgaagacatccmataatctcctttgtttagattttgtctgtactgttagttaatctacmaacgtttgcattggagacttccttccgtcacatcttatgttaagattactactcttctccgggttgaagtatacccaaaatcagccagctttctgacmaattaaattctaggtgtggtgatatagattawatatgtgtgattaacmaacataaatgctgaacattccatgttgttacggttaatatcttaatctagctggaagatgaatggaaaaaagtgtgcaactaggtttttttttttttttttgtgatggtataatgttctgaatttacttaaaggaattctttttgtgctaaaaataatttaaaaaatatttttcaattctgttaatttgtagtaatttacgtttgcatgtgcctttcaactctagaattattctgaagttgtacttgattttaatcaaaagttcagtttgtatacatggaaaaataattttaataaaatatggtatctttaaaaaaaaaaaaaaaaaaaaaaaaa

SEQ ID NO: 685 - DNA, 567 bp, Canis familiaris
ttcctttctcttgctcagcaacttgaccacaaaatgaaattcctcgtactggctgctctgctcacagtggccgctgccgaggggggcatcagcccgcgggcagtttggcagttccgcaacatgatcaagtgcacgatccccgagagtgaccccttgaaggactacaacgactacggctgctactgtggcctgggtggatccggcacccctgtggatgagttggacaagtgttgccagacgcatgaccactgctactcagaagccaagaaactggacagctgtaaattcctcctggacaacccctacaccaaaatctactcatactcatgctccggctctgagatcacctgcagcagcaaaaacaaagactgccaggcctttatctgcaactgtgaccgcagtgctgccatctgcttttcaaaggctccgtataacaaggagcacaagaacctggacactaagaagtactgctagaattgagtctcctctctggaaagcatcattcctacatgcctcgtggccttcaccctaccctgtgtcctccaataaagcactttgttgaaaggc

SEQ ID NO: 686 - DNA, 670 bp, Canis familiaris
acttccctccattgcccacgaggtttcaagcttcattctcaagatccaatggggagcatggtctctggctctttttgcatttgaacttctttttcctgtttttcatcgatggtaacctttgagtctgtgaagtggtaaaattaaarwaaaaaaaaartggttgagacccctgagtgtgtatcacatccattcattaattcattctgcaaatagctacccccctgtggctcaagtgtgtacggagttggacaggacactggattctggaggacataacacaaacctctcaagagttggggtcgaccagttgtcagctgagggctggattatctaatacgcttgggccctgttgcttagctagcacgaaacctaggtgacaaacacagcacagaagtatccacgttcttctcaaatgagcctttaaggtcagattccacatgcaaacttgctttgtaatttaaaaatgcataaactctgtaactctgtgaacaacattgacatttttgtaagcattgcagtcataccatcagcgtaaatgtctccttaaagacgagaatacagagaccatgggtatttttttttaaggtatatgaaatcatgactcctttgtaaataaatctacatttaagcgataaaaaaaaaaaaaaaaaaaaaaaaaaaaaaaaaaaaa

SEQ ID NO: 687 - DNA, 651 bp, Canis familiaris
agaatgtggatctggaagggctggatcctactcccacagcttctgcactgactccccatgccggcactggacccgttgtccctccacctcgctgctcgcgtactttcatcactttttagtgatgatgcaacactttgaggaatggtttccccaaggccggcccccmarggtccctgttcgggaggtctgccccgtgacccmtcgccccagccctgtacccgggaaccctgttcacagacattccccttacgccmctgctygagcctttcaagwtcatccgtgaggcctacaagaagtacatcactgcccacggactgccgcccactgcctcagccctgggccctggcccaccacctcccgagcccctccctggttctgggccccgagccttgcgccagaaaattgtcatcaaataaggagatgtttaatccttagaaacctctttcctgccctgacttggggctcttcatgtttccccttctctccctgcttctcccctttgtcagctctgagctttgcccagcccttttctatttctttccccccagttcctactggttttgtgttttttaatctaataaaagagaaagatctcctttgtctggtgaaaaaaaaaaaaaaaaaaaaaaaaaaaaaaaaaaaaaaaaaaaa

SEQ ID NO: 688 - DNA, 671 bp, Canis familiaris
gtggaagacttctgctgaccaggagctggtctcccacgtctgtggatccagcacagcacggcacacttccttctgccccctcctagatgtctgttcgtcatggaatgtaaagaatgaccagcttttgacacaraacttgagccactttggagatttactcctcatacgtcaatatttgaatctttgttccgtttcctcccgctttattcaccttgatggtgaaaggagaccggtagcatcttttctacagtattaaaattgcagaagtagtttctcatttaaaacmacmaactcaaatataaatcagtaattctatgcccgccagagaccagcctgtttcttctccttttctcctgggaataatcttgggcttcttcctgaatcctggcaacttccatcctcttctactgcttgggcttccctgtttgcacgcatgtgtgtgcaggaatggctgtgtgctcggactcagtcccagctggaagcatgctctgccccgttactgttccggaaacagaaaccttcaagccctaggtggagccatttttgtcaagtcatcaactgtatttttgtactgaggttaacaaaaaaaaattaaaaatattaattgttccattaaactttaataaaactttgaaaggaaaaaaaaaaaaaaaaaaaaaaaaaaaaaaaaa

SEQ ID NO: 689 - DNA, 604 bp, Canis familiaris
cacacagacctacgaggcgctggcttggsccgcgagtacctgcacgcctgtgaaggggtctcctctgtgatcccaaccgcctgcccccacttacctgcgctggtgtgtgctgtccactcctgagatccagaagtgcggagacatggccgtggccttcagccggcagcggctcaagccagagatccagtgcgtgtcggccgagtctccccaacactgcatggaacggatccaggccgggcagatcgacgcggtgaccctgaggggcgaggacacctacctggcgggacagaagcacggcctggtgcccgcggcgggggagcgctatgccccggacgacacgagcagctcgtacttcgccgtggccgtggtgaagcggaacagctcggacgccttctccctggacgagctgcggggcaggcgctcgtgccacccgggcttgggcagccccacgggctgggacatccccgtgggcgccctgctgcggaggggcttcctccggcccagggactgcgacgtcctcacagccgtgagccagttcttcagcgccagctgcgtgcctgtcaacaaccccaagaactacccggcctcgctgtgcgccctctgc

SEQ ID NO: 690 - DNA, 647 bp, Canis familiaris
gttagccgcccccggctgcctcgggaaccaagtgcgaccgaaaggcggtgatcaaaaacgccgatatgtcggaggagatgcaacaggactcggtggagtgtgcgactacaggcgttggagaaatataacatagagaaggacattgcggcccatattaagaaggagtttgacacagaagtgacaaccccacctggcactgcatcgtggggaggaacttcggtagttatgtgacacatgakaaccctaacactkkcatctacttctacctgggccaagtggccattcttctgttcaaatctggttaaaagcatggactgtgtcacacacccagtgatccatcccaaaccacaggactgcagcctaaattcccaataccagagactgaaatcttcagccttgcctaggggwacacctcgatctttgaaccyttattgtgttgttttgtacagggcattctctgtacgaatttgttgtggttataaaacaattagagaaaacagcttacawttgtatttattttctattccatacctctgccccatgttttttctcctcaaaatccattcctttccaaataaatctgttggagaarwraaaaaaaaaaaaaaaaaaaaaaaaaaaaaaraaaaaaaaaaaaaaaaaaaaaa

SEQ ID NO: 691 - DNA, 611 bp, Canis familiaris
gtacccggattgagtggagcacatgttcaacccatctgcgtcttcctgcttgcgctgttagtggcttctgcggagaccgaaaacctgcactgtatgccggtggagacggccaaatgtcaccatgcagctctctgatgatccaattctacggcccggccctcttacgtggagctgacttctctcagcacatccgctgtcagtgcaggcctccgttggaggatatgaagctagaaaaggaggagacccagggcagggggaagaggaagagagagaagcagagacccacagactgccacctgtgcggccatactgttccccagaggtaaccggcccctcagaggagagacgcctcgccccggctcctgtatttattacggccacactcagttacctccctgctgacacctgccctctatttattagccaattgtatccctgctgaatgrsttgstccctccaaggtgaggggcagggagggataggaccctcaggaattcagtgccttaaacagaacgtgagagaaagaaaggaggcagccgcagacccacgtgtgcatcagctggagaagaagcaagatctgtggctttgagaggggcaaaccaggccccagc

SEQ ID NO: 692 - DNA, 706 bp, Canis familiaris
tttctgcagctctggccggctgcactgcctgcttatgccccccccagcawtggcttgtctgctkgaatggctcatcagaggtggaagtggtgcccttccagcaagtgtggggacgcagctactgccgggcactggagaagctggtggacgtcttgtcggagtacccggatgaggtggagcacatgttcaacccatcctgcgtctccctgctgcgctgtagtggctgctgcggagacgaaaacctgcactgtatgccggtggagacggccaatgtcaccatgcagctcctgatgatccattctacgggccggccctcctacgtggagctgaccttctctcagcacatccgctgtcagtgcaggcctccgttggaggatatgaagctagaaaggtgcggccatactgttccccagaggtaaccggcccctcagaggagagacgcctcgccccggctcctgtatttattacggccacactcagttacctccctgctgacacctgccctctatttattagccaattgtatccctgctgaatgacttgctccctccaaggtgaggggcagggagggataggaccctcaggaattcagtgccttaaacagaacgtgagagaaagaaaggaggcagccgcagacccacgtgtgcatcagctggagaagaagcaagatctgtggctttgagaggggcaaaccaggccccagcgg

SEQ ID NO: 693 - DNA, 648 bp, Canis familiaris
tcgcctggcgcagtggcccacggcctccccgccgcccgccaccgcctcgcacaagtcgccgagccccggtggcagccgggggtgttagttaatccaggacgtccccggaccgggacgtgtggcttgcatttctgtctttcatcttctccccggaagctkcgggatctgtgtcagcccgagggctcttcacagaagcttcgtggagaaccgtgttggctccgcagacmgaccggcgtggcccatcgggtgcccgtgarcgggactgggaggcgcctggttctcctcaggaggaagagttcccgcctggcctgccagcaagtcttcagcccttcagcctggggacagagctgtcccccaccccccaaggctgtccgagctgcttaccgagccctcagtgacgtcatcgccacgtcgacctgcaakgagggggtcgtcaggaaggcaccgagcccccctttgcccctggggtgcgggcgccgcgggtctgggctctgtgtgcttctctcctcacggtgtctactaacgaccaacatttgctaatgtaaataatagtaaattattgagaatcctaattcttttacacagtctgttttttaatctattttaattaaataaagcatattactctacccgtggaaaaaaaaaaaa

SEQ ID NO: 694 - DNA, 651 bp, Canis familiaris
tcactgagtatatccatggatttacattcctggagctcaaagaagagttctgagctaaaggtmaaataamattgggagttttagttatatggatttatgagtaaagccttgagaatgaatgagttcmatgaagggcaagagacggcctggccctgaggaaatcctctggtactggaggagtccagtwaataacacgctgagaaagaacagtcagaagtcctawwaaaacmgaagactatgatggcatcatggcagctaggaaagagaatgcttcagtgaaggagtggccagctgagccgaacactgcccagcagtccmgtaagatgggcagtgttacatacctggtttttaagtaatacmaagacaggctatccmaccacgtggttttaatatatgataaaaaaaaaaaaaaaacmacttactggaaaaaaaaaaaaaaacacaacwacttactgggcacctgggtgcctcaattggttaaacctctgccttcagctcaggtcatgatcccagggtcccagaatcaagcccccacattgggctccctgctggagcctgcttttccctctccctctgctgctgctccccctgcttgtgctctcttgctctctctgtcaaagaaataaataaaatcttaaaaaaaaaaaaaaa

SEQ ID NO: 695 - DNA, 692 bp, Canis familiaris
gcccgctccggagctcgccgcccctgtgcggccagccgggcccytcccgtgcacacttggactcgggcccgcgctccagctgcgggcctggtctcccgttacacgccgggcggaccacccacagcccggccgccgcgggccgcctccgccagactgaccgccaggcctgcagcgcggtgccaggagacagaccctcgccgtggctgccgccgccgccgccgccgctgacgccccccaccgtgcgccaccaccagactgcggcctccagcgatctgagctcagccaggaagtatccgagccggccgcggtccccggacactgattccagcagcttgccacccacccccgcggaggggccggccagcctctcgcctccrgtgagacccgttccacccccctcctcccagagacctcttctgctcctgccagatggccaccaggtcccaggggtgcctggcagtcgggtccagtcactcgttttccttctgtgtacctgtgcgttttgggcaggttccgttctcaatttgcagctgtctctctgatgtgtgccttttgttcaacacagtaattaacccctgcactctgcccagcycttcyacactacctggacaaaygtsttttcyttttttcaataaatgtsagaagctattaaaagaaaaaaaaaaaaaaaaaaaaaaaaaaaaaaaaaaaaa

SEQ ID NO: 696 - DNA, 1088 bp, Canis familiaris
agccagatgcttaaccaaatgacctaccccgcccccgccctccccgggactccttaaccatttttaattgtacaatccagtggcatttaagtgccttcatgcagtgagtgtgaatgtggctggttcttacccaccagcacacctctgccgagtccatgtgccaatctcaccttcctttccctccccgttcccctgcagactccagctcaaacctctcccttcaggaaaggtggactgtgttcaaggtatggttggtggctgtggcgagacccccaccctcacagccagtgcctgcctgccagctttccacttatgtcttctgactcttccagggcttgctatggtacattgtccccttggtcctagtttactttgcggagtatttcatcaatcaggggctggtgagtgagagttgccgggaggggtgcaagtcacaatagaggcaggggccccacttgtctctgaccgtctaccctctgtgctctttgctgcagttcgagctcctgttcttccggaacacatccctgaatcatgctcagcagtatcgctggtaagaagagtaagatggggcagcaggatgggcgggaggctgggagggccccttgatgatggggctggcagcagctggggccatcctgctgagtaggggcccagtggggcttccttctcctctctgcccccttcaaaggtaccagatgctctaccaggctggcgtctttgtttcccgttcttctctccattgctgtcgcatccgtttcacatgggtcctggccctgctgcaggtaccaagcctggctctccctccattccctccttggctcccagctacccaagaccccaggcctccttccctctgcaggaagtgtttcttgcccactgtcaggttgtctggggaacagaaggccagcaggactccagatctgtataaaatgtgtggtcttgggaaacctggcaaacatggatgcaaatcccaccttctgttctctgcagttgtgtgacttagggcaggtctctaaaccagtccaagatgagagttcctcatctctgaatcaggtgtggccaacatctgcttctctaggtagttataa

SEQ ID NO: 697 - DNA, 666 bp, Canis familiaris
gcagcaatgacaatkggggacaaccacaaacagaagtwacgaaatcccttctacagatgtgctgacmaaagcggtcgggaacatctttcggtctatgctgtggtggtaattgcatctgtggtgggattttgtctgctggtgatgctgtttctgctgaagttggcaagacactccaagtttggcatgaaaggttttgttttgtttcataagatcccactggatgggtagctgaaataaagaaaaagacagagaaaggggctgtggtgcttgttggttgatgctgccttgtaagctggactcttgggacgggcattggcttctcccaggaggtgccgcttagttggggttttctggcagatgtgggtggtatttgcaggaggtcctgcatgaagcctgcggctgttgtgagctgtgtttggggcgcactgctgctgcagaggcagctcgcaggcagctaagaaaatgctcaagaaaacattttaaattcatgcttccctcttgttcttacaattgctcaaatacaaaattgaaatgggattccattggattatgcttctcttcttaaaggagtgctccttgaccatactggaaatgtattgattcttattgtttctgttcattaaaggtgaactgcamagttacammmamaaaaaaaaaaaaaaaaaa

SEQ ID NO: 698 - DNA, 653 bp, Canis familiaris
cattgtgttacctgttgtaaagtttcctgttaagttccccgtgccataattttttatgttcttgtgagggaaaaaaagtaaaaacctggtttaatctgtatttgactttatgacattgctgttcaataagccaatgttaaatgtgttaagacttgacttgtgtactagtgttgtaatttttcaagttaaaagtgtccstaaaggccacgttccgtatatctgatttttcccagtaaatgaggcmaagcaattctaagaccttccacaaacatctagccttctaaaatggagaggtgaatccttctgcctagtacaaacaagcgtagctattagagggtggtcggggtatgctactcttaggatttcagagtgtcttcaaactgaaatctcaatgttctcagtaatgagaaaacctgagatcagatgcttatgtaaggaaagtgctattcacccagtaaatcccaaraaagcaaatggataatgctggccatattttgcctttctgacatttccttgggaatctacaagaacctcccctmtcccctcccccaataagaccatttaagtgtgtgttaagcaactacagaatactaaataaaaagtttggccaaaaccmammawraaaaaaaaaaaaaaaaaaaaaaaaaaaaaaa

SEQ ID NO: 699 - DNA, 721 bp, Canis familiaris
  misc_feature (35)..(35): n comprises a, c, g, or t, or includes no nucleotide
acaaggtcatcatcaccacgttcccttcgtacccnagtcgttagacatccaggttyccmacttscccagcctgatgagaccaagggcttccatcagattcccttggatccatgatcttcwttgaarggmctgactytwaagaggakccagagccaggctataagcgcctggcgtggggccagcctgtgggcctgaggcatacaggctacgtcatcgagctgcagcatgttgtcaagggccccagtggctgtgtagagagcctggaggtgacctgtagacgagcagatgctgcagaaaagcccaaggcctttattcactgggtgtcacagcctctgacttgtgagattcgcctttatgagcgactatttcagcacaagaaccctgaggatcctgctgaggtgcctggtggattcttaagtgacctgaacccagcatcgctacaagtggtggaggcagcgttagtggactgctctgtggccctggcaaagccctttgacaagttccagtttgagcggcttggctacttctccttggatccagacagctgccagggacagcttgtcttcaaccggactgtcactcttaaggaggacccaggaaaggtgtgagctgtaaggaagccccatggacctacctcatgcttctggaggctagggataccctagactccgtgtcaataaaaaacagctaaatctcmwrraaaaaaaaaaaaaaaaaaaaa

SEQ ID NO: 700 - DNA, 649 bp, Canis familiaris
tgtatcgctccagcccctcakatctgccaggatgggtttsttttgtgtgtgtggatggcastgggggggggaggtgtctggaagcttctgaaagtcctgctggtctcccaggtgaggcttgagtcagggttggagggaggagagcctctggatccttccccagacctctgccgctggaagtggtgtggacttggatgagtgatggccgcagggctgggtggtgagcagctggctcagtgggactggaaaagagctagtatgggatttagggaagggtactggtgtctttagtgccttggctctgggctgagcagtgagggtacagcgaagccacaggaaaaagatggttgcttcagatgtgctttggctcctccccmgtggactctacccctcttggagtggggtcttttgtcttttgatcttggcctccmaaacagatgctaatctttgaatgtggagggtgctggagtgagaggggagtatcatttctcttgagggtccacctcccatcgtgtagaggttaaaagggtcagaggggagggtgactatatgtacacatgcttgattcccactctaccccactgcttgaggtagggggttgtggaataaattatttttgttaaggcmaaaaaaaaaaaaaaaaaaaaaa

SEQ ID NO: 701 - DNA, 694 bp, Canis familiaris
cagctttggaaatcataggctagtagctataaggcagtgcagcaaratcaagacccwactccccattatggggtaaatgaaggcctgaagctaccagatggaatatctgtgggtcagatgaaatctagaataagactgaaacactttctgcatgtagccmawgcwtamcactacagaataagtgccagagactatatatttataaattagattcttttstaatctattacacagataacttttctatcttkaactatataaaataacctccatctcaacattgggattgtgttactcgactattattatgtaataatccmagwacactgacttaataccmatacmaaaataggtaatgataatacaaatgtattrataaatttattacagatgcattaatacatgtattatttcatagatatgaactacatgaaaachwacccwacacatcagtttttaagtttttattggtttgcttccatctaaattaatgttataggatctaaaaatgcatatggaaggggaatgattaaaacattgtaaacctaaattatatgtcattatgcgtgtcttgagactggtaaacgtttaatgttaatgaaaattgagggtcgtgtggtccattaacacaaagcttctgagatctttaaaataaataattatttccccmaaaaaaaaaaaaaaaaaaaaaaaa

SEQ ID NO: 702 - DNA, 652 bp, Canis familiaris
gagcagcccattacggagcactgcccgcctgacctcagctacatcactcgagctaggcacggtggtgaggactacgtcttctccctgctaaccggctactgtgagccacccaccggcgtgtcactgcgagaaggcctctacttcaacccctacttccctggacaggctattggcatggcgcctcccatctacgatgaagtcctggagtttgacagatggcaccccagctaccatgtcccaggtagccaaggacgtgtgtaccttcctgcgctgggcatctgagccagaacacgaccatcggaaacgcatggggctcaagatgttgatgatgatgggcttgctatttcccctgatctacgccatgaagcggcataagtggtcggtcctcaagagccggaagctggcatatcggccaccaaagtgaccctgctccatggctgctcactgtcttgcctgagggggccctggagccgaggagccaccactggacctgttcaggcctcagctggccctyttggccaaacccctctttctttggttaagagggaacggggcaagagaccaggttctggttcagacccttcagcccctgcatcatggaaataaattaagtttctcaacamaaaaaaaaaaaaaaaaaaaaaaaaaaaaa

SEQ ID NO: 703 - DNA, 669 bp, Canis familiaris
aatccgccacaggggccagatgacgtgtttcccaatccacgagtcatcatcttgacatgaatcagayttgtttcgaccagtagattcgactcaaccacaactatcggaactaggctcggggagaactcgaccggcgtatcgacggaacgcgttggctaaccgagactcggggattctccacgsggtcaggaagtgaatcatcatcgatccggctaagratccgracaacgtgatcagtctcgcgattctgaacgatcggttgcacatgatggatgtcgtgagtcctcacaagggggtcgacctggtcctcaatcggattattaagactcctggggcccaacagtgaagggcgattcccgcacgtccaagactcaccgctgaccgtctgcatctctggggggtagcggctctcaatgaccggatttccgtcgtctcgagacctcgggctcaccggcggttggccaagatgaacagtattcgtcactcggtacgacatcacgtgatgaatcgacggaacccgtgttggaattggtatcgtatgaacaacaaccatcacgtccaagctctccggaactgtaaggcttcatgaggtccgtctccgttgaataaaggtctgtcgggttccccgacggtgarrraaaaaaaaaaaaaaaaaaaaaaaaaaaaaaa

SEQ ID NO: 704 - DNA, 669 bp, Canis familiaris
ttaggcggtgtccccggtctactgcacaaagggttaggtgctcagtagtagaactgtacttagtctraacaaagctggtcatctaagctgagttggtgttgatagccttgatccgagcccctcttgagctggccgcatagctgccttgcgcaaccgattggctctgagcccctaagaggtgcsccagtccttcacttagtagtagctaggccgattcytaggcytgttgcactagtcagagcgctaagacttgctagccaacgtgtactacctacagcactcaggagtgttcccccagctggaccaggagttagcctaataattctgaggaccccgggttgtcacttcccgctaagggcgtgcaggttctgagtggcgactggcagacgtagagaccccccatcgccgagagttactggcctaaaggcagcagagctctggagcccgagtggccgccaaccggttctacttgtcataagcagtgagccatgctgtagtgcactacttagctgccttgggcacaaccttaaccatagcatacttgttgttggtagtgcaggttcgagaggccttgacattccgaagtactccaggcagaggcaacttatttccagacagcccaaggggctgccactyyyttttttttttttttttttttttttttttttt

SEQ ID NO: 705 - DNA, 653 bp, Canis familiaris
gcttccgatgcgaccacaactcccsggctymagctctgaggagcggccaagcagcaggacaggcaacctcccctcgtggtcaatyttgataagcgcgatgtctgccttctcatccacatccttgattttggcttcgtaagtggcaccattcttcagctcgaccttgacccgatgcttgttggtcaccacgtgggcgtttgtcacaatcaatccatcttcggacacgataaasccagacccactggccaccggcacctccctcttagaaaacggaagcttgcgaaacaggctcgatgtgaaccacggcagggggcgatcttctccaccacgtcagcgatgaagttgtacttatggcgcaaactgttagggtcttcttgcccttggccgcaggcgccgcgctgcaggacgatgacgggcggctggtgcagcctctcggcgcggcggctggcggcgcgcagctggcacaggttggcgtaggtgttggcgtcgctgccgcacaccggctcgccgctggcgcacacgcagacgccggcctgcgcgcgccgccgcaccgtggccgaggcgggcaccccgaagggcaccacgcactgcagcccctcgccgcacgggccctcctgcaggccgcacgccgccccctcgggcgcgccgcacac

SEQ ID NO: 706 - DNA, 677 bp, Canis familiaris
ccatgtcagatcacccgtaagtgatctacaacttcgcagcactcccttcagatacctacttacacccattgtgcaaaawagtgttcaaaatagaatacagagccttaattgggaagaaatggraaaaagcccatgcattcctgaaatagatgattctgagttttgtattcgtattcctggaggaggtatcacaamgaacactgctatgatgaaggctgttctaaagaaatcccagtggtggttctgctgaaatttgttttcagaaggagacaatatcccagatgcattaggtcttgttgagtatcttaatgaatggcttcagataatcaaaccatgttgtgatgaccccacagcatctgccttgcagtggaaaatgccgagttcgtggagattactctttggcagtggtcttccccctgcacttttctgatctgttttcagcttttatatattatgtcccaagacacttactaccaacacaactgttaaacaactatatcaaaagttatattatctgagaatgtattaggaaataaatctttacttttcacagaaaatctcagaaaatggattaaaagttgttttgccatgcttttcactatatacaacaaatgtaaattttgtacaataaaatacttcctgattttgtctgaaaaaaaaaaaaaaaaaaaaaaaaa

SEQ ID NO: 707 - DNA, 651 bp, Canis familiaris
gctgaatgagaccccggagacccaagaggaccctcctcaatggagacctccagaccmgtatctgractgcctgaaaaataaataaataaaatgccmagctctgccmagtggcaagtgctccctcccctctgccccctttccttcctcccacccatcacacctggcttctagaataggaaattgctcagcatgagtccmatcagagaacmgtgtctgagtgaatgataatgtattaaattgatgacaccccctccccccaccttaaagtgaacactttaaatgcaggcagacmattccmagtcaggagaagaagagatcacgcttgggtctgatatgtagaaatggtgaagctcmacmaaaatagaaaagtctatctgcgtgtttaaaacctaatatgtaatcttgtggtcttatatttatacttatctattctactcttctctagtccctgtgtagtcattacctatgtttcctgtgttcmaaagtacacgagtagccagattgaagtgtgcctagtataggtggacgtttattacmatatggtacccgccagaaatggacttgcccatgaagcccaataaagtttaagcttcagggraaaaaaaaaaaaaaaaaaaaaaarrraaaaaaaaaaaaaaaaaaaaaaaaaaa

SEQ ID NO: 708 - DNA, 656 bp, Canis familiaris
cagagagcatctggggggacataagcaccagcggataaacatccccmmaggaagaaaagcatagcgagaagaggaggccatgaagcagctaagccagctcctccccgaggatctcaggaaggaactttatgaactttgggaagagtatgagaaccaatctagcgcagaagctaaattcgtgaagcagctggaccaatgtgagatgatcctgcaggcatctgagtatgaagacgctgagaacaaacctgggaggctgcaggacttctttgattccacggcaggaaagttcagtcaccccgagatagtccagctggtttctgaactcgaggcagaaagaaacgccagcatagctgctgccgcccgtgagccgagttcytgacatgtgctccctgctgcggccctcctgcgacgggcgtcgtgtttttccctctcacgtgtcgtgttttgctgcttttgctttgattccccccagacgtgagtccgtttgttttccwttgcttggactccagcaagaaacacaatacagtctggataataaaagaagctgcgagcaggatgtggtcctggaaaattccctggatgaagactggggggtagtggggggagctgcttatgaactaaataaatacatctttaaaaccttaaaaaaaaaaaaa

SEQ ID NO: 709 - DNA, 652 bp, Canis familiaris
ggaagccacttgaacggtcatggccttcagaatgcctcctcagccacctggtgtgtgagacaatgcagcctgggragcagaagaatcgccaaaatgcaaggatatagtacataccttgtccctgtctgagcagcctgtagccggcacgcagtctccccccagggtccccattccagacatgtctagagggtatcgccgtggcagacttcgttaatcaagcacagcatccctgttgtaatggacccagacacagcctgcctcactaccctcaaccctmggctctaagcagtccccacgtttattcagagttggcagagaacatgtagcctgcttggtgtttctggcctaaggacacctcaggggtgacaggacctgggcagagccccagcaccaagagtacagtcaaaggggatgacggaggtcctggtgctggagagccctgatctctgaggacctgtgttatamctgcgtgatgaggatcaaaccatatatactactgggaggaagactgttgacctaggtaatggcagagtagtaaagtcaaaagagaaaaaccaagtgttgggtttggggctgtcacgtatgaacaaaataaagcaaaaaataattgttaaaaaaaaaaaaaaaaaaaaaaaaaaaaaaaaaaaaaaaa

SEQ ID NO: 710 - DNA, 669 bp, Canis familiaris
actccaaccaggaaggaaattccctgttccaacctgtatcatttaaaaaaatttttttttcctgagagcagtttagtccatattttgcactgacatacttgtcattgttcctttgtttgttaaggtaaggtattcaccctcaattcaatccaacttctattttattagggtggaatatgatgtttagcagcaaacttaacagaaactggccttttctttgttacattcaaaaggccaacatggtacaattaaagaattgcggacaccaaaaaactgttccaagtatgtcgaatatgtcaagccatttaggcttgtcagaaatgactcctttggttttttttctaagtcwttraaatgtatataaattatactagattggataacagtcttgcatgtctatcatggtaaaatttaatatgccatcctgcccaacccttccactcctacctttaaaaaaaaaaggccaattttatgaagcattgcacaccctcttgggaaactgatcgtcaaattttgaaacagtatgaaacmattctggttggtgtctcatgaatgagctgacaccatttttttattctgtatatttagaatgaagtcatgaacmaactttataaagacatctttgatcattccmaaaaaaaaaaaaaaaaaaaaaaaaaaaaaaaaaaa

SEQ ID NO: 711 - DNA, 654 bp, Canis familiaris
ccgagaccccccgcgagaccccaccgagaattggacccgcgtttccccccgaaccgaaccggggggacgcagtgctcckcsagccccacccgagagccccactctgcggtgtcttaccctcgggtcacaactgaatgccaacaactcgcccccgtggacagcctgcgtccacgacgagagtgggcctgtcggtcggttgcctgggacctggggtgaaaactgcccattccccagtgacacccccaccccgcagcacggggactgtccagggaaccckaggccacgggcctcggggcactgctcggtctgtcacgctcctgcgacacctgctttctgctggcctaggcgcccacttgcccgcgaccccagtgccccgtgttctttggagcataccagctgtcccccccgacatcacggttgccagggcccagggccaackgaggctctttgcgtggagaagcaaaaatttctttttttcttttcttttcttccctttgcacaacaaccamtggkgtgagtaaggaacatcgaaaatcagttttcccacaaatagagaatgaaaacagtaaccaagagaaagcactcagagacctcgactgcctcaaaactgttatttggagaactaaccactttttttttttttttttttttttt

SEQ ID NO: 712 - DNA, 654 bp, Canis familiaris
ggctctggggggcgctctggggtggctcttaacctgggcgcaaaggggggcttggcttggcccccctgcgtcacgaggmgstcggggtgggctctcggggtgagacgccacagaatgggagcccagtgttgacttacggttgttgagcgggggcacctgtcggacgcaggtgctgctctcacccggacagccagccaacggaccctggaccccacttttgacgggtaaggggtcactgtgggggtggggcgtcgtgcccctgacaggtcccttgggmtccggtgcccggagccccgtgacgagccagacagtgcgaggacgctgtggacgaaagacgaccggatccgcgggtgaacgggcgctggggtcacggggcacaagaaacctcgtatggtcgacagggggggctgtagtgccaacggtcccgggtcccggttgmctccgagaaacgcacctcttcgtttttaaagaaaaaaagaaaagaaaagaagggaaacgtgttgttggtkaccmcactcattccttgtagcttttagtcaaaagggtgtttatctcttacttttgtcattggttctctttcgtgagtctctggagctgacggagttttgacaataaacctcttgattggtgaaaaaaaaaaaaaaaaaaaaaaaa

SEQ ID NO: 713 - DNA, 673 bp, Canis familiaris
cgtaacgattaggaggmaccaatagaccgacatctagacaagtcacattgcgatccgcaccatccgcacawaacggccgaagttgtagctcggtcgacaagggaacttccgatttctgatgaccatgacacctatgaatcctctcacgggaaaccttgcaaacctcttcgacgttgttgcggttgcggacatgcttgaatccgaggtttcttaacgtgaagaaccgttgacttaagatcgtaaccattctccaaggctatatacgatccccctagggwaaggtcaactgactcaatcaattcatgtagaacgctccttatccgaacatgaagaacaacgcaattcgggtcagacataagagattcattcgtgcctgtgttcctaaatatccgatgatgtcgatccaccatgtcattgagcacatgtataggcttccaaaagctttgaaacaacggaagaagtttttatccgggttgaaattatgttgtggagctccgccaatcaacaaaaacaggagggattttctacaacctccacatcgtccgaagacccaacaggacatgaataccgttattacaaccatcaagtaacctatgtaggatcattatttttctaatgtcctgacttaataaatcagtagtttgaaatccaaaaaaaaaaaaaaaaaaaaaaa

SEQ ID NO: 714 - DNA, 673 bp, Canis familiaris
gcattgctaatcctccktggttatctggctgtagatctgttcagtgtaacgctaggcgtggtaggcgtgtwttgccggcttcaacatcgagccagctgttcccttgaaggctaaagactactggtactgtggatacttaggagagtgccctttggaacgtttggagaagctgcaacaacgccaacgcctgtacgaacttaggctccaaagaattgcacttcttggcaactgaattctagcattggtaagaggttccgatatatgctagggggatcccwttccagttgactgagttagttaagtacatcttgcgaggaataggcttgtacttcttgttgcgttaagcccagtctgtattctctaagtaagcacggacacaaggatttataggctactacagctaggtggtacagtaactcgtgtacatatccgaaggttttcgaaactttgttgccttcttcaaaaataggcccaactttaatacaacacctcgaggcggttagttgtttttgtcctccctaaaagatgttggaggtgtagcaggcttctgggttgtcctgtacttatggcaataatgttggtagttcattggatacatcctagtaataaaaagattacaggactgaattatttagtcatcaaactttaggttttttttttttttttttttttt

SEQ ID NO: 715 - DNA, 658 bp, Canis familiaris
cgtgggtgaccagacccgcagcggccagtggcgcatctatggcagcgatgaggatctgtgtgcgaggccctactatgaggtctacaccatccaggggaactcccacgggaagccatgcaccatccccttcaagtacgataaccagtggttccatagctgcaccagcacaggccgtgaagacgggcacctgtggtgtgccaccacccaggactacggcaaggacgagcgctggggcttctgtccaatcaagagtaatgactgtgagaccttctgggacmaggaccagctgacggacagctgctaccagtttaacttccagtccaccctgtcgtggagggaggcctgggccaagctgcgagcatgcagggggcagacctgctgagcatcacggagatccacgagcagacctacatcaacgggctcctcaccggctacagctccacgctgtggattggccttaatgacctggacaccagcggaggctggcagtggtccgacaactcgcccctgaagtacctcaactgggagagtgatcagccggacaacccgagcgaggagaactgcggggtgatccgcacggagtcctcgggcggctggcagaaccgcgactgcagcatcgcgctgccctacgtgtgcaagaagaagcccaacgccacsg

SEQ ID NO: 716 - DNA, 657 bp, Canis familiaris
gacctcattgacgcggcctacgggttcgacttctacatcctgaagactccagaggaggatctgtgctccaagttcgggatggacctgaagcgagggatgctgctgcggctcgcccgacaggacccccagctgcaccccgacaacccccagaagagggctgccatcttcgacaagtacaaggagtttgtcatcccggaggcagaagccgagtggktcggcctgacgctggatgagkccgtggagaagcagaggctcctggaggagaaggacccgayccctctgttcaaggtctacgtggaggagctgattgggcagcttgagcagcaggccctgtctgagcctgtggtggtscagaagaggsccascagggagtgactgcgcggggacctgccccccgcccccgccaccgtgggcgcacgagtctggtgggggctggtggatgaaccccatcttctgtgctggctcagtggctgccagggctggatgggctttgtggagccccmgggktctcctgtcccagggcccccagaggtctggggccagcttgctgcctctgtagtcccctcttctcccctgaggtggagacccagctggggcggcgtcagtaaagtttgaacttgtcammaaaaaaaaaaaaaaaaaaaaaaaaaaaaaaaa

SEQ ID NO: 717 - DNA, 770 bp, Canis familiaris
agctcgccatgttctcgcctgaagcaaggggttcggccggttcctgccaggagaagaactgcatggcccgacgctgsctggccaggctcgagcccggagccggcgtgamccgcagatacatcgcgytcggcgccgtcgggctgctggcctkgtacctggtgttcggttatggagcctctctcctctgcaacttgataggattcggctacccagcctacgtctcaattaaagccatagagagtcccmacmaagaagatgatacccmgtggctgacctactgggtcgtgtatggggtgttcagcmttgctgaatttttctctgacctcttcctctcatgggtccccttytactacatgctgaagtgcggcttcctgctgtggtgcatggccccgagcccctctaacggggccgagctgctctacaggcgcgtcatccagcctgtctttctgaagcatgagtcccaggtggataccatggtgaatgacttcaaggacmaagccmaagagactgtggataccatcacgaaagaagccaagaaagcagcagtgaccttgctcggtgacgaaaagaagmgcacctaagccaccaaccggtgagaccttcctcgctgccctccgcgtagtgcccgtgttgcattagggaccgcgccataatcatcttaataatgttgccttggaaacatttttgatatattaaaaaagaatgtgttaaggtthmaamaaaaaaaaaaaaaaaaaaaaaaaaaaaaaaaaaaaaaaaaaaaaaaaaaa

SEQ ID NO: 718 - DNA, 841 bp, Canis familiaris
ccgggagaaggactggatggaggggccgggctgggtgggggggcccgggagaggggacagggagggatgtggtgcggggttcagaaatgtctgcacagttggtgaagtcctaaaaggcttgttccttggacggtcccacatccggatgcccagatccgggctgaggatgggggaatgtgcccacggatgggcccacccagagcacaagggcaggtgggtgtcytggggctcccctggactcctgtgagtgccttgagcccaccagtgggagcctggaatgagggcaggggatgagtctgtcaagcacacattgttctccgagtggaacccaaagaggggaggagccggggccgggtcctggccccccgggagcacaaggacagggtcctgacggccctggccacagggtacaggatggggggagcgctgagcagagacgaggggtggggctcgtkgccttctccgagcttgggagctgtttkggaagataatgtggggggaagggagagccaccctggtacttgtacaccctksctccccctcgttctgaaattccgtccccctcggctttgggggaatgcagcctttttttccttttccttctcacttttgcatgtttttactgatcattcgatatgctaaccgttctcagccctgagcctagaagaggaggtttcgacacctcctgtcagacttaggtgctctctggagatgaaactcttaaatgctttgttattttctcaattagatcccttttcagaagtgtcggtagaaccaataaaaatctttgacttctgaaaaaaaaaaaaaaaaaaaaaaaaaaaaaaaaaaaaaaaaaaaa

SEQ ID NO: 719 - DNA, 877 bp, Canis familiaris
gggagccaacaagtgaggaggcgccgcgttccgggcgcagcgggcggcgcagcgggcgcgggagaggccggcgagccccgacccggcccggcccgacccgacccgacctcgacctcgacccggacccgacccggcccggcccggcccggcggctgagcgctggttggcggcggcccgcgtggcgctcgctgcaggcgcgtccggagcggccggtcccgggracatgcggcgcgcctgggtcctgctcgccctgggcctggcggcctgcgcggcggcggcgagggcggagctgacctccgacaaggacatgtacctggacaacagctccgttgaggaagcctcgggagtgtatcccatcgacgacgaygactacgcctccgcttcaggctcgggagctgacgaggatggagagagccccgagccgacggcgtcccrgccgctccccaacgcagggcccacgagtgccgtccccgccgcggaggccacgacgctgaagacccgcgggaaggagcctgcccagacrgagtcccctgaagaaatcggtgaggacaaagtccgcctctctgactcccgamaggammggtggacccgtccgacgaggacgcaaacgtgtacacggagaagcactcggacaacctgtttaagcgaacggaagtcctggcggctgtcatcgctggcggcgtgatcggctttctctttgcgattttccttatcctgctgttggtgtatcgcatgaggaagaaggacgaggggagctatgaccttggagaacgcaaaccttccagtgctgcttatcagaaggcccccactaaggagttttacgcgtgaaactcccacctagtgtctctatttatgagatcactgaacttttaaaaat

SEQ ID NO: 720 - DNA, 675 bp, Canis familiaris
tggaagatgtcgacsstyccaaagcatcgaagccgtccacaaggggaatccacgccctctctgkggacaccatggcaggccgctgcgcagagggccacctgggggagctgtggaagtagcgggaggcggacgtccaggcgacgtgctcgcggcaacacgcgccgagaccaccaggcggcaggtcagggagccgggagccagcgggtgcgctggggacgccgtgcaggcagcgcttcgcagcggtgtccccccgtcctgtctcagcctggagacccmatgaatcacggccttcggggagtttaatgaccacctccaggcagcttcacggagatggcgatcggtcatcattttcctgaatttcttacaggggcgaataaaaattaatttaaaaaggtgctcgaggggatcmctgggtggcccagcggtttagcgcctgcctttgtttttttcttttttttttttttctttttttttagtgcctgcctttggcccagggcgtgatcctggagtcccgggagtcgaatcccacatcgggctcctggcttggagcctgcttctccctcctcctgtgtctctgcctctctctctctctctctctctgataaataaataaaccttaaaagaaataaaaaaaaaaaaaaaaaaaaaaaaaaaaaaaaaaaaaaaaaaaaaaaa

SEQ ID NO: 721 - DNA, 720 bp, Canis familiaris
cttccctactactggaatgtgacccgacctttatcctggttctccccgcatgaccccactccgtcgttaccmaatctgccagacaactcaggagccataatgcagatgctgaggagaagctggagcgtggccacgagaaatcagaccggaaccatgagaagccagaccggagccacgagaagtcagaccggagccatgagaagtcggaccggagccatgagaagtctgacagagatcgagaacgtggttatgacmaagtggacagagagagagaccgggaccgggaccgggaccgggaccgcgggtatgacaagtcagacagggaagagagcaaggagcggcgccatcatcgcagagaggagctggctccctaccccaagagcaagaaggcggcaagccggaaggatgaagagttagaccccatggaccccagctcctactcggacgcgcctcggggcacgtggtcaacaggactccccaagcggaatgaagccmagacgggcgcagacaccacagcagcggggccgctcttccagcagcgtccctacccgtctccgggagctgtgctccgggccaatgctgaggcctcccgaaccaagcaacaggactgagcctccccatcaccccactgccatccccagggtttttaataaaagcttttcaatggawmrwraaaaaaaaaaaaaaaaaaaaaaaaaaaaaaaaaaaaaaaaaaaaaaa

SEQ ID NO: 722 - DNA, 690 bp, Canis familiaris
  misc_feature (63)..(63): n comprises a, c, g, or t, or includes no nucleotide
tggcaagatttaccggacaacggatgtttcagctgggaatctggatgccaaacgagattgggnccatgccaaggactatgtagaggctatgtggctgatgttgcagaacgatgagccagaggattttgtcattgctactggggaagtccatagtgttcgagaatttgtagagaaatcatttttgcacattggaaaaacyattgtgtgggaagggaagaatgaaaatgaggtgggcagatgtaaggagaccggcmaaattcacgtgactgtggatctcaagtactatcgaccaactgaagtggactttctgcagggcgactgctccaaagcgaaacagaagctgagctggaagccccgggtcgcctttgatgagctggtccgggagatggtggacgcggacgtggagctcatgagaaccaacccgaacgcctgaggcccgccgcgacccgaggccgcgacccgagcccggagcgcccttygcccttcgcagcaggcgggccggacccgcaggcctcggcgacgcctcccccgccgcgggggatcagccaggtgtcagcaccgcactcccctgtacttcagattatgtcctttgaccacggaaatcggggcctttcaaattgtttttctcttttcttattaaaaatggtctttctaygaamwrrmmaaaaaaaaaaaaaaaaaaaaaaaaaa

SEQ ID NO: 723 - DNA, 722 bp, Canis familiaris
acaaacagccggctccctktacccytccaaccccgtwargaaccatccagagaccgggaggccraggtcggcccgcgagcytggtggttgtgctcycgttggccgtggkragsctgktyccggtccggtcgtcgtggtccggtgggagggggsggggttgtcgaacttgatccggtccgggctggatggamsggggtytggtgtagtccggtggacaggaccatgttggtgggtccgtgcgtgtgtgtgggtctgggtgtggagctctggctgtgatggtgggtgtggtgtgtgagatgtgggacgtccctggcgtctgtctccgcgccccggtgtcgtgacggggtagggaccgracggggccccgacacccgacgtcgggggracggtccagactggtccaccacctgacgacctccacagcatcgagggtcgatcgagtggcgagtggraaccccacgattccggggccaaacccgggacggtgggagtccacggggacggrcgtttgatgctgggggtgtggggagcacatccgtacgtgtggggtgggttgcggttgtccggggtcctatcctccccctttgtaagcatgagagggacgttcaccaccccgtcgttgtcacctgccttcttctgtttgaattaaacaaagrgtctcgrwwwmaaaaaaarraaaaaaraaaaaaaaaaaaaaaaaaaaaaaaaaaaaaaaaaaaaaa

SEQ ID NO: 724 - DNA, 722 bp, Canis familiaris
tgtttgtcggccgagggamatgggraggttggggcawtycttggtaggtctctggccctccggytccagccgggcgctcgraccaccaacacgagrgcaaccggcaccmytcsgacmarggccaggccagcagcaccaggccaccctcccccsccccaacagcttgaactaggccaggcccgacctacctksccccaraccacatcaggccacctgtcctggtacaaccacccaggcacgcacacacacccagacccacacctcgagaccgacactaccacccacaccacacactctacaccctgcagggaccgcagacagaggcgcggggccacagcactgccccatccctggcytgccccggggctgtgggctgcagcccccytgccaggtctgaccaggtggtggactgctggaggtgtcgtagctcccagctagctcaccgctcaccyttggggtgctaaggccccggtttgggccctgccaccctcaggtgcccctgccygcaaactacgacccccacacccctcgtgtaggcatgcacaccccacccaacgccaacaggccccaggataggagggggaaacattcgtactctccctgcaagtggtggggcagcaacagtggacggaagaagacaaacttaatttgtttcycagagcywwwktttttttyyttttttyttttttttttttttttttttttttttttttttttttttt

SEQ ID NO: 725 - DNA, 705 bp, Canis familiaris
tgctgcccaacggctgtcactgctacccaatgtgtcagcccatggaagccaagctaactcaccctcgactcctactcagctggtggatacccttcgccatgttatcakccagacaggaggatacagtgacggaytcgcagcccagtcagatgtacagtccgcagggcatcagtgctaatggaggttggcaggatgctactaccccttcatcagtgacctcccctactagaaggcyctggcagtgttcactctgatacctccaactgatctcccagcagtcgcatcccggctgaccctgtgccccagtcgggacagggccaggagggagggtttctctcccaacgctgaakcggtcagactggaggtcgaagcactcagcaaacacrataagagtctccttctcgttctcttctttgggatgctatttcagccaatctggacacttctttatactctcttcccttttttttctgggtagaagccacccttccctgcctccagctgtcagcctggtgtccgccatctttcctgccccctccctctgtcctagactccctgggtccctgcccgctattacatcacggaaggatattttcaacaattagaggaatttaaagaggaaagaaaatacaaagaaaataataaacgtgtttgtatgttttcaaaaaaaaaaaaaaaaaaaaaaaaaaaaaaaaaaaaaaaaaa

SEQ ID NO: 726 - DNA, 665 bp, Canis familiaris
actgacaccagacgtgcagtttgtgttgatgccgtcactgacgtcatcatcaagacaccctgaaggctgcggcctcttctgaggggcagtgggaccctggcaggatgggccaccgccgactctgctccccccagctcctgaggaagacgggggcaagaggaccacactccctgcctgcccccccttccccagctgctttcccccctctttactctctctgttcttggctcccctgtccccccgcctcagttccagagactcggggtggggaggaactgccacaggcctccctgtttgaagccaccccttgtcctaggtgccgggaatgaccgcggtacccccttcccgggcatctgttttggttttaaccattgtcttattctgtgacgggggaagggagcatatgctgagtctcccaaggcctgtgtctggaggggcactcacttctccagcctgggacccctggcttcgctcaacaccagcccctgacccagcccaagtccaaatgtttacagggagcctcctgcccgtcccacccctccagccgcttggaggccccaaaggaaaaagcacaagaagcgtgagacgccaccattcctggagactacagtccacctgctcattctcgtagctttttaaaaaaatgaaagtaaaggaaaaaaaaa

SEQ ID NO: 727 - DNA, 666 bp, Canis familiaris
cttgatcgaggcaggggtcttgccttccgtgggcggaggacccgatggggcytgtcgaggaaaggcgaaccccttcaactgtgawaagctgccctcgagcaatgccctttccttccgtgacgggaggagcaggtgaggacckcgggccctgctcggccccctcgggaggagctgtgaccgttccggtkctgtcgtctgcccacctgcccgcyccgyctgggagaccgcagcagagcyttgcccccaccttgggcatcacggaaccacccgctaggattgcccgcattcccgtggaaattgaatcttgctgtcgccaaagaaaagtctggctcggaggttctttggagcccaggatgccggcatgcgccaatgactctcacatttgtctcttccmaagcmaagccatatccgagggctgccacgtggtgccctgtgggtgttgtctaggtcatgtgattccgttktgcttcctcgtccctcstgaggcccccgtcacgctgtcttcctcaccctctggccccttcaaaactgttgtcatttgtactgaagtcaaatgtgtcccgttctccccagaccmcttcgctatggtatattgcaataaaaattacttcttatatttgcmaaaaaaaaaaaaaaaaaaaaaaaaaaaaaaaaaaaaaaaaaaaa

SEQ ID NO: 728 - DNA, 644 bp, Canis familiaris
tgtcgtggcttcgtgagcgagggcaggggsytgcctgccgtgggcggaggacccgaggggcctkcgaggaaaggcaaccccttcactgtgaaaagctgccctcgagcaatgccctttccttccgtgacgggaggagcaggtgaggaccgcgggccctgctcggccccctcgggaggagctgtgaccgttccggtgctgtcgtctgcccacctgcccgcmccgcctgggagaccgcagcagagccttgcccccaccttgggcatcacggaaccacccgctaggattgcccgcattcccgtggaaattgaatcttgctgtcgccaaagaaaagtctggctcggaggttctttggagcccaggatgccggcatgcgccaatgactctcacatttgtctcttccaaagcaaagccatatccgagggctgccacgtggtgccctgtgggtgttgtctaggtcatgtgattccgttttgcttcctcgtccctcctgaggcccccgtcacgctgtcttcctcaccctctggccccttcaaaactgttgtcatttgtactgaagtcaaatgtgtcccgttctccccagaccacttcgctatggtatattgcaataaaaattacttcttatatttgcaamaaaaaaaamaama

SEQ ID NO: 729 - DNA, 690 bp, Canis familiaris
gacctccttagctcctcttggtaaaccgctagtaatttattagaagcaaggagtctggcaccagtggcacaactgaggtggcacacagacctttctttkccacaccacttctttgcctatccaacttagtatagacctcagtgaattaagctgctgtcatctgtctttgggagtctcttcgcctatatatctgctcttggctgattttctctgacccattgcttgcttgcttgcttgcttgcttggttgtttccttgctttggaaggctatccaagatgtatacacactactttaggaagggaattgcttaaaaataacaagacactgcaaaagggattgggaagaattggaatcaggagtgaccaggctggatgactcaagtataaatgactgagaaattcttgatgaagtattagtctgactttgtcatcaagtgatgtaatataggaaatgcataaaagggaataactttctgacactgatctgttagagaggtacttcagagactcctggacttttgcatatttaaagttcctaagatatggctttttcctccttttggctgtatagcaaactgttttaatccacagttgtgccttattgttccatttaaattgtattctttgatccatcaataaatacttgtggttaaaataaaaaaaaaaaaaaaaaaaaaaaaaaaaaaaaaa

SEQ ID NO: 730 - DNA, 1665 bp, Canis familiaris
gagcaccctggctggccagccccaggtccctggtgtggtgagggacaccggcgtgccccacgagcccagcgggcactgagacagctatggggctgctgaccggggacacgctggggcccctggccgtagccgtggccatcttcctgctcctggtagacctgatgcaccggcgcaggcgctgggccacacgctacccgccaggccccacgccagtgcccatggtgggcaacctgctgcagatggacttccaggaaccaatctgctacttcagccagctgcaaggccgcttcggaaacgtgttcagcctggagctggcctggacgccggtggtcgtgctcaacggcctggaggcggtgcgcgaggccctggtgcaccgcagcgaggacactgccgaccgcccacctatgccgatctatgaccacctgggtttggggccagaatcccaagggttgttcctggcgcgctacgggcgcgcgtggcgcgagcagcggcgcttctcgctgtccaccctgcgcaacttcggcctgggcaggaagtccctggagcagtgggtgaccgaggaggcctcgtgcctctgcgcggccttcgccgagcaggcgggccgccccttcggccccggcgcgctgctgaacaaggcggtgagcaacgtgatctcgtcgctcacctacgggcgccgcttcgagtacgacgacccgcggctgctccagctgctggagctcacccagcaggcgctgaagcaggactccggcttcctgcgtgaggccctgaactccatccccgtgctcctgcacatcccgggactggccagcaaggtcttctccgcgcagaaggccatcataaccctgacaaatgaaatgatccaggagcacaggaagacccgggaccccacccagccaccccgacacctgatcgacgccttcgtggatgagatagaaaaagccaaagggaaccccaagaccagcttcaatgaggagaacctgtgcatggtgacctctgacctgttcatcgctgggatggtgtccacctcaatcacgctgacctgggccctcctgctcatgatcctgcacccggacgtgcagcgacgtgtccagcaggagatagatgaggtgatagggcgggagcagctaccagagatgggagaccagacccgtatgcccttcaccgtggccgtgatccatgaggtgcagcgttttggggacatcgtcccactcggtgtgccccacatgacgtcccgagacactgaagtgcagggcttcctcatccccaaggggacgacactcatcaccaacctgtcgtcagtgctaaaggacgagaaggtctggaagaagcccttccgcttctaccccgagcacttcctggacgcccagggccacttcgtcaagcatgaggccttcatgcccttctctgcaggccgccgcgtctgcctcggggagcccctggcccgcatggagctcttcctcttcttcacctgcctcctgcagcgcttcagcttttcagtgcctgcggggcagccccggcccagcgaccacggggtcttcaccttcctgaaggttccagcccccttccagctctgtgtggagcctcgctaggggcaggaaccaccaccccccgccgcccggctcctcagcaggggcccgaggtacaataaaccagtttggtggctcc

SEQ ID NO: 731 - DNA, 1072 bp, Canis familiaris
agcacaaagtagtcaggaggccaagacccaaagagatctggcaagtagaccacactctggtccttgacgcagcatggaggacattcccgacacctcgcgcccaccactgaagtatgtgaaggggatccctctaatcaagtactttgcagaggcactggagtcactgcaggacttccaagctcagcctgatgacctgcttatcagcacgtaccccaaatctggcaccacttgggtgagcgagatcctggacatgatctaccaagacggtgatgtagagaagtgtcgcagggcccccgtcttcatccgggtacccttccttgagttcaaggctccagggattcccacaggtttggaggttctaaaagatacaccagccccacgactcatcaagacacacctgcccctggccctgctcccccagaccttgttggatcagaagkycaaggtggtytacgtcgcccgcaacgcaaaagatgtagctgtctcctattaccacttctaccgcatggccaaggtgcaccctgaccctgacacctgggacagcttcctggagaagttcatggctggggaagtgtcctatgggtcctggtatcagcatgtgcaggaatggtgggagctgagtcacactcaccctgttctctacctcttctatgaggacatgaaagagaaccccaaaagggagattcagaagatcctgaagtttgtggggcgctccctgccagaggagactgtggatctcattgtccagcacacgtctttcaaggagatgaagaacaactccatggctaactacaccaccttatctcctgacatcatggaccacagcatttctgccttcatgaggaaaggcatctcgggggactggaagaccaccttcactgtggcccagaatgagcgctttgatgccgactatgccaagaagatggagggttgtggcctcagcttccgcacacagctgtgagcagtgcccccaggaggcacccaaaggccccgtgctctgacacagccagcccccagcttcaaaaataaaattccattggtattaaaaaaaaaaaaaaaaaaaaaaaaaaaa

SEQ ID NO: 732 - DNA, 2372 bp, Canis familiaris
agccctgaaggaagccgcaagaaccctgcccgcacctccgcgacctcaagatgtccactccactggaagacggagaatactggattgaccccaaccaaggatgcaacctgatgccatcaaggttttctgcaacatggagacaggtgagacskgcgtmtacccacctacctggctgatttggtggtacgtttggccatggcatgcaaacagaaaggagacagtgggagtccctcaagcwggtttagtgcagattggagcacctacaggtcactttctttattcttcatccttgtgacttcagtgaactcagtaggtgttatgcagttggtgaatcccatcttcccaggtactgtcatttgccatgaaaataaaatgacagtggaatttccaagggatcttggcaccaaaaaatggcatgcatctgtggtggatccatttagttttgaattgttgaactgtacttctatcctggacccagaaaagctcaccctgaaggccccatatgagacctgtagcaggagagtgcttggccagcatcagatggccatcagactcacggacaacaatgctgcttcaagacataaggctttcatgtatcagatcagctgtccagttatgcaaacagaagaaacccatgagcatgcaggatccacaatctgcacaaaagattccatgtcttttacctttaacattattcctggcatggctgatgaaaatassaatcccagtggtgggaaatggatgatggaggttgatgatgcaaaagctcaaaatctgactcttcgggaggccttgatgcaaggatataatttcctgtttgatagccacaggctcagtgtccaagtgtcattcaatgccactggagtcactcactacatgcaaggtaacagtcacctctacacagtgcctctgaagcttatacacacatctcctgggcagaagatcatcttaacaacacgagtactttgtatgtcagatcccgtgacctgtaacgccacacacatgaccctcaccataccagagtttcctgggaaactacagtctgtgagatttgaaaacacgaactttsstgtaagccagctgcacaaccatgggattgataaagaagaattaaacggcttgaggttacacttcagcaaatctcttctcaaaatgaactcctctgaaaaatgcctacyctatcagttctacttagcatctctcargctgacctttgcctttgaacgggacacggtttccacagtggtttatcctgagtgtgtttgtgagccaccagttactatagttacaggtgacctgtgtacccaggatgggtttatggatgtcaaggtctacagccaccaaacaaaaccagctctaaacttggataccctcrgagtgggagactcctcctgccaacctactttcaaggctccatcacaagggttracactgtttcacatccccctaaatggatgtggaacaagacttaagttcaaaggtgacacagtcatctatgaaaatgaaatacatgctctctggacagatctccctccaagcacaatttccagagatagtgaattcagaatgactgtgaagtgccattacagcagagatgacctgctgataaataccaatgtccaaagtcttcctcctcccgtggcctcagtgaggcctggtccacttgccttaatcctgcaaacctacccagataaatcctatttgcgaccctatggggataaggagtatcctgtggtgagatacctccgccaaccaatttacctggaagtgaaagtcctaaatagggctgaccccaacatcaagctggtcttagatgattgctgggcaacacccaccatggacccagcctcactcccccagtggaatattgtcatggatggctgtgaatacaatctggacaactacagaacgaccttccatccagttggctcctctgtgacctaccctactcactatcrgaggtttgatgtgaagacctttgcctttatakcagaggcccaagtgcttkctagcctggtctacttccactgcaccgcattaatctgcaatcgactgtctcctgactcccctctgtgttctgtgacttgccctgtatcatccaggcacaggcgagccacaggcagtactgmagaagagaagatgatagtaagtctcccgggacccatcctcctgttggcagacagctcttcactcagagatggtgtggactcaaaagggcacagggctgctggatatgttgcttttaaaactgtagtggctgtggctgccttagcaggccttgtggctgctctaggtctcatcatctacctgcgtaagaaaagaaccatggtgttaaatcactaaggattttcaaataaagtgtttgttaaagt

SEQ ID NO: 733 - DNA, 1320 bp, Canis familiaris
ggttaccagtgggagtgactggaggagctatggggctgagctatggaattttcatctgttttctgctcctgggaggcatggagctgtgctgcccccagaccatctggccaactgagacctactacccattgacatctaggcccccagtaatggtggactgtctggagtcccagctggtggtcactgtcagcaaagacctttttggtactgggaagctcatcaggccagcagacctcaccctgggtccagagaactgtgagcccctggtctccatggacacggatgatgtggtcaggtttgaggttgggctgcacgagtgtggcagcagggtgcaggtgactgacaatgctctggtgtacagcaccttcctgatccacagcccccgccctgcgggcaacctgtccatcctgagaactaatcgtgccgaggtycccatcgagtgccactaccccaggcacagcaatgtgagcagccaggccatcctgcccacttgggtssccttcaggaccacaatgctcttcgaggagaagctagttttctctctccgcctaatggaggaggactggggctccgagaagcaatcccccacattccagctgggagacatagcccacctccaggctgaagtccacactggcagccatatgccactgcgactttttgtggaccactgtgtggccacgctgacaccagatcggaatgccttccytcatcacaaaattgtggacttccatggctgtcttgtggatggtctctacaattcctcttcagccttcaaagcccccagacccaggccagagactcttcagttcacagtggatgttttccactttgctaaggactcaagaaacacgatctatatcacctgccatctgaaggtcactccggctgaccgagtcccagaccagctaaacaaagcttgttccttcatcaagtctaccaagaggtsstaccctgtagaaggctcggctgatatttgtcgctgttgtaacaaaggcagctgtggccttccaggccggtccaggaggctgtcccacctagagagagggtggcgcargtctgtttcccacactagaaatcgcaggcacgtgactgaagaagcagakatcaccgtggggcctctgatcttcctgggaaaggctagtgatcatggtatagaggggtcaacctctcctcacacctctgtgatgttgggcttaggcctggccacggtggtatccctgactctagctaccattgtcctggtccttgccaagaggcatcgtactgcttcccaccctgtgatatgccctgcatctgtctcccaataaaagaataagc

SEQ ID NO: 734 - DNA, 750 bp, Canis familiaris
aacacaccaggccccacttattatggacacccataagaggatcagtacgactataacccagacctagaaataacccttctccctgacgccattacttattacggaattacacctaactgcttagtcattaacttcattctacytycytatcatgcttaactattccttttgggtcgttccagtgcacactatcaatatactccattaacataaataaggcacttcattacatcaaggkcataatccactcactaaatcgccctcttctcttcacacatatttccacggttatgcttamccccatagtgctgggtctgattaatccggaaaccgcatattttcctttgctaccaatgctctcaaacatccccttggctccccacaaccccattaaccttatcatgatgactacgtttcataatgacataaataacttccctaggcacatgccgaacgtaattccgccttataatcagctggtctccaccattacctaaagtaaggtggggcatccaatgcacaatacttataatgcgcgtcctctgcaaaatactcaaaataataacattaccatcaatcgtaccatgttaaagcagaagccaattaacttgccatagaaaaatccaatcatgagtgacatatcaatctagtcttctccattwktyyytyytttcactcgcaatcctctatgacttcccttgccctagtccgcagtctggggcccaaactttttttttttttttttttttt

SEQ ID NO: 735 - DNA, 750 bp, Canis familiaris
ttgtgtggtccggggtgaataatacctgtgggtattctcctagtcatgctgatattgggtctggatctttattgggaagagggactgcggtaatgaataatgccttaatgtggattgacgaatcagtaattgaagtaagatgrargratagtacgaattgataaggaaaacccagcaaggtcacgtgtgatagttatatgaggtaattgtatttattccgtgaagtaatgtagttccmgtattaggtgagtgatttagcgggagaagagaagtgtgtataaaggtgccaatacgaatkggggtatcacgacccagactaattaggcctttggcgtataaaaggaaacgatggttacgagagtttgtaggggaaccgaggggtgttggggtaattggaatagtactactgatgcaaagtattactgtatttattgaagggatccgtgtacggcttgcattaaggcggaatattagtcgaccagaggtggtaatggatttcattccaccccgtaggttacgtgttatgaatattacgcgcaggagacgttttatgagttttattattgtaatggtagttagcatggtacaatttcgtcttcggttaattgaacggtatctttttaggttagtactcactgtatagttagatcagaagaggtaawmarrrarraaagtgagcgttaggagatactgaagggaacgggatcaggcgtcagaccccgggtttgaaaaaaaaaaaaaaaaaaaaaa

SEQ ID NO: 736 - DNA, 673 bp, Canis familiaris
cgtcacgcggccttcggcaaggacgtgcgcgtgtccaagcacctgcggccggcccccggcgcgctactgcgtggtcagcgagcgcggcgaggagcggctgcgctcctgccacctctgcaacgcgtcggacccccaagaaggcgcacccgcccgccttcctcaccgacctcaacaacccgcacaacctgacgtgctggcagtccgagaactacctgcagttsccgcacaacgtcacgctcacgctgtcgctcggcaagaagttcgaggtgacctacgtgagcctgcagttctgctcgccgcggcccgagtccatggccatctacaagtccatggactacgggcgcacgtgggtgcccttccagttctactccacgcagtgccgcaagatgtacaaccggccgcaccgcgcgcccatcaccaagcagaacgagcaggaggccgtgtgcaccgactcgcacaccgacatgcgcccgctctcgggcggcctcatcgccttcagcacgctggacgggcggccctcggcgcacgacttcgacaactcgccggtcctgcaggactgggtcacggccaccgacatccgcgtggccttcagccgcctgcacacgttcggcgacgagaacgaggacgactcggagctggcgcgcgactcgtacttctacgccgtgtccgacct

SEQ ID NO: 737 - DNA, 270 bp, Canis familiaris
cacatttcgtgargatgtwtaaggccgagtgccatttcaccaacgggacggagcgggtgcggtttctggcgagaagcatctataaccgggaggagttcgygcgcttcgacagcgacgtgggggagtaccgggcggtcacggagctcgggcggcgcgacgctgagtcctggaaccggcagaaggagctcttggagcggrsgcgggccgmggtggacacctactgcagacacaactacsgggtgrkygagagcttcacggtgcagcggcgag

SEQ ID NO: 738 - DNA, 705 bp, Canis familiaris
gctgcctgtcatggggcagccatctcccagggsccctcawtkgccattgtcctgcaacggcctcgttaggcttcctgctgctcctgctctgggtcattctctgctgggccttgccattcccgctctgcggacatcgactctctttcggaatccagtcccaactccagccctggcccctgtcctgagaaggcacccccgccccagaagcccagccatgaaggcagctacctgctgcagccctgaaggcccctcgcctcgcctggagtctggggcctaagtctgccccacccagagcctgggatcaggatcccagggtctagccagtctggggtccagaacccagagtccagcctgtctggagctggacctagcagcccagagtctagccagtctggctccactaggggctccagtggcccttagtagacaggcctggggtgggggttcatgagttggtgctagggccagggccatctcgactctgctccataccgagggccagggactgggtccacctctccctaggccaattgcctccaggcccttgaggttggggaagcaaactggaatccatggcaataatgggagggtgtccaggctgggcccctccttgggtcctcccactgtttgctggataataaatggaactatggctctaaaaaaaaaaaaaaaaaaaaaaaaaaaaaaaaaaaaaaaaaaaaaaag

SEQ ID NO: 739 - DNA, 1183 bp, Canis familiaris
attcgcggccgccggtgcccagtgttcatctgctccttggtcctctggctcctgagtacaggcaccctcaatgcaaaagtcatgcagactccaggacatctggtcaaagggaaaggacaaaaaagcaaaatggaatgtgtccctaaaagacaatgttatgttttctggtatcagcagatcccagcaaaagagttcaagttcttgatttctttccaggataacgctgtctttgataaaacagggatgcccacgcagagatttttagccttgtgtccaaaaaacctacccgtatgcctagagatcgagcgtacagagctgcaggattcagccgtgtatttttgtgccagcagtgatatactcctggggacgagacagtatttcggtgccggcaccaggctcacggtcctcgaggatctgcagaaggtcacccctcccacggtcacagtgtttgaaccatcagaagcagagatctcgcggacccagaaggccacactcgtgtgcctggcacggggcttctaccccgaccacgtggagctgagctggtgggtgaacgggaaggaggtcacgagtgggttcagcaccgacccgcagccygacaaggagaggcccagcgagaatgactccagctactgtctgagcagccggctgagggtctctgcctccttctggcacaacccgcgcaaccacttccgctgccaagtccagttctatgggctcggggacgacgatgagtggaartacgatagagtcaaacccatcacccagaacatcagtgctgaggcctggggcagagcagactgtggcttcacctcggtgtcctaccatcagggcgtcctgtctgccaccatccttctatgagatcctgctgggcaaggccacgctgtatgctgtgctggtcagcatcctggtgctgatggcyaaggtcaagagaaaaggttcctgagaccagctccaaaagtgcatcctgagatgatcatgagcctcaccctcaattctccttcgcacgcttccagtctgcgtttctaaaagagttattctctctctacctcttatcaccttcctgctgggatatctgtcccctctctctgcttccctgcagactgagctcctcaagcctgatcctgaaatagactaaaacaataaaagtgtcctgccaggcaaaaaaaaaaaaaaaaaaaaaaaa

SEQ ID NO: 740 - DNA, 718 bp, Canis familiaris
ggattctgattatttttaaacagaggggccaccacaagggttgtccttcttactctcttgcaggtcttaatgcagctttgtgsgaaaggtctctgggtaggcaagtggtatttggtctgctgcttgccmaccctkkttccccccagggatgctgtggtcataaagtcagaataacagcatattccmaatctcmaaagctattgtggcctgagcacagctgaaatctagcagagtctttcatatatagctttagagtaactcttctgcttctttgtcactcgtaattcacgttctgcctttgcttcagaacatgagcagaagagtcctcgtgacgctagttattattgcagtcatggttgaaagtcatttagggaaaggatttcmatataaagctgtggggctgcttctccccmattcctccctaacmattcattgtgtggacttctctcatctaaaaggttggtggctttttgcttgggatcagtgctctattcatgtgttgctggtctctgaacacattcctgttgcgttaagacttgaaagatttgtagatgtgtgatgttcaggcacaggatgctaagagctatgttactattcttagtttgtaaattgtccttttgataccmtcttgttttcttttgtaggtataaataaaacmctgttgaccaawaaaaaaaaaaaaaaaaaaaaaaaaaaaaaaaaaaaaaaaaaaaaaaaa

SEQ ID NO: 741 - DNA, 679 bp, Canis familiaris
gtcccgagagccccagcggggcatgcccagcccagcgcagagctgcctgccgagaagggcggggagtctcgggatggagaggccgaggctgcagctccacctgcacctgagcagcccgcccagtcagggcagggkcagccgttcgtgttgcctgtgggcgtgagctcgaggaacgaggactatccccgcacctgcaggatgtgtttttatggcacaggcctcattgctggccatggcttcaccagccctgagcgcacacctggggtcttcatcttgttcgacgaggaccgcttcgggttcatctggttggagctgaaatccttcagcctgtacagcagggtgcaggccaccttccagaacgcagaggcgccatccccacaggccttcgaggagatgctcaagaacatccagtccctgacttcctgacgggccagtgccctgtagggtggctcccagggccctggaccctgctcctgcgaaaggaagcagcatgccaactttggagatttggccttctgaccagaataccgaccttgtaagagtcttggcctagccaccccaagattcttgtatagagtgtacatttgccccggtcctcgtcaggagctcataggaaggctgactgagcatgtcttataaaaaaaagaaaaaaraaaaaaraaaaagaaaaaaaaaaaaa

SEQ ID NO: 742 - DNA, 941 bp, Canis familiaris
acctcttctgtcaagctcatgacttatgacagctgccacctttgctcggcgcctattggactggggcccaagccagagtggctctacagacccgcaaattctgtctgcctgtgagaagaaccccacggatgcctaccagctcaattatgacatgcacacccttttgacatctgtgctgcatcctgaccggcccatctaccgtggaaagccagtagagaaatgtccgctcagcggggcctgctattcccctgagttcaagggtcaaatctgcaaggtcactacagtgacagagattggcagagacgtcaytggtttaaggatcagccctttgcagttccgttgaggccccctttggtgtgtgcaggtcaatcaccatattttcctccggagaagcagcatctctgtccttctagcgccttcttcctcaattacccttcaaattattgacatttagatcacctgctctaagtcctagtatccctttctcgtcttctatgactaatcmaaatgtctacactatttgtcattgtctcaaggtgactacagttatgatcacagttggtcttgccttcccggcttagatctttcaaggaataaatgaagactcagtgatgcgcatttgcttactaaattccttcagcatttattctttccctccccatcacctttgtatcttcttttgaaaagaagccagggtgtcataaataaataatatcccatcttttgctcagccacagcaaactcttgccatcccccgtttatcttggaccttccaggcaggtaccctctgtgtgcccagaaactttaaaatgtgagaagaaacttgttttccmaaaatgcatatcaccttttattgatttgttctctatacccmttgttcttgtgttttgtttctcatccttaataaatttcttatgagaaaaaaaaaaaaaaaaaaaaaa

SEQ ID NO: 743 - DNA, 944 bp, Canis familiaris
  misc_feature (422)..(422): n comprises a, c, g, or t, or includes no nucleotide
  misc_feature (627)..(627): n comprises a, c, g, or t, or includes no nucleotide
  misc_feature (693)..(693): n comprises a, c, g, or t, or includes no nucleotide
  misc_feature (877)..(877): n comprises a, c, g, or t, or includes no nucleotide
ccgggctgcaggaattcggcacgaggcwcgrkggtcccaagaagcatctgaagcgtgtagcagctccaaagcactggatgctggataaactgaccggcgtgtttgcccctcgcccatctactggcccccataagctgagagaatgtcttcctctcatcattttcctaaggaacagacttaagtatgccctaacaggggatgaagtgaagaagatctgtatgcrgcgttttattaagaykgrwgscmasktycgvmbtratatsacbhwvccysckkstbywwtkgahktcatcrgcmbkgrmhmgactkggrrgrrwkycsgtskawtbwawgammscmvrgktcgcttkbcygttcatcggmktayacctgakgagbssmagtatwrkttgtssmaagtgagawagatctttgtggkracnharggratccstcrcmtggtgactcatgatgctcgcamcrtccgctatcckgrtcccctcwtcaakgtgaatgataccmttcagattgatttggagactggraagattacggatttcatcmagtttgatactggtaatctgtgtakggtgactggaggtsccmmcctgggaagamttggtgtgatcaccmaccgagagagacmsnctggttctytkgawgtagttcacgtgaaagatsccmmtgscmacagctttgccacccgactbkccnacatykttgttattggchraggcmacmarccmtggatttctcttccccstggaaagggtatccgcctcaccmktgctgaggawagagacmagagactgscagccmaacmgagcmgtgggtaaaatggtscctgggtgacgtgayyggaagtctttatacttaattaaagattytacmgcmmrmnaawahahaawamamaradraaamaaaaarrdvdhwradvdmaamaaaaaaaaaaraaaaaaaaaaaa

SEQ ID NO: 744 - DNA, 685 bp, Canis familiaris
tcgcccatctactggccccccataagctgagagaatgtcttcctctcatcattttcctaaggaacagacttaagtatgccctaacaggggatgaagtgaagaagatctgtatgcagcgttttattaagattgatggcaaggtccgaactgatatcacctaccctgctggttttatggatgtcatcagcattgacaagactggggagaatttccgtctaatctatgacaccaagggtcgctttgctgttcatcggattacacctgaggaggccaaggtgaatgataccattcagattgatttggagactggaaagattacggatttcatcaagtttgatactggtaatctgtgtatggtgactggaggtgccaacctgggaagaattggtgtgatcaccaaccgagagagacaccctggttcttttgatgtagttcacgtgaaagatgccaatggcaacagctttgccacccgactctccaacatttttgttattggcaaaggcaacaaaccatggatttctcttccccgtggaaagggtatccgcctcaccattgctgaggaaagagacaagagactggcagccaaacagagcagtgggtaaaatggtccctgggtgacgtgattggaagtctttatacttaattaaagattctacagcacgctaaaaaaaaaaaaaaaaaaaaa

SEQ ID NO: 745 - DNA, 595 bp, Canis familiaris
caagacttggggagaatttccgtctaatctatgacaccaaggttcgctttgctgtttcatccggattagcaccctgagggaagggcccaaggtataaagttgtkgcaaagtgagaaagatctttgtgggaaccataagggaatccctcacctggtgactcatgatgctcgcaccagtccgctatgcctgatcccctcatcaaggtgaatggataccattcagattgattttggagactggaaagattacggatttcatcaagtttgatactggtaatctgtgtatggtgactggaggtgccaacctgggaagaattggtgtgatcaccacaccgagagagacaccctggttctttkgatgtagttcacgtgaaagatgccaatggcaacagctttgccacccgactctccaacatttttgttattgscaaagscaacmaaccatggatttctcttccccgtggaaagggtatccgcctcaccattgctgaggaaagagacaagagactggcagccaaacagagcagtgggtaaaatggtccctgggtgacgtgattggaagtctttatacttaattaaagattctacagcacgca

SEQ ID NO: 746 - DNA, 678 bp, Canis familiaris
ttgaaccgaagccagcccaggccaaggtagtttttactggaaccaggaggtggggacgaacacaaaatgagggacgggttgtactctaagccatcctgctcctgtgccaagtccaaatcctgagtactgtgagccaggcggttcgcttcccctgaagataggcacccccctacctcccccacccgccactttcccacttgggcatcccaggggcaagcctcattggaggcatcttgggggagcccagaggacactcgcatatccaggtgtctacttgagcatctttaaaatattttgtatctaaaacaaatgcccttccccgtcttagtggcaccagcggcccagctccatccactctgaatggaaagtagagactgccagtactttccttggtcttccctttgtcctttgatgtcattgtcctctgccccccctccccccaccgcctccccctccatttcactgtcgtggatggatagcagaggacaccatgcgggcttgaggccgtcctatgtgagtccatgatcacttctgttggggttttgttgtttttgtaactgtcctaaaccagcaggtgtttggaaattagggggaaaattaaattctcaccaatggttgctgttacagtcaaatcaataaagatcttgagtatcaaaaaaaaaaaaaaaaaaaaaaaaa

SEQ ID NO: 747 - DNA, 692 bp, Canis familiaris
tcccagtttccctttcacaggcaatagacaggagccaagactggagaatggagaccactctggaattgtggsytagaaagggactgtcttgtccctcatccttcttcagctagcctgcctgggatgtctggacagatggcctgtgtgggaggtgaagaccatgtctgtgcctgagtgakcggctgcttggagttcactgtgatgccacaagtgtatcccaagggtgactctcacactattccagactcttctattaggcacagataagatctgcagtataatacctgagccaaaagccaaggagctaaattaagtcttatgtctttctgtaaaatcccaatttgcctttggcagatctccagggtatggccagctctctctgaccatgggtatctaagcaggcagaccaagagactgggcaccaaacacgcatgccaaagtgaccagtcatctcatgaggacccagacatgaccctgtggactgttccacctgattcagaacccactttttattagctccccatacctctggcctttctctttcccctgccatcctgacactgatagtttgtcacataaattcccctggttgtgttttttttttttctagaaaaaaaattaaaaagccaaaacaaattacaaawaakaaaaaaaaaaaaaaaaaaaaaaaaaaaaaaaaaaaaaaaaaaaag

SEQ ID NO: 748 - DNA, 680 bp, Canis familiaris
ggacgtggtgttcaagggactccgtgaaaggtcaatgacggtgaactacaaaaacgcacgggggagctgggcgagggcgccagggaaatttgtgtttttcaacgatacctcagatccagtaccaaatcccttgggtacagatcatgatgtttaagaacatgacgccgtccccctttctgcggttctatctggattctggggagcaggtccttgtggatktggagaccmagagcaacaaggagattgtggagcacatcamaaaaatcttggggaagaacacaggaaaccctggaagaggaggagcaggagaaaaagcagctttctcacccagcccacttcgggccccgaaagtactgcctgcgggagtgtatctgcgaggtggaggggcaggtcccctgcccgggcctgttgccattacccaaggagctgaccgggaagtacaaagcaatgctgacggccagcacccaggactgaggcccaggccacaccctgggagggtgtccctggagggactctgaaaaatctgtgccataagaccgtccccttcacacacctgtgtgcagtgacacaggagggtcggggaggatctgcagtggagctgctagacgtgggctctgctctgtcaggcaataaaatgcttcctggtctcccaaaaaaaaaaaaaaaaaaaaaaaaaaaaa

SEQ ID NO: 749 - DNA, 2449 bp, Canis familiaris
gcccggagcgcgcggccgggagcgcacacgcgggacggacgggcgggcggagcggagccgccggagatgccctgtatccaagcccaatatgggacaccagcaccaagcccaggaccccgagaccacctggcaagcgaccccctgacccccgagctcagcaagcccaccatggacctggccagccctgaggcagcccccaccgcccccacggccctgcccagcttcagcactttcatggacggctacacgggggagtttgacaccttcctgtaccagctgccgggaacggcccagccatgctcttcggcctcctcttcggcctcctccacgtcctcctcctcggccacctcccccgcctctgcttccttcaagtttgaggacttccaggtgtacggctgctaccctggccccctgagcggtcccctggacgagaccctgtcctccagcggttccgactactacggcagcccctgctcagcgccgtccccgtccacgcccagcttccagccaccccagctctctccctgggatggctcgttcggccccttctcacccagccagacgtacgaaggcctgcgggcatggacagagcaactgcccaaggcttctgggcacccccagccgcctgcctttttttccttcagcccccctactggtcccagtcccagccttgcccagagccccttgaagctgttcccctcacaggccacctgccagctgggggagagagaaagttattccatatccacggctttcccgggcctggcgcccacttctccacacctcgacggcccagggatgctggacgcaccggtgccttcggccaaggcccggagcggggcccccagtggaagcgagggccgctgtgccgtgtgtggggacaacgcttcgtgccagcattacggcgtccgcacctgcgagggctgtaagggcttcttcaagcgcacagtacagaaaaacgccaagtacatctgcctggctaacaaggactgccctgtggacaagaggcggcgaaaccgctgccagttctgtcgcttccagaagtgcctggccgtaggcatggtgaaggaagttgtccggacagacagcctgaaggggcggcggggtcggctcccttcgaagcccaagcagcccccggacgcctcccctgccaacctcctcacgtccctggtcagggcacacctggactccgggcccagcacagccaaactggactactccaagttccaggagctggtactgccccacttcgggaaggaagatgccggggacgtgcagcagttctacgacctgctttcgggttccctggaggtcatccgcaagtgggccgagaagatccccggctttgccgagctgtccccgggtgaccaggacctgctgctggagtcggccttcctggagctcttcatcctccgcctggcctaccgctcgaagccggccgaggggaagctcatcttctgctcgggcctggtgctccaccggctgcagtgcgcccgcggctttggcgactggatcgacagcattctggccttctctcggtccctgcacggcctggtggtggacgtccctgccttcgcctgcctctcggcgctcgtcctcatcacagaccggcacgggctgcaagagccaaggcgggtggaggagctgcaaaatcgcatcgccagctgcctgaaggagcacgtctcggccgtggcgggcgaaccgcagccggccagctgcctgtcacgcctgctgggcaagctccccgagctgcggaccctgtgcacccagggcttgcaacgcatcttctacctcaagctggaggacttggtgccccctccgcccattgtcgacaagatctttatggacacactgcccttctgaccccagcccaggaacacgcgtgcgcsgtgaatgcacgctcctacaccaccccacgtgcctttagcccatggcccacggaccctcagagcacccccagcctgggcttgagccgcagaccagccggcctccgcccttgtactgggtggttgkcagggagctcacgccctgggggagggggatgcattcatgggggtgacccctactacttgtcttagcccccagcccagccctggccttcatgtttttgtaagataaaccgtttttaacacacaccgccgtgctgtaaataagccagatgctgctgtaaatataggaaggaagaggccgagatgggagtgggggctcggagggaggggcggcccccaccagcccgggcaagcctctcccgcctccttgcacctgctctctcttcccaccctctttccacatgtacataaccttactctacaaagaagacaaatgacagattctgacatttatatttgtgtattttcctggatttatagtatgtgacttttctgattaatatatttaatatattgaataaaaaataggcctgtagctgaaaaaaaaaaaaaaaaaaaaa

SEQ ID NO: 750 - DNA, 697 bp, Canis familiaris
cagccggtgcccgtgtgcgggaactgccgtggcccagccctggatgccacccaagttgtatatttttttaatctctgtgactgaatggactttgcacacattggcctagggtgccatgcctctgtcctggcttcagtatttggggggagacacactcgggggatgagccatgtgaatcctcctgagtccccatgagtgagacaacagagccacccgagccttcaycctggcactggcgaataaggcctctaagggcacacgggctcaacctagctcccgcccactgcctcgggagggggttttcactttgttgtgtttgaagtttatcctcgttgattttttttcttttgctttgtgggtttggctggtgttttcttgcatggtttggagccgatcacttttcgtcccactccctagggaccagcaggtggagatccctgtgtctctgctcagtctggggtctagggggatgggcccaaggtctctgctcagagaggtgctaggggagctgtctagctcactctccttggggaccggctcwacgggggctgtggatttgcttttggtgttgtttaaaaaaaaaaaaaaaagaaagaawatatatattttttgaagaaaggactgcgccagggttttatccctgataggtcggggcagttacctgattgctgttttaagtttaaaaaaaaaatgaaaa

SEQ ID NO: 751 - DNA, 694 bp, Canis familiaris
ggttccaggagggatgggcctttcttgaatggccttaccagcgccctggacagrggagggatcytggcccagcgggagtttgataggagattctccccgcattttctggactgggcagccttcggagtcatgaccctgccctccatcggcatccccctgctgctgtggtactccagcaagaggaaatatgacactcccaagtccmagaagaactgaggggcttccgaggccgctgcctaggagatccaggtgctttccagactccggagggcctctggagtgcggtctctcatccccagcccctgccaccttctccaggatcctgcctgctctcaaccagagtcggggaccaggcctcggtgtctgtgaaagcctcctccttctgtcccmragccatatgagcmagaacgagcaggaatgcctccagcaacaagcctygggacctcatctgtgtgccttgtggtgctgcagtgtgaactgaggggcccaggagggggcactaaggaaactgcctgactctacccccatcccctgctctcccctctcggaagagggtggaagatcagatgaaggccmagtgactcggaggctacccmatctctgttctgggtcaggggagctctraccmaatggagttttctaataaaaacatgccacmcyraaaaaaaaaaaaaaaaaaaaaaaaaaaaaaaaa

SEQ ID NO: 752 - DNA, 1147 bp, Canis familiaris
tcgaattcccacaaatcttctcactattttgctacatagatgagttgatccttttagattgtttatgggtagctcttccggycycggtggtcccctgaaagactgtggggtgcgcgcgatgaggcttctggcttctgtgctgttggccctgtttgctgtcagtcatgcggaggaaggagcccggcttctggcctccaagtcactgctgaacagatacgccgtggaggggcgagacctgaccttgcagtacaacatctacaatgttggctcaagtgctgcattagacgtggagttatctgatgattcctttcccccagaggactttggcattgtgtctggaatgctcaatgtcaaatgggaccggattgcccctgctagcaatgtctcccacaccgtggtcctgcgcccgctcaaggctggctatttcaactttacttcggctactgttacttacctggctcaggaggatgggcctgtcgtgattggctttaccagcgcccctggacagggagggatcctggcccagcgggagtttgataggagattctccccgcattttctggactgggcagccttcggagtcatgaccctgccctccatcggcatccccctgctgctgtggtactccagcaagaggaaatatgacactcccaagtccaagaagaactgaggggcttccgaggccgctgcctaggagatccaggtgctttccagactccggagggcctctggagtgcggtctctcatccccagcccctgccaccttctccaggatcctgcctgctctcaaccagagtcggggaccaggcctcggtgtctgtgaaagcctcctccttctgtcccaaagccatatgagcaagaacgagcaggaatgcctccagcaacaakcctygggacctcatctgtgtgccttgtggtgctgcagtgtgaactgaggggcccaggagggggcactaaggaaactgcctgactctacccccatcccctgctctcscctctcggaagagggtggaagatcagatgaaggccaagtgactcggaggctacccaatctctgttstgggtcaggggagctctraccaaatggagttttctaataaaaacatgccamackgaattcctgcagcccgggggatccacgagtcta

SEQ ID NO: 753 - DNA, 678 bp, Canis familiaris
  misc_feature (97)..(97): n comprises a, c, g, or t, or includes no nucleotide
ctccgtgattggctttaccagcgcgcctggaacagggagggatacctggcccagcgggagtttgataggagattctccccgcattttctgggactgngcagccttcggagtcatgaccctgccctccatcggcatcccctgctgctgtggtactccagcaagaggaaatatgacactcccaagtccaagaagwactgaggggcttccgaggccgctgcctaggagatccaggtgctttcccaggactccggagggcctctggagtgcggtctctcatccccagcccctgccaccttctccaggatcctgcctgctctcaaccagagtcggggaccaggcctcggtgtctgtgaaagcctcctccttctgtcccmaagccatatgagcaagaacgagcaggaatgcctccagcaacaagccttgggacctcatctgtgtgccttgtggtgctgcagtgtgaactgaggggcccaggagggggcactaaggaaactgcctgactctacccccatcccctgctctcccctctcggaagagggtggaagatcagatgaaggccaagtgactcggaggctacccmatctctgttctgggtcaggggagctctgaccmaatggagttttctaataaaaacatgccacactgaaaaaaaaaaaaaaaaaaaaaaaaaaaaaaaaa

SEQ ID NO: 754 - DNA, 642 bp, Canis familiaris
acaagacacactcccttcccatgaagatcttgggcttgtagagacctcagaacagctggactgggcagcctctcggagtcatgaccctgccctccatcggcatccccctgctkctgtggtactccaagcaagaggaaatatgacactcgccaagtccmagaagaactgaggggcttccgaggccgctgcctcaacgcgagatccaggtgctttccagactccggagggcctctggagtgcggtctctcatccccagcccctgccaccttctccaggatcctgcctgctctcaaccagagtcggggaccaggcctcggtgtctgtgaaagcctcctccttctgtccccaagccatatgagcaagaacgagcaggaatgcctccagcaacaagccttgggacctcatctgtgtgccttgtggtgctgcagtgtgaactgaggggcccaggagggggcactaaggaaactgcctgactctacccccatcccctgctctcccctctcggaagagcggtggaagatcagatgaaggccaagtgactcggaggctacccmatctctgttctgggtcaggggagctctgaccmaatggagtttwctaataaaracatgccacactgaaaaaaaaaaaaaaaaaaaaaaa

SEQ ID NO: 755 - DNA, 681 bp, Canis familiaris
ccacgagatcggactcgggccacgtcctctctgctaacagtaatccmrgggtgccacygggttgcacaactgcgcggtgcaaggaccaagtcaaagtcatgccgcactagcccgtggccaagaaagctcacctgtccaccctgaactttaagggtccggaacatggcgaacggcgggcccacgtcgtcagcgtccagcaaaaccagggcgccgcggtcttgcaacctaatcgggtagtcgcsgcagttctagcgatgcccctcgtccatcacccgaaaatcaacttccattagattgtcccggtcaacatgcaccatttgttacacacagcggtcgacagggacctgtttaacgtcccgttccggaactggatggaggatcgggctctcgtcatggcggacgcggatatgaccctggcaaacgacctactcaagatgggctggttgattctggcggtccagtgggacaacgagatgcagttgtgggtggcttgtggctatccccctccggcgggaccggcgctcaacaccaacaatcggaacaacccggacyctccccgtccacggcctcatcagcaacaccaccagtcaagggagggttggatgggtttgaccgggctccattatgtacttttgtaccggaataataaaagactcttttccaaaaaaaaaaaaaaaaaaa

SEQ ID NO: 756 - DNA, 681 bp, Canis familiaris
ggtgctctagcctgagcccggtgcaggagagacgattgtcattaggkycccacggtgrcccaacgtgttgacgcgccacgttcctggttcagtttcagtacggcgtgatcgggcaccggttctttcgagtggacaggtgggacttgaaattcccaggccttgtaccgcttgccgcccgggtgcagcagtcgcaggtcgttttggtcccgcggcgccagaacgttggattagcccatcagcgscgtcaagatcgctacggggagcaggtagtgggcttttagttgaaggtaatctaacagggccagttgtacgtggtaaacaatgtgtgtcgccagctgtccctggacaaattgcagggcaaggccttgacctacctcctagcccgagagcagtaccgcctgcgcctatactgggaccgtttgctggatgagttctacccgaccaactaagaccgccaggtcaccctgttgctctacgtcaacacccaccgaacaccgatagggggaggccgccctggccgcgagttgtggttgttagccttgttgggcctgrgaggggcaggtgccggagtagtcgttgtggtggtcagttccctcccaacctacccaaactggcccgaggtaatacatgaaaacatggccttattattttctgagaaaaggttttttttttttttttttt

SEQ ID NO: 757 - DNA, 699 bp, Canis familiaris
tgcactgaagaaggagtagagagagagagagagactggagacgcacagatcccccccagatctcccaagctatcgtcccgcagattatagaacagaaccccawaaatcgaaacagaggaaacggacagcggttgaacatggacgaaggaattcctcatttgcaagagagacagttactggaacatagagattttataggactggactattcctctttgtatatgtgtaagcccaaaaggagcatgaagcgagacgatagcaaggatacctacaaattaccgcacagattaatagaaaagaaaagaagagatcgaattaatgaatgcattgctcagctgaaagatttactgcctgaacatctgaagttgacaactctggggcatctggagaaagcggtagtcttggaattaactttgaaacacttaaaagctttaacagccttaaccgagcagcagcatcagaagataattgctttacagaatggggagcgatctctgaaatcgcccattcagtccgacttggatgcgttccactcgggatttcaaacatgcgccaaagaagtcttgcaatacctctcccggtttgagagctggacgcccagggagcagcggtgtgtccagctgatcaaccacttgcacgccgtggccacccagttcttgcccgcccccttctgcctgcccttctacttcctctcgccct

SEQ ID NO: 758 - DNA, 800 bp, Canis familiaris
gcttgttagacttgggcaccattccccttgaagagttcagcggattgaaaatggagcccttccaagggaatkgaagaagctgctcctatgatccgcaattgctgawaccvawatractaccatccctcaaggtcttcctcsytccsktackkratkacatsttgaaggcracavawtcaccmrggttgatgcatctagcctgaaaggactgaataatttggctaarttgggactgagttttaacagcakctccgctgttgacaatggcactytagccmacactcctcatctgagggagcttcacttggacmacmataagctcatcagagtacccggtgggctggcggagcataagtacatccaggttgtctaccttcatracvmcmatatatctgcagtcggatctaatgacttctgcccacctggatacaacaccmaaaaggcttcttattcaggtgtgagccttttcagcaacccmgtgcagtactgggagatccagccatccaccttccggtgtgtctacgtgcgctctgccattcagcttggaaattataaataattcccmagaaagccctcgtttttataacctggcmaaatcccmttaatatcattgctcmaaaaaaaaaaaaaatgaaagctagatactggaaacttaactgcmatgtggatctttttcccacatgatttataatacataaagcygaatatgcagtttaaataattgcctacmataaaaaaatattttgcctgcmmaaaaaaaaaaaaaaaaaaaaaaaaaaaaaaaaaaaaaaaaaaaaggg

SEQ ID NO: 759 - DNA, 634 bp, Canis familiaris
gatttccccgaagcccctcgttttttataacctggccagaatccccttgagatcagtgctccaagataataaaaatgaaagctagatactggaaacttaactgccatgtggatctttttccccacatgatttataatacataaagccgaatatgcmgtttaaataattgcctacmatrwyaaatattttgcctgccmttttcagaattctktkttgaaggtttctgttgatgttaactgagctattgcagatatkttaatttccctraacgtaaaatttggagtaaatatatatatatattcttgacatatatgtgtgtgtgtgtgtgtatatatatatatatatatakacacatatatatgtcaacmattcagtaaagsttttgtttaattttcagaaggaatcaaataaaacmagtatccatcttctgtagttcgtagggtgttaggtcctttaacgtaaagtcaaacttcaaattccatctagctctgtgttaatccctgttattactggtaaagcttcatttgaatatgtaaattcagtttaggctatgtaaaatttttgctaatgtcatcattctgaaaaaaataaatttacmaatacattcaaaawwaaaaaaaaaaaaaaaaaaaaa

SEQ ID NO: 760 - DNA, 634 bp, Canis familiaris
aagcctcggttttttataacctggcaaatcccacttaataatcagtgctctcatattaattaatatgaaagctagatactggaacttaacctgcaatgtggatctgttttccccacatgatttataatacataaagccgaatatgcagtttaaataattgcctacmataaaaaaatattttgcctgccmttttcagaattcttttttgaaggtttctgttgatgttaactgagctattgcagatattttaatttccctrwacgtaaaatttggagtaaatatatatatatattcttgacatatatgtgtgtgtgtgtgtgtatatatatatatatatatatacmcatatatatgtccamcattcmgtaaagcttttgtttaattttcagaaggaatcmaataaamcaagtatccatcttctgtagttcgtagggtgttaggtcctttaacgtaaagtcmaacttcmaattccatctagctctgtgttaatccctgttattactggtaaagcttcatttgaatatgtaaattcagtttagkctatgtaaaatttttgctaatgtcatcmttctgaaaaaaataaatttaccaatacattcmaaawwaaaaaaaaaaaaaaaaaaaaaaaaaaaaa

SEQ ID NO: 761 - DNA, 1112 bp, Canis familiaris
tcgtctgtagagctgggcaccaatctcctgaagagttcaggggattgaaaatgggagcctttccagggaatgaagaagctctccgtatatccgcattgctgataccaatataactaccatccctcaaggtcttcctccttcccttactgaattacatcttgaaggcaacaaaatcaccaaggttgatgcatctagcctgaaaggactgaataatttggctaagttgggactgagttttaacagcatctccgctgttgacaatggcactctagccacactcctcatctgagggagcttcacttggacaacaataagctcatcagagtacccggtgggctggcggagcataagtacatccaggttgtctaccttcataacaacaatatatctgcagtcggatctaatgacttctgcccacctggatacaacaccaaaaaggcttcttattcaggtgtgagccttttcagcaacccagtgcagtactgggagatccagccatccaccttccggtgtgtctacgtgcgctctgccattcagcttggaaattataaataattcccaagaaagccctcgtttttataacctggcaaatcccattaatatcattgctcaaaaaaaaaaaaaaatgaaagctagatactggaaacttaactgcaatgtggatctttttcccacatgatttataatacataaagccgaatatgcagtttaaataattgcctacaataaaaaaatattttgcctgccattttcagaattcttttttgaaggtttctgttgatgttaactgagctattgcagatattttaatttccctaaacgtaaaatttggagtaaatatacatatatatgtcaacaattcagtaaagcttttgtttaattttcagaaggaatcaaataaaacaagtatccatcttctgtagttcgtagggtgttaggtcctttaacgtaaagtcaaacttcaaattccatctagctctgtgttaatccctgttattactggtaaagcttcatttgaatatgtaaattcagtttaggctatgtaaaatttttgctaatgtcatcattctgaaaaaaataaatttacaaatacattcaaaaaaaaaaaaaaa

SEQ ID NO: 762 - DNA, 687 bp, Canis familiaris
gttcaatgggactgtaccagatgatcgtcgtagagctgggcacccaatccctctgaagagttcaggggattgaaaatgggacctttccagggaatgaagaaagctctccctatatccgcaattgctgataccgatataactaccatccctcaaggtcttcctccgttcccgttactgaattacatcttgaaggcaacaaatcaccaaggttgatgcatctagcctgaaaggactgaataatttggctaagttgggactgagttttaacagcatctccgctgcttgacaatggcactctagcctacactcctcatctgagggagcttcacttggacaacaataagctcatcagagtacccggtgggctggcggagcataagtacatccaggttgtctaccttcatgaccaccatataatctgcacgttcggaatctaattgacattcgtgccacaacctgggatacaacacccacaaagtgcttcttattcaggtgtgagccttttcagcaacccagctgcagtaactgggagatccagccatccaccttccggtgtgtctacgtgcgctctgccattcagcttggraattataaataattcccaagaaagccctcgtttttataacctggcaaaatcccattaatatcattgctcaaaaaaaaaaaaaaaatgaaagctagatactg

SEQ ID NO: 763 - DNA, 825 bp, Canis familiaris
  misc_feature (354)..(354): n comprises a, c, g, or t, or includes no nucleotide
gctgggcacccaatcccctgaagagcttcagggattgaacaatggagccttccaagggaatgtagaagctctcctatatccgcacttgctgatacccatattgacgtaccatccctcaaggtcttcctccgttcccctttactgaattacatcttgaaggccaccagaatcaccacaggttgaagcatttagcctggaaggactggataatttggctataattgggaactgaagttttttaccagcattcttccccctggttggaaccaatgggccaccttcttaagcccaaccaactccttcaattcttgaaggggagccttccacctttggaccaaccaataaagcttcatncagagtacccggtggctggcggagcataagtacatccaggttgtctaccttcataacacaatatatctgcagtcggatctaatgacttctgcccacctggatacaacaccmaaaaggcttcttattcaggtgtgagccttttcagcaacccagtgcagtactgggagatccagccatccaccttccggtgtgtctacgtgcgctctgccattcagcttggraattataaataattcccmagaaagccctcgtttttataacctggcmaaatcccattaatatcattgctcmaaaaaaaaaaaaaatgaaagctagatactggaacttaactgcaatgtggatctttttcccacatgatttataatacataaagccgaatatgcagtttaaataattgcctaccaataaaaaaatattttgcctgcccaaaaaaaaaaaaaaaaaaaaaaaaaaaaaaaaaaaaataaaaaa

SEQ ID NO: 764 - DNA, 688 bp, Canis familiaris
acaaaatcaccccaggttgatgcatctagcctgaaaggactgaataatttggctaagttgggactgagttttaacagcatctccgctgttgacaatggcactctagccaacactcctcatctgagggagcttcacttggacaaccatcaagctcatcagagtacccggtgggtctggccggacgcataagtacaatcacagcgttgtctaccatctcataatcaacaactaataatcttgcagctcgggagtgataattgacgattcttgccgcaccactggagtgaccaaccacccacaaaggcggtttttattatcattcgagggtgatgcccctttcacggacagaacaccccgatgcacgatatatgtggagagttactcacacgccattcccctcttcgcgtggtgtgttatagcgtcgcgtctctccacattacagctgtggaaattatataaataatttcccwaggaaagcccctcgtttttataacctggcaaaatcccattaatatcattgctcaamaaaawaaaaaaatgaaagctagatactggaaacttaactgcaatgtggatctttttcccacatgatttataatacataaagccgaatatgcagtttaaataattgcctacaataaaaaaatattttgcctgccaaaaaaaaaaaaaaaaaaaaaaaaaaaaa

SEQ ID NO: 765 - DNA, 488 bp, Canis familiaris
aataggagaaatagttttgcctgccattttgcagaattcgttttttgaaggtttctgtgtgatgttaactgagctattgcagatattttaatttccctgwrgcgtaaatttggagtaaatatatatatgatattcttgacatatatgtgtgtgtgtgtgtgtatatatatatagtatatagtatacacatatatatgtcagacaagttcagtaaagcttttgtttaattttcagaaggaatcaaataamcacagtatccatcttctgtagttcgtagggtgttaggtcctttaacgtaaagtcaaacttcaaattccatctagctctgtgttaatccctgttattactggtaaagcttcatttgaatatgtaaattcagtttaggctatgtaaaatttttgctaatgtcatcattctgaaaaaaataaatttacaaatacattccaaaaaaaaaaaaaaaaaaaaaaaaaaaaaaaaaaaaaaaaaaa

SEQ ID NO: 766 - DNA, 1001 bp, Canis familiaris
  misc_feature (210)..(211): n comprises a, c, g, or t, or includes no nucleotide
  misc_feature (277)..(277): n comprises a, c, g, or t, or includes no nucleotide
taaaaggggcctgaaaggactgaaataaattttttggctaagttgggactgagcttttctttttaacagcatctccgctgttttggaaaaccccaatggcactctatgccaacaccttttcccccgtcatctgagggagcttcacttgggacacaacccaaaataagctcatcagagtacccggtgggctggcggagcataagtacatcnncaggttgtctgaacctgtcataaccaccatatatcgtgcagtcgggatcgtgaatggagctttttnttgcccacctggatacaacacccaaaaggcttcttattcacgagtgtgaggacgcctctttcacgccaccccagtccagtactgggagatccagccatcccaccttccggtgtgtctacgtgcgctctgccattcagcttggaaattataaatrattcccmagraagccctcgtttttatacctggcaaatcccattaatatcaktgctcaaaaaattaaaatgaagctagatactggaactttaactgcaaatgtggatctttttccccacatgatttataatagcataaagccgataatgcagttttaaataaattgcctaccatagaaaatattttgcctgccattttcagaattcttttttgaaggtttctgttgatgttaactgagctattgcagatattttaatttccctaaacgtaaaatttggagtaaatatatatatatatgtcaacaattcagtaaagcttttgtttaattttcagaaggaatcaaataaacacagtatccatcttctgtagttcgtagggtgttaggtcctttaacgtaaagtcaaacttcaaattccatctagctctgtgttaatccctgttattactggtaaagcttcatttgaatatgtaaattcagtttaggctatgtaaaatttttgctaatgtcatcattctgaaaaaaataaatttacaaatacattccaaaaaaaaaaaaaaaaaaaaaaaaaaa

SEQ ID NO: 767 - DNA, 756 bp, Canis familiaris
gggattgaaaatgagccttccagggaatggcagaagctctccctatatccgcattgcgtgataccaatataactgtaccatccctcaaggtcttcctcctgtgcccttactgaattacatgctgtgaaggcgaacaaaatcaccaaggttgatgcatctagcctgaaaggactgaataatttggctaagttgggactgagttttaacagcatctccgctgttgacaatggcactctagccaacactccctcatctgagggagcttcacttggacwacmataagctcatcagagtaccccggtgggtctgkcggagcataagtacatgccaggttgtctaccttcataacmacmatatatctgcagtcggatctaatgacttctgcccacctggatacaacacccamaaaggcttcttattcaggtgtgagccttttcagcaacccagtgcagtactgggagatccagccatccaccttccggtgtgtctacgtgcgctctgccacttcagcttggaaacttataaataattcccamgaaagccctcgtttttataacctggccaaatcccattaatatcattgctcaamaaatataaaaaaaatgtaacgctagatatctggaaacttaactgcactgtggatctttttcccacatgatttataatacataaagccgaatatgcagtttaaataattgcctacaataaaaaaatattttgcctgcccaaaaaaaaaaaaaaaaaaaaaaaaaaaaa

SEQ ID NO: 768 - DNA, 881 bp, Canis familiaris
actcttcagagtctgcgtgcccatgagaatgagatcaccaagttcgaacagctgtgttcaatggactkgaaccagatgatcgtcgtagagctgggcaccwatcccctgaagagttcagggattgaaaatggagccttccagggaatgaagaagctctcctatatccgcattgctgataccvatataactaccatccctcaaggtcttcctccttcccttactgaattacatcttgaaggcmmcwaaatcaccaaggtygatgcatctagcctgaaaggactgawwaatttggctaakttgggactgagttttwacagcatctccgctgttgmmmatggcactctagccaacactcctcatctgagggagcttcacttggacmacmataagctcatcagagtacccggtgggctgkcggagcataagtacatccmggttgtctaccttcatracvrcmatatatctgcagtcggatctaatgacttctgcccacctggatacaacacchwaaaggcttcttattcaggtgtgagccttttcagcaacccmgtgcagtactgggagatccagccatccaccttccggtgtgtytacgtgcgctctgccattcagcttggaaattataaataattcccmmgaaagccctcstttttataacctggcmaaatcccmttratatcattgctcmaaawaaaamaaaaatgaaagstagatactggraacttaactgcmatgtggatctttttcccacatgatttataatacataaagcygaatatgcagtttaaataattgcctacmaataaaaaaatattttgcctgccmaaaaaaaaaawawwaaaaaaawaaaaaaaaaaaaaaaaaaaaaaaaaaaaaaaaag

SEQ ID NO: 769 - DNA, 1493 bp, Canis familiaris
tttttttaactgtgctatggagtaraascaggaggttctcaacctaktracaktcacararcagcacctaccccctcctcctttccacacctgcaaactcttttgcttgggctgaatatttagtktaattacatctcasctttragggctcctgtggcaaatccccggattaaaaggttccttggctgtgaaaatacatrasctaaaccatgaaggcaactatcatcttcctcctgcttgcacaagtttcctgggctgggccgttccaacagagaggcttatttgactttatgctagaagatgaggcttccgggataggcccggaggaccgtgcacctgacatgcctgacctcgagcttctgggacctgtgtgtcccttccgctgtcagtgccatctccgagtggtccagctgttccgacctgggtctggacaaagtaccaaaagatcttccccctgacactacgctgctcgacttgcaaaacaacaaaatcaccgaaatcaaagatggagacttcaagaacctcaagaacctgcataccttgattctkgtaaacaacaaaattagcaaaatcagccctggagcatttacacctttgttgaaattggaacgactttatctgtccaagaatcatctgaaggaattgccagaaaaaatgcccaaaactcttcrggagctgcgkgcccatgagaatgagatcaccmaagttcgaaaagctgtgtkcaatggactgraccagatgatcktygtagagctgggcaccdatccsckgaagagttcagggaytkaaaatggagccttccagggaatgaagaagctctcctatatccgcatkgctgataccrrtatrrctaccatccctcaagktcttcctccttcccttactgrattacatcktgaaggcracvwaatcaccaaggttgatgcatctagcctgaaaggactgaataatttggctaagttgggactgagttttaacagcatctccgctgttgacaatggcactctagccwacactcctcatctgagggagcttcacttggacamcaataagctcatcagagtacccggtgggctggcggagcataagtacatccaggttgtctaccttcataacaacaatatatctkcmgtcggatytaatgacttctgcccacctggatacaacaccmaaaaggcttcttattcaggtgtgagccttttcagcaacccagtgcagtactgggagatccagccatccaccttccggtgtgtctacgtgcgctctgccatycagcttggaaattataaataattcccaagaragccctcgtttttataacctggcaaaatcccattaatatcattgctcaaaaaaaaaaaaaaaarraamwaartacgggaaacttagctgcaatgtgaatgttttccccctaatttataatactaaaccaaattgcatttaaaatgccaaaaaaaaaaaattttggccgccaaaaaaaaaaaaaaaaaaaa

SEQ ID NO: 770 - DNA, 1493 bp, Canis familiaris
ttttttttttttttttttttggcggccaaaattttttttttttggcattttaaatgcaatttggtttagtattataaattagggggaaaacattcacattgcagctaagtttcccgtayttwkttyyttttttttttttttttgagcaatgatattaatgggattttgccaggttataaaaacgagggctytcttgggaattatttataatttccaagctgratggcagagcgcacgtagacacaccggaaggtggatggctggatctcccagtactgcactgggttgctgaaaaggctcacacctgaataagaagccttttkggtgttgtatccaggtgggcagaagtcattaratccgackgmagatatattgttgttatgaaggtagacaacctggatgtacttatgctccgccagcccaccgggtactctgatgagcttattgktgtccaagtgaagctccctcagatgaggagtgtwggctagagtgccattgtcaacagcggagatgctgttaaaactcagtcccaacttagccaaattattcagtcctttcaggctagatgcatcaaccttggtgattwbgtygccttcamgatgtaatycagtaagggaaggaggaagamcttgagggatggtagyyatayyggtatcagcmatgcggatataggagagcttcttcattccctggaaggctccattttmartccctgaactcttcmgsggathggtgcccagctctacramgatcatctggtycagtccattgmacacagcttttcgaacttkggtgatctcattctcatgggcmcgcagctccygaagagttttgggcattttttctggcaattccttcagatgattcttggacagataaagtcgttccaatttcaacaaaggtgtaaatgctccagggctgattttgctaattttgttgtttacmagaatcaaggtatgcaggttcttgaggttcttgaagtctccatctttgatttcggtgattttgttgttttgcaagtcgagcagcgtagtgtcagggggaagatcttttggtactttgtccagacccaggtcggaacagctggaccactcggagatggcactgacagcggaagggacacacaggtcccagaagctcgaggtcaggcatgtcaggtgcacggtcctccgggcctatcccggaagcctcatcttctagcataaagtcaaataagcctctctgttggaacggcccagcccaggaaacttgtgcaagcaggaggaagatgatagttgccttcatggtttagstyatgtattttcacagccaaggaaccttttaatccggggatttgccacaggagccctyaaagstgagatgtaattamactaaatattcagcccaagcaaaagagtttgcaggtgtggaaaggaggagggggtaggtgctgytytgtgamtgtyamtaggttgagaacctcctgsttytactccatagcacagttaaaaaaa

SEQ ID NO: 771 - DNA, 789 bp, Canis familiaris
gcacccaatccctctgaagagttcaagggattgaaaatggagccttcgcagggaatgaagaagcttctcctatattccgcatttgctgataccccatatgacgtaccatccctcaggtcttcctccttcccttactgaattacatcttgaaggcmacvaatcaccaaggttgawgmwtctagcctghaaggactgdataatttggctaarttgggactgagttttracagcatctccsctgttgacmatggcactctagccmacactcctcatctgagggagcttcacttggacammmataagctcatcagagtacccggtgggctgbcggagcataagtacatccaggttgtctaccttcatwacvachatatatckgcmrtcggatytaatgacttctgcccacctggatacmacaccmaaaaggcttcttattcaggtgtgagccttttcagcaacccmgtgcagtactgggagatccagccatccmccttccggtgtgtctacgtgcgctctgccmttcagcktggaaattataaataattcccmagaaagccctcgtttttataacctggmmaaatcccmttaatatcaktgctcmaaaaaaaaaaaaaatgaaagctagatactggraacttaactgcmatgtggatctttttcccacatgatttataawacataaagcygaatatgcagtttaaataattgcctaccaataaaaaaatattttgcctgccmwwwwmaraaaaaaaaaaaaaaaaaaaaaaaaaaaaaaaaaaaaaaaraaaa

SEQ ID NO: 772 - DNA, 1182 bp, Canis familiaris
  misc_feature (137)..(137): n comprises a, c, g, or t, or includes no nucleotide
  misc_feature (158)..(158): n comprises a, c, g, or t, or includes no nucleotide
  misc_feature (167)..(167): n comprises a, c, g, or t, or includes no nucleotide
  misc_feature (183)..(190): n comprises a, c, g, or t, or includes no nucleotide
cataataactaccatccctcaaggtcttcctctctccttacgtgaattacatcttgaaggcaacaaaatcaccaaggttgatgcatctagcctgaaaggactgaataatttggctaagttgggactgaggttttaancagcatctccgctgttgaccnaatggcacntctagccaacactccnnnnnnnntcatctgagggaagcttcaccttggacaacaaataagctcactcagacgtactccggtgggctgccggcagcatcaagtagcatccacagcgttgtcgtacctctcatcaacaaccaactatatcctgccagctcggagtataatagacattcttgcgccaccactggagtatcaaccacccacaaagaggcgtttcttattattctaacgaggtgtgtagaccccttttctacgacgaaaaccacgaatgtcgacgatgatatcggggaagatccaccactatcccctcttcccgtgtgttgttcaaccgtgcgtcttctgcccattccagccttgggaaattaatarataattccccaagaaagccctcgtttttataacctggcaaratcccabtaatatcattgctyaamawmhwhmwaaatgaaagctagatactggaaacttaactgcaatgtggatcttttkcccacatgatttataatacataawsyygaatatscmstttaaataattgcctacvatrdadrratattttgcctgccawwwwmaraawwcttttttgaaggtttctgttgatgttaactgagctattgcagatattttaatttccctaaacgtaaaatttggagtaaatatatatatatattcttgacatatatgtgtgtgtgtgtgtgtatatatatatatatatatatacacatatatatgtcaacmattcagtaaagcttttgtttaattttcagaaggaatcaaataaaacmagtatccatcttctgtagttcgtagggtgttaggtcctttaacgtaaagtcmaacttcaaattccatctagctctgtgttaatccctgttattactggtaaagcttcatttgaatatgtaaattcagtttaggctatgtaaaatttttgctaatgtcatcattctgaaaaaaataaatttaccaaatacattcmaaawwwmmmwwrwaaaaaaaaaaaaaaaaaaaa

SEQ ID NO: 773 - DNA, 1228 bp, Canis familiaris
atccgcatggcttgataccagatatgacgtaccatccctcaaggtctttcgtccttcccttaactgaagttacatsyttgaaggcaacagaatatcagccaagggttgatgcatctaagcctgaaaggactgaataatttggctaatgttgggactgagttttaacagcatctccgctgttgacaatggcactctagccaacactcctcatctgagggagcttcacttggacaacrataagctcatcagagtacccggtgggctgkcggagcataagtacatccaggttgtctaccttcatracacaatatatctgcagtcggatctaatgacttctgcccacctggatacaacaccwaaaaggcttcttattcaggtgtgagccttttcagcaacccagtgcagtactgggagatccagccatccaccttccggtgtgtctacgtgcgctctgccattcagcttggaaattataratrattcccaagaaagccctcgtttttataacctggcraaatcccaktdatatcattgctcaaarmwmdrrrraratgwaagctagatactggaaacttaactgcaatgtggatctttttcccacatgatttataatacataaascygaatatgcagtttaaataattgcctacmatawmmwaatatkttgcctgccawwwwmaraattcttttttgaaggtttctgttgatgttaactgagctattgcagatattttmatttccytawacgtaaaatttggagtaaatatatatatatattcttgacatatatgtgtgtgtgtgtgtgtatatatatatatatatatatacacatatatatgtcaacmattcagtaaagcttttgtttaattttcagaaggaatcwaataaaacmagtatccatcttctgtagttcgtagggtgttaggtccyttaacgtaaagtcmaacttcaaattccatctagctctgtgttaatccctgttattactggtaaagcttcatttgaatatgtaaattcagtttaggctatgtaaaatttttgctaatgtcatcattctgaaaaaaataaatttacamatacattcaaaawwammmwwrwaaaaaarwrwaattgtaaatcttccctaaactctattttctgatgaaagcagacactgtgttcttgaccaaaaatagcacatcttttcaagttctcagataaaaaaaaaaaaaaaaaaaaaaaaaaaaaa

SEQ ID NO: 774 - DNA, 813 bp, Canis familiaris
  misc_feature (285)..(285): n comprises a, c, g, or t, or includes no nucleotide
  misc_feature (390)..(390): n comprises a, c, g, or t, or includes no nucleotide
gaccagatgatcggtcgtagagctgggcaccaatcccctgaagagttcagggattgaaaatggagccttccagggaatgaagaagctctccgtatatccgcattgctgataccattatactaccatccctcaaggtcttcctcccttcccgttactggagttacattcgttgaaggcacagaatcaccaaggttgaygcatctagcctgaaaggactgwataatttggywaadttgggactgagtttkaacagcatctccgctgttgacmatggcmctytagccnacactcctcatctgagggagcttcacttggacdacmataagctcatcagagtacccggtgggctggcggagcataagtacatccmggttgtctaccttcatamcnacvatatatctgcagtcggatctaatgacttctgcccacctggatacaacacchaaaaggcttcttattcaggtgtgagccttttcagcaacccmgtgcagtactgggagatccagccatccaccttccggtgtgtctacgtgcgctctgccattcagcttggraattataaataattcccmagaaagccctcgtttttataacctggcmaaatcccmttaatatcmytgctcmaaaaaaaaaaaaaaatgaaagctagatactggraacttaactgcaatgtggatctttttcccacatgatttataatacataaagcygaatatgcagtttaaataattgcctaccaataamaaaatattttgcctgccmmmaaaaaaaaaaaaaaaaaaaaaaaaaaaaaaaaaaaaaaaaaaaaaaaaa

SEQ ID NO: 775 - DNA, 969 bp, Canis familiaris
  misc_feature (109)..(110): n comprises a, c, g, or t, or includes no nucleotide
aatgccacttttagccaacactccctcatttttgagggagcttccacttggacgagcataagctcatcagaagtaccccggtgggctgcggagcataagtacatccagnnttgtctaccttcatacaccatatatctgcagtcggatctaatgacttcttgcccacctggatacaacacccaaaaggcttcttattcaggtgtgagccttttcaagcaacccagtgcagtactgggagatccaagccatcacaccttccggtgtgtctacagtgcgctctgccattcgagcttggaaatgatataaatagattcccaacgaaagccctcgtttttataacctggcmsmaatcccactwaatatcasttgctcvmaaaarawraraaaartgaaagctagatactggaaacttaactgcmatgtggatctttttcccacatgatttataatacatwaagccgaatatgcagtttaaataattgcctacmatrdaraaatattttgcctgccmhwwwmaraawtcttttttgaaggtttctgttgatgttaactgagctattgcagatattttaatttccctaaacgtaaaatttggagtaaatatatatatatattcttgacatatatgtgtgtgtgtgtgtgtatatatatatatatatatatacacatatatatgtcmacmattcagtaaagcttttgtttaattttcagaaggaatcmaataaaacacagtatccatcttctgtagttcgtagggtgttaggtcctttaacgtaaagtcmaacttcaaattccatctagctctgtgttaatccctgttattactggtaaagcttcatttgaatatgtaaattyagtttaggctatgtaaaatttttgctaatgtcatcattctgaaaaaaataaatttacmaatacattcmamawwaaaaaaaaaaaaaaaaaaaaaaaaaaaaaaaaaaaaaaaaa

SEQ ID NO: 776 - DNA, 1166 bp, Canis familiaris
tcagtgattgatatggagcctttcatgggaatgaagaagtctctcctatatcctgcattgctgatgcccatataactaccgatccctcaagtctgtcctccttcccttactgagattgacatcttgaaaggcacwaratcaccaaggwtgatgcatywagcctgaaaggactgratmatttggctaagttggrmctgagttttaacagcatctccgctgttgacmatggcactctakccwacactcctcatctgagggagcttcacttggacaacvataagctcatcagagtacccggtgggctggcggagcataagtacatccaggttgtctaccttcataachacmmtatatctgcagtcggatctaatgacttctgcccacctggatacdacaccmwaaaggcttytwattcaggtgtgagccttttcagcaacccagtgcagtactgggagatccagccatccaccttccggtgtgtctacgtgcgctctgccattcagcttggaaattataaataattcccaagaaagccctcgtttttataacctggcmaaatcccattaatatcattgctcmaaaawrawaaaaaawraaarmwagatactggaaacttaactgcaatgtggatctttttcccacatgatttataatacataaagcygaatatgcagtttaaataattgcctacaataaaaaatattttgcctgccahwwwmaraawtcttttttgaaggtttctgttgatgttaactgagctattgcagatattttaatttccctaaacgtaaaatttggagtaaatatatatatatattcttgacatataatgtgtgtgtgtgtgtgtatatawatatatrtgtatataatatatacacatataatatgtcaacaattcagtaaagcttttgtttaattttcagaaggaatcaaataaaacaagtatccatcttctgtagttcgtagggtgttaggtcctttaacgtaaagtcaaacttcaaattccatctagctctgtgttaatccctgttattactggtaaagcttcatttgaatatgtaaattcagtttaggctatgtaaaatttttgctaatgtcatcattctgaaaaaaataaatttacaaatacattcaaaaaaaaaaaaaaaaaaaaaaaaaaaaaaaaa

SEQ ID NO: 777 - DNA, 689 bp, Canis familiaris
attattcagrccctgawcagatwcgggacaatttactgttgcttcgtagcacatgcggagcaggactgcttagccagtagagggggatccggaaccccagtgttatttggttatgatatgcaatctggctgtaaactaagactgcctcaagccatcacgtgtcagctcgcagtgaagaaagtaaagaacctccttgaagggccaaggcttcccagattatgttgcccccttttggaaactcccaggcccaggatgtgctgkactgggatccgctgtccacttcatcacccaggcatcccacatgaaggattcttgccagctcccagtggctttgtttatagaagtgaagtggaccmaatacgggtccttactgaacccacaggctwaaattgtaaacgttaactgcmagtctccatttcatcccccctttccctgagaccgactcaggaaatgagaggacggttcttatttccactgcggttacttttgtggatgcgtctgcacctgcgaaggcaggcttcagagctcggccaaccatcaatgccaggctgccgtttaatttcttctttccgtttgtttgacaatgctcacatgaaaagatgcactggttcctcatacatgggaaatgggaaagtacatttgatgagattaaattttatatacaactaaaaaaaaaaaaaaaaaaaaaa

SEQ ID NO: 778 - DNA, 701 bp, Canis familiaris
ctgtctcatgctgttttgagggaagaaaggttttttttttgttgcttggctttagaaaattaacctcagccgccatatggctattttttaatgcctaggattggtttgaaatttttttaaaactagaattttcttacattagtattttaaaataacctaaataaatttttgtaatattttgtaatattttgaaccmatattagctctgctggaaactgatttatatctttttatatgaccttttaaaagtgaaaagctgcatataatctaggggaatttgtcagaggattttataattcaggagcctttagccmagtttgttaatacacggagagaactaagccataatgcctcttgaggttattcactttcctatgtgttgtgaagaattgtgtatttgcmgtggggtttatgttaagaagggttaaaagtttgttgttattttccttcagccmatgtgactctgatatcattgactcctaagtgtcatttctaagagtaactttaccactttttgcctttttaaaagcctttgaaatcacagctttttcatgacaaaataattatagtcttatccggttggatatatgtatttgacagtacatgtttaacaccacmaaggttatgtacgaaaaaattcactaatgctgtctttcatcattaaaatgcatctctttttggaaarrwaaaaaaaaaaaaaa

SEQ ID NO: 779 - DNA, 693 bp, Canis familiaris
ccttcctaggcctgggccattggggccatgggtgcgtgggccgggcggcgcgaggacgttgggccggatcccgggaggaccacgcgagcttgatgcggatgaacggccagccgcctcgacgcsgccggtgctcccgcagatgctgaacgcgttgcacgacaaccccttggcggtgctccggatcaacttggtcgcccggtgacaccaggtggtcaaccacgagtagattcaggtcaaccaggcggggttgtagggccccgtcctcaactagatcgagtggccaggtcttctccggatcctgtcccacccagtcaatctcctcaacagaccaacaatcatcgttccccacaggaagggacgacattgtaacggaccgaggattgctccccagttgtcgattgaacttccgaccaagatgattgatcctactcattgactaaaaactcgacacaaacaaatgacggtatcctttaacggtcaacacttccttcagtagaactgttctcgttttcagtccatgtatcaataaaacatccagagacgattacttgggtttccgaggagtttatatcttggtccagatacgtgttgattggactcagttccaactaatacamtgaatgtttgttttgtaaaagctagttaaggaataaacggtttccaaagtccaaaaaaaamaaaaaaaaaaaaaaa

SEQ ID NO: 780 - DNA, 693 bp, Canis familiaris
ggaaggatccggacccggtaaccccggtacccacgcacccggcccgccgcgctcctgcaacccggcctagggccctcctggtgcgctcgaactacgcctacttgccggtcggcggagctgcgscggccacgagggcgtctacgacttgcgcaacgtgctgttggggaaccgccacgaggcctagttgaaccagcgggccactgtggtccaccagttggtgctcatctaagtccagttggtccgccccaacatcccggggcaggagttgatctagctcaccggtccagaagaggcctaggacagggtgggtcagttagaggagttgtctggttgttagtagcaaggggtgtccttccctgctgtaacattgcctggctcctaacgaggggtcaacagctaacttgaaggctggttctactaactaggatgagtaactgatttttgagctgtgtttgtttactgccataggaaattgccagttgtgaaggaagtcatcttgacaagagcaaaagtcaggtacatagttattttgtaggtctctgctaatgaacccaaaggctcctcaaatatagaaccaggtctatgcacaactaacctgagtcaaggttgattatgtkacttacaaacaaaacattttcgatcaattccttatttgccaaaggtttcaggttttttttkttttttttttttttt

SEQ ID NO: 781 - DNA, 229 bp, Canis familiaris
aagaggcatagagtccctagaaacatgctcacccagagccagcctcgtaggcttcatgggccttataccccaagctcgaggtctgagttcttgatgctcatagtccccctgggagctgcagcccccactaggtcctttgccaaggagccatgcgggacctgtcagcagatgaagggacacatcataggtctgtgcccccctggccacactggccagcactgcaatgtag

SEQ ID NO: 782 - DNA, 706 bp, Canis familiaris
gtaataacaggtcatttgaagtgtatacatagtaacccatggcctctcaaaagcacattttaggtactgaagataaaaagaaaatgcatcttgaagcatttttatggattctttggaccacatattcgttgttagatctatgtattgtaggatttttttagaatttttgtatatggattatttttttaatgtgacacgttaaaacacatctttwaaagcatagtcccaggtaaaagaaacacgagtataatggtttctttgaaaactcctgcaatgtttaatttggaggcagctttcagactattttattggtggtaactactcgctgagctcttttaataggtaataactccacgagaagcagcctgtatatactcctaacacttttgttcacattgcatttaagtttagagtaagccccacagtaaaacmatggaaatgtatatagaactgttagttcttacatgatttaattatatcaagatacatgaatttaacttgctttaatgtaggcmaactttccactttgtccattttactgtttatgttaaaataacatccctttcctacataatcttttcttgactcaaatgaaatattaacctaaggtcaagatgggagagaaacgactgagatgaatgtctttactaaaatacccaataaatttgtcaaactccmaaaaaaaaaaaaaaaaaaaaaaaaaaaa

SEQ ID NO: 783 - DNA, 689 bp, Canis familiaris
gtgctcttcaaccaacatggccatgaccaacgggcgatctatgtgttccatgagcctcaaattcatgataacaagggattcccaaaacgtggttgatgttaacaattcctgatgaagtagtatgtagcttttgtgtcattcgtatcaatgacatcaaagggaaaccaatttattctatttaaattcacactaaacaagccaaatcttgtatgcagaacacacacaagaatcgcctagtcttcactatattgagtagctataatatgctaattttagactctgaaattaacattttaaacatctccattttatctatatcctgttgaaaacacttatcatagtcactaattctaatttcagggttgactttctctttctgaatggcttcagagaattggtgtgaactttgaagacttagggtactaatgattgtatctttgctagtcaacaaataatgaaacataatactcactgctggcatctgatatgtcagtaagtagagaagtgactaagacacaaataacctttgcaaactctcaagctgtgtaatattccaatgttgtttttttttctttgtatatatacttaaatcatgtaggatgttgtaaaattagtatgaccgtgtctagtcttcaaacttaaaataaaacttttgaaaatctggaaaaaaaaaaaaaaaaaaaaaaaaa

SEQ ID NO: 784 - DNA, 3302 bp, Canis familiaris
cgcggctcgtgacggtcgggcagcctccgctgctgtctccactgcagcgcgggccgggcgtgcgggcgggtggaggcgcgggccgcgcacgactcgagatcatggaagggaaatggctgctgtgtatgttactggtccttggaactactattgttcaggctcatgaaggacatgatgatgatatgattgatattgaggacgacctcgatgatgttattgaagaggtagaagactccaaatcaaaaccagataccagcgctcctacatctccaaaggtcacctataaagctccagttccaacaggggaagtgtattttgctgattcctttgacagaggaactctgtcagggtggattttatcaaaagccaagaaggatgacactgatgatgaaattgccaaatatgacggaaagtgggaggtagatgaaatgaaggaaacaaagctcccaggtgataaagggcttgtgttgatgtctcgggccaagcatcatgccatctctgcaaaactcaacaagcccttcctgtttgataccaagcctctcattgttcagtatgaggttaatttccaaaatggaatagaatgtggtggtgcctatgtgaaactgctttccaaaacccccgaactcaacctggatcagttccacgacaagaccccttatacgattatgtttggtccagataaatgtggagaagactataaactgcacttcatcttccgccacaaaaaccccaaaacaggcgtatatgaagaaaagcatgctaagaggccagatgcagatctgaagacctattttactgacaagaaaacacatctttatacattaatcttgaatccagataatagttttgaaatactagtggaccaatctattgtgaatagtggaaatttactaaatgacatgactcctcctgtaaatccttcacgtgaaattgaggacccagaagaccagaagcctgaagattgggatgaaagaccaaaaataccagatcctgatgctgtcaaaccagatgactggaatgaagatgcccctgctaagattccagatgaagaagctacgaagcctgatggctggttagatgatgaacccgaatatgtacctgatccagatgcagagaagccagaggattgggatgaagatatggatggagaatgggaggctcctcagatcgccaaccctaagtgtgagtcggcccctgggtgtggtgtctggcagcgacctatgattgacaaccctaattataagggcaaatggaagcctcccatgattgacaatcctaactaccagggaatctggaaaccccggaagataccaaatccggatttctttgaagatctggaacctttcaaaatgactccttttagcgctattggtttggaactgtggtctatgacctcagacattttttttgacaactttattgtttgtggggatcgaagagtagttgatgattgggccaatgatggatggggtctgaagaaagcagctgatggggctgccgagccaggtgtggtggggcagatgattgaggcagctgaggagcgcccgtggctctgggtggtctacgttttgaccgtagctctgcccgtgtttcttgttatcctcttctgctgctctggaaagaaacagtcaagtcctgtggagtataagaagacagacgctcctcagccagatgtgaaggaggaggaagaagaaaaggaagaggaaaaggacaagggcgatgaggaggaggagggcgaagaaaaacttgaagagaagcaaaaaagtgatgctgaagaagatggcggcactgccagtcaagaggaggacgataggaaacctaaggcagasgaggatgaaattttgaacagatcaccaagaaacagaaagccacgaagagagtgaaacaattttaagaacttgatctgtgatttcctctccctyctccccttcccctgcaagcatggtcctgggagaggacctggcacaccttaggttgaactcagaaaacctccagacatcaccatcaacaggttccagtcgaacactagcccgtgtaattttaaacatctaagcagtaaataattgctgttgtgaaataaaggaccctgtttctgtagaaagaaggcatataacattaatagttgtgaaatgtaacatgaagcaactaacttgtattttttgttttgttttgtttttaaacatctttgttttttaaaatagagygatagaactttgccagtctttaaamtcttggcttaatttaatatattaatctgtccatgcagaaataacaccaacctttagaaatgtttgggggatgaattgcagtttctataaccaaatttttaagtttggtattatgaaacattcaagtgttctctgtcccttaaaattgataatcattgtttaaagtgcagtcatttgtggttatagtcttgttttgcttgcttccatcacccagttcctcctaagaaaactgaggagatggactggatggaagcccaaattataaaaggttctgtttcagttatattaaaaatagatatacagaaagaagaaacttttcctcttggtgttggttagaccatacagtgcgtgtgttctgttgcccttggtagcagctctgttcccagacggctctgcagtccgttgaggaggtggtatgatgtggcattcgggcagtcatgcttccacaactgggagtgtctgggctccagccttccggagcaggtggctgtttgaggaatgctcccagggcatgggagctcccaagcagacgcagatgttttcatcacttcctccactgtgttgacactgtctccttcccagttgtcccagatccccagctttctcctctgctatgcattttcttcacagcgcacgttgcagtccgtcactgaaaatgattataagctccgcatagtgttaagctttattgtgattaagtgtatgtttcttccttctttaagcagacccacacctttccagggtcaaagtacaggataagatactgtctttcatttttatccatttcttttgctctgtgtcaagacttgaaaagtctcagccagaggtgagccaattcagaatctgtaattgaacacaggcttaaagtatttatgggaggagtggcataacagcatgaattctgaatttttttttttttttagctgctaaactttttaagtcttcatttgcagttcatgtaacatttgtgtcttaaattacatgataaagcagtcctgttaaaaaattctgggggggtatgtggcttgtagaattcttttaagatgtgatcttagattttttttttcggaattc

SEQ ID NO: 785 - DNA, 695 bp, Canis familiaris
gtaactaggtcccaaagatgcaaacaaatccgaagkttagccaagtagaaatgaaarggacagggttccaagccctgctacaaggttgtttacttatttattctctgcttaagatccttggggagatggtaagagtaaggatagaacaaagaaggtgccaagtaaatgagaaacagacctaagatgaatgaaaccatactttctaccagaggaacgagggaaccaaatgcagcacattattttttttgttattttggtttaattttgagatctcttcacttacacacmwaaaataagaactggtttttatttactgttgatttttttttcccctcctgtggatgaagtaactgaagcctagaggaatgaactagtgctactgaactgtttaaattatttttgtgttaatagtacactttgagtatctttttccacattacaaaaatcttttctggattataaatgttttccttacattatttaacaatgtacactgtttaaaaaacaaataaactgaattcaaaccgwrrrrrtttctcagcagccgttaattgtacattttgcactaactctgggtgttgcgcttcttgtaagattgcgctctgtgcttcagtttgttacctttgtagacttatttaatgaaaccattcaaataaaccaaacttgcttttgttgaaaaaaaaaaaaaaaaaaaa

SEQ ID NO: 786 - DNA, 713 bp, Canis familiaris
ctcccccgaacgagggccagaatggaggccagtggaggccatgctsctccccagagacgctgaggaggtggacamaytcccygcagatgaggaggatagacmacctctacctgccmaagkktkccatstccagcagctataatctggaagatgtccttccccagctgggcgtgagagaagtcttcaccaacsagsccgacctgtcgagagtcacagggcacaagaacctgkcagtttcccagatagtycacaagaccctgctcgatgtgaccgagttgggcacagaagccgctgccgccacgggaagtaaakttgtttttttwtcyggaaagatcggcccactggtcactgttcgtttcaacagaccctttctgttytgcatacaccacmaagatacggagaacatcctcttctggggcaaggtcaccaaccccmatcaagcstaggcctccccccgcagaggtggggcccctttcagaggtctgtgsgtgcrgcctggcctctctgcaccgaggagccacgtgccaggctctgccctgctcatcctttagaaggtgccagtgactacctgstggcttccagggagcctrtrggctttttgatctgaggcmctgaggtctccagacagcaataaactatctttcttggamwrraaaaaaaaaaaaaaaaraaaaaaaaaaaaaaaaaaaaaaaaaaaaaaaaaaaaaaaaaaa

SEQ ID NO: 787 - DNA, 645 bp, Canis familiaris
cccacgagaaccttgaggaggtggacaacactcccctcagattgaggagatagccaacctctacctgcccaaagtgtgccatctccagcagctataaatcctggaagatgtccttcccccactgggcgtgagagaagtgcttcaccaacgaggccgacctgtcgagagtcacagggcaacaagaacctggcagtttccccagatagttcacaagaccctgctcgatgtgaccgagttgggcacagaagccgctgccgccacgggaagtaaagtygtttttttwtcyggaaagatcggcccactggtcactgttcgtttcaacagaccctttctgttctgcatacaccacaagatacggagaacatcctcttctggggcaaggtcaccaaccccaatcaagcctaggcctccccccgcagaggtggggcccctttcagaggtctgtgggtgcagcctggcctctctgcaccgaggagccacgtgccaggctctgccctgctcatcctttagaaggtgccagtgactacctggtggcttccagggagcctgtgggctttttgatctgaggccctgaggtctccagacagcaataaactatctttcctggactggaaaaaaaaaaaaaaaaaaaaaaaaaaaaaaaaa

SEQ ID NO: 788 - DNA, 682 bp, Canis familiaris
atctggctcctcagagacctgaggaggtgacacattgcctgcagatgaggaggatttgacaaccttttacctgccaaaagttktccatctcccagcagctataatcctggaagatgtccttccccagctgggcgtgagagaagtcttcaccaaccaggccgacctgtcgagagtcacagggcacaagaacctggcagtttccctagatagtccacaagaccctgctcgatgtgaccgagttgggcacagaagccgctgccgccacgggaagtaaakttgtttttttwtcyggaaagatcggcccactggtcactgttcgtttcagacagaccctttctgttytgcatacaccacacaagatacggagaacatcctcttctggggcaaggtcaccaaccccaatcaagcctaggcctccccccgcagaggtggggcccctttcagaggtctgtgcgtgcagcctggcctctctgcaccgaggagccacgtgccaggctctgccctgctcatcctttagaaggtgccagtgactacctgstggcttccagggagcctrtrggctttttgatctgaggccctgaggtctccagacagccaataaactatctttcttggamwrraaaaaaaaaaaaaaaaaaaaaaaaaaaaaaaaaaaaaaaaaaaaaaaaaaaaaaaaaaaaaa

SEQ ID NO: 789 - DNA, 2076 bp, Canis familiaris
ggcgacgcggcsttcggcgatgaagccctgggcggtgggcctcgggccgccgccgccgctgccgctgccgctgctgctgctgctgctgctcggcgcggcgttggtgcgcgcggccgccgcctccgcgccgctacaccccggactggcagagtctggactcgcggccgctgccggactggttcgacaaggccaagttcggggtgttcgtgcactggggcgwgttcgcggtgccggcctggggcagcgagtggttctggtggcactggaagggcgaggggctgccgcagtacgagcagttcatgagcgagaactacccgcccggcttcagctacgccgacttcgggccgcagttcacggcgcgcttcttccaccccgacacctgggccgacctcttccaggcggcgggggcccggtatgtagtcctgacgacaaagcaccacgaaggcttcacaaactggccaagttctgtgtcttggaattggaactctaatgatgtgggtccccatcgtgatttggttggtgagttgggaagagccctccggaagaggaacatacgttatggactctaccactcacttttagaatggttccacccactgtacctacttgataagaaaaacaacttcaaaacacagttttttgtccgtgcaaaaacaatgccagaactatatgaccttgttaacaggtatgaacctgacttgatttggtctgatggrgagtggraatgtcctgatacttactggaactctacagagtttctttcttggctctacaatgatagtccagtcaaggrtcacgtagtggtaaatgaccggtggggtcagaactgttcctgtcaccatggaggatactacaactgtcaagataaatacaagccagagagcttgccagaccwyaagtgggaaatgtgtacctccatagacaaggtctcctggggctatcgtcgtaacatggtgatgtcggacgttgcaagtgaatgtgaaatcatctcggaactggttcagacagtgagcttgggaggcaactacctcctcaacattggaccaactaaagatggactgattgtccccatcttccaagaaaggcttctttccattgggaagtggctaagcatcaatggggaggctatctatgcctctaaaccgtggagggtacaactggaaaagaacacgacktctgtgtggtatacctcaagaggaatgactgtttatgccattttcctgcgctggccagaaaatggagtcttaagccttaaatccccagtaactacctcgactacacagataacgatgctggggatccagaaagatctgaagtggtccacggaaccagaaggtctsctcatttatctgccccagttatcactctttactctgccagttgagtttggttggactataaagctgacaggagtggaatgattgttggagttcaggaggaactgcctcctgttggctgctttggttttcctcttatagcaccatcgttgtwataaactacttctctattcagagatggcttttccracacaktktaatcaaaggaactgagtgcattatactgaygtctcaatggatcagagatctgagatccmttgctagcatacctctctctgatcagcaagaggcactagctggttaagctctgcgttcatccttctattcctaacttgggraattatctaccccagaaacttcccyccattccttgtgtwtgaaacctatttccttactcaatgacttcagataaagaatgagccmagtcaccccmttgcctatggaagaaggtgaagaggatctggcmatctcaaccatacrctgtgtgtttagcatcagttgtcaccagcacccctccmagaggaggagatcctggaagggaagcmagaggctagcmagggctgccmatggtcagctctttggaagtttccatagcmaactaggtgctcagaaattcagtctgtttacagtgataggatgaagaaaatgaatgtgattctgccctgctttttaaaatataatcaaataaataaatttttakgtcaaatcatttctatcmaaaaaaaaaaaaaaaaaaaaa

SEQ ID NO: 790 - DNA, 798 bp, Canis familiaris
aggaacggccgaccaggaggggaggagccagtcgccaggcagccggggtgacacgccccctttccsctccgagccaatcactagtgggggtgggcggggccacgcggccscgtacctgcgcggagagaggcggcggcggaggttcgggcgcggcgacgcggcsttcggcgatgaagccctgggcggtgggcctcgggccgccgccgccgctgccgctgccgctgctgctgctgctgctgctcggcgcggcgttggtgcgcgcggccgccgcctccgcgccgctacaccccggactggcagagtctggactcgcggccgctgccggactggttcgacaaggccaagttcggggtgttcgtgcactggggcgwgttcgcggtgccggcctggggcagcgagtggttctggtggcactggaagggcgaggggctgccgcagtacgagcagttcatgagcgagaactacccgcccggcttcagctacgccgacttcgggccgcagttcacggcgcgcttcttccaccccgacacctgggccgacctcttccaggcggcgggggcccggtgagtgcccgggtcsggccggcgggaggcgcggggcggggaggcgggcccggcccaggagccccccgaggggtgcgcactggacgtggcgcacctggcctcgcggagggggcgcgtctgctcggggcggggggggcgggggggarscccgtgtctaggcctgtgtatggagacgatcgagctgcgccgacccccggccccttaccaggtcaacaagacaatcaggattccagaa

SEQ ID NO: 791 - DNA, 696 bp, Canis familiaris
gcctgagggtctctaccagggattcagcgtctctgtccaggcatcataatctacagagctgcctactttggagtctatgatactgccaaggggatgttgcctgaccccaagaatgtgcacattattgtgagctggatgattgcccaaagcgtgacagcggttgcagggctggtgtcctacccttttgacactgtccgccgtaggatgatgatgcagtctggccggaaaggggctgatattatgtacaccgggacggtggactgctggaggaagattgcaaaagatgaaggagccaaggctttcttcaaaggtgcctggtccaatgtgttgagaggcatgggtggagcttttgtactggtgttgtatgatgagatcaaaaaattcgtctaatgtagttaaaactcaagatcattggttccagatccattgtgtggtttaatagacttttcctatgggaagtaaaaagaaagatctgggataaaaccagactgaaaggaatacctcagaaaaaaaagcttcactgagtgttcattaaaccacaaatgtattttgtatttattttacatttaaattcccacgtcagacataaaataacttatcatacttgtacaattaactgaagaactgataatgacgataaccgaatgtgaaatctcaataaagaccacttaatgcaaaaaaaaaaaaaaaaaaaaa

SEQ ID NO: 792 - DNA, 683 bp, Canis familiaris
tggcgccttcctcttcctgtggcctttgtgggctkctktggggcctgcaaggagaactactgtcttatgatcacgtttgccmtcttcctgtcccttatcatgctggtggaggtggccgcagccatcgctggctatgtgtttagagacmaggtgatgtcagagtttaataaggacttccgggagcagatgaagaattatcagaaaaacmaccacacggcttcgatcctggacmggatgcaggaggattttaagtgctgcggggccgctaactacacagactggcagaccgtctctctcatgcccmagggccaggtccctgactcctgctgcatcaatgtmacgaaggactgtgggatttctttcmatgtgaagaatatctactctgagggctgcgtggagaagattgggggctggctgagaagcmmtgtgctggtggtggctgcagcggccctgggcamttgccttcgtggaggyactgggaattgtcttcgcctgctgcctcgtgaagagtatccgaagtggctatgaagtcatgtaggggtctggtctcttcagccccttcatctaagggagtgggatagtacactccaggtttttcaattaaacggattattttttcagactgaaaaaawarwmwmarwwwatctcgaaaaaaaaaaaaaaaaaaaaaaaaaaaaaaaaaa

SEQ ID NO: 793 - DNA, 696 bp, Canis familiaris
cccgttgcccgtggtcatcatcgccagtgggcccttcctcttcctgggtggcctttgtggcttctgtggggcctgcaaggagaactactgtcttatgatcacgtttgccatcktcctgtcccttatcatgctggtggaggtgccgcagccatcgctggctatgtgtttagagacaaggtgatgtcagagtttaataaggacttccgggagcagatgaagaattatcagrwaaacaaccacacggcttcgatcctggacaggatgcaggaggattttaagtgctgcggggccgctaactacacagactggcagaccgtctctctcatgcccmagggccaggtccctgactcctgctgcatcaatgtcacgaaggactgtgggatttctttcaatgtgaagaatatctactctgagggctgcgtggagaagattgggggctggctgagaagcmatgtgctggtggtggctgcagcggccctgggcattgccttcgtggaggtactgggaattgtcttcgcctgctgcctcgtgaagagtatccgaagtggctatgaagtcatgtaggggtctggtctcttcagccccttcatctaagggagtgggatagtacactccaggtttttcaattaaacggattattttttcagactgaaaaaaaaaaaaaaaaaaaaaaaaaaaaaaaaaaaaaaaaaaaaa

SEQ ID NO: 794 - DNA, 702 bp, Canis familiaris
cgagccacggcagcagagagcacggctgagctggagccctagtgaatcccactgtgtgccgctgcggtgcggacgccacagggagcagsmggcaggcagcmmaggccagccgggggctcgggggctctgcgtgccggcgggcccgcccccacgtccacatagcacaacgtcttactgtgcctctaaccawgcgagtgtttggaaccacatacttttggaatccactgcaaaattttctactggccaagtttgagtgtgcaagccgggttcccagctgcggctggagtggaggctccaggcccgcagagggcctctgcytgctggaacgttctaacatttacatttttgttataagctatttaaaaccaataagaagacttgatactcagaaaaaaaatcaacaggttttttaatgactaacttttaaaagccccaccaacacgtgatgccatcctaggacctgccggggcgcagccaccccgcccctygaagccatcgcagctcgtccgtggccgagcaaggacagggagggttttctccagagtctattttttcaacgacgaggacccgggcctcctgtgccgccgctggggaagagcagggaggccgccacaagccgcaagccgtgccgagccaggccaccacctccgcctgcctgcccacccggcggctccagagggggctcagtgccgggcccgcccc

SEQ ID NO: 795 - DNA, 698 bp, Canis familiaris
aaagatctggtcaccaggttccggttccctctaaaaatgatggaatgatagagatgtgtacctttcacagagatggtaatggcacctctagattatagatggttttatattttagagtttatataacggggttatattaatatatttaaatactgaggaaatcccttcactctcagacagcaagactcagctgtgtttcaagttgtgttccctagcctgttaaaggcaatggctgaagataagctggcagtgtccactttatctttttggtcttaactatgccmatttaattaaaattctttgcatctaaaatgttgccttttgctaattgaaaggcattttagtgtggtttgtgcgtaatattaaaattttaacacttgggttttatacacctgtaaggtcagacgcttttaaaatttagtgtgaggagatacagcagcagacttggcttgtgaattcttgactaagactacgttattattcaggattgtcttctaaacagctattcagtgacacaaatgtggaattaaccatgtgtgtatgtatgattggtaatggtgcttttgccaactccttagaaaggttaaaatagaggagatccgtcmtcagcacaaatttgtacattatgtgataaggtttaagataattaaaaacaaagtcacagawmatgaaaaaaaaaaaaaaaaaaaaaaaaaaaa

SEQ ID NO: 796 - DNA, 809 bp, Canis familiaris
ccaagcgtcactcctttgccagctggccacccagaccataggcgtgtgtgttttgccaccctgggaccagaggccagagtggtctggtgggagctgtggctcagtgcacatggctttggcccccggttgctgtttgttgcctgacagacatcctacacttgggcatctgtttctgagtaactgatttctctttgagkkgcatttttaatctattgaattggcaagaacacaagggacagaagctgccctttcttggactcttctggagtaagagggatgggcctgtgctttgccctcgtggagggtcacatgcctcattcttgggctgatagaagggctctggagcacgtgtgcagccacgctgagccaggggcctccacagagcaggctctgcagcctgagcaccatctcctgtgtctgctttagtgcctgtggctctcagtgtggtgcttggccaacggcccttatcacccacccacccacaggcacctggcaaggtcagaggctcactgctcagactcccttgggctgagagggggctgaaccmaacctcccagctttaggtcccmaagacagtgtcattcagaatttgagtcactggtttagacagaaaaaaaaaaaaaaaaaaraaaagctagtgctaacccagtctgaaagcagcatgatttggaagaaaactttggattttttgaagtaaattcttaatgtttcatattgttaatatcttgaaaatttgttagatgttgttggaagccttattactattttcagatcctttcaataaacagacttgtttaaaaagttgaaaa

SEQ ID NO: 797 - DNA, 716 bp, Canis familiaris
ttcccgggatcccagatggcgccgaaagaccagaagcctaagaagtcaacctggaagtttaacttggaccttacccatccagtagaagatggaatttttgattctggaaattttgagcmgtttctccgggagaaggttaaagtcacatggaaaaactggaaatctggggaatgttgttcacattgaacgcttcaagaataaaatcacrgtagtttctgagaaaccagttctctaaaaggtatttgaaatatcttacccagaaataccttaagaaaaaccatcttcgtgattggcttcgtgtggttgcatctgaccaagagacttacgaacttcgttatttcccaattagtccakatgaagatgaattctgagttctgaagacttagtgaggctgccccytacagggctttgcttcctaagaaaataaatgtagcatgcmaaagaaagaaacmactagaaatggacttttagtttattggtgaattgaataaaaagcattatactgtgtatcttaagcgcctgcttcttttaagtgtatgctgtttatatgactcctggagtcccgggatcmagtaacccacctctggctcccctcgaggagcctgcttctccctctgcctatggtgtcttctgcctctctgcmtttctcatgaataaataaaatctatttttctgaaaaaaaaaaaaaaaaaaaaaaaaaaaaaaaaaaaaaaaaa

SEQ ID NO: 798 - DNA, 740 bp, Canis familiaris
cagaggagtcaatccactgtgaaaggtctacaaatatccctgcaggggtttcccagggtaggttcaagccctgagtatatacatggctcagtcaagtgggcggcatatcgagctcatcaccagccaacgttcttgctgtgtgtgcctggccgggcccagaggaagtggtcaactcaggatgtgcttctacttcattttggtggagttaggggtggtggagaggtatctgttggaaaagagagcgtttagaaaaccctgttttatggctgaggtatgaatgtgcttggtatcagacccgtagtcgagctgctagtgaccgtcaggacagtatggcgtcataccaaccaatggcagagatgcgagaaaggtagggacagctatatgctacctggaaagtttatatttccttaattcaggttccaaaaaacaactccaaggcacaggcaggatgaaatgcaagagtaagcttttggctactacgttgaactgttggcaaagaacctttcctctgagcccatcctcctcctactcttgacttgccattgaaaactctaacatggaatgtgctgaaaataggccttagataaaattgrtgctccaaggcaagatttccatccagcagaattccccctcctccccttccaaggagctccccaggcagtgctgctacctatcccaaataaaatgataaaagaataaaramararwwwramtttcacaccaaaaaaaaaaaaaaaaaa

SEQ ID NO: 799 - DNA, 736 bp, Canis familiaris
gagttcatgtaccattggcagcattaccttaatcgttttgcatcattcactcgtttagattattaaaagcatgtggtcttttatatatgacttttgctgttgattaagaagcacaatgttaataaatgatgtggtgatcaatgaggttttatcttaaagaatgtaaagactttagtttttggaaagttattttggagaaatgggactcagttggcmatagctaccatgtatttggtcgacgtttttctcaatgatttctttaatttgtatgtttgcaagagtgttcagagtgcccctctgaccgtccttccttctactccagccaactcctcctgctaaactgtattccaatttccaaggttgctaattgactagggcctccttaaacaatacttcacgggaaccmaatgccmaacggaggaaataagtaagtcctcccagtttctccaagataaagcttttttattattgctattaatattaaatataggtctcattcatacagtgtatgagtaggatcatcatttggacaatgtccacaaggaccaatttttaaaacatgttcttgtgttatggctaaatagtctagtaatgttttgtcctttattttcaatatttgataaacatttgatgttgaaaacttagatgatagatgcttgtatatgaacgtgttgtaataaagtgaggttttcttgatawawawwwawwaaaamratcaaaattcaaaaaaaaaaaa

SEQ ID NO: 800 - DNA, 798 bp, Canis familiaris
tgtttggggtggacccctgctggacgaggaccagagttggtgtcaccacgccctttacccttgaggggagccccagacctcctcggcaccctccatcaccggcgctgtgagccatgcgcatgctgcttggctgaccaggccagagctggaaggaggagtggtgaccatggagacctggatgaagggctcactcaaggcctcctgtctgtacagggcagctccccaaagttccaggacggagacctcaccctgtaccagtccaatgccatcctgcgacacctgggccgctcccttgggctctacgggaaggaccagcaggagsygkccttgctggatgtagtgwcacgatggtgtggaggatctccgctgcwatatacgccctcctcatctacactaactacgaggcaggaaaggaggagtatgtgaaggcactaccaggttacctgaagccttttgaaacgctgttgtcccagaatgaggggggccaggccttcatcgtgggcaaccagatctccttcgcggactacaacctgctggacttgctgctgattcaccaggtcctggcccccagctgcctggactccttccccctgctctcggcctatgtggcgcgcctcagcgccagacccaagctcaaggcattcctgtcgtcccccgagcacgtgaaccgccccatcaatggcaacgggaagcagtgagagcttgtggaaccctgggcgggaagctggggggctacctgacttcctttctcccctgacccaataaaattttcaagtgggaarmaaaaaaaaaaaaaaa

SEQ ID NO: 801 - DNA, 1297 bp, Canis familiaris
  misc_feature (52)..(53): n comprises a, c, g, or t, or includes no nucleotide
tcttgcttttgtgttttctctctcttttttgttgttttttttctcttctctnnccgcgttgtagcggagaacgtgcaggagaccgagcgcaagaggtgacacccatgtttctgattcaagtgtttctctttgttcacgcgttctccacgatctctcgttgctctttattgttcgcttttctttgttatccatccgtatgttagagtacccacgtccgatatgcatagttagagccctttccacggctccttaaatgaatgcctaaactcctgttctcaatagtcacctttgcttgattataaagtatatcaggaattttaagattctgagttagcaggttcaaagcattttatgaaacaaccaactagtaatgcagcaacactttagtttagctacaaattctcctgttccaacttaggaaatccaaactgatttgtacatctgactcagagaaagatagtcacctccaacagagaaagcaaaacagcattggttggaaggcgatggctcttcttcccatttccttgtcgtgaaaaatgtattctgtacataatttacaaataaacattttattttaattgttacttattatttagacattttctcgacacttaaatttgtaatattaagaccatgtaagggtaatgtttttagagaaatggaagtttcaataacccacagaacatctgtgatctttctacagcagcttcagttttgtgccaacattccatgtatttgaatatgagtttaaaagatccttattaaataagagcagacttaaagtagctgtttgtacgccttaatgttcattctgattaatcttaaatctctccattcagaaaggaggtactatattatcagaccacggaggcactgctatgaaagataatttactgttctaaaaatatcmatttaaaatwaagracataaaagaaaacataagagaaccacttggactctaattgctttaaactagttttgcagtttgattttatgtcttgcataccttagttacaaatctttcagaaaaatcttgtgtttacctatgagcataatctcattccttggacttacactcttatcaaatggtaatgaattttaaattattttccttcagtcatggagcattttgctttgtagttgaaaaaggtgttgtgggtaggtctttaattttctttaggctgtttcccatctagtgtttgactacagatgttaaatttttctaactgtgaaaaaaaaaaaaaagattttctgtatactgacaccttttattaaacgtggcttgactgctaaaaaa

SEQ ID NO: 802 - DNA, 994 bp, Canis familiaris
  misc_feature (95)..(95): n comprises a, c, g, or t, or includes no nucleotide
  misc_feature (98)..(99): n comprises a, c, g, or t, or includes no nucleotide
tttgtttttctttttttttttttgtcttttttcttttttttttttttttttttttttttttctttcttttctttatttttttctctttttttttnttnnacccccccgcacaacgcaaggagaaggggagaagaaccgaggatcttcccccgcaggtattctctgagtcccctcgtatgtatgggttctgttgtcccctctcttggggtccttctcttccttgggtctccggtgctctcctgtttcgatccacagaaggcaacccgacctggatcttcgttctgccttgtgactatgaagtcacttatccaccgccctctggccagggatgatcccttaatccaagcagcaaccctgggtaatagaaacctatcagcatccctgtgttggctaattaggatatgtaaatagagtcaggattcaaagctgagttgatttgattcccaagccctcggtcttccttccctgttgctggcactcagaagatggacaaatgaggtcagggtgagcttttggatgtataactgagagagtaagatatccmccaagcgacatggttgaaagacmaagaaagtaaccccattagtaaataataagaacatgcatttcttcatggaacctcttctacaactacctgtcacatttgggtaccaccttgcaatgtcccaaaagctatccctgtgcaccgcctcactgattgccccagcmaaaccactggcagagacacagcagggagaatgtgcatccccacttgacmaagaatgtgagatgtggagaggctaaatgacttgcccactggccccttgcaaggctctctcttgcccagggagagagtttgtttacctaccaaccttattccctcaaggatttaaaaatacatcataaaaatagaaaaattgctatgaatataatgttaatcaagataaggggaaataaaattggaatatcttcccttcmaaaaaaaaaaaaaaaaaaaaaaaaaaaaaaaaaaaaa

SEQ ID NO: 803 - DNA, 618 bp, Canis familiaris
caagtgccataaagatgaaaaggaatttcccacaccacacatttgtatgcttctcagcctccagaaggttccagascctgtttcctgagagctcagaactattgcccttgtgaatatcttctttgaagggttagagggaagaagagagagggagggataggcatgaatgttaattgtcctcagtgtttcttgctgttggaatacggagggtccagcgggtcaggacccaaatgaggctgcacagggcccttggataatttgccctcgggtgatcagtctttgcagcggaggacgggttcccaacctccctcacctcctgggatattacatccgcaagttcctcatctccaagtgcctccttgagttccgtacattgggccagcaagtctgctgacctgtgacagcacctccagctctgctgcttcaacaacagtgactggctgtccagtggtgcccagcatgtcaatggaggggacatgctcaaccacagaaactcacgtctgagtggccagttctctatagttctctcctgtctccttttctgtctaaggtggttttcattaaatgcagcacttgattagcaraaaaaaaaaaaaaaaaaaaaaaaaaaaaaaaaaa

SEQ ID NO: 804 - DNA, 626 bp, Canis familiaris
tccggtgacaacccttctgcggagtggggaaggtgactaccgtacaargacacgcttgcctgtcctgtgcttgtgggctgcaartggggtctccmmataagtggttccatgaacgaggacaggaattcttgaggccatagtggatcmacagaagttgactgacttccttttcttgcccttcycsggccccacagcccatgtcgtcctcaagttccacatgacagacacctttgtattttccaggccctgtcactcaggtctttgttggagtgaawgtttgtctggagcmaagggagagccgactggggagggtcctgggtgacctgggtcccgacctctctggtcagcctgtgccacctctggccamccttgggtcagagtggctgcagcagagtaaggctgtctagcacctagcaaggtgcctttgtacctcagatgttttaggtgtgaggtgtttcagtgaacccaagttctgataccttgtttacatgtttgtttttatggcatttctatcaatgtggctttaacccaaaaaataaaatgtccctgccggaagcccttaaararmmaaaaaaaaaaaaaaaaaaaaaaaaaaaaaaaaaaaaaaaaaaaaaaaaaaaaaaaaa

SEQ ID NO: 805 - DNA, 631 bp, Canis familiaris
aagctccagcgttaccacgttcacggggagcccaacaagtgtcctcgctgtaacaagagggtctactttgccgagaaggtgacgtccctgggcaaggactggcaccgcccgtgcctgcgctgtgagcgctgtgggaagacgcttactccaggcgggcacgcggagcacgacggccagccctactgccacaagccctgctacggaatactgtttgggcccaagggagtgaacactggatccgtgggcagctacatctacgacagagaccccgagggcaaagctcagccctcttgtgtcctcatggtctgtgcccctcctctgtgtgtctcgtgtccctgtgtgcccgtggccccggtgggtctcccctggggtggccaccccacactccccctctcgcggccccaggcctgccccacagtattacttctgcttcccttgccagtgacggccacagccacgctcttcacggtgttcctaggggggcaccgagggcgtccctgccaggagccctccgcccacctcccgcaccgccttgcaaacgcttgtctgacacgcggctcacacttaccgctgagatttgctgtcaataaaaggtttgaggatcggggaaaaaaaaaaaaaaaaaaaaaaa

SEQ ID NO: 806 - DNA, 618 bp, Canis familiaris
tgtacccttggagccctgggcagctacatcttcgtcccgagaccccgagggccaagctcagcccttgggcgagggcccgtcctgcctcccgccggcctgctccggagccctgctgctcggccccgggggcagcttgctgcccagcccggcccggcacgtcctgcctgcaggcccagggcccggtgccgctgggtgtcggcctgcctgcccacgcctgttgctctggccgcccctcgccctcttgtgtcctcatggtctgtgcccctcctctgtgtgtctcgtgtccctgtgtgcccgtggccccggtgggtctccctggggtggccaccccacactccccctctcgcggccccaggcctgccccmcmgtattacttctgcttcccttgccmgtgacggccaccagccacgctcttcacggtgttcctaggggggcacccgagggcgtccctgccacggagccctccgcccaccctcccgcacccgccttgcmaacgcttgtctgacmcgcggctcacacttaccgctgagatttgctgtcmataaaaggtttgaggatcgggraaaaaacaaaaaaaaaaaaaaaaaaaaaaaaaaaaaaaaaaacaaaaaaaaaaaa

SEQ ID NO: 807 - DNA, 509 bp, Canis familiaris
gtgtaagccacgccgtcctggtggttgagcatttcacactggtaaaataggctcccttcggactaggctcccttaggatacggacctgtatgtcctttgccwtcgactcccttctccttacaaccctccatttcccacacgctctgccccacttcccatgctcagggtgggtkcggtccgtggacacccmgtwactggtggtgggactctgagaatacagaaccacgtctgctgtctggggcaggagaccacagagcaggatctcggccagcctctgccttaaaggaaatctttattaattatgtatggttcacagatgtccttttaaaaaccccmactttctagagaagcacaatcctcatgagtggcttcagctttgcatcatgagtcttgtattaaaatccmagtggtacmatttgtttacactatgatactttytaaataaactctttttaaaaaaaaaaamaaaaaaaaaaaaaaaaaaaaaaaaawaaaaaaaaaaaaaaaaa

SEQ ID NO: 808 - DNA, 738 bp, Canis familiaris
gctgagtcagattcttccctgggaacaagtgcagtgccctcagactatcgaggtgccttgctcagtatgcctcacccacctctgtgtggcttcaatggcggcaaggactgcaccgcaactgcttgcacctccctccatgcgcccgtgcagaggaattgccccgatgctcaggaacccctgcagatcctgtatatccgcagcatctcccctttccccgagctggagcagttcctccaggataccatcaagaggtataatctgcaggtgttggaggctgagggcgacatgaagcaggccctgagcgaactgcaggcgcggcacccccagctggaggctgtcctgatgggcacgcgccgcacagacccctactcctgcagcctctgccccttcagccccactgaccccggctggcctgccttcatgcgtgtcaacccgctgctggactggacctatagagacatctgggacttcctgcgtcagctgtttgtcccgtactgcatcctatatgaccgaggctacacgtccctggggggccgagagaacacggtgaggaacccagccctgaagtgcctgagcccagggggacagcccacctaccgtcctgcctacctacttgagaacgaagaggaggagcggaactcccgcacatgacctcgcactcatccgctccaggagctgggagggaggccttcctggggtgtaacctgtcaataaaccgtgcctctcctggaaaaaaaa

SEQ ID NO: 809 - DNA, 585 bp, Canis familiaris
acgggattacaatttcacacaggaaacagctatgaccattaggcctatttaggtgacactatagaacaagtttgtaccaaaaagcaggctggtaccggtccggaattcccgggatcgaggacaagatggccatcgacgacaagtacagccggcgggaggaataccgtggttttacccaggacttcaaggagaaggatggctacmaacccgatgtgaagattgagtacgtggatgagacgggccggaagctcactcccaaggaggctttccggcagctgtcccatcgcttccacgggaaaggctcaggcaagatgaagacagagcggcggatgaagaagctagatgaggaggcgctcctgaagaagatgagctccagcgacacaacccctgggcacggtggccttgctccaggagaagcagaaggcccagaagacgccgtacatcgtgctcagtggcagcggcaagagcatgaacgcgaacaccatcaccaaatgaagctgatctcccttctgaccccctccccgactttaatattaaataaagttccctccttattttttcaaaaaaaaaaaaaaaaaaaaaaaa

SEQ ID NO: 810 - DNA, 203 bp, Canis familiaris
acttgctgcacgtgctgcctgtcaacttggaggcactgcctggctggaccctcagtgtggggagtgggccactcactgatggctgcgtgcacctgtgtactggtgtcccaactctgcccccaacccatcttcccagtgtttgtgaaataaacgtggttttcgtctgggtcmaaaaaaaaaaaaaaaaaaaaaaaaaaaaaaaa

SEQ ID NO: 811 - DNA, 825 bp, Canis familiaris
gcacgagaaagtcctcaggaggatgtggctgcagaacctgcttttcttgggcactgtggtctgcagcatctctgcacccacccgctcacccacccttgtcactcggccctctcagcacgtggatgccatccaggaagccctgagccttttgaacaacagtaatgacgtgactgctgtgatgaataaagcagtaaaagtggtctctgaagtgtttgaccctgaggggccaacatgcctggagacccgcctacagctgtacaaggagggcctgcagggcagcctcaccagcctcaagaatcccttaaccatgatggccaatcactataagcagcactgtccccctaccccggaatctccctgtgcaacccagaatattaacttcaaaagtttcaaagagaacctgaaggattttctgtttaacatcccctttgactgctggaaaccagtcaagaagtgaggcagaccagtccagccaggagccagcccagtccagccagaagccagccctgagagcatacctcatacctcacaagtcactgcctttctacccatggattgctgaaactcaggatcttcacctttgagggacaccgggtggaccagggcagtagagggggcatggacttgctctggccatgctgcccggataccagcttggtatggggagcggggaatgttttatactggcagggatcagtaatatttatttatatatttatgtattttaatatttatttatttatttatttaagatcatactctgtatttattcaagacattttactattataataaattattaaaagcctgttaaaaaaaaaaaaa

SEQ ID NO: 812 - DNA, 1410 bp, Canis familiaris
gcgtgtgctcgtccgttgatatctgtgtactccgaaaagggggaatcatccggcaaaaatgttaccttgcccgctgtgtttaaggctcccattcgacccgatatcgtgaactttgttcacaccaacttgcgcaaaaacaacagacagccatatgctgtcagtgaattagcaggtcatcaaaccagtgctgaatcttggggtactggcagagccgtggctcgaattccccgagttcgaggcggtgggactcaccgttctggccagggtgcttttggaaatatgtgtcgtggaggccgcatgtttgcaccaaccaaaacctggcgccgttggcaccgcagagtgaacacaacacaaaagcgatacgccatctgttctgccctggcatgcctcagcttaccagcactggtcatgtctaaaggtcatcgtattgaggaagttcctgaacttcctttggtggttgaagataaagttgaaggctacaagaagaccaaggaggcagttttgcttcttaagaaacttaaagcctggaatgatatcaagaaggtctatgcctctcagcgaatgagagctggcaaaggcaaaatgagaaaccgtcgtcgtatccagcgcaggggaccctgcwtcatctacaatgaagacaacggtatcatcaaggccttcarraaacatcctggrattactttacttaaatgtaaagcaagctgaacattctgaaactkgctcctggtgggcatgtgggacgtytctgcatttgractgwaagtgctttycgcmagttagacgatctgtatgscacttggcgtwrrsstgcctccyycaagagtwactacramcttcccakgcataagatgcktaatacrgacctcagcagaatcttgaraagcccagagatccmaagagccctccgrgcaccacgcaagaagattcatcgtagagtcctgaagaagaatccmctgaagracctaagaatcatgttgaagctaaacccgtatgcmaagaccatgcgccggaacaccattcttcgccaggccmagaatcacmamytccggatggataaggcrgcagcagctttagaagccmaatcggaggagaagggagttccaggcaagaagcccacggtagggaagaaaggaaagaaaactgttggtgtgaaaaagccgaagaaacctgtggtaggaammaaggctgcagctaccmagaaaccagcagctgacmagaaacctgsagaaaagaaacctaccmcggaagagaagaagcccgctgcctaaaaacttatatttgtttattccataaaactcaaatcattttggacagctaattytaaatmaagacctgatcaaagacarwraraaamrwaaaaaaaaaraaaaaaaawaaaaaaaaaaaaaaaaaaaaaaaaaaaaaaaaagg

SEQ ID NO: 813 - DNA, 721 bp, Canis familiaris
tatgtaagcaagctgacatttgaaaactgctcctggtggggcaatgtgggacgtttctgcaatttggggacctgaaaagtgcttttccgccaagttagacgatctgtatggcactwggcgtaaggctgcctccctcaagagtaactacaaccttcccatgcataagatgcktratacagacctcagcagaatcttgaaaagcccagagatccvragagccctccgagcaccacgcaagaagattcatcgtagagtcctgaagaagaatccactgaagaacctaagaatcatgttgaagctraacccgtatgcmaagrccatgcgccggracaccatksttcgccaggccmagaatcacvaactccggatggataaggcrgcagcagctttagaagccmaatcggaggagaagggagttccaggcawgaagcccmcggtagggaagaaaggaaagaaaactgttggtgtgaaaaagccgaagaaacctgtggtaggaaaaaaggctgcagctacchagaaaccagcagctgacaagaaacctgsagaaaagaaacctaccacggaagagaagaagcccgctgcctaaaaacttatatttgtttattccataaaactcwaatcattttggacagctaattttaaataaagacctgatcaaagacagtgaraarmawaaaaaaaaaaaaaaaaaaaaaaaaaaaaaaaaaaaaaaaaaaaaaaa

SEQ ID NO: 814 - DNA, 674 bp, Canis familiaris
tgtttcgaaagccacacctacacattccaggaggcacaggacaaatatcagtgaaataacaggcgactgcagaagtgtggatggatgagttcaagatttcttctatataatttctccaggtgttacaaaggtagattatggagatatatcatcaagacttggtctaagacacaaactacaatgcaaacctttctcttggtacctagagaatatttatcctgattcccagattccacgtcactatttctctttgggagagataagaaatgtggaaacaaatcaatgtctagataacatggctagaaaagagaatgacaaaagttggaatttttaactgtcaccggtatgggaggtaaccaggttttctcttatactgccaacaaagaaattagaacagatgacctttgcttggatgtctccaaacttaatggcccagtcacaatgctcaaatgccaccacctammaggcaatcaactttgggagtatgatccagtgaaattaaccctgcagcatgtgaacagtaatcagtgcctggataaagccacagaggaggatagccaggtgcccagcataagagactgcaatggaagccggtcccagcagtggcttcttcgaaatgtcacccttccagaaatattctgagaccaaatttacaaaaaaaaaaaaaaraaaga

SEQ ID NO: 815 - DNA, 647 bp, Canis familiaris
taccttcttgatgattaatgcagtatcaaatggacaagtccgaggtgatagttacacgtgaaggttgcctgggtcacaacaggtgctcgcatttggctcttcattggtttcatgctggcctttggatctctgattgcatccatgtggattctctttggaggttatgttgctaaagaaaaagccatcgtatacccctggaattgctgtatttttcccaaatgccttcatcttttttggaggactggtttttaagtttggccgcactgaagacttatggcagtgaaaacacctgatttacttctgcacagcagccctgcgtgggtttttactgctcgctcccattttttgtaatgccattttctaaactcatctttgagtgtagtctcagcttcagtttgtgtaatactaaaatcatgagaatttcctatgtaaacaacaacaaaaatctgttgtgtgcatcggattaacttataaaatgttgaaaatatgccacatgagtaatttgtattaagttttatcatggtgtaatttgtaaaaataaattacaagaaaaatattatggatgcatcttatacaaacatttgtcatatccmaggtccaaaactataattaaagtgctctgaagatttaaaaaaaaaaaaaaaaaa

SEQ ID NO: 816 - DNA, 591 bp, Canis familiaris
cctttggatctctgattgcatccatgtggattctctttggagtttatgttgctaaagaaaaagccatcgtataccctggaattgctgtatttttcccaaatgccttcatctgtttttggaggactggtttttaagtttggccgcactgaagacttatggcagtgaaaacacctgatttacttctgcacagcagccctgcgtgggtttttactgctcgctccccattttttgtaatgccattttctaaactcatttttgagtgtagtctcagcttcagtttgtgtaatactaaaatcatgagaatttcctatgtaaacaacaacaaaaatctgttgtgtgcatcggattaacttataaaatgttgaaaatatgccacatgagtaatttgtattaagttttatcatggtgtaatttgtaaaaataaattacmaaaaaatattatggatgcatcttatacaaacactttgtcatatccaaggtccmaaactataattaaagtgctctgaagatttaatgtgtctgtttaaatgtggccttttctgtgtcaaatgttaaatgaaatataaacaccttcttgtttataaaaaaaaa

SEQ ID NO: 817 - DNA, 576 bp, Canis familiaris
cggagctgagcatggggcccgagctgcccaccagcccgctggccatggagtacgtcaacgacttcgacctgctcaagttcgacgygaagaaggagccgctggggcgcgcggagcggccgggccggccctgcacagcgcctgcagcccagccggtctcggtgtcgtccaccccgctcagcacgccgtgcagctcggtgcccatcgtcgcccagcttcagccccaccgwacagaagactcacctggaggacctgtactggatggctgagcaactaccagcagatgaaccccgaggcgctcaacctgacgcccgaggacgcggtggaggcgctcatcgggtcgcacccggtgccgcagccgctgcagagctycgacggcttccgcggcgcgcaccaccaccaccaccaccaccacccgcacccgcaccacgcctacccgggcgccggcgtgccccacgacgagctgggcccgcacgcgcacccgcaccatcaccaccaccaccaagcgtcgccgccgccgtccagcgccgccagccccgcgcagcagctgcccaccagccacccggggcccgggccgca

SEQ ID NO: 818 - DNA, 701 bp, Canis familiaris
  misc_feature (117)..(118): n comprises a, c, g, or t, or includes no nucleotide
ttgtctccccacagcccgaggctatcccaatcggacctcgatttctggttctcttctgccccacgccctcccttacaaggtttggagtcacaagccatctgttggcgagtctgggtnncgggtgggccatttctgagcctcacccatatcccccgcccccaacgtcaccagacctgtacaaggcccagttcactcctktattttctcagactttcctkttacccatactkttccttgtccccractaccctgctctggtctgtattcttgggtccaggcagccccccaagagcatagaccaggactcaccagaccctcagcccctgggggcttctagggagggcactgccctcccccacacctctgctgttggccccccacaatgtccagtggtggctggagtgaccctggggctctctgttcagggctgggcttggtgttgcccttcctccctctctgtccctgctttctttctctatgggacagagaagaggaaggtgaagggggtggggataaggatggatggtagtcttagggctacgaaatccttggtttgggggagagataaacttggaagagaggcttgcttgaagtgagaggggggtagacagctctgcacattcaaaaggctaaattggtggcagatccctttctcctttgtaccaaataaaagactaaaccmaaaaaaaaaaaaaaaaaaa

SEQ ID NO: 819 - DNA, 514 bp, Canis familiaris
tgtctcagactttcggttgtttaccccatacttgttccgtggtccccgacttccctgctctggtccgtgtattctttgggtccagcagcccccctagagcatagaccaggactcaccagaccctcagccctgggggcttctagggagggcactgccctcccccacacctctgctgttggccccccacaatgtccagtggtggctggagtgaccctggggctctctgttcagggctgggcttggtgttgcccttcctccctctctgtccctgctttctttctctatgggacagagaagaaggaaaatggtgaaagggggtggggataaggatggatggtagtcttagggckacgaaatccttggtttgggggagagataaacttggaagagaggtcttttgcttgaagtgagaggggggtagacagctgctgcacattcaaaaggctaaattggtggcagatccccttttctcctttgtaccaataaagactaaccaagcctcaaaaaaaaaaaa

SEQ ID NO: 820 - DNA, 549 bp, Canis familiaris
tattcatgatacagtcaaagctatgaatgtgagctataactggttagtgtgtatccaaccattagttaaatatctagatagtcccatagtgagtaaagtgtaatttgtcacactgcttcctattcctcatgtccctccagggaaatctattgcttaatgttctgcctttttcctctcacatatgcacttttggtcctttttattgttgttattttgtaagtagtctggaaaatagagaataccacccctacaaacctgtatttttagtacaatgaccatgtgaatttgcctttgtccaacatttcatccgtgtgtgtgtgcgtgtgtgtgtgtgtgtgtgtgtgaagccgtccgttcatctttttatatggggtggttgtcttttcttggtctgtttggtcctctccctcgtgggcttgtgcttgggatcmactctttctggcctgttaatgattytcgacatttgacttggaccacmagtgaatctttctcctggtgactccaaataataaaagtataatttttaaaaaaaaaaaaaaaaaaaaaaaa

SEQ ID NO: 821 - DNA, 462 bp, Canis familiaris
tcccccaagcaacatccccaagcccagggttccaagccccccagtcttaccaaggttctgggaaaacttttttccggagtctgtgtgggaccttatgcttgctgggcccaagcagtcctgttcagtgctgacctgcgcctaccccaccgagctcaggagccatcagcaaagcgcaggagatctacagacctagaaagctaggtgggggacactggacaaagggatttccccaagtacctttcccmacttccctctgccatccagcctcttgctgggaagggagcttcctgcaactacctcagaggccgggtccactcaaatgaagcagtttgcacagcaatgtggggtgaggattatctggggagacggtgctacctatgtttttatctcttccctttattacaagaaagaacaataaaatagaaacatttgtatggaaaaaaaaaaaaacaacaaaaaaaa

SEQ ID NO: 822 - DNA, 401 bp, Canis familiaris
cgtccccctccccctcccccgccgccacccccacccccacccccagcctggggccctggcactttgcgcccgaggccaccgaggccaccgaggccaccccggcgggctgggaggagtcggagacggagacctacacggaggtggtgacggagtttgggacagaaayggggccggaggaggaggaggaagaggacgaggagggagtggtcatgggcccggatttccctttcaccacggtcgagacctacacagtgaactttggggacttctgagcacacgtccgcccacccccgcgccagctcagtgccctctgtgcggccgggccaggaggggcgcccgggagccagggcgtgcaggcgagctctgcgggcgccgcgggcctgggcctgagcagcggacag

SEQ ID NO: 823 - DNA, 636 bp, Canis familiaris
tctccgagctggattcagagtctgagtccggaggctcagtgcgaaggaggcggtggcctgagcctttcttgggcttctttctccgactgtccccagccaagccgatcaatgcattgagctctttgcgcttcttcatctttttgtgtggggtgagcggagcacccactgctgagctgccaggttcgtacccacgcccattctctcgctgccttggagctgccttccagggtggggaatctgggccagagcccctgggtcactcccacccaggggtgggactgacccgatccgctgggggctagagatcggagctcagaggaaagtggaactcggaggggtgaggaaagtcacatagagacggccagggagctggtgatcaaaacgggtaaggctcggggcatggagtcccaggtaagggagtggaaaagggagcaaccttcacctcccggtaagtaggtagtatttctaagtgcgctcccggagctggggaaagactcacagatgggtgttttgcccttccggggcaggactcccaagggagagcgaaaagaaacttgttcccgaatgggagaggcggcggaggtgcagagccagccggggggaaggcgccagtcgctcccagctggaggcggcagc

SEQ ID NO: 824 - DNA, 586 bp, Canis familiaris
  misc_feature (567)..(567): n comprises a, c, g, or t, or includes no nucleotide
aaggaaaccaaaagcaaagaacgtcagattactgaggaggactttagagggcmaaacagaggaagaaatagaaatgatgaagttaatgggatttgcctcttttgactccacmaaagggaaaaaggtggatggctctgtaaatgcctatgccataaatgtgtctcagaagaggaagtacaggcagtacatgaatcgaaaaggcggattcaacagacctttggatttcattgcatgagaattgaaatgatttttctttcccctaccttgttcagaagagtggattttgtatttcatatttaatatgcataaaaaacaggatcacagtcctccctccttgtaaagtaagaaaattttatttatgatgtgtgcagttcacttaccttgactcaaaaaaaagaagattaaatattgcatttttttcttttaggaaatatcatttggggcaatcgtcagccccattttttgttcttactgttgtggaagctgtatatgttttcttcttggatgcttgttaggactttttaaaacataaaagtaatttggttgtaagtttctcaaataaagcantatttctacccttaaaaaa

SEQ ID NO: 825 - DNA, 1320 bp, Canis familiaris
atgcctctcaacgtcagcttcgccaataggaactatgacctcgactacgactcggtgcagccgtatttctactgcgacgaggaggagaacttctaccagcagcagcagcagagcgagctgcagccgccggcgcccagcgaggatatctggaagaaattcgagctgctgcccaccccgccgctgtccccgagccgccgctccgggctctgctcgccctcctacgtcgcagtcgcgtccttctccccccggggggacgatgacggcggcggcggcagcttctccaccgccgaccagttggagatggtgaccgagctgctgggaggagacatggtgaaccagagcttcatctgcgacccggacgacgagaccttcatcaaaaacatcatcatccaggactgcatgtggagcggcttctcggccgccgccaagctcgtctcggagaagctggcctcctaccaggctgcgcgcaaagacagcggcagcccgagccccgctcgcgggcccggcggctgctccacctccagcctgtacctgcaggacctgagcgccgccgcctccgagtgcatcgacccctccgtggtcttcccctacccgctcaatgacagcagctcgcccaagccctgcgcgtcccccgactcggccgccttctccccgtcctcggactctctgctctcctcggccgagtcctccccccgggccagccccgagcccctggcgctgcacgaggagacaccgcccaccaccagcagcgactcggaggaagaacaagaggacgaagaagaaattgatgttgtttctgtggaaaaaaggcaggcccctgccrmamgrkccgaatcggggtccccctctgctggaggccacagcaaacctcctcacagcccrctggtccttaagagatgccatgtgtccacccatcagcacaactacgcggcacccccctccaccaggaaggactatcccgccgccaagagggcgaggttggacagtggtagagtcctgaaacagatcagcaacaaccgcaaatgtgccagccccaggtcttcggacacggaggagaatgacaagaggcgaacacacaacgtcttggagcgccagaggaggaacgagctgaaacggagcttctttgccctgcgtgatcagatcccggagttggaaaacaatgaaaaggcccccaaggtagtgatccttaaaaaagccaccgcgtacatcctgtccgtccaagccgaggagcaaaagctcctttccgaaaaggacttgttgcggaagcggcgagaacagttgaaacacaaactggaacagctaaggaactctggtgcctaa

SEQ ID NO: 826 - DNA, 253 bp, Canis familiaris
ggagcaaatgtaaaagaaagtaggaaggggagaggagagaagacaggggaaggagaggcaaggaggagagagaagcaagcgagcagaaagaggtgagggggtaggaagaaggggaggaggaaaccactggccctgggtgtcagcctttcccgggacttgagggcagacacaaatgtaaataaaaagttgacttgttgttactgaaaaaaaaaaaaaaaaaaaaaaaaaaaaaaaaaaaaaaaaaaaaaaaaaa

SEQ ID NO: 827 - DNA, 632 bp, Canis familiaris
cccmarccctccaggctggcatctgtgtggatcaactgctatgatgtatttggggcccagtcaccattcggtggctacaagatgtctgggagtggccgggagctgggagagtatgggttgcaggcatacacggaagtgaaaactgtcacgatcmaagtgcctcagaagaactcctaargaactccmccmgctccctcactcatccagcgactgaggtcaaggacatcagcagccaaaccmagaaaaatgacgcttgcacacgaaaagtctcmagagagaaatttgctcatagaatctcttgatcmagaaagtcacagattttgaattggtaaatgggagtgggtgcacgggcmaagagtacagggagagccttttaccctgcamcmgtactactgctaggtttcaggctgatttttcmaaactagattcaaatgtcttatcttgtccmtctggtatccttctgtaacttgcccttgtgggggaacmaaaagctattgtttatccttgtactaacmagttggggcmmcaactagtgccttcctttgtattctggactaaaactccattwaaaacmatgctgctgttcmaaaaaaaaaaaaaaaaaaaaaaaaaaaaaaaaaaaaaaaaaaaaa

SEQ ID NO: 828 - DNA, 2777 bp, Canis familiaris
gtccaaagttcagataggagcatgggacatacactgtactctagagacagcgcatccgggttccgaacttttctggatgatgcgtgaaaagccaatccagaagactctggaggcaagggcagtcatgacaagcacgcccatgtagttgggaaacagtgctctagagccagtcgaaagtgcatcataaaggaaagcaaaaagagaagtagaaagtgagggagacgttcagaaatgaaaacgcgtctgttgcctacttaagccccacacacgagggaagatgctcagagaagctgaagccgcggttcccacacttgcccagcgcagcaggcccacagcccctgcaggatccccgatggccctgccctgctccttctcggtggccctggtgctgctcagctgccactccctgtgctgtctggcttgccacctgcccgacacccacrgcctgcgcaactggagggtcctgacgctcctgggacagatgaggagactctccgccrgctcttgtgaccactacaccamtgactttgccttccccaaggarctgtttgatggccagcggctccaggaggcgcargccctctctgtggtccacgtgatgacccagaaggtcttccacctcttctgcmcgracacgtcctctgctccttggaacatgacyctcctggaggaaytgtgctcggggctctctgagcagctggatgacctggakgcctgtcccctgcaggaggcggggctggccgagacccccctcatgcatgargactccaccctgaggacctacttccaaaggatctccctctacctgcaagacaggaaccacagcccgtgtgcctgggagatggtccgagcagaaatcgggagatccttcttctcctygacmatcttgcaagaaagartmaggaggaggaaatgagacccgcccrggtccccaaggaaatgattctgtctgacaaataatatcacacttgccctgttctgctgtgtcagagacgctcatttctgctgtaacagtgacataagcagaatcaatttgtcaataattacctgagccaaaggcagtcggttaaccaactgagccaccctggcacccttgaatattctgtcttctgtaatattaagcaacatgtcaacgctataagtgctagtcactttcagatgaccatgccggtgtctatttatctatttaaatatttattctatgaaatatttataaggtttatatttcttcacacactattatgtgtacctttatgtggcagcaatataataaaatatatattctttatttaatcagtttttcatgtctttattgaacttttgctgtggaaagtatttttgaaagactaccatgaattttgcaacttgtagaaaattagccggcagaatgcattgacccattatattacattaacatcaagtaataagtgacttcctctaaaaaaaattgtcaattgcctttagaatataggccatgacacatacagttcctgatgtccatatctctaattttatagggatagaaacctaaaaatgatcatcatatttagtgttataatgaaaaagggagaaaagtgaattctctctcacctgattctagattggagaatctcaagaagtacacataaaagcggtggacccctcctgaggtgaccggtaaacatggaggcacaaacgcccagtgtcaggggagcggtaagcttgcaataggcaagaaacaccatggcttaagtctgtatctagcatggaaaaggccagaaacagaggtggccatgtggggagacggtgtagtgtgagaagaagacatgaatgtgattctgaggatctccaaccaccaaacggagggggggaaagagccacaaggagacagtggaatcatggccatagagtacatggataacaagacaggatggtgatgagtgtatttaaagaaatgtgtttaggagatcacagtggattcatggaagttgtaggttgaaactgtccactatgtcagaataattgaagccactgttgaccttcccgagagtaggtttggtggatgaataagcagaaatcacattagagtagttgggagtataaataagagaaattagtgcctccgaggtggagaagaatgtattgtgggatctggtaataatggggttagattttctgtgcctacttttgcccttttatgccatatgtcttttctgagtgaattcatggaattgatgttctggtaaatcacctcaatgtgtttaatattgtatttttttagaatcatgacttaatgacgtacaatggttatcctgtcttggttctcattaccttttatatcaacaagctgctcatctttaagaactcactaggcagaaatagataactcaatccttcatcaaatcatctattactactcataaaataatgttcctggaattattggctttattaattaggttatttacccattactgtgaccctggtttactacaagggcttaatatcacacttctttttctagtgagtttggtaggataagaattcttttatgttactcactggtgatgtttcctaattttatgaatatcacagtatttgttttaaagtttttatttatttgagagcagtagagatcacagaaagagaaggaggggagaagaagtctcatcactgagtggagagcctgatgtagggctccaactcaggactctgagataattacctgagccaaaggcagtcacttaaccaactgagccacccaggtgcccccgaatatcataatctttggtggatcc

SEQ ID NO: 829 - DNA, 1952 bp, Canis familiaris
aagcttgaccctggagaggcctaacgaaaccttcttccttagtatttaatgtctctaattgggttttcttgggtaccacacaagcattgacattgaatatttggaagacacaaattgcctgcaagatcagtgtgacaagcctaggaatagcaggaatactttaggcttgcaagaatttctttccatcatttcttagacctcaaaatcttcctagagaggtgatctttgcttacttttgagctgccattggctgtcttatagatgatacttgtctgagccttgatgtcatgctggctttggcaattaaaaacaaatagatgatattttatgatttaattctattaaacttattcaacatatcagtaattatataatgctaaacagaaaaaatattctgacattacatacaagagtatctagcagcaggtgtagtatatagaattaaacagtttaaattattaaaattaatacaattaataaaagttaaaaattattttgtaatatgaggcaacaatacacttcaattatcctaaggaatgttaattctttaatttttcactagcttttagcaattgggaataattttaaatgtttaaatacactgaaatcattattatgtctttttagaaattgttaatttgcatatgcaccttatctatttcaatttgtatgagtaaagaaatgagaagtcactcaccaaatttagtttacgtacttaaacatcaatagctgtaaaatttaacttttagataaaaatctttagtcatccgcaaacctgtattaggtaaactttacactttcttttttacatattaaccacaggtataaatacaacacataattatatgtactatgtatccatgctattaagtattctaggaatgttcactaaaaaattccagaaagggttgcctgagtagctcagtggttgagcatctatctttggctcagggcaagatcccaggtcctgggtccgagtcccatttgggctccctacacggagccttcttctccctctgcctatgtctgtgtctctgtttctgtgtgtctctcctgaataaataaatgaaaacttttaaaaaaataaatttttaaaaaccacccaaaaacactctggaagcaagaggcatgaaaaaaaaaataaatggaaggcaacagtactctaaacccatggagaaagtgcataagggaaagcaaaaagagaagagaaagtgagggagacattcagaaatggaaaacgcgtctgttgcctacttaagccccacacacgagggaagatgctcagagaagctgaagccgcggttcccacacttgcccagcgcagccaggcccacagcccctgcaggatccccgatggccctgccctgctccttctcggtggccctggtgctgctcagctgccactccctgtgctgtctggcttgccacctgcccgacacccacggcctgcgcaactggagggtcctgacgctcctgggacagatgaggagactctccgccggctcttgtgaccactacaccaatgactttgccttccccaaggagctgtttgatggccagcggctccaggaggcgcaggccctctctgtggtccacgtgatgacccagaaggtcttccacctcttctgcccggacacgtcctctgctccttggaacatgactctcctggaggaactgtgctcggggctctctgagcagctggatgacctggaggcctgtcccctgcaggaggcggggctggccgagacccccctcatgcatgaggactccaccctgaggacctacttccaaaggatctccctctacctgcaagacaggaaccacagcccgtgtgcctgggagatggtccgagcagaaatcgggagatccttcttctcctcgacaatcttgcaagaaagaatcaggaggaggaaatgagacccgcccggrtccgtcgacctgcagccaagctt

SEQ ID NO: 830 - DNA, 631 bp, Canis familiaris
gctcgcccttcttcgagctagcctggcagctgcgcatgaacttcccgtacttctacgtcgcaggctcggtgatcctcaacatccgcttgcaggtacacatttagcgccgcgcccaggaggccggcgtcccggcccggacatggccgcctcccgcgaggcccggcggcgaagcggcgcggcgagcgcgagctctggagtctcgcgagagggcgtgagcgctctctgcggctgcgctctgggtcctcgcggagcttcgggccggcggcggaaggcggggagcggctggcgggggcgccgcggtcggttttccggggaccgcgaagcgcttcacgcgttatttaagaagctttgcacgccttcacagccaaaaccgaggcgagccctgacgcgttaggaaaaaggaaggctaccgaaaaagttttccaggaaaataaatgtttcgtgtacagcaagctcacggtccgaaataaaataggaaaacgtaaattgcgggaagattggattggattgtaagcaggaccttgaattaataagaagctgaaggtcttaaagatacacgtggaaggcaaaaatatttcctcagtccagcaagagaaaaccgggacaatccaattttcagtgggaaaaaaaa

SEQ ID NO: 831 - DNA, 620 bp, Canis familiaris
gagaatctccggaccagggctccaagtggtcccaaaggagaaaaaggagascagggrmcccaagggtgacagagggatggatggagccagcattgtggggccccccggacccagggggccaccaggtcgcatcgaagtcctgtctagtgctttgaccamcatcacccatggattcatgaatctctcggacatccctgagctcattgggcctccgggtccggagggcatacccgggctgccaggatttccaggccctcgaggaccaaagggtgacactggcgtgcctggatttccaggactaaaaggagaacagggmgagaagggagagccaggtgccatcctgaccggagatattcctctggaacggctgcaggggaaaaagggtgaacctggagtgcacggagccccgggmccaatggggcccaaaggaccgccaggacacaaaggagagtttggccttcctggacgacctggtcgcccgggactcaatggcctcaagggcgccaaaggagaccraggggtcatgatgccgggcccacctggcttacctggtcctccgggtccccctgggcctcctggagctgtgattaacatcaaaggagctgtcttccccataccag

SEQ ID NO: 832 - DNA, 617 bp, Canis familiaris
ggcgcacatcgctgcgcgcgccgcccctgggcgcgcctcccgctcaccgtgcgctggctgcgcgccgacttccgtcgcgagctgtgcccgccgccgccgccacacatgccgctggccttcgggcctccgccgccccgcgcccgggagcgccgcgacggggccctcggctgacccggagcccgagcgcgaccgagacgccgacgcctcctgcgccctgtgcgcgcgctccttccaggatgaagagggccccctgtgctgcccccactctggctgccgcctaagggcccacatgatctgcctagctgaggagttcctgcaagaggagccagggcagcttctgcccctagagggccaatgccstggctgtaagaactcagtgctgtggggagacctgatctggctgtgccgaatgggcaacgaggaggaagaggaggacttggagttagaagaggaacactggacggacatgctggagacctgaccctgactcacctcagcagccccagccctctgcccactccgtctgtgccatccaccccccgcaggggtctaggcaatttttacttgattacaataaagagtctgagttaaaaaaaaaaaaaaaaaaaaaaaaaaaa

SEQ ID NO: 833 - DNA, 709 bp, Canis familiaris
  misc_feature (283)..(283): n comprises a, c, g, or t, or includes no nucleotide
  misc_feature (426)..(426): n comprises a, c, g, or t, or includes no nucleotide
ggtgatgcccccatgtagattggaaatcgtcccaaactaattgacgatcacagaagagattaaagaggactgtgatgaaatgccatcagaatgtatatctagaagggagttggaaaaaggcagaatttctagagaagaaatggaaacactgtcagttttcagaagttatgaacctggtgaaccaaactgtagagtttatgtaaagaatttagctaaacatgttcaagaaaaggaccttaaatttatttttgggagatatgttgacttttcatcagaaacacancggataatgtttgatatacgtttgatgaaagaaggtcgcatgaaaggacaagctttcattggacttccaaatgaaaaagcagcagcaaaagccttaaaggaagctaatggatatgttctttttggaaaacctatggtggttcnattcgctcgatctgctagacccaaacaagattctaaagaaggaaaaaggaagtgttaaaaattagtaaaggttccttttgattccgtgtcttccaactgctttccaaatttaaggagaagaaaatgacacctggtctatggaactgtgcgtaacagcttttaaagtatatttaaaagttaaaatctatatgcattaaatcagtttattggagatatattacatgtattttaatcatcttcctcatatataataaattattttctttsccaataaaaaaaaaaa

SEQ ID NO: 834 - DNA, 230 bp, Canis familiaris
ccttttttttttttcctaatgggggtttctcttcctgtccggtgtccggactttcctaattggagtttgaggcccctaagctggcatcaaccccmacccatgttctctattccttccctccctgtgccccctccgccttttgtacgcccatttctcagaaataaagatcttttgtccctttttttaaaaaaaaaaaaaaaaaaaaaaaaaaaaaaaaarcaaaaaaaaaa

SEQ ID NO: 835 - DNA, 302 bp, Canis familiaris
atggccctgctcgtgcggggacattacggacacactatgaagcggcagtgacgtctacaggagttcgagtcctggagcttccgctcaactacttgactcacagacaaagcaccatgggaatgaaaacattgttactatctggagactattttaagagggattatatcttatctatatttctattacgcctatagatattatatgtgtatataatacacatctgtgtatcccaattcaaataacctggatttaagaagtaaagtttattgcaactaaaaaaatagcatcacgtaaaaaaaaaa

SEQ ID NO: 836 - DNA, 724 bp, Canis familiaris
  misc_feature (444)..(444): n comprises a, c, g, or t, or includes no nucleotide
gaacccgcccagcgttggtctgccctgcgttttgtctacacgggtccactagccatcccacytgggccacwttggggcytattgcaacgktratcaccacctkkacaaatttggggtgtgctccttagagaaggctcasccagcacaaatcagccatgtgctagatgctgaacaagtgcctgcaggtccccagcttccttckttcctggtggcctcaggaaattcacccgagtggcacttgagagagcagggtcaggagctgaatgtccacagcgtgagcagcaggaccagcccgcagctacaaccagcggcccccagcmagcgtcccctggctcgatggagccmtttggaggacggtccgagggctgtgtgggccmagttgcgatgctatttcagctccmacttttggttggaaaaacmatcttcacggccccmaatcccccnacacacgtcatgtaaaatgatctctgtgcgtctgcatgaagatattttatgaggcttcttacttatttaaactgtacggaagtaaaacccgaaacttgggagccmcagaaccagcttaagtgtgtgtcatcattgtttaagaaacagttaagatcctaaatttattggataaccctttatatttctgaacttcgaatttaatcattttttttcttagattcaaataaaatatgctatchaaaaaaaaaaaaaaaaaaaaaaaaaaaaaaaaaaaaaaaaa

SEQ ID NO: 837 - DNA, 570 bp, Canis familiaris
tgccctgcaaggtcccccagcttccttctttcctggtggccctcagggaaattcaaccgagtggcamcttgagaggagcaggggtcagggagctgaatgtccacaagcgtgagcagcaggaccagccccgccagctacaaccagcggcccccccagccaagcgtcccctggctcgatggagccatttggaggacggtccgaggggctgtgtgggccaagtttgcgatgctatttcagctccaacttttggttggaaaaacmatcttcacggccccaaatcccccracacacgtcatgtaaaatgatctctgtgcgtctgcatgaagatattttatgaggcttcttacttatttaaactgtacggaagtaaaacccgaaacttgggagccacagaaccagcttaagtgtgtgtcatcattgtttaagaaacagttaagatcctaaactttattggataaccctttatattctctgaacgttcgaatcttaatcacttttttttcttagattcaaataamatatgctatcwaaaraamagaaaccaaccgaataagagacatcaaataaaag

SEQ ID NO: 838 - DNA, 605 bp, Canis familiaris
  misc_feature (163)..(163): n comprises a, c, g, or t, or includes no nucleotide
aattggcgatccttgtcaaagagagggaccactgtagaaagagctgaaagaaagccacttctgttcccaactcatttacccatatcttatgtaacatgaactctgtcttttttggtccttttcttacagatggacctcttttgagaagaattattatattccnaactttttagccctcaggttactaagataaatatatgtatatctaacctttattatttcatatatctttctggataatacattcaggtggtgctgggtgattattataatctgaacctaggtgtatcctttggtcttccatgatcatgttgaggtggactacttagcctggtaaaaagccagattatcacataacttgatcctggcctttacattgagctcttgagagtggatacactcttgttaaagtctaaccccagtataggggaatataaattccctgctctccagattccccatttttatcgttaagaagatcagagataataatgtcaacctgggattagagagagcacatgaactgagccctgcagctccctaggtacagagaacccaggccttatgttaaagtcatgcacttagaaagcaacctacaaaaaaaa

SEQ ID NO: 839 - DNA, 649 bp, Canis familiaris
aagctgctggtcaccatccatgacccgagagattgcccaaggttccagagcgatgcgatccaggcccggctatgaaatggctttcccaccctctgtgacagagagcccattctccacaccacttccgtggacttcaccttcaacaagttcgaccaatcctaccaatgggcacagtggactggagagccccttctcctctgaggccacaggggctgacgacaagtcagagaccacgtacgcctgggcacggccactcgactagatcgtggcccccgagagggacaagtgcacacgccttcctgtgaccctgggggccaggagcccactccctgcaccgggagccagcccgtgtgccacctagctgctgggccacagccacgccaggcggacacccctccgagcccgggaaaaggcccgggaccgcgccgctctccgctttccgcaccacgtccagcgcgtcgtctccgggcaccgctgggagcccaggccgcctctcccttccaggagggctgagcctccaggctgcccagaggagaaggctcttggggagcgtcggagtgtttaaaaccaacacacgctctggcttttgtgttgatcatttttatatgaaataaaaagatcgtgcattwaaaaaaaaaaaaaaaaaaaa

SEQ ID NO: 840 - DNA, 575 bp, Canis familiaris
ccagaaccggtgcccggcgtccggaactacgggttttgggataaagacaagagcagatacgatgttttctgtttttacatctaacttcaatggccggttttactaccttatccaccccaccaagctgacctatgatgaagcagtgcaggcttgtctcaacgatggtgctcagatcgccaaagtgggccagatattcgctgcctggaaacttctgggatatgaccgctgcgatgcgggctggttggcagatggcagcgtccgctaccccatcttctaggccaagaaggcgctgcagtcctacagaggctgcagtgcgcttcgtgggtttcccagataaaaagcataagctgtatggtgtctactgcttcagaggcatataactgaggcgtgcccctagaggcacatcagttttaaagtcattaagaacatgwraaaggttgttgttttttttttttcaatatgaactcatgcaagttacccaaactgtgataacccttttttacttactgtaaagagtcattttcataaagacccaattcattgaaaaaaaaaaaaaaaaaaaaaaaaaaaaaaaa

SEQ ID NO: 841 - DNA, 632 bp, Canis familiaris
cccccatcgcccagcccctgtgagtccctgtcgggggccacgataccggtgcccggcgtccggactaccggttttggataagtcccagagccgattcgatgttttctgttttacatgtgaacttccatggccggttttactaccttatccccccccccacagctgacctatgatgaagccgtgtcaggcttgtctcaacgatggtgctcagatcgcccaagtgggcccagatattcgctgcctggaaacttctgggatatgaccgctgcgatgcgggctggttggccagatggcagcgtccgctaccccatctctaggcccagaaggcgctgcagtcctacacgaggctgcagtgcgcttcgtgggtttcccagataaaaagcataagctgtatggtgtctactgcttcagagcatataactgagcgtgcccctagagcacatcagttttaaagtcattaagaacatgtgaaaggttgttgttttttttttttcmatatgaactcatgcmagttaccmaaactgtgataacccttttttacttactgtaaagagtcattttcataaagaccmattcattgwaaaaaaaaaaaaaaaaaaaaaaaaaaaaaaaaaaaaaaaaaaaaaaaaaaa

SEQ ID NO: 842 - DNA, 476 bp, Canis familiaris
ctcggccctcctgcccgcccccttccccccctagctccccacagctggtggcctgaattctagtctgatggggcacaggctctcttccatcctgcactttaggtcagccccttcttaggcctcagggctttattttagtccccttttcagggatgagcaggtgggggtggggagggggggatcttggtgctacagccctgcttctcctcctgccctcccacctttctgtggcttcaccacatcctagtgtttgaccccatggaagaccccacggaaaagatggggaagggtgacctaggcgggacgacgcctcctccagggtgcctgcccggatgcccacacccaccatcaccacccccccccccacctccccatgcccgggaggggcctgtgaaccgaacagcgaacatagttcccacagagcaaataaagccaaggcttctttccmaaaaaaaaaaaaaaaaaaaaaaaaaaaa

SEQ ID NO: 843 - DNA, 684 bp, Canis familiaris
ccccckgtggtgracacgscaggaccttcggccagaagaaggaccgctwhsgagatcractcgttggtacggtamcagkgcactgagggtttcgtccarcggcatgtgccgaccatccggkgccagcctakcggccactgggraaaacctcgcatcacctgcacagacccctccacttacaagcgcagactacagaagcggagctcacgggccccacggaggagccgccccagcacagcccmctgagaggagcttccaggacgcacccaggatgctgagcccaggagccccgccaggctgacatcccacatggatggtgtcctcttcttgccgctttctgtcatataaggaattccattaaagaaggaaaaawaaacmaatcccacattgtgtatgcacccacctctccccaccccacccccmaatcgccmaaaccgcatctgatttttccctcctcgatgccmaagcaaagcaaacctattgtaagccatggactgagtttagagacatttctccaatctctcgttgtgcctttccagggaccagagcagggacagggkgagaaggggaggggttaagttaaataaagaagattattttttgtttcctgacyttawmmaaaaaaaaaaaaaaaaaaaaaaaaraaaaaaaaaaaaaaaaaaaaaaaaaaaaaaaaaaaaaaaa

SEQ ID NO: 844 - DNA, 7160 bp, Canis familiaris
atgaccactttactctgggtttttgtgactctgagggtcatcacagcagccagctcagaagaaacttcagaccatgacaactcactgagtgtcagcatccccgaaccgtccccaatgcgggtcctcctggggagctccctcaccatcccctgctacttcatcgaccccatgcaccctgtgaccaccgccccctccaccgcccccctcgccccaagaatcaagtggagccgcattaccaaggagaaggaggtggtgctgctggtagccactgaagggcaggtgaggatcaacagtgcttaccaagacaaagtctcgctacccaactacccggccatccccagcgatgccaccttggaaatccagaacctgcgctccaacgactctgggatctatcgctgtgaggttatgcacggcattgaagacagtgaggctaccctggaggtcgtggtgaaaggcattgtgttccattacagagccatctccacgcgctacacgctggactttgacagggcacagcgtgcctgcctgcagaacagtgccatcattgctacacccgaacagctgcaggccgcctatgaggacggctttcaccagtgtgacgccggctggctggccgaccagactgtcaggtaccccatccacaccccgagggaaggctgctatggagacaaggatgagttcccaggcgtgaggacctatggcatccgagataccaatgagacttatgatgtgtactgcttcgctgaggagatggagggtgaggtcttgtatgcgacatctccggagaagttcaccttccaagaggcagccaacgagtgccggcggctgggcgcccggctggccaccacgggccagctctacctggcctggcagggcggcatggacatgtgcagtgccggctggctggctgaccgcagtgtgcgctaccccatctccaaggcccggcccaactgcggaggcaacctcctaggcgtgcggaccgtctacctgcacgccaaccagacaggctacccggacccctcatcccgctatgacgccatctgctacacaggtgaagactttgtggacatcccagaaaacttctttggggtgggtggtgaggaggacatcaccatccagacagtgacctggcctgatgtggagctgcccctgccccgaaacattactgagggtgaagcccgaggcaacgtgatcctcactgtgaaacccatctttgacctctctcccactgccccggagcctgaggagcctttcacatttgtcccggagcccgagaagcccttcactttcgccaccgatgtaggggtcactgctttccctgaggccgagaacagaactggagaggccaccaggccctggggtgttcccgaggagtccacacctggcccagccttcaccgccttcaccagtgaggaccatgtcgtgcaggtgactgcagtcccaggtgcggccgaggtgcccgggcagccacgattgccagggggggttgtgttccactaccgcccaggctccgcccgctactcactgacctttgaggaggctcagcaggcctgcctacgcactggggctgtcatcgcctctcctgagcagctccaggctgcctatgaagctggctatgaacaatgtgatgctggttggctgcaggaccagactgtcagataccccattgtgagcccacggaccccgtgtgtgggtgacaaggacagcagcccgggggtcaggacctatggtgtgcggccaccatcagaaacctacgatgtctactgctatgtggacaagcttgagggggaggtgttcttcatcacacgcctggagcagttcaccttccaggaagccctggcattctgcgaatctcataacgccaccctggcctccactggccagctctatgctgcctggaggcaaggcctggacaagtgctatgccggttggctatcagatggcagcctccgttaccccattgtgaccccgaggccctcctgcggtggagacaagccaggcgtgagaactgtctacctctaccccaaccagacaggtctcccagacccgctgtcccggcaccatgtcttctgcttccgaggtgtctcaggagtaccctctccaggagaagaggaaggtggcacacccaccccctctgtagtggaggactggatccctacccaggtggggcctgttgtgccttctgtccccatgggggaggagacgactgcaatcctggacttcaccattgagcctgaaaaccagacggaatgggaaccagcctacagcccagcaggcacttccccactgccagggatccctccaacatggcctcccaccagcacagcaacagaggagagcacagaaggcccttctggaacggaagtgccctcagtctcagaggagccatccccctcagaggagccattcccctgggaggagttgtccacactttcacccccagggcccagtgggactgagctgccaggctctggggaggcatctggggtacctgaagtcagtggtgacttcacaggcagtggagaagtttcgggacatccagactccagtgggcaactctcaggggaaagtgcaagtggactgccctctgaagatcttgactccagtgggctcacctctgctgtgggaagtggactggcctcaggggatgaagatagaattacattgtccagcattcctaaagtagaaggtgagggcctagagacctctgcctctggagtcgaggacctcagcgggctgccttctggaagagaaggtctagagacttctacctctggagtcggggatctcagtgggttgccttctggagaaggtctagaagtctctgcctctggagttgaggacctcagtgggttgccttctggagagggtccagaaacatctacctctggagttggggacctcagcaggctgccttctggagaaggtccagaagtctctgcctctggagtaggagacctcagtggacttccttctggaagagaaggtctagagacctctacctctggtgtagaggacctcagtgggttgccttctggagaaggtccagaagcctccacctctggagttggggatctcagcaggctgccttctggagaaggtccagaagtctctgcctctggagtagaggacctcagtggattaccttctggagagggtctagaagcttctgcctctggagttggggacctcagtgggttgccttctggagaaggtccagaagcctctgcctctggagtcggggatctcagcaggctgccttctggagaaggtccagaagtctctgcctctggagtagaggacctcagtggattatcttctggagagagtccagaagcttctgcctctggagttggggaccttagtgggttgccttctggaagagaaggtctagagacctctgcctctggtgtaggggacctcagtgggttgccttccggagaaggtcaggaagcctctgcctctggagtagaagacctcagcagattgccttctggagaaggtccagaagcttctgcctctggagtaggggagctcagcgggttgccttctggaagagaaggtctagagacctctgcctctggtgtaggggacctcagtgggttgccttctggagaaggtccagaagcctttgcctctggagtagaggacctcagcatattaccttctggagaaggtccagaagcctctgcctctggagtaggggacctcagcgggttgccttctgggagagaaggtctagagacctctacctctggagtaggggacctcagcgggttgccttctgggagagaaggtctagagacctctacctctggtgtaggggacctcagcgggttgccttctggagaaggtccggaagcctctgcctctggtataggggacatcagtgggctgccttctggaagagaaggtctagagacctcttcctctggagtagaggatcatccagagacttctgcctctggagtagaggacctcagtggattgccttctggagtagagggtcatccagagacttctgcttctggagtggaggatctcagtgacctttcttctggaggagagggtctagagacctctgcttctggagctgaggatctcagtgggtttccctctggaaaagaagacttgattgggtcagcttctggagccttggactttggcagaataccttctggaactctgggaagtggccaagctccagaagcaagtagcctcccctctggatttagtggtgagtattcaggggtggactttgggagtggccccatctctggcctacctgactttagtggacttccctctggattcccaactatctccctcgtggataccacattggtggaagtgatcacaaccacctctgcaagtgaactggaagggaggggaactattggcatcagtggtgctggagaaacatctgggctgcccgtcagcgagctggacattagtggggcagttagtggactcccttcaggagctgaactcagcggccaagcatctgggtctcctgatatgagtggggaaacatctgggttctttggtgtcagtggacagccatcagggtttcctgacatcagtgggggtacatctgggctttttgaggtcagtgggcagccatcagggttttctggggaaacatctggagtgactgagcttagtggactgtactctggacaaccagatgtcagtggagaagcctctggagttccttctggcagtggtcaaccatttggcatgactgacctgagtggagaaacatctggggtccctgatatcagcgggcagccatcggggctgccagagttcagtgggacaacctctggaatccctgacctggtttctagtaccatgagtggcagtggtgaatcttctggcattacgtttgtggacaccagtttggtcgaagtgaccccaactacatttaaagaaaaaaaacgtttagggtctgtggaactcagtggactcccttcaggggaggtggatctctcgggcgcatctgggacaatggatatcagtggacaatcttctggagcaactgactccagtgggttgacatcccaccttccaaaattcagtggcctgccaagtggagctgctgaggtcagtggagaatcctctggagcagaagttgggagcagcctgccctcaggaacctatgaaggtagtgggaatttccatccagctttccccactgtatttcttgtagacagaactttggtggaatctgtaacccaggctccgacagcccaagaagcaggagaagggccttcaggcattttggaactcagtggtgcccattctggagcaccagacgtgtctggagaccattcaggatctttggacctaagtgggatgcagtccgggctggtggagcccagtggagagccatcaagtactccatattttagtggggacttttctggcaccatggatgtcactggagaaccctctacagccatgagcgccagtggggaagcctcaggacttttagaagtgactttaatcacttccgagtttgtggagggtgtcactgaaccaactgtttcccaggaacttgcccaaagaccccctgtgacacacacccctcagctttttgagtccagtggagaagcctctgcatccggggaaattagtggagctacaccagcgttccccgggtctgggctggaagcgtcatcagtcccagaatctagcagcgagacatctgactttcctgagcgtgcagtgggggtgtctgctgcccctgaggccagtggaggagcttctggtgcccctgatgtaagcgaagccacctccaccttccctgaagccgatgtggagggagcctcaggcttgggagtgagtggtggcacctcagcctttcctgaagcccccagggagggctcagccaccccagaagtccaggaggagccaaccacatcctatgatgtgggccgagaggcgttgggctggccttcagccactccaacagcatctggagacaggattgaagtcagtggagacctgtctggtcacacgtcggggctggatgttgtcatcagcactagcgtcccagagtctgagtggatccagcagacccagcgccctgcagaggcgcatttagaaatcgaggcctcaagccccttgcactcaggagaggagacccaaacagccgagacagccacctcccctacagatgatgcttccatcccaacttctccatcagggacagatgagtcagcaccagccattccagacattgacgagtgcctctcaagtccttgtttgaatggagccacctgcgtggacgccatcgactctttcacatgcttatgccttcccagctaccgaggggacctgtgtgagatcgaccaggagctgtgtgaggagggctggaccaagttccagggccactgttaccgctacttccccgaccgtgagagctgggtggatgcggagagccggtgtcgggcacaacagtcacacctgagcagcattgtcacccctgaggaacaggagtttgtcaacaacaakgcccmagactaccagtggattggcctgaatgacaggaccatcgaaggggacttccgctggtcagatggacactccttgcaatttgagaactggcgccccaaccagcccgacaacttctttgtcagcggagaggactgtgtggtgatgatctggcacgagaagggagagtggaatgacgtgccttgcaattactacctgcccttcacgtgtaaaaagggcacagtggcctgcggagacccccctgtggtggaacacgccaggaccttcggccagaagaaggaccgctacgagatcaactcgttggtacggtaccagtgcactgagggtttcgtccagcggcatgtgccgaccatccggtgccagcctagcggccactgggaaaaacctcgcatcacctgcacagacccctccacttacaagcgcagactacagaagcggagctcacgggccccacggaggagccgccccagcacagcccactgagaggagcttccaggacgcacccaggatgctgagcccaggagccccgccaggctgacatcccacatggatggtgtcctcttcttgccgctttctgtcatataaggaattccattaaaraarraaaaaaaaamaaaaaaaaraaaaaaaaaaaaaaaaaa

SEQ ID NO: 845 - DNA, 602 bp, Canis familiaris
tggcccgagtgaggtgtcttgggatgtgcctgctgcttgcttcccctgcgcaccaagggccctagccagccccgctcccctggccagggcaatggggtgggctctcaggggcttggggaaagccaaattgccaaaactgaagttgcctccattcccatgtgggaggccaggtgtcctcacgcctctgccttctctgtcccagggggtggtgcaggagcccggggccccagcacacagccctcgccggacagagccagcggccgagccttacttgtcccacccgggcctgccggcctggtgtcgtgtgcctggtcggtcagtatttattgcctccatatgtgccgtcctctgggcccmctggcctgccacctctgcccccaggctcggtgccaccatccccggcaggccatccccggacccagccaggacagctgcgggaccaagccgcacagtcggagccctcccctgtgcctccctccccttgcctcccttgttaggcctgggcctaggatgttcaggagcctgaccctgcttctccttttctgaccgggaaataaactcccccaaaggaaaaaaaaaaaaaaaaaaaaaaaaaaaaaaaa

SEQ ID NO: 846 - DNA, 473 bp, Canis familiaris
agtcatctgtcttgtgactttaactgaaggaacataataactttgtgaatccaaaccaacccaccccaagcctgaattaatctatttttataaacagttatagatacccaatattttataaaatgcattaaagtgtgggtagaaaaaggtctattcttacctgagtttagagtgcttgcgtaatttttatagttaagtctttagtgagggtgacagcacmaaggcttagattccttcccagcagaggctctgggcccmtttcctgctgcttgagttcttgctccaggagggatgagcmaatgggagagctcmagctatgagctcagtaaaaggaagaaacagccattaaacctacatttaatttattttattaaaataacataattgaagaaccatcagataactgtattttgtccggcgccaataaaaaccaaaattaaaaccccaatcatccagaaaaaaaaaaaaaaaaa

SEQ ID NO: 847 - DNA, 529 bp, Canis familiaris
gatatagtttttaaaaataactattttgttatagatcatgagatgcataaaactgtacagaactattttgtaatgtattgatttaaaccaaaattctgtaaataaagtttaaaaaaagaattcccatggcacacatggaaggatgtagatattttgctatttatttaaaggactattttaagagaggttgaactatctgaaattgacccgtaatccaaattccgatcatacgaacgcttttcctcgaggtgtagaccgtgattctcagaagcgattgcactacccgcccatttttgccaccttgtttctgtatcttcatttagcagaaaaacmacmacgaaattgtgcctkagctgtatttttttgtctagggagtttgtttctgtctgacmaagcmaaactttttgcagaaaacmgtggatgtattaaatactgtatcataccmaaaacmctgcaggtgtatatagatgcttctgtcattctgtgttttcagatgcagaattttaaaattaaaaaaaaatactgtctt

SEQ ID NO: 848 - DNA, 623 bp, Canis familiaris
ttaacattcaaaaaaactggttttcacatggacccaaagatgtgccatataaaaatacaagcctcttgtcatcaacagccgtgaccactttagaatgaaccagttcattgcatgctgaagcgacattgttggtcaagaaaccagtttctggcatagcgctatttgtagttacttttgctttctctgagagactgcagataataagatgtaaacattaacacctcgtgaatacaatttaacttccatttagctatagctttactcagcatgactgtagataaggatagcagcaaaccatcattggagcttaatgaacatttttaaaaataagtaccaaggcctcccctctctacttgtgagttttgaaatcgttttgtttattttcagggataccgtttaatttaattgtatgatttgtctgcactcagtttatttcccttctcaaatctcagcctcatgttctttgttattgtcagaacctggtgagttgttttgaacagaactgtttttccccctcctataagacgatgttactgcacaagagcactgcagtgtttttcataataaacttgtgaactaagaaaaaaaaaaaaaaaaaaaaaaaaaaaaaaaaaaaaaaaaaa

SEQ ID NO: 849 - DNA, 621 bp, Canis familiaris
attgttattgggtacaccatcctagatttgtttctttttttagtgttgcccttgctgtgtaataaacgctatatctagtttacctagccaaagcttgaaactgcgctagtatggacttttggacagacttagtttttgcacataaccttgtacaatcttgcaacagagggccagccacataagatatatatctggactctcttgtatcatagaatttttcttgttctgaatatccttgacattacagctgacagaaaccaaaactggtatttcagatctgttttctgaaatcttttaagctaaaaatcaccatgcacagaattgactttgcagctactaattttgacaccttttagacctgtatgaaagtgtgttgtgttgaagcagcacaaacaatgagtgctgcattttgaatactttagttttatctttagttaaacaccaccccggtgtattcatttataccatctaatatatgacacactgttgtagtatgtataattttgtgatctttatttccctttgtattcattttaagcatctaaataaattgctgtattgtgmwtcaatgtaaaaaaaaaaaaaaaaaaaaaaaaaaaaaaaaaaaaaaaaaaaaaaaaa

SEQ ID NO: 850 - DNA, 694 bp, Canis familiaris
ctgcaaccgctaccctaatattgagctttcttacgaagtggtggataaggacagcatccscagtggtggsccggtttgtggtgctggtacagctggagcgggaagaggaggtcacaggccctgtgatcgcacctctctttccacagaaacgtgaagagggctggtgggtagtgattggtgatgccaagtccaatagcctcatctcgatcaagaggctgaccctgcagcagaaggccaaggtgaagcttgactttgtagccccagccactggtgcccacaactacactctgtatttcatgagtgatgcttacatgggctgtgaccaggaatacaaattcagcgtggatgtgaaggaagcagagacagacagtgactcrgactgagtccagagcacatactcttacmaagaggagagtcgcctctgaattaggagcatgtaccgttttgtggagaccaggtcctttggcatgaggtccagccagtcagtgcagtgctgtcccagcccctcctgctcctctgccctcttactaccttgccatccagatgttggatcctttgctcactggtcccctgtagctgtcaatcatcgactatgtacagcatttttaggcttgttctatgtagttccttttgttagatcttctaataaaataacctggaaaaacmmaaaaaaaaaaaaaaaaaaaaaaaaaaa

SEQ ID NO: 851 - DNA, 2937 bp, Canis familiaris
gggagctcaggccgcgatcgccgccgcttcctgctgccgccatgctcgacttcttcaccattttctccaagggcgggcttgtgctctggtgcttccagggcgtgagcgactcctgcaccgggcccgttaatgcgttgattcgatctgtgctgctgcaggaaaggggaggtaacaactccttcacccatgaggcgctcacactcaagtataaactggacaaccagttcgagctggtgttcgtggtcggttttcagaagatcctaacgctgacgtacgtagacaagttgatagatgatgtgcatcggctgtttcgagacaagtaccgcacagagatccaacagcaaagtgccttaagtctattgaacggcacttttgatttccagaatgacttcctgcggctccttcgcgaacgagaggagagcagtaagatccgtgctcccactaccatgaagaaattcgaagattctgaaaaggccaagaaacctgtgaggtccatgattgagacacggggtgaaaagcccaaggaaaaagcaaagaacagcaaaaaaaagggggccaagaaggagagctctgatggccctttggctacgggcaaagcagttcctgccgaaaagtcaggtctcccagcggggccagagaacggggtagaactttccaaagaggagctaatacgcaggaagcgggaggagttcattcagaagcatgggagaggtctggagaagtccagcaagtccacgaaatcagatgctccgaaggagaagggcaagaaagcaccccgggtgtgggcactgggtggctgtgctaacaaggaagtcttggattatagcgctcccaccaccaatggagcccctgacgctgccccgcctgaggacatcaacttgattcgagggactgggcctggggggcagcttcaggatctggactgcagcagctcagatgatgaagagaccgcacaaaatgccagcaaacccagtgctaccaagggaactctgggtggcatgtttgggatgctgaagggccttgtggggtccaagagcttgagtcgtgaagacatggaatcggtgctggataagatgcgtgatcatctcattgctaagaatgtggcagcagacattgcagtccagctctgtgaatctgtggccaacaagctggaggggaaggtgatggggacattcagcacggtgacttccacagtaaagcaagccctgcaagagtccctggtgcagattctgcagccacagcgtcgtgtagacatgctccgagatattatggacgcccagcgtcatcagcgcccttatgttgtcactttctgtggtgttaacggagtggggaagtctactaatcttgccaagatttccttctggctgctagagaatggcttcagtgtcctcattgctgcctgtgacacatttcgtgctggggccgtggagcacgtgcgcacacacacccggcgcctgagtgccctacaccccccagagaagcacgctggcccgactatggtgcagttgtttgaaaagggctacggcaaggacgctgcaggcattgccatggaagcgattgcctttgcacgtaaccaaggctttgatgtggtgctggtggacacagctggccgcatgcaagacaatgcccctctgatgactgccctggctaagctcattactgtcaacacacccgacttggtgctgtttgtgggggaggccttagtaggcaatgaggccgtggaccagctggtcaagttcaacagagccttggctgaccattctatggctcaaacacctcggctcattgatggcattgtccttaccaaatttgataccattgatgacaaggtgggagctgctatttctatgacctacatcacgagcaaacccatcgtctttgtgggcactggccagacctactgtgacctacgcagcctcaatgcsmasgmkgtggtggctgccctcatgaaggcttaacatggctcttgcccaaaaccaaatcactgcttcccccaaagcccctcttcctgtatcaagaatgtgctttagaatacgtgagtgacttctcttcagtgtagtacagaggcagagtgaggggagttctaggggcctgcagttccccctgccccactccttggcagcccagcctccacctgcaagggcctaatcatgttacagtccactgcccatcacccccgtccctgacagtcatccttcctactcaggcattcccttctctctgcctacacactcagtctcattacagctttgaccaacggttggaagatccaacaccagagctttgctaattcgcaccggtcacagggatgtctgagcacaatgagcagtcgaracttccagagccagctctgggttatcccttggatccacagctttcaggcccctggggccaggatgatacccaccacactatgkcagtgtatggcctgttccaattgctgctaattcttatgatgaccccatccccactgtttcctcaaagcattagctaggccagaatgatttgttagaaatgmacaaaaggagttcctgcttccctcraaaataaagggagctgagctgcagtgttgcattgggcttctcagccttccaactcttccctgctcccagaatccagatgtaagctttgcatgttccctttcctgggagagaaccaactgtcaaaagggtatacaagttgcccctctcccccaccccactcttcacctgagtggatcctggcttttcctcctcctcctctctacagtgcctggtagacaagtgctacgttgaagaatacaaacctcttgttaagacttgtcctgtagcttggtattacagatgtgctattagtgcaataaggtgaaggctgtctgcccagagaaatacataawwtatataagaaaataaatttcataagtaaattgcmwwwwaaaaaaaaaaaaaaaaaaaaaaa

SEQ ID NO: 852 - DNA, 587 bp, Canis familiaris
taagctcattgcttatattgttcagaatgaaggtttttgtgttaaaatttactgcattgcgagggtagtttcgctgaagtcctggcaccaattaactgagatgaaatattggtatttattgtcctacttcctgaggctgttagcttgttttattctttgtgaattcgcatggggtgagtcccaacgccacactgcatcgtcttagtttatttgcaatggcatttatgtgtccctcttttcctcattaaatggggtcagaattccaggagattccaccctcgctcaggtagactccttcgtctgcccttccattacgagatggttttcccttcccctgtctctgagaggttaacagaacctaggcataaatcaatkggaaaccgggtctcttattttattgttgttattattatttttgggatcagtcattttctgtgattagtttgactgtgtaaattagatattaactgcacttcttaacaaaaaaaaaaaaaaaaaaaaaaaacatctcactgttacctccttgaaagattcacttctgtaggcctttgtccataggctcttgcctgcagagaagggaaaaaaaa

SEQ ID NO: 853 - DNA, 700 bp, Canis familiaris
ggtagagtccttcttaggaaactcgtcttctgcccccgcccgccccgcccccaccaggtcccgtaacaccggcatcgcgaccgcacagcgccatctccccagrataaagcccagtaracacacctgtctccgaggcctacttcccaccacgttttgctatcagaactctccttgtttccagagcccgtgtgcttttgtttgccccagccccccccgcctcccctccctcccccccttttgtgttacattggtgtaaaaaactgtaawacccmmaaatcttatgaactaactgtgstgtgtgaaagagaagacaaaactggcaaatctgacttccacgtgtcrtttgggagttgcttgggcttgggcccggggggacaggggacagctcccggagaaaggaggtggccctcagcgtcgtcctgcacagactggcccctgtcccacggagcccacgtggtgggggcgcggagtggggcytgctgaccgtctgctcttctggccaggtgcttttctgtcaatttttatggaatgcaaaaggagttttttgttttattttgtttttttgtaaagcttaaaaaaagaaaatctacatcttatacttgagcttccatacttaaaaaaaaaaaaaaaraaaaaaagaacaaaaaaataaataaaccaactgggacgccaaaaaaaaaaaaaaaaaaaaaaaaaaaaa

SEQ ID NO: 854 - DNA, 596 bp, Canis familiaris
tatattaattcttgtgggctttgtgacccaatttggtatacgtctctactttgatatatgcttttataggaattcgattggggggattgtccttctgttgtgaatacattgggaagtgttagctgcttctgcttgcctaagtgattcttttcctggatcactatgcatttttaaagttaaagagcatttttaagtattccaaatgatctagagaattttgtgtttccatgattgcattttactgtacagaatgctgcttctgctatatgttgtgatagaggaattwacraggatacacatttatttctttgtgcctgttttatgtgcacacattaggcattgagaattgaaacttttttgtccatgtatctttggatctttgataaagaatcccysttcattgtaagcacttttacgggtggggtaggggtgggggggagggagtgctctgctggtctcaaattaccaagaattcgcccaagaaattttccgcaggatgattgtacagaatcattgcttatgaccatgatagctttctacactgtattacataaataaattaaataaaatcaaaaaaaaaaaaaaaaaaaaaaaaa

SEQ ID NO: 855 - DNA, 690 bp, Canis familiaris
acctgggcaccgggctgcgtggagktktgcacgtcaagctggcgcacctgagcmagcaccccmagttcgaggagatcctcacccgtctgcgcctgcagaagcggggcacagrtggtgtggacacagctgctgtgggctcagtgtycgacatatccwacgccgatcgactgggctcatccgaagtagaacaggtgcagctggtggtggacggtgtgaagctcatggtggagatggagaagaagctggaaaaaggccagtccatcgacgacatgatccccgcccagaaataggcgtccagcccgcccgccgccgcctgctggagccccagccaatgggaggactcggcccctcagaggcccgcccctttcccgcagctccgcccacaggggggtgggccacctgggggctcttttcacccatctcggaattccaggtccaaccagagttccgaccaatgggcttcggcctctgagttctgtttggccaatgtraaacctccctcacaccttcctctccttgccccggagctccggccaccaccaggagctcrgggtcgcggggagctctccaacacatctggagctcatgctttttctacacccmaagcaacaaataaaagcmmtggtggccctarmhaaaaaaaaaaaaaaaaaaaaraaaaaaaaaaraaaaaaaaaaaaaarrrwaaaa

SEQ ID NO: 856 - DNA, 1673 bp, Canis familiaris
gagggcggaagtggccgagaggaacggagaatggcggcggaaggctggatttggcgctggggctggggccggcggtgcctggggaggcctgggcttcccggccccggccctggccccgctacacctctatttcttctcctgttgctggggccggttgttgctgatataactgacggtaacagtgaacacctcaagcgggagcattcgcttatcaagccctaccaaggggtcggttccagctccatgcccctctgggactttcaaggcagcactatactcacgagccagtacgtgcgtttgaccccggatgagcgcagcaaagagggctctatctggaaccaccagccttgtttcctcaaggactgggagatgcacgtccactttaaagtccatggtacggggaagaaaaatctccatggagacggcattgccttgtggtacacccgggaccgccttgtgccagggcctgtgtttggaagcaaagacaacttccatggcttagccatcttcttggacacgtatcccaatgatgagaccacggagcgtgtgttcccgtacatctcggtgatggtgaacaatggctccctgtcctacgaccatagcaaagatggccgctggacggagctggcaggctgcacggctgacttccgtaaccgtgatcatgataccttcctagctgtgcgctactctcggggccggctgacggtaatgactgacctagaggacaagaatgagtggaagaattgcattgacatcacgggagtgcgcctgcccactggttactactttggagcctcagctggcactggtgacctgtctgacaatcatgacatcatttccatgaagctgttccagctgatggtagaacacacgcctgacgaagagaacattgactggaccaagattgagcccagtgtcaatttcctcaagtcacccaaagacaatgtggatgacccgactggaaacttccgaagtgggcccctgaccgggtggcgggtgttcctkctgctgctgtgtgcactcttgggcatcatcgtgtgcsctktgktggggsccgtagtgtttcagaarcggcaggagcggamcaagcgtttctactgagtggccggtgctctgttccagggaagggcctagttttgggccccggcactaatgtgaacttttttttactgggattataaaagawawataagatgaccktatttcttaaccgtttcaaagaaacmaaagtattttcgtacattttgctttatgcccagcagggacaggctgcagggctagggaatagggtttggcatccccacagctgcggacmaaggtccttgcctgttcccagcatcttgggagcagggaggaaactgtgtttggagctgggccctggcagtcagctcttgaacactggcagtcagctcttgaacactaccacattggggtaagtgcctgacgatgtgagcagtgattttgttctgtgcagcgtgtgttggtagaagaggaggctgactggggaaccttggccttattaccctctgagcttcccaaggccgaccctcaagtgtggctggaggagcmatttggtagggctcagaatgtgaccataggctaaataaaatgaaataaccmmccwmaaaaaaaaaaaaaaaaaaaaaaaaaaaaaaaaaaaaaaaaaaaaaaaa

SEQ ID NO: 857 - DNA, 3335 bp, Canis familiaris
ccccgcgtctcctccaagatggcgagcggcggcagcgggggggtgtcggtgcctgcgctctggagtgaagtgaaccgttatggccagaacggcgacttcacgcgcgctctcaagacggtcaacaagatactgcagatcaacaaggatgatgtaactgccttacactgtaaagtggtatgccttatccaaaatggaagtttcaaggaagccttgaatgtcatcaatactcatactaaagtgttggccaataactcgctttcttttgagaaggcatattgtgagtacaggctgaacagaattgagaatgccttgaagacaatagaaagtgccaatcagcagacagacaaactaaaggagctttatggacaagtgttataccggttagaacgctatgatgaatgcttagcagtatatagagatctcgtccgaaactcccaagatgattatgatgaagagagaaagacaaacctttcagcagttgttgcagctcaaagcaattgggaaaaagtggttccagaaaacttgggcctccaagaaggcacacatgaactatgctacaatgctgcatgtgcactgataggacaaggccagctgagccaggcaatgaaaatcctacaaaaagctgaagatctttgccgccgttcattatcagaagattctgatgggactgaggaagacccacaggcagaactggccatcattcatgggcagatggcttatattctgcagcttcaaggtcgtacagaggaggcgttgcaactttataatcagataataaaactaaagccaacagatgtgggattgctagcagtgattgcaaataacatcattactattaacaaggaccaaaatgtctttgactccaagaagaaagtgaaattaaccaacgcagaaggagtagagtttaagctttctaagaaacaactgcaagctatagaatttaacaaagctttacttgctatgtacacaaatcaggcagaacagtgccgcaaaatatctgccagtttacagtcccaaagtcctgagcatctcctgcctgtattaatccaagctgcccagctctgccgtgaaaagcagcacacaaaagcaatagaactgcttcaggaattttcagatcagcatccagaaaatgcagctgaaattaagctggaccatggcacagctgaaaatttcccaaggcaatatatccaaagcatgtctaatattgagaagcatagaagagttaaagcataaaccaggcatggtatctgcattagtgaccatgtacagccatgaagaggatattgatagtgccattgaggtcttcacacaagctatccagtggtatcmaaaccatcagcccaaatcttctgctcatttgtccttgataagagaagctgcaaacttcaaactcaaatatgggcggaagaaagaggcaattagtgacctagaacagctatggaaacaaaatccmaaagatattcacaccctggcgcagcttatttctgcttactcacttgtagatcctgagaaggcaaaagcccttagtaaacacctgccctcatcagatagtatgtctctaaaagtagatgtcgaggctcttgaaaattctcctggtgctacttacattcggaaaaagggtggaaaagttgctggagatagtcaaccmaaggaacaaggacagggagatttgaaaaagaagaaraaaaaaaagaagggaaaactacctaaaaattatgacccaaaggtgaccccagatccagaaagatggctaccaatgcgagaacgttcttactaccggggaagaaagaagggaaaaaagaaggatcagattggaaaagggacccagggagcaactgcaggagcttcatctgaactggatgccagtaaaactgtgagcagcccaccgacctccccaagacctggcagtgcagcaacagcatctgcatctacaagtaatatcatacccccaagacaccagaaacctgcaggggctccagcaacaaaaaagaaacagcaacagaaaaagaagaaaggtggaaaaggtggctggtgattaaagcattcttgttttcaggctatttttagtctcgctgacactaggaacacaataaaggtaacacagtaagaagcacagagctactcccctctcccatccccccgttttcatgaaattgttttcttgcacatcccccaggaaaacatcttcctcaaactctgtctagtcagacttggcctactttaccatccagctttgcacaaatgataaggactcaaaattgggcatttttccaccttgatctctgttgcattctttctctttgtgtgctgtgatctggtgtttttttttcagtttcacaaacaatgcatgttatccagagtttcctaggatctaaacagaaactacttcggtttcaactagagtctgaagatacttgttcatatcaaatcccactttaaattatgtcttaggaggccttaggagactgaaagtggaatcttctgagcattccaaatagctgcttagagatatcatgtgataaaaagggaccttattacacgctggtgttcttcacttcattacatgaatgaccacaggaaaactaaagtaaatgtcatcagttttaaccatacatcctgtcatgtgatcctggagtatgggataccgaatacacatactatataaatagtaatgaaatgtgtgtgtgtcatatatacacacatatacacatatatatgaattaggactcctctgcaccccgttttgttttcagattatgataacattatgctgatttagcattaaagaactcaaggaaaatgtagcagtgttgcaagaagttgactctgagacccagtgttctgaggtcagatgggtttggagtgtctcaatcagaaagatttcatggccctgtcaagagcatgaacattgacttctgagggcagaggggaaccctccagagttcaatagtgggcattattagaacttaacagaactgtttggccccattaacagatactaaaatgactcgccttcatcatttggggtacaactattcattacccttctcaaagtaatgaagtattgtacattcagtctggtgtcagtgttgctctggtcttcttgcttgcaagccactttcccattgaacagctctgagacagacatgctgggatgcccacccttgttagtattcattttgtactgcccaagatagcattgaatttagactttaagtatttccttgtgatcatattacttcatccttgttaataaagtgctgctgtgttggactctgaaaaaaaaaaaaaaaaaaaaaaaaaaaaaaaaaaaaaaaaaaaaaaaaaaaaaaaaa

SEQ ID NO: 858 - DNA, 1017 bp, Canis familiaris
aataagtttgatacccagctcttccatacaataggtgtagaatttttaaataaagatttggaggtggatggacattttgttaccatgcagatttgggacacagccggtcaagagcgattcagaagcctgaggacgccgttttacagaggttctgactgttgcctgctcacttttagtgttgatgattctcagagcttccagaacttgagtaactggaagaaagaattcatatattatgcagatgtgaaagagcccgaaagctttccttttgtgattttgggcaacaagatcgacataagtgaacgacaagtgtctacagaagaagcccaagcttggtgcagggacaacggcgactatccttactttgaaacaagtgcaaaagatgccacaaatgtcgcagcagcctttgaggaasytgttcgaagagtgcttgctactgaggataggtcagatcacctgattcagacagacacagtcagcctgcaccgaaagcccaagcctagctcatcttgctgttgatcattagagaggttccctgtgcgatctaaccaacttacacacacatacacgaaaaatcacagggtggagaagagaattagcatttgcagcaatggatcacctactcataaaattaaactaaccatattgctgctttgttagtgggtgggagaagggacacatccactcatggaagaatcaatttactcagtagtggcaccttacatttataaattgtaatggttgtctaataacgtttaatttaaatatgtaagttacagagctaataaacgagatgatcaagactttaattacaattaaaacacttgaatattctggaagttaatgtyttttttttcccctgggaaaatggagaactactttttatatgtgtatatttttgkgkaawtagcatttaattcctggktgaggggggaaaagattcccctaaagccaataatgktaaataataaagattaaaatctaawrmmaaaaaaaaaaaaaaaaaaaaaaaaaaaa

SEQ ID NO: 859 - DNA, 644 bp, Canis familiaris
ggcacgagcggttcccttgaataacagcccaggsamrmstcggagccttcacccagccaccggccagcatgtctgggggcaaatacgtagactccgaggggcacctctacaccgttcccatccgggagcagggcaacatctacaagcccaacaacaaggccatggcggaggagatgagcgagaagcaggtgtacgacgcgcacaccaaggaaatcgacctggtcaaccgcgaccccaagcatctcaacgacgacgtggtcaagattgattttgaagatgtgattgcagaaccagaaggaacacacagttttgatggcatctggaaggccagcttcaccaccttcactgtgacaaaatactggttttaccgcttgctgtctgccctctttggcatcccaatggcactcatatggggcatttactttgccattctttctttcctgcacatctgggcagttgtgccgtgcattaagagtttcctgattgagattcagtgcatcagccgtgtctattccatctacgtccacaccttctgtgacccgttctttgaggctgttggcaaaatattcagcaatatccgcatcaacatgcagaaagaaacataaatgacattttaaggatagcagttaacctgattctttttt

SEQ ID NO: 860 - DNA, 661 bp, Canis familiaris
ctcagtggtcagccaagcaattttggtctgcgccacaatacccgttctgaagctttttatggtttggagagaaaattgggggtagtgttagaactattccccattaatgggagttctctgtggatgcgagaagacatgaccagcccatttggtgaagatatccggaactattttcaagtgagcccagagtacttctccatgcttctagttggaaaagatggaaatgtcaaatcctggtatccttccccaatgtggtccatggtgattgtgtatgacttaattgattcgatgcaactccggagacaggaaatggccattcagcaatcactggggatgcgctgcccagaagacgagtacgcaggctacggttaccatagctaccaycaaggataccaggatggttaccaggatgactaccgtcatcatgagagttaccaccatggatacccttactgaacagwaatacgtaaccttagccccagccagtttcccctgcagctgttaaagccacaagtggccagctacgtaaagaagtttttccacactgcctacattccttgcctttttctttccgtgttcttccmaaattaaataaatagcmaacttttgtctaaaaaaaaaaaaaaaaaaaaaaaaaaaaaaaaaaaaaaaaaaaaaaaaa

SEQ ID NO: 861 - DNA, 2656 bp, Canis familiaris
cgcagtgcccggatgtgaatggattacaatgtatctttcagggaaacctattattatcaatgtgactccacgggggagtcaatggtgatgatgaggaggaggaggaggatgatgatgatgagacacctctaaacttggaacaagtttaagactttataagaggagaagaaaaaaaaaaagccaccaacaagatttgtttgaggaaagattctaactatcctgtattgatatattttttttttttttagaaacaataagaaaaagttgttggaatttttttttttttttaatggtttcttttttgggggaggggattttgttgcagtttgatggtggaaaatgcaaaaaccagagccaggtgcataatcttgtattctgtggatatccctggagcagaactgagtaccagttaaaatacttttttgggggatacacatgtgagatactaagtacttgcagaagattttttgtctttctttttaaagtcactttccttggaatattgtgagcatatttgtggccatttaagatgttttcacctcctgtgagcagtgggaaaaatggaccaacttctttggcgagtggacatttcactggctcaaatgtagaagacagaagtagctcagggtcctgggggaacggaggacatccaagcccgtccaggaactatggagatgggactccctatgaccacatgaccagcagggaccttgggtcacatgacaatctctctccaccttttgtcaattccagaatacaaagtaaaacagaaaggggctcatactcatcttatgggagagaatcaaacttacagggttgccaccagagtctccttggaggtgacatggatatgggcaccccaggaaccctgtcgcccaccaaacctggctcccagtattaccagtattctagcaataacccccgaaggaggcctcttcacagtagtgctatggaggtgcagacaaagaaagttcgaaaagttcctccaggtttgccatcttcagtttatgctccatcagcaagcactgccgactacaatagggactcgccaggctacccttcctcgaaaccagcagccagcactttccctagctccttcttcatgcaggatggccatcacagcagtgacccttggagctcctccagtgggatgaatcagcctggctacggaggaatgttgggcagttcttctcatattccacagtctagcagctactgtagcctgcatccacacgaacgcttgagctatccatcacactcctcagcagacatcaattccagtcttcctccgatgtccactttccaccgtagtggcacaaaccattacagcacctcttcctgtacacctcctgccaacgggacagacagtataatggcaaatagaggaagcggggcagcaggcagctcccagactggagatgctctggggaaagcacttgcttcgatctattctccagatcacactaacaacagcttttcatcaaacccttcaactcctgttggctctcctccttctctctcagcaggcacagctgtttggtctagaaacggaggacaggcctcatcatctcctaattatgaaggacccttacactctttgcaaagccgaattgaagatcgcttagaaagactggatgatgctattcacgttctccggaatcatgcagtgggcccatccacagctatgccgggtggtcatggggacatgcatggaatcattggaccttctcataatggagcgatgggtggtctgggctcagggtatggaaccggtcttctttcagccaacagacattcactcatggtcggggcccatcgcgaagacggcgtggccctgcgaggcagccactccctcgtgcccaaccaggtcccggtgccacagcttcccgtgcagtctgcgacgtcccctgacctgaacccaccccaggacccttacagaggcatgccaccgggattgcagggccagagcgtctcctccggcagctctgagatcaaatccgacgacgaaggcgatgagaacctgcaagacacgaaatcttccgaggacaagaagttagatgacgacaagaaggatatcaaatcgattactagcaataacgatgacgaggacctgaccccggagcagaaggcggagcgcgagaaggagcggaggatggccaacaacgcccgcgagcgcctgcgcgtccgcgacatcaacgaggctttcaaggagctcggccgcatggtgcagctccacctcaagagtgacaagccccagaccaagctcctgatcctccaccaggccgtggccgtcatcctcagcctggagcagcaagttcgagaaaggaatctgaatccgaaagccgcgtgtctgaaaagaagggaggaagagaaggtgtcctcagagcctcccccgctctccttggcgggcccgcatccctggaatgggagatgcgtcwaaccacagtgggacagatsymaaagggtccaagctgccacattgcttcattaatacaagagaccacttccttaacagctgtattatcttaaacccacataaacacttctccttcacccctttttttgtaatataagacaagtctgagtagttatgaatcgcagacgcaagaggtttcagcattcccaattatcaaaaaaccgaaaaacacacaaaaaa

SEQ ID NO: 862 - DNA, 535 bp, Canis familiaris
gctattcgtcggagacctcccgttccaagcctgcctggacggctggttctgtgacttgacagtggctccccagcccctaagcctcccccttcatctgtgacttagtctgttgtagtggtgactgacacatccaggcgtgatattggtgaaaacttgtgcccctctgtggtattgctcctatcccattctatrratmactatraatacacacacacacacacacacacatacatatatggctgccacagcctcgcctctagtgttgggaaccwatcaccatcgctgtccttgaggagtcttgyggtccaactacaggggaacactgtcatccctgacatccccctctccaaagtgtgccacctccgatgagccttccctgtcatgcccggcctgtggacggccactcttccgtccctcccccgctcgagcacaggggggcgctgtactggcagctgtgtggtcctctgccaccagtcttgctgtctcttggctgcagaataaaacccatttctggacgaaaaaaaaaaaaaaaaaa

SEQ ID NO: 863 - DNA, 1167 bp, Canis familiaris
ccgcggagagcgctggcgggcggcgagcggacgccggaccggccgcgccatgagggtcctcccgcgcctgcttctgctcctcttgctggcgttccccgctgccgtgctgctccgaggcggcccgggaggctcattagttgcagctcaagatctcacagaagatgaagaaacggtggaagattcaataattgaagatgaagatgatgaagcagaagtggaagaagatgaacccacagatttggctgaagataaagaggaagaagatgtatctggtgaacctgaagcttcaccaagtgcagatacaaccatcctgtttgtgaaaggagaagattttccagcaaataatattgtgaagttcctagtaggctttacaaacaagggtacagaagattttattgttgaatccttagatgcctcattccgttatcctcaggactaccagttttatatccagaatttcacagctcttcctctgaacactgtagtaccaccgcagagacaggcaacttttgagtactccttcattcctgcagagcccatgggtggacgaccttttggtctagtcatcaatctgaactacaaagatctgaatggcaatgtattccaagatgctgtcttcaatcaaacagttacgatcattgaaagagaggatgggttagatggagagacaatctttatgtatatgttccttgctggtcttgggctcctggttgttgttggccttcatcaactcctagaatcgagaaagcgcaagagacccatacagaaggtagagatgggtacatcaagtcagaatgatgttgacatgagttggattcctcaggaaacccttgaatcaaatcaataaagcttcaccmagaaggttgcccaggaaacgggcacagaagagatcacgtgggatctgatgagtaaatgttcctttgtgcaacaattcagtctttacttaacctgccctaatgtttttcggcctgatgggaattagtgcagagaagccatatcaccatagaaggcaactactacttatgtgtggactgagcaatcagagtctgtggcgataataatattactgaaaatgcactgcattcatttttctaaagtaacmaatttggtttttttttaagcccattaaaaaaaaaaaaaaaaaaaaaaaaaaaaaaaaaaaaaaaa

SEQ ID NO: 864 - DNA, 2439 bp, Canis familiaris
ggcaagatggctgccgagaaacaggttcccggtggcggcggcggcggcggcggcgggagcggcggcggacgcggtgccggaggagaggaaaataaggaaaacgaacggccttcagctggatcgaaggcaaacagagaattcggggatagcctgagtttggagattcttcagataattaaggaatcccagcagcagcatggtttgcggcatggagattttcagaggtataggggctactgttcccgtagacaaagacgtcttcggaaaacactcaacttcaagatggggaacaggcacaaatttacagggaaaaaagtaactgaagaccttctgactgataacagatatttgcttctggttctgatggatgctgaacgagcctggagctatgccatgcagctgaaacaggaagccaacactgaaccccgaaaacgtttccacttgttgtctcgccttcgcaaagctgtgaagcatgcggaggaattggaacgcttgtgtgagagcaatcgcgtggatgccaagaccaagttagaggctcaggcttacacggcttacctctcaggaatgctgcgttttgaacatcaagaatggaaagctgcgattgaggcttttaacaagtgcaaaactatctatgagaaactagccagtgctttcacagaagagcaggctgtgctatacaaccaacgtgtggaagagatctcgcctaatatccgctactgtgcatataacattggggaccagtcagctatcaatgaactcatgcagatgagattgaggtctggaggcactgagggtctcctggctgaaaaattggaggcattgatcactcagactcgggccaaacaggcagccaccatgagcgaagtggaatggagagggagaacggttccagtgaagattgacaaagtgaggatctttttgttgggattggctgataacgaagcagccattgcccaggctgaaagtgaagaaaccaaggagcgtctgtttgaatcaatgctcagtgagtgtcgggacgccatccaggctgttcgggaagagctcaagccagatcagaaacagagagattacacccttgacggggagtcgggaaaggtatctaatcttcaatacctgcacagctacctgacttatatcaagctgtcaacggccatcaggcggaacgagaacatggctaaggggctgcagaaagcactacagcagcagccagaagatgagagcaagcgctcgccacggccccaggacctcatccggctctatgacatcattctacagaatctggtggaattgctccagcttcctgggttagaggaggacagagccttccagaaagagataggcctcaagactctggtgtttaaggcttacaggtgttttttcattgctcagtcctatgtgttggtgaagaagtggagcgaagccctcgtcctgtatgaccgagtcctgaaatatgcaaatgaagtaaattcggatgctggggccttcaggaacagcttaaaggacctgcccgatgtgcaagagctcatcactcaagtgaggtcagaaaagtgttctctgcaggcagcagcaatcctggatgcaagtgactcccaccaaccggagacttcttcccaagtcaaggacaacaagcctctggttgaacggtttgagacattctgcttggacccttccctcgtcaccaagcaagccaaccttgtgcacttcccgccaggattccagcctatcccctgcaagcctttgttctttgacctggccctcaaccatgtggctttcccacccctcgaggacaagttggagcagaagaccaagagtggcctcactggatacatcaagggcatctttggattccggagctaaccaggctcttcttgggggcaaggggagattctcactcttcatctgtattgtgagaaaaccctagcaagttccatgatattaaatccaggtctgcattggccccgggcaagagtgtatcatcctcagccctgcgtccctatgtcttgtgtgtttgtgcacttaacattcttaaccggtgtgctcaaaggggaccctgctgtcttctggtggatgtgtgcgggattcctctgtccgcacctcctgggggaagggccactgccacctggccccatgggagccgtgcttgggtgggtccactccaggcatagatgggagctcggaactttgtcgtgtttyttcagtattcacggaatttggaawtggactccttcctcgctgtgagcatccatccagagtcccgtgaagagtctgtgaccaggaaccactggcagcatcaccccacaactacagtcagccttatgccctgtcacctccaagtggaagttaagtttcagaacaagcaaagagctctatttttagaagaaatgtgttacactcagaaatgatgaaaacaaatcttatattaaaaggcaaagatgctgg

SEQ ID NO: 865 - DNA, 849 bp, Canis familiaris
ttcggcacgaggcttccgactcgcggacaggcgcactcggcgcagagaggccggactgcgagtcgtcgcctgagtgcctacatctgagaagttaaaggcacttgtagaacttctgccacacaggctgtgggtcttgcagcacatttgtaagcatggctgccatccggaagaaactggtgattgttggtgatggagcctgtggtaagacttgtttgctcatcgtctttagcaaggaccagttcccagaggtgtatgtacccacagtgtttgagaactatgtggcagatattgaagttgatggaaagcaggtagagttggctttgtgggatacagctgggcaggaagattatgatcgcttgaggcctctctcctatccagacactgatgttatactgatgtgtttctctattgacagccctgatagcttagaaaacatcccagaaaaatggaccccagaagtcaagcacttctgtcccaacgtgcccatcatcctggttgggaacaagaaggatcttcggaatgatgagcacacaaggcgggagctagccaagatgaagcaggagccggtgaaaccgacagaaggcagagatatggcaaacaggattggtgcttttgggtacatggagtgttcagcaaagaccaaagatggagtgagggaggtttttgaaatggccacgagagctgctctgcaagccagacgtgggaagaaaaaatctgggtgccttgtcttgtgaaaccctgctgcaagcacagccctcatgcggttaattttgaagtgctgtttattaatcttagtgtatgattactggcctttttcatttatctataatttacctaagattacaaatc

SEQ ID NO: 866 - DNA, 1075 bp, Canis familiaris
cacgagagcaccagcgctatggctgcccagggagagccccaagtccagttcaagctggtgctggttggcgacggcggcaccggcaagaccacgttcgtgaagcgtcacctgacgggtgaattcgagaagaagtatgtagccactctgggcgtggaggtccaccccctcgtgttccacaccaacaggggccccatcaagttcaacgtgtgggacaccgccggccaggagaagttcggcgggctccgggacggctactacatccaagcccagtgtgccattataatgtttgacgtaacgtcaagggttacttacaagaatgtgcctaactggcatagagatctggtacgagtgtgtgagaacatccccattgtgctctgtggcaataaagtggatattaaggacagaaaagttaaggcaaaatctatcgtcttccaccgaaagaagaaccttcagtactatgacatttctgccaaaagtaactacaattttgagaagccgttcctgtggcttgctagraaactaattggagaccctaacctggagtttgtcgccatgcctgctcttgcccccccagaggtggtcatggatccagctctggcagcacagtacgagcacgatctagaggttgctcagacgaccgcgctcccggatgaggatgatgacctgtgagaagtgcagctggaggccagcgtcagaagtctagttttataggcaactgtcctgtgatgtcagtggtgcagcgtgtttgccacttttattatatagctgagcagaacatgkgcttaatctttgggatgctgaaggagatgaatgggcttcggagtgaatgtggcagtttaaacagtaccttcatttttttggacctgcatacttagctgttttggaacgcagttgtttccttcctgagtttcagataatgagactgctacagtcccatcacaatatccagtggtgaaatctcgtttgtcactgtcattcccattccttttcgtttagaatcagaataaagttgtatttcaaatawmwaamaaaaaaaaaaaaaaaaaaaaaaaaaaaaaaaaaaaaaaaaaaaaaa

SEQ ID NO: 867 - DNA, 707 bp, Canis familiaris
ctctgtaataattctaatacatttactctattaatatagaggttaacactgtgtagaaggtatagaaccattgggaagcccatgaaaaccataattatagtccatatattatctagacaaatattgtaaataagattgatcatttcttttattgaagcatatctgggaaatttcagatgctttaatattgaaagaggacaaatgtatgcatgcacatttttacacttaggctggatatgcaaattgtaccaaaatataaatcccaagagattgtaaagtttaactcagacactgctgatacaacctagaactcaactactaacctaaaatacctgaatggtctaggataagatgaatatattatttaaagaggggactatctcccaaatagcaactttaacacctcagatatgggggttagcatgttggaggaagcccatacttgagtgattatgccccacattataagaattgtatcggaaatgcaagtgggaacacatttctattgaagcagatatgtaaatttcagttattgctgcagaactctacctttataatattttaagcatcgtagcatttcttaacttttgaatacttactagtattggaattggtgctgttcaaaatctctggagtgactgttagctaattaaaacctatactgattgccaaaaaaaaaaaaaaaaaaaaaaaaaaaaaaaaaaaaa

SEQ ID NO: 868 - DNA, 619 bp, Canis familiaris
aagttgatggacacaaagacattcagatgcccagacggcatcaggcgagaagagkttgtgcagtgggtggakctgctycctgacacccagacgccctcctggctaggcctgcccamcwacgccgagagagtcctgctcaccacccagggtgtggacatgatcagcaagatgctggaagatgcagatgctggaggatgaagacgacctagcctacgcagaaaccgagaagaaggcaaggaccgactccacgtccgacgggcgtcctgcctggatgcggaccctgcacaccaccgcgtccaattggctgcacctcatcccacagacgctgagccacctcaagcggacggtggagaacatcaaggatccactgttcaggttctttgagagagaagtgaagatgggagctaagttacttcaggacgttcgccaggatctcgcagatgtcgtccaagtgtgtgaagggaagaagaaacagaccaactacctgcgcaccctcataaacgagctggtgaaagggatcttgcctcggagctggtcccactacacagtgcccgcaggcatgaccgtcatccagtgggtgtccgacttcagcgagaggatcaaacagctacagaacatc

SEQ ID NO: 869 - DNA, 658 bp, Canis familiaris
ttgcccgctaggtgcaccaataaaaatggtatcgatggaaggcccaaaccatgttcagggtttatggcccatctattctatgtaaagagtttaaagtacaattgttttagagtcagagaatagcataaactacacaggtccccttgcttcgtgtacacacacactgatagaccaataagggtgtttagttttgtaatattatttgtgctatttaataacttctttaaatattattcaattgtatatacttttattacttttcttttaaaattatagaaattcttcttcaacatgactgcccaatgtaaagaaaattttctttctcccaaataatgtcmacgtatactgaatattggtggcttaattagttttgttttgtgtagtttgacacttttgatgactttactatgttttccatttgtattgtacataaaatttcctaggaatgcactttttttcaaagtgtaggtttgtggatagattttagcatgatgaaactgtcattacggtgaatgtttgctccatgagaaaataaactaaatgtagttagtgtattaatatttaattggatattgaggaaatcatttgcctggcsaaaataaaacatgttgaattcccccwaaawwawwaaawaaaaaaaaaaaaaararmaaaaaaa

SEQ ID NO: 870 - DNA, 1055 bp, Canis familiaris
gcacgaggccgagcaagcgagcggtcakcgcgaagccgagccgcgcgtccagcccgccggcatggccccagcagcggcgtcggggggcagcagcctgcccagcggcttctccgtcttcacgaccttcccggacctgctcttcatcttcgagtttatcttcgggggcctggtgtggatcttgattgcctcgtccctggtgcccatccccctggtccagggctgggtgatgtttgtgtctgtgttctgcttcatggccaccacagccctgcttgtcctgtacataattggtgcccacggcggggasamttcctgggtcaccctggaygcagcctaccactgtatygctgccctgttttacctcagcgcctctgtgctggaagctttggccaccattgkgatgcaggagggctacacctacaaacagtaccacgagaacatctctgcagtggtgttttcatatgtggccactctgctgtacgtggtccatgcagtgttttctttaatcagatggaagtcttcataaagcagcagaacttttgctgaaaacccagacggtgttaactgatcagcctgccttccagcataacattttagaatgcacaaatactctcgatggtggaaaaagaaacaaaaaagcgatgctctgtttcttgtgggtgttatgtttactctcccatataccttcatgtcagggctgggggcctgtatgtttaaactccaaccactgagctgtctttctagagctgtttcctatttgtggaagggggctgtggggctgggaaatagggactgtgcccacgaaacaaagatcccctggtgacccctggaccggatcttgagaactgtctgttggacttcccacaagctcttttgagtacccatcctggggcacgtttccaagtcttcatggatagtctccctgtcctagggagtaaaggtcacccaacaagtatctgcagatgtccacagtggaagatgataaacctttgaaatactttataaaatgcctttatgctcaataaaaaaaaaaaaaaaaaaaaaaaaaaaaaaaaaaa

SEQ ID NO: 871 - DNA, 636 bp, Canis familiaris
aaatagttatattccagtgctaagccagaaatccagtatgcaccacagttggagcaggagcctacatatgttgaaagaatcgtcgctaagcaaaatgtcctatctggcaaatgagaagttcacaaacccataggaactatcttgaagatggagaaagtgatggctttttaagatgtctatctcttaactctggctggattttaaccacaactcttgtcctctcggtgatggtattgctctggatttgttgtgcaactgtcgctacagctgtcgagcagtatgttccctctgagaagctgagtatctatggtgacttggaatttgtgaacgaacmaaagttaaacagatatccatcttcttctcttgtggttgttagatctaawactgaagaccatgaagaagcagggcctctacctacmaaagtgaatcttgctcattcagaaatttaagctttctttttttttaaagtaaagggttaattgacatctaaatttccattcctcatagagcttctcaagatggtttcattggatatagggcttaaaaatcactttaaaacacaaataaagttacccmaatctgtgaagaccgtaaaaaaawaaaaaaaaaaaaaaaaaaaaaaaaaaaaaaaaaaaa

SEQ ID NO: 872 - DNA, 592 bp, Canis familiaris
tttgtttttttggttttctgtaacattccccttgtagcgtaaatcttagccaagtcatcatcctgaagtgacttaaaggatgacttaagtagtcttacaagccaatctgctccttcctacacgtagtttctccaacaggggtgatataatctgtctgcttcaaacataggtaaggcctgccgtcctcattggtcaaaggagcatatgggaccttgagtgggctccgccagcaaggcaggcagcccaagagccagctttcaggtgttgggttatcaatgcctgccctctgagtttacatgttgaattgcttccaagggtgaataaataccctgctctgtgaatgctctaagacccccacagccaaccttaggctgggtctgtgtatgttcttctgaagcactgatgaacmaaattgaagatacattcagaggttttgattggttgaaattaactggtttggtggttggtatacgtttatttttatgtctttgtatgtagttctacataatgcaaactttctgatggacaagacctcataactgtgattaatatcaataaaggggatattgttgtggaaaaaaaaaaaaaaaag

SEQ ID NO: 873 - DNA, 641 bp, Canis familiaris
ccccagttgcacaggatgtggatttggagtttcctggctaaaatgactaatggcttctctggagctgacctggacggagattttgccaacgtgcttgcaagctggccatccgtgaatccattgagagtgaaattaggcgagaacgggagaggcagaccaacccatctgccatggaggtagaagaagatgatccagtgcctgagatccgccgagatcactttggaggaagccatgcgctttgcccgccgttctgtcagtgacaatgacattcggaagtatgagatgtttgctcagacccttcagcagagtcggggctttggcagcttcagattcccttcaggaaaccagggtggagctggccccagtcagggcagtggaggcggcacaggtggcagtgtatacacagaagacaatgacgatgacctgtatggctaagtggtggtggccagcatgcagcgagctggcctggttggaccttgttccctgagggtgggggcgcttgcccaggagggaccaggggtgtgcccatggcctgctccattcctcagtctgaacagttcagctacagtcagattctggacaggggtttctgttgcaaaaaaaaaaaaaaaaaaaaaaaaaaaaaaaaaaaaaaaaaaaaa

SEQ ID NO: 874 - DNA, 1946 bp, Canis familiaris
tccggcaataagagcggcggcggcggcacgcgggcagcagctccccgcagctcctgctctggtccgcctcggcccggcggcggccatcagcccccctcggcctcggctcgaggggcggggagcttcgcgctcccctcggtacgaccgccaacctcccttccccgcgcgccccgcgcccgcagtccgccccgcgcgctcctccccgaggagcgagcccgcgccaggcccgcccgcccggcgctgcccggccctcccggccctcccggccctcccggcccgcgtgaggccgcccgcgcccggccccgccgccgccgccgcagcccggccgcgccccgcgccccgccgccgccgccatgggctgcctcggaaacagtaagaccgaggaccagcgcaacgaggagaaggcgcagcgcgaggccaacaaaaagatcgagaagcagctgcagaaggacaagcaggtctaccgggccacgcaccgcctgctgctgctgggtgccggagaatctggtaaaagcaccattgtgaagcagatgaggatcctgcatgttaatgggtttaatggagagggcggcgaagaggacccgcaagctgcaaggagcaacagcgatggtgagaaggcaaccaaagttcaggacatcaaaaacaacctgaaagaggcgatcgaaaccatcgtggccgccatgagcaacctggtgccccccgtggagctggccaaccctgagaaccagttcagagtggactacattctgagcgtgatgaacgtgcctgactttgacttccctcctgagttctatgagcatgccaaggctctgtgggaggatgaaggagtgcgtgcctgctatgagcgctccaacgagtaccagctgattgactgcgcccagtacttcctggacaagattgatgtcatcaagcaggctgactacgtgcccagtgatcaggatctgcttcgctgccgtgtcctgacttctggaatctttgagaccaagttccaggtggacaaagtcaacttccacatgtttgacgtgggtggccagcgcgatgaacgccgcaaatggatccaatgcttcaatgatgtgactgccatcatcttcgtggtggccagcagcagctacaacatggtcattcgggaggacaaccagaccaaccgcctgcaggaggctctgaacctcttcaagagcatctggaacaacagatggctgcgcaccatgctctgtgattctgttcctcaacaagcaagacctgctcgctgagaaagtccttgctggaaaatcgaagattgaggactactttccagaatttgctcgctacactactcctgaggatgctactcccgagcccggagaggacccacgcgtgacccgggccaagtacttcatccgcgacgaatttctgagaatcagcactgctaktggagatgggcgccactactgctacccccacttcacttgcgctgtggacaccgagaacattcgccgtgtgttcaacgactgccgtgacatcattcagcgcatgcaccttcgtcagtatgagctgctctaagaagggracacccarakttaattraagccttaagcacmattaattaagagtgwaacgtaattgtacacgcagttgatcacccaccatagggcatgattaacaacgcaacctttccttttctccccaagtgattttgcgaaacccccttttcktcccttccgcttgcttaaatattccmaatttagaaggcttaaggcggcctacagagaaaaaraaaaggaaaaaggccacaaaagttcyctstctctttcagtaattaaaataacagcagcaaacagagataatgaaataaaagaaataaatgaaataaaagaaataaatgaaataaatgaaataaatattgtcttgtgcagcattaaaaaaatmmaaataaaaattaaatgtgagcmaaaaaaaaaaaaaaaaaa

SEQ ID NO: 875 - DNA, 551 bp, Canis familiaris
ccagtggccaccaatactacgggaactacgactacgggagctactccgggaacacacagggaggcacgagcacacagtagccagtgtgctctggaggcccctgccggcttcctccaccagcgcccacctcggccccctcgtctacccaccctgggtcctgtggtgctgggggacgggtcatccgagggctgcctcctttcagcccactgcctcccctctgaggggcttcttccccaacacagggctgggcatttttctctggattcaaacaggcaacaatgaccttttattttctgtttgtccccttaccttcttcctccccctcttcctcttcctcctcttcccttcctcatttttgactaaagacacataccccccttggtcatacagtgaggctacagtggctgaggggggcccttctgcccacctctcccagccctgctccagcccctcagcttccagaccctcatgcagttggttgtacattcttccaggagctgttttactgtctagcttttcaggattaaaaaaaaaaaaaaatcaaaaaaaaa

SEQ ID NO: 876 - DNA, 819 bp, Canis familiaris
gggcctgggtctgggccccggccagaagggcagggctggtcctggagaacaggtgagctggctccacatgtctcagcagccacagggctggggggccacggcctgggcactccgaggctgccgcagctggcggagggaagcatccccgtactgaatgcctgagcccatcctctcggggtccagctcacctgagtcgatcttgttcaggatggtgcgggcacacttcaggaaagcctcttccacgttctcacccgtgagggcactagtctccaggaacattagctcattctcctgggcaaagcgggaggcctccaggaaagtgacctcgcgctcagggtccaggtctttcttgttgccacagaggatgaccacgatgttggggctagccagcgtgcgggcgtccgtcagccaggcagccaacgagttgtatgtctcccggctggtgatgtcgtacaccagcagggctccagccgcccctcggtagtaactccgtgtcaccgaccgaaaccgctcttggccggctgtgtcccaaatctggagcttcacagtcttcccacccacgttgactacccgagatccaaactccacgccgattgtgtggttggagtcctgtttgaacttattctcaatgaactgatgaaggagacatgatttgccagttcctgcactgccaatcaccaggaatttgaagaggaagtcgtaggtctcggccatgactcggtcgcggccgctcggggccgcaatatggcgccgcggccgcgcctgctcctcggctggcagccgctccactccggctgcagccccggctccttcctactc

SEQ ID NO: 877 - DNA, 692 bp, Canis familiaris
  misc_feature (49)..(49): n comprises a, c, g, or t, or includes no nucleotide
tgaggctttccgccctgggcgtgtccttgttttcggacactctgcctgngctcctctgtgtgcattttgtgtctggcctggagaagccaggtcgtgaccccctccttctttatagcttagtgtaactctagcatttggttaagctgcgtaatctgtttaatgttatcagtgcattttaaataggggcattgaagttcactcccaccaccagggctttctttggggtgcctgggccttaagacactagccaaactcccagttctcaaatcacagctagtagttcttgctcctggctgcaggccaggccccaaggggtctccttcctagggtcacaaagagcagagaggaagaggaatagcaactcagggcctgggggttgtgtgggatctgatcttagggactggatgcctctgcctggctgagtatagtgctgactgcccctcctctcctcctaacaggttctgaatagtgcctgagcccctgccccatagggctgaggggtgggactgggggtgtacaagtggcctacccttttctgttttcactgaacggcttgttctgaggtgggaagaaggggagagctctagattgggctagagggggtgggggtgtcagggaggccagtgtgttgtgttactgtgtcaataaactgatttaaagttaaaaaaaaaaaaaaaaaaaaaaaaaaaaaa

SEQ ID NO: 878 - DNA, 646 bp, Canis familiaris
ccgccgcttcccggcttcgcccgcctcgttctccttcgcgctggcgctgcccgaagccactgcatctcgggcgctcattcagctcamycacacgcgycmgcgggcctgtccctggaggactgtgactgcgcgcaggacgagaactgcaagtccaccaagcgcgccattgagccgtgcctgccccggacgagcggcggcggcgcgggcggcgcsggcgcaggrcggggtcatgggctgcaccgaggcccggcggcgctgcgaccgcgacagccgctgcaacctggccctcggccgctacctgacctactgcggcaagctcttcaacgggctgcgctgcaccgacgagtgccgcacggtcatcgaggacatgctggccgtgcccaaggcggcgctgctcaacgactgcgtgtgcgacgggctggagcggcccatctgcgagtcggtcaaggagaacatggcccgcctgtgcttcggcgccgagctgggcaacggcccgggcagcagcggctcggacggcggcctggacgactactacgacgaggactacgaagacgagccgcgcgcggggggcgcgggcggcgagcagctgctggacgacgacgacggcgccccgcacccggcgcgcccgggcggcggcgctgcagcg

SEQ ID NO: 879 - DNA, 300 bp, Canis familiaris
actattccctgacacccctacatycatatattgaatcacccctactgtgctatgtcagtatctccaggtaaacccttcttccctccccctatgtacgtcgtgcattaatggtttgccccatgcatataagcatgtacataatattatattcttacataggacatrttaactcaatttcataattcactgatctatcaacagtaatcraatgcayatcacttagtcyaataagggcttaatcaccatgcctcgagaaaccatcaacccttsctcgtaatgtccctcttctcgctccgggcc

SEQ ID NO: 880 - DNA, 620 bp, Canis familiaris
tacactttgtatggcatcctcttctttgtcttcgccatcctgctgagcgtgggggcttgcatctccattgcactcacctacttccagttgtctggggaggattaccgctggtggtggcgatctgtgctgagcgttggctccactgggctcttcatcttcctctactcagttttctactatgcccggcgctctaacatgtcaggggcagtacagacagtagagttttttggttactccttactcactggttatgtcttcttcctcatgctaggcaccatctcctttttttcttccctaaagttcatccgttatatctatgttaacctcaagatggactgagttttgggtggcamaactgttgcacttctctcccattcttcacgtccaggggcccattgatctcttctgattgagtggctgaattgtgtgatggcattgctgccttcccctttgccctttgggcctcccttcccccgggagggcctggaattacmaatctctattatataaggagtatatagtttgaactttttaagttgcctttagtcttggtcctgatctttctttttacamttatcmaaataaaatttattwaraaaaagggaaaaaaaaaaaaaaaa

SEQ ID NO: 881 - DNA, 563 bp, Canis familiaris
gtttccagagcatacattgtcatgagttgcatttcctttctgtgttagaaggagacccaatgcactgcagtttgtgtgttttctacagggtgctttagatgacgtctcattcgagaagaacccatctgggcatcttttgcaaactgtatttcgttctggggttccagcgtggagcactccaaagccagggggacagctcctgtgcttcagscagaactcaagctccagktagcggccctgtcctcacactcgcacacacggttgtgggtccggttgcactcctgctkgacatactggagctccttgcacaccggcctgcagtatagacactcgtcactggtgtgccacaggtccgtgtagtagtggttgggacaagggacacacacagtcttccgctttgctgtgcagtgctgtttcagagaagtgccaggaggacacttgtcacacatcagctggcgagaggtttctgggtcataatgaaggtactttggaggaaaggtttcctgggtggtccatttaatggagatgtccaggaacaggagcgcgcagcacagcagcggctt

SEQ ID NO: 882 - DNA, 544 bp, Canis familiaris
ctactcagagatttgatcattcgacatgcataacgttgaattcaatagacttttgtttggttagaaaacatgttttttagattattaataktatatcaacttaatttgagtggaaattgaaaactgattcaagtaagtttgaatatcacgttagctttctaattccataraaatagtttatacagtttaatatctgacatttcccccagtgccatttataaagracaactttccagcagtacatttgaagcactttttaacaatgtgaagctacaaatataaaccatgtttaaaagctcatcatgttaaatttttatgtactattttggaactagtttttaaattttagattatatgtccacctatcttaagtgtacagttaataattagcttattgatgattgcatgatgccttacagttttcaataatattttttcttatgcaaacgtcatgcaataaaacacaycctgatgtttggcatcctwmwwrrrmaaaaaaaaaaaaaaaaaaaaaaaaaaaaaaaaaaaaaaaaaaaaaaaaaaa

SEQ ID NO: 883 - DNA, 632 bp, Canis familiaris
  misc_feature (148)..(148): n comprises a, c, g, or t, or includes no nucleotide
cttctccctgtagctctaaccaaggctgctcccttgccccgtgggttagggagaccgctcctgggtacttgtcacacctgcccacgtgagctggggaaagaggatagtccgtatgcatggctctgctcagagctcctgaccatacccnctgggagccaagaccaggttgaagactccatgaaaccaggccctggcagcagctctggagctgctggaggtaggagggagcccaacttctgtatttctttccctcccctcccctctcaatgttacttgagctccttatcctcagctagaatcttctgagcttgtttccccacctgggtgggacagagtacacaaggagaaaggaggatctagaagaggcagcccttctttgtcctctgggggaaatgagcttgacctagtgcaaatggagagacccaaagcctctgatttttaatttccacmaaaatgttagagagagaagtatatatatatatttctttaaatttttgagtctttgatatgtctatacaaacaatccattccctctgccctgaagcctgagtgagacacatgataaagctctctgtgtgtttcattcgaaggtgttaattaaatgattaaaacttgaaaaaaaaaaaaaaaaa

SEQ ID NO: 884 - DNA, 755 bp, Canis familiaris
gttctgccttgctttggacagtggtccaaacagtcttcctgtccctggggagctgacagggaccagccacactgccccccccatcccatacccccttccctttcctcccccagttttgggatccaaagaaaattttcataaaagcaactttgagggtagatttgtgggaaaaataagtgactgactctacaaaattgtgatgcagtaagacctgagggagggagaaggggagagagggagatgcggcctgcttctccacttctccggaagtcaggcctgtcagaaaactgcagggctacaggacacctgcaccaggcctccagaagccctcctcctaaggaccagaagccacctttttgctcagaaatgaccatcaaggaaggaggcaggacgttccatgcaaggattcttctgtggccttctgtcctgacatgtgggacatctcaggaggctggaaaggaccccctgccccccgtcccatgttctgtggtcttccacctgcacccactctccctgcactcccttgagtggtgccagctgggtggggcccagggcctcatgcggtgaacggttcacacatctggatgtgcaaaggcatttgtgatttggggccattctcaaagaaaaggctggcattctgcacacagaagcataaaatcgaggtgtttgatttcaaagtaaatgtttttcaaaagaaaaaaaaaaaaaaaaaaaaaaaaaaaaaaaaaaaaaaaaaaaaaaaaaaaaaaaaaaaa

SEQ ID NO: 885 - DNA, 608 bp, Canis familiaris
gccacggtggcagtgctgagtttcatcctctccaagtgcggccaagcacagtgtggatggcgagtccttgtccaagtgaactgcagcagctggggcttcccaaagagcacgcggccagcctctgtcgctgttatgaggagaaacaaagccccctgcaggagcacctgcgggcctgcagcctgcgagtgaataggctggcaggcgtggsctggcgggtggactacaccctgagctccagcctgctccggtccgtggaagagccccatggtgcacctgaggctggagktggtggcttcctcgggtgccccggcccagcctgtggccatgtccctctcggcagacaagttccaggtcctcctggcagaactgaagcaggctcagaccctgatgaacaacctgsgctgaggagaaggccaccctccccactccccacggccggcccggctccgggaccctggaggcctggcttgctgggttcccccctgagaacgcagcataaggattccggggacttctccacgttgccttccctcccccacgaaaggcacytgtcagcagttttcacaagcaggaagaataaactagtgtaaagcaraaaaaaaaaaaaa

SEQ ID NO: 886 - DNA, 647 bp, Canis familiaris
cctaatatttagttgtatgtccatattttcccattcattccctacatagaattaattgttaacacttgaaaacgtccagactttacccacttataaaataacatatttcttcagactagcttcttaaaacactgacctctatgaggtatttactgtgcacataactgattcattttttgagagcttgaagcaaccacatgattttccctccactgctgttaattagtgtcacttcccagaagaaaaattgttctgttgtawaaattgctcttaattcttgaggaggtttactaatagcagtaggatagaattgtatgaggttaccgtacagactacgttaatgttcttacactgtaagcattgttactttaccmagataaatgtaattttattatagcttatttttcttttggaaacakgccttacattaaacastatactttttgcgttgtccagagcttcttatattataaggagatgtttcttcttctgtcttttagactgaatagtagagtattgccmaaataatgggacctctgacttgaatggatagaaatgaataagctggttttggttttcaaaatggaagtaatctagatttgttctcctcacacataaatggttttaaatcaaaaaaaaaaaaaaaa

SEQ ID NO: 887 - DNA, 665 bp, Canis familiaris
ggcacaaatcagcaggacctctgggscmatgacagatgaggagaaggcaaagcagtgccagtcatccaccaggaaggcaacaggctgtaccgtgagggccacgtgaaggagccgccgccaagtactacgatgccattgcctgcctcaagaacctgcagatgaaggagcagcccgggtcccctgactggatccagctggatcagcagatcaccccgctgctgctcaactattgtcagtgcaagctggtggcccaggagtattatgaagtgctggaccactgctcctccatcctcwacaagtatgacgacaatgtcaaggcctacttcaagcggggcaaggcacacgcggccgtgtggaatgcacaggaggcccaggctgactttgccaaggtgctggagctggaccctgcccctggcgcccatcgtgagccgtgagctgcgagccctggaggcacggatccggcagaaggatgaagaggacaaggctcgcttccggggcatcttctcccattgatagggccctgccggccctgcccaccctgcctagcccactgctgctcccagcacccctgcccctgctgcatcatgcttctctgtatataaaggccatatttatctctmmaaaaaaaaaaaaaaaaaaaaaaaaaaaaaaaaaaaaaaaaaaaa

SEQ ID NO: 888 - DNA, 691 bp, Canis familiaris
ttgcagcctggaaacttaagtggcgccttatagatcaattttaggagctttatttggtgcattaasgcactggtaattgcsaaatccacttcgcctgtgtaagtgaaaatatagactgttatcttgttggccctatgaaattctgcacttggtatttagcatatactctaccttcattactatctggcacgatgttctgccttagcactcagttgcattcttttcctttkctttcctgttcattatgctttaattctgaggaccatatgaaggtagaatatattaaaaattaacawawattataaraatttgtataggcaaaccatttccttaagttgatggccaaatgttaaaatgttatttttcatatcatttataatcttgtcacagtccacttaacgaagtttggttagatttcagtgaaaattatcttccagagtagtttcttttttcctgggaytggggaggggggstaactttactacamttagtatgtatggtgcagaatttcatgcaaatgaggtgtgccagcagtgtggtaatttaatcgtatttaaacaacaacaaaaaaagaatgcacaaacttgctgctgcttagatcactgcagcttctaggacccagtttcttttactgatttaaaaacaaaacaaaaaaaaaaawaaaaaagttgtgcctgaaaaaaaaaaaaaa

SEQ ID NO: 889 - DNA, 650 bp, Canis familiaris
agggattattctgctcggagattttgggctcccagcttctctcctggctgccaatgtctatagatggtgcttgtcatcgccccaggaggggctggtggcttttcagcgtcagcagaaatccttcctgtattctgtcttcagatgccagctcctggagctgccaagtggggagccgtgtggctccctggggaggcccctcagtccagggcattctcggagcytggacacaggcttcccagcactcktctcccgactgccctcscrwagagctgttcctgatcctgaacccggcctgggaactccttcascaccctgtttgtcagccagtgcatgtctgccmagaccctctcatggctcctctcagcggcacggccccaagtgttttatcgatggtttagggtgtcggcgtgtctgggtggagagagccagcagccagcccagcctgagccyttgggtgtggccgccgtggccggtcggggatgcagagcctgggccgacgggcccctctccacacacccagtcggccccgagcctctccgtcccctcttagcagcttgggtacacggccccgggccggaccgggtctggaggcttcgcgggcccaggaccccgaggctgacccagtcccaaaggcttgtttcccaggaggc

SEQ ID NO: 890 - DNA, 636 bp, Canis familiaris
tcagctgcctgccgtggctcccatccacgtggttcgacctggtccatggcacgtcatgcaaagcatagacgggagaccctagaggggtattgttaggtgttccaaagccatagaaagtagagtycctaatgagaccaagtccccaccggcggcggcacttctaagcaagtagctcactagatttggaagaggttggaaagaaaggtaktggagcagcccttgggagaaagccattctcccggggcccctgcatctcctgagcttatagtcaagtagcctcaaagaccctcaacggtctggtccttggcatgattcctttsttcaataatacgttttattttttgtgcacctctgctgatcatgtgaatgaaagaggaacagctggaagagctgtactcrctttacggactgtctgtccccttacaacmaacacctgggtggtcctgacccgactggcctaccagcataatcagtggaagctcatttggggagaaaccggctttaactgtttaaaagtcactgcttcactctcttaattcaacaaggaaaggaatgactatgcccaataaaacgttttctcccmwwaaaaaaaaaaaaaaaaaaaaaaaaaaaaaaaaaaaaaaaaaaaaaaaaaaa

SEQ ID NO: 891 - DNA, 706 bp, Canis familiaris
ggaattcgccaccatgcagacaattaagtgcgttgttgtgggcgatggtgccgttggtaaaacatgtctcctgatatcctacacaacaaacaaatttccatctgagtatgtaccgactgtttttgacaactatgcagtcacggttatgattggtggagagccatatacccttggactttttgatactgcagggcaagaggattatgacagatttacgaccgctgagttatccacaaacagatgtatttctagtctgtttttcagtggtctctccatcctcatttgaaaatgtgaaggaaaagtgggtgcctgagataactcaccactgtccaaagactcctttcttgcttgttgggacccaaattgatctccgagatgacccctctactatcgagaaacttgccaagaacaaacagaagcctatcactccagagactgctgaaaagctggcccgtgacctgaaggcggtcaagtatgtggagtgttctgcactcacacagaaaggcctaaagaatgtatttgacgaagcaatattggctgccctggagcctccagaaccgaagaagagccgcaggtgtgtgctgctatgarsatcyctccagagccctttctgcacaactggtgtcagcatcgtactaaaagcaatgttaaatcaaactaaagattaaagattaaaattcgtttttgcaataaaaaaaaaaaaaaa

SEQ ID NO: 892 - DNA, 500 bp, Canis familiaris
taaagtttttggggccctcaagggagcagtggacggaggcctgtctatccctcacagtaccaaacgattccctggttatgattcagaaagcaaggaattcaaygcagaagttcatcgaaagcacatcatgggtcagaatgttgcagattatatgcgttacctaatggaggaagatgaagatgcttacaagaaacaattctctcaatatataaagracaacgttatctccagacatgaatggaggagaatgtaataaagaaagcgcacgctgctatacgagagaatcccgtctatgagaagaaacctaagaaagaagttaagaagaagaggtggaaccgtcctaagatgtctcttgcccmaaagaaagatcgggtagctcagaagaaggcaagcttccttagagctcaggagcgggctgctgagagctaataaacccaaccmtaatttttctatgaagattttccagataaagcccaataataaacttattcaccaagcma

SEQ ID NO: 893 - DNA, 587 bp, Canis familiaris
cgaagaaggagataccagagaagcagattctactccccacagttcctgcccatttcattcagggagtatctctaactcctgctcttcgctcactgtccattaaagaaaatagtaagttctgattcaaggttctggaatactctgtgaaacttcaactgaggttccttttgctcagaatatgtgcggttatcctctcaggctgggggctgaaaacaggacagacgcaggggctccctggagcagtgtggggcccagccgctctggaggcaggagctccccagccccgtgtgacctgatgtctgtgccaggcgggtgtggactgcctgcagaggacaccgccacagggaggagggaggcagagggaggtcaggggtgggccgtggtgagggccaggggatggaagcagggcaactgttaagatcaaaggcaatgatgtgactcctgtgttctgcmaaaggagcggccaatgtatccaaattgatgccaaatttggacaagtgtaatacttataataaagtttttaatgtgttttwaaaaaaaaaaaaaaaaaaaaaaaaaaaaaaaaataacaaaaaaaacaataaaaa

SEQ ID NO: 894 - DNA, 1305 bp, Canis familiaris
agagcaggctgtgtggcaccggaccacagcctggtcagtcgagtgggaatccttcctcaaactctcccccagccagtctgacccagcatggatgccgtggacgccactgtggagaagctccgggcacagtgcctgtcccgaggggccttgggcatccagggcctggccaggtttttccgccgcctggaccgggacaggagccgatccctggactccagggaactccagcggggcctggctgagctgggactggtgctggacacggccgaagcggagggcgtgtgcaggcgctgggaccgtgatggcagcgggacgctggacctggaggagttcctgagggcactgcggccccccatgtcccaggcccgggaggcggtcattgcagctgcatttgccaagctggaccgcagcggggatggtgtggtgaccgtggatgacctccggggggtgtacagtggccgcacccaccccaaggtacaaagtggggagtggaccgaggaggaggtgctccgccgcttcctggacaacttcgactcctccgagaaggacgggcaggtcacactggctgaattccaggactactacagtggtgtgagcgcctccatggacacagatgaggagtttgtggccatgatgaccagtgcctggcagctgtgagccatcatgcacgtttgctcagccagccccactgtagcgtaggacccccaccctggccctctctcacctaggcagcccccaaggcggaggccacaggaccagctgggccaggtctcagaggacctggcttggccactatatgcaagtaggacaaaggttccgagaatgggtcactggctcaggaccccagggagcaaggccctcccagtccatgctgtgcagacctcaggcctcacaagctctgcagttgcccctcctcactaggcatcctcttggttctgctcagtgaatccttggccctgctagcacccccacctacccttcccaccacttgagattgcacccccaccctaaagccaggggccgggaagcaaacagctcttctgtgaagcaaagctcagcatggaggcggctagtcttggaaggcagccaagctcggtcacctgcctggtggacatggagtgtggggcaggggccaggggcccacagacaggccaggctgctctgggaggtggaggctattcctggccaggctgtccagcttcctgaggcccctggggcatgcaggaggccagggttttagttaaaagttttaatgtagttcccaaatacatttcatatgacaatcttacataaatgttccaaaac

SEQ ID NO: 895 - DNA, 671 bp, Canis familiaris
gaagggagatgtggcctttgtgaaagaccagactgtcttgcagmacactggggggaaagaacwctgragattgggctaaggatctgaagrwagaggwctttgagctgctgtgccctgatggcchawggaagtctgtggacaaggctcctgagtgcttcctagccmwagccccvwatcatgctgtggtctcaaggraagacaaggcatcttgtgttagcmawatgttacttgaccagcagcttttgtttggaagaaatggaaatgactgctcgggcaagttttgcttgttccactcagcaaccmaggaccttctgttcagggacgacacacaatgtttggccmaacttccagaggacacmwcatatraatcatacttaggagcagagtatatcmcggctgttgctaacctgagacmatgctccacctcgaaactcctggaggcctgcactttccatacatcttaaaatccmagaggcggagacacaccagatggtgatgggagctcacgtgacccataagttccctcggggcctcactggcctgggtggtttgtctggtttcacagttcagcggtggaacctctgtagaacattaaataaacattattattggtgttatcttttaaaaaaaaaaaaaaaaaaaaaaaaaaaaaaaaaaaaaaaaaaaaaaaa

SEQ ID NO: 896 - DNA, 626 bp, Canis familiaris
tgtttaccaatggtgtataattaaaagatttttctatttcagatgtactttagagagaaatattagcttaactctgacatctgctattgtgacacatcccattgctggcaatgtggtgcacactccagaacttttaactactgttttgtaagcctccaaaggtggcggcattgcagaatcctaggcaatgctttgtttgccttcmataccattcactgggtgttgcactagatgcagagaggcactccatctcagtgcttttgagtgagcccccctgctaaaggaactgtaatgcttaagcacggagctaatacmaaggaaacaggtccttctggcttaattgaaacagtttttcctgcatgaagtagtgtggaggccctggactgctgctcattctttaggattgactgttcttatacctggtgttgatttaaagactgtttataagagacatcaccaaggtgatgggattcatttgaagcacctatatttctgttttaatggttttgtccmattttgccttcccaagatttttgttctacatagaaagttcatgccactttttaatataaaaaagttttaacaaaaaaaaaaaaaaaaaaaaaaaaaaaaaaaaaaaaaaaaaa

SEQ ID NO: 897 - DNA, 1173 bp, Canis familiaris
agaggaccgaagaaggagactggagagaccaggatccttccagctgaacaaagtcagcagcaaagcagactagccagctggctacaattggagtcagagttccaaagacatgggcttgttagagtgctgtgcaagatgtcttgtwggggccccctttgcttccttggtggccactggattatgtttctttggggtggcactgttctgtggctgtggacatgaagcattaactggtacagaaaagctaattgagacctatttytccaaaaactaccaggactatgagtatctcatcaatgtgatccatgccttccagtatgtcatctatggaactgcctctttcttcttcctttatggggccctcctgctggctgagggcttctacaccaccggtgcagtcaggcagatctttggcgactacaagaccaccatctgcggcaagggcctgagcgcaacggtaacagggggccagaaggggaggggttccagaggccaacatcaagctcattctttggagcgggtgtgtcattgtttgggaaaatggctaggacatcccgacaagtttgtgggcatcacctatgccttgaccattgtgtggctcctggtgtttgcctgctctgctgtgcctgtgtacatttacttcaatacctggaccacctgccagtcaattgccttccccagcaagacttctgccagtataggcagtctctgtgctgatgccagaatgtatggtgttctcccatggaatgctttcccaggcaaagtgtgtggctccaaccttctgtccatctgcaaaacagctgagttccaaatgacgttccacctgtttattgctgcattcgtgggggctgcagccacactggtttccctgctcaccttcatgattgctgccacttacaactttgccgtccttaaactcatgggccgaggcaccaagttctgatctcctgtagaaatgtccctttctctaatagcgaggctctaaccacacagcctacaatgctgcgtctcccatgttaactctttgcctttgccatctattggccctttcttacttgacgagtgtaacaagaaaggagagtcttgtggtgattaatgtctctctgtggactctcccccttacatacctcttttagtcattttgcttcacagctggttcctgctagaaatggg

SEQ ID NO: 898 - DNA, 4347 bp, Canis familiaris
caggcgcagaggggcccagacgaccgtggaggatgaagaaatagccttgggacccttggaaaatgaggccgccgcccctgctgcacctggcgctgcttctcgccctgcccaggagcctgggggggaaggggtgtccttctcccccctgtgagtgccaccaggaggatgacttcagagtcacctgcaaggatatccaccgcatccccaccctaccacccagcacgcagactctgaagtttatagagactcagctgaaaaccattcccagtcgtgcattttcaaatctgcccaatatttccaggatagagattcggaataccagaagcttaacatccatagaccctgacgccctaaaagagctcccactcctgaagttccttggcattttcaacactggacttggagtattccctgatgtgaccaaagtttattccactgatgtattctttatacttgaaatcacagacaacccttacatggcttccatccctgccaatgctttccaggggctgtgcaatgaaaccctgacactgaaactatacaacaatggctttacttcaatccaaggacatgctttcaatgggacaaaactggatgctgtttacctgaacaagaataaatacctgtcagctatcgacaaagatgcatttggaggagtgtacagtggaccaaccttgctggatgtctcttacaccagtgttactgccctgccatccaaaggcctggagcatctaaaggagctgatagcaagaaacacttggactctaaagaaactcccactttccttgagtttccttcaccttacacgggctgacctttcttatccaagccactgctgtgcttttaagaatcagaagaaaatcagaggaatccttgagtccttaatgtgtaatgaaagcagtattcggagcctgcgccagagaaaatctgtgaatactttgaatggcccctttgaccaggaatatgaagagtatctgggtgacagccatgctgggtacaaggacaactctcagttccaggataccgatagcaattctcattattatgtcttcttcgaagaacaagaagatgagatcctcggttttgggcaggagcttaaaaacccacaggaagagaccctccaggcctttgatagccattatgactacactgtgtgtggtggcaatgaagacatggtgtgtactcctaagtcagatgagttcaacccctgtgaagacataatgggctacaagttcctgaggattgtggtgtggtttgttagtctgctggctctcctgggcaatgtctttgtcctgatcgtcctccttaccagtcactacaaattgactgtcccacgctttctcatgtgcaacttggcctttgcagatttctgcatggggatgtatctgctcctcatcgcctccgtagacctctacactcattctgagtactacaaccatgccatcgactggcagacaggccctgggtgtaacacagctggtttcttcactgtctttgccagtgaattatcagtgtatacactgacagtcatcaccctggagcgctggtatgccattaccttcgccatgcgcctggacaggaagatccgcctcaggcatgcatatgccatcatggttgggggctgggtttgctgcttcctgctcgccctgctccctctggtgggaataagcagctatgccaaggtcagcatctgcctgcccatggacactgagacacctcttgccctggcatatattatccttgttctgttgctcaacatagttgcctttatcattgtctgctcctgttatgtgaagatctacatcacagtccgaaatccccagtacaacccgggggacaaagacaccaaaattgccaaaaggatggctgtattgatcttcactgacttcatgtgcatggccccaatctcattctacgctctgtcagcacttatgaacaagcctctcatcactgttaccaactccaaaatcttgctggttctcttctatccacttaactcctgtgccaatccatttctctatgctattttcacgaaagccttccagagggatgtatttatcctgctcagcaagtttggcatctgtaaacgccaggctcaggcataccggggccagagggtttctccaaagaatagtgctggtattcagatccaaaaggttacccgggacatgaggcaaagtctccccaacatgcaggatgagtatgaactgcttgaaaactcccatctaaccccaaataagcagggccaaatctcaaaagagtataaccaaacagttctgtaagcagaccctatactactcgcagtggcaggtggacttctaaaaatctagtttcttgaacacgtattccaaattcattatatacacaagacagctgacctaaccctttgcaggtgatgtttcatggggcaaatttcatctccaaaaagggggtagcactaccacctaatcattacctcccagaaggaagagaggctaccagcacttctgaaccctggtgatatcaagataactgacactttctagaaaacttgtttgatgctaactgctttaacaacattgtataagatgtccaacagatattaactgaaccaggtcaacattgagcttctcactttcaaatagcatttcatagtaaagattcagcaaatggcaaatgctattaactgagttggtgaccacaagatagaattagccccatgttggcttggtccaccttcatgttcttggatacaaccaaagagaatgtgaattcctcgaaactgaaaagtccagcaggatacatgcatgaagcagctattatgaggtggaaggaggggaaaggcttagcttagttgttatttcagcctctgaaactatatcatctcttcacaaggacctacctgatgtgacccaactgttaggtgttgcccagggggggaaaaaaactggcaagatttcagcttatgtggctgagcaaagtaagaattgttcttcttggctagtcttatagcataaaatacgtgaaccctagaaatatttctaagtagcagcaagtgggaattatgagcagggcacactaaatcacacactgattaataaagcagggccacaaggtaactgttggagcttgggcaaatcactgggccacttctaagtctagaaatgagagagcctgattgcttcttcagtttcaaaactctatgtatatcccttccccttaaaatatgtttccatgacaaaaaagaaaagcactaaaaaagaaaagaaaagaaaagaaaagcactaagaaagaaaaatttatttttcctatcttgtagtgcagccacctctttctctttggaggctggatatatgacccaggacatttctttcttttttttattttttttttcatttttgattataatgtctgatccatgttgggctggatctaaatcactcaactaattactagatctctacagctacaattatcaggccaaaaacagactcatattcacataacagaataaaaggtggttttgcaaattttggttattcagagttactacttcactgtatagattaacttgaaaacatttaacttgtccagggattggaagctatcaaacactcaggcaaagcaacactaaagctatcaagagaagtttcttctctccaaaactgctagccttttccaacctgttgatcattggacataatctctattgcccaatagtgttctcttacttaaaatggttaggatcaatcttttaatatagacgtactcttcagattacctgtcaaaacagtcccttaatttcctcccaagcagagatggcatttgcttctcaatgttcatgaagcacaccaaggaattagaagcatttgttgtttcaagtctgtggagtagggttactgggcccaatgcccccccccccacagagatggtcccccaacccacctaggatatcccaatagcaatacccatttctgattatcattgagattggacatcttagtagaaatattatacacactcgaaatcatgacttatccaccagttcacttgtaactaataactaaacagttgtgttatcgtttggcatgtgtttctcacctgtgacattttgaaatagtacatcctgataatgtattttatcttaagtagttgaaataacactttggaaaccgtcctagaaaagtaacttcaacacaattgttactaaaatttgcattcacaacatgaaataaattttcttcctatgaaatgattgtgctgagtcctacagtatggcattttgtaatttgtgagcttcttttaatgttaccgttatatgtgttacaactgaagacagggaaaaaaaacaactggcaaatttgctaa

SEQ ID NO: 899 - DNA, 4417 bp, Canis familiaris
caggcgcagaggggcccagacgaccgtggaggatgaagaaatagccttgggacccttggaaaatgaggccgccgcccctgctgcacctggcgctgcttctcgccctgcccaggagcctgggggggaaggggtgtccttctcccccctgtgagtgccaccaggaggatgacttcagagtcacctgcaaggatatccaccgcatccccaccctaccacccagcacgcagactctgaagtttatagagactcagctgaaaaccattcccagtcgtgcattttcaaatctgcccaatatttccaggatctacttgtcaatagatgcaactctgcagcggctggaatcacattccttctacaatttaagtaaaatgactcacatagagattcggaataccagaagcttaacatccatagaccctgacgccctaaaagagctcccactcctgaagttccttggcattttcaacactggacttggagtattccctgatgtgaccaaagtttattccactgatgtattctttatacttgaaatcacagacaacccttacatggcttccatccctgccaatgctttccaggggctgtgcaatgaaaccctgacactgaaactatacaacaatggctttacttcaatccaaggacatgctttcaatgggacaaaactggatgctgtttacctgaacaagaataaatacctgtcagctatcgacaaagatgcatttggaggagtgtacagtggaccaaccttgctggatgtctcttacaccagtgttactgccctgccatccaaaggcctggagcatctaaaggagctgatagcaagaaacacttggactctaaagaaactcccactttccttgagtttccttcaccttacacgggctgacctttcttatccaagccactgctgtgcttttaagaatcagaagaaaatcagaggaatccttgagtccttaatgtgtaatgaaagcagtattcggagcctgcgccagagaaaatctgtgaatactttgaatggcccctttgaccaggaatatgaagagtatctgggtgacagccatgctgggtacaaggacaactctcagttccaggataccgatagcaattctcattattatgtcttcttcgaagaacaagaagatgagatcctcggttttgggcaggagcttaaaaacccacaggaagagaccctccaggcctttgatagccattatgactacactgtgtgtggtggcaatgaagacatggtgtgtactcctaagtcagatgagttcaacccctgtgaagacataatgggctacaagttcctgaggattgtggtgtggtttgttagtctgctggctctcctgggcaatgtctttgtcctgatcgtcctccttaccagtcactacaaattgactgtcccacgctttctcatgtgcaacttggcctttgcagatttctgcatggggatgtatctgctcctcatcgcctccgtagacctctacactcattctgagtactacaaccatgccatcgactggcagacaggccctgggtgtaacacagctggtttcttcactgtctttgccagtgaattatcagtgtatacactgacagtcatcaccctggagcgctggtatgccattaccttcgccatgcgcctggacaggaagatccgcctcaggcatgcatatgccatcatggttgggggctgggtttgctgcttcctgctcgccctgctccctctggtgggaataagcagctatgccaaggtcagcatctgcctgcccatggacactgagacacctcttgccctggcatatattatccttgttctgttgctcaacatagttgcctttatcattgtctgctcctgttatgtgaagatctacatcacagtccgaaatccccagtacaacccgggggacaaagacaccaaaattgccaaaaggatggctgtattgatcttcactgacttcatgtgcatggccccaatctcattctacgctctgtcagcacttatgaacaagcctctcatcactgttaccaactccaaaatcttgctggttctcttctatccacttaactcctgtgccaatccatttctctatgctattttcacgaaagccttccagagggatgtatttatcctgctcagcaagtttggcatctgtaaacgccaggctcaggcataccggggccagagggtttctccaaagaatagtgctggtattcagatccaaaaggttacccgggacatgaggcaaagtctccccaacatgcaggatgagtatgaactgcttgaaaactcccatctaaccccaaataagcagggccaaatctcaaaagagtataaccaaacagttctgtaagcagaccctatactactcgcagtggcaggtggacttctaaaaatctagtttcttgaacacgtattccaaattcattatatacacaagacagctgacctaaccctttgcaggtgatgtttcatggggcaaatttcatctccaaaaagggggtagctctaccacctaatcattacctcccagaaggaagagaggctaccagcacttctgaaccctggtgatatcaagataactgacactttctagaaaacttgtttgatgctaactgctttaacaacattgtataagatgtccaacagatattaactgaaccaggtcaacattgagcttctcactttcaaatagcatttcatagtaaagattctgcaaatggcaaatgctattaactgagttggtgaccacaagatagaattagccccatgttggcttggtccaccttcatgttcttggatacaaccaaagagaatgtgaattcctcgaaactgaaaagtccagcaggatacatgcatgaagcagctattatgaggtggaaggaggggaaaggcttagcttagttgttatttcagcctctgaaactatatcatctcttcacaaggacctacctgatgtgacccaactgttaggtgttgcccaggggggaaaaaaactggcaagatttcagcttatgtggctgagcaaagtaagaattgttcttcttggctagtcttatagcataaaatacgtgaaccctagaaatatttctaagtagcagcaagtgggaattatgagcagggcacactaaatcacacactgattaataaagcagggccacaaggtaactgttggagcttgggcaaatcactgggccacttctaagtctagaaatgagagagcctgattgcttcttcagtttcaaaactctatgtatatcccttccccttaaaatatgtttccatgacaaaaaagaaaagcactaaaaaagaaaagaaaagaaaagcactaagaaagaaaaatttatttttcctatcttgtagtgcagccacctctttctctttggaggctggatatatgacccaggacatttctttcttttttttattttttttttcatttttgattataatgtctgatccatgttgggctggatctaaatcactcaactaattactagatctctacagctacaattatcaggccaaaaacagactcatattcacataacagaataaaaggtggttttgcaaattttggttattcagagttactacttcactgtatagattaacttgaaaacatttaacttgtccagggattggaagctatcaaacactcaggcaaagcaacactaaagctatcaagagaagtttcttctctccaaaactgctagccttttccaacctgttgatcattggacataatctctattgcccaatagtgttctcttacttaaaatggttaggatcaatcttttaatatagacgtactcttcagattacctgtcaaaacagtcccttaatttcctcccaagcagagatggcatttgcttctcaatgttcatgaagcacaccaaggaattagaagcatttgttgtttcaagtctgtggagtagggttactgggcccaatgcccccccccccacagagatggtcccccaacccacctaggatatcccaatagcaatacccatttctgattatcattgagattggacatcttagtagaaatattatacacactcgaaatcatgacttatccaccagttcacttgtaactaataactaaacagttgtgttatcgtttggcatgtgtttctcacctgtgacattttgaaatagtacatcctgataatgtattttatcttaagtagttgaaataacactttggaaaccgtcctagaaaagtaacttcaacacaattgttactaaaatttgcattcacaacatgaaataaattttcttcctatgaaatgattgtgctgagtcctacagtatggcattttgtaatttgtgagcttcttttaatgttaccgttatatgtgttacaactgaagacagggaaaaaaaaacaactggcaaatttgctaa

SEQ ID NO: 900 - DNA, 637 bp, Canis familiaris
atgccctgcccctcgtcgccgtctcacgcgggaagcttttaccagggcatcaagaaaccgtgaagcatgaacagattcgcgtcggggtgaaggaggtacagaagttatcaacaaaggcgagaaaagggatcatggttttggcaggggacacattgcccctttgaaggtatactgccaatctcccagttatgtgtgaggaccggaatttgccctacgtctatattccctctaagacggacctgggtgcttkccgctggctccaagcgtcccacctgcgtgatcatggtcaagccccatgaggagtaccaggaggcttacgacgagtgcctggaggaggtgcaagccttgcccccacccatgtgaagggttcaggcacctgctctggaagctgctgccctggcacgtgggccagctggctgccctgccgctgtctgtgctctgctcgcacatcactctgggcccctgtggcctgtcctcttcccacggcacgttctgccagctttttcattaaaggaatgccggcgtcttctgttgagcatcmacgcagatagctctgagaatgtaatgtgggggaagtaaatgctaagactaaarwrwraaaaaaaaaaaaaaaaaaaaaaaaaaaaaaaaaaacaaa

SEQ ID NO: 901 - DNA, 695 bp, Canis familiaris
cccggcctcccattccggtcaccatccttctgtgggagtggtaaccccatcctggccagccccccaacactgggcctcctggagcccaagaaggagaaggaagaagaggagctatttcccgagtccgagcggcccgagatgctgagcgagcaggagcacatgagcatctccggcagcagcgcccgccacatggtgatgcagaagctgctccgcaagcaggagtccacagtgatggttctgcgcwacatggtggaccccaaggacatcgacgacgacctggagggggaggtgaccgaggagtgtggcaagtttggtgctgtcaaccgcgtcatcatctaccaggagaagcagggagaggaggaggatgcggagatcattgtcaagatttttgtggagttctccatagcctccgagactcacaaggccatccaggccctcaacgggcgctggtttgctggccgcaaggtggtggctgaagtatatgaccaggagcgttttgataacagtgacctttctgcgtgaccttggccctgttccctggacttgcacttgctccttgtttcctctgggttttatagggtgattgatgtgctggttggtgtctcaggccagcagccccatggggataaaggtgcagatgctgttgaccctcmaaaaaaaaaaaaaaaaaaaaaaaaaaaaaaaaaaaaaaaagg

SEQ ID NO: 902 - DNA, 741 bp, Canis familiaris
aattttaagaagggaggcattccccccccgcccccacttgtttaagggttaaaagcttttttttagaggtgaaatcattgctggtgtttattttttggkacaaccagaaaatagtgggatattgaatgtgggaggctttgattgtcttggggtgtcacgctcaacattccatagaccggggtagttttttatatcctatgaatwccmagcatactaaatggcmatttggagtcagtcgtgcaatttaatatgtcttgaacmttktaaatttcttctattcccatgttgtttttggtagaattgtttcctaaagaaaaccmctcctagatcttggctctccttgtcagaattcttgtgcactctgtaacatcttggttgtggtagtccmgtttttctagtaactgttaatgtgctgtgcmagactgaaaatttgaatatgtagtgtatatgatattaaattgtgaattaatgggacttaacmaagtaacmgtgtatcagcatttgaagatattggtacctgatatactgttaaggaaaatttgcctccmaattttaagctggaaggtcactggaataatttttagaaaaggatcaccmactacatgattttttagatttycggtacgtacgttaagaattgtgtacmaattgaaatgtctgtactgatcctcagaagaaccmataaaaaattatgaaagaaaaaaaaaaaaaaaaaaaaaaaaaaaaaaaaaaaaaaaaaaa

SEQ ID NO: 903 - DNA, 680 bp, Canis familiaris
tttcaagtaaagtttgaattgatatttttatagaattttttaaagccactgtgatttactatttttttttaagttaaagtgtgtttatataatagtccttaacacatcctgtaatggagggatctgttaatttatagatcatgccttgagacctctaggattaatttttttttaaaagaaagttaatgggtttgaagctttttattcaatcttttaactttgagatyctraattgaatgtttttctctttgtgctgaagcatgcatttracatgtcatcmaaagatttttaaagtttttttgagttaaatatttctttttttttaaatatttctaagccacattcatgactgtatcagtatatcttaattttgccatattttgatcactatacagccmaagttgacataaatgggctctagatagcatatatgttgtgttgatgaaatgstgtatctgtgtgtatatatgaccaagtcttgtaaacttatgaagtggctgaaagcctaagttgtttaacaaatgtaatgtaacccctgccmaagttccgatggccaccacagatttgctgtttgaaccacaatatgctgtgcctttctgaggaggctaagaatataccatctgccattagcattgraaaaaaaaaaaaaaaaaaaaaaaaaaaaaaaaaaaaaaaaaaaa

SEQ ID NO: 904 - DNA, 709 bp, Canis familiaris
tctgactgcatgtcagttgtgaagatatactattagcaataaggggatcctgacactcttgacagatattgatgtcagaagtttaaaattgtgttccaagtttgaactagaataaccaatgcgttttactacctgcatggggttcactatgtacttgttttggtggcagtagcacagaaagatcacacataagctttagactgtactgtagcaggtcacaatttacctttgtgtattttagatgtgtgtggaatacctatacttgttagtggaggttacttattaacggaggttggggtgggaagcmatagtactgcatatgggcacttgatccccgaccttccaactactctttccgctgcatgcatctgtccacatggstaacttttaattatgtgtatttttacmttatgtaaattcttaatcagcttgtcttgtttagattgtatacatcattatatctgacattcttgtaactactgtatgatcmataagattcctagaagaaattctgcttttttaaaaaaacacaaagtaccatgtggagaggggtgacttttatcccacattactgggtggtcactaggatctctaaaccaagtacatttttaatgaactaaggtgaataaaggcacaactaaaaactgwmaaaaaaaaaaaaaaaaaaaaaaaaaaaaaaaaaaaaaaaaaaaaaaaaaaaaaaaaaaaa

SEQ ID NO: 905 - DNA, 630 bp, Canis familiaris
agtgccacgcccgccccgcgcccgtgagccccgcgccgcccctcgagaacagtctgacggagcactcggtggacaacgacctcaagatgcacgtggcgccctttggaggcgcagtttcgaaccaacgggcacccgagccgccaccacaagamcagaascaaagggcaccgggccagccggctcacggtcctgagggagtacgcctacgacgtgcccacgagcgtggagggcagcgtgcagaacggcccggccgcgcggggccgcagggcccacctggcccacctggcccacctggcccaccgcgcccggcagcacggcrcggcccagcaggacagcagcgacggctgcggcccgccgccccggagcagcagagactgcgagaggccctggcccagcggcaggagggacgcgggcgggaaggcgggcgcaggccagctcgacggccagcacaagtcctacggcctgaacctggccgtccccaacggccccggccgaggccgcgcgcaggagggccccgcgctgccccccgacggccccagcagcgtcagcaccggcctgtggaaacacgagacggccgtgtagccgcgggcccaggccgaggggtgcgcccaagccgtgaccctcacattc

SEQ ID NO: 906 - DNA, 609 bp, Canis familiaris
aaagcttagctgactgaggctctggggccttccttgcctaacgggtttgagtcacttgtgttgaccagtggcgggtcactcttagccctctcacctgggggacagcatgaactgagtatgcaggacactagcatgggccactgatcwactgggtttgkttgktcttctttacccgtctgcagtactctgagaaggctggattgctcaccatcacaggggaggagcccgaggctttgaggggacatgtggcagaaaggagtctgggctcagatctctgcttcctgaccttggctgtctgcccccaggctcctcaagaaggggtctaccattcttgcaatttcctgcctcataagcaggtccatgtgattgcctgggtaggttgctttaggtcttatgataagaaatggagctggatttgcctcagaagctctagcccttgggacacctgggtggctcagtagttgagcatctgccttcagctcagggcgtgatcctggggtatctgggatcgagtcctgcattgggctccccgcagggagcttgcttctccctctgcctatgtctgtctctgtctgtcatgaataaataaataaaatcttaaaaaaaaaa

SEQ ID NO: 907 - DNA, 2153 bp, Canis familiaris
  misc_feature (2131)..(2131): n comprises a, c, g, or t, or includes no nucleotide
ggatcccaggatggaccttcctgccccaggcgggctgcacacccccctgtccctctcttgccccacctctgtccctgtcccccctatgaggagtgcgtgccttgcccacagcacacagcacacggtccttgacagcctatggtctggggaggggagccactcccacctgcctattcagattcaatgggttctctcaggtagggactgtgaccaagccagagggcgggctggagtccaaagcctctgagaatccccatgcttgttcagccgttgggatttctctggacttctcttctgccttttcccccgtgtgtccagtgggaccatacttagctcctaggaggtcatggtcatgaaggaggagattcagctggtgcagtgagtctccagctgtgcatgaccctttacccaggtccccacaccccagtgttcccaggggaaggggaagagcatcatttgccctaatagaaggcagcactgcctggggtcttgagtgatggagagatgaggctttggaggagcccaggagaagcagggcggccctgcccagtccagtcctgggagcggcctctcctagagtctttggcctctgccaggcccatgtaaagccatggttgggaaagggcaccccagtgccttagaccagtgctcccggggttctgcagacagtagctggggtgtccgagtgcggtactgggagaagcaggtacctgctgccgccaccacctgtgctgaaggcagagggggtgggattgaggggggtcgcagtttctagcttgagttcattagccacctggcctccgctcccctccccagccccatggctgtgtctgcccatctggtcttgtctccgtgggtgccatgctccccttcccacatggctcctccctagccccgtcccgtcttgcttggtcccagtgtgagctgcccccaggccgcctgtcgtccctgtggccggcggcccagccccaccaggtccctctgcctgggcgccaggttgccccgcctgtgcactgccagcttgggccttgtggcgcgtgtctgtctcggtctgctcttgcctgcccgtgccttcggtgtattcatttggtttcttttctttgactagcatagcgtatcgtcgggtcattcgtgtctatcagtatgaagttggggatgatctgtctggaaggtttttctcctcttatttctctcttatctcactgtggttttaccaatgcactcttgacttccccaggcgcgtccgctttctgactaacccacccgcctcggccgcttgggaaggaggggtgtgtcctcctcccactgcaccagcacccagcctcctgcccccgggtcctaggggtgtggcttttccggggggacatggcgtgactgtgagtctgatctgctggggtaggaggaagctggtgccttgccttgctcgagcactttgaacttggggacatttcatagctagccctggctcgaagggtgctgcaggggtagcaggggccatgtgggtgcaggggaggctgggccaaaatcccaagacatgcgcacagtgtgactcatccctgcacgtaaccccaacttgtttgttgtcttcgttcactggtggccttctgtgacgtcacactgtaacgttgggaagatggctccctggggcatccctgctcttcagaacttggccctgggagccttggssctrtctgtctcrtggagcctgaaactggggcctaactgcagtcacctcccttctttgggcagtagaaacactttcaaaacccaaatctggtcataatctcttagcatcccggctttttgtctgaggggtcatctgactgcatctcctccacggctgtcccaccctagaatgtgacttccctcctcaggaacctgcaggagactccaggaattttctgggggttggctctccatttgtcagcctctcctccctaaggtgtccaggtggcagagttgtacagagcagctttctccccagtggctgcagcaggcgggcatgctgtcaggcccatggaggaacctcagctcggttcctcaggcacctttcagggtgtagcttgggcctaaggagcccatgagaaaggatcctaaccccggaaaaggctgtgtgggacttggccctggncccccaatgggcctttggaaag

SEQ ID NO: 908 - DNA, 1320 bp, Canis familiaris
gggggccagtacttcctgcggtgcggggactaccccgactaccagcagtggctgggcctcagtgactcggtccgctcctgtcgtctcatcccccatgtgagtgcagctccagatggggacacaggatacataggttcaagcaaaggttaaacatgatcattagtgatcattcagaataactgaaggtttggacagaagaccagctaccctacagtagttcaatatagtttgccccaaacagaagcaaagggtgacccgggtaccaagtaatcaacaaatatttattaagaatgtgttggccacagtggtcatgtaccagcaataggtcctgtcctggaatcacttacagtggagttgtagaaaagccactaatattcaatagaagaataatcaagtgctagaatatgtagagcagacaggagcagacaggagcagacaggagttgaaaaggaaacttagaggggttaagttttttaagacctctctctcttttgctccccacttgtgtattttggtcccaccacccacccaaatagaagtactttctctcaatggggagaaacccagagacattttatgcacacacgcacatacatttcaaatacgtgttttaaaacactaaggtttttgaaaaattagtgctgggtccttaccgatttttctttctcatgtttcttcattttatccctgaactatcaaataagaatcaactattgtctgagtcacttaagatgtttgactttgctttcgccagaaacagaaggatccaagtccttggtgatttttccaagatttatcttaaacccaaagcaaggtcattcatttcataaactgactttactgttcaagcacacatgcttgaaaaattaaaaacatcttttcaaaatggcaaaaatagtaatacgctcttaaaggtttgagtttctggtatggttgactgaacatgactagtattttattctggcaaatatttaaatatataaagagtgaaatttccttctgaattctatcatactttatggtcttgaaaaggtactgaatctcgagctttgaaaatagggaatatataaatattgagaattacttaaggcaattacttaaggcttgccatatatttcaaaatagcttgagctggactgcatgaaagtgttgcaaccatttcatgctttgctttccccctctttccatctctggatgggccaggctggcgctcacaggatcagactctatgagagggaagattatagaggccagatgatggagttcaccgaggactgctcctctcttcaggaccgcttccacttcaatgagatttactcc

SEQ ID NO: 909 - DNA, 624 bp, Canis familiaris
aaggccttggcattctgtccactgcatccttcagaaagtaatttcctcctgtaaccattgttgttgagtgtaagatgtccttcatgttttctcacaaagtcagtgtttagacatgttaccctaagttatgtgccgaccgaatgctttattcttcatacatccataatctacagagaaactgaactgctcaaatgatcctatttgtattttctgatattaccagactttaatgtttatttcctaaaatattgccatcatgctttaggagttttatattctttacacaatgcatatctttagtatggcatctggtttatataactctgacttsctgraaamgtttaaactccaaattatctgaaactagaaatagaaatagcacataatgactacctttcccttggtggccctcccccccacccccgcccccaccctcaccccgtccccctgactttatgacttccagggacagctctcgaattacaactgccgttgaaccaccaggttcatgaggatgaattttctgagacacatatatcttcatgctgtatacttttattttttttccatgtaagtgaacataaaaacatcttttccaggcaaaaaaaaaaaaaaaaaaaaaaa

SEQ ID NO: 910 - DNA, 721 bp, Canis familiaris
ggtcacgcgagcccggaccagccttccagtagaccgagtccgggccccgtgctcgaagcggacgaagcggacgccgggcccgtagtcggtgaaggtgtgggagatctgcaccagcccccgtcgtcgccgtcggggggcacagccacctggccgctgctgaactcggccagcacgtcctcgtgctccgacagcagcctcaccgtgagctcgtacaggcagcccgcgtcgctgcggcccgagtaccagtccttcgccacgrtcgcaggctgagtggtgtccagcagctcctcccagtagccctcggcctgcaggtcgatgacctgcgctttgcgacaccactcaaaggaggaggcgaagtacttcttgacgctctcatcgtggatgaactccaccccacagtctccgggcagctcctccaccctccagccgtccccgccgtgctccacgtcgcaccagccctccaggtcctcttccccgcacggattgcgcagcaggttgcgccgccgcttgctcagsmmgtagaactgctgccagtggtcgcgctcgccctccgcgccgccctcgggcaccagcccctcctgctggcacttgagcagccagagagggccgccgtccaccagctccttccagcgcaggcacaccaggcggcaggcctgcaccasctsggcggccggcagctccgccaggacgcgcagcagcagcggctcgggcagctcgtcca

SEQ ID NO: 911 - DNA, 590 bp, Canis familiaris
ttaaatcccagtatccatctctagtatagttactgttctaagagtgattaaccgtagcccccgaaccgaggactagccgtaggacagggttgactgtcctgggcttaaaattcatataagaggaaccacttcgcttagggagtaaattactttctttgtcctgactcccmgaaagctttcacactgtttatgtgaaatcttatcaccmgtgacatccactttcctggccttaccacttagagccatagagcatgctcctgattttcaaagaggccmttctactaaggattcaagacatgtggtttcataaaatcaactggttttttctctcagagcacccaagcamcaaaattctccmatctgtattaggataactgaaaaactacccaactgtctcatcacmatctgtattttagcagatttcagcmattgtcccaaagaatctgtcctccattttaactgggataaatgtttttagagtaaactcacgaaaattttttggttgttacataaagatttgctaataaataactgctttgcccataaaaaaaaaaaaaaaaaaaaaaaaaaaaaaaaaaaaaaaaaaaaaa

SEQ ID NO: 912 - DNA, 672 bp, Canis familiaris
ctcggtggccaggatcaccattggaaattgcatcctcagctccaggaccagctcaggaactgaggatcacttcttagtcccccagctcatggactctgtctgtggtcaggtgaccttactcaggagtagacctctccttggccttcatggttgaccttatctctccagatgtgcctgagaacattccagagctcaccggctcttgctagatgtgcctgtcctgcttggccttcagctgcgttctctagatgtgagaagggcgtgcaaaacagcccccactactcatcccctcctcccctgagaccctgtaccataggaatggccacttgacctactggcccagaatttttggatactggaggcagtctcattggcctccctcgttagaatccgggactcagtcctacttgagaccattttggttctaccagtgcaaaaatctagaactgattgtggatctaagagaggatttttctagtgttctacaaaggccmaaagagagggtgagagtgggaggggccagtagccagaggggacctatgtgcctcatttaatagtttagtggtgattactaatttgcttttctgaataaagtttggtttgtctgaaaaaaaaaaaaaaaaaaaaaaaaaaaaaaaaaaaaaaaaaaaaaaaaaaaaaaaaaaaaaaaaa

SEQ ID NO: 913 - DNA, 270 bp, Canis familiaris
cacatttcktgkasmwgttwaagyycgagtgccatttcaccaacgggacggagcgggtgcggttcgtggaaagatacatccataaccgggaggagwwcgtgcgcttcgacagcgacgtgggggagtaccgggcggtcacggagctcgggcggcccgacgctgagtcctggaaccggcagaaggagctcttggagcaggagcgggccgcggtggacacskwstgcagacacaactaccgggtgggcgagagcttcacggtgcagcggcgag

SEQ ID NO: 914 - DNA, 625 bp, Canis familiaris
cagccctggcaccccaggccttttcctcctagctctctccttcctccaggaattattggtggagaatatgatgaaagattaacacttccctttgttggggaccccatcaattcactcattcccgggcctggggagacccccagccagttccctccactcagaccacgttttgatcctgttggcccgcttccgggacctcgccccaccttgccagggcggggtggcccgagtgacagatttcccctaaggcccagcaggggctggccaactgacagcaggccaccgttcatgtgattgatttgtaatctcacttctggagcttgtttggttttgatgtcatcttgttggggtgctgatctctagtgttttctgattgtgatggtgaggaatgcactcacagtggcctttcagtagatctgtttaaagctccaggggtggtagggcccagaggtcactgtatgaccaggttgaccttgggaatagctagctactgacctacaccacccccaccccccgccccgaattcccctcttgagtgaatgaaggtggttcatcgataatgttctgcaccagattaaaaaaaaaaacaaaacawaaaaaaaaaaaaaaaaaaaaaaaaaaaaaa

SEQ ID NO: 915 - DNA, 634 bp, Canis familiaris
cccacctactgtgctatagagacacagctctcttgcagagtaactggtgaacctttgtttgaaccgacactagttagttttaaagacgaatatttatgatgagttgtatagcctgtrargttattkkttctagtaatgtggctttctgtagcyadggcatctcccrmactgtgtggcccagcctcccgkcagggacactcatctcagatttgwacacaaggcayttgcccctctggactccatcckkccagatttcctgtcctctcttgactctcccgtgratcctgtccctgacgtcagggaagccctcccaccattgccctatgccttctagaaatcccktktaaaatctcaatscctttcaatgakttcttctcctatagatttccccacctccccccacccccgccagactctccaacttctgttcaatctggtcatggttctttttaagcccaggcagcattttggtcmctgctccgacctatagtaaaacagcttgaaatatcccatgcaagagagtagtttcaagtgggctatcctgccctctatttaaaagcgtgcacaatcaaaatactatgcattttaagataataaagacagtacaattctwaaaaaaaaaaaaaaaaaaaaa

SEQ ID NO: 916 - DNA, 595 bp, Canis familiaris
aggcccagctagagctagctacagctaaagtgggtgcctcccacctcccctaaacgagatgttggcttctcggcatcaggtagctaccacagcccccaggcttgcttaggcgatcctgagwataggaggaaggctgggggcgctgagaaatgcaaaaggctcagaatatgttakaaatcccacccccagggtggggaggggcaggtaccagacaccgaagaagctgcaccaaggaaacagcccatgggttctcctgagtcgggctgcgcagcccagaacccctggccactgcgcccagcaggacaggctgtgccaatcaggagcccagcacccagcctgcaggaatcccagtgtgcctgtccctgctggcaatggctgttggctgccagtttttgctgatacaggtaggatgggaatcttcattaatatttgactttaagaagttggtaaggatatattttttttgtctatgttctgtttcaacttatgtagattattataaattgatgtaaaccacgtgagaggaaaatgttaataaawacaatgcaaagccccaacatttgcacacaaaaaaaaaaaaaaaaaaaaawaaaaa

SEQ ID NO: 917 - DNA, 657 bp, Canis familiaris
ggccaagcagcagtacttggctttgtgcctgctcgggagaaccctgtgtcactgctgcctccgttcccacagttcctggacgctgagggctcgccaggagggtggcattggcagcmagtcccgctgccttccctgcagtacccctttcctccaccccaagcgcccgggctcagggaccacagaaaggcagctgtggattgttgttacactgkccttgcctggcccccaaggtcccccttgccmcctgggccaggccaggccttgtatagcctgggaccatgggggaccagcctggacaggccgggcagcacagcgagaggagccaggtggggccagctctcgccacaccctggctggtcagtgtgcctcccgggctgtccagccccatagccccacgtcccgttcatgccactgcccacagggtgccatcctgcccgccgcatgcccccttgtgccagtcgcgctgccgtgtgtggtgtcgcgccctctccccctggggctgggttggcacaccctcccctcccatctactcaccccctggggtgttcctttgccgatttttgaatgtgattttaaagagtggaaaatgagactatgcgtttttataaaaaatggtgcctgaaaaaaaaaaaaaaaaaaaaaaaaaaaaaaaaaaaa

SEQ ID NO: 918 - DNA, 686 bp, Canis familiaris
tcgaggactgaagacgagaacccgtgctccgcgcccagctgcacagcacaacctggagatgtgggcgagagtgcgagcagtgacgcccagcccgcrgcgcgagggggcttctccggcmcctgctgccccttccccagcccttagcacagagagggacagacgcccctcccccagctgcgtttttttatagtagatttttaacmaaacggggagaaataatgcatttctgtggataagctcccaccgctctcctcaacttgagaagcgatctcctccctcccctgtctgtctcccttctctcggcccccactaaagccccagcacttctagtggtctcgcctggaggcaagagggaggaggacacaggccctgccctatcccgctgcctccttggtctctagaggtactgagacagggtgctttcgggaaggaggggagcctttagggggkccaccctggggcctggacctgagcagggaggccatgtcccaccccacctcttgtttctggatccctgctcccctttgagtgtgtgtgtgtgttttaattttctttatggaaaagtggacgaaaaaatagagagagagaggtatttaactgcaataaactggccccatgtggccmmrmmwwrwmmaaaaaaaaaaaaaaaaaaaaaaaaaaaaaaaaaaaaaaaaaaaaaaaaaaaa

SEQ ID NO: 919 - DNA, 649 bp, Canis familiaris
ggaaaattttataacataggcgatcagagaggccacggagaagatcactgccagtttgtggactcgtttttagatggtcgcacaggacagcaaytcagctctgaccagttacccaccmaagaaggctatttcagagcagttcgtcaggaacctgtccmatttggagaaataggtggtcacacccaaatcaattacgtccagtggtatgagtgtgggaccacaattcctggaaaatggtagatgctgcaatcgtgatcaaaagtgccttctgttttaccgtggcaaagaagtaattggaaacagctawagtattggtcacattcatttaaagctgttatgtttactatgtattaaagtttaatagcaatagtagatgtttattagaaatattgctgagaatatttatcaggttttacaaaatcattttaagaaaacaagatattgacattaacmataacatttttagggaagctggctccctaattcatggtattttaagagatcatttgtatattatttatcgcactgttgtaatgatgttttgagatacttttataacaaatttaacatcaaaaactaatatacttaaaaaaatacttttattaaagtgtatgcttcttaaaaaaaaaaaaaaaaaaaaaaaaaaaaa

SEQ ID NO: 920 - DNA, 2895 bp, Canis familiaris
gcccccgcgctgccccggctgcccgcgctcctggccctcctcggggctctgctcccaggacttggaggtgcccagacgtccgtggacccagcagaagccatcatactccgaggaggctctgtgcaggtgaactgtagtacctcatgcaaccagacctccatcttcggcctggagactctgttgactaagacggaagtgacctctggggacaactgggtgctctttgaactgactgatgtgcaagaagatagcaagctgatatgtttctcaaactgtcatgacgagaccatggctccgatcgacctcaccgtatactggttcccggagcgagtggagctggcacccctaccccgctggcagcccgtgggtgagaacctcaccatgacctgccaggtggcaggcggggcgccccggaccaacctcacggtggtgctgctccgcggggaggaggagctgagccggcaaccggccgtcggggagcccgccgaggtcacgttcacggtggcggtgggcagagaggaccacctcgccaacttctcgtgccgcacggacctggacctgaggcaccgagggttgggattgttccagaacagctcggcgcccaggcagctccaaacctttgtcctgccagagacccccccacgccttgctacccccccgattgtggaagtggrcacacagtggtctgtggactgcmskmwsgakggggtgttcccagcttcggaggcccaagtccacctggcgttagcagaagagaggctgcactccacagtcctgtacaaaaaggactccctcttggccacggcaaatgtcaaagcaaacccagaagacgagggtacccagcagctatggtgtgaggtgacactgggagacgwgaatcggaggtggcaggagaatgtgaccttctatagcttcccggcacccaacctgaccctgagtgagccagaggtctcagaatggactacggtgactgtggagtgtgaggcccctgctggagtcgtggtgtcgctgagcgggcyyccttcggggcttgcagtacccagggcacagttccaactaaatgccagcgctgccgacaacaggcgcagcttctcctgctctgctgccctggaggtggctgggcacatgctgcaaaagaaccagacccgggagctccacgtcctgtatggtccccgactagaccagagggattgtccgggaaactggacgtgggaggaaggctyccatcagaccctgaagtgccaagcttgggggaacccggttcctgagctgaaatgtcaccggaagggggatgatgctttgctccccatcggggacctgagacctgtcaagcgggaggttgctggcacttacctgtgtcaggcccggagcccccgtggtgagatcacccgagaagtggtcatcaacgtgatctaccaccagaacaacattcttatcatcatcctggtgacaaccattgtcatcttaggaactgtgagtgtagccgcttacctctataaccgccagcggaagatccagaaatacaagcttcagaaggcccaggaggcagctgccatgaagctgaacacaccggccacccccccctgaccctgggccaggacccagcctcctcctctgcccccgactcggtggcagcagtgtcacactggcagcggtgccataatgaatggtggtcacaagccactcaccttcccaggatgcctgaggacagggtagaggcctcaggatacagacagcatttggggtcctggcacctgcacattaagggtcctcaagcctcacacctgacctgaagcctcaggactgagccacaaggaagggggcaggacttggggcatgactctgatggacgtctaagcctgacctgtgtagagggggtgtagcggaacactcaagcatgggatgcccaactgggaaaccccgaaacttcacccttacttgcatgtgctgaggccctacagtcctaagatagaagtggcctgcacacacagaaatagcacagaaacatatatccctatacttcctctgatccatgccctgctgtccactgactgtcctcaacttttgataatgacatatttattaatttgttcttttaccagctatttattgagtgccttttatgtgggctagaacggtaaaggaagaggaaacgtaggttcctgtcctcagggagctctcagtctaacctaattcagggttgccaggtacagttgtactagtgttgcactgcacaggagtgcctggcaaaaagatcaagtcagagctggaatttcccattccattggctaagctgctttcctccagaggaggactggcaatggtgatacagtttagttggcgacatgcccagggacaacccactgagccccatactcctccccgtcactgacactgacctctgttagccgtctctctccccatacgcatctctgctagtgctcacgatgacatcgctgcatgcctgaacacgaatgaccactcactggcagctaaactgtggagtcccatgaaactgcccaacccctatgtgtccctgcctggtcctgtttccatctcggtggcaccatacaaggacacagcactctggcagcccaaattcctgcagagacgagggccctgcaggcagttggcagaagaggccggcgaggattcctgtcccagctccggaagcttctctcttgtagtaataaagcttgtctgtgggcgcttgtcttgtgtgagtggaggggaggtgtcatgtccagttgggagttctttccagccacaacctcccacttcctcccccaagaaaaggctgccggttcaaggcccacccctgaggctctaatccaaatttggggcttgttaggaccttttgagactccagcgaaaattaaagatccctctctccag

SEQ ID NO: 921 - DNA, 643 bp, Canis familiaris
ccctcccccacggcccacttgcatgcccctctggccttctgaagatgaagcaatggcttatcggacagaggctttttctactycccgacactaggacatttaccacacaaagggktttctacctgctggggccacctgttggcctaccccctcccccatcagcacagcacgacagtcctatcvatcgacactcagscaggtccgttcctctgtgacacggtatttgacggtacgggtccctcttgaccctgtgctcgcaagaccttttctttgtcagtttgtagaaaccggtggaccccaggaggctgacgggtgtggtcagaggacaccctcaatgctagggggtgttytggcctcctggggccctgcgcaggccggtgcctgggacagggtagatgccattccagggaggagaaaaaaatactaccmattggctttggcmaaacmawttctgaaaatttttttgctttatgtgggaaataggtataaatctcattttatgctgtattttatatcttagttgtgtttgaaaacgttttgatttttgaaaaccatcmcaaataaataatggccatttgttgtaaaaaaaaaaaaaaaaaaaaaaaaaaaaaaaaaaaaaaaaaaaaaaaaaaaaaaaaaaaaa

SEQ ID NO: 922 - DNA, 569 bp, Canis familiaris
ataacacgcggttcaagtatactaacagtcatatgctcaggtttttgtttttgttttgttttkggcagttgacmagaagttaatttgctttagtgaaaatccctcatccaccctttctctatgaatagcctcttccttgctgttttaatgtggtacacactatagcctcgcagacctattactccagtataatctgcagtgtcctaactaaagttactgacttggtcttatctgcagtttttgtgtcctgtttgcttcttgaatctgattaactagaacatttctcttgctcctttttaatatgtgatgtcacttgacctaatttatgtgtagaagcactacrccattggtttccagtaccctatgtgtaagatacacacttgtgtgcagaaagtatctcccttcaggcttgtaatacccttcacgtggaagatcmatgagggaaatctttatattctgtataaaaacmaatcaaatttatatactaaaatcatttgtctaaaaatttaagttgttttcagataaaaataaaaaagcatttctgatatgcactgaaaaaaaaaaaaaaa

SEQ ID NO: 923 - DNA, 589 bp, Canis familiaris
gatgaccgggggcttcttccacaaggaggagttcaggcccaacgccccctaccggatcttwaacacctggctgggggacccgtctaagaacctgctkctggccgaggtcatcaacatcatcaagcgggaggacctgctgaataacgcagcccatgccgggaaggccctgctgacggggctgctggacctgcaggcccggtacccccagttcatcagcagagtgagaggacgaggcaccttctgctccttcgacacgcccgatgaaaccattcggaataaactcattctaatggccagaaacmaaggcgtggtgttgggaggctgcggggacmaatccattcgattccgccccactctggtcttcagggatcaccacgcacacctgttcctcaatattttcagcgacatcttagcagacttcaagtaaagaagccatttccactacgcaatgagaaagccccgatctcaactgttgtcaaattgattagtttgcctaattcatgtcttcacttaaagtatcagaggcgaatgcgtaaaamaaaaaaaaaaaaaaaaaaaaaaaaaaaaaaaaaaaaaaaaaaaaaaaaaa

SEQ ID NO: 924 - DNA, 687 bp, Canis familiaris
tgtgttgccatggcagcagattgcgtcgagcattgaaatgtggcaattcctttttggactttgaagtattggatttgctgttttaagcatttgtacatattagaagtctgaagagtagcaagctttgagaaccctggcattagcacctttgacatctttccccaggtgaccagctcctaatgtchacwaggwaagcctgtatcatgaacaggakcggtgacccaggagcaggcttctgctgcttkttacccttgcctggccagcaggttgccttctgtcctcccccctcccagaggtgtttaggatcttttgtttctagtgtcmactcgggcttttcctcataggttctttgccctgggtttaaaagaggaggcgtctctgggtgtcctaagacctgtctttaggaagtcccattccmaagagatggtagtattctggaaatctgcttaaaaacmagaagctgtctgatttttgcmaaagagagaggttaggtttttattcatcttttcttttacagttctgcagttccatcacagtgttttttttcmataactcaggtgttaatgaggataaattagaaaagaaaataacttatgtggactgtaaatgttttatttgtaagattctataaataaaagctatattctgtactactgaaaaaaaaaaaaaaaaaaaaaaaaaaaaaaa

SEQ ID NO: 925 - DNA, 635 bp, Canis familiaris
  misc_feature (36)..(36): n comprises a, c, g, or t, or includes no nucleotide
gggggccacttggggatccacccagagttcgcacancctgagtactctcctgatagcacatctatgcctatgaaacttcgctgttctgggcttagatctctgcacggtcaagtctggccctatcttkgacmactttcctcatcaccawcgacgaggcgtatgcacgaggagtttggaaatgagacctggggtgtcaccgaaggcggcmgagaagcagatgaaggacmagcaggatgaggagcmgaggctaaaggaggaggaggaggacmagaagcgcacaggaagaagaggaggccagacmaggaagatgaggaagacmaggacgaggatgaggaggacgaggatgacmaggaggaagaggaagaggatgatgctgccgctggccaggccacaggacgagctgtaggggctacactgctgcctctagggctggactgaggcctgagcgctcccgccgcagagccggctgcgccmaataatgtctctatgagactggagaactttcatttttttccagcgggttccagctcggctcacmctgagaatgtaagaactaccaaacmaaatttctattaaattaagttttgtgtcttcmaaaaaaaaaaaaaaaaaaaaaaaaaaaaaaaaaaaaaaaa

SEQ ID NO: 926 - DNA, 619 bp, Canis familiaris
cccttcaaagggcttgagtaggtgggagctgactcaattggggcaggtttgtggcttgagatggccagaagcgagtggggattcctgtgtatgtccgaagcagctcctgggaagcatcgggtggctcttgtgccatcgaaggaggtgcagacaccaggtgkctgggaggagcatctgccaagggggcgcagagctctgccccccatagttgggccgaagcttgttggtagaacttgcgatgacccatcctcggggtccccatgcatttgccaacctgtcccacatcccagggctctcatatgcacgcatgtgtgtgcgaaccggtctcgatggtctcgtcggggtctcctggtgtgatgagatggggcgtgcagctgtaccccagctatctcgggagactggggagtccatggactccatggtccgtcgttttctctgacgttttcagtgttgcatttttgcccaccccgcctatcgtggcagcagctcaccagcgtcagagtggcgggctggggcacccggccatgcggccgatggcgggctgtcctcatgggtgtcctctgcccattgctgccggcctgggccactggagccggtgcagtctgcgtgttttctctct

SEQ ID NO: 927 - DNA, 661 bp, Canis familiaris
ccatgacttgtgcaatcggagaragctacaccmgccarcccagcgtcggctttytgatccagtattgcacttggtagggttkctggggctgctgstagscmacagcaccagsctgkggttkggggaragbcagatgactaggtgacctgctgcacttccmgctggctggagagtaccactcccacttgggachacatcaggcctcccctgcmaagagtgtactgtcctcmaagcagagcmgttacacacaggtgsycgtgggcggaattgtytgccmaagaaatttctggcctttccckttcccttaactgcatcagggaagaatccttatctctggcttggtttccacataaggtttttttgaggaaggggactgggataagaaatctgtcatgtagttaagtaggcmagaaatcttattaatccmattttgtttgaaagttgcttgtccatatgattttttttaaagttgtttagtttcacmacttttttttttctgaaattacttttggggtaatatttaaaatgagagacmttttgtaaccctgtaaaatacatagggaatataacattccagtgtacacmaagaaggaaaattctttmatccaaataaagagtattataaaatgaaaaaaaaaaaaaaaaaaaaaaaaaaaaaaaa

SEQ ID NO: 928 - DNA, 608 bp, Canis familiaris
ctttagcctccacgtcattgttaaccatcacagaaatataatctaccttgcccaggagataatcwactgwaaagaagtcatcackcgatcgttggggcccccgaatggctacagaccaaaggtcccaagctctcaggccgacgagtagtctatgtctcgtccccraacgacacttctctggagwacagatgccacawaattgacaactggccacttcttgtgagctcctgagtattcaggagccaccggaccccttggctggtgtgttgcagcatggtggctttctgagtcctattggccacgaagtgtcagactcagtactgccgggactcttgccaagcagggagcaagagataagtcaagaaggtgagatctgccccggtgggtgtgtgaatgggggtgtgcgagatgttggaacgtttggtactatccatgtctgggtgtgtgcctattacctcagcgttctcacaaagtgtaccatgtagcatgttttatgtatataaaagggagggtttttttttttaatatattcccagattatccttataatgacacaaatctgcaataaaagccatcagtgctttgrmwrwaaaaaaaaaaaaaaaaaa

SEQ ID NO: 929 - DNA, 704 bp, Canis familiaris
tataatcagtgcttatataggtgtttgatttattctctttgctgtcgtcattttaaaggtggtataacttagatgtgccagacataaaattaagctcaataagctctcattaaatgtttagacacctaatttatattctaattgatcccagccacctgatgcatttactttagctactcctactaaataagcatattaattttccacaccaggccatcagatcttaataaccgaccmgttatctagaactcagtgtctcctaatattttcccctgcatgcasccttcattgattttgcagcccaaatatacccgtaatcattatktcgcttytggattaaaaatttttcgtgtgttaagttgcccttgtaaagagccactgttgagtaaatggggccacgccgtggccctttgtggtagttgttaaagcccaaagaaagatgttggagcmmctttgaagatagatcttttcacggaaaactgtagtaatttaagttttttgagaaagaagtgatacccataggaaattgtcataatgaagttcttcatccagcmcggtgtttaaccacgtgttattttgcccttttgcccattaataatgtataaccatctatgagtgatttaccaataaatgattatgaatttgwwrrwaaaaaaaaaaaaaaaaaaaaaaaaaaaaaaaaaaaataaaaaaaaaaaaaaaaa

SEQ ID NO: 930 - DNA, 516 bp, Canis familiaris
gcttacatcragaaktcaaacccggcactcaatgataatctggagaaggggctcctgaaagycctgaaagttttagaccattacttgacatcccccctcccagaagaagtggatgagaccagtgctgaggatgagggcatctcacagaggaagtttctggatggcaatgagctcactctggctgactgcaacctcttgccaaaactccacatagtacacggtggtgtgtaagaaatacacggggattctccatcccagaggtgttccgcggagtgcatcggtacttgcgtaatgcctatgctcgggaagagtttgcctccacctgtccagatgatgaggagatcgagctggcttatgagcaagtggccaaggccctcaaataagtccctcctgaggctccccgtctctcctctccattttctccacmaagacaccagctggttttcacgtggctacccmaaggacacacttcaaaatggccagtgggcagagaatcctgaagcgcttctacagggc

SEQ ID NO: 931 - DNA, 600 bp, Canis familiaris
tctcaacactactgtttggggcacatgaagtctaagggtctggtgaggttaggaagaagctgagaatgtcagtgacagcatctgaggaatctaggcctgtcagaccmagattkgttattcagaaaagttaagtcatctccttagagatcagttgtgttattcctggaaaatgttttccacttttctgsmaatctatatctgacctgctgaggaaatcatttggtgaaatggatccagaaagcagagaatgcttcattactttaaatagcagcmgtaagcccmttatagcctctgaattgtcccttcttggagtttgctaatgtttccaacttagtcatttggagctcaagagtacgattttataagccccgactgatagactcatctcttatagactgaataaattatctatctgttttggactatatattgtgaaatttraaacmagatcctctccacatatgtcattattaaaccmaatttgtgctgtgttgtgtgatactttattttctggaattcttggatggatctaatcaaataaagacctcttgaacccsaaaaaaaaaaaaaaaaaaaaaaaaaaaaaaaaaaaaaaaaaaa

SEQ ID NO: 932 - DNA, 620 bp, Canis familiaris
cttctttctgaaatagtcaaaacatgaaattagagragacctccctgtttcaagstacctcaaccttggtcagaaatacagatgaattctagaagtcctggaagatgaaaaaaatcataaattagcsataatttcctaaattattgataaaaaagtatagtacgagaatttaaagaaaaaatttttttaaatcttgacgattgttaatcttggatatcaactgcttttaaaggtgcttttctcctttcttgtcattgctgaaatggtcaagattacccacatttgggaaggctttaaagacacatgttatggtgctaatgtactttcactttaaaaactccaggtcagaattgttgccttgcattcaaaacataaatgcacaccatctttcaaaaaaatttattgccgtgtcacttcaggggactctctctcccttgatcctgtaaaagtcaacaacaacaacaacaacaacaaaaaattatggggctgcttttgtcacagtaacacagagaatgtgctgaaatttaactttgtaagcttgtatgtggttgttggtctttytttttttttcctccagacacccataataaaatatcataataaaaaaaaaaaaaaaaaaa

SEQ ID NO: 933 - DNA, 574 bp, Canis familiaris
ggacctgtacgccaacaacgtcatagtcggggggcaccaccatgtaccccgggatcgctgaccgcatgtcagaaggagatcacggcgtctggcccccagcaccatgaagatcaagatcatcgccccacctgagckcaagtactcggtgtggatcggcggctccatsctggcctcgctgtccaccttccagcagatgtggatcaccaagcaggagtacgacgagtgccggcccctccatcgtccaccgcaaatgcttytagaccccacgccaccaacagcgagcgaattctcctcaggacgacaaatctgctcaggttgcaggtggctgacctcgagtcaccgctgcagcaactctgtctctaacaacttgagttgctgccgccgcaaccctayacaatgtttataacgtgtacatacattaacttatttacctcattttgttatttttaaaacmaagccctgtggaaggaaatggaaaacttgaagcattawactcagccattctgtctgttgcgtaawaaaaaaaaaaaaaaaaaaaaaaaaaaaaaaaaaaaaaaaaaaaaaaaaaaaaaaa

SEQ ID NO: 934 - DNA, 593 bp, Canis familiaris
cacttcactccgttcctctcacactcgatgaagatcaagtatgtkgtcacctgatggtttcaaagatcccttcgtataccccyttatcttgttccttggacttgttctgcctggctgggagttggtggctttascaaattagttggtggttgagtaagtgattggaactcctcgaaagcaagcagcctcacaatctgttagcctgggaggtctgtgatgtgactggagattctttatgctgaaaacagcccagtcccacgagatgacttgtctggatttaagaactgaaatagtattcactactgcttattgcacagcagttgtcactgaatcgctccactcttaaaggatgcttctggaaaacagtacaactaggtagtagctaaatacmaaatctatgggatttggtctgtgtctttttctagtacagattttaagttactacgaatttcagtagtgttcttcaaagagcmaaataatgttaagaaatatttgaaatctttgggaaatcatgaaatttgtattatctttgtattttttataaaaattccaaaataaatttccaaatagcttttaaaaaaaaaaaaaaaaaa

SEQ ID NO: 935 - DNA, 668 bp, Canis familiaris
acaacaattttgtagtagtgcagagtaccatagtaaaccagtaagctgctctattgtagcatttcttaatgtagcttgttcaagcgttttatgaacatgattcmatgctatggatttcttgttttcmaattttgttgttgggcmactgrrwaaagtaagtggtttgtgtgatatagtcttttcattggacatctttttcatagagttcagatagctagcaggttataattgccatcatrawaccatcgwwaagatctcatccttgtcctcttcaggcctccagggaagccttttgcctcagttctattgcacttgtagaaaatctggtcctttgccccacttgtttaacgataaaagattaaatttgtttcccaagggaaatgttcagtttttctaatgaaaaktgctctttttgtaagtagtcttctgtctagtagtagtacttgtagatatcacccatgggcctttaattatttttggtcacattttccatagggttaacaccattttggcttaaaaaaaatataacttgattgctaattgagaattgctttattatgaaaaggaaatggttctgcctttgaatgtttctgttgggagaaataaaaagactttcatgtgaaaaaaaaaaaaaaaaaaaaaawaaaaaaaaaaaaaaaaaaaaaaaa

SEQ ID NO: 936 - DNA, 550 bp, Canis familiaris
gaggattctctggtccagagccggctaccggagcctgcagcatgactcacaccccccatggcagctgaaggaccccaccgggaatattctggctgtgaggagctgggggtgtctggctggcctgccttgtccccacggcactgagccactgccctccatgtgccatagcagtgccmgtgagagctgaccccgcagtggggsctgggctctgctgctgacctctgccccttcccctcccccccgcagcgcgactgtcctttatgtcagactctaggtcactatttttgtgaaaagctatgcgacccccacagccaaggccactcctgtcctctcctgcccctgtcstggcattcaaacccctgcactttgcacactgcacccagagcacmggggatttttagcatgtgtcccaccctgagtatgtttaggcttataaagcagacttcaggctcacatgtattttactttgttcaggctgcagcttcctctgttgtgttggatcaccctaataaagacttcagaactgaaaaaaaaaaaaaaaaaaaaaaaa

SEQ ID NO: 937 - DNA, 652 bp, Canis familiaris
gtcggtgggcatcgggaattkccgtagtgatgatatttggcatgatcttcagtatgatcctgtgctgtgctatccgcaggagccgagagatggtctagagtcagcttgcacccctgagcmggwawgtccacccctaaagattgttggttattttcttggggttttgtttttttgtgtgtttttggatattttttkkgggggkgttggggttttttgttttgttttgtttttttggtgtgttgtttttgtttgttgattttttttttttttttgccactaaccttagtattcattctgcatttctaamcharaaggttattccatgtttgtctttttaatgctttattcmatattggtatttttagttgagagatttggggatttggttggctttagtttatatttttttggttgtttgtttttgctgattatgttaagcagaaatcctgcaatgaaaggtactatatttgctagactctagacmagagatattgtacataaagagaatttttttttgtctttaaatagataaaaaaaatgtctatcaaatttaatcaggttgtaacttatgttgaagacmatttgatacataataaatgatgatgacmatawmmwrraaaaaaaaaaaaaaaaaaaaaaaaaaawaaaaaaa

SEQ ID NO: 938 - DNA, 649 bp, Canis familiaris
tccacttgtggtcggtccaggcagtgttcaaggctawttttagtggtaaaaaaaaaaaraaatttgggtattcttcactatcccaaaagataamcccagaagaaatatgtatcatgtgtgatctatctcmaaatgtgttttcaagagcatctgaaattttgtttgtacgtgtatcttgatcatttataaagctactatgatccataattcaagaaaatttgtcttgccatttttaaaactcmaaaattaagacgtccgtaatttcmaagttagacattaaaatgtatgtgaaagracagactatttctgatactcttacataytagagaagttgttttacttgctctctttgtttttcatttaacttacaggtgaaggactttggttgaacttcataatataagaactgttaaagtgaaaatgtcmagtaaaaggaaagccctacatccmwaaagaaagactgaacmattatgccctcwacccttaaaaggttttaaaacctgcccagaaatccacctcagtatctgaagtttccctctgtctcctcctctaattacgcttgtcattggttatgcaccagcattcgagataataaaatttcttgttctgtgwawaaaaaaaamaaaaaaaaaaaaaaaaaaaaaaaaaa

SEQ ID NO: 939 - DNA, 565 bp, Canis familiaris
ctgtatcctctgcccctccttccccagagctgggcatttccgttccacaagctgctgtggggacttttgttcccctcctcaaaactctgtgccatcttctcccacccctcctgggtagaaggcggggctgacccctgggccggagagggaggggacggatgcagggcagattggctcctcggcccccagggggccgcctgggctgctagtctctgaacagggatgccaggcactctccgttatgggagagcctttgtctgaaagcacagccccgtgctgttcctctcccctgcccccttcattggcattaatctgggcaccagctcgttccatagcagtgactcccctcaccactcatctcccgcgccttgccttttcttcctgacattgtcgcccctcctctcaggagacactgcccagggcctccatggccacctggcaggaggctggacagggcagcggggccgggagcatctgccctcccagggggtggggggacagataggcccagcgactcccagcttgctaacctccttggccagtgtgggagtggctggttatgggc

SEQ ID NO: 940 - DNA, 571 bp, Canis familiaris
cccgggagggagcacctagtgccagggaggagctgtgagggccacaacaagtgtcagggccctggtgggcaagggctgtcagtaacccagcacttgacccagctgcctggccccaaggcttaggccgaatcacccatctgcttggacctcagtttcccagcagataagacccwagataaatgaaaaaaaaaagwaaagaagaagaaaaactttcttaccctcctaccactctcaaagggatgacacatagataaatcaactttgaacttttagatgaaaggtgctctctataaactcgaggtctcatcaaccgtaattgttacggtaattattttaatgataataatgatgataatgggagaagggggggcacgggtgaggacgaaacctcctaccttgagacmaagaaaaactcttccattaaaacctgcatcacgatgccttctgctccttgctctcaaccatctctttcaaactgccmattcccgggctgaaatattatttactcctctccttccccaataaaacmattatttgttccmccgttaaaaaaaaaaaaaaaaaaaaaaaa

SEQ ID NO: 941 - DNA, 640 bp, Canis familiaris
cttttcgcagggtgtctgtgtggctcacatacacctactttttaataagtgatgtaacaytaaatcttctctaaaccyaaagaaacttaatcaggtgtcaagtaattttccactttgagagctgggttaatcggaatttaattcatcmaagaamatgatatctgcagaactgctttgcacgttataaaaatgcttatttcacmacttgcttttcacataacctcttaccattaatttgcctaacagacattgatcgccctaaaggactggcattcactgatgtggatgtcgattccatcaaaattgcttgggaaagcccacaggggcaagtttccaggtacagggtgacctactcaagccctgaggatggaatccatgagctattccctgcacctgatggtgaagaagacactgcagagctgcaaggcctcaggccgggttctgagtacacagtcagtgtggttgccttgcacgatgatatggagagccagcccctgattggaacccagtccacaggtatatcgttcactgccaccgctgggtattcacgggcgccgtggctttatgccctgctgaatgagttaattatatcgggctattgagtccctgtaagggggttaaaaaaaaaaaaaaaaaaagg

SEQ ID NO: 942 - DNA, 690 bp, Canis familiaris
gacttaatcccttagtcaattagaaattgcctatggccagtttctttgttgaattaatattaatccctaattgatttttctgggatttatacagattcctgtttatatcccaatatattgtttaagaccgtagctatagcccttaacccaaggaccgatgatatatatatgttgttgtktttktttttttttttttttagctgtccctacatacctgtatcagcatcatgtatgtaggtgtgacacgtgtttcmaacagcccctytacccggcctacgctcttggctccagctgcttgggtaggacccattwgaacatctgttacgctcatcttgaaatgggatttcttcaaagcagccmacactacatcaccagtgtttcmaattggaaccttgaggctagttagtataacactcaggccacactcagcacttgcccacactctgtgtttactgccttgtattctagtcatttgtgtatctgtctgtctcccccactagattatacgctccttgtgggcagggactatgtctttttcatctgttgtatcttttatggcacctagcacagtgctttgcacatagtagtcatcaatgtttgttaaataaagctattagtgtcattaaaattccaaaaaaaaaaaaaaaaaaaaaaaaaaaaaaaaaaaaaaaaaaaaaaaaaaaaaaaaaa

SEQ ID NO: 943 - DNA, 575 bp, Canis familiaris
tgggcgggcaaccacacccccgccagcccacgtcccagcccttgtcacmcctgcccagccagctgggccacctgcccctgcagcctccccctcccaccgagccctcctggcctgcatcccccccacccccgcccccacccgacacctagcccagggcccccccggcctcagggctgccagggaaactccaccccaactcttaccaggagctgctacaggcagagcccagcactgagagggtctccccgcccacaccagcccatagcccccccactgatctggaagtgaaggcccaggggacatggggggaggagggcattggtggttgacaagagttagtgccttgggtgggggatgccaggactcatgactgggagggacaggaaggggacatgacagccctgccccatctgtgggagcctgagggcccaactgggggcacgtaccctccccaccagcagcccacagatgtggggccaggatgcctggcctctgtgtcctagaagggaccctcctgtggtctttgtcttgatctttcttaataaacggtgctatccccgcmaaaaaaaaaaaaa

SEQ ID NO: 944 - DNA, 664 bp, Canis familiaris
cttaaggcaatctgtatktcaaagaacctgtctctgcagtagatcttgcagaggawatttgcactattacacttgaaaattgttaacttttttggcagctcaataggaaagctcgacattttaaacatggtagtactggaaatttcgacaagacttttacctagcacttaaatatgtataaatgtacataagaccaacctagtaagcatgacctggggaaatggtcagaccttgtattgtgtttttggccttgagagtagcwagtgaccagaatctgccatggcaacaggcttttaaaaagacccttcaaaagacactgtctcaactgtggtgttagcaccagccagctctctgtgacatttgctagcttgtagttttctaagactgagtaaacttcttatttttagaaagtggaggtctggtttgtaactttccttgtacttaattgggtaaaagtcttttccacaaaccaccatctattttgtgarctttgttagtcatcttttatttggtaaattatgaactggtgtaaatttgtacagttcatgtatattgattgtggcmaagttgtacagatttctatattttggatgagaaatttttcttctctctataataaattgtttcttatcttggcattttaaaaaaaaaaaaaaaaaaaaaa

SEQ ID NO: 945 - DNA, 641 bp, Canis familiaris
ataggaagattctggcaaaggggcaaaacccagttcaccatagagaatgtgaccggaccggatagttttgctgatgtgaaagttcacawccwggctctttccraacatcaagatggcaagaactgccatttgcaacytcatcctgggaaatcctccatgcaaaggtttacggcmatatccgagccgctggctagcagagcagcagatcgattctgatttcmaatcagaggcttaccttgtctttggactcgagtaaataaaagcccttgccctctgcctgtggtcacaggaaaccacgtgaagaactctttagtcacttgcagccttcatcgcttcttccgttctcagccagaagcatcagcagaaagcmaaggtttgataatacagcaacttgaagatccttcccgtatctgaatttaataccgtaattatacatcataatttatcacttcattttaaataaaagatttgcataataatgctcttattggataaactgtcctatatgaatttatttatgaatttgtaactttttataaacatttcttgtctatggagtgtaattaaacmatcagctccacmaaaaaaaaaaaaaaaaaaaaaaaaaaaaaaaaaaaaaaaaaaaaaaaaaaaaaaaaaaa

SEQ ID NO: 946 - DNA, 663 bp, Canis familiaris
agaattggaattacccttatgactctcaagaggctgatgatgtgacctggtgtatatagaactggcttcaattcagccaactctcactgagcacctgctgtatactgagcactgaatgggggagggggatgggagcmctgagatgatcmacatggtatctgggctgggggscacggcctgctaacacatggggtgtcgttcgggcacagactcacatgtgatggatgtaaggcacggaagtgatgggagacggcatgagaatgtgtttgtggaattacagagaaagcagatgcacagttggtgcagaccmaggaatgcgttctggaagagactgcacttgagccaagttcaggaaggatctttgtaaacagagaggagattgtaacttgaaagggtgataggatgaggggccagaaggaggtctattatactctcatttaaaacatcaaccctctgcaactctctttttggccagcatctttcaactgtcctgaccctttagaaatgtccccagccagacacaatcattgaaactgcctcattatcactggttgagaacttggcaagatgaagggcttttgttattgttgttgggtatttttgtttcccataaaagcacataatttcaaccccaaaaaaaaaaaaaaaaaaaaaaaaaaaaaa

SEQ ID NO: 947 - DNA, 631 bp, Canis familiaris
tctggagaaggcgccagtcggagctgtcaggggcaccggatgaggcttccagggctgagatcchaatccgcatcgaggccmacgaggcyctggtgaaagctctcgagtaggcggtgcgtggcccttgccagcagggaaactgaggcccatgtccctggcaggctgggccagctcccatgggtccagagtgatggcgggaggcgggatggscggaaggtgagaaagcctctagagggatgcgccccgtgcagggcgcggtcttgccgaagctggcctccmggggkcagccccgttaagcttcctgccgggagcagcctcgtcaaacccgggaagctgaggctccatggggggkttggggctgctgactggggctgagctcagagaccttgctctgctttttttttttgggggggggttacccccaccgtgggctcactgtccaccttccagccygtcgctacccacctgatgcgcccctgccatccttctggccccgtagaccctggcgtggagacccattcccagccactttcatgggacagcctgtccccwactcgagctttccattaaaaaccggggacctgaaaaaaaaaaaaaaaaaaaaaaaaaaaaaaaaaaaaaaaaaaaaaaa

SEQ ID NO: 948 - DNA, 738 bp, Canis familiaris
  misc_feature (99)..(99): n comprises a, c, g, or t, or includes no nucleotide
gatgagcccatgattgcaggatccagactccgtggagcgaatccacagcacctgatgcaaggcacggtcattgacacacttgtgcgcaagatggtctcntgatggcgagctccgaccggaggccaagtggctgctgtccgacagggccgagcttagggcctatgactgtttccaggcggccgtgaccccacttccgcacacactgcttcaactggcactccgtcatgtacgagtatgcgctcaggcagctacacgtgctcgccaacctctgtgagaggcctttcccgatcgacagaatcaagctgtccatggacaaggtgtgcctccgctactactgacacgttggcctctggatcgcctctgcgcggacccacacccgggaggggccttggggctcctgggtgcaggctccctcccccacctccctcaggtcccrtgtgccttggggcctgcctgcctctgagtgtgcttccagtcttgaggtgtaggggggcatcaggctctcgctgccaccacggtctctgtcccaaggggttggaggccgggcctgcgcatcctcggaatgattttacccmagatggatgcacagcccccgatgaaaaatgatctttagaaaatgctaggatctttgattgtttttatatctttatttatcaataacgggtaaggcttacgaaaataaagattcatgactgarmmwraaaaaaaaaaaaaaaaaaaaaaaaaaaaaaaaaaaaa

SEQ ID NO: 949 - DNA, 617 bp, Canis familiaris
ttcttctcggcttctaactcctcccatatcataagaacggcccttaaattcatcccactctgctgttaagggctagtggtcgaggctaccakagagagcccagcagacagcagcgttcttacctctgcctccatagggtacccagcctgccgttcacctactaggaaatggcactttttgcmaaatttgaaatttcttgggtaaccacatattagcttggcagctaaaatcaagatgttgccaaatacttattgtctttgcctaacgttggttacacagcccagttgcttttatttttaatgtcttttaatgtcctatctcaaaagaacaatcagtacattttctttctgcagaatcccgaatctcaaccatgtataactggactgtccmacttttctttgtgctgtcttctcttatatataagtgagcagattatatgccgagtcccttgtctctagcaatttctgctraaactttcaagtagattgtttccttttacaattaaattattgtatttattcatttgaatccagtaaatcctttctctaatctggctatactgtcaataaaaagatgaaagcaacaagttgaaaaaaaaaaaaaaaaaaaaaaaaaaa

SEQ ID NO: 950 - DNA, 2175 bp, Canis familiaris
ccccgctcccgcccggctctcgccccggcccgccccagcccccgcgcccgcgacccccgcccggccatgcggccccccggcccccgcgcccccgggctggcgctgctggccgcgctgctggcggcgccccgggccctcgcagaggccccgcacctggtgctcgtggacgcggcccgcgcgctgcggcccctgcggcccttctggaggagcaccggcttctgcccccccctgccgcacagccaggctgaccgctatgacctcagctgggaccagcagctcaacctggcctatgtgggtgctgtccctcacgggggcatcgagcaggtccggacccactggctgctggagctcatcacggccagggagtcagctgggcaaggcctgagctacaacttcacccacctggatggctacctggatctcctcagggagaaccagctcctcccaggttttgagctgatgggcagcccctcccagcgcttcactgacttcgaggacaagcggcaggtgttggcgtggaaggagctggtgtccctcctggccaggagatacatcgggaggtatggactctcatacgtttccaagtggaacttcgagacgtggaatgagccagaccaccacgacttcgacaacgtgaccatgaccctgcaaggcttcctgaactactatgacgcctgctccgagggtctgcgtgctgccagcccggccctgcgctttggcggccccggggactctttccacccctggccgcgctcccccctgtgctggggcctcctggagcattgtcacaacggcaccaacttcttcaccggggagctgggggtgcgcctggactacatctccctccacaagaagggcgcggggagctccatctacatcctggaacaggagcaggccaccgtgcagcagatccgacggctcttccccaagttcgccgacacccccgtttacaacgacgaggcggacccsctggtggsctgkgccctgccgcagcmctggagagccgacgtgacgtacgcggccatggtggtgaaggtcgtggcgcagcaccagaacccgccccgggccaacggcagcgcggmcmtgcgccccgcgctcctgagcaacgacaacgccttcctgagcttccacccgcacccgttcacgcagcgcacgctcaccgcgcgcttccaggtcaacgacacggarccgccgcacgtgcagctgctgcgcaagccggtgctcacggccatggcgctgctggccctgctggacggccggcagctgtgggccgaggtgtcgcggggcgggacggtgctggacagcaaccacacggtgggcgtcctggccagcgcgcacctgccggccgggccccgggacgcctggcgcgccaccgtgctgctctacgcgagcgacgacacgcgcgcccacgccgcccgcgccgtgcccgtgacgctgcgcctgctcggggtgccgcggggcccagggctcgtctacgtcaccctggccctggacaacccgcgctgcagcccccacsgcgagtggcagcgcctgrgccggcccgtcttccccacggcggaggagttccggcgcatgcgcgcagccgaggacccggtggccgaggcgccgcgccccttccccgccagcggccgcctgacgctcagcgtggagctgcggctgccctcgctgctgctgctgcacgtgtgcgcgcgcccggagaagccgccgggaccggtgacccggctccgtgccctgcccttgacccgtgggcaggtgcttttggtgtggtcggatgagcgcgtgggctccaagtgcctgtggacctatgagatccagttctccgcggatggagaagtgtacacgcccatcagcaggaagccatccacctttaacctgtttgtgttcagcccagagtcagccgtcacctctggctcctaccgggttcgagcggtggactactgggcccgaccgggccccttctcgacccgcgtgcactacgtggaggtccctgcaccgtcagggccgccgcggcccagtgactgtgagcggtgctgacctcggagccgcggaggccaggcgctgagatgggcctccaaggaaggccctcgtccgccggggatggacgcagcccgtccgtgggctccgctccttctgtgctgtctcactcccttaaagtgcctttgcgctcaccaaaaa

SEQ ID NO: 951 - DNA, 655 bp, Canis familiaris
  misc_feature (96)..(96): n comprises a, c, g, or t, or includes no nucleotide
atgatcgcggctgtccgattcacacgtataacgacaatcatcttctggccattgtggggtccgaacgatcttttggaggaactggtcgctccatgngtccgttactcaagattctaggtctggaatctcgaaagttaatattttcaaccgggtcccaattctcggaaatttcggatctagtcataagctacgatttcagatccaaaccgtgaggacaagggaacgacttaaggcaacatgacgggtacctcaggtgcggactcaaaagtgggttccggttcacggcgttgcaagttgcccaatgtgcggtgttcgcgaccatccccacgtgagtgggacaagcccacacatgaagattcgactaagaaaacaatcctttattattcggacttttccggtggtgactcgtgtgagagtgtcgtagatcatgatgacacggagacgtacgttcaatcgtaatcacctacactccttttcaacaacaaaaaagtcgtttgtcagtcattcggttgaaccaaaaaacaaggtatttttctcgatgatttaggratgatcggatagaacgctttatttttactagattttattttttgataaaattcgtaatcggtaacgtttctattaaaataaataaataatraaataacaaaaaaaa

SEQ ID NO: 952 - DNA, 655 bp, Canis familiaris
  misc_feature (96)..(96): n comprises a, c, g, or t, or includes no nucleotide
tactagcgccgacaggctaagtgtgcatattgctgttagtagaagaccggtaacaccccaggcttgctagaaaacctccttgaccagcgaggtacncaggcaatgagttctaagatccagaccttagagctttcaattataaaagttggcccagggttaagagcctttaaagcctagatcagtattcgatgctaaagtctaggtttggcactcctgttcccttgctgaattccgttgtactgcccatggagtccacgcctgagttttcacccaaggccaagtgccgcaacgttcaacgggttacacgccacaagcgctggtaggggtgcactcaccctgttcgggtgtgtacttctaagctgattcttttgttaggaaataataagcctgaaaaggccaccactgagcacactctcacagcatctagtactactgtgcctctgcatgcaagttagcattagtggatgtgaggaaaagttgttgttttttcagcaaacagtcagtaagccaacttggttttttgttccataaaaagagctactaaatccytactagcctatcttgcgaaataaaaatgatctaaaataaaaaactattttaagcattagccattgcaaagataattttatttatttattaytttattgtttttttt

SEQ ID NO: 953 - DNA, 663 bp, Canis familiaris
  misc_feature (49)..(49): n comprises a, c, g, or t, or includes no nucleotide
ttgacccctatatccacagccccttcgtcatgcagtcccacccttgagnctacagcctccttgcaggtgcagacctgcagaccctcgggggggggggtgtgcttctgccctcctcatttataggggcacacagggtggagttggttcacmggtgaggcagctgaggcccgggatggtatggtgacaggtgcacacgccctcagagtagcctccccacctcmaaatgtggccmctgatgagcagcagtggcatgacctgggagcccgtcagaaatgcagaattgtggggccccaacccagacctcctgatcacggatccmcggtctagtgagattccccagggcatagatgtgcmaatttgtgtscmatttttttacmgttccctactgaggtataattcaccaccaacataaatttcmaaatgtttaaccmtttaaaaccacataaagtcagtggcttcacatagttgtacgctgattccagaacattttcatcatccccccaagaaaccccgtacctataagcagtcacttcccattcctcctcccaccatccctcagatatgcttgtctctatggacttgcctatttctggacatttcatataaatggaatcatmccagtaaaaaaaaaaaaaaaaaaaaaaaaaaaaaaaaaaaaaaaaa

SEQ ID NO: 954 - DNA, 765 bp, Canis familiaris
tttctcgcgccaccagcaacgtcggccccagggatactaggactgttaggggtcattctggtgccagcactgaagaagttaacgggttcttctccaagtccaaagagctgcaccctgatcgggagcctggggacccagccctgcacagccgctttgtggagctgagtgaagcataccaagtgctcagccatgagcacagccgccgcagctatgatcaccagctcagctccacaactcctccaaagtctccaggaaccacagtccatcccagggctgctcatcaagcgcacagcagctcctgggcaccccccaatgcacaatactgggcccagtttcatggtgtgaggcctcagggaccagagtcaaggcagcagcagcacagacacaaccagcgggtgctgggatactgcctcctgatcatgttggcaggcatgggcctgcactatgttgccttcaggaagctggagcagatgcaccggagcttcatggatgaaaaggatcggataatcacagccatctacaatgacacacgggcccgggccagggccaacagagccaagctccaggagcaactgcagaggcagcggctgcagccaccacctggaggcccagggatcgtgcctccgggcacaggcacccgcccgtgagcagctcgctgggatggggccttgctaccccatgggacttcccactccccaaaacgcgtgcaataaagtgattctcagaaaaaaaaaaaaaaaaaaaaaaaaaaaaaaaaaaaaaaaa

SEQ ID NO: 955 - DNA, 619 bp, Canis familiaris
gttccacccccctgtacccccatggttttctttgcaagtgcttttggaactaagaagctagtatcctggattaacttgatgcccgctagtgcttctgattactcgaatcctggtttcttgctttaaaggaaaagtgaaagacaagactgttggaccaatactgcagttctgtagtgtcatttcttattmaaaatacaataatttgattaccmaaattggtatatttaaagcctaacaccattctaataaaggcacmaatttctttttaatacttgtttcaagctcttcaatctctttataagttaactaatctattttcttcaaacctctgcaatagttctttaaaatcacaacagttggttagcaagctgacttttttatgtgctctaracarataattgtgaacttttaatatgttgactgctttcattttgataactggatctccatttgatattttcatttgtataactcatttgcagtctgaaaatttttttagtgccagtgccctgacatatcatggaaagttaattttctttgcattttaaaatatctggatcatgaagaaaaagtgatgaaaataaattaaaactgaattacmaaaaaaaaaaaaaaaaaa

SEQ ID NO: 956 - DNA, 688 bp, Canis familiaris
cacggagatttatcctttatctttttctctctctgagttttgatactattgattttccctgagtttattactttgatcaatttgacattgtcacccaaatcttttctaragryttyagtakttttttttaacataacatcaaamcgaccggtatttgatgagaacgagacagatacagagagacmcagdagraagttatcgtttatttctaaatttactcttttgtggatgtgtagtctgaaatcatctcgraactgttgtgttccttcaatccaactgacggraccattataagtggtcaatgttaagttaatatcggraagacgatcccgtagagagatatcaatatttaatatgttcaaggraatcatgtgraatttgratcttgacatttcgttaagtcmaaaatacctcctaaattttaacagtcatcattttcgraaatagtacaggraattgatcaacggagatagagttacacgratatttttactattaacaattatatacttaggtactcaaagttgtgttttgtacaattatttttgagtgtaactgatctctatcttggtttttaatgatttcgatcttatctttaagracgtgatacgaaaataaaagatacgraatccgraaaaaaaaaaaaaaaaaaaaaaaaaaaaaaaaaaaaaaaaaaaaaaaaaaaaac

SEQ ID NO: 957 - DNA, 688 bp, Canis familiaris
gtgcctctaaataggaaatagaaaaagagagagactcaaaactatgataactaaaagggactcaaataatgaaactagttaaactgtaacagtgggtttagaaaagatytcyraartcatmaaaaaaaattgtattgtagtttkgctggccataaactactcttgctctgtctatgtctctctgkgtchtcyttcaatagcaaataaagatttaaatgagaaaacacctacacatcagactttagtagagcyttgacaacacaaggaagttaggttgactgccytggtaatattcaccagttacaattcaattatagccyttctgctagggcatctctctatagttataaattatacaagttccyttagtacacyttaaacytagaactgtaaagcaattcagkttttatggaggatttaaaattgtcagtagtaaaagcytttatcatgtccyttaactagttgcctctatctcaatgtgcytataaaaatgataattgttaatatatgaatccatgagtttcaacacaaaacatgttaataaaaactcacattgactagagatagaaccaaaaattactaaagctagaatagaaattcytgcactatgcttttattttctatgcyttaggcytttttttttttttttttttttttttttttttttttttttttttttttttttttg

SEQ ID NO: 958 - DNA, 588 bp, Canis familiaris
agcaacagctgtcagcccacatcatcgaggagctcargcaatttcagcgcctcactccctcctacttcaacatggtgttgattgacaagcaaggaattgaccgggaacgctacatggaacctgtcacccccgaggaaatctttacattcattgatgactatctactgagcaaccaggagctgatccagcgtcgggagcaaagggacatatgcgagtgaactggagccagggcatggatggaggtcaagggcaaagttcccctagtcggctgaaactggggcctaataaaaggaggaaatggctccccacggtactagggccaggaccctgaggtgggtgagattcaccaatcctgggatattcccagacgccctttgtagggctgtgtaatagtttccctaagcaagtttctgctttaagtagcactcgaggagataagaagctaggcaaggacttaggacaggtcctggtcaacgggctggggggtgaaagtcttttcccamccggaggcctctgcgcagctctccaaagtcttccagataagtaaattctcaattcattcactaaaaaaaaaaaaaaaaaaaaaaa

SEQ ID NO: 959 - DNA, 667 bp, Canis familiaris
gtggacacctgtccttctgcagcgtgccgtcggtcatcgggacggaccgccgggctccgctccagccacgccattcgcattgctcccctgtggacagtgcccgagtcttggcgcctccacagcactgagcccccgagagactcagacctccgtggaactgctgagaaccctcwaagcatgtcattgtcagtgatccatttttattctatggaactctaacctatttgtgtcatattgaccttttgatgcatgagtcataaattatgaaatcggtcttatggtttttgaaatgtagccagcatttgtaaggctaaacctttttcacsaactgaatttaagtgaataaccmagcggcggctcttctcctgaaggagagtacttatggaccawttgaatctctttgccccttttcaacaggctatggcatcaggttctaagacaagcttgtmactttttcctgttattttaataatatggaaatattagcatagtgtttcttttgatagtgatagactataatccatatttaaattttatagagaagaaattttattgtactgtgatgtagatatttattatccaggtaaggatttgcccgstgtgtattttttacaattgagacattttactttaatctttaaaaaaaaaaaaaaaaaaaaaaaaaaaa

SEQ ID NO: 960 - DNA, 615 bp, Canis familiaris
ggctctytggcgratcctgatcccgggacccaggggaaccaaggggctgtcgagccagcctgktggkgccctcgctccgcctcccccgggccaagkccctgccatccgggagkccggggaggggycbkcggtggggaacttcgctcccggggagcccgggctggggccggcgcaggacttggtttctgccgaaggccgttccacagcctcgcrggaggggtggccggggtccccggagcgtcgggggatgtcagtcccatgtgtccacttgacgagctttgatgagcgacgccaagtttgaattatgagaactgcagcagctcggcatggcccgggcctggccctagggcgttacgttgttaagattaaggtttgaatgttttccttagtaatttcatgtctaacttggtataggaagctttgtgctctgtgtaacctgtcacatgccctgtgtcacagaagattcggaaaaatgcacttgggaatcaaaagaaaaaaaggggggggggtacttctttttgaaaagaaagacagcagtgttgactgactgtatggacacaacctcaataaaacttgtcgtataawamawaaaaaaaaaaaaaataaaaaaaaaaa

SEQ ID NO: 961 - DNA, 1079 bp, Canis familiaris
cctctccgctgcccgtgtcctccttcaccggccgcgccatgctgtctctagattttttggacgatgtgcggcgaatgaacaagcggcagctgtattatcaagtcctaaattttggaatgattgtctcctcggcactaatgatctggaagggactgatggtcataactggaagtgaaagtccaattgtagtggtgctcagtggcagcatggagccagcatttcatagaggagatcttctctttttaacaaatcgagttgaagatcccatccgagtgggagaaattgttgtttttaggatagaaggaagagagattcctatagtttcaccgagtcttgaagattcatgaaaagcmaaatggacatatcaagtttttgaccmaaggagataataatgccgttgatgaccgaggcctctataaacaaggacaacactggctagagaagaaggatgtcgtggggagagcaaggggatttgttccttatattggaattgtgacgatcctcatgaatgactatccgaaatttaagtatgccgtcctcttcttgctgggtttattcgtgctggtccatcgtgagtaagaagtctaccttgctgttcctggaagatgccgtacttttcgttcctgactgtttggagtagatattggtctatgattggtggagtgcagaacgtacatgttggcgcttcttggtascawtggtttgcattagtttctgtttccacgccagggtctgtgtgggcgggtgcaccaagaygcgcaccgaggggactctcaatcacaggatttcatatgttgtcattgtcacactttcacatttttgtacatcagtgaattttttatattaaaaggttgagcccaagcccccagtgtttgtattttgaagccaagcttcacttctaaagtgcctacagagttctgtaaatgaaaatgcagctctgcacgagtttgaaaccgtcattcctctttataaaatgggaatggcatatgctgaggtggtcgtaagtcttaacttttcaaattttaaataaaagactttgcatattgaaaaaaaaaaaaaaaaaaaaaaaaaaaaaaaaa

SEQ ID NO: 962 - DNA, 625 bp, Canis familiaris
  misc_feature (6)..(6): n comprises a, c, g, or t, or includes no nucleotide
atttgngatcctgaaggaacaaagagccactctcacgttcaaccaaaggaggarccgcttttgtaaccgtgggatagatcccmwgtcmaaagggacttttgagtgatgactctgttttaaaagttgaattgcttgaagagttcatcacmgraattcacagaaactttatttccgaatattcacacaggctaaatcttatttttatttttgaagttgttttcgttgtttttttttaaacactgtataaataatgccctgaaagaataacccgggaatatacctatctgttcttaagattccactggttggcccacgacacgaaaaattctctatttgacttctttggttcctcatgaagcagaaagaagacacccaagatagaaattgattatttttatgtagtggtatttaggatctcatcacttttgcctgtgttttacacctttgccmctggtaaatcttggtcttcagagatatgagtaggtccctttgttgttgtcacctatcctttaataagtgtggatgtaataagtgcggttgacttttcttcattagagttattamaaaatcactagaawwmmmaaaaaaaaaaaaaaaaaaaaaaaaaaaaaaaaaaaaaaaaaaa

SEQ ID NO: 963 - DNA, 576 bp, Canis familiaris
ccagrggcagcgctgtgccatcgcgcctgtggttcactttggacgcgcggcacagtgagcgggaccgggtgcaggccgatgacctggtgaggatgctcttcagccccgaagaggtggacctctccgcaggagcagccccaggacacccaggaggggcccccccagcctgttgaggagtcgctctctggcagtgaggtggggcgcaaggatgagctctgacagtgcccagctcaggatgggtgagcagacccacctcgggaactgtgtcccaccctggccagcgcccgcggggctgcggagcggggaaactgatgtctgccgcccaaccaacgggagggaccctggtggcggccatccgcacggtgctgctgctctcggagtggacatggcaggacggccctccctccccgggcctggctgagggctcggcacgcaggcccagagacaccgtggggggctgcgcgggcagccgtgccacagcaacacggtatttaagtgtcggtgtagacaaccaaagaataaatgatttgtggtttttwaaaaaaaaaaaaaaaaaaaaaaaaaaaaaaaaaaaaa

SEQ ID NO: 964 - DNA, 729 bp, Canis familiaris
cctatttaggtgcccttaggacagttgtccagaagcaggctgtacccgtccggaattccccgggatagcagaccctttcctgaggccttctggaggctcccttgggacaagcagtkctgggcaacagggacascagtcgggcttgttgagcctgaggagttctcsttggaggatgccccagttctaagcagggagcacctgggaccccaccagcagcaggcacacagtggcctttaaagcacagagccacagtcaccactccatagcggcagcaaagctggcaccacctaagtccgacttcctaggacacctcactagcagcgctaaccaggaaacagacccacccaccaagggcaagaagcgacccgcctacagcccccccagcaagtcagcagcagaagcaggctgggcccgacaggtctgtcgacccccctccagtccagggcactccaccagctagctcacacgtggccttgtcagacccagtcctgagcgagactcactgcctccctgcagcaccggcggtggggctccgcatggtccgtggtccgtgaccgcggtgggggggctgaccccagcttccaggggactgtcactgtggatgccmaaacggcataactgagtgaaggtgaataagtgacaaataaaggaaactgtttacgarmmaaaaaaaaaaaaaaaaaaaaaaaaaaaaaaaaaaaaaaaaaaaaaaaaaaaaaaaaaaaaaaa

SEQ ID NO: 965 - DNA, 3396 bp, Canis familiaris
ccgaggggaagctctcccgcgcgggctgggccgcgggcagcgtcgcctcgcttgggacggagtggagcaggagcgggacccggagtcctagcagccgccgccatggcgatcaaatttctggaagttatcaagcctttctgtgtcatcctgccagagattcagaagccggagaggaagattcagtttaaggagaaagtgctatggactgcaatcaccctctttatattcttagtatgctgccagatccccctgtttggtatcatgtcttcagattcagctgaccctttctactggatgagagtgattctggcctctaacagaggcacattgatggagctgggtatctctcccattgtcacctctggcctcatcatgcagcttttggctggtgccaaaataattgaagttggtgacaccccaaaagaccgagccctcttcaatggagcccaaaagttattcggcatgatcattaccatcggccagtccatagtatatgtgatgacgggaatgtacggagacccttctgaaatgggtgctggaatctgcctgttaatcaccatccagctctttgttgctggcttaattgtcttgcttttggatgaacttctgcaaaaagggtacggcctgggctctggaatctccctcttcattgccactaacatctgcgagaccattgtttggaaggcgttcagccccaccaccgtcaacaccggcagaggaatggaattcgaaggcgccatcattgcactgttccatctcctggccacacgcacagacaaggtccgagcccttcgagaggccttctaccgccagaatctgcccaacctcatgaatctgatcgccaccatctttgtctttgcagtggtgatctattttcagggcttccgtgtggacctgcccatcaagtcagcccgttaccgaggccagtacaacacctaccctatcaagctcttctacacttccaacatccccatcatcctgcagtccgccctggtgtccaacctgtacgtcatctcccagatgctgtccgcccgcttcagtggcaacctgctggtcagcctgctgggtacctggtctgatacttcttccgggggcccagcacgggcgtacccagtgggtggcctttgccactacctatcccctccagaatcttttggctccgtgttagaagaccctgtccatgctgtggtgtacatagtgttcatgctcggctcgtgtgcgttcttctccaaaacctggattgaggtctcgggctcctctgccaaagatgttgcaaagcagctgaaggaacagcagatggtgatgaggggccatcgagagacttccatggtgcatgaactcaatcggtacatccccacagctgcagccttcggtgggctgtgcatcggggccctctccgtcctggccgacttcctgggcgccattgggtctggaaccgggatcctgctggcagtcacaatcatctaccagtactttgaaatcttcgtaaaggagcagagcgaggtcggcagcatgggcgcccttctgttctgagccaagtctccctggaccaaggagaggggccctgcatggaattgcaagggaggggaacaacgacacctcactgtggggtgctcatcgcaggagtgctgccgtggcaccgggacttttaataatgtttttgaatttcatattctttcattccactttgtaaagtgctagaatttttcaagtttgaaattttgctttttattctggcattggcaaaaaagaacagtagaagagagattttcttgagctgactgccagaggtggggatggtaaatgtccccaagtgtccctgtaacttttgttttaacctttgcacctgctcagtgccggacggctgcagtggtctgagctgttcccccaccagggatgtcttttttggttaaaaagcacaaacctcgtggcagtgtctccatcgtggccatagggcacgaggctaagagcaaatcatgtttctggtggacgtgggggactcggtcatgagtccctgtcacaatcagggctaagaatatctggcttcaaactgtttctctggaagacactattgttttcccttttataaggtagtttttttaggagcaagcctcttccaagagaaagggatgagttttccagaagaccctactgggccatctgttgatttttctgcatgtgcctgttggctgttgtcgttgattattctggtcgggctttgaggctgaaaagcatggagttagcttggctcccccatgtctgtctgtaatcggtttgcgtcctctgagcgagtgagcgtggccaggctttgccagcctaatagaggtgcgctcggccaagcccagtggacattgtatggaggagccttgaaatgatgtgtgtctgtccagtccttctggttgtcgctggacgggcctcccactagcccctggagggaaagacggcagcctagctttcacaggtcaccgctacctcccaggctgagaacttcccatcgtgtttttagcacttttttttatcgtgcctacaacccaaatgcaggtaaagtaaatgaccagatgccacccgtctcctctcaacttccaccagaaccgccccgcagagaggagggtgcaggccccagatccgtggtgaaatctgggtcagaaagcttaggtttttgttttgtttttagtaagttgctccagtgtttgatatgaaaagactcatgattgtatctaaagtgaattgtgtgtttgtagtatcgagacctaggttgtaggcatcagaacctttcctgaggcctgtcgggaggctccttgggggacaggcagtgctgggcagcagggacagcagtcgggcgttgtgagcctgaggagttctccttggaggatgccccagttctaagcagggagcacctgggaccccaccagcagcaggcacacagtgscctttaaagcacagagccacagtcaccactccatagcggcagcaaagctggcaccacctaagtccgacttcctaggacacctcactagcagcgctaaccaggaaacagacccacccaccaagggcaagaagcgacccgcctacagcccccccagcaagtcagcagcagaagcaggctgggcccgacaggtctgtcgacccccctccagtccagggcactccaccagctagctcacacgtggccttgtcagacccagtcctgagcgagactcactgcctccctgcagcacsggcggtgggsstccgcatggtccgtggtccgtgaccgcggtgggggggcctgaccccagcttccaggggactgtcactgtggatgccaaaacgggcataactgagtgaaggtgaataagtgacaaataaaggaaactgtttacgaaaaaaaaaaaaaaaaaaaaaaaaaaaaaaaaa

SEQ ID NO: 966 - DNA, 653 bp, Canis familiaris
agtagctaccyatacagccctckgacccstcagaggacagagtctgctttgggggcagctgtctagacggtctattcmatcccatcagggccmgagcaggtcccccagcatgcccgtcgccmtgatggtgaccaaacccmagtaactccatctgcmgattatytggaagcagcacggacmaccaggtaacmcttaatggtcacccgacccgtcatgacatcgacacacctctcttctccattccctagcacgggacttctagctcatttaaccagataaggaaactgaggtccmatgtscccmcagtgaggtaacgacttggccaggcctagcmaccmaggccatgtctctggctactcccctggaccmcgagactgacccctcttattcccmgctgctcggtttctgcctgcgtggtggtcmggagccmggaggggcgaggcttgtgctggaggggagagggggcscagacccgcttcctgcctggttctggctgctgcgtgcccagaccttgcatctgtctctctgcatatatgtctctttggaatcggaatttcattatatgttaagaaaataaaggaaaatgacttataatgtcmaaaaaaaaaaaaaaaaaaaaaaaaaaaaaaaaaaaaaaaaaaaaaaaaaaaaaa

SEQ ID NO: 967 - DNA, 686 bp, Canis familiaris
acatccactgtgaagaatttccgggactgtacaaacaccaaaggggggtggactgaaaggtgtggaatatcagggtataaattagatccatgagatggggggagggaagaccagaattcccctgaattgtgtttcgatgcaatataagcatawagatcaccttgtattttctttgccttctaaaagccacttattatgataktagacgaagaggaagaaagttcaggtacagaaaatgtgttttaataacctaaacgatggtgcttggtgagtcttggttctaaaggtaccamaatgaggaagccaaagttctcaaactgctgcatactttgacaaggaaaatctatttttgtcttccgatcgtacatttatgacctaagtcaggtaaatacgcctggtttacttctttaacattttttatgcagacagtctgttaatgcactgtggtttcagatgtgcaataatttgtacaatggtttattcccaagtatgccttaagcagaacaaatgtttttttctatatagttccttgccttaataaatatgtaatataaatttaagcaaacttctattttgtatatttgtaaactacaaagtaaaaaatgaacattttgtggagtttgtattttgcatactcaaggtgagaattaagttttaaataaacctataatattttaaaaaaaaaa

SEQ ID NO: 968 - DNA, 625 bp, Canis familiaris
ctaatggggaaaaggttgggagttcacccgttaagctgtcatgggtgggtccttggagagcatggagactccagtgtgcctgtatggagtggagtaaatgttgctggtgtctctctgaagaatctgcaccctgacytaggcactgatgcagataaggaacagtggaaacaggttcacaaacaggtggttgacagtgcctatgaggtgatccaaactaaaaggctacacttcctgggccattggactctctgtggcagatttggcagaaagtataatgaagaatcttaggcgggtgcatccaatttccaccatgattaagggtctctatggaataaaagatgatgtcttccttagtgttccttgcatcttgggacagaatggaatctctgatgttgtgaaggtgactctgactcctgaggaagaggcccgtttaaagaagacgctcgcagatacactcttgggggatccmaaaggagctgcagttttaaaattttctaatgtaccatgtcactgtctagactacaacaagattttaattggaggttgtgtatgttgtccttattatctgacctgttactcaagtcgtaatattaaaatggcctaagaaaaaaaaaaaaaaaaaagg

SEQ ID NO: 969 - DNA, 638 bp, Canis familiaris
acctgtgtcggttggaggagatgcgccagtcccttcgaatcatcgagccatgtctgaacaagatgcctcccggggagatcaaggttgatgatgccmagtgtctccgccgaagcgagcagagatgaagacttccatggagtcattgatccaccacttcaagttgtacacggagggctaccaggtccctccgggggccacgtacactgccatcgaggctcctaagggagagtttggggtgtacctcgtgtccgatggcagcagccgcccttaccgatgcaagatcaaggctcctggttttgcccacctggctggtttggacmagatgtccaagggacacatgctggcggacgttgttgccatcataggtacccaagatatcgtgtttggagaagtggatcggtgaactggggaacagtgtttgattcccctgcttctstgcttcctcctcggagcccggccgtcactggacagcaactgtgtgtgtgtgtgtgtgtgtgtgtgtgtgtgtgtgtgtacacatgtgaacattcagccatcaggctttctgtgcatgcactagaaaaggagaaattataataaattagccatcttccggcccctctgmmmaaaaaaaaaaaaaaaaaaaaaaaaaaaaaaaa

SEQ ID NO: 970 - DNA, 608 bp, Canis familiaris
tgcctcagagaaggcactagccaaccagttcctggcccctggccgcgtaccaaccmacagccagggagcgggtgcctgccacgaagacggtgcatctgcagtcacgggcacgatacactagcgaaatgaggaatgagctgctaggcacggattctgctggagagcccacagctggatgtgaggaagagaatcggggtggcagggcccagatcaggggatgagaaacagtcagcagccgagctagacgtcgtcctgcagcggcatcaggacctccaggagaagctggcggaggagatgctgggcctggcaaggagcctcaagagcaacacgctggccgcccagagcgtcattaagaaggacaaccagaccctgtcacactccctcaagatggctgaccagaacctggagaagctgaagaccgaatcggagcggctggagcagcacacacagaagtcggtcaactggctgctctgggccatgcttattatcgtctgcttcatcttcatcagcatgatcctcttcattcgcatcatgcccmaactcaaataaagacctgtgctggccccaaaaaaaaaaaaaaaaaaaaaaaaaaaaaaaaaaaaaaaaaa

SEQ ID NO: 971 - DNA, 821 bp, Canis familiaris
agttttgagcctgagaagagaggaggcctgactgggcaaattgactggcagccacagaacttgttctccagggctgctcttgaggcctggccacaatgttttatcttggcatgtctctggccttttgcacaggactttgtctctgtttcctagcagggtggacaggtatatcagttggtcagaacmcaaaagttcagtgtcaaatgatttctgattctctttgagttcccaaggatatggatggctcaaggaatggtgagagggaaattcttggaccacctgagaccttatacagttgagtttctggaaggcaaagtcataaaataattgaaatgttttctgtgattctcccactggagatgtattctagcctgcaatcctcatctacctaagtgactacagagttgtaggcctagattgaaaccccaggtctgccatttattagctgtgcggccttggacaagtcataattaccctgaggctcgggtttaaatctcagctataccacttaaaacctgtttgaccttggacagatttaacttctttaagtcttggctttcttgactttaaacttcctagggttgtgagggccmmaggagataagtaaagtaagcatatactaagtactcaataaaggataactgttgttataaaaawawwwwattataaaataawwwaccttgctgtgtattgtgagggttaagtcagaatgtatatcgaagcactaagtggtgcccctaatctagtgacccactcctacttcatacaagtcctgaagatttgttttgcctatgtgctattgtctcctgccactaaatctt

SEQ ID NO: 972 - DNA, 1641 bp, Canis familiaris
aagatgaggaggaggaggaagatggaggccggcgccgcggcccgcgcttggtcgctgctgtggctgctgctgcccttgcttggcccggtgtgcgccagcggccctcgcaccttggtgctgctggacaacctcaacctgcgggagacgcactcgctcttcttccgcagcctgaaggacagggccttcgagctgacgttcaagaccgcagacgaccccagcctgtccctcatcaagtacggggagttcctctacgacaacctcatcatcttctccccctcggtggaagatttcggaggcaacatcaatgtggagaccatcagtaccttcatcgatggtggaggcagtgtcctggtagctgccagctcagacattggtgaccctcttcgagagctgggcagcgagtgtgggattgagttcgacgaggagaagacagctgtcattgaccatcacaactatgacgtctctgacctcggccagcatacgctcatcgtggccgaccccgagaacttgctgaaggccccaaccatcgttgggaggtcatcgctgaaccccatcctctttcgaggtgttgggatggtagctgatccggacaaccctttggtattggacatcctgacgggctcttctacctcttactccttcttcccagacaagcctatcacccagtacccccacgccgtggggaagaacaccctgctcattgctgggctgcaggccaggaacaatgcccgggtcgtcttcagtggctccctggacttctttagtgacgccttcttcaactctgcagtgcagaaggcggcgcccggctcccagaggtattcccaaacaggcaactatgaactagctgtggccctctcccgctgggtgttcaaggaggaaggtgtcctccgtgtagggcctgtgtcccaccatcgggtgggtgagacagccccacccaatgcctacaccgtcactgacctcgtggagtacagcattgtgattgagcagctctcaaatggaagatgggtcccctttgatggtgatgacattcagctggaatttgtccgcatcgatccttttgtgaggaccttcttgaagaaaaaaggtggcaaatacagcgtccagttcaagttgcctgatgtgtatggggtgttccagtttaaagtggattacaaccggctaggctacacgcacttacactcttccactcaggtgtccgtgaggccgctccagcacacgcwgtacgagcgcttcatcccctcggcctacccctactacgccagcgccttctccatgatgctggggctcttcatcttcagcacagtcttcttacacatgaaggagaaggagaaatctgactgaaggggcagagccaggrctcctgacgacaggcacttgggagttctgcgggcctgcgtcttcctcacagcgggctttgttctgttgttaaagctgtgggaccgtggcacagccttacctcagggragatgcggcactgagtaccgagggaggggggtggggatgaattttctgtgagtttttccacctaatgctaagtggtatttttcatatgtggtcactctcatttctaagataaacattgccctccmamwmhmaaaaaaaaaaaaaaaaaaaaaaaaaaaaaaaaaaaaaaaaaaaaaa

SEQ ID NO: 973 - DNA, 1770 bp, Canis familiaris
gaattcggcacgagcggatctgtgtgtggctctggccaaacacactggcatgtcaccagaaaggatgatggtggctgacgtctttagccaccgcttctataagatctaccagctggaggagtctctgagcagcatcttggaccgcgatgatattttcatatatgaggtgtcgggcaggtctgctattggtgaaaactccagggaagacgttgtgcttcctatctacctgcgggagcgcaccccagcccgggactacaacaactcctactatggcctgatgctctttgggcaccctctcctggtgtcggtgccccgtgaccggctctcctgggatgccctctatcacatcctgctgtaccgcctctcgcgctatgtgaccagacccagctcggatgacgaagatgacggggatgagaaagacatagaggataaggacaacatccccaaaccaggacacgtggctggggccagctcccaggattctggggccggatcaggcggggcccagctctggagtcgcaggcggaagcctgcccccgtggataactcccctggaccatctcactggccccagagggcacggcgcaagcacctgttcaccctgcagacagtgaactccaatgggaccagcgaccgctcaaccttcaacgaggatacccatgcccagccgtacattgccatcgattgggagccagagatgaagaagcgttactatgacgaggtggaggccgagggctacgtgaaacatgactgtgttgggtacgtgctgaagaaggctcctgtgcggctgcaggagtgcattgagctcttcaccactgtcgagactctggagaaggaaaatccctggttctgccccacctgcaagcagcaccagctggccaccaagaagctggacctgtggatgctgcccgagacactcatcatccacctgaagcgcttctcctataccaagttctcccgcgagaagctggacacccttgtggagtttcctatccgggacctggacttctctgagtttgtcatcaagccgcagaatgagtccgctccagagctgtacaaatatgatctcatcgcagtttccaatcattacgggggcctgcgtgacggacactacacaacatttgcttgcaacaaagacagcggccagtsssattacttcgatgacaacagtgtctcacctgtaactgagaatcagatcgagtccaaggcagcctatgtcctcttctaccaacgccaggatgtggcgcgtcgcctgcaaccccagcccagttcatctgaccccccggcatctcctgcctgcggttccccacccaactctgagttcatggatgtaaactaaggggctctgtccctgccacagggaaggaagccatctctgctctcttccttcccacatccatccacccccaccctcgccctcctacccgcgttaggtgccccgtgccaggcattgcaggcctgattgtggctactgttctcctgtgccgcttatattgctctctcccggggaagaggaggttgtgtctcctcccggcagtgtgttccccgcctgtgtttgccccttagagcattaatcttcccttctcttctctatttatggttgtccccttccctctgtcctcaacctggggtgttctgagggggtggtggtggggtgcacctgaacacagagtgtattttcttatcgagaccctgtaccttctgctgtgtatatataaagtgccagtgtgttcaaaaaaaaaaaaaaaaaaaaaaaaaaaaaaaaaaaaa

SEQ ID NO: 974 - DNA, 595 bp, Canis familiaris
cagagctggtctcatgccccaattggtttgagctacggaacccttcgcaggagactccctgcagcctacgtagcactcagcccctcttgggaaacctgagttagttctcttgcagaaaccactgggtgatttgagaaactgcaggtgaattcttcatctgtcagactctcgtgcttttgcctcttgcagacttgggacccttttcccatggcccattcattttgtcctcagccgggtttactaatactgcctcaggctgcctccttgtggtgtaggagagcgggcaagtgctaagtatggacaccttccattacgatgttggggtctacttttcagggtaacagttcagggtggcagaagatgcgmacmaagaactaaaatcaggaaagaaaaggagaaacactgagagttaaagaactgttggtcaaagtggatcagtgttaaactagattttattcattgctggataagtttataaacgctctatgcattgccgatattcaggagaaataacttttgtaacattttgagaaaaaataaaaccttwwtctaaaaaraaaaaaaaaaaaaaaaaaaaaaaaaaaaaaaaaaaaaa

SEQ ID NO: 975 - DNA, 674 bp, Canis familiaris
gtcgaatctatgagctccgaacaaggacgcatctccgtagcagctgcctccaagctgcttgccaacatggtgtatcaatataaaggcatggggctgtccatgggcaccatgatctgtggctgggatwagagaggccctggcctctactatgtggacagtgaaggraaccggatctcgggggccaccttctctgtaggttctggctctgtgtatgcttatggggttatggatcggggttactcctatgacctagaggtggaacaggcctatgatctggcccgtcgagccatctaccaagccacctatagagatgcctactcaggaggtgcagtcaacctctaccatgtccgggaggatggctggatccgagtctccagtgacaatgtagctgatctacatgacaaatatagtggctctaccccctaaaggagggtggatgtggctcctaccatttcttggggtgactgttgctgataatgtggatacagttccccatcctctaatggaggggtcctcagttgtattgataatttttttacgctctggtgccgttgacctctatgtgttactagttgttaatgacctactgcagaagtgattatttgttttactttcttggatgttaacattacactacttgaccttaaaaaaaaaaaaaaaaaaaaaaaaaaaaa

SEQ ID NO: 976 - DNA, 678 bp, Canis familiaris
cactgcgcacccagctggacctgcgccggtttccgaatctactcggaaccagtctgcaattgggagtcactggcactgatcccwctgcaggcccctttgaagaccatgctgcagattggagtgatgcccatgctcaatgagaggatgtggcggggagtgcagatcccactacctgagggtatcaactttgtgcgtgaggtggtgacgaaccatgcgggcttcctcaccattggggccgacctccactttgccmaagggcttcgagaggtgattgagaagaacaggcctgcctccagggaccccttggcatccagtgccccaccaccctccacgacagctgcctgagccctcaagcccgccctggcaggggcattcaggactccaacacctctcagcccctccctcagcccctcccagcctatactgtccagtctaaccccccagtgccacagagaagacagggttttaagctatacccaatttaattccataatcagtcaatgcatcaattaccgtccatccaccctccccgtgggctgtcctgagctctgctatgttccagtgcgttaagggagggggccaggccccaccccagtcaggaataaagtgctaaccccccmraaaaaaaaaaaaaaaaaaaaaaaaaaaaaaaaaaaaaaaaaaaaaaaaaaaaaaaaa

SEQ ID NO: 977 - DNA, 747 bp, Canis familiaris
cagggacgaccgtctggttcaatcaggtgatgtgattcacaacaatctggctctatgcttctgctcgtttccgcacatctctcgcattatgcgagtcacgacagcaccatgctggtgcttccggagactatgcagatttccagtatttgaacaagttctcggccagatggtgattgatgaggagctgttgggagatggacacagctatagccctagagctattcattcatggctgaccagagccatgtacagccgtcgctccaagatgaaccccctgtggaacaaccatggtcattggaggctacgctgatggagagagcttcctcggttatgtggacatgcttggtgtagcttatgaagccccttcgctggccacctggttatggtgcatacttggctcagcctctgctgcgagaagttctggagaagcagccagtcctgagccagactgaggcccgagagctagtggaacgctgcatgcgagtgctttattatcgagatgcccgctcctataaccggtttcaaattgccacagtcaccgaaaaaggtgttgaaatagagggaccactctctgcagagaccmactgggagattgctcacatgatcagtggttttgaatgaaattcagatgcattatccagaattgaagttgtgcccttcttctaactttgaacttggctggttcaaggtctacttttctactgtaaaataaattctttgaaatgcwwaaaaaaaaaaaaaaaaaaa

SEQ ID NO: 978 - DNA, 672 bp, Canis familiaris
ttggtaccaaaaaagcaggctggaaccgtccgggattcccggatcgctgaggacgcggcgctgccctgctgagcccccctcagctgcgtctctgccgtcagatatgcatccaagaagacaggtgcagctccaaaacctgggtggaaagtcaccaggcaaacgctttggcctcaggaaaatggagggtcactacgttcatgctggcaacatccttgcaactcagcgccacttccgttggcatccaggcgcccatgtgggccttgggaagaagaagcacctgtatgccctggaggagggagtggtccactacactaaggaggtctatgtgcccagtcccagcaacacggaggctgtggagctggttaccaggctgcccaagggtgctgtgctctataagacctttgtccacgtggttcctgtgaagcctgagggcaccttcaaactggtagctatgctttgaattcctggggccmttggatggagactggagcccaggtgacaggagagggtggcaccaggagaagtcaagagttggggatggcaaggcctcctgaggaagcccacttggtaatgactgtagaagactctgaaatgactggctaggaagccttttgggagccctgacctggggcccaaaaataaagtttgctggagtcmaaaaaaaaaaaaaaa

SEQ ID NO: 979 - DNA, 612 bp, Canis familiaris
tggcctggccatccgggacagtgagcgacagggcaaggcccaagtggagattgtcwctgacggggaagaacctkcagagatgatccaggtcctgggccccaaggcctgtctctgaaggagggcaaccctgtaggwagacctcacagcggaccggacwaatgcccaggccgcggctctgtataaggtctccgatgccactggacagatgaacctgaccaaggtggccgactccagtccctttgcccttgagctgctgctgtctgatgactgcttcgtgctggacaatgggctctgtggcaagatctacatttggaaagggcgaaaagctaacgagaaggagcggcaggcggctctccaagtggccgaggacttcatctcccgcatgcgctatgcccccaacactcaggtggagattctgccccagggccgcgagagccccatcttcaagcaattcttcaaggactggaaatgagggtgggcgcctccctgccccccacctcctgccggctttctcctctggctgcctggccagtgctgaggtgcccccgaggctgttgaataaaggagacaagtgctttcccamawaawaatataataatataaaaataaata

SEQ ID NO: 980 - DNA, 625 bp, Canis familiaris
cctgggggttcaaggccacagagggataggacacatctccacctccccagaaccacggggtctttcacaccagttacccagtgctgaagtatggctgccacctgtccccacatacccaatggagcagtggccatctttcccccccmragccccacccccattacctatctcttgggagttagccctctcctccctctcatttcccattgttaagtttgagaggaaagagctaggttagggaggaaggtggttggcccagagaggtggggagcagccaggagcccccaacctctcatttttcctccatcctgctcaccacctcctttgggtactcacagccccctcttgggacagccggggccaggactgggtcacctatgagctgaatcagcatctcctcctgagtcccagggcccctgcagttcccmgtctcttctgtcctgcagcccttgcctcctgcccaccaggttcccactttatatccmccttttccttttcccatttttatttttattttttttattattaaatgatgtggtctatgggaaaataataaaaatctgacttagttttaaaaaaaaaaaaaaaaaaaaaaaaaaaaawaaaaaaaaaaaaaaaaaaaaaa

SEQ ID NO: 981 - DNA, 604 bp, Canis familiaris
atatattcatgtttatttaagaagtggaaaaaaaatcaaaaccttaaaawaaaaaaccaatttcccaccctcctaaagtggcccccattcccatcttggcctgagaagacccaggccagacagctgtcccccatcccccgccccagccctgcctgctctaagaaactggcaggactggaggcgacagatgggcccctcttggcctctgtcccagctccctgcagccagatggagaggcggctgcttgcttccccctccccctgaagagccccggagacctcccccccttcttccagggtgaggggaagctggagccccaaactttgatcctccattgaagtggcctgacctttccatttggggtgagcactcagaggcccaaggacccccctctcccagttctggccttgggctctggcctgcatccctttgctggggaggaggcggcctggtttagttctgcctggggaggggtaacaacagagctgctctggaggtcgaggccaccccccaccctaggaccagaacygtgtctctgataaaggttttgaagtgaataaagttttaaaagccmaaaaaaaaaaaaaaaaaaaaaaaaaaaaaa

SEQ ID NO: 982 - DNA, 583 bp, Canis familiaris
gtgtctagcaagtatttaataaactcttgtaatttttttgttatcaggtgctggtagctccagaattttgtgacaactgttgtggttaaaatgtatctgtatcgcttgttaacgttccctggtctaaccttactcagtaagctttattcaccmaactttgtgctcaaaatatatcaatactattttatgttcatttcaccccccaaagagaagtaaataagagttcggaacccagggtaaaatggtagcctcattcaatacatcattaaaatgcatcttatttcctctttaaaaaacgtgatttattgtatttcatgctaatcttcagttcagaattcctccaggaaaataattcaatcttttgactactttcacactggctgcaaaccmagcagggaaagggtagggtgaggggaggttatgcagtggagcagtacccctggagttgagagtgataaacccctgaggcttttgtatttgtacttttgtgaatttagagaatgcaaaaatatgttggtgaggacattcttctcataaagagtagaagtaaawrmwrrwwrtgaatttgtgggtaaaaaaaaaa

SEQ ID NO: 983 - DNA, 679 bp, Canis familiaris
agggctgaagagagaatttcactaaatagaagaatctgctggcgatagcggcttctccacacattcataaagtgaaacagcaggaaataggatcatcagccaaatataacatcagamaaataatctcagtgcggttgattctgacattgctacaattactttttgtcctatttttcatgccacaaaaatgaggaaaacaaactaagtagcccwataagawawwaaatagattcatggcttggaaaggcaaatgtctaggcattccttccmaaactgatgtgctaaaatcagcactgatgtttgtttttttacacctaggatttttagcctgggtgtgtaggttgaggccaagtccctctgcaggaaagaacttatttttaaactcagaaaatgtcaatcatgaaaatcgacttcaactttagcmaaaagaaaaaaaatcaacaaaaagtatactctgtatgctgggattccaaggttccaacgtgccgctacaaatctctggggggtttctttcttctgataattctagagcctgttaccatagaaaggcatttcttcaatggctggttgtagttagttcatgtttttcaatcaaaatttgcaaatgtatttgttgctgtatagtgattgttttgcaaaataaaattgcttgtcacctaaaaaaaaaaaaaaaaaaaaa

SEQ ID NO: 984 - DNA, 690 bp, Canis familiaris
gccgttctcctcgtggraaacatatccgcaatatactcatcttgatccmcgtacccatccccattcttgtcgatgtccctccagagtttccwaaccacratttccttcatgtgctcaaactcctcagggtgcaggaaggcggtgaactcctcccgagtggcggtctggtcaccatcccaaggtctgcagccttgaaccttctctcgtcgcggggcagcatcttttttaaaggtgtgatgatccaaagagtcttgaaactcagcagggtttcctaggtagtaaccatacgtggcttgcttgtattcctcccaggaaattttatcatctttgtcccgatcataatccttccagactttagcgacattatcgtagatgtatcttttctgcactcgtttgatccaggttttcagctcctcagtggttacaaagctgtccccatcactgtcgattcgatcaacgatcttccccagcctctccttgctctcctccgaggtgagctggtcgaaggtcttggagtcctccttgcccaggaaggcctcgtggtcgtactggaagctctggttgtcctcgggcggccgctcgcccagctccgagtcgggccgcaccacgcgctccttgcgcaccgtgggcttggcccgcagcgtccgcggcgccagcgccagcgccagcagcagccccagggcgagcccc

SEQ ID NO: 985 - DNA, 628 bp, Canis familiaris
  misc_feature (24)..(24): n comprises a, c, g, or t, or includes no nucleotide
tatcttctagacttaggagttcanacacagcacctgaggatacccaagtagctcttctatgcatagttcaccttctccacccagtggggcacagaggagagtaggtgggtacagggtgtacaagctgcaagtaaggccctttattcatgtgatttctttcccccmattaatggatctttaatctgtatgtaccgactttttttctctgaaaacttcaacgtgagctgctctttacttccatgcaatattgtatactcgattgtgtatagaagaagctggtgagagtgccctcctacataagcmattgcagtgttttgcatgcmaaattttaagaatttaaatcgtcctgattctattttgtaaatggagaaamacmatcatatctttctaagcagtaatggaggaagactagtgctttgtgcatctttgatatactttgagtcttcattttttccataatgtaatacttttgacacmagttgagtttctcatattatcctagttcatgtacatccgaatgctacaataatactgtgtttaagttttgtgttgcaaagaacmaatggaataaacttgaattgtgctacmaaaaaaaaaaaaaaaaaaaaaaaaaaaaaaaaaaaaaaaa

SEQ ID NO: 986 - DNA, 621 bp, Canis familiaris
gagactgagsctggatcagaggaagaattcacgcgtgkcgggakccacgggcgggcgggcggaacacggaccacgwagacctggattttcatctcggctttgagactttataactttggattaaactgaggaacctctccaagctgaggatccctcgtctgtaagagggggatccccgctccgtggcgttgktggggattaagtgagaaaaccmcttggaagtgccttggcgcagtgcctggtgggtgggtgctccttacacctcttgctttcttttctcttggtgggggcatcactacaccgcactacagagggcgccccccmccctgaagctcttgctgggtgaggggcagatcctccccctaccaggggtggacccataactatgaaaaacccagcctctggtttttcagcccmagcattaaaaactcctcaacctgggcagctgggtggcttggttcagcggctgccttcagctcaggtcgtgatcttgggctccccactcmatggggagcctgcttctccttctttctttgcccctctctcttctctctctctctcataaataaaatctttaaaagaaaaaaaaaaaaaaaaaaaaaaaaaaaaaaaaaaaaaaaa

SEQ ID NO: 987 - DNA, 682 bp, Canis familiaris
tgatgacatttgaaccagacccggccgatttagccctgtcaagcattcctggccatgagacctttgaccctcggagacatcgcttctcagaggaggaacttaagccccaagcccatcatgaagaaggcccggaagatycaggtgccagaggagcagaaggacgagaagtattggagccgacggtacaagaataacgaggcagccaagaggtcccgagatgcccggcggctcaaggagaaccagatctcggtacgggcggccttcctggagaaggagaacgccctgctgaggcaggaagtggtggctgtgcgccaagagctgtcccactaccgcgccgtgctgtcccgctaccaggcccagcacggatccctgtgaggccgtcccccatccctgccaggcagcctcgctcagacttgtgccctgacgccctcttccctccccaccctgtggcccacgggccggccagctgagtgccccaggaacgtgatgatgcagataagatacatttatatttttaagaaaaagcgagcctcccccctccctcgcgggggcggggagggtcctgtgtgtgtgcccctgccacttcggggaccccatcctcccaccgcctccgttaatgcgtcctgaataaatcttgagaaccccaaaaaaaaaaaaaaaaaaaaaaaaaaaaaaaaaaaaa

SEQ ID NO: 988 - DNA, 594 bp, Canis familiaris
gcccgtgggggctctgggtttcctgaaagccmgatgtcctagaaagttgctggctggctttwtcttttttgtctggggcctggggaaagggctcggactgataggagaaatktggccccttcccttactcccagaaagatggaattagtgacggaccctccagggaatctccccagctggcttccmctctgactggccagacgtcgttgaccmcaggggagccmtggtctttactttcttcatgctcagacataaacttagcatcttaatggaaggaaaatgaggggaacttcmattatgatttattaaagacmatttctattacaccctcctttatgacacagtgacacttttagatgttaaagtaaaaactttaccatgccttttttttttttttttttttggcctaacattgaggccttaaacctgaggctcctgtgcctgatggaattcttgtaacatacacttgtgtatcatataaagataccmctctgtttctcttatgtattcttaatctagttgtttattaagaatgacmagcacgtcttttcmaaaaaaaaaaaaaaaaaaaaaaaaaaaaaaaaaaaaaaaaaa

SEQ ID NO: 989 - DNA, 643 bp, Canis familiaris
cgtgcggcgatcggcaagcagaacatgctcctctgggatgctggaggggttgctcaagctctccagtctgggccctcgrgctccagccctgagcaccgacgacagactagcttgagcctcctaggaccctaggcaggcccactgacctctgtagggcagtgtcacatccccagatcctggtccttccttccccccastcccccccacccccgggccacagagggagggagagcctgtgtccactgtgttgcatttgctgatttgagtggctcagctcactggagctcaaccttttttcttttcctcgagtcatttgctgtgcttccctgcaatattccacactactggggggttggggtaccagctgctgtgtggggtctggaaacccgcgactcatggctgttcagagtgtgttcatgtgtgtgtgtgcgtgtgtacatacatgtatgtaaccgaggtgtcgtgtagaatgtcctttggtagctctgggttggttgacagatggttttgtgatacttaacccccttgccttggtattgccagtttctcgtgcaataaacaatcagcagctrwraaaaaaawaaaaaaaaaaaaaaaaaaaaaaaaaaaaaaaaaaaaaaaaaaaaaaaaaaaaaaaaaaaaa

SEQ ID NO: 990 - DNA, 701 bp, Canis familiaris
  misc_feature (19)..(19): n comprises a, c, g, or t, or includes no nucleotide
ccgagcaacgcaccgagtntgtgccagaggccacttggaggatcggggccggctatccctatgggctgcaggacctccgctgagcaccactcggccgccagwatgctcctgctgttgctgggtatcatcgtcctccacgtcgccgtgctggtgctgctgttcgtctccacgatcgtcagccmatggktcgtgggcmatggacacgccmctgacctctggcmgaactgtagcacgtcctcggcaggcmacgtccmccmctgtcactcatcatcagcmaacgaatggctgcmgtctgtccaggccmccmtgatcctgtccatcatctttagtgttctgtcgctgttcctgttcttttgccmactcttcaccctcaccmaggggggtcggttttacatcactggagtcttccmaatccttgccggtctgtgcgtgatgagcgcagcgtccatctacmcggtgaggcacccagaatggcatttcaactctgactacgcctatggcttcacctacatcctggcctgggtggccttcccgctggcccttctcagcggtgtcatatacgtgatcttgcggaaacgtgaatgaggcgcccagacagttggtctgaggcmctgagcatacatagggaaagggaggaaggaaaccagaaaccygaaraawaaaaaraaaaaaaaaaaaaaaaaaaaaaaaaaaaaaaaaaa

SEQ ID NO: 991 - DNA, 712 bp, Canis familiaris
aggcccgagaaagcgcagggacagctcgtacacgtccgggctctccacaagctcctcttcctgctccgaggccgctgccagccgtccgcgggctgcccacgtagtcggagttgtagaagcaggcctcgctgscsgcctgcggtyygaagcggcccgtgtctcggcccagctccgggggcccggggcmctgggggggcgccacggccgggtggaaggcctggaagtgcatggggaagaaggcctgccagccagagatggcgtgcatgcggcagcggttcaggaaktcgggcgtgagcaccgtgtcgggcccggccagcaggaacagcgtgtccagcgggtgcttcttggagagcaggtccatgaggcgcagcggcgagggtgcagttgtctgcacgctgagccagggcacccgggcacccgggaaacgccgctcgagttccgccacgtgggccttgacaggcgcaaagacatctgcgtgggccgcccgctgggcctgtcgtggctcgtacaggagcagcagggtcagggctgcagccgcgtcacccggctccagcgccgcggtggcgaaggcctccaggaagccaggggccaggtcccgctcggccgcagccagaggcagcaacacggtgagacgcgacgcctcggtgacgtagggcacaggcaggatctccacgcggctcaggggccgcagcagctgcacccggcgggtgag

SEQ ID NO: 992 - DNA, 2827 bp, Canis familiaris
ccgcgcggcttgtggtctgagcgtctgatccccggggtggggggtggaggcggctcctactatcaaaagggacgtgagactcccaccggccgcgcgccatgagggccctgtgggtgctgggcctctgctgcgtcctgctgaccttcgggtcagtccgagctgacgatgaagtcgatgtggatggtacagtggaagaggatctgggtaaaagtagagaaggctccaggacagatgatgaagtagtgcagagagaggaagaagctattcagttggatggattaaatgcatcccaaataagagaacttagagaaaaatcagaaaaatttgccttccaagctgaagtgaatagaatgatgaaacttatcatcaattcattgtataaaaataaagagattttcttgagagaactgatttcaaatgcttctgatgccttagataagataaggttaatatcactgactgatgaaaatgctcttgctggaaatgaggaactaactgtcaaaattaagtgtgacaaggagaagaatctgctacatgtcacagacactggtgtgggaatgacccgggaagagttggttaaaaaccttggtaccatagccaaatctggaacaagcgagtttttaaacaaaatgactgaggcacaagaggatggccagtcaacttctgaactgattgggcagtttggtgtcggtttctattctgccttccttgtcgcagataaggttattgtcacatcaaaacacaacaacgatacccagcatatctgggaatctgactccaatgagttctctgtaattgctgacccacgagggaacaccctcggacggggaacaacaattacacttgttttaaaagaagaagcatctgattaccttgaattggacacaattaaaaatctcgtcaagaaatattcacagtttataaacttccctatttatgtgtggagcagcaagactgaaactgttgaggagcccatggaagaagaagaagcagcaaaagaagaaaaagaagattctgatgatgaagctgcagtggaagaagaagaggaggaaaaaaaaccaaaaaccaaaaaagttgagaaaactgtctgggattgggagcttatgaatgacatcaaaccaatatggcagagaccatcaaaagaagtagaagatgacgaatacaaagctttctacaaatcattttcaaaggaaagtgatgaccccatggcttatatccactttactgctgaaggggaagtcaccttcaaatcaattttatttgtacctacatctgctccacgtggtctgtttgatgaatatggatctaagaagagtgattacattaagctttacgtgcgcagagtattcatcacagatgacttccatgatatgatgcccaagtaccttaactttgtcaagggtgttgtggactcagatgatctccccttgaatgtttcccgggaaactcttcagcaacataaactgcttaaggtgattagaaagaagcttgtccgtaaaactctggacatgatcaagaagattgctgatgagaagtacaatgatactttttggaaagaatttggtaccaacatcaagcttggtgtaattgaagaccactcaaatcgaacacgtcttgctaaacttcttagattccagtcatctcatcatccaagtgacataaccagtctagaccaatacgtggaaagaatgaaggagaagcaagacaaaatctacttcatggctgggtctagcagaaaagaggctgaatcttctccatttgttgagcgacttctgaaaaagggctatgaagtgatttatctcaccgaacctgtggacgaatactgcattcaggctcttcctgagtttgatgggaaaaggttccagaatgttgccaaagaaggtgtgaaatttgatgaaagtgagaaaacaaaggagagtcgtgaagcgattgagaaagaatttgagcctctgctcaactggatgaaagataaagctctcaaggacaagattgaaaaggccgtggtatctcagcgtctgacagagtctccgtgtgctctggtggccagccagtatggatggtctggcaacatggagagaatcatgaaagctcaagcataccagacgggcaaagacatctctacaaattactatgccagccaaaagaaaacatttgaaattaatcccagacatcccctgatcaaagacatgctgcgacgagttaaggaagatgaagatgacaaaacggtatcggatcttgctgtggttttgtttgagacagcaacgctgagatcaggctatctgctaccagacactaaagcatatggagatcgaatagaaagaatgcttcgcctcagtttaaacattgaccctgatgcaaaggtggaagaagaaccagaagaagaacccgaagagacaaccgaggacaccacagaagacacagagcaggacgatgaagaagaaatggatgcaggaacagacgacgaagaacaagaaacagtaaagaaatctacagctgaaaaagatgaattataaattatactctcaccatttggaacctgtgtggagagggaatgtgaaatttaagtcatttctttcgagagagacttgttttggatgctccccgcagcccccttctcccctgcactgtaaaatgttgggattgtgggtcacagaaagaagtgggttttttagttgaatttttttttttaacattcctcatgaatgtaaatttgtactatttaactgactattcttggtgtaaaatcttgtcatgtgtataaaaataaaaaagatcccaaataaaaaaaaaaaaaaaaaaaaaactcgaggggggggcccggtacccc

SEQ ID NO: 993 - DNA, 1063 bp, Canis familiaris
tctgggtctggaaacccaaaccctcaaggatggcctggtccatggggaaaccagcctgctggagcagggggctacccaggggcctcctatcctggtgcctaccctggccaggcaccacccggcggctaccctggccaggcacctcccggyggctaccctggccaggcacswsccggcggctaccctggccaggcaccacccggcggctaccctggccrrgcacctcccggtggctaccctggccaggcacctcccggcggctaccctggccaggcgcctcctggcacctaccctggccccacagcacctgcttatcctggcccaacagcaccaggaacccaascmsgrcwmccgagtkgscytggggcctacccgcctcctggacaaccaagcgctccgggagcytaccctkcgsytggtcccytkgsmatccctgctggaccactgwytgtgccttakgrsstacctttgsctggaggagtcaagcctcgcatgctgataacmattctgggcacagtaaggcccagtgcaaacagacttgctctagatttcaagagagggaatgatgttgccttycactttaacccacgcttyaatgaagacawcaagagagtcattgtttgcaataccaagctggataatatctggggaaaggaagaaaggcaggcagcttttccattcgaaagtggtaaaccattcraaatacaagtgctggttgaatctgaccacttcaaggttgcggtcaatgatgcccatttgttgcagtacaatcatcggatgaaaaatctcccggraatcagcmaactgggaatttctggtgacatagatctcaccagtgcttcatatgctatgatataatcttaaaggagaagatttaaaaaaaagagaattgaatattcatttaaacttacacatgtaaacttcatgtttcgactgaaaaattttacctttattcatcactatccttcttgtaaatcatccatttaataaacattctaagagttmmwrwmaaaaaaaaaaaaaaaaaaaaaaaaaaaaaaaaaaaaaaaaaaaaaaaaaaaaa

SEQ ID NO: 994 - DNA, 430 bp, Canis familiaris
gcacgagsvcrmrmkmsccgaagccgtccccgaagccgtccccgcagcgagcgaacgagcgccgaggcgtggggaaaatggcagacagtttttcacttaatgatgctttatctgggtctggaaacccaaaccctcaaggatggcctggtccatggggaaaccagcctgctggagcagggggctacccaggggcctcctatcctggtgcctaccctggccaggcacctcccggcggctaccctggccaggcacctcccggcggctaccctggccaggcaccacccggcggctaccctggccaggcacctcccggtggctaccctggccaggcacctcccggcggctaccctggccaggcgcctcctggcacctaccctggccccacagcacctgcttatcctggcccaacagcaccaggaacccaacccgg

SEQ ID NO: 995 - DNA, 695 bp, Canis familiaris
cgtggacaaccaagcgctccgggagcctaaccctgcgccttggtcccctttggcaatccctgctgggaccacctgactggtgccttatggaccgtaccctttgcctggaggagtcaagcctcgcatgcgtgataacgattctgggcacagtaaggcccagtgcmaacagacttgctctagatttcaagagagggaatgatgttgccttccactttaacccacgcttcratgaagactacaagagagtcattgtttgcaataccmagctggataatatctgggraarggaaraaaggcaggcagcttttccattcgaaagtggtraaaccattcraaatacaagtgctggttgaatctgaccacttcaaggttgcggtcaatggatgcccatttgttgcagtaccagatccatcggatgaaaaatctcccggaaatcagcaaactgggaatttctggtgacatagatctcaccagtgcttcatatgctatgatataatcttaaaggagaagatttaaaaaaaagagaattgaatattcatttaaacttacacatgtaaacttcatgtttcgactgaaaaattttacctttattcatcactatccttcttgtaaatcatccatttaataaacattctaagagttmmmwrwmaaaaaaaaaaaaaaaaaaaaaaaaaaaaaaaaaaaaaaaaaaaaaa

SEQ ID NO: 996 - DNA, 629 bp, Canis familiaris
cccagatgagcgtcgctttgccggtcttttccattgctgtctcctccgatggacgggaagtgctaggaggggcaaatgacggctgcctatatgtctttgatcgagamcagaatccggcgcacccttcagaytgagtcccacgaggatgatgtgaattgcagtggccttttgctgacataagctctcagatcctgttttctgggggtgacgatgccatcttgcaaagtgtgggatcgacgcaccatgcgggaggacgaccccaaacctgtgggcgcactggctgggcaccaggatggcatcaccttcattgacagtaagggtgatgcccgctatctcatctccaactccaaagaccagaccatcaagctctgggatatccgacgcttttctagtcgggaaggaatggaggcctcacggcaggctgccacacagcaaaactgggactaccgctggcagcaggtgcccaaaaaagcctggcggaaactgaagctcccaggggacagctccttgatgacctaccggggccatggggtgctgcacaccctcatccgctgccgattctcccccatccatagtacgggccagcagtttatctacagcggctgctctactggcaaagttgttgtgta

SEQ ID NO: 997 - DNA, 642 bp, Canis familiaris
ttccaccaattcagaaggtgtgtgaagttgttgatggattcatctatgttgcaatgctgaagctcatawagacatgwatggcacagatgaattttctcgtattatggcaatgacagatccacgcttttggatcttcaggaagacctatgctggttttatcttgcatttctcacagcmaatgtaaaaagaatgccctgtttttatttggctcatgagctgcgtctaaatcatctaaaccacccatggatggtccaggatacagaggctgaaactctaactggttttttgaatggcattcagtggattcttgaagaagtagaatctaagcatacmagatgatcctccttttagaccttggaaattgaaaccccttgaaacttgttactaaggtcatgatttgaatattttgctgagtcagctaattttgtcctgcctttttgcaggtgggctttatattgggacagctgtagctgctgtgttttttatataatttttactttttaccttaaatcaattacacagaacmatgtttcagcatttagcccccmaatgagccttttaagactttttgataacttttatattttctttttttaaaatattaaattctgaaaaaaaaaaaaaaaaaaaaaaaaaaaaaaa

SEQ ID NO: 998 - DNA, 693 bp, Canis familiaris
  misc_feature (121)..(121): n comprises a, c, g, or t, or includes no nucleotide
  misc_feature (123)..(123): n comprises a, c, g, or t, or includes no nucleotide
tctcgaccgtaagccgcaccaccggcccccgaatcgtccaggcccaacgccgcagccaccgagcaagtcgtacgccccctcggcggctccgcgccttggagctgcccgtggggcccccagncntgagctccccgccgcttgccraagccgctccgcgctcccccccacactctggcggctcccgacccggcccggagacattccgccagcgtttccggcagttccgctaccaggacgccgcaggtccgcgggaggcgttccggcagctgcgggagctctcccgccagtggctgcgacccgacatccgcacgaaggagcagatcgtggagatgctggtgcaggagcagctgctggccatcctgcctgaggcggcgcgggcccggyggcttcgccgccgcacsgatgtgcgcatcacgggctgagctgcgcagctgcgggcggcggggccccggcgttctctgagctggggccacgatcgggtccaggggcctgagccaggctctccgttgttgatgaaaaatgagtttttggcagctccagcgtctgatgtgccccttttcgttcgtcccttactaggtgtattttcccgagccttttcccttccaatctcctttttggctggtggcaaaacccgcgttgggacccatgagaataaagcctttgtttcctgttcaaaaaaaaaaaaaaaaaaaa

SEQ ID NO: 999 - DNA, 633 bp, Canis familiaris
gcgcgtccccttggggcctgccccctgcctcctgctgtgagcactttgtggaggctcctagggctcaccggscmacccagggcgcctctgggtcagaattcagttccccctgccacccaaggtcatattcccgggccgtgggtgaggaccgggcgccttcgagggagccmttaggcagacaggaagagccgagcggagaccccmacgcgcggcttcccctgcggcctctgcccgaggccaccccttggcacttctgccggcctccctggcggaggcacctccacaggcgtcagtcaggccggtgctgactggggcacaggggcacccagaccacttgctaggatcccmgcmagttctggccgcgtggatttaaagcagaagctgcttcccacccgcgctgccaccacgataagctacgtcactgatataagctccttaaaaaaaaaaatcaaatctttcctgccacgagagagctgcctggtggggtggcccggcccccacccgcgcggtgacaggccccggggtccctccggcgctggggccacatcctaaacattctataaaagctgaaaaaagaatgtgmaaaaaaaaaaaaaaaaaaaaaaaaaaaaaaaaaaaaaaaaaaaaaaaaaa

SEQ ID NO: 1000 - DNA, 662 bp, Canis familiaris
tgtctggtatctgtaaacactcttttcgttcttagtctttttcttgtataattgatgttctttaaaattgttaatgtataacagggcttatgtttcagtttgttttctgttgtgtttttaaacagaaaatgaaaggagtacmagctcctttgtctcatttcaaagttgctaccagtgtacgcagtaattagacgaagaagaaacattcagtagaacattttattgcctagttgacaacattgcttgaatgctggtggttctatccctttgacactacacaattttctaatatgtgttaatgctatgtgacmaaatgccctgattcctagtgccmaaggttcaacttaatgtatatacctgaaaacccatgcatttgtgctcttttttttatggtgcttgaagtaaaacagcccatcctctgcaagtccatctatgttgttccttaggcattctatctttgctcaaattgttgaaggatggtgatttgtttcatggtttttgtatttgagtctaatgcacgttctaacatgatagaggcaatgcattattgtgtagccmcggttttctggagaagttgatattttaggaattgtatttcagatcttaaataaaatttgtttctaaatttcmaaaaaaaaaaaaaaaaaaaaaaaaaaaaaaaa

SEQ ID NO: 1001 - DNA, 514 bp, Canis familiaris
gcacgaggccagatctgcagacggctgttgtctccgcgagccgagcccggcccacacagaagcaattatgtctaagggacctgcagtcgggatcgatcttggcaccacctactcctgcgtgggtgtcttccagcacgggaaagtggaaataattgccaatgatcagggaaaccgaaccaccccaagttatgtcgccttcacggacaccgaacgattgatcggtgatgctgcgaagaatcaagttgcgatgaaccccaccaacacggttttcgatgccaagcggctgattggacgtagatttgatgatgctgtcgtccaatctgatatgawgcattggcctttcatggtggtgaatgatgctggcaggcctaaagtccaagtagagtacaagggggagaccaaaagtttctatccagaggaggtgtcctctatggtcctgacgaagatgaaggaaattgcagaggcctaccttgggaagactgttaccaatgcagttgtcacggtacctggatac

SEQ ID NO: 1002 - DNA, 720 bp, Canis familiaris
  misc_feature (60)..(60): n comprises a, c, g, or t, or includes no nucleotide
gactcagtcccttcaacacaggatggaccatctcacccaccgtggggcaatctctttcanacagtcatctcctgacaccccctagcccaggcttccacagcagccatgtcrctccttctgctggtggtctctgccccttcacatcctwattctcatcctgcttttcgtggccamytttggacaagtcctggtggactctcccggggaaggagtccctgaatctctggtatgactgcacatggracwatgacaacmawacatgggcctgcagtaatgtcagcgagaatggctggctcaaggcggttcaggtcctcatggtgctttccctcatcctctgctgcctgtccttcatcctgttcatgttccagctgtataccatgcggcgaggagggctcttctatgccactggcctctgccagctttgcaccagcgtggcggtgtttaccggggcgctgatctacgccattcacgccgaggagatcctggcggagcgcccgccggggggcagcttcggytactgcttcgccctggcttgggtggccttccccctcgcccctggccagcggcgtcatctacatccacctgcggaagcgggagtgagggccccgcgtcgcgctgccgcccctgcccgcccctcggtctcagccccgaagcccccgcccccggcctcctccagaaaataaaaccgtttaaccgccwraaaaaaaaaaaaaaaaaaaa

SEQ ID NO: 1003 - DNA, 958 bp, Canis familiaris
tcatgggaggcctgggaggataaagcgggtgagattaccaccctgaagtgccaaaaaacgcctcaatgaccggattgaaatgtggagttatgcagcaaaggtggcccccgcagatggcttctctgaccttgccatgcaagtgatgacctctccatcaaagaactacattctctctgtcatcagtgggagcatctgtatattgttcctgattggtctgatgtgtggacgtatcaccaagcgagtaacacgagagctcaaggacaggtagagccaccttgaccagcagaggaacggcctggcctgttggtgcccagtgtatacagccctcctgtatagtgtacccactcacctcgttcttctcggaggtggcaccaacacccgcgttagagcagcagcaggtatcctctgcactgtcccgtctccaacttcgcccgtgtccatggtgtcctcctcctcctcgaccattttgtgcagcatcagcagctggccgctttggttattgcctgggttggcaaatttgggtttacctgcccgtagacaagtctctctcataccaatggaactaccaatacttccagaaccaacttacctgacctgcaactcaaatgatttttaaaaaaagaaaaaaacaaacaccmaaaaaaaaagaaatttttaaagaaagaaaaaaatgtatatagtaacacatctcctccaggcttgatttgggcaatggggttatttcttctgtgtgactataaaatgaaggcaggactttaggggaaaacacacacccaatatgctatcactgggatgtcttgctcatttctcaaaagcacctttggaccatgtgggggccatggacttcaccgaggagtgggaaaccactaaccagcctgctttgggtcttgttttcttctgctgaaatagtgatgccttccagttcccacgttaatagagccactgctggtcacgaaaa

SEQ ID NO: 1004 - DNA, 613 bp, Canis familiaris
aaaatgggatctaatctataaaataaggactgatcmaagttgacacaagttttttgtgcttttttccctccttacaawttcttttggattctgaaaatttcscccgaatttctagaggttagtgtatcaggttctaattcacaggctttctgttctgtgcmaacagtaggggttcattttcctcactgctttttccttgggaggattttggtgttgaatctctggtgtatggatattctaggtatatttggagtctgtcattgacgttaactcttgactgatctagtttatatcatgtttgaaatgcmaattgagtcatttgaagttggatctactagtatactttgagagattttgctaagcaaaggccaaccctgccatgcccttggtttatcagatgtttcaaactatttttcaggtgtttggcatttaataaaacccagcacatttcaatgattggtaccttctccatccgttttcaaagccttgtgttttttccagcaaatgtaatccttgtgattgttttcactcagttcatctaaatttggttcagaatcttaaactctttgaaatcccagaagcttttagattttgctcttaaaaaaaaaaaaaa

SEQ ID NO: 1005 - DNA, 643 bp, Canis familiaris
tcccccggtcgtttcctttgacaactgcgggagaacgtgtccgcgcgtcgagcgagcccgtgaagttgcgtgtgcgtggcccgtgtgcgtgggagtgtgactgcgtgtgtaactcgagccaccccgtctgttccgacctgcgctgcggagcccacgctccaggcccgctccacctgctgcggtttcgcggtgatcgtaggtacaggcgcgtcccggcgtctaagccgagggcgctggggcgacgttggaggaagatcagctcgctacggcccaagtcgggctgactcgccgagccggtgtagacagtggctggcttcggaagagtgcgtgtctgcgtgcgtgcgacccggctgcggctcagctcccaccaaccacaggatcagccacaaacttaaccaacatccccaaacccgagttctcagatgtggagagctgtactctgagtgtcatcgacttggacttttattattattattattatcatcatcattttttttaaagattagcttttctttgaaaagctgagttttctgaactgagcgttttgccagaatttattaagagaacatgacaagtatttctagcccagcccttcttcaactactgaagcttattttcaaggctacttaaaaaaaaaaaaaaa

SEQ ID NO: 1006 - DNA, 675 bp, Canis familiaris
caaaaccgggcagtgccacccctccactggctactgctggtgcgtcctggtggacactggacgtcccatscctggcacgtccaccaggtacgaacagccgaaatgtgacmacacagccagggctcacccaaccaaaaccagggatctgtacaagggccgccagctccaaggttgtcctggtgccaaaaagaatgaatttctgacaagcatcttggacgcgctctctaccgacatggtgcacgcagtctccgacccctcttcctctggcaggctctcagaacccgaccccagccacaccctcgaggagagggtggtccactggtacttcaagctactcgataagaactccagcggggacattggcaaaaaggagattaagcccttcaagagattccttcggaaaaaatcaaagcccaaaaagtgcgtgaagaagtttgtcgaatactgtgacgtgaataacgacaaatccatctccgtgcaagagctgatgggctgcctcggggtgacgaaagaagaagcccctagagctaatgctgaaagcgcctctaatagacagccaaggaagcaaggatagtggctcacacatcccaggcggttcctagacatgtgggagactccctcaccaaaaagcaattaaaaacaaaaacaaacamaaaaaaaaaaaaaaaaaaaaaa

SEQ ID NO: 1007 - DNA, 746 bp, Canis familiaris
ggagctcacggcggacgcgcggagccaacatgccagtggcccggarctgggtgtgtcgtaagacttatgkgaccyctcgragrcccttcgagaagtcgcgcytcgaccaggamctgraactgatcggcgagtacgkgctccggamcmwwcktgaggtctggagggtcaakkktwvcctggccmagatccgcaaggccgcccgggagctkctgacgctggacgaraaggacccgcggcgcctgtkcgaaggtaatgccctrctgcgscgacttgtacgcatcggggtgctggatgagggcmaratgaagttggattacattctgggcctgaagatcgaggatttcttagagagacgcctgcaraccyaggtctttaarctgggcttggccmagtccatccaccatgcccgtgtgctgatccgccagcgccatatcagggtccgaaagcaggtagtgaacatcccgtccttcattgyccgcctggacycccagaagcacatcgacttctccctccgttctccgtatgggggtggccgcccaggccgcgtgaagaggaagaatgccmagaagggccagggtggggctggagccggtgatgacgaagaggaggactgaacccacccttccatccctttcaggcccgtggatwatctagttttytaggccmataatraaacmgtgttttggrawmrwwwaaaaaaamawaraaaaaaaaaaaaaraaaaaaaaraaaaaaaaaaaaaaaaa

SEQ ID NO: 1008 - DNA, 774 bp, Canis familiaris
gggctcgggaggtggtcagaggcgttgaagcctataatgatagttctgatgaagaaagcagcagccatcatggaccaggagtgcaatgtgcccatcagtaaactgcaaacaattgcacaggtggattttcgttgttccacatttgcccagtttgctttcagcgatccagctggagtgtctggtcaatccagaagaactgatggacatttgttggtctatgtgtaacttttaaaattggtatagtatctacagagtgtataatttaaactaaccmcmaagctttacatcttcattttgactgttctgtagcagaataaagcacttgaaaggaaacacagactccctgttcacaccatgggttataagtttcagtcctggtatctgtgcttgatttttatcagttttgtgtagattttatgtttcatattttaaatccmaatcccaccattgtaaagtttgtgtacaatttgtcctgaagctttgtgtttggctgcaccctgcgtaagctgctacacaatagaataaagaatttcatagcctgtatctatcatttagatgcatggaaaaatgggctttgcacacaatgggtttggagctgactgggaacaatggaaaaaaaaataacattagctgtggttgtaaagtccccccccccctttttttttaccatcttgtgaaaggtttctgaaactcgataataaaaagcagttggtataaattaaaaaaaaaaaaaaaaaaaaaaaaaaaaaaaaaaaaaaaaaaaaaaaaaaaggg

SEQ ID NO: 1009 - DNA, 608 bp, Canis familiaris
gaagaggaccagcgctggatcaacttagtsgtggagagcctgcgtctgtctgggtaacactttcgtggcgctgtctgacytgcgctgcaatctggcctgtgcgcccccacgacacctgcatgtggtccggcccatgtctcactacactacccccatggtgcttcagcaagcagccattcccatccagatcaatgtgggaaccactgtgaccatgacggggaatgggactcggccccccccaactgccaatgcggaggcagctccccctggtcctgggcaggcctcgtccctggctcccacttctaccactgtcgagtcttcaaccgagggggctcccccgccagggccagctccccccccaaccaccagtcacccgagggtcatccgaatttcccaccagagcgtggaacccgtggtcatgatgcacatgaatatccaagattccggcacacagcctggtggagttccgagtgctcccactggccccctaggaccccctggtcatggccagaccctgggctccaccctcatccagctgccctccctgcccctgagttcatgcacgccgtcgcccaccagatcactcatcaggccatggtggcagctgt

SEQ ID NO: 1010 - DNA, 419 bp, Canis familiaris
gccacgtgcgccccggtgccatgtggccaagccattcctgcctcctggtcccaattccatgttcttgtttcgcgattgtctctccggggtctagtgtttgtctgtcgctggagtcggctcgtgatccactgtggtctagctgcagggccctgcccgcccctccccgcccctccccgtccctccccgtccctccccgctcctgccatccacccggttgcaggggagttgcctggccaccagtgctgtgggtctgctgttatggcagctgcaggaccccctccccagctattccccagctgctccccagctcccgactcgcccgccacctgcctgctcaccaataaagaaagcctgacccgtctcgttctcgggctcctgtgcacacaaaaaaaaaaaaaaaaaaaaaaaaaaaaaaaaaa

SEQ ID NO: 1011 - DNA, 964 bp, Canis familiaris
  misc_feature (14)..(14): n comprises a, c, g, or t, or includes no nucleotide
cccacgcgtccggnaagcggcggaagccggatgaggtcctggatgacgaggacacgggctctgctcctctgaagagcagtgggcacgtcaacgacaaaggcaagaacgttcgccagcggaacgccaactgaggcctcccgcctccgcctggagcagccgcgagcagctcagcggctggtgtctgcagattccacgttctttcctctcacaggagacccgccccacgaaagcagaccacacaccgtgggtcagatcacacttttctttccttttttaaactaaactagggttttctacatagaattccattctttagggggtttttcctttttaaacattttgtgagcgtctcaggggagccgtgagcttcctgcgagactcctgtcctcccctcgtctgctcggccacccctgcccgctgtcccctcgccrgccccccaccgccctcccgcccgcccmtgccgggcccagccacccgtccttcggcgtcccttgggcatcttagcctcctctcccctcgtggggktcgtggaggacggactggcccatctctggggctctacctcctggggctgctgggccttgttgggacccctgtgcagggtcacaggccgtgcacggtgcaggtgcaagcatcctgcctgcccaagtcctggctgkygggttgcctcgggtctgtgttgtgcgtgggacggctctgaccacgtggctgytggcgggccccgcccgcccctccccgtccctccccgtccctccccgctcctgccatccacccggttgcaggggagttgcctggccaccagtgctgcgggtctgctgttatggcagctgcagggaccccctcccagctattccccagctgctccccagctcccgactcgcccgccacctgcctgctcaccaataaatgaaagcctgacccgtctcgttctcgggctcctgtgcacacaaaaaaaaaaaaaaaa

SEQ ID NO: 1012 - DNA, 717 bp, Canis familiaris
acccggccccaagggacagggtcatcatcagctttaatcctctgccagatgtgcaggtcaatgacctccgcagcgccctggagacccagctgyaccaggccrcggggggcgcgtwkcgggtggtccacggccgccaggtgaagcagctggccggggcccaggaggagtcctgagtagccmctagccgccacggtcctcctggtcggcaggtctcctcccccaaccaacgcggggagccacgtgggtgccgagtcagaggtcccscggtggcgggggtttggacggcctatgcctttgccagcccgcatyttaaacttgctggggtgaccgagctcaccaggactcagacgatgcagcggccggccggggagcgtggccccgaggtgacaccaggctgccgtgaggccccctgcccgccggagctgcctctcgctctacatagtcgtggttcacgtgatgctccgagtgtgtggagaactgtcacacaactcggcctctgctcagctgctcggtggccaccggctccaccgtgggaggaccctggggctgggagctgcggcattctcggttagccagctgcctgagtgtgtggccgcctcagcccttgtcacggtccctttgcgctccctgtgctttccccaactataaagttgttttacaaataagaaaaaaaaaaaaaaaaaaaaaaaaaaaaaaaaaaaaaaaaaaaaaaaaaaa

SEQ ID NO: 1013 - DNA, 648 bp, Canis familiaris
ttctgcaaggagttcaacgagaagacaataggacatcaaagaaggcattcctttgcccaccaagatttttgtgaagcctgataggacatttgaaatcaagatcggacaacccactgtttcctacttcctgaaagcagctgctgggattgagaagggggcccggcaaacagggaaggaggtggctggcctggtgaccttgaagcatgtgtatgagatcgcccaagttaaagctcaggatgaggccttcgccctgcaggatgtgcccctgtcctctgtggttcgctccatcattggctctgcccgttccctgggcattcgtgtggtgaaggacctcagttcagaagagctagcagctttccagaargagcgagccgcattcctggctgcccagaaagaggcagatttggcagcccaggcagaagctgccaagaagtgaccctgtcccccacactccagggttttgaagggagtagctggaatggaggccagttggaaaagctgtaccaaaagggtgggagggaggtgacaccaagctgattgttatatccctgactttaaattatatattttcatatgtatgacagtatcaagagatcaaacttaaataaacatttcttttgtcawmmaaaaaaaaaaaaaaaaaaaaaa

SEQ ID NO: 1014 - DNA, 616 bp, Canis familiaris
ttctcttatactgctcgcagtaattcacactggraataagacactagagttccattgtgcctactaaaatatgggaatgtctaacttaaatagctttgagatttcagctgtgctagaggcttttattagaaagccctattttttttctgtaaagttactaatatatcgtgtaacmctattacmgtatttctgatgttatattcattcagatataaggtttgtacatattatcatcctwaarggaaattgtataagacmattttagaaagaaaaatatatgttctgtttattattatgacmaatgagagataaaatatattttttaatggaaagtttatagcatctcttaataggtacggccatccttcctgtgtggagtgtttttgtaatatacttttaccctgtataagctgtaatatcmttttatagaaaatgccattatatagtcmagttgtttaatgttggaaagtgtatgaagtataaattatctgaatattagatgctctgagaaattgaatgtactttatttaaaagattttatgtttttactatctaaacatcattaaagttttcmaattatttmrrarwaaaaaaaaaaaaaaaaaaaaaaaaaaaa

SEQ ID NO: 1015 - DNA, 631 bp, Canis familiaris
ctgttgtgaagaactgatttgcactctgtagtgtttaaagactcaatctctgatagtgaatctcttaaatttagtgtatgtaaacagctttcgatatgtattgtctaaatgcatttaaatctcttttactcaaagctacagcaaaatactggtatgtgaccacgtaagactgtcaatgccracraagacaacactaatcagcatatcctacagtggattgcagtgctctccraattatttgaaaaatgcattacagacaacttgcctgactttgagcataaaaggccctctaacctatgcaggtttcctcattacgcatctagaaaatgctagtgtgtttttgctcacttcatatgtaacaggtgcccttatgttgtgctgtatcctgtgctttttctgtgggaccattccattcaggaacagagcaccatgattccaatctgtgtgtatttactaacccttccctgaggtttgtgtatgttggatattgtggtgttttagatcactgagtgtacagaagagagaattcaaacaaaatattgctgttcttcagttttgtttgtggaatttgaaattactcaaatttaaaataaattactggactgtggaaaaaaaaaaaaaaaaaaaaaaa

SEQ ID NO: 1016 - DNA, 619 bp, Canis familiaris
cgctccagacccacatctggtttgctttatgrcttattctggcccctcgcgtaccacccgccaggcagacgtgtgagcakcggagggsccggtgaagaggaaggcccytgagggtkctgctggcctgaaggctcatctgtcaggcttctgctcgtcgggcgcacgggctgggaggactgtcatgaaatgaatgtacggctgtctgtttctttggggaggcccccctggcctcacgtgggagcggctggggttggggtgctgccttaggaggtacacctgcgtgcccmgttccacgtgcacactgggaagaatgcaaccagctgcctgcctcccgtttgctggcttgcccacccccctctcacgctttccctgaaatcctgtccttgtcagcctcaggagtgagactccctggggaggaaagccttttactgttcttggaagcccaggctgcgtaccttggggcacgggggatatgcttgaaaacagtctcattcttcgcacacacccacccccccatcactgtatggtaccaaacctgattaaagtggcatctgagaaaaaaaaaaaaaaaaaaaaaaaaaaaaaaaaaaaaaaaaaaaaaaaaaaaaaaaaaaaaaaa

SEQ ID NO: 1017 - DNA, 629 bp, Canis familiaris
gttatagcagccacaggaacaaatacacagctctaaaaattagctaaattggcttaaaattcatgtcccaggggtacccgagtggctcarttggttaagtgcccgactcttgatttctgctcgggtcatgacctcagggttatgagatcaagccccatgtcaggcaactgctgggcacagaacctgcctaagattctctttctctcccgctgcccttcccctcacctctctttctccctttataaaaaaataaaaaatmaaattcatgctcccaactagtatatataacccccctatcttttgttatacttattttaaaataactatcaccagaaaataaatgtaaatcttttatttacmgagtacmgagatttcccagagcacagagttcccataatactcctccctcagtatcccatattgctaacatcttatatgactatgtacactttgtcacaactaagaagccmatcttggtaccttcctattaactaaactctacactttcccttggatttcactagctttcccgctaatgtccmttttttgttccaggtcccatccmagatattaaattatacttagtcmaaaaaaaaaaaaaaaaaaaaaaaaaaaaaaaaaaaaaaaaa

SEQ ID NO: 1018 - DNA, 1038 bp, Canis familiaris
gtgactccgagatgcggtgtcccgttgcmtcgmtgataksccaccgaatggaaacctgcaggtgtcctctcagctacctaatctctttcctccttttcctgtcccattcagagacagcctgccgtcccttggggaagagaccttgcaggatgcaagccttcagaatctgggatgttaaccagaagaccttctacctgaggaataaccaactagtcgctggatacttgcaaggatcaaatactaaattagaagagaagttagatgtggtgcccgtcgagcctcatgccgtgttcttggggatccatggggggaagctgtgcctggcctgtgtcaagtctggagatgagaccaggctccagctggaggccgttaacatcactgacctgagtaagaacaaggatcaagacaagcgctttaccttcatcctctcagacagtggccctaccaccagctttgagtctgctgcctgccctggctggttcctctgcacagcactggaggccgaccggcytgtcagcctcaccaacagaccagaagaggccatgatggtcactaagttctacttccagaaggaataatagwgtstmcwtkmcgtgcttcccccccactcccaacacatcaatgactccagagatgcctctccattctgcctggggtctcctggctgtggtggaggctctgaggagcagcctcggtggggtggaccctcagaaggatgtatgagagccctggtaacgggaccctgcctccagcctcctcagctagccaacctcaatgctgccaccacagtggtctttctaaagtgcacctctagctgcagcactgctccaggcctttcagggctgcctctgccttctggattaaagccaggctgcttggccagcctggccccctgctctcctctccgtaactccttgctctcctcccttgccccatgtccatgtcctggatccctcctgcccctttgctggcctcccaaaccttgtgttttgcaaaccgaaaaaaaaaaaaaaacgatccggtacctctagatcagaa

SEQ ID NO: 1019 - DNA, 627 bp, Canis familiaris
gagcctctggactccctggaaggcctgggcccmctggtcccccggggacctcctggagagaatggtttccaggccaaatgggacttcgtggcctcccaggcattaaaggcccccctggtgctcttggtttgagggggcctaaaggtgacttgggagaaaggggggaacgtggccctccaggaagaggtcctaagggcttgcccggagctacaggtctcccaggtgagcctggtcctgccagctacgggaggaatggccgggatggtgaacgaggccccccaggggtggcaggaattcctggtgtacctggtcctccaggccctcctggccctcctgggttttgtgagccagcctcctgcaccatgcaggctgggcmacgggcgtttagcmaagggcctgaccagtgaaaagcttagtgctgcatgsctgtctgcaaaaaccatgtctggcaaaggagcttgraggagaaacaccaccgaagccaaggcaaaagatgacaatgcattaccttcattgttattacatgtcttatttgacagatttaaaacaatggtgctattcaataaatgctcttccctttcccttggaggggagacaggagagtcatcagataaaaaaaaaaaaaaa

SEQ ID NO: 1020 - DNA, 616 bp, Canis familiaris
gtgcttctgttgccactggctgagcccgggswtctgggtggttgaawcggaggacgagccactgcttgcctgaggtgacccagctcccttgggggctctggtcgtggtgacagcaacccttcagagggcagctcagcttcccttccacttcttccttscctgagcctccatctgagcctcctattgaccctgtgtggctgctgtaacattaggtatccctccggcagggaatgggctcccacagagctccctctgcataggccctgagaccatagtctttgtcaccactgtttccctgcaccaccaccactcaggtggctatttttaaaaagtaaatttcatgaagggtcataggcctggacactccatcctttccaaaccactgcccgaaagtggcctttaagcaccagaatgttgattgagtggagacctccagcccccaggggaaggatttgggcagagcctgagattttgcctactgtcgtctttcctacggggcctggctcataaaaagagcmcagaaaatgcttttgtcccatagctaggtcattgcccagcmagtcmatgttgaaaataaaggagcccagaaatttaaaaaaaaaaaaaaaaaaaaaaa

SEQ ID NO: 1021 - DNA, 624 bp, Canis familiaris
cagatcagtcttagagcctaaagtcaaattctattctgtaccattagcctagtaagaagctttcatawttctgactggtgcctttccccyktkttcagaagcaatgaaagttcttcacttgattatatccttctgtttgacaatggcaaaataagataggagaggagaatattttattttactgatgtttttgttcacagatgtgactctgtgaaactggtattttttccatgtccttcccttttactctcatgccagaaataccaactcagacatttgtgctttcagtttaaagttcattgataacaccttgattttattgaaaaagtaaaaattatttgcctttgatagaaggctagtgcaagagcaaataagctttaaaaatggggatgttacctgctttccaacattttgagccttttcaacacagtctatatataacacagatagaaatgatacagtttaagtgctgttatactgttgtcataaactcctgtcataagccatttttctgtttgtttaatggatagaggcatgtgggatttctacagattcacttgtaagtgttggattggggatttttgtgtaaattttctcaaataaatgctagcagaaaccaaaaaa

SEQ ID NO: 1022 - DNA, 780 bp, Canis familiaris
atcagaaagcagcagctgcagcttggtacagtggtatgtggagggcttaatccgggcgaggcaacgattgcaaagaaggcgtaattggtgccaggacaggatgctccaaggaccacattgacacctctgagtaccaaaccaaagattaatccaaccaattccttagaataacactgcgtaaataaagactggagcaagtattcttataaaccgatggctgcataaacttagttaggaaggctttaggatctcagattgctatggcmaagtatccatcatgatgtgttagtgtgaaatattaggtgcatttttccagcagtactgctggatatttgtgccaccagcttcctttaattagatttttccttaattagatcttgttaataaatgggatgttcctcaaatctctagataacaccatttcccaaacaccagtacattaaactagctcaagagaccacctggaggtagtgaaaggaagacagtggtgtgatttatttcgtgtggccmagttagatttctaagagtagcatttcagattgactttatataataccttcctctctgtaaacmaactgcttatcctcatgcctcctggccagctccacacagaaaagggaaagtgataaaaaaaaaaaaaaacacaaacaacaaaaaaaaaaggcaaagtgcttttaaggtctttttcaagtttgcaccactgaccaggcagctgcttctatagttttgtcaagagtggaaaagtaatttaagcatatgttcataagagctaggcaaaaa

SEQ ID NO: 1023 - DNA, 769 bp, Canis familiaris
ccatgggcgccgcggcccgcagcctgcgcctggcgctcggcctcctgctgctggcgacgctgccgcgcccggccgacgcctgcagctgctccccggtgcacccgcaacaggcgttctgcaacgcggacgtagtgattagggccaaagcggtcagtgtgaaggaggtggactctgggaatgacatctacggcaaccccatcaagcggatycagtatgagatcaagcagataaagatgttcaaaggaccagacaaggacatagagtttatctacacggctccttcctccgccgtatgcggggtctccctggacatcggaggaaagaaggagtatctcattgcgggaaaggccgaggggaacggcaagatgcacatcaccctttgtgacttcatcgtgccctgggacaccctgagcagcacccagaagaagagtctgaaccataggtaccagatgggctgtgagygcaagatcacgcgctgccccatgatcccgtgctayatctcgtctccggatgagtgcctctggatggactgggtcacggagaagagcatcaacgggcatcaggccaagttcttcgcctgcatcaagagaagcgacggctcctgtgcatggtaccgcggagcagcaccccccaagcaggagtttctcgayatygaggacccrtaagcaggccaacagcacccctttggccaacggaaaagcctccaagagtttagactggtccagctctgacatcccttcccggaaacagcatgaataaaacactcatc

SEQ ID NO: 1024 - DNA, 689 bp, Canis familiaris
caacaattccatgatgctaaattcatggtggacattgatctgggatccggctgcacgttaaataagaagatcagaaatgcccagttagcaacaatataacttcatcctagttattggtgaawaagagaaagccagtggcacygttaatatccgtacaagagataataaggtacatggagagcgcacaattttggaaaccatcgagcggctgcagcagctcaaacagtcccgtagcaaacaggcagaagaagaattttaatgaagaacctgacccagatcggctcagtgggaaaagaagaaaaatgtttccataatgttaattttatactctagaaaacatcaatttatactgaatttggactagttgagcagtgtctgcataggtgcaggatcaacctattttgtgacctagacaggttttagacmcatgtgtatttgaaggaggtcattaaaagagacacttaaaatgattttatttgttatataaacactggatcacctggaaataaaaccatgaggaatgctataatgtaatgtgggagaatattttttataaatttaatgcaattgaaaaataaaaattttcagatttgattaaagtaaaagaccagaattagatgatgttgtaaaaataataaaaactttaattcacctaaaaaaaaaaaaaaaaaaaaaaaaaaaaaaaaaaa

SEQ ID NO: 1025 - DNA, 629 bp, Canis familiaris
gattcttagattgctagctttgtcctccagggaccattgccggtgaggctcacagcccagagcccttggccctgctgagagtaatttgtattccggaccttgtccagctgagagccttgtacaccagattcttgaggtatcggcagcactttttgttttccatgaggtttttggaccatgggctgagctcaggcactttctgtaagagaatgttgtccgtaaagatggttgatttgctttcactcctccactcccatcacagcggccctcctgagggctgaccmagaggccagtggaactgccctggtggctgtgggggagggccmaagcctgctgagctgattgtccagctgctgctccagccctcccaccttaacagcacagaggtggtcaccccagggacagccaggcacctgcctgggggaggggtgcgccttctgtccctgtcactgcttcccatatggcccaacctggccacctggattggttttaaagctgtgctgacagccttttttgtctccttttggtattcacaacagccagggacatgattttgatgtattttaaaccacattaaaaataaagagtctgttgcccttaaaaaaaaaaaaaaaaaaaaaaaaaaaaaa

SEQ ID NO: 1026 - DNA, 620 bp, Canis familiaris
atgagaggatggcytactacacctccaggatgcagttccccatggagatggccgcagctccaggacgaccagggcccccgggraaggacggtgccccaggccggccaggcgctccgggatcacccggacttcctggccagattggcagggaaggacggcagggcgtgccaggcatgagaggattgcccggtaccaaaggtgaaaaaggggacattggtatcggcattgcaggagaaaatggtctccccggcccgccaggtcctcaaggccctccagggtatggcaagatgggtgccactggaccaatgggccagcaaggcattcctggcatccctgggcccccaggtcccatgggccagccgggcaaggctggccactgtaacccctctgactgctttggagccatgccaatggagcagcagtacccacccatgaagaacatgaaggggcctttcggctgaaaccaccagctccgtcagatgaaggactccattgggaacatatggctgaaacttacaggactctgtgatgggttgtgaatgttttgtttttctgaattgctattaatatttttttatcaataaatgaacaaaactammwrmaaaaaaaaaaaaaaaaaa

SEQ ID NO: 1027 - DNA, 669 bp, Canis familiaris
ttagccccggtatcatggccaaggaccccgacgacctcttcatggtgcgcttggcacagggcttgacacatttagggaagggcacactcaccctgtgtccctaccacagtgatcggcagctaatgagtcaagtggccgtggctggactactcactgtgcttgtctctttcctggatgtccgtaacatcatcctcggcaaatcgcactatgtattgtatgggctggtggctgccatgcagccccggatgctggttacattcgatgaggagttgcggccattaccggtgtctgtccgcgtgggccaggcagtggatgtggtgggccaggccggcaagcctaagactatcacggggttccagacacacacaaccccagtgttgttggcccacggggagagggcagaactggccactgaggagtttcttcctgtcacccccattctggaaggttttgttatccttcggaagaacccgaactatgacctctaagtggctaccaggggcgctgagctgccactgatatgtcagcaggccgtgtttcctgctgccagatgtggacactgctcctgttaacctcctgttattttgttactaatgagataactttgttgaataaagacctttatccccaaraaaaaaaaaaaaaaaaaaaaaaaaaaaaaaaaaarrg

SEQ ID NO: 1028 - DNA, 708 bp, Canis familiaris
gcggtcggcggcgaaggagggaggaaagtgaaagaggaagatggcggagcgccggagcggcccccgccgcgaccccggagggcgcggcgggagcgggaccagctgtactacgagtgctacgcggacatctcggtgcacgaggagatgatcgcggaccgcgtccgcaccgacgcctmycgcctggggcatcctgcggaactgggccgggcttgcgggggcaagacggtgctggacgtgggcgcgggcaccggcatcctcagcctcttctgcgtgcaggcgggcgcccggcgcgtgtacgccgtggaggccagcgccatctggcagcaggcccgcgacgtggtgcggctcaaacgggctggaggaccgcgtgcacgtgctgccggggccggtggagacggtggagctgcccgagcaggtggacgccatcgtgagcgagtggatgggctacgggctgctgcacgagtccatgctgcgctccgtgctgcacgcgcgggcccgctggctcaaggagggcggcctgctgctgccggcgtccgccgagctcttcgtggcgcccgtcagcgaccagatgctggagctgcgcctgggcttctggagccaggtgaagcagctctacggcgtggacatgagctgcctggagagcttcgccacgcgctgcctcatgggccactcggagatcgtggtgcagggcctgtccggggaggacgt

SEQ ID NO: 1029 - DNA, 645 bp, Canis familiaris
  misc_feature (18)..(18): n comprises a, c, g, or t, or includes no nucleotide
gtgagggatggtgaggtncggttcaaagcactcttccackgaagttctgctgtccgtcacaggagaacmatatggtcgacctattagtgggcaaaaggaggtacatggcatggcccagccaagccagwacaactactggaaagccatggaaggcatcttcatgaagcccagtgagttgttaaaggcagaagctcatcacgcagagctatgagcctggaagctgtaagccactgttaccacacagtgttcatgacatctgctgctgctccaccttgggatccctgccacaggtttcmctgggcagtggccatgtccccactgagatgaagatgcgtgacagaaaacagtggctgtgtttggaagctttagcccttcacacttgaattggtggttcttccagactttcggtcagttctttttgagtaccggacttgctggtgaaggagcagatgtttttattcatattgataaaacagaaactaagggagatacctctcttcgttgggaaatttttactcttcagaagcttggcatcatggattatcaatgtgtgacttttactctttctccaaagtgataaagaatttcattattagtcamaaaaaaaaaaaaaaaaaaaaaaaaaaaaaaaaaaaaaaaaaaaaa

SEQ ID NO: 1030 - DNA, 651 bp, Canis familiaris
gtattgtctggccaaagtaatattactacgggaccttcacagttaacgttcttgtcagcattktattgtacctgtgktaatacggaaaatttaagacattcctgtgtttaaacacactratatcctcaggatatatcttaacatgtatagaatttaagtatccagatggcaaagacatccctttcaaggtaaaaactactaaacgatagctttgtgaagctgtaccaaatgtcagaagggataaggacggatcccgtggcagcttcggtgcagtttgctcctctttcagttctgtcttgtatagattgtgccmactttggaagcacataattatactacttttcatattcagatatcttttaaaagtccacagtataaatgaagccatgttcctttaatgataagacttttcttcattaaaatcagaaatttggcattgacacttttggtatattaaatggtgtataaggatttttggatgcattttttatttgtaatcacaattttttttttctggaacaaatgtattatagtatgcctattacaattaagctatgacagtaggaaaataagtgatatttgggaaattaaagaaaaattgagccagagtctttatattcctgactttaatttgattaaagtaaaatttat

SEQ ID NO: 1031 - DNA, 677 bp, Canis familiaris
cctccacaggtggtgttcgtggttggatattgccttgttcctaaatacgggtgtttgttctgcaaatagtggcaatcggkttctgscsgtttttgttwraggtgttgttttaagtctttatctctgtggaccacttgtcccctagggtcaccaggacagtgccccctaattttaagtcaataactactagcaaggccaggccagcccaaccacctacgccgcccatggtatagggggtcacctctggggcagcagcccactagccactggcttccaggggcaatctgatcagggttctcttggcaaatgactcatcagaattgtttggacaacatttttgaatttttttttttaacaattgtgaacagtggctattgagccagagtcactaaccagtgtgaataatgagcctaaactcagattgcttgtttgtccaggttttaggtggggtgcccaacgaagtgttaggggagataaatttcaagactagctctgactggcgcatatcacagatgcagaatgggagagtggtagcagggggccttgccaggagatctgtggatgaacctgtacagatgtaggggttctgccttggggactctggcacatcccaagagcatacccagattaacagagtacctttccattatttaataaaaatttgttttttttttttt

SEQ ID NO: 1032 - DNA, 677 bp, Canis familiaris
ggaggtgtccaccacaagcaccaacctataacggaacaaggatttatgcccacaaacaagacgtttatcaccgttagccmaagacsgscaaaaacaawytccacaacaaaattcagaaatagagacacctggtgaacaggggatcccagtggtcctgtcacgggggattaaaattcagttattgatgatcgttccggtccggtcgggttggtggatgcggcgggtaccatatcccccagtggagaccccgtcgtcgggtgatcggtgaccgaaggtccccgttagactagtcccaagagaaccgtttactgagtagtcttaacaaacctgttgtaaaaacttaaaaaaaaaaattgttaacacttgtcaccgataactcggtctcagtgattggtcacacttattactcggatttgagtctaacgaacaaacaggtccaaaatccaccccacgggttgcttcacaatcccctctatttaaagttctgatcgagactgaccgcgtatagtgtctacgtcttaccctctcaccatcgtcccccggaacggtcctctagacacctacttggacatgtctacatccccaagacggaacccctgagaccgtgtagggttctcgtatgggtctaattgtctcatggaaaggtaataaattatttttaaacaaaaaaaaaaaaa

SEQ ID NO: 1033 - DNA, 616 bp, Canis familiaris
agccctctcttggggcctgacactagagataaaggcgatcatcakgcaaccacggagggaccacctctctaaccggcttgsmcgcgctgcctgcccccttctgagctgaggcgctgaggtggattccgtgcccgggcctttctccaggtccatcatcccctgggagactccctgtctgtcccmagatgttgctgcagcatcagttcaccagaccmgttgattttgttgtacttattaagcmaaggaatgtcccatacttccatccagctttttaagaaaatctgctttgccccttggggcctttcccagtttccctgaagctcagagaagagatagaatccaggcatgtgttataccccctcctctcaagctgctgggtgacctggagggactccattctcgctgctgtctgaagaagacacgcggtgggcccggctgcacgggtcmctgcacgggtgactgcacagctgcccctggggagggggcggcatctccctttgggtgtgtttatgttaaaacccattcaagtgtaaggtttgccctttctaaccaataaatgcctctgtttaaaaaaaaaaaaaaaaaaaaaaaaaaaaaaaaaaaaaaaaaaaaaaaa

SEQ ID NO: 1034 - DNA, 613 bp, Canis familiaris
gcaggaggaggaggtggcacarcagggtccggtggtggtgagccctgctagtgactaccaagacaagtacagccaccttatcggcaagggggcagccaaggatkccgcccacatgttgcaggccmacmagacctatggctgtgtgcccgtggccaacaagagggatacgcgctccatcgaagaggccatgaacgagatccgggccmagaagcgcctgcggcagagtggggaagagttgccacccacatcctaggcaccacggcccccaggggcagggcggggggtggggggactggctgctgctactagaacccactyctggagccccagctccaccacccgccccggacagccgtgtttytggcttggggggtccagtgtgcgacgtgtcaactgctggagcttggacgagtgtgcggcactgtgtgagtgcaagtgtgtgagtgtgcgagtgtgcacggtgggtatttaacgtgtattattctttttccttggactgtcttccccatgaaagggggctgggatgacttcacattcaataaacactgttggacctgaaaaaaaaaaaaaaaaaaaaaaaaaaaaaaaaaaaaaaaaaaaaaaaaaaaaaaaa

SEQ ID NO: 1035 - DNA, 636 bp, Canis familiaris
cagggctcatgtcgcatccaagttccagcatgcttgcctcacgcttggcttgggctgcatatgcattagctacacacatctctagcttcaagttttcattttggagtgtgcagagcagccaggttcctggaggcacgggagggagccggggtggcagatggccagcttcgctctgacccaggtatagctcagctctgtgtcctctttgctccctaggcctgaggctgaccccagcagaagctgtcctcccccagccctcctgtctcccacgtctgccccccctagagccgtggtgggggctgggaggacagctctacccagtgccctgctgtggctgttccaggagtgctgcttctaaacccagaccacgctttgtcccatgtagagagcatgggggacaactgcaatgtcccggtgtcctcagctccatctccccactctgtggttctttgggggttcctgctaccccaaagcaaacacccccccatccgacagcccagtggcttgactattgcctggcattcccctgccctccaatgctggaatcaaagattgccttcccaagtatttttgttaagatggcaataaaaagaaattgatctcacacttggaaaaaaaaaaaaaaaaaaaaaaaaa

SEQ ID NO: 1036 - DNA, 709 bp, Canis familiaris
gccccaagttcgcctctatggccccaccactttcgcacccgttatcaaccacgtggcccaggttggcaacccaggctgcatatcagaggacggcctcgcatacttcgtgctgttggctgctgactgatggtgctgtgacagatgtggaggctacacgtgaggctgtggtgcgtgcctcccacctgcccatgtcagtgatcatcgtgggtktgggtggtgtctgacttcgaggccmtggagcaactagatgctgacggtggacccctgcggacacgctctggggaggcagctgcccgtgacatagtgcagtttgtgccctaccgccgcttccaaaatgcccctcgggagacactggcacaaactgtgcttgcagaagtacccacacagctggtctcctacttcaaggcccaaggttgggccccattcaagccacttccacccccagcaaagagtcctgcacaggcccctcaggtctaggttccattagaggataggctatggctagtcctcagccttgtgtccccaaggtttccgtaagcgtgagccccttaagcacacattccccagtgctgcactttacattttatacttttatatttgctcctgctgttgttgctcttgattccctcctgcttgccctggagtcattcatttaataaagatcaatgaagaccmaaaaaaaaaaaaaaaaaaaaaaaaaaaaaaaaaa

SEQ ID NO: 1037 - DNA, 648 bp, Canis familiaris
ggaaatgtgcccaatctgcatggcaaagacccacctktctctgtctcaccaacctgacacagaaaggtgttcccagagatttcattttgcctattagtgatgtccgggcgagcataggcgctgggttcatctaccctttggttggaacgatgagcaccatgccggggctgccgacccggccctgcttctatgatatagatcttgatacggaaacggagcaagttaaaggcttgttctgaatgaacccgacttccacagaacccagttcaggctcccaaaatgcagacaactcctcgccttttgctgctgttggagaagaaagcaaatctgaaatatgcttcttgcgcaacgcgggagaaatggggaaacaggccaaagatttattcttcgttcaagaccgaattctgtgtgcaaccgagtacagtgtccggtgaaaggacctccaccgggtttgaaagcaactaatttattttccatttcagcagagtttacattatttcccattgcttacacttgagaatgtttattttacgaggactaagggattaagagagcgcgaacgaaaaggtagcatcttctactctggagttttctatgttgtctttgaactgcaaataaacatgtatctagaaaammaaaaaaaaaaaa

SEQ ID NO: 1038 - DNA, 695 bp, Canis familiaris
cagsaaccctatgtggrggccgctgctctcctacacgcgcatcaagaggccacaggaccagctgcgcttccctcgaatgcttgatgaagcttgtgagcttgcgtaccctgagctctgtgcactccgagcaggtctttgccctgcgrcttcaagacaagaagctgccgcctcttctgtctgagatctgggacgtccacgaatgaggggcctggtgaccctgccccacagccctgtacccttcagcaaatggacattgttaccccttcctcctcctggagtgggaaggggcccagcctggggtcccacccttgtggcttttagcacaagtcctggccccaccagccctcagcccacgggtgagccccagtcagggtccaggaggctcccccctgcccactgagtcttcctgggagggctggatgggtcatagatcccaacctctgactctcctagcactaccagccgccctccccacccagcttacacctcaagctcactgcgcaccttgaacagagggattgggggacctgaggctctcccctccagcctgagagactgcaggcctcctccccttgttccttttatttaataaaaactaaaaaaaaaaagacaaaaacaggaaaataaaagtatgaatagaaaaaaaaaaaaaaaaaaaaaaaaaaaaaaaaaaaaaaaaaaaaaaaaaaaaaaaa

SEQ ID NO: 1039 - DNA, 655 bp, Canis familiaris
tgttctccacagcccttggaacaggcagtgtaaccgctcacatccaaggcagkggacaccttccagagctttgccaaatatggaaaatttggagatgacctgtactctggctggttggcagaagcccttggcagtaacctgcaggtccaattctggcaaaactctcatggcatcctaccctccaactgctccagggtccagcatgtgctggacgtgacccagatagccttccctgggccagctgggccagccttcagtgccagagaagaccactccaagtggtgtgtagccccagaagggccctgggcctgtgtgggtgacatgaatcggaaccttggagaggagcaccggggtgggggcacattatgtgcccagctgccagctctctggaaggccttccagcctctggtgaaggcctggaagccctgtggggagaacagaacttctctccaggaaatccagcagagcatataagagctaaggctcagacaccatttgggacttcagcttgaaccccagtttaacgtctgtgtgaccctaattatgtgccttaacctgtgactcagtctactcacctgcaaaatgagaatcatgacacctgactcaggactgttgagaaataaaaggaaattggtggaaaaaaaaaaaaaaaaaa

SEQ ID NO: 1040 - DNA, 646 bp, Canis familiaris
ccggtggtttagaaaggccggcaacaagactgtgagctcctgcctgcttggagatgggtatgggtggkggctgtctctcattagctcagtaacmagataaacacgcctgtttgatggcgatggggtcaggaaggtgggaactaggatccactctgctgagtccaccatccatccagtttgccccacctatagtgacaggttctaatttcattccaacttcagtatatttgctgccaccacttttcagggtctaaggtcggtcatacattcccagtttactctgttctaatctagctagttgttctgaaagtagctcattttgttgtcctaaagtagcttaatagcctaagggttatattcaatctgaagggttaacacggatagggtacgaaagacaggaggactcgaggattgtctggtcaccctgatcttccaccttattctaatgccttttctttggacacagcctttggtgttctcttgcctttagctaccttttctaaccatgtatgctaccatcactttaacaatatttgagagtgatggaaatgggtttgagagtcataatttatattaaaaatgtgttggacttttaaatacatttttcaaataaaaaaaaagtttaaacaaaaaaaaaaaaaaaaaa

SEQ ID NO: 1041 - DNA, 614 bp, Canis familiaris
gacataggtctggcggcagatgtgggaacgctgcaggcgactacccsaaatcatcggaaaccaagagtctggtcaacgagctggccttcacttgccgcacaatgatggctgatgaggccctggccagtgggctggtcagccgggtgttcccagacaaggagggcatgcttgatgcagccttcaccctggcggccgagatttccaccaagagccccgtggcagtgcagagcaccaagatcaacctcatctactcgcgcaaccatccggtgaccgagggcctcaactacatggcgacctggaacatgagcatgctgcaaacccaggacatcattaagtcggtccaggctgccatggagaagaaggaactgaagagcatcaccttctctaagctctgagagccgctgcggcccggggcctggcctggggcctggacttctcttacctcccgcccatttcctcatgggcagagaaggaggattagtgaagatggtcaccagtgccttctcccttggtctccctgtttctgacattatgacaccgatccttatgcccagggactgacttaccatcacccgaacaataaagcaacttaatgaaaaaaaaaaaaaaaaaaa

SEQ ID NO: 1042 - DNA, 502 bp, Canis familiaris
  misc_feature (119)..(119): n comprises a, c, g, or t, or includes no nucleotide
aaagtggaccgcattgttkcaagaccttcctaacaacacctgcacgtgacagggaggtcacccacggatggacgtgcctaaagacccaatgagaattcattataatgcagtcgagaggnaaatccgaccagtttctgtcacacacasatacacacacacacacracacacatgcacgtacgcagagcatttaaacagttcgaatgtggagtgacggcactctaccaggacacgtkacaagtttaggaatttcatttcctgttcggaacaccggcagcattcacccacacaatgtaatctaagagggcttatggttctttgtctgacagtgcttctcatgtgccttcccatagcagtaaacgacctatagtagtcaagagactctatttagggtttggcattctgggatccgctgagaatccacgaacggatgaagggaccagtagacagacagacagacaggcagccaaccagccaaccaaaaacatctcagaagttttcaa

SEQ ID NO: 1043 - DNA, 1518 bp, Canis familiaris
tacgaatgaatgattggccagatttcgtctgctcgtctgctgaagagcttcccagtgttcctctcactgggacacatggttagcacaggaaatactggtgaggctttcccatcctttaacattctctggctgtctttgagttttgttgactgtatcctttgctgtgcaaaagcttcttatcttgatgaagtcccaatagttcatttttgcttttgtttcttttgccttcgtggatgtatcttgcaagaagttactatggccgagttcaaaaagggtgttgcctgtgttcttctctaggattttgatggaatcttgtctcacatttagatctttcatccattttgagtttatctttgtgtatggtgaaagagagtggtctagtttcattcttctgcatgtggatgtccaattttcccagcaccatttattgaagagactgtctttcttccaatggatagtctttcctcctttatcgaatattagttgcccataaagttcagggtccacttctggattctctattctgttccactgatctatgtgtctgaagatatttgcaaatgacatatcagataaagggctagtttccaagatctataaagaacttattaaactcaacaccaaagaaacaaacaatccaatcatgaaatgggcaaaagacatgaacagaaatctcacagaagaagacatagacatggccaacatgcacatgagaaaatgctctgcatcacttgccatcagggaaatacaaatcaaaaccacaatgagataccacctcacaccagtgagaatgggaaaaattaacaaggcaggaaacaacaaatgttggagaggatgtggagaaaagggaaccctcttacactgttggtgggaatgtgaactggtgcagccactgtggaaaactgtgtggaggttcctcaaacagttaaaaatatacctgccctacgacccagcaattgcactgttggggatttaccccaaagatacaaatgcaatgaaacgctgggacacctgcaccccgatgtttctagcagcaatggccacgatagccaaactgtggaaggagcctcggtgtccaacgaaagatgaatggataaagaagatgtggtttatgtatacaatggaatattactcagctattagaaatgacaaatacccaccatttgcttcaacgtggatggaactggagggtattatgctgagtgaagtaagtcagtcggagaaggacaaacattatatgttctcattcatttggggaatataaataatagtgaaagggaaaataagggaagggagaagaaatgtgtgggaaatatcagaaagggagacagaacataaagactgctaactctgggaaacgaactaggggtggtagaaggggaggagggcggggggtgggagtgaatgggtgacgggcactgggtgttattctgtatgttagtaaattgaacaccaataaaaataaaataaaataaaataaaataaaataaaataaaaaaaaaaataacattctctggc

SEQ ID NO: 1044 - DNA, 648 bp, Canis familiaris
ccaggagaccatccgcactgctctggccatgggtgcagaccgaggcatccacgkggaggtgccagctgcagaggcagatcgcctgggtcccctgcaggtggcccgggtcctggccaagctggcagagaaggagaaggtggacctgctgctgctgggcaagacaggccatcgatgatgactgtaaccagacggggcagatgacagctggatttctagactggccacagggcacattcgcctcccaggtgacagtggaaggtgacaaactgaaagtggagcgggaggttgatgggggcctagagaccgtgcggctgaagctgcctgctgtggtgactgctgacctgcggctcaatgagccccgctatgccacattgcccaacatcatgaaagccaagaagaagaagattgaagtgatcaagcctggagacctgggtgtggacctgacctccaagctctccatagttagtgtggaggacccaccccagcgaaccgctggcatcaaggtggagactgtggaggacctggtggccaagctgaaggagattgggcggatttgagccccttccctaaaacccagcaataaaactatgaccctctcgaaaaaaaaaaaaaaaaaaaaaaaaaaaaaaaaaaaaaaaaaaaaaaaaa

SEQ ID NO: 1045 - DNA, 426 bp, Canis familiaris
acagtgtggagagtcctcaagaagttaaaaatagagctactctatgactcagtaactgccctactgtgtatagacaccaaagatacagatgtgaaatgaagggcaactgcaccccaatgttcatagctaacaatgtccacaacagccaaactgtggaaagagcctcgacgtccattgatgtgtgtgtgtgtgtgtgtatagagagagaatattcatatattgaacattcatattgaattaatatatattcatacatatatatatatgaatactgttcagccatcacaaaaatgaaatcaaccatttgctacaatgtggatagaactagaggatattatgctaagcaaaataagtcaatcagagaaagacaattatcatatggtctcactcatatgtgaaatttaagaaacaaaacaggagtcctct

SEQ ID NO: 1046 - DNA, 663 bp, Canis familiaris
tctctttgtaaattagaaataatcaccctgaatggggactttgcttaattgctgcagcttagggactttgctttacgtggtctagttcccttcatgatggaaacaaacaggtgcagtttctccacataaaaggcagtgggaaaatcatgccgcttttacctttttatcgcctcaatgaggtaacgtctcccctgacactgggttggcaccagaccccatcacacctaatatgtctttccacattttatctctctatgctcacactcatcttcaaagaggaaaggtttggaatttagaagagaggcagctcttctttttcgcattctcatcagaaacagttgcmaaagagaactgaatcttttccmctgggaagatggaccttttatatttattgtggagtaaatataaagcaacattccmattgcttgcacatctctggacccagaagattcggcattactggggatgcagttggaacctggagctgcgagtcccmagatgaaggatctacagcaattatgcttgaaatttttatataaattattttgtcatcctaccctttccttccaaaacaaaaattagagggttattttaatactttggattcttccccctttttgagaaataaagttcttatgaaaaaamaaaaaaaaaaaaaaaaaa

SEQ ID NO: 1047 - DNA, 828 bp, Canis familiaris
ataagaacacttgtaaatgaaagttataatatgtggtacatgcagcctatgcttttgtgagactgtgctcttattagaagcaaaacaaaatgtgacttatgaacacctgccggtaargaccaagccaaraggcagcgtgggtgttggatgagaggtgttgccctggcagtaaatccaagttgctcacaccaaaggaaatgtttctagggaagctgtctgagcaagaggtaaatacttagtcattcagaggaggccataaatgagtgtttcttcaacaagggaaggtctgattccaaagagctgaaaaaatggttggatagcatttctctcttccatctatccttttattcacaatatacattgttaagaattaagagtctctgtaatcaagagatwacacttgccaccttgttgggcaagttgttagagaactatgatttgtctgcttggtattatttcaataatagtttttgcattatgattctaagtaactaataaaaaaagacccaggcccttgtatgttctaaaatactgtgctgtgtgtgtgtgtgtgtgtgtgtatacatacatcctgtgccttcctacctattccccagggccaccaagttttaagattcgacttcttatgcatttcctttcatctgtttccttgtttcagtgttcaacactattgacacagttgagggctccatcttctcttgcctawgcattgcaaaagcccagactctttcaatggtctcccttgctcactggcttcccaaccccatctcccatctaccttatcaccacctccaattatccttgcaaatcatgggcctgwcctctaga

SEQ ID NO: 1048 - DNA, 515 bp, Canis familiaris
  misc_feature (36)..(36): n comprises a, c, g, or t, or includes no nucleotide
  misc_feature (41)..(41): n comprises a, c, g, or t, or includes no nucleotide
  misc_feature (44)..(44): n comprises a, c, g, or t, or includes no nucleotide
  misc_feature (482)..(482): n comprises a, c, g, or t, or includes no nucleotide
  misc_feature (487)..(488): n comprises a, c, g, or t, or includes no nucleotide
  misc_feature (497)..(497): n comprises a, c, g, or t, or includes no nucleotide
  misc_feature (503)..(503): n comprises a, c, g, or t, or includes no nucleotide
agacagtgtggatgaaagccctatcttaccaagctnacatntgnatcctgcataatcctgcaatgaatcaattgcataattttaggtaatgagtgctatatgaaagttaagagtgtgtgtgtgtgtgtgtgtgtgtgtgtgtgaagagtaaggagtttagtttttagaaggggttgtctaagagatgagactaatgcaggcaggctgggcctcaagacccagagagrgaccagcaggaccagcccagagggtccttggctaggtgcagcaggatagaaatcaaatgtgagccaataggaagtgcagcagwgtttattgaagattatatatagagagtacaggtatagacagagtgttcagaagactgkgaaagcaaaggaaaaagaatctctgggacctggggtttttattaacaattgtagtctggtgcatgtgtcctctcaggtatmtagaactstctggasarscacaggmtcctcgcngaganncagggcagnaccagncccccccccccc

SEQ ID NO: 1049 - DNA, 519 bp, Canis familiaris
gttttatcatgattattatttcyaccatcaccagatatctaattctgtcttgctttcggtaataactagattctaatccttacattattctgtatatccccaaatctgacttatatccctatcattcccaatccttaaatcctttctttgtgcccctgaaactgctggactatcatggtacatcatatcctgtgtcctcaaaattttctctgaaccatcccttcaccctcttcctccaacttgaccttggctctcttctaatgtcactgctttaatcacagcctttgcagacagctatgctccccctttggagtatgctgggtttttactcttaattactattttcattataccatgaatctcctatacacacacacacacacacacatcaactcctttaggattcgtgttatcagactacacctctgtcatcactatccattgtctttctggtcaattttcctgggttcagggataattttaatatctaacttattgacatctactctatcactattg

SEQ ID NO: 1050 - DNA, 366 bp, Canis familiaris
ctagaggatcacagccacgttggattcaagaccagaatttagtgtctgggacagccactgaacttcagaggaagagaatttagatgtttattgacttagttttggccaacttggtcttgcagttgctgttccaaaaggaaccagacatgcacactcgcatacacccccccacacacacacgcaaacacacacacacacacacacaccggacacataaccctcaccaatattacaaggtgtgaatataatattgggtttagggataaaaatgtattggctgagaagcakaaaaacacacaaggtcatgtmgctctgattatctcagaatgcattaagcgagagagagctggacagaatgcmccgcgg

SEQ ID NO: 1051 - DNA, 530 bp, Canis familiaris
  misc_feature (265)..(265): n comprises a, c, g, or t, or includes no nucleotide
  misc_feature (285)..(286): n comprises a, c, g, or t, or includes no nucleotide
  misc_feature (292)..(292): n comprises a, c, g, or t, or includes no nucleotide
  misc_feature (347)..(347): n comprises a, c, g, or t, or includes no nucleotide
  misc_feature (353)..(353): n comprises a, c, g, or t, or includes no nucleotide
  misc_feature (369)..(369): n comprises a, c, g, or t, or includes no nucleotide
  misc_feature (378)..(378): n comprises a, c, g, or t, or includes no nucleotide
  misc_feature (381)..(383): n comprises a, c, g, or t, or includes no nucleotide
  misc_feature (388)..(388): n comprises a, c, g, or t, or includes no nucleotide
  misc_feature (393)..(393): n comprises a, c, g, or t, or includes no nucleotide
  misc_feature (402)..(402): n comprises a, c, g, or t, or includes no nucleotide
  misc_feature (414)..(414): n comprises a, c, g, or t, or includes no nucleotide
  misc_feature (417)..(418): n comprises a, c, g, or t, or includes no nucleotide
  misc_feature (449)..(449): n comprises a, c, g, or t, or includes no nucleotide
  misc_feature (498)..(498): n comprises a, c, g, or t, or includes no nucleotide
agatcctggagcatgtccatgcatcctccaggtggctactcctgtcctctctccactcctatgtgaccccatggctccttctgtcttccccaagcttcaatgaatccacacctgctatgtgtggcaaatgaagggaagacaacctagcccaggaacccacttaacacttcactgctccagaggaccttggcacccatccagccaccagacacacacacagacacacacacacacacacacacacacacacacacacagagtattntgggctgtcctccttctgcnnggttgnatctgttctccccttgtcagagagccctgtcatgtgggccacatcttatcttctntcaaanatcctctacccacctncccccttcntgnnntggangggtnccaaattcntggtgtctttanctnngagagtgatctctctctcaaatatcactgtnacagaatagtatgacagtagggagtacagacagccctgagccagagcgntggggttcatatcccagctctgccatttattg

SEQ ID NO: 1052 - DNA, 639 bp, Canis familiaris
cctgagctggtgcagagacttggtcaccatcaaagcagctgcatgagcaagcccatgcagttcggtcagctcctgacacacttggataccacacagcagatgattgctagctccctcaaggacaacaccgcccctcctgacccaggtgcagacaaccatgcgtgagaacctgtccacmattgaggggaattttgccaacattgatgagcggatgaagcagctgggaaagtgagcacctytaggagatggagaacacggggtaatccctgcccctttgaactctgttaacagcttacatagggctcccccttcattataactctcgcacccccatcccatttgacactggggtcaaggggttcttcttgcatgtggggtttacacccctcctccgacgaatacacgagtgstcagctgggggactttagatggtggtctcccctcaggccctggggacgtgggcccagccaccmgggcagctcctgtccagtactgctttgcctggggtggggaaggactgggtcctgtcctccagcacagctcctgtggctggatgtactactgtacmactgtttctgacccattaaatgctgttgtactctgaaaaaaaaaaaaaaaaaaaaaaaaaaaaaaaaaaaa

SEQ ID NO: 1053 - DNA, 627 bp, Canis familiaris
cgcgggcacagatgttccccacaagtaagagggaaaggtgtactggggaarcagggctgagccacagaagagagagcagggccttcagtgaaggggaccaggagagctggagccccaacagcaagcactcgaggaggaacctggactgggacaggagagggctggagaaggatgacacgtggctctaagaaaagaaagcttttatagtacagcctggtgacacgggctgcagccacagcagcgtgcagacttaggtgaccagtgaacgggactgttcacataagattattttgttttccttaaaggagttggtgtgctgttggaaaaatggaaaatgtatcctaacacctgtgcctcttggtcatcttccatagtttctgtcagttgtaaaagctttcgagggcctccgtgtgttgtaatgtccataaagtgggagacttgagatgttggtctcttgtccttctaagataagggctcagactggagtggatgttgtaaaagttgaaatgtatatttgtatagcaaataacaaaattgttttaaaatttaacctagtagaccacttttctttcccctgcttaaaatgttaaatcattttcaacagaacacactgtatatttaaaaaaa

SEQ ID NO: 1054 - DNA, 670 bp, Canis familiaris
catctgatggatgatatagaaaagggcaatagatgatggtgtaataccttcaaagttctcacmagggataaacgtcttgttcctggaggtggagcmacagaaattgagttagccmaactagatcacatcatacggagagacacgtcctggacttgaacacgtatgccataaagaagtttgctgaggcattcgaagctattccccgggcactggcagaaaactctggagttaaggcccaatgaagtaatctctaaactctatgcagtacatcaagaaggaaataagaacgttggattagatattgaggctgaagttcctgctgtaaaggacatgttggaagctggtattctagacacttacttgggaaaatactgggctatcaagctggctacgaatgctgccatcactgtccttagagtggatcagatcatcatggcmaaaccagctggtgggcccaaacctccaagtgggaagaaagactgggatgaagaccmaaatgattgactggcttagttttttactgtaggtgaagactacatttgtagtagtagtctaggaattgcctgatgttttcatattttacttaagttaagaagaagtgttttgtgtttatatcctcagctggatgataaaataaacgttgttgctgtctaaaaaaaaaaaaaaaaaa

SEQ ID NO: 1055 - DNA, 704 bp, Canis familiaris
tgcaacccaagcaaggtcacccgggccccagattgaggagacactccgccgagaccaccagcacaaagaggcccccagaaccagccgagaagccaagagccaacttggaggtgccgctggaggagaatgtgaaccgccgagtgctggaggaggscagcgtggaggcccgcaccacttgaggatgccatcgcggtgctcagtgtggcagaagaggctgcagaccggcacccagagcgccgcatgcgggcggccttcaccgcctttgaggaggcacagctgccacggctcaagcaagaaaccccmacatgcggctgtcgcagctgaagcagttgctcaagaaggagtggctgcggtcgccagacaaccccatgaaccagcgggccgtgcccttcaatgcccccaagtgagcccagaactgggggagccgccccacaggcggtcagagtcttgaccttacacgccctcccgctgggtcagctacatgggttacagtamgcaggtccagggctgaggcaggtgtcctgggggctacgtggcatcattggccattcctcccgctggagagtccctgcttcgagtgacacccactacccccttcctgggcctgtggagcccgtgggctgatgccccaataaaggcagttsgtgarrmaaaaaaaaaaaaaaaaaaaaaaaaaaaaaaaaaaaaaaaaaaaaaaaaaaagg

SEQ ID NO: 1056 - DNA, 670 bp, Canis familiaris
ccgtccggaattcccsggatctcggcagagaagaggcgatggcggcgctggcatccctcggcgmcctggcgctcctcctgctgtccagcctctcctgctgctcagcggaggcctgcgtggagccccagatcaccccttcctastacaccacctcggatkccgtcatttccmctgagactgttttcatcgtggagatctccctgacgtgcaagaacmgggtccmgaacmtggctctttatgctgacgtcagtggaaaacagtttcctgtcacccggggccaggacgtggggcgttatcaggtatcctggagcctagaccacmagagcgcccatgcaggtacctacgaggtcagattcttcgatgaggagtcctacagcctcctgaggaaggctcagagaaataatgaggacatttccatcatcccacccctgttcacggtcagtgtggaccatcggggcacctggaacgggccctgggtctctacggaggtgttggctgcagccatcggcctagtgatctactacctggccttcagtgccmagagtcacatccaggcctgaaggtggcacccctgggctcttgctactttaaataaacmgttgctggctctaaccmggammmrawaaaawaawaaaaaaaaaaaaaaaawaaaaaawaaaawaaaaattaa

SEQ ID NO: 1057 - DNA, 677 bp, Canis familiaris
  misc_feature (46)..(46): n comprises a, c, g, or t, or includes no nucleotide
cgttatacagagtttactgacaggtgaatagagagctctctcaganactcccccaagtatgcggttgaaattgattgcraataacacaacggtagaacgaaggtttagttcatggattggtggctcgattctagcatctttgggtacctttcagcagatgtggatttcccaacaagaatatgaagaaggagggaaacaatgcgtagaaaggaaatgcccttgaagagagttccccaagctcttccttcctgtgtcaccttaagtttcatagctttagtatactcaggaaaagaatgaccatcttttgtagaatgtttatacatgttgttgcatatgttcaatgttccagcttaaaatttttaaggctttaagctggctctataaattaagataagtttgtgctttccttgagaatgcacttattcttattacaagcattttataattttgtataaatgtstattttgctctagaatattttgctttcagtaaaagctttccaaactctgtttagtatgttaattaccagtcattggtagaattggtttttattgactagtaaaacttactgcctatgctttttatcttaggcttgccaaaattarataaaaattattagccattcmmaaaaaaaaaaaaaaaaaaaaaaaaaaaaaaaaaaaaaaaaaaaaaaaaaa

SEQ ID NO: 1058 - DNA, 615 bp, Canis familiaris
agtttctgaactctgtccagggtttcgtggacmtcattcagttccacgttgtccctttctgtycggtttccatgcagctttttcattagttccggcaactcctactgtatgtagttggacaatctcagggtgaccagataccgggattcgtccagagtcctttccgcgaatcttctgaaaagtggaccgcattgttgcaagaccctcctaacaacacctgcacgtgacagggaggtcacccacggakggacgtgcctaaagacccaatgagarttcattataatgcagtcgagaggrraatcygaccagtktctgtcacacacacatacatacacacacacacacacacacacacacacacacwacacayatgcrcgtacgcagagcatttaaacagttcgaatgtggagtgacggcactctaccaggacacgttacaagtttaggaatttcatttcctgttcggaacaccggcagcattcacccacacaatataatctaagagggcttatgattctttgtctgacagtgcttctcatgtgccttcccatagcaggtaaacgacctatagtagtcaagagactctatttagggtttggcattctgggtcctctag

SEQ ID NO: 1059 - DNA, 446 bp, Canis familiaris
  misc_feature (11)..(11): n comprises a, c, g, or t, or includes no nucleotide
  misc_feature (103)..(103): n comprises a, c, g, or t, or includes no nucleotide
  misc_feature (335)..(335): n comprises a, c, g, or t, or includes no nucleotide
  misc_feature (348)..(348): n comprises a, c, g, or t, or includes no nucleotide
  misc_feature (361)..(361): n comprises a, c, g, or t, or includes no nucleotide
  misc_feature (384)..(385): n comprises a, c, g, or t, or includes no nucleotide
  misc_feature (428)..(428): n comprises a, c, g, or t, or includes no nucleotide
  misc_feature (431)..(431): n comprises a, c, g, or t, or includes no nucleotide
ttctgctaacntgccctgtgggatgccagcatccctgcaagtagcctgactccccaatacctttgtgttggagatgccctttgcatgtcccagctgagctgcnggccaartgatggctcaccatggacaagcaccccaattgagcgctcaggtgactgcagccctggctgtcatccgactgcaatcacaggagagcccgcaagcaaggatytcccatctgttttcttcccaaatcctgagtccacaaaactgtgagcaacagaaaatgtgtctgggaaacacctgtgtgtgtgtgtgtgtgtgtgtgtgtgtgtgtgtgtgtgtgtstcwgtgcntgtgtgtgtacanatgtgtgtggganggggtgaacccgggggactgganncatatgccctgggtgagwatgccacwggctctgtgacctgtanaanctctttactctctca

SEQ ID NO: 1060 - DNA, 927 bp, Canis familiaris
tccctccgcaggtccaacagcagcttctagtaaaagtgggcccccaggaggrggcttcggagrattcacacgcgttgaattaagaccatccttgctagtgatagagacccaaactccgaacagcttctggaagagcgggagtcgttggcccgcatgaccagagagcgctgcgagagcaccgggcacagcagcattcagagtctcatccccctgtatctgactcggtctttcttttgtgatatcaaaattctcttcagcagatagtctcaaaatttctatgtccgattctagagagaatggacctgattggcggkgscaccaccactgcccctgtagggcagagctcccgctttctggccacttcctggctgccaggtgtagcctgtggattaaggacccttggaccagaggatcacgcttcactcactgttcacccctggagcgcagagcggatcatgagggaggcagcctcggctactgacttatttgagggataccatggttgctttttgcaaacatctcactctgaacatgatgttagagcagctcacgttgatagcagctttcagaaaaccgtattggaactgtttctgagtggcggggcggaccagggcggatgaccttaacgctgcgtcataaacctttcgtgctatataatttttaawmwwrtgcatatgttactttggtagtaaaaaaaaaaaaaaagaaaagaaaaaacagagggctcctgggcggctctgacagttgaacatctgactcttgatttcagctcaggtcatgatctcagggttttgagaccaagccctgcatctggctccatgctgggcgtggagcctgctcaggattctttctctctccctctccctctgcctgtcccccacctgcacgtgtgcactaccacattcttgctctctaaaaaaaaaaaaa

SEQ ID NO: 1061 - DNA, 663 bp, Canis familiaris
gtcctacccatgatgaggcgcccactcggaagaggaaggctttcgctgtggatgatgaggattctgatggggacctgaatacctgggagctgtcagaaggggtgtccaactgtccgcccaaggaatcggctgctgatatttttaacgaggactgggatttggagttgaaagcagatcaaggcaatccatatgatgctgatgacatccagggttgcatctctcaagaggtcaaaccttgggtgtgctgtgccccacaaggagacatgatctatgaccctagttggcaccatccacctccactgataccccattattccaagatggtcttcgaaacaggacagtttgatgatgctgaagattgagtgtgcagcttctggcctggtgggtgggcatgcctttccaaatgaaggtctctcttcctttcatggaggtggaggtcacatttgatgacacattcccagcgatccccaagtcgagcacacagactggcattagataaggtcccaatgtcctccagttatgctgttgttgtttttaatgagcttctccttgggacatgtgagtgtttgcgtctgtgtcaggaggagtcgtgttctttataaataaaggtagaaaaaatttaaaaaaaaaaaaaaaaaaaaaaaaaaaaaaaaaaaaaaaaaa

SEQ ID NO: 1062 - DNA, 348 bp, Canis familiaris
cccggcccgccgccccccgacggcagccccgacggcaccccggacggcacccccrgcccrccgccccccgacggcagccccgacggcaccycggacggcacccccrgcccrccgccccccgacggcagccccgacggcaccycggacggcacccccrgcccaccgccccccgacggcagccccgacggcacctcggacggcacccccggcccaccgccccccgacggcagccccgacggcacccccggcccgccgccccccgacggcagccctgatgacaacccccgcccgccgccccctgacagcagccctggcccgccgccccccgaggtcacccccgatgacacc

SEQ ID NO: 1063 - DNA, 246 bp, Canis familiaris
cccggcccgccgccccccgacggcagcccggacggcacccccagcccaccscsscccgmcgscagccccgacggcaccycggacggcacccccrgcccaccgccccccgacggcagccccgacggcacctcggacggcacccccggcccgccgccccccgacggcagccctgatgacaacccccgcccgccgmcccctgacagcagccctggcccgccgccccccgaggtcacccccgatgacacc

SEQ ID NO: 1064 - DNA, 285 bp, Canis familiaris
cccggcccgccgccccccgacggcagccccgacggcacccccggcccgccgcccccsgmcsgcmgccccgacggcascycsgacggcacccccggcccrccgccccccgacggcagccccgacggcacctcggacggcacccccggcccaccgccccccgacggcagccccgacggcacccccggcccgccgccccccgacggcagccctgatgacaacccccgcccgccgmcccctgacagcagccctggcccgccgccccccgaggtcacccccgatgacacc

SEQ ID NO: 1065 - DNA, 665 bp, Canis familiaris
ctgctggagagggtcgggcttgtggtgcgagggcgccacctcgtgctgctggacaaggctcagaccgcggccaccgggcaccggctgcaagcagagaaggaggttgctggccccgcaggtggttgctggcccccggtggcggcgccccctaccacctgggagtcgccccgcgcaagcagttctcggggctccgccgggagctgcctccctccgtacacctgctcacactggcccgctgggaccggacgaggctgctgctgcgcttggagcaccmgttcgctgtaggggagggttctggcaacctgagctccccggtgaccttggatttgaaggacctgttctccgccttcaccatcacgtacctgcaggagaccacgctggcagccaaccagccccgggccagcgcctccaggctcaagtggacaccmaacacgggccctacagcccagccctctccccctcggctggaccccaccaccatcacgctggagcccatggaaatccgcaytttcctggcctcggtccagtggaaagagcatggctagacatgctgggggcaggaagactctccctctcctcctcctgctgctgttgccacccatggaagccmttaaaatgccmctacccagacttgaaaaaaaaaaaaaaaaaaaaaaaaaaaaaaa

SEQ ID NO: 1066 - DNA, 659 bp, Canis familiaris
aacgttcaccaacaacccagttggttgggacagtgctttgtgttgttggcacttggaggtgatcctttaatggcacagattttattgactgccytgaaatctttctgaatgatccagccaacagaaggcatcatactgattggtgaaattggtggtaatgcagaagaaaatgctgcagaattcttgaagcaacataattcaggtcccaaggccaagcctgtggtgtccttcattgctggtttaactgctcctcctggcaggagaatgggtcatgcaggggcgattattgctggaggaaaaggtggagccaaagagaagatttctgcccttcagagtgcaggagttgtggtcagcatgtctccagcacagctgggaaccaccatctacaaggagttcgaaaagaggaagctgctatgaaagaaaaaacatgaagttccctaaacctatggaattaatcattatggaaatgtgaaccagcagctgtttgcttctgttgtcccaggtgtcagcctgtgtgcctgtcgctggtctgtcggtacagcaagaagaaaacacagggttcagaatgtcctatattgaggtgtttccacctcattgtgtaacagacagccagtaaacctaccmattgatttgaaaaaaaaaaaaaaaaaaaaaaaaaa

SEQ ID NO: 1067 - DNA, 544 bp, Canis familiaris
gaatttcacttccatcttgggtcccyctcactttaggagagtggactgcaccaatatcttgactgcagatgtgtgcwactgtccatttacaagtctggcttatgctgtgaacccaacagtcttccttgccaacccttagcaaagccaaacaccaatgaaataaaacaaacaataaagactccaccaaatacgaragaagaataaaaatacaaggwaywkwattwagaagcctaaactttgtcatgattataccctatagacttgtggtattgcatagctagtacttcaccattgctgtwcattgcccatccttttggaagtagaagtcaaaggcaagatggcctcyttgcwaaacacacacacacacacacacacacacacacacacacacatgctatacaargtatataaattgtwctttctgcwastcttgtctaagattaatgcctaatatcttgagacatttttagtcaagttggggctatgagtatctaaagccccagcctctctaactacatgggagaagatggatgtctttctgtgt

SEQ ID NO: 1068 - DNA, 757 bp, Canis familiaris
  misc_feature (387)..(387): n comprises a, c, g, or t, or includes no nucleotide
accctagctatctccaaggggcctgagcagagctacaggccctgccttgaggtaagtgggatggtcaactcaggcagggcactgctggcatgaaggacaataaagtacccattgcctgcttgagccttacccagctgggccccccactcagaggccaccagatggccatcatatcatagcgtaaatgtcagaagggcctttggggtcacccaaaatatctttccttggccctgctgtaaagcccataacactgcaatagcataggtgggagtacagacctctccattctggccagcctcagtccaggaggccggagcctgggtccatctgagggtatccaagtcctgtctaggatttggaaggtgtccaggaaaacaggaagggaancaatgagggatgcatmtactcactcttggcccaccatcttggatwtgagaktggadgartwtcacaagttctgctccamtcaatttwtagtgcgtgctccccgccacacacacacacacacacacacacacacacatacacacacacacacacagaggcctccttgactcccacaaagccctggccagtcatgctccacttagcaaccacattgagctgtcttcttataacactttattttatagcatttttgtacctcaggtgcagagacccgagttaatcataatcctcagtaaagcacacacagactttttctttctttgttttgtgtattttactttcccttttatcccatctccctcccattcct

SEQ ID NO: 1069 - DNA, 646 bp, Canis familiaris
tagtccttgccaatcccagaggtaactaggccgatctscctgttcttacttttaggaggtctggaatataatctggctgtacattctcagaggtgttgagagagtagaaataagccatgataccatcagtttgcctgaagctgtgaatgggaacaagacagtgccaaattactgagtgttccatgtcatggtgtggtggcctgtaggccagccttcaggaggtgttggtggccagcagtgaccctgagacatggaggacgtccagtcttctgggccctttgtgtgctcacagggagacccgccaaaacacatgaaggggtcagaacctttgctttttcagcctaattttacttttggttgctatttgagatcatgtagcctacttggagaagaaacgagtttatgctgcttgatcttgagatcccacgccctgacaggtgaggtggggggagttgctgttcctctccggcgtctgctctggtgcaaggtgggctggagcagggatgatgcacccctggcagggccaggagctgaggaagtggctgctgtgagcctgtgcccagtgttgtcacccagatgggaccactgtgtggggctgtttctccataaatcagtttttgaaacccttaaaaaaaaaaaaaaaaaa

SEQ ID NO: 1070 - DNA, 632 bp, Canis familiaris
ctgtccactctgtctgaatgccagsytgctcctacsccacstcccctcccacgtcacctgctcaggtcagttcccgagcctgtcctccccgagaaaggcctctcatcccctgcaccagacaccacagtgtccaccacattgaatgacccgggctgttgctccgccagcctggaggccctggagggtggccgtgtctgactccctttgggagtcaagtgtggggacctggcccagattggtcccaagggtacctggcttctcacccaagccctgtggcttcccaggcgggagagagcctggccaggagcagagtgcctgacaccctctggaaggccacctgtcttcctgaaggtgcccatggggcagggggcagaggaagccccctgacagggggaggggtgacgaggactgagccagcttcgcctcccctgtgctgttcagcaaggggcggtcgactcctggaatcacccaccagagcggctggggagcgcgcgttatgtgtcgaggtgtatttgtgagcttcgctgtacagtggattcccccgtatgcttgtactgtatgtttctctactgtatggaaattaaagtttacaagcammaaaaaaaaaaaaaaaaaaaaaaaaaaaaaaaaaa

SEQ ID NO: 1071 - DNA, 670 bp, Canis familiaris
agccctggacactggtgatacacccgtgtggtggccaagctctcgcccagcttaaccacgcaggaagtgtgagcgtgtcttgctggcctattctgtcatgagcscctgccgacctttgcaccagcttggcttacttgactctacttttctccctggatcagcctggtggcamcctggacctgascctgatccgtgcccgtctccaggagaagttgtcacccccatatagttccccccaggagtttgcccaggatgtgggccgcatgtttaagcagttcaacaagctgacagaggacaaggcagacgtgcagtccatcatcggcctgcagcgcttcttcgagactcgcatgaacgaggcctttggtgacaccaagttctcagctgtgctggtggagcccccccccctgagcctgcctggtgctggcctgagtgcccaggagctatccagtggtcctggtgatggcccctgagtctgtggcctctcaggccaacccggcctggcaatgttctctgtcctgtcaaattcccctccccctacctccccctctggtggcctggctcctacttcttggtggccccatcccccaacccctcacaatatggtttttacttatgtggatttaataaaaacttcaccagttmmwmaaaaaaaaaaaaaaaaaaaaaaaaa

SEQ ID NO: 1072 - DNA, 650 bp, Canis familiaris
aaagtcatttttagcattagtgttgctggacttttgactttttttatataatgaaccactctttttaaaatttataacttacccttgaagacagaattttagggttggtacttgtaaacattttcattaacagtatgggaaatgatgcctggagagaaagataatgagcaaatatattgcttctttcaaaggaggaggcgagcactcttttgcgtctgaattttgttcctttggtcmaagaatgcattcctcagttttcaaagatgtccctttaaagaaaaaaggaaaattaagttttaaataacacttgagtattacaccctgacatctagagcgtatttaaacatagcctatttcttgcttgatttaatattcatttagttgtagttgtccaaatgaatattaattattgcmaaggttaccttgtccataataatttgtaaatggtgttatagctgaatacctgtgcatgaaaatgggaactattttcatgtttacttgtagtgccatagaggccaatatgcacaatattaaagccaagacttgaatgtttaaaagaatttaatgttcagttatcactgatgctttcacactatttattaataaaatcayatattgtctacttwwaaaaaaaaaaaaaaaaaaaaaaa

SEQ ID NO: 1073 - DNA, 674 bp, Canis familiaris
tgtccagcttccagcctgcaaagatctatcctcagtctggccagagatccacgggaagcccccagctaagaacctggaacctggggagtgagacctggaaactctgggacagcccccacctggtgggccaacaaggaacactaaccgtggatggtgccccaggcccagctcaggacagatcccacaacaaggatcacgctggctcagaaccagctccaagaggactcagaactctaacggggccagatcgaacctggggcccggggttgatctgggacccagactcagacgttggtaacctaaccaggcagatccaggactacatctgagcctgttccagacctgggcctggaggcccgatccacctctgactcgggagaagtcaggaattgcccaggaccctgaaggggccacgatggtaacagatctggaacctcagcctggccagatgcaggccctccccgtcccccagaaagagggaagcccactgtcctgggcctgcaggatttgggtcctgcccactagctgcactgacgctgcccctttctccctgcccaacttcccctcacctcagctccggacatccgggacttatttaaactctgttgcaagtgcaataaacccggcccggtgcccccacwraaaaaaaaaaaaaaaaaaaaaaaaaaaaaaaa

SEQ ID NO: 1074 - DNA, 1116 bp, Canis familiaris
acaacctcttctcaaaggagttccgggcatccctttataasrkmstcagmtcccctcacactttgggctcctcagggaggaggkggctggagccctrgaccaccgttagcacaatgatcctcaggctgcttctggccctcaacttcttcccctcgattcaagtaacagaaaacaagattttggtgaagcagttgcccaggcttgtggtatacaacaatgaggtcaatctgagctgcaagtatacctacaacctcttctcaaaggagttccgggcatccctttataagggagtagatagtgctgtggaagtctgtgttgtgaatggaaattactcccatcagcctcagttctactcaagtacaggattcgactgygatggaaaactgggcaatgaaacagtgacattctacctccggaatttgttcgttaaccaaacggatatttacttttgcaaaattgaggtcatgtatccacctccttacattggcaatgagaagagcaatgggaccattatccatgtgaaagaaaaacatctttgtccagatgagctgtttcctgattcttctaagccattttgggcactggtggtggttggtgcagtcctagttttctatagcttgctagtaacagtggctctttgtgcctactggataaagagtaagagtagcaggatccttcagagtgactacatgaacatgaccccccgggaggccggggcccacccgaaggcactaccaaccctatgccccagcacgsgactttgcagcataccgctcctgacatggacgcctatccagatgcgagccggctggcagctcttcacctgctcaacacaactgctctggataggaaaaacccgcctcgtcttcagccggccatgggckccttttaggggctcttattaggccwccgatgccaatttttcttgaatgactatmccaaataacattattttgagactctgaaatgaagttaaagaatattactgtggcaggctctatcttgcagtgccatgacccaaattccaacttaccatgtatttattgacttgaggttacagtagaaaacaaaacaaaaaaagcaatggattctattaaaaaaaaaaaaaaaaaaaaa

SEQ ID NO: 1075 - DNA, 1369 bp, Canis familiaris
  misc_feature (1269)..(1269): n comprises a, c, g, or t, or includes no nucleotide
gaattcggcacgagccccgctcgcgctctcggcagtgccgggggcgccgcctcccccatgccgccctccgggctgcggctgctgccgctgctgctgccgctgctgcggctactagtgctgacgcctggccggccggccgccggactgtccacctgcaagaccatcgacatggaactggtgaagcggaagcgcatcgaggccatccgcggccagatcctgtccaagctgcggctctccagccccccgagccagggggaggtgccgcccgtgccgctgcccgaggccgtgctggccctctacaacagcacccgcgaccgggtggcgggggagagcgccgagccggagcccgagcccgaggcggactactacgccaaggaggtcacccgcgtgctaatggtggaaaacaccaacaaaatctatgagaaagtcaagaaaagtccgcacagcatatatatgctcttcaacacatcagagctccgagaagcagtgcctgagcccgtcttgctctcccgggcagagttgcgcctgctgaggctcaagttaaaagcggagcagcatgtggagctgtaccagaaatatagcaatgattcctggcgctacctcagcamccggctgctggcgcccagcgacacgccagaatggctgtcctttgatgtcactggagtcgtgaggcagtggctgagccatggaggggaagtcgagggctttcgcctcagtgcccactgttcctgtgacagcaaagataacacactgcaagtagacattaacgggttcagttccagccgccgaggtgacctggccaccattcatggcatgaaccgacccttcctgctcctcatggccaccccactggagagggcccagcacctgcacagctcccggcagcgccgggccctggacaccaactactgcttcagctccacggagaagaactgctgcgtccggcagctctacwttgacttccgcaaggatctgggctggaagtggatccatgagcccaagggttaccacgctaacttctgcctggggccctgcccctacatttggagcctggacacgcagtacagcaaggtcctggccctgtacaaccagcacaacccgggcgcgtcggcggcgccgtgctgcgtgccgcaggcgctggagccactgcccatcgtgtactacgtgggccgcaagcccaaggtggagcagctgtcgaacatgatcgtgcgctcctgcaagtgcagctgaggccccgccccgtccggcaggccccgcccaccggcaggnccggccccgcccccgcccgctgcgccgggctgtatttaaggacaccgcgccccaggcatccccccccatcccccggggtccattaaaggtggagagaggg

SEQ ID NO: 1076 - DNA, 643 bp, Canis familiaris
cgattccacaagactgctcagctcaacagccacacaatgtaagggcatgaatagattacctgctccccacmcyttgtggttctgggacactgggtggggagtccagcccaagagctatgatgcccttagagatgcatgtgaccatttctgaagccacaaagtcaaagctctactttgagcgcatattttagaaggtcagagctgtatgcgctgggcaaatcaaggagagcttcatagaagaggtgagtcttcaatttggccttaaagggtaggtaggtgtaagaaagagggtaacgggattataatggatgggtcatttttttgagtgaaaaaaaagcaatacccattgtgtaatattttcaagcttaaagacataagtaataatctataatgacctattgcctagaggtgtgcctgggtggctgagtccattaagtatctgactcttgatttcagctcaggtcatgatcttagggtcctgagattacagctcagcttgagtcaggttccctgctcagcagggagtctgcytgagattctttccctctgcccctccccctgtgcatgctctctctgtctctctgtctctgtctctctcaaataaataaatctttaaaaacaaagacctaaaaaaaaaaaaaaa

SEQ ID NO: 1077 - DNA, 657 bp, Canis familiaris
  misc_feature (7)..(7): n comprises a, c, g, or t, or includes no nucleotide
cctgtcnctgcggtccacgacccccggcccccaacggcactgagccacccctggcctcatggctcttgaggtcccagagcccttgggtgaggacmagaagaaaggaaagccagagamattgaaacgctgcattcgcacagcagctgggagcagctgggaggaccccacgtctgctagagtgggatgcagatgacttccggatcttctgtggggacttgggcacatgaagtgaatgatgacatcttggcacgagccttcagccgcttcccatccttccttaaggctaaggtgatccgagacmagcgcacgggcmagaccmagggctatggctttgtcagctttaaggatcccagcgactacgtgcgcgccatgcgtgagatgaatgggaagtatgtgggctcgcgccccatcaagctgcgcacagagtatgtggaaggaccggaacctggacgtggtacgcmagaagcagaaggagaagaagaaactgggcctgagatagggtctgtggccgggcacccgctccctcctggccgggcgctggctcttctccccgttctctttggaagatcctccaaaaatccactcaccmcctccccmaaaccmgtttcaataaatttacgttatttctgaaaaaaaaaaaaaaaaaaaaaaaaaaaa

SEQ ID NO: 1078 - DNA, 1015 bp, Canis familiaris
atgcatcctcagcagttggtcatctcctggttttccctcgttttgctggcgtctyccctcatgrccatatgggaactggagaaagatgtttatgttgtagagttggactggcaccctgatgcccccggagaaatggtggtcctcacctgccatacccctgaagaagatgacatcacttggacctcagcgcagagcagtgaagtcctaggtkctggtaaaactctgaccatccaagtcaaagaatttggagatgctggccagtatacctgccataaaggaggcaaggttctgagccgctcactcctgttgattcacaaaaaagaagatggaatttggtccactgatatcttaaaggaacagaaagaatccaaaaataagatctttctgaaatgtgaggcaaagaattattctggacgtttcacatgctggtggctgacggcaatcagtactgatttgaaattcagtgtcaaaagtagcagaggcttctctgacccccaaggggtgacatgtggagcagtgacactttcagcagagagggtcagagtggacaacagggattataasaagtacacagtggagtgtcaggarggcagtgcctgcccctctgccgaggagagcctacccatcgaggtcgtggtggatgctattcmcaagctcaagtatgaaaactacaccagcagcttcttcatcagagacatcatcaaaccagacccacccacaaacctgcagctgaagccattgaaaaattctcggcacgtggaggtcagctgggaataccccgacacctggagcaccccacattcctacttctccctgacattttgcrtacaggcccagggcaagaacaatagagaaaagaaagatagactctgcgtggacaagacctcagccaaggtcgtgtgccacaaggatgccaagatccgcgtgcaagcccgagaccgctactatagttcatcctggagcgactgggcatctgtgtcctgcagttaggttccacccccaggatgaatcttgg

SEQ ID NO: 1079 - DNA, 1477 bp, Canis familiaris
ggacaagagccagaaagaaaccagaacgaaggcaccttgtgtaaacatgacttccaagctggctgttgctctcttggcagcttttgtcctttctgcagctctctgtgaagctgcagttctgtcaagagtcagttcagracttcgatgccagtgtataaaaacacactccacacctttccatcccaaatatattraagaactgagagtgattgacagtggcccacattgtgaaaactcagaaatcattgtaaagcttttcaatggaaatgaggtgtgcctggaccccaaggaaaaatgggtacaaaaggttgtgcagatatttctaaagaaggctgagaaacaagatccgtgaaacaacaaacacattctctgtggtttccaagaattcctcaggaaagatgccaatgagacttcaaaaaaatctatttcagtacttcatgtcccgtgtagacctggtgtaggattgccagataaaaatacagtatgcccagttagatttgaatattaagtaaaacaatgaatagtttttttctaaagtctcatatatgttgccctattcaatgtctaggcacacttacattaaacatattattcattgtttgctgtaaattcaaatgtagctggaaatcctggatatattttgttgttgttacatctttccacctcacctacaggccaggatgcatgagtcccttttcaaccttgccttggtctcttctttattcctcaactggagaaaaggtatcagcaagcatcctacctcacagaaatatgaggacatatggaagcactttaactttttctcatgttgtctaaattatgttcaagtgaaacttgtttgcctatttattatttatgtatttatttaagaaacaaatatgggaatatctgtgcataaatttggaaaaataggaaaggaagcattgttgataagttagtataatgatggtagtgaatttatatttattttggtatttagtgatgttatattaaagaactattttgtttttttttttttaaagaactattttgaacaaggttgctagatttagcaaaattaaaaatgagatactcatttaattttgatttcaaacaataattttttattatattattatttatctgaaatttcaattgaaccgcaatcctacttttgatactcctagtcttgtctattcactgacagccttgttcaatgctgggttgaatgatcataaccctgagttagaattgtttctccaaagagcaaaaactcgacaagcaatattaatgaagtaatttcttgccagttaaaatttgtatatttataatatacaaaatagattccttataattttacttattgtgttcttaaacactgacttttttactttaagatgcttttatatgtttcccaagagatttttttttcctcctatttttgatgctatggaaataaaaatgtaaaatatttaaaataaaacttattgtcaaagtc

SEQ ID NO: 1080 - DNA, 419 bp, Canis familiaris
  misc_feature (266)..(266): n comprises a, c, g, or t, or includes no nucleotide
  misc_feature (336)..(336): n comprises a, c, g, or t, or includes no nucleotide
ctgtcagtgggattctaaatgttattggtattctagaagaataaacacaggagactgcttagaaaaaaaaaaattgaaacatcgtccaccccccaacaatcaaatgtttaatttccaggacttctgtgtgtgtgcacaggtgtgtgtgtgtgtgtgtgtgtgtaatgttaccttgcatcctgtttcagctactcgctgtttaacaggctacccgaaaccaaattgcttcagacaactatttgctcgtggttctgtacccttggcanactcagtgggcagttctctgggtcttgctggtggcccatatagctgcattcagctggcaggtcagctkangcggggtcagcggggacagccaggcgcctctgtctccatgtagccctaagggcctttctgttccgtctctacttcatcttgcc

SEQ ID NO: 1081 - DNA, 659 bp, Canis familiaris
ccgctgtagtcttggcggactcactctgcctggtccagtgacaagagaatggttttctataattaacactatatttccctgaaccactcctaaaaccacactacaaactgagcctaaacacaactagaatggcagaaagatctttcaaaagggtgccggggaggatctactgaacacaggttaccgcctggccgcaggggggaggtactcctctcccagatgggcaacaccccaccatgcagacaaagggtttcgctggtcagggtggcagaaaagtcctcgtgtggcctttggactctgtgctctggagatgtttttaagattttatgtttttgaggagaaggagttaaggaaaagaaaagaaaactctcaaaggtatgcagactcttgtggacaaacccactgaaacctgctagaacaaccaaaacacccaaacactcgaaaaaccaccataattacttgtgtttcaactttgacctcagggtaggacggtacactctggcagtgttcacgaactccaccttgctaaactagtttttgcagcaacaataattacgagctttcacaagcctcgtagaggggtgaaagtctttacaaacttttatttttgattagtcaatgtttcagcytttttttttttttttttttttttttttttt

SEQ ID NO: 1082 - DNA, 659 bp, Canis familiaris
ggcgacatcagaaccgcctgagtgagacggaccaggtcactgttctcttaccaaaagatattaattgtgatataaagggacttggtgaggattttggtgtgatgtttgactcggatttgtgttgatcttaccgtctttctagaaagttttcccacggcccctcctagatgacttgtgtccaatggcggaccggcgtcccccctccatgaggagagggtctacccgttgtggggtggtacgtctgtttcccaaagcgaccagtcccaccgtcttttcaggagcacaccggaaacctgagacacgagacctctacaaaaattctaaaatacaaaaactcctcttcctcaattccttttcttttcttttgagagtttccatacgtctgagaacacctgtttgggtgactttggacgatcttgttggttttgtgggtttgtgagctttttggtggtattaatgaacacaaagttgaaactggagtcccatcctgccatgtgagaccgtcacaagtgcttgaggtggaacgatttgatcaaaaacgtcgttgttattaatgctcgaaagtgttcggagcatctccccactttcagaaatgtttgaaaataaaaactaatcagttacaaagtcgraaaaaaaaaaaaaaaaaaaaaaaaaaaaaa

SEQ ID NO: 1083 - DNA, 641 bp, Canis familiaris
cacagtgaatacaggttgacttgaatggtgatccaktcatctattcacataggctctgtgcccaacatggggccgaaactcaggacctcaagatcaagagttgggtgccccactgagccaactgagccagccaggcatcctttgctttatttcttctgggtactcccttgatctgtccagggttgagctctccaaagcwacattaaggatggagcagcttgtttcctgtatgctaccccaaagtctccagagttaacaggtcctgttacctataacctgcttgtttgctgaaaggtccagtaccttgtgtgggactcaagaatgatttgaggaaccctaagccatttttctgttcagctccagtctgaggtctaaagaaagaaggatccctgggtggtgcagcagtttagcgcctgcctttggcccagggcgcgatcctggagacccgggatcgaatcccacgtcgggctcccggtgcatggagcctgcttctccctctgcctatgtctctgcctctctctctctctctctctctctctctctctctctgtgattatcataaataaataaaaaatttttamaaataaagaaccaagcttttatgtaamarrwaaaaaaaaaaaaaaaaaaaaaaaaaaaaa

SEQ ID NO: 1084 - DNA, 687 bp, Canis familiaris
gcaaaatgggcaccagagggaagaaccagatattgaagagaacagagagactctgaagttctatctgcggatcatactgggggccaatgccattacgtgtcttgtgaccttggtgttcttctattcatctgcctcattttgggcctggatggccttgggctttagtctggcagtatatggggccagctaccactctatgagctcgatggcacgggcagccttttctgaggatggggccctgatggatggtggaatggacctcaacatggagcagggcatggcagagcaccttaaggatgtgatcctactgacagccatcgtgcaggtgctcagctgcttctccctctacatctggtccttctggcttctggctccgggccgggccctttacctcctctgggtgaatgtgctgggcccgtggttcacagcagacagtggcaccccagcaccagagcacaatgagaaacggcagcgccgacaggagcggcggcmsatgaagcggttatagccatcaacgttttggccacaggctgcatggcccccatgccaggagcaaggagggcctagtccaaggcccmaaagcagttctaaggtataggattgttgaataaatggctcagaatgtggctaaaaaaaaamaaaaaaaaaaaaaaaaaaaaaaaaaaaaaaaaaaaaaaaaaaaaaaaa

SEQ ID NO: 1085 - DNA, 657 bp, Canis familiaris
agtatgattttccgtgaaggaggtttgtaaagsccggtgtttgctaacctgtacagaaaggtttctaaagtaaatggaagaagtatcagtctgtctttcccccgtaacaccagaggcctgaagctaagatgggtctttaaaaatcttgtaaatatagtgsccatttcagtatctcttagcagggtgttggcctcatattgaactgttagaacattktyctagaatttgcctaaacatccaagtatcatgggtcraaccgtatggatcgacagtgagagtgaggtggccaaatccggaattgcccgccccaagaacttcttctctggtcctgagctgactggtttggggtgattctccttctttgagaagccctttcggatggcaacgtgctactggtatctataaattaaggcgtttcygaattgtcataaatgggatattttagtctaaaggttttcgggttacttgaatttttttaaagaaaattgagctttatttctgctatttaccctttcatttttgtatatcaagttttcattatacttaaaactgtatcttgaaacattgtgaactgacttgctgtatttgcactttgaacaattgaaataaatgtgattttttttgtctgawaaaaaaaaaaaaaaaaaaaaaaaaaaa

SEQ ID NO: 1086 - DNA, 661 bp, Canis familiaris
gaagttatagaaagtgacaacacagaatgccacttgagactgtktcccaagcttcggcaactgctccagaagtagctgcaaaatcaaatctgctgcagggaacagcatttgagagaaagaaatgttctgagttagagtctgaaccgaagaaaccmttatatagggataatgaagattatgattttagagaaatatatctcctaaaaccaggctaggatcctgaaacccctgggttctgattctaccttgtgcttcaattaatggggtcctaacaggagattgagaaacaccactgcttcttacctcaccccacttagtagaaccagccatatgaactgaaaccatttcttctggcaaaggaggctccccgaggtaagacatgatcgctactgggacagctaacatttgatcctttaccaccataggatttatgtagaaaataatcatctcgtttcttacactgtcagaggtctattttctggatttgtaaaactgagttgttagtactttgaagtgcttcttaagaggaaaatgtataggtttttgtatcaatcctagattttgacttttgaggccagtggtttgtgcaatcattgttaaatgccagccccaaggtttaggtaataataaactgagtttaagttctaaaaaaaaaaaaaaa

SEQ ID NO: 1087 - DNA, 695 bp, Canis familiaris
actacacccagatgaacgagctgcagcggcgcttcggaccccggggcctggttgtgctcggcttcccgkgcaaccagttcgggcatcaggaaaacgctaagamygaagagatcctgrattccctcaagtacgttcgacctggcrgcgggttcgagcccaacttcacgctttttgagaagtgcgaggtgaacggcgcgcaggcgcaccccctcttcgccttcctgcgggagtctctgcctgcccccagtgacgacaccactgcgctaatgaccgaccccaagttcatcacctggtccccggtgtgccgcaacgacgttgcctggaactttgagaagttcctagtgggcccagatggtgtgcctgtgcgcaggtatagccgccgcttcccaaccatcgatatcgagcctgacatcgaagccttgctgtcccaggggcccagctgtgcctaggcaaccctcctttccctgctgcttggcagtcacagcgctgccctctggggatttcatccatgatggtgtttccttgaaatctgcatggaggaacgcctgatttccaggaaagtcccctgagctgggcttgggctcttcttgtccatcccagaaccccctccctaactaggctcctcactaataaagtgttggccgtcagcaaaaaaaaaaaaaaaaaaaaaaaaaaaaaaaaaaaaaaaaaaaaaa

SEQ ID NO: 1088 - DNA, 509 bp, Canis familiaris
tatgtttttgtgtagagtttctaaggtagtccttgggggaaagcaaattgaacagttaaagaggtctttgtgcattgttggtacagtttgaaggtctcacaggatcttagtctttgccaaaatagagagttttactacagtggagcagaatatctggcagtctctcattggtgggtctcctgactcagtcagataaggcctgattggccagccccagtgggttttactgctccttccccccagctgtggcttcccaactgctccaaggaaagaatgcaaggcaggaatgtctcaaaaagaatagaatgtgcatattttcattgactttaatctcaaggcactaaaagtgtgtgtgtgtgtgtgtgtgtgtgtgtgtgtaatattgaaacttggcagcaaaaagagtgtggcagttgagccaagaaaccaaaaaaaaaaaaaaaaaaaaggtttgaaaaatatccactgcattgccaaatttgtccatggacgtttatgggaaaaaaaaa

SEQ ID NO: 1089 - DNA, 666 bp, Canis familiaris
aaagtgatcacagagtatctgaatgcccaagagtcagccaagagcgycagkctgaacctgtggcgctatggagacttccgggccgacgatgctgatgagtttggctacagccgctaaggaaggaagcgggtctggcccccagccccgctcacaccagtacctcctcctctgcagggagggtgttttcagctccagaccccagatcaggggtgtagattgggtccagctttgcttcagtgtatggaaatgtcttgtggggcaccatctgggctggaggtgggatgggggagcccaaggctttcagagggcaggccattgtcttctgagatgacaggcactgctgtccacagtctgtcccagctgattttgtgtttttatttggcagattttgtttttaaagttgtcctcaaatcaggracatgaaagactttgtcctaacatagggcatgatcctgacacccaaggccagctggcaccccacttctatcccagattgcctttctccccagctctctgtccacctgttgattgattatgtgattcttctgatacgtccattctcaaatgccagcgtgtctacatctgccccctgccagccctccccacttctgtatttaaagctttcaaggcccaataaaatagtacctgctgtcwrmaaaaaaaaaa

SEQ ID NO: 1090 - DNA, 880 bp, Canis familiaris
ctcaagtggattcctgtgcctttcatgggtttgaagtagcctatgggaccaagaaattcaaagttattggacttggctcacaagtcgcgggggcttaaagctgttcgtgtcgcctcacccttggcagcatggtgtccccatgtcgtggatgttggcggttgagcgctgaaagctctcaagtcatcatctgtcgcatttccaggaacacctaaaattcttaagctgctttttagtgctttactctycagtttttcccaagtagtgattgggataaggccacctcatgacaaagcgtttgtggtgaaatgttcccacggccatcatcctgagtcctgctccgtccacctgcccttctagggcctgtttcaggcaaggagcctgcgcatcctcaagcagctggaggacaggcccgcatcttaggggccagaccatatgggttgataaccttattccttggtgggctgggagtgagtcttctctgtttgtcactcccattaaaccagattgaaggataaggtaaaattaaaaataaggctaggtggtcattgtgatttgcccaggcagcaggtcagtctggaagctgactttaaaacagtatttctaaaaaaaataaaaaataaaaaaataaaacacgtatttctaaaaaaaaagtaaaaaataaaaaaaaaaaataaaacagtatttcttattttacttccagtcatatgcttgccttcttgggggggagggtagacacttgtaatatgaatttgttgaggactcccattagcttttggctgtttaatattcaaagtcattgtttacagggactttagtagctcttgtacagggttgtgcgtacccagaaacagggtttcatatgctttgatgatgtgctgtc

SEQ ID NO: 1091 - DNA, 325 bp, Canis familiaris
gcatccacattgaatcttaaaaggtgagtagaagtaatccaggtggagaagtaaaggaatagccacggggccagcatgagcaaagtggagtgtatgtgtatgcatctgtgtgtgtgtgtgtgtgtgtgtgtgtgtgtctgtgtctgtgtctgtgtctacaaaccacagacaatgcagaattcataattggcctgtgagtagatattatcaggagatggaagcwctggagacagatacaaataaaaccaaatataaaaaggcctgtgtgccataccggatagacactccataaaatgatggagcatattatgaacatttattgttt

SEQ ID NO: 1092 - DNA, 675 bp, Canis familiaris
atttctatcttatattgtctcaaaatggggggaggggtktaggctttacgggtttagttgtgcctttaactacttagtagctgtatttaatagctggaaacctctggttaaatttgttcttacatgcacttctggcatagtcctattaaatccatatgaagcccagatatgattaggtgcagatgtggtgtgcttcatgatatggtacagggcccaagacttgagatgtggtgttttacatggtgactcacattatgaatggatttactagaagaacmcttgctgctccttatttattgtggtgtgctgcatggaacatatttatttgagagcattaaaataaacgatcctagagcatgtgcataatgagaggactgtattgtctctctgctgctgttgaagttacattaagttccaaataacamttacagtatgccggttccactgaggacmagaaatctttagaggtttgttgcagggaacggaatgaattttaatgcctattatttctaggtacttgaacaatatttcaaatgtagttgaccmttgatacttgtcattcaagctaacacagtcccaacaaaagtctgtggttcctgaatatgacaccagtattgccaataaaatgttccaaacaagttctgcaaaaaaaaaaaaaaaaaaaaaaaaaaaaaa

SEQ ID NO: 1093 - DNA, 690 bp, Canis familiaris
aaacactcactggttaaccagatgttcttaagtcatgaggcaccttgctggagtctcggcttcccgaatgcccttgcctaagattggataggggkkcgkggcacacgggtattttaggggcacatctgaggactgattttaaataggctttaaaataaaaggccaatattagcataacgctataattctactaaaaggcttcagagtggcagaagttctgcttatgtcttagtaggttcagaaggctgcaggaaggtcagacataaaaacaggtagtagcacttttccaaagaacaaaaagaagcaaaataaatgggaaaagaacatggacctcatgttcatctattttagtctaataccattgtaacatttttttactccgccaatatattcccagtaaatacatatagaaagagtaggaggactcaagtctagaaaatcctaattgtttatgttttaagaaacgaaaaaaaaactacattatttttgtaaagtatttattgagtcattgagtcttgtgcatcaagcgattgtgatatgacctggttctgtagtgtggaacttaggacaaataaagagtttgttgttatgcaatctttacttgcaaaactccaggagaagagaatatatactaaaatcataataaaatgtgttacctgcaaaaaaaaaaaaaaaaaaaaaaaaaaaaaa

SEQ ID NO: 1094 - DNA, 2234 bp, Canis familiaris
ggcaacatggcggacagccgggacccagccagcgaccagatgaagctctggaaggagcagcgcgccgcgcagaaacctgatgtcctgaccaccgggggcggtaatccaataggagacaaacttaatgtgatgacagcagggcctcgggggccccttcttgttcaggatgtggttttcactgatgaaatggctcactttgaccgggagagaatccctgagagagtcgtgcacgctaaaggagcaggggcttttggctacttcgaggtcacacatgacattaccaaatactccaaagcaaaggtgtttgagcatattggaaagaggacccccattgcagttcgattctccactgttgctggagaatcaggctcggctgacacagttcgtgaccctcgtgggtttgcagtgaaattttacacagaggatggtaattgggatcttgttggaaataacacccccattttcttcatcagagatgccatattgtttccgtcctttatccatagtcaaaagagaaaccctcaaacacacctgaaggatccggacatggtctgggacttctggagcctgcgccctgagtctctgcaccaggtttccttcttgttcagtgatcgagggattccagatggacacaggcacatgaatggatatggatcacatacttttaagctggttaatgcagcgggagaggcggtttattgcaaattccattataagactgaccagggcatcaaaaacctttctgttgaagacgcagcaagactttctcatgaagatcctgactacggcctccgggatcttttcaatgccattgccacaggcaactacccctcctggacattttatatccaagtcatgacttttagtcaggcagaaacttttccattcaatccatttgatcttaccaagatttggcctcaccaagactaccctcttatcccagttggtaaactggtcttaaaccggaatccagttaattacttcrctgaggttgaacagatggcatttgacccaagcaacatgccacctggcattgagcccagccctgacaaaatgcttcagggtcgtctttttgcctatcctgacactcaccgccaccgcctgggacccaactatcttcagatacctgtgaactgtcctttccgggctcgagtggccaactaccaacgggatggccccatgtgcatgctcgacaatcagggtggtgctccaaattactaccccaatagctttagtgctcctgaacaacagcgttgtgtcctagagcatagcagccaatgttcgccagatgtgcagcgcttcaacagtgccaatgaagataatgtcactcaggtgcggaccttctatttgaaggtacttggtgaagaggagaggaaacgcctgtgcgagaacattgctggccatctgaaggacgcacaacttttcatccagaagaaagcggtcaagaacttcagtgatgtccaccctgactacggggcccgcattcaggctcttttggacaaatacaatgctgagaaacctaagaacgcgattcacacctttatgcagcatgggtctcacctggctgccagggaaaaagccaatctgtgagagtcgtgccccaggttgctctccacctgtgaagcaaagcgtggtgttcgcacacgtacccacccttcgctggatagaagattctcctgtgctaggtgcgcagatgcaagcttacgcctttaaaataagccaggtttctatcgcaagtaatgtagcagtggcttttaatgctatttccctagggggaagtaagggtagggcttaacaatgatataaaagaaaatgtatttgcttttggcrgtgggttggattattcacttaaaatgactagaatgaaagtttctggcagaaatatgattttatttgataagataaagtcttggtgaaattagtatgtttatatatatcatctcatggccttattaaataaaagtgtggctgtaattatgtaagaagaaaagatgatctacccagaaatttaaatttttctcagttccatatgggaaaaacacatttaatgcattgatgtcttttgaaaataacttcagtgacatcatagcttaatgcttattcctgcctggaattgatcagatttttttaaaacctggaattacattcatgctaatatagcattgattttacaacagactgatttgtaactgctacatttttacaataaaataatctgtacataaaaaaaaaaa

SEQ ID NO: 1095 - DNA, 693 bp, Canis familiaris
acacctcagtttcccagccgctctccctccctcttcmcctcccgggtcgcctgatgcaggaggctcgctcctgtccctgctcccacctccgaagtggtgtcacccagtgccacacacactgccctcccggcgtggcccgttgtgttgggtttgaggacctcgggtcgcctgcacgtggccccctgcagctgggccctgtgttttgctgtgtgagaaatggcccttttgttgygggcaggcaggtgcyttctytgccgtaaacgccagaracattttgtccatcaaggcagtcatgttctctgtgctaaaataccacgtcaggtgagaggaaaattgtgcctgattgactgggctgaagcgtgaagcaagcagagagtgattctccccccaggatgcaccctgtggatgctgcatgggagtgcattgccttcctgagagctggggaggccaggtcggcacctgcgacagtcaggggtggtgtctttctggaagattctgtgtctcgggtgtctgggacattagcgtctacttcctgaagcgcatttctgcataatccttgctttaccacaattaggtcgggttttatatgcaattactgtatctaagtttctgtagcacacatcataggtatgattttttttaaattaaatattcaaaataaactttttttgatccaaaaaaaaaaaaaaaaaa

SEQ ID NO: 1096 - DNA, 4706 bp, Canis familiaris
caggaggcacgcggagtgtgaggccacgcatgagccgacgctaacccccaccccagccgcaaagagtctacatgtctaggatctwgacatgttcagctttgtggacctccggctcctgctcctcttagcggccacsgccctcctgacgcacggccaagaggagggccaagaagaagacatcccaccagtcacstgygtacagaacggcctcaggtaytatgaccgagacgtatggaaacccgaggcctgccggatctgtgtctgcgacaacggcaacgtgttgtgcgatgacgtgatytgcgacgaaaccaagaactgccccggcgcccaagtycccccgggsgagtgctgccccgtytgccccgacggsgaggcgtcacctaccgaccaagaaaccacaggagtygagggacccaaaggagacaccggcccccgaggtccaaggggacctgccgggccccctggccgagatggcatycccggacagcstggacttyccggaccccctggacctcccggaccccctggaccccytggcctyggaggaaactttgytycccaaatgtyttatggctatgatgagaaatcaactggaggaatytccgtgcctggccccatgggtccttctggtcctcgtggtctccctggcccccctggcgcacctggtcctcaaggtttccaaggcccccctggtgaacctggcgagcctggagcctcaggtcccatgggtccccgtggtccccctggcccccctggcaagaacggagatgacggtgaagctggaaagcctggtcgtcctggtgagcgtgggcctcctgggcctcagggtgctcggggattgcctggaacagctggccttcctggaatgaagggacacagaggtttcagtggtttggatggtgccaagggagatgctggtcctgctggtcccaagggtgagcctggtagccccggtgaaaatggagctcctggccagatgggcccccgtggtctgcccggtgaaagaggtcgccctggagcccctggccctgccggtgctcgtggaaacgatggtgctactggtgctgctgggccccctggtcccactggccccgctggtcctcctggcttccccggtgctgttggtgctaagggtgaagctggtccccaaggagcccgtggctctgaaggtccccagggcgtgcgtggtgagcccggcccccctggccctgctggtgctgccggccctgccggaaaccccggtgctgatggacagcctggtgctaaaggtgctaacggcgctcctggcattgctggtgctcccggcttccccggtgcccgaggcccctctggaccccagggccccagcggtcctcctggtcccaagggtaacagcggtgaacctggtgctcccggaaacaaaggagacactggtgccaagggagagcccggccccactggtattcaaggtccccctggccctgctggggaagaaggaaagcgaggagcccgaggtgaacctggacccactggcctgcccggaccccctggcgagcgtggtggacctggtagccgtggtttccctggtgcagatggtgtcgctggtcccaagggtcccgctggtgaacgtggttctcctggtcccgctgggcccaaaggttctcctggtgaagctggtcgccctggtgaagctggtctgcctggtgccaagggtctgactggaagtcctggcagccccggtccagatggcaaaactggcccccctggtcccgctggtcaggatggtcgtcccggacccccaggcccccctggtgcccgtggtcaagctggtgtgatgggattccctgggcctaaaggtgccgctggagagcctggcaaggctggagagcgtggtgtccctggcccccctggtgctgttggtcctgctggcaaagatggagaagcaggagctcaggggccccctggccctgctggccccgctggcgagagaggtgaacaaggtcctgctggctcccccggattccagggtctccctggccctgctggtcctcccggcgaagcaggcaaacctggtgaacagggtgttcctggcgaccttggtgcccccggcccctctggagcaagaggcgagagaggctttcctggtgaacgtggtgtgcaaggtccccccggtcctgcaggtccccgaggagccaacggtgcccctggcaatgatggtgctaagggtgatgctggtgcccctggagccccaggtagccagggcgctcctggccttcagggaatgcctggtgaacgaggtgcagctggtcttcctggccctaagggtgacagaggtgatgccggtcccaaaggtgctgatggttctcctggcaaagatggtgtccgtggtctgactggccccattggtcctcctggccctgctggtgcccctggtgacaagggtgaagctggtcctagcggccctgctggtcccactggagctcgtggtgcccccggagaccgtggtgagcctggtccccctggtcctgctggcttcgctgggccccccggtgctgacggccaacctggtgctaaaggtgaacccggtgatgctggtgctaaaggcgacgctggtccccctggccctgctggacccactggacctcccggccccattggtaacgttggtgctcctggacccaaaggtgctcgtggcagcgccggtccccctggtgctactggtttccctggtgctgctggccgcgtcggtccccccggcccctctggaaatgctggaccccctggccctcctggccctgctggcaaagaaggcggcaaaggcgcccgtggtgagactggccctgctggacgtcccggtgaagtcggtccccctggtccccctggccctgctggcgagaaaggatcccctggtgctgatggacccgctggtgctcccggcactcccggacctcaaggcattgctggacagcgtggtgtggtcggtctgcccggtcaacgaggagaaagaggcttccctggtcttcccggcccctctggcgaacctggcaaacaaggtccttctggaacaagtggtgaacgtggtccccctggtcccatgggsccccctggattagctggaccccctggcgagtctggacggragggatctcctggtgctgaaggctcccytggacgagatggttctcstggccccaagggtgaccgtggtgagaccggccctgctggaccccctggtgcccccggtgcccctggtgctcctggccctgtcggccctgctggcaagaacggtgaccgcggtgagactggtcctgctggtcctgctggcccaatcggccctgttggtgctcgtggtcctgctggaccccaaggcccccgtggtgacaagggtgagacaggcgaacagggtgacagaggcataaagggtcaccgtggcttctctggtcttcagggtcctcctggccctcccggctctcctggtgaacaaggtccttctggagcttctggtcctgctggtccccgaggtccccctggctctgctggttctcctggcaaagacggactcaacggtctcccaggccccattggcccccccggtcctcgtggtcgcactggtgatgccggtcctgttggtcccccyggccctcctggaccccctggtccccccggtcctcccagcggcggtttcgacttcagcttcctgccccagccacctcaggagaaggctcacgatggcggccgctactaccgggccgatgatgccaacgtggtccgtgaccgtgacctcgaggtagacaccaccctcaagagcctgagccagcagatcgagaacatccggagccctgaaggaagccgcaagaaccctgcccgcacctgccgcgacctcaagatgtgccactccgactggaagagcggagaatactggattgaccccaaccaaggatgcaacctcgatgccatcaaggttttctgcaacatggagacaggtgagacctgcgtataccccactcagccccaggtggcccagaagaactggkacatcagcargaaccccaaggagaagagacacgtctggtacggcgagagcatgaccgacggattccagttcgagtatggtggccagggctccgatcctgccgatgtggccatccagctgaccttcctgcgcctgatgtccaccgaggcctcccagaacatcacctaccactgcaagaacagcgtggcctacatggaccagcagaccggcaacctcaagaaggccctgctcctccagggttccaacgagatcgagatccgggccgagggcaacagccgcttcacctacagtgtcacctacgacggctgcacgagtcacactggagcctggggcaagacagtgatcgaatacaaaaccaccaagacctcccgtttgcccatcatcgatgtggcaccattggacgttggcgccccagaccaggaattcggcatggatattggccctgtctgcttcctgtaaactccctcccacccaacctggctccctcccacccaaccccctcacccctgaccctggaaacagacaaacaacccaaactgaaccccccaaaaagccaaaaaatgggagacaatttcacatggactttggaaaatatttttttcctttgcattcatctctcaaacttagtttttatctttgaccaactgaacatgaccaaaaaccaaaagcacattcaaccttaccaaaaaaaaaa

SEQ ID NO: 1097 - DNA, 655 bp, Canis familiaris
ctgagcaagtggtgacgtggtccctggtcaccatggccccactgattagctgacccctggcgagtctgacggagggatctcctggtgctgaaggctccactggacgagatggttctcctggccccaagggtgaccgtggtgagaccggccctgctggaccccctggtgcccccggtgcmcctggtgctcctggccctgtcgsccctgctggcaagaacggtgaccgcggtgagactggtcctgctggtcctgctggcccaatcggccctgttggtgctcgtggtcctgctggaccccaaggcccccgtggtgacaagggtgagacaggcgaacagggtgacagaggcataaagggtcaccgtggcttctctggtcttcagggtcctcctggccctcccggctctcctggtgaacaaggtccttctggagcttctggtcctgctggtccccgaggtccccctggctctgctggttctcctggcaaagacggactcaacggtctcccaggccccattggcccccccggtcctcgtggtcgcactggtgatgccggtcctgttggtcccmcyggccctcctggacmccctggtcmmccccggtcctcccagcggcggtttcgacttcagcttcctgccccagccacctcaggagaagg

SEQ ID NO: 1098 - DNA, 671 bp, Canis familiaris
agactttctgagmacattggaaagtcacgctcaattgktaacctagtggtctgtaaatagccaggttgtcttatgaatttttatgagtgtctttccacmaaagtgacaggtgatctgttgactctctgtctgcacatgggcacaaatgatgttcagttgtctaggcacaagtaacgtcacagacggtgttatgaacatggttgaagttaagatctgtggggttattgccatgtacagacagggaacgaggccggagagaaaaagatagcccttagtcccactgcgttaaaattagattggtttattatattgtcactatagggctctttttgactatttctaagagtaggaacaaaatgaatttaaggtggtgacttggaaagagagactcacatcatgctcccagtatcccgccacccgatagttatttttcaagcttccaacgtgggcaatacttggaagatgtgagtgtcagaaaagatttagtttggtgggaaaggggtatggtttgaaacttcctgacttgtttcagaatgtcatcattgtaaacacgcacctgaagctttggcgagcagagcccataaatcacagttatggctccctctgagtgacaaggacatttgcagctgcctttggaaggcttttcttctccacttctaaaraaaaaaaaa

SEQ ID NO: 1099 - DNA, 468 bp, Canis familiaris
atgtgcacagggagaggagaccaagatgaactgaatagaaagtaaaagctgaagaagacttgagaagtgctagttatgagtactcccttcccaacctcacatacacacacacacacacacacacacacacacatgcacacacatcacagggaagagggagaaagtcttactgacttgcagtatttgaatacagtcttctaaaaatttagcagttgagatccaagctacaaaatcacaaggacaatccctaggaatataggttaaaaataaaaataaacaatacgaatttggaaaaactgaamaaaggtatcaggaggcccactttagaggagaatattctgcagtaaagtctatgcaactataaaaataataaatctaggaaaaaggaaagagaatacatgttcactgaactatattatcaaaaatgtctactgaaaaaattaggaaatggggcacttgggtggctta

SEQ ID NO: 1100 - DNA, 727 bp, Canis familiaris
gggacagttaagtgatttttctaaaaaagcacatgtcatgggaaagtgtttgtagaagaagaaagcgtagctcacacgggaatttgtgaaggccaaagaagtggaagggctgacggaggaaggtatctgagccttctgtccacaagatttagtggsttttgtctcccagactaccagatatgtcttgacgaaacatgcttcagatgacttcccttgttcttcgtgttagaatcccmagtttaggagaattaacacatcagtttgttctcacmatatttaaggattattaatatatcagtatttctccagcttgatgagcttaaccatatcttcagatctatggcatgacmaccmgtaggactgcttaacattcactttgaaccagaagcttccagggttaaaatgaaaatcgtagttgactagcmagattgtaaagtgacgctgtattaacctgtaagtctgtgatagcttgatatcmatgttacggaatcggccatgatgttggctaatgtgaacgttttaggaaattctcgaattgactttcttaaggtactcagaatgaatatagaagtgatcctgttagctttttaaatgttctgtggttgactttttggttggttgtttttttctgtcctttgttttttgcttttgctccaaataaagcttttggtatttgtttaaawwammaaaaaaaaaaaaaaaaaaaaaaaaaaaaaaaaaaaaaaaa

SEQ ID NO: 1101 - DNA, 2753 bp, Canis familiaris
gcagaaacatcgcggagacctggccccttcatgagctgcgactctgaggcccctgctcccgctgsaassttaacgggggtcccaggctaaggggcccaacatgggcagctcccagggcagctccctgcagcgtgggccgtctgctccctgcccagagccctgagcgttcaggcccccgggctcactgcagtcaggagtgggagccgagctgggaagctgcctgcactgcgctcggcgagaatggcgctgctsaaagtcaaatttgaccagaagaagagggtgaagttggcccaagggctctggctcatgaactggctctccgtgttggctggcatcgtcatcttcagcctagggctgttccttaagatcgagctgcggaagaggagcgatgtgatgaataattcagagagccattttgtgcccaactccttgatagtgatgggggtgctgtcctgtgtcttcaactctctggctggcaagatctgctacgatgccctggaccccgccaagtacgccaagtggaagccctggctgaagccgtacctggctgtctgtgtcctcttcaacattgccctcttcctggtgaccctctgctgcttcctgatgcggggctcactggagagcaccctggcccacgggctcaagaacggcatgaagtactaccgagacacagataccccsggcaggtgtttcatgaagaagaccatcgacatgctgcagattgagttcagatgctgtggcaacaatggctttcgagattggtttgagattcagtggatcagcaatcgctacctggacttttcctccaaagaagtcaaagatcgcatcaagagcaatgtggatgggcgatacctggtggatggtgttcccttcagctgctgcaaccccagttctccacggccctgcattcagtaccagctcactaacaattcggcgcactacagctatgaccaccagacagaggagctcaacttgtgggtgaatggctgcagggctgccctgctgagctactacagcagcctcatgaactccatgggtgctgtcacactacttgtytggctctttgaggtgaccatcacgattggsctgcgctacctacacacagcactggaaggtgtgtccaaccctgaagaccctgaatgtgaaagcgagggctggcttctggaaaagagcgtgtcggagacttggaaggccyttctggagagcttgaaaaagttgggcaagagtaaccaggtggaagctgagggtgcagacgcaggccaggccccagaggctggctgatggccccagggccccctcccctcctgracactgaraagtagtggactccargaaaggtggatacccccctcatccaatctgaatctcccaaggagggsagccatcttacaaactcttcttgatggtgggatttaaagtttaggatccctaaaagcatttggcaaacatttgttaaatgattgacttaaaaatgaatgagcctctattcaggcccacctcatggtggactcagggggcctcttagtggatcactcttaaaagcacatgaattcagttccacccgggactggactacacctactactggacacacctgagggcagttccccttttaagagtctgccattacaagctccaagttgcttcattctatattcaaagcatcacttgttgcataagcacagaagtctaaaaaaatttactggccatgctgtcatgttttttttaaatgccaatattgacaggtcagccattttatttgtataattgtggaaggtgggggatgttatacttttctaagagaatgcactctccaaagcactgggggctcacaagaggaattcttcaacgatggggcaaacgaacttaaagacaggattatttttcctcaccaaatacatagttaaaggctatttctgtgtcacattcttatgccctcacttagcctggagtgagctatgggctgaggaagtcaggttgttagcatattctggcaacatcccacccctaacgtgccacgcaacctcctttggcttatctgtggaagcactgggttagatggttgccttttactggaagaggagcaacrattagacaagagtccactctttggagaccaggcctcacctcttggagggcccaggaacacccatacaggtggccatgacagcccccatggacaacatgaattgtctacagtggagggcmmaaacatcctctgggagcttcttcctgtttctttccccagctacccatcctgcaaggcaatatttctggaatgcctccatatttaaagaagattccttgagacagtccatctttctgcgctagtgacagtaagagaagtttttaatttctctcagaaaagcgaaaaaagggaagcttttacgggaaggagaggaggacttcattgctgttctaatgtgttcagtggggagaaaakttaagacttccggtgctgcctggggcatgttctggggctctagttctcccaggcgttaggatcagatcaaagatatttggatactatcaaacgctggtcccaggtttaattagacttctgaatcttcttgagaccaaagagtggtccacattgaacatgctgagggagtcagccacctctgagggtcctgtaactctctcccctcaggagtactgagaaccatcatgaaagtgctgctctaggccacgtgtaactatgctgttaacasctgtatcatagacawtaaaaattatattgtgtgaaaaaaaaa

SEQ ID NO: 1102 - DNA, 5323 bp, Canis familiaris
ggcaggaacattggttctctagggtcatttctccatcttcagctcctacaacagtggctggcacatagtaagtgcacaacaaatacttaccaagaatgaatgaatgaatgaatgaatgaatatacgaatattatcgcttttcagaggcaagggttggggggaactggcccctggtgaggaatccaaggagcccctctcaagccatctttctcctttagtcgcatcaagagcaatgtggatgggcgatacctggtggatggtgttcccttcagctgctgcaaccccagttctccacggccctgcattcagtaccagctcactaacaattcggcgcactacagctatgaccaccagacagaggagctcaacttgtgggtgaatggctgcagggctgccctgctgagctactacagcagcctcatgaactccatgggtgctgtcacactacttgtttggctctttgaggtaggttaaaccaggtggggggagggaagagggattcacctgccccttttagatttaatgaatgggtgggacttgagacaagcacaagagagtgctgtctctctcctccaaaccagtcctcagcttagttgtgggtcagacaggcctaagtttgaaccctaacacctccactattttttatttatttcctgtcactcaaaaaataatttattgaggtgaaattcatagaacataaaactaaccattttaaggtgagcaattcattggcagttagtatattcacaattttgtgcaaccaccacatctacatagttctaaaagatttctatcactcccaaagagaagctcatacccattaagcagcatactcccgacttctttcttcccagtccctggcaactattaatctgtgctctgtccttgtggatttatctattctggacattttatataaatgccattataatatgtgacattttctgtctgggttctttcactttgcatgttttagaggttcaccctgtgcctttgtttttttcagtttgaggtattgggaagttatttaacctgttaaaagggctgacagcacttagctttgggattcctgggggaggggcaaaaggagataatacgtacattgtgttaggaaatgggagctatttggatttgtgcttctctggagactctggtagcaatttatctgttattctaattatttgtggattcatgtgatcttacctctaagctttaattcctctctgtacagagcttgggatgtagccattcactcctttattgaagagttagttcttagacacctaaggacactaggcgctgtcctgggtgctgaacaagagcaagggaagtacaaagccagaaacattgggtggggaaagtttgtccattagagaagattcactgaaagtgacctttaagtaagttgctctcttagtgctatggaagttcacacatagctgttccctcagctgagatgagtacttctaacacataacactagaggtactgtatgtacagtccgggggtaagggtgccaggttggggggagagggcttcttttaatgtcaaggcaaatgaatgacattttattggtcattgactccttgaggtttgggaatgagtgggtaaagagccagacaagaagcttactgctagaaagtcagaaggttgtgaaaacccatgaaaagaagactaaagggtgacagaagtcagtgggaaaatggggttccactggctacctctcagtttgctcaccttttcaggaagctagtgacttcatgagatgaggactggctcactgagaacacggagtaaatacccctggtttttagctgaggactttggttggcacagctctgtgatgggcatgaaggtagctgaactaacaataggatcctggcctgagccttgccctcctgggccccacaatccagttaagaagtgacacctaactcaagaaccaaggggaggaacattaacaagtgcaaaattcataatgtatcaataggcctccttcaggaaagaagaggatcagagtgggagcatgcataccatgaggactccctggaggagaaaaggggttttccattataaaaatattttattggaacgcttgggtggctcagcacttgagcatctatctttggctcagggcatgatcccggggtcctgggattgagtcaagtcctgcatagggctcccttcaggagcttgcttctccatctgcctgtgtctctgcctctctgcgtctctcatgaataaataaataaaatcttgttttttaaagatttaaatgcaccccgtcttttttaaaaaagattttatttattcatgagagacacacagatagagaagcagagacacaggcagagggatgagcaagctccatgcacggatcccgatgagggacttgatcctggaactctggaatcacaccctgagccaaagacagatgcccaaccactgagccacccaggcatcccaagaaataaaatcttaaaaaaatatttattaagctttcaaaagacagtaactaaaacctaaaactattagttactaatgtcatctgcaaccataattataaaatgctccttgagcattgattcaatagatgtttactgaggtcccatcatcactgggtgctgttctaggggctgggagacagagtgaacaagatggatcagggggtggacattctccattagcaggcctcaccacctcatggagtttgctgtactatcaaaggagaagtataagagagagtaaacaatgaatctgtgtagaaacaagtgagtaacacaatacattagaaaagtgaaaacagtacttaccacactaataaccagttacagttgacatatctattcatccttactgtacaccttactgcactctacacatactgacatgtcacagcatgcacatgaggcaggagacactccatctgaaaatttgtaaaccagatgagtgaacttaggtttcttagtcacatggctggccaagtgccagggctggtgtttgaacccaggcattttggcaccttagactgatgcagtgactgctggtgaacaaatccaaacaaatcacccactcatccccacactaatcaaaacaacagaagtagaagggagccacaaatgatgatattgcttgttgagaagggagggggtgattttaattctgtctagcaaatggttacccaacacccaatatgtgctaaggattgtgctaggaatggggcagggacccaaggaagaggagagtaggactaatgcccccagaacagcgagatctgagaggaagaggagggagaatgagcagcagggagcactcaaagaaggctgaagctgaattaacaggtgaatgtggagaggaacgatattctaggcaaacaggaaatggtaaagactagagggaagaaagtgtgaatgggacccaaagaagcttagggtggccagaaagagaggagaatggggttggagatgaggcagctattttgagcaccaagccagactggtgggcaggccctcaccaacccagactcaacagatcctgccacacttgaagggccccagggatgaagaggctggtggcttacaactattacttcctaatagctccagcctccagctacttttcccagaccagctctaagtttctttttcccaccaggtgaccatcacgattgggctgcgctacctacacacagcactggaaggtgtgtccaaccctgaagaccctgaatgtgaaagcgagggctggcttctggaaaagagcgtgtcggagacttggaaggcccttctggagagcttgaaaaagttgggcaagagtaaccaggtggaagctgagggtgcagacgcaggccaggccccagaggctggctgatggcccagggccccctcccctcctgaacactgagaagtagtggactccaagaaaggtggatacccccctcatccaatctgaatctcccaaggaggggagccatcttacaaactcttcttgatggtgggatttaaagtttaggatccctaaaagcatttggcaaacatttgttaaatgattgacttaaaaatgaatgagcctctattcaggcccacctcatggtggactcagggggcctcttagtggatcactcttaaaagcacatgaattcagttccacccgggactggactacacctactactggacacacctgagggcagttccccttttaagagtctgccattacaagctccaagttgcttcattctatattcaaagcatcacttgttgcataagcacagaagtctaaaaaaatttactggccatgctgtcatgttttttttaaatgccaatattgacaggtcagccattttatttgtataattgtggaaggtgggggatgttatacttttctaagagaatgcactctccaaagcactgggggctcacaagaggaattcttcaacgatggggcaaacgaacttaaagacaggattattttcctcaccaaatacatagttaaaggctatttctgtgtcacattcttatgccctcacttagcctggagtgagctatgggctgaggaagtcaggttgttagcatattctggcaacatcccacccctaacgtgccacgcaacctcctttggcttatctgtggaagcactgggttagatggttgccttttactggaagaggagcaacaattagacaagagtccactctttggagaccaggcctcacctcttggagggcccaggaacacccatacaggtggccatgacacccccatggacaacatgaattgtctacagtggaggcccaaacatcctctgggagcttcttcctgtttctttccccagctacccatcctgcaaggcaatatttctggaatgcctccatatttaaagaagattccttgagacagtccatctttctgcgctagtgacagtaagagaagtttttaatttctctcagaaaagcgaaaaaagggaagcttttacgggaaggagaggaggacttcattgctgttctaatgtgttcagtggggagaaaagttaagacttccggtgctgcctggggcatgttctggggctctagttctcccaggcgttaggatcagatcaagatatttggatactatcaaacgctggtcccaggtttaattagacttctgaatcttcttgagaccaaagagtggtccacattgaacatgctgagggagtcagccacctctgagggtcctgtaactctctcccctcaggagtactgagaaccatcatgaaagtctgctctaggccacgtgtaactatctgttaacacctgtatcatagacaataaaaattatattgtgtg

SEQ ID NO: 1103 - DNA, 557 bp, Canis familiaris
  misc_feature (5)..(5): n comprises a, c, g, or t, or includes no nucleotide
  misc_feature (67)..(67): n comprises a, c, g, or t, or includes no nucleotide
  misc_feature (74)..(74): n comprises a, c, g, or t, or includes no nucleotide
  misc_feature (77)..(77): n comprises a, c, g, or t, or includes no nucleotide
  misc_feature (79)..(79): n comprises a, c, g, or t, or includes no nucleotide
  misc_feature (82)..(82): n comprises a, c, g, or t, or includes no nucleotide
  misc_feature (553)..(553): n comprises a, c, g, or t, or includes no nucleotide
tcttnaaactttcatatagcactcattacctaaaattatgcaattgattccattgcgggattatgcnggattcnaangntangcttggtaagatagggcctttccatyccacactgtcctagaataatcccctggtttttcccttttttatagtatctatcactaactgacattatacttttgcatttatttgtctttccccatatkggaatgtaaactccaggaacgtagagactgttttctttgagtccacactacacagaatagtgcaattttttaatgcatgaatraacaaatccagccattctctgtttaacagtaaagtacaacactamgcatgtcactgtctttagtccacaggactcctagtttccaaaggaggtccaatctgggataatgacttggagctaagtcaaaccctttacctttgctgtaacataacagacttcaaactggagtttaccccaaggactacataggtaaatggctttaaaagagctcactyccaggacacctgggtggctcagtggttgtcggctctgtcttcggcgtnaggg

SEQ ID NO: 1104 - DNA, 583 bp, Canis familiaris
tgcatygtkagcstctcctagtaaackgakwkgtctgctattgtcactgcaaatagagatctattaatgggtctcacctcccaactgattccaactctggtctgcttactagcactcaccagcacctttgtccacggacataacttcaatattactattaaagagatcatcaaaatgttgaacatcctcacagcgagaaacgactcgtgcatggagctgactgtcaaggacgtcttcactgctccaaagaacacaagcgataaggaaatcttctgcagagctgctactgtactgcggcagatctatacacacaactgctccaacagatatctcagaggactctacaggaacctcagcagcatggcaaacaagacctgttctatgaatgaaatcaagaagagtacactgaaagacttcttggaaaggctaaaagygatcatgcagaagaaatactacaggcattgaagctgaatattttaatttatgagtttttamatagctttattttaaaaatatttatatatttataacataataaaataaaatatatatagamwmwaawawaaaaaaaaaaaaaaaaaaa

SEQ ID NO: 1105 - DNA, 400 bp, Canis familiaris
tccttacttaagctgtattgttttattaatgaagtagctcattgcttcaaaaaccctatttcagaagactagtccaaccttatttaccgtgactactactctgattagataattgatactaacaggtctgaaaccaggcgggatcttaggtattactgctaacaggatagcttgcggcagttttacacacacacacacacacacacataggtattttgtgattttcaaaaatccatattaggtgactttgcttttatgagagacctgcatccatacatgttttgctaactaaaagaaatatgaaaaggattttcccttttacaggaaaaggtgaaaagcaaaaaatgttgtgttttgcagcaaaccattgtagagacagcactcactccctagcagtgag

SEQ ID NO: 1106 - DNA, 367 bp, Canis familiaris
  misc_feature (340)..(340): n comprises a, c, g, or t, or includes no nucleotide
gatcactccgagggtttggttagactctttgtgttgggagcagagaaccactcccccagttctagtaaagaccacccattccaactgatggaaacttgtggaaattcaaagacagaagcccaagatagccatgactcaagggaacttgactctagaactagtctaaagctttcacattaaggtaggtctgtccctgtgtgtgtgtgtgtgtgtgtgtagtgtctgtctctcacactcacacattctctctgcctttctccttcactctcagcctcttctctctacctttcttcagctgtcatgacccattagagatttcactcccgcacttgactactanagattcccaaaatagtccgattggccc

SEQ ID NO: 1107 - DNA, 867 bp, Canis familiaris
tgcttctgacctctggcctttgggcaggctcagtatctttacttggaacacttttcttctgtgaactctgtctggctgcmttctattcgccacccaagtcccattaaaagtcaccttccacgggctcctctgcwatatgcwctcaaagcattgtacttcttccttccttcctacatcctctctgctagtgctagttgatttttcatcttgvtcatatkccccttacgagcacattcactgctctattccagaggatgtacaatgcmtagmatacagtaggcataaatatctgtgaagctcagctgaagttaaatatatatgtttatctgatattgtacatatcagcataaatatatgcacataacagttgggggttttgtttcggttttaaattccatgatactgctgtcctctgagcctctctccatagaawtaggggtctgactgaaggtatctatcatccaragtccatgtatatctacagcagtgtttcccagtatktttatattatcccactgctattattagacacwktkgtycaatcacmcawrccctgtgwagwtttaataccacacacacacacacacacacacacacacacacacaatawctctttatgtastgtggccctttctttggagggtctataatcattatracatgtaagaatttttgctcctcaaaatcaattttcacccattggggcaatatwgcccttsttgacaatgtactatctatctatatytccatgtctatctgtcwgtctctgtttatatctatcatgtttcttaatctagggagaaarggagtscgggagggaaggaaggaggaagagagaaagaaggagagacaaaatgtccaattgtc

SEQ ID NO: 1108 - DNA, 399 bp, Canis familiaris
aattcccatttcatttcttcattcaagtgagtcagtcatattgctttttatggggatccaaaccatgcttgcttttgtcatctgggtctcatctgaaaaactgtagggcaatgcaagccacagattggctctgagacatgtgctcaagcatgtatgttcagagatggcaaaatcaatctcttttgctctgtctctccccatctctcagcctctgtatctctgtctctctcatacatgcacacctgcacgtgcacacacacactcacacacactatagctgactcagcctctcccaattagaacagaatgtcaaaaatccaactgagatttcaactttccctccttgttgactgcatccaactgcaagacgccagcagaatctgccactccatacacggg

SEQ ID NO: 1109 - DNA, 367 bp, Canis familiaris
ttaatgatgtgtgtcccaacacaaggtggtagaagctccacagagccacccagaggtggatgctgcatctgaacacactgacctcctcttcttggtggcagggaaataaggagctggatggttgtataatggctctcatgtgttttgacttgaagcaacacaaatcacttctggacccagaccttagccacaacgagtcatgtgagtcagccagctgtgaagggcccggtgagctagggaagctgaagggactctgttttagaaaggttctggttttctgctgggtctcatttctgaataagctaaagaagctatgttcctacttcacaaggggagcaagaaagttaataatcctctgagttttgtc

SEQ ID NO: 1110 - DNA, 415 bp, Canis familiaris
ttagcagaaccaagagtcagatgcttaactactgagccccccagctgcccctatctatgtttttaaaattaagagaaattgaaatgaattgaataaatcctaaggcatttgacacatctgacctcttctccttgaaattcttttctgccttgggtcccatgtctctctgttctcccacgtatctgaaggcttcttctctgacttcactgcacctctgtatctttcttctgaactactgctgtccttcagagttattccctttggctgcctgggcccccactatgtggtctccatgtaagcccctttacttcccaggttcacctgccatatttctcctggtaaaattccaacacctctctcctaagattcacacacacacacacacacacacacacacacacacaactgtattagc

SEQ ID NO: 1111 - DNA, 731 bp, Canis familiaris
ccactgaagcacccagacacctcagaracaggctargtttytcaaactgagctttcttattaggaaaaattccaaatcctgagatacattttccagacagagaagtgagatgcacttwcattttatcttaggcttcatgagaatatttacacacacacacacacacacacacacaaccagggtggcctttgtgtgctagtaagttcaaagatgcaaatgaaaacataatgcctgttcttttacttacttctattagtagtaaagtctcgggcactgytaacattttggagtttgttgccaacattaaatatggaaggaaatgataaatatcatttagagtgcaggaaccaagggcaggccactcaagatgggctactttggcgtgaagattacttggagtcaaaagcaatccatcaggggtgcttgggtggctcaattggttaagtgctgcctttagctcaggtcccgggcttgagccctgcatcaggctctctgctcaggctchctgctctgtttctctctctccchctactgctgccctctactcctgctttctctctctctcaaataaataaataaaacctaaattaaaaaaagcaatccatgcccagaagtcagtggcatttctatacacaaacaatgagactgaagaaagagaaattaaggagtcaatcccatttacaattgcacccaaaagcataagatacctaggaataaacctaaccaaaaat

SEQ ID NO: 1112 - DNA, 379 bp, Canis familiaris
  misc_feature (242)..(242): n comprises a, c, g, or t, or includes no nucleotide
  misc_feature (334)..(334): n comprises a, c, g, or t, or includes no nucleotide
cccctgtttagggcgaggtaggatttgacagcaccattcattcagatggagccacatccgggactcacaccctaagagcaacagcagcaagctcttggcccaaggggcgtggccatgcyaacacacaacttgtgtgtgtgtgtgtgtgtgtgtgtgtacacagacattgctggctttgaagttactcccagccatagaagactaakaataaaccactcggakakakaagttcakcagctgtntactgggagtgtaaaagcaaatgaatggggctcatcatacattcagacaccacatcaagcccctcattatgctcacttagtgtttgaggacnacccaagagatgggtaacaggctggaatgaatatgggaccccggt

SEQ ID NO: 1113 - DNA, 389 bp, Canis familiaris
tctggggagtgagcagaagagagctgggttggggggactgaggtgaggcagcatcttgtggaaggggcttttgaaccctcaagaaaagacaacaagctcaagaaatctaagagggagagaagtagcaggagggcgctgcaagttatgagagcgtcaatgctgggaaaccaggatggagaaaggtctagagaagtagcccacgacacacacacacacacacacacatacacaaacacacacacacacaatcctcagagtgacttaaggtcttgaggcacccttatcacccatcttgtwgtgtagtgagtgataactggtctctcttcccccctggatttcagtttcctataagaaccacgggcttggggtttaggggcctttgttctcag

SEQ ID NO: 1114 - DNA, 427 bp, Canis familiaris
  misc_feature (189)..(189): n comprises a, c, g, or t, or includes no nucleotide
atgactttgcttttcatttgtttgttctatttcttcattcaatgaattctatcaagtgctaagaatgaagtattatatgagggctgccactgtaaatacggaagacagattgtcctctcctgtgaaccttgaattgcgtgtgtgtgtgtgtgtgtgtgtgtgtgtgttgggtgtggggacaaccagganagcagatgctcagagcccagtgggggcagtgcagtctttgagggagtggtgagggggcctgggagagcacagagctgggcgagtaaccagctggaggcccattgatgactttgtggaaaaagtgatgactgcgggaacactaaggtagcagggcatctgcaagaggtcagggcaggtggaggagaatacacagtttcaggaggaaggtggctatttactggtgwgtggtcactccttc

SEQ ID NO: 1115 - DNA, 2591 bp, Canis familiaris
gggtcactttatataagggcctgggggggggtcagagcctgaagtcgtcctgccggagccctgggtggccaagctcaggcctcagcagcactcttgggactgagccgcccacggggcagccgccaggaccgcagccatgaacgggacggagggcccgaacttctacgtgcccttctccaacaagacgggtgtggtgcgcagccccttcgagtacccacagtactacctggctgagccatggcagttctccatgctggctgcctacatgtttctgctgatcgtgctcggcttccccatcaacttcctcacgctctacgtcacagtccagcacaagaagctgcgtacacctctcaactacatcctgctcaacctggctgtggctgacctcttcatggtcttcggtggcttcaccaccaccctctacacctctctgcatggatactttgtcttcgggcccacaggatgcaatgtggagggcttctttgccacactgggcggtgaaattgccctgtggtctttggtggtcctggccattgagcggtacgtggtggtgtgtaagcccatgagcaacttccgttttggggagaaccatgccatcatgggcgtcgccttcacctgggtcatggcgctggcctgtgcggcaccccccctcgctggctggtccaggtacatcccagagggcatgcagtgctcatgtgggatcgactactacacactcaagccagaaatcaacaatgagtccttcgtcatctacatgttcgtggtccacttcgccatccccatgattgtcatattcttctgctatggacagctcgtcttcacagtcaaggaggcagctgcccagcagcaggaatcggccaccacccagaaggctgaaaaggaggtcacccgcatggtcatcatcatggtcatcgctttcctgatctgctgggtgccctatgccagtgtggcattctacatcttcacccaccagggctccgactttggccccatcttcatgaccctcccagcgttcttcgccaagtcctcctccatctacaaccctgtcatctatatcatgatgaacaagcagttccggaactgcatgatcaccaccctctgctgcggcaagaacccactgggtgacgacgaggcctctgccagcgcctccaagacggagaccagccaggtggcaccggcctaagccctgccaaggactctacggccgattgtaggagtctcccattccctacacctaccccagccacagctgccccacaggagtcagtcctgtcagaaccaggttacagagtctccctgagtttggaaaacaaacaaaaaaagaattaatgagagaagtagagaagatgaggctccccactcggcaaggagcttgctccatctggagtcgagttcccaggggcagtgggatctctgcccctcctccccccaactcatctctcaggaacacaagaactcttgctctctggaaaagtgtcccagcttagggataagtgtctagcacagagtggggcacacagtaggtgcttaataaatgctaggtggatgagggaaggaacgaatggaggaatgaatggaggaatgagtgggctgggagagcatatctatcctctgaaaacaccttagcagcagcagctcaccctcagctgatgaccctgagcagttgtttccctccctgggaaacactttctttccctgaaaaatggaaatcccaaatccctggccctgccaacacatggctgctgtgaaagatcmaacaagattttgtgtgtgtgtgtgtttgtgtgtgccagtgtgtgtgcatgtgtgagcactttgtaaatggtaaagagctgtacagattgtagttaacatyatgaatatcaatataattaattaatatgksatctcctcttgatagtgaccattttgagatcgggcaaagcctgagcatacagcctgagcagaatttttaatattagccaggagtcaaggccagaccagggctgatggctgggcagcagggagggacagtcaagggaacacaaaacgcagtcatcgggattgaaaaaatgtcagggcactggggtctggaccaaggcccagcgtctcacctctggcatggagctgcaggcccggtgcttccccttcccaatacggcctagggagaaacaagcctttctttcagcttctgcaaaccacccactctcctgcccagcagctaggccacagcaactctgggccagcttggagcttctagaagccatatttacctgcctacatttaatgaagagctgattccccagtgtcacccttgtctcaaagagcttagaaacaaaaagtaggaaattcagatggactcaccttccctagggatgttcacaggtcccagattccagcttctttgctgggtgagcccgtcttaatagctccactccattctccattctggagagtccttggtgcaaagctggccagaactctgggcatctgaatcgagctgcctacataactgcccccccccccccccataaccaaaacacgaagctctagctctccctggctcagcctggagactaagcaaattggggcattaaaagctcagctcctat

SEQ ID NO: 1116 - DNA, 367 bp, Canis familiaris
caggtcgactctagaggatcttttatggcaaaattgccttatgaccaactagctatacgggaaaatgctttcagcaaagatgcttacagtgaaaccacttagaacctttgaagatatatgcacctctatgttcattaccgcatcattcacaatatccaagatatagaaacaactgamgtgctcaacgatggatggatggacaaatatgtgtgtacacacacacacacacacacacacacacacacacacgcaatggaatactcagccattaccaaaaaaatgaaatacttgtaatcaggacatcaatgggccttgaggtactaagtggaataagtcaaaagagagagacaacatatgatttgttgtc

SEQ ID NO: 1117 - DNA, 725 bp, Canis familiaris
  misc_feature (120)..(120): n comprises a, c, g, or t, or includes no nucleotide
  misc_feature (123)..(123): n comprises a, c, g, or t, or includes no nucleotide
  misc_feature (125)..(125): n comprises a, c, g, or t, or includes no nucleotide
  misc_feature (127)..(127): n comprises a, c, g, or t, or includes no nucleotide
  misc_feature (150)..(150): n comprises a, c, g, or t, or includes no nucleotide
  misc_feature (532)..(532): n comprises a, c, g, or t, or includes no nucleotide
  misc_feature (540)..(540): n comprises a, c, g, or t, or includes no nucleotide
gaggatcagatagtatttgtctgtctgtctttctttttaaagattttattgatttaggtatgagaaacacagagagcggcagagacacaggcagagggagaagcgggctccctgcagggngtngntnggggactcgatcctgggaccccngggtcatggcctgagctgaaggcaggtactcaaccactgggccgcccaggagccccagtatttgtctttctctgttaattcactcagcataatgccttcagggttccccatgttgtaacaagtgataggatttcctcacttttttttatggctgaataatatccctgtgtgtgtgtgtgtgtgtgtgtgtgtgtgtgtgtatcacggcttctttatccctttcatcccgtcaatggataacttaaggttgtgtccgtgtcttggttattataaataatactgccctgcatgtgggggtgcagatgtgttttcaagttagggtttttatttcctttggatgtatttccagaagtggaatttcaggatcctgtggtagttctantaaaaatnttttggagggtcctccatactgttttatgtagtgactgtataaattgacgttcctaccaagtgcacaaaggttcccctttctccatatttttaacagcattttcttgtctttttggtggtggcccttctaccaagtgtggggtggtatctccttgtgcttttgatttgcgtttccctgatgattg

SEQ ID NO: 1118 - DNA, 399 bp, Canis familiaris
cgmacaagcaaggcagaaaagtctatcgaatgcgaggagtgtgggaagcatttctctcacgctggggctttgtttacacacaaaatggtgcataaggaaaagggaaccaacaaaatgcacaagtgtaaattctgtgaatatgagacagctgaacaaggcttattgaatcgccaccttttggcggtycacagcaagaactttcctcatatttgtgtggagtgtggtaaaggttttcgtcacccgtcagagctcaaaaagcacatgcgaatccacactggsgagaagccataccagtgccaatactgcgaatataggtctgcagactcttctaacttaaaaacacatktgaaaaccaagcataktaaagaratgccattcmagtgtgacatctgtcttctg

SEQ ID NO: 1119 - DNA, 407 bp, Canis familiaris
ggsaccagcaaagcagagaaggccattgaatgcgacgagtgtgggaagcatttctctcatgctggggctttgtttacgcacaaaatggtgcataaggagaaaggagccaacaaaatgcacaagtgtaaattctgtgaatacgagacagctgaacaagggttattgaatcgccaccttttggcggtccacagcaagaactttcctcatatttgtgtggagtgcggcaaaggttttcgtcacccatcagagctcaaaaagcacatgcgaatccacactggggagaagccgtaccagtgccagtactgcgaatataggtctgcagactcttctarcttgaaaacacatgtwtaaaactaagcatagtaaagagatgccattcmagtgtgacatctgtcttctgaataaaa

SEQ ID NO: 1120 - DNA, 826 bp, Canis familiaris
gcgggctgggcaggggcttgcgcctccgcggcagccatggcgtatcacggcctcackgtgcctctcatcgtgatgagcgtgttctggggcttcgtcggcttctgcgtgccctggtttatccctaagggtcccaaccggggagttatcatcaccatgttggtaacctgttcagtttgctgctatctyttttggctgattgcmattctggcccamctcaaccctctctttggaccacagttgaaaaatgaaaccatctggtacctcargtatcattggccttgaggaggaagacctgctctccagcgctcagtcaytgaggtcacgaagagaattcctctagatgcmaaatcractccmaacccagaccgccttctttgacttgcctattttggccatcagctgccttaracattcacaccatatttgaatatcttattctacaatgcagtattttttcctgttgcctttttttacattttgatgaattatgtgcctacttaaactgtgctgactccataaaatgtttatgcactcttctgagatagagggtgctattcttctgagaaatacattgctctctccttggaacctgtgaatttgaagatgactcctgcctggtcacaacatgagaatcagcmaagtgtttaaaaactgtcacaagacaaggcagtcagtaggagagcatgttcagagggaatatctgtcccaacagaattacaccmaagtatattttcaggatgrctttcttatttctgccatctactggaataaattatttttcagctttctgtggaaaaaaaaaaaaaaaaaaaaaaaaaaaaaaaaa

SEQ ID NO: 1121 - DNA, 772 bp, Canis familiaris
tggggtaccggcctcatgcgtgacttcgaaggcacgttccaacgtggaacacagtcacagatgatgactatgctggcttcatctttggctaccaggacagctccagcttctacgtggttatgtggaaacagatggagcagacatactggcaggcgaatcccttcagggccgtagctgaacccggcattcagctcaaggctgtgaagtcctccacaggccccggggagcagctgcggaatgcactctggcacacaggggacacagcatcacaggtgcggctgctgtggaaggacccccgcaacgtgggttggaaggacaagacatcctaccgctggttcctgcagcatcggccccaagtgggctacatcagagtgcggttctacgagggtcctgagctggtggccgacagcaacgtggtcctggacacaaccatgcggggtggccgcctgggggtcttttgcttctcccaagagaacatcatctgggccaatctgcgctaccggtgcaatgacaccataccagaggactacgagactcagaggcttctgcaggcctagggatgggggtggggacccattgctggaagatggcaccatcgtggctaccctcactgcaacaaacagggagcttggcacccggctccaagaggtagctgccctagaggggctcagaaaggacaaaataaagtgtgtgtggtggaaaaaaaaaaaaaaaaaaaaaaaaaaaaaaaaaaaaaaaaaaaaaaaaaaaaaaaaaaaaaaaaaaaaaaaaa

SEQ ID NO: 1122 - DNA, 690 bp, Canis familiaris
tatgctgggcttcatcattggccaagcaggcagctccaagcttctaccgtgggtaatgtggaaacaratgggagcaracatactgcagcgratccyttcaggsccbtakctgaacccggsattcagctcaaggctgtgaagtcctccacargccccggggagcagctkcggaatgcactctggcacacaggggacacagcatcacaggtgcggctgctgtggaaggacccccgcaacgtgggttggaaggacawgacatcctaccgctggttcctgcagcatcggccccaagtgggctacatcagagtgcggttctacgagggtcctgagctggtggccgacagcwacgtggtcctggacrcraccatgcggggtgsccgcctgggggtcttttgcttctcccaagagaacatcatctgggccmatctgcgctaccggtgcaatgacaccataccagaggactacgagactcagaggcttctgcaggcctagggatgggggtggggacccmttgctggaagatggcaccatcgtggctacccgtttgttgctcactgcaacmaacagggagcttggcacccggctccaagaggtagctgccctagaggggctcagaaaggacmaaaataaagtgtgtgtggtggaaaaaaaaaawaaaaaaaraaaaaaaaaaaaaaaaaaaaaaaaaaa

SEQ ID NO: 1123 - DNA, 672 bp, Canis familiaris
agcctccctccggcccgtccgggggcggctcgtcgtctttggtggactctagataacctcggccgatcgcacgccccccgtgsgcgacgacccattcgacktctgccctatcmactttcgatggtagtcgccgtgcctaccwtggtgaccacggktgacggggaatcagggttcgattccggagagkgagcctgagawacggctaccacatccaaggaagkcagcaggcgcgcaaattacccactcccgacccggggaggtagtgacgawaaatmmcwatacaggactctttcgaggccctgtaattggaatgagtccactttaaatcctttaacgaggatccattggagggcaagtctggtgccagcagccgcggtaattccagctccwtagcgtatattaaagttgctgcagttwaaagctcgtagttggatcttgggagcgggcgggcggtccsccscgaggcgagccaccgcccgtccccgccccttgcctctcggcgccccctcgatgctcttagctgagtgtcccgcggggcccgaagcgtttactttgaaaaaattagagtgttcaaagcaggcccgagccgcctggataccgcagctaggaataatggaataggaccgcggttctattttgttggttttcggaactgaggccatgattaaaagg

SEQ ID NO: 1124 - DNA, 726 bp, Canis familiaris
acgtggacaccagtcacagatgatgactattctgtcttcatcttttgggctaccaggacaggctccagcttctaacgtgggttatgtgggaaacagatggagcaagacatactgcaggcgaatcccttcaggccgtagctgaacccggcattcagctcaaggctgtgaagtcctccacaggccccggggagcakctkcggaatgcactctggcacacagkggacacagcatcacaggtgcgkctgctgtggaaggacccccgcwacgtgggttggaaggacwagacatcctaccgctggttcctgcagcatcggccccaagtgggctacatcagagtgcggttctacgagggtcctgagctggtggccgacagcaacgtggtcctggacacaaccatgyggggtgbycgcctgggggtcttttgcttctcccaagagracatcatctgggccaatctgcgctaccggtgcaatgacaccataccagaggactacgagactcagaggcttctgcaggcctagggatgggggtggggacccattgctggaagatggcaccatcgtggctacccgtttgttgctcactgcaacaaacagggagcttggcacccggctccaagaggtagctgccctagaggggctcagaaaggmmmaaaataaagtgtgtgtggtggawaaaaaaaaaaawaaaaarawaaawawaaaaaaaaaaaaaaaaaaaaaaaaa

SEQ ID NO: 1125 - DNA, 700 bp, Canis familiaris
cacaagatgatgactatctggcgttatcctttggctaccaaggacagctccagcttctaacgtggktartgtggaaaccwgattggagcagacatwctggcaggcgaatccyttcagggccgtagyytgaacccggcattcagctcwargctgtgaagtcctccacaggccccgggragcakctgcggaatgcactctggcacacaggggacacagcatcacaggtgcggctgctgtggaaggacccccgcaacgtgggttggaaggacaagacatcctaccgctggttcctgcagcatcggccccaagtgggctacatcagagtgcggttctacgagggtcctgagctggtggccgacagcwacgtggtcctggacacaaccatgcggggtggccgcctgggggtcttttgcttctcccaagagaacatcatctgggccaatctgygctaccggtgcaatgacaccataccagaggactacgagactcagaggcttctgcmggcctagggatgggggtggggacccattgctggaagatggcaccatcgtggctaccctcactgcaacaaacagggagcttggcacccggctccaagaggtagctgccctagaggggctcagaaaggacaaaataaagtgtgtstggtggarwrrmmaaaaaaaaaaaaaaaaaaaaaaaaaaaaaaaaaaaaaaaaaa

SEQ ID NO: 1126 - DNA, 1294 bp, Canis familiaris
tgctcgtcagggggccggagcctatggtatacgccagcgacgcggcctttttacggttcctggccttttgctggccttttgctcacatgttctttcctgcgttatcccctgattctgtggataacctgtattaccgccgttkgagtgagctgataccgctcgccgcagccgaacgaccgagcgcaagcgagtcagtgagcgaggaagcggaagagcgcccratacgcaaaccgcctctgccccgcgcgtkggccgattcattaatgcagagcttgcaattcgckstttktcaatatkatkgaagcatttatcagggttattgtctcatgagcggatacatatttgaatgtatttagaaaaatawacaaataggggttccgcgcacatttccccgaaaagtgccacctgacgtctaagaaaccattattatcatgacattaacctataaaaataggcgtattacgaggccctttcacgcattagatgcatgtcgttacataacttacggtaaatggcccgcctggctgaccgcccaacgacccccgcccattgacgtcaataatgacgtatgttcccatagtaacgccaatagggactttccattgacgtcaatgggtggagtatttacggtaaactgcccacttggcagtacatcaagtgtatcatatgccaagtacgccccctattgacgtcaatgacggtaaatggcccgcctggcattatgcccagtacatgaccttatgggactttcctacttggcagtacatctacgtattagtcatcgctattaccatggtgatgcggttttggcagtacatcaatgggcgtggatagcggtttgactcacggggatttccaagtctccaccccattgacgtcaatgggagtttgttttggcaccaaaatcaacgggactttccaaaatgtcgtaacaactccgccccattgacgcaaatgggcggtaggcgtgtacggtgggaggtctatataagcagagctcgtttagtgaaccgtcagatcgcctggagacgccatccacgctgttttgacctccatagaagacaccgggaccgatccagcctccggactctagcctaggccgcgggacggataacaatttcacacaggaaacagctatgaccattaggcctatttaggtgacactatagaacaagtttgtacaaaaaagcaggctggtaccggtccggaattcccgggatgctaattttaaataaagacctgatcaaagacagtgagaaaaaaaaaaaaaaaaaaaaaaaaaaaaaaaaaaaaa

SEQ ID NO: 1127 - DNA, 752 bp, Canis familiaris
ggagaatggcccagtgcccgggcacaggctcaatccacagccccctccgtacccgccgggtaggcccagcagtgacctgggctygcggcctcagtcctctgcsttgcctggactcctctgtacctgggaaatctcagtccccttccccagatgctcccttccctaggtttctgggcccccctctccctcccctgcccagaattcagagtcaagacaagacctacgagtgtccgattgtggaaatgcctggcgggggaccgttgctgtgtgacacmaaatggagttcttcctgatggcaggagccagcatcctgggtgaccactgggcatctgcctgaggcccagggggatttgctcccagctcacatgctggccctgattttatgtgtgttttctaccctgatctcagatatcctgtcgagattcccgactccgcctgaagcctgctctgcgtatcgctgagctgggtgctttttttttgggtcccctgcccccmaactttgttctaggggttatttattgaaatgaagcccatggggctggtcaagggagtaagagggggggtgtccaggccccgtgaaagtcaggcaggggcttcttggttctggggctaagggacacmattctcacaggtttggtgcttggagaccacccccaggggggttgggcagggaatcaattaaagatgcttcatttccmaaaaaaaaaaaaaaaaaaaaaaaaaaaaaaaaaaaaaaaaaaaaaaaaaaaaaa

SEQ ID NO: 1128 - DNA, 691 bp, Canis familiaris
cacccgttcagcctccgctcggcccggccgggggcggggcgccgtcgcattttggtgtactcctagataatcctcgggctcgtatctgcacgccccctcgtgtcgcgacgacccattcgaacgtgtgccctatcaactttcgatggtaktcgccgtgcctaccatggtgaccacgggtgacgkggaatcagggttcgattccggagagggagcctgagawwcggctaccacatccaaggaaggcagcaggcgcgcdaattacccactcccgacccggggaggtagtgacgwwawatrmcaatacaggactctttcgaggycctgtwattggaatgagtccactttaaatcctttawcgaggatccattggagggcaagtctggtgccagcakcckcggtaattccagctccaatagcgtatattaaagttgctgcagtkaaaaagctcgtagttggatcttgggagcgggcgggcggtccgccgcgaggcgagccaccgcccgtccccgccccttgcctctcggcgccccctcgatgctcttagctgagtgtcccgcggggcccgaagcgtttactttgaaaaaattagagtgttcaaagcaggcccgagccgcctggataccgcagctaggaataatggaataggaccgcggttctattttgttgkttttcggaactgaggccatgatta

SEQ ID NO: 1129 - DNA, 729 bp, Canis familiaris
tcgcggggggaattgcgtgcattaatcagattcaaaacccgacccgggtcagcctccctccggccccggccgggggtcgggcgccggcggcttttggtgactctargataacctcgggccgatctgcacgcccccccgtggcggcgacgacccattcgracgtctgccctatcaactttcgatggtagtcsccgtgcctaccatggtgaccacgggtgacggggaatcagggttcgattccggagagggagcctgagaaacggctaccacatccaaggaaggcagcaggcgcgcaaattacccactcccgacccggggwrgtwgtgacgaaaratmacaatacaggactctttcgaggccctgtaattggaatgagtccactktaaatcctttaacgaggatccattggagggcaagtctggysccagcagccgcggtaattccagctccaatagcgtatattaaagttgctgcagttaaaaagctcgtagttggatcttgggagcgggcgggcggtccgccgcgaggcgagccaccgcccgtccccgccccttgcctctcggcgccccctcgatgctcttagctgagtgtcccgcggggcccgaagcgtttactttgaaaaaawwaragtgttcaaagcaggcccgagccgcctggataccgcagctaggaataatggaataggaccgcggttctattttgttggttttcggaactgaggccatgatt

SEQ ID NO: 1130 - DNA, 624 bp, Canis familiaris
gaaggtcaccaagctgctactgacgaggctgctgcaggtcctacaaaggagtatgatgttcaacacgtcctgccctgctgtaacagctgtacgagcagtttasctgggtgtcccaactggcttaacctcactcdaagtgaagacccattstatctcmrggtcacgacggtgggttctcagacttctgactccratgttcccgtgggcttcactaaggtgkttgtgaagctctttgattctgaccccatcrcggtgatgatcccagaagcagtctccaggagacaatcctrwaatttatggagactgtggcagagaaggctcttcaggagtatcgccaaaagcaccgagaggaatgagatgtgaacattgcttctccaaatatgggagggctgagttcctttgaccccaagatgagtgctaggcccctagagagagctctgcatgtcascaagtgaccaggccktgcctcgaggcgctcctgtctcctaacccagctttccttcctctggactccgcactgtaacgcctacgtttgctgatcatgggaagaactcctgtgtgccactaactcrataaaaccgcsmaggaatctgaawaawakwawawtattgtattttatttttt

SEQ ID NO: 1131 - DNA, 738 bp, Canis familiaris
tccacgggaaccccagtcacagattgatgaactatgcgggcttcatctttggctacacaaggacaggctccagcttctacgtggtgtatgtggaaaacagatggagcagaccatacttgkcaaggcgaatcccttcagggccgtakctgaacccggcattcagctcaaggctgtgaagtcctccacaggccccggggagcawdctgcggaatgcactctggcacacaggggacacagcatcacaggtgcgkctgctgtggaaggacccccgcaacgtgggttggaaggacaagacatcctaccgctggttcctgcagcatcggccccaagtgggctacatcagagtgcggttctacgagggtcctgagctggtggccgacagcaacgtggtcctggacacaaccatgcggggtggccgcctgggggtcttttgcttctcccmagagaacatcatctgggccmatctgcgctaccggtgcaatgacaccataccagaggactacgagactcagaggcttctgcaggcctagggatgggggtggggacccattgctggaagatggcaccatcgtggctaccctcactgcaacaaacmgggagcttggcacccggctccmagaggtagctgccctagaggggctcagaaaggaccaaataaagtgtgtgtggtggaaaaaaaaaaaaaaaaaaaaaaaaaaaaaaaaaaaaaaaaaaaaaaaataaaaaaaaaaaaaaaaa

SEQ ID NO: 1132 - DNA, 1736 bp, Canis familiaris
  misc_feature (1017)..(1017): n comprises a, c, g, or t, or includes no nucleotide
  misc_feature (1136)..(1136): n comprises a, c, g, or t, or includes no nucleotide
  misc_feature (1149)..(1149): n comprises a, c, g, or t, or includes no nucleotide
  misc_feature (1345)..(1345): n comprises a, c, g, or t, or includes no nucleotide
gcacgmrssasgmrckrsgcacggtcgccggcgccgctgaccgaggcctgctgggattccagaattggagaaggaggcatgatgaagactctcctgctgctggtggggctgctgctgacctgggacarkgsacgggttctgggagaccaggctgtctcagacaccgagctccaggaaatgtccaccgaaggtagtaagtacattaataaggaaataaaaaatgctctcaagggggtgaaacagataaagaccctaatagaacagacaaacgaagagcgcaaatcactgctcagcaacctggaggaagccaagaagaagaaagaggatgcactaaatgataccaaggattctgaaacgaagctgaaggcgtcccagggggtgtgcaatgacaccatgatggccctctgggaggagtgcaagccctgcctgaaacagacctgcatgaagttctacgcacgtgtctgcagaagtggctcggggctagttggccaccagctcgaggagttcctgaaccagagttctcccttctacttctggatgaatggcgatcgtatcgactccctgctggagaacgaccggcagcagacccacgccctggacgtcatgcaggacagcttcaaccgggcatccagcatcatggatgagcttttccaggacagattcttcacccgggagccccaggatacttaccactactcacccttcagcttattccagaggaggcctttcttcaatcccaaatttcgcatcgcccggaacataatacctttccctagattccagcccttaaacttccatgacatgtttcagcccttctttgacatgatacaccaggctcaacaggccatggatgttaacctgcatagaattccttaccacttcccaattgaattcccagaagaagataaccgcaccgtgtgcaaggagatccgtcacaactccacaggkkgcctgraawtgaaggaccagtgtgrmaagtgccrggagatcttgtcaskgratkgktckbccracvrncbbgcssagbtccasytgcgacargdamywagtdatyccsyscagawbsyggagaagttcmccmrkctytwcsackakctkcyscagtcytdycaggagrwgatgtycdamacgtscknsytsbtgaagcwnctgdhcgrschktttadctggkygtcccvmctgkcwaacctcrctcvrrgtgdagaccymktckatctscmggtcacgacggtgggttctcagacttctgactccmmkgktccsgtgggcttcachaaggtgbtygtgaagctctttgattckgaycccatcmcggtgatgatccmmgaascmgtctycaggdrmnatcckraatttwtggagactgtgkcmgagaaggctcttcaggagkatcgcchaaagcmccgrgaggratgagawgtgmacmttgcttctcchaatatgggagggctgagttccttygaccccmasmtgagygctaggcccctrgagagagctctgcawgtcmccmmgkgaccaggccttscctcgaggcgctcctgtctcctaacccmgctktccttcctstggactccgcmctgtwamgcstacgtttgytgatcatgggaagaactcctgtgtgccmctaactcwwtwaaaccschmrggaawhwrvwwrwdahadwaaaawddraawwaawawavaaawwarrrarhraaaaaawaaawaaaaaaraaaaaaaaaaaaaaaaaaaaaa

SEQ ID NO: 1133 - DNA, 991 bp, Canis familiaris
  misc_feature (517)..(517): n comprises a, c, g, or t, or includes no nucleotide
ccaaccccggttcagcgtccctccgggcccggccgggggcggcctcgtcggcttttggtgactctagataacctcgggccgatcgcacgccccccgtggcggcgacgacccattcgaacgtctgcccctatcaactttcgatggtagtcgccgtgcctaccatggtgaccacgggtgacggggaatcagggttcgattccggagagggagcctgagaaacggctaccacatccaaggaaggcagcaggcgcgcaaattacccactcccgacccggggaggtagtgacgaaaaataacaatacaggactctttcgaggccctgtaattggaatgagtccactttaaatcctttaacgaggatccattggagggcaaagtctggtgccatgcaagccgcggtaaattcccagctcccaatagcgctatattaaagttgctcgccagttaacagctctattggatcctgggagcgggcgggcggtccgccgcgaggcgagccaccgcccgtccccgcccnttgcctctcggcgccccctcgatgctcttakctgagtgtcccgcggggcccgaagcgtttactttgaaaaaattagagtgttcaaagcaggcccgagccgcctggataccgcagctaggaataatggaataggaccgcggttctattttgttggttttcggaactgaggccatgatyargagctctgggtggggcggtgggggtgagggactcattgtagaagggatgcattgctcattcgtgagtagtattaaggtattttgaaactgctaggtgtgctggtgcagatggacactaatgcagcccaccaattggagaatacttcgcttcgtaatattggagcacatgttactgcttcattttggagcttgtggtgttgatgacgttctgttttctgtttgtaaattatttggtaagcatatttctctctaggcgtttttcctttcggttctacacttgtttaaaaaaaaaaaa

SEQ ID NO: 1134 - DNA, 663 bp, Canis familiaris
caggaacttaggtaattcccctccagaattgtcggagaaagttcacccaagctctacggacgaggctgctgcagttcctaccagggaggaagatgttcaacgacgtcgctccctgctgaagcagctgaacgagcagtttagctgggtgtcccmactggctaacctcactcaaagtgaagacccmmttcwatctccaggtcacgacggtgggttctcagacttctgactccmmatgttcccgtgggcttcacwaaggtgsttktgaagctctttgattctgaccccatcacggtgatgatcccagaagcagtctccaggaacmatcctaaatttatggagactgtggcagagaaggctcttcaggagtatcgcccaaagcaccgagaggaatgagatgtgaacmttgcttctccmaatatgggagggctgagttcctttgaccccmagatgagtgctaggcccctagagagagctctgcatgtcaccmagtgaccaggccttgcctcgaggcgctcctgtctcctaacccagctttccttcctctggactccgcactgtaacgcctacgtttgctgatcatgggaagaactcctgtgtgccactaactcaataaaaccgccmaggaawmwraaaaaaaaaaaaaaaaaaaaaaaaaaaaaaaaa

SEQ ID NO: 1135 - DNA, 609 bp, Canis familiaris
tatgtggatcagatggatgcagacattatcttggcagcgaatccccttcaggccgtartctgaacccgcattcagctcaagtctgtgaagtcctccacaggccccggggagcagwctkcggaatgcactstggcacacaggggacacagcatcacaggtgcggctgctgtggaaggacccccgcaacgtgggttggaaggacaagacatcctaccgctggttcsygcagcatcggccccaagtgggctacatcagagtgcggttctacgagggtcctgagctggtggccgacagcaacgtggtcctggacacaaccatgcggggtgsycgcctgggggtcttttgcttctcccaagagracatcatctgggccaatytgcgctaccggtgcaatgacaccataccagaggactacgagactcagaggcttctgcaggcctagggatgggggtggggacccattgctggaagatggcaccatcgtggctaccctcactgcaacaaacagggagcttggcacccggctccaagaggtagctgccctagaggggctcagaaaggacaaaataaagtgtgtgtggtggaaaaaaaaaaaaaaaaaaaaaaaaa

SEQ ID NO: 1136 - DNA, 689 bp, Canis familiaris
cggaacccggtcacagaagatgactatgctggcgtcatctttggctaaccaggacagctccagctttacgttggttattggaaccagatggacaagacatactggcaggcgaatcccktcagggccstagctgaacccggcattcagctcaaggctgtgaagtcctccacaggccccggggatgcagctkcggaatgcactctggcacacaggggacacagcatcacaggtgcgkctgctgtggaaggacccccgcaacgtgggttggaaggacaagacatcctaccgctggttcctgcagcatcggccccmagtgggctacatcagagtgcggttctacgagggtcctgagctggtggccgacagcaacgtggtcctggacacmaccatgcggggtgrccgcctgggggtcttttgcttctcccaagagaacatcatctgggccmatctgcgctaccggtgcaatgacaccataccagaggactacgagactcagaggcttctgcaggcctagggatgggggtggggacccmttgctggaagatggcaccatcgtggctaccctcactgcaacmaacmgggagcttggcacccggctccmagaggtagctgccctagaggggctcagaaaggacmaaataaagtgtgtgtggtggmaaaaaaaaaaaaaaaaaaaaaaaaaaaaaaaa

SEQ ID NO: 1137 - DNA, 619 bp, Canis familiaris
atggagcagacaaactggcagcgaaycccktcagggccgtagctgwaccckgcattcagctcaaggctgtgwagtcctccacaggcmccggggaggcagctgcggaatgcactctggcacacaggggacacagcatcacaggtkcggtctgtctgtggaaggacccccgcaacgtgggcttggaaggacaagacatcctacccgctggttcctgcagcatcggccccacagtgggctacatcagagtgcggttctacgagggtcctgagctggtggccgacagcaacgtggtcctggacacaaccatgcggggtgsycgcctgggggtcttttgcttctcccmagagaacatcatctgggccmatctgcgctaccggtgcaatgacaccataccagaggactacgagactcagaggcttctgcaggcctagggatgggggtggggacccacttgctggaagatggcaccatcgtggctaccctcactgcaacaaahcaygggagcttggcacccggctccmagaggtagctgccctagaggggctcagaaaggaccaaaataaagtgtgtgtggtggarwrrmwraaaaaaaaaaaaaaaaaaaaaaaaaaaaacaaaa

SEQ ID NO: 1138 - DNA, 1054 bp, Canis familiaris
agtaacgccatagggactctcccatcgacgtcaatgggtggagtatttacggtaaactgccccacttggcagtaacatccagtgtatcatatgccaagtacgcccccctattgacgtcaatgacggtaaatggcccgcctggcattatgcccaagtacatgaccttaatgggacttttcctacttggcagtaacatctacgtattagtcatcgctattaccatggtgatgcggtttttggcagtacaatcaatgggcgtggatagcggtttgactcacggggatttccaagtctccaccccattgacgtcaatgggagtttgttttggcaccaaaatcaacgggactttccaaaatgtcgtaacaactccgccccattgacgcaaatgggcgktaggcgtgtacggtgggaggtctatataagcagagctcgtttagtgaaccgtcagatcgcctggagacgccatccacgctgttttgacctccatagaagacaccgggaccgatccagcctccggactctagcctaggccgcgggacggataacaatttcacacaggaaacagctatgaccattaggcctatttaggtgacactatagaacaagtttgtacaaaaaagcaggctggtaccggtccggaattcccgggatctgtcctacaatacagcctctaacaaaactaggctgtcccgaactcctggcaatagaatcgtttacctttataccaagaaggttgggaaagcgccaaagtctgcatgtggcgtgtgtcctggccgacttcgaggtgttcgtgcggtgagacctaaagtccttatgagattgtctaaaacgaaaaaacatgtcagcagggcctatggtggttccatgtgtgctaagtgtgttcgtgacaggatcaagcgtgctttccttattgaggagcagaaaatcgttgtgaaagtgttgaaggcacaagcacagagtcagaaagctaaataaaaaaatgaggatttttttagtaataaaaatcaaaaagcttgatctgttattgctattgtaatttgtgtagtataaaaaa

SEQ ID NO: 1139 - DNA, 614 bp, Canis familiaris
caaactggcccaggcgaatccccttcarggccgtaagctgaamccgggcatttcagctcaaggctgtgaagtcctccacargccccggggagcagctkcggaatgcactctggcacacaggggacaccagcatcacaggtgcggctgctgtggagaggacccccgcaacgtgggttggaaggacaagacatcctaccgctggttcctgcagcatcggccccaagtgtggctacatctagagtgcggttctacgagggtcctgggagctggtggccgacagcaactgtggttcctggacacaaccatgcggggtggccgccctgggggtcttgttgcttctcccaatgagaacatcatctgggccmatctgcgctaccggtgcaatgacaccataccagaggactacgagactcagaggcttctgcaggcctagggatgggggtggggacccacttgctggaagatggcaccatcgtggctacccgtttgttgctcactgcaacaaacagggagcttggcacccggctccaagaggtagctgccctagaggggctcagaaaggacaaaataaagtgtgtgtggtggaaaaaaaaaaaaaaaaaaaaaaaaaaaaa

SEQ ID NO: 1140 - DNA, 715 bp, Canis familiaris
tgacggtcaatgggagtttgttttgcacccaaatccacgggactktccaaaatgtcgtracaactccgccccattggacgcaaatggccggtaggcgtgtacggttgggaggtctatataagcagagctcgtttagtgaaccgtcagatcgcctggagacgccatccacgctgttttgacctccatagaagacaccgggaccgatccagcctccggactctagcctaggccgcgggacggataacaatttcacacaggaaacagctatgaccattaggcctatttaggtgacactatagaacaagtttgtacaaaaaagcaggctggtaccggtccggaattcccgggatcgctgtttcccgtccagtgctgtggtcttgagctcgcttctcccagtgcaattagccgccttgtctgcccccttctcctgacgcagccagacacacagccacataggaaggcgtttgtctctttccggacccattcaagtttgaaggcttcgcctacctgttcttaaactaaaaagatctcaagagtaaacatccaggggcccctgggtggctaagtcagttgagtacaggactcttggggtcgtgagatcgagccccgcatcggactctgtgctcagtgtggagtctgctcgtgattctccctctcactttgcccctttccagcacacccccctcaaactaaataaatcaatcttgaaaaaaaa

SEQ ID NO: 1141 - DNA, 655 bp, Canis familiaris
atttcacacaggaaacagctatgaccacttaggcctatataggtgacactatagaacaagtttgtacaaaaaagcaggctggtaccggtccggaattcccgggattgctgaagcagctgaacgagcagtttagctgggtgtcccmactggctaacctcactcmaagtgaagacccmttctatctccaggtcmcgacggtgggttctcagacttctgactgcccatgtttcccgctgggcttcacctaaggtggttgtgaagctctttgattctgaycccactcaccggtgatgatcccacgaagcacgttctccaggaacacatcctaaatttatggagacctgtggcacgagaaggctcttcacggagtatcgcccaaagcacccgagaggaatgagatgtgaacmttgcttctccmaatatgggagggctgagttcctttgacccccagatgagtgctaggcccctagagagagctctgcatgtcaccmagtgaccaggccttgcctcgaggcgctcctgtctcctaacccagctttccttcctctggactccgcactgtaacgcctacgtttgctgatcmtgggaagaactcctgtgtgccactaactcaataaaaccgccaaggaatctgaaaaaaaaaaaaaaaaaaaaa

SEQ ID NO: 1142 - DNA, 836 bp, Canis familiaris
ccccaccttggcagtacatctagtgtatcatatggcccagttacgccccctattgacgtcaatgacggtaaatggccccgcctggcattatgcccagtacatgaccttatggactttcctacttggcagtacatctacgtattagtcatcgctattaccatggtgatcggttctgcagtacatcaatgggcgtggatagcggtttgactcacggggatttycragtctccaccccattgacgtcaaatggggagttttgttttggcaccaaaaatcaacgggactttccaaaatgtcgtaacaactccgccccattgacgcaaatgggcggtaggcgtgtacggtgggaggtctatataagcagagctcgtttagtgaaccgtcagatcgcctggagacgccatccacgctgttttgacctccatagaagacaccgggaccgatccagcctccggactctagcctaggccgcgggacggataacaatttcacacaggaaacagctatgaccattaggcctmtttaggtgacactatagaacaagtttgtacaaaaaagcaggctggtaccggtccggaattcccgggatcaagagaacatcatctgggccaatctgcgctaccggtgcaatgacaccataccagaggactacgagactcagaggcttctgcaggcctagggatgggggtggggacccattgctggaagatggcaccatcgtggctaccctcactgcaacaaacagggagcttggcacccggctccaagaggtagctgccctagaggggctcagaaaggacaaaataaagtgtgtgtggtggaaaaaaaaaaaaaaa

SEQ ID NO: 1143 - DNA, 776 bp, Canis familiaris
  misc_feature (380)..(380): n comprises a, c, g, or t, or includes no nucleotide
tactggataactgtggtattctagagctttacatgccgacggcgctgaccccctcgcggggggatgcgtgcatktatcagatcrmwccamcysgtcargcctcccwcsgdsycskccgggggybggcbcsssbbbbyttkstgactytakatwrhctysgbccgakygcacgccmhycgtgksbbskvygacccmttsgdacgtctgccytatcvmcbkkygwtgktadwcbcygkgcykaycwtggtgaccacggktgaysggkaatyarggttcgattccggagagggagcytgagadacggctaccacatccmaggwagkcagcaggcgcgcwaattacccactcccgacycggggagstagtgacsvhmdatdmynatacaggactctttcgaggycctgtmattggaatgagtccactktaawtccktwrhcgaggatccwttggaggbcwagtctggtgccakcasccsmgktrattccagctcchrtagcgtatattaaagttgmtgcagktdhahrkctcgtagttggatyttgggwgcgggcggbcggtccgccgcgmggcgagccaccgcccgtccccgccccttgcctytcggsgccccctcgatgctcttagctgagtgtcccgcggggcccgaagcgtttactttgaaaaaawwagagtgttcaaagcaggcccgagccgcctggataccgcagctaggaataatggaataggaccgcggttctattttgttggttttcggaactgaggccrtgawwaaragg

SEQ ID NO: 1144 - DNA, 678 bp, Canis familiaris
  misc_feature (415)..(417): n comprises a, c, g, or t, or includes no nucleotide
acgtgacacagtcacagatgatgactatgctgctcatctttggctaccaggacagctccagcttctacgtggttatgtggaacagatgagccgacatactggcacggcgaatcccttcaggccgtatgctgacccggccttccgctcacaggctgtgagtcctccaccggcccccgggagccgcttccggatgccctttggccaccaccggggaccccagcctccaccggttccgcttcttgtggaaagaaccccccgccaaccttgggtttggaaggaaccaaaccaattccttacccgcctgggttccctgccagcaatcgccccaagtgggctacatcagagtcgggttctacgagggtcctgagctggtggccgacagcaacgtggtcctggacacaaccatgcggggtgnnnccgcctgggggtcttttgcttctcccaagagaacatcatctgggcccatctgcgctaccggtgcaatgacaccataccacgaggactacgagactcagaggcttctgcaggcctagggatgggggtggggacccacttgctggaagatggcaccatcgtggctaccctcactgcaacaacagggagcttggcacccggctcccagaggtagctgccctagaggggctcagaaaggaccaaaataaagtgtgtgtggtggaa

SEQ ID NO: 1145 - DNA, 935 bp, Canis familiaris
ggtaaactgcccacttggcagtacatcaagtgtatcatatgccaagtacgccccctattgacgtcaatgacggtaaatggcccgcctggcattatgcccagtacatgaccttatgggactttcctacttggcagtacatctacgtattagtcatcgctattaccatggtgatgcggttttggcagtacatcaatgggcgtggatagcggtttgactcacggggatttccaagtctccaccccattgacgtcaatgggagtttgttttggcaccacaatccacgggactttcccaaaagttggtamcaaytcssccccatgaacscaaakggscgktaggcgtgtacggtgggaggtcttatataagcagagctcgtttagtgaaccgtcagatcgcctggagacgccatccacgctgttttgacctccatagaagacaccgggaccgatccagcctccggactctagcctaggccgcgggacggataacaatttcacacaggaaacagctatgaccattaggcctatttaggtgacactatagaacaagtttgtaccaaaaagcaggctggtaccggtccggaattcccgggatcggcgctgcgcccggggccgcgatgagctcggcgccggggccccgccgggctgggcctgcagggactgcgtgcgtcgccctgagagcataggcggcccgcgggagcccccgggcaaggcgcttcctgaccggggcagcccgggccgtgtgcatccccgcgggaaccacctcttcctccgcggctgctacggggacctgcgaacattcttccctgccactaactatctctgatagctctagaaatttcgagcctggccatagttagaaagaaagaaaagaaagaaaggaaaggaagaaaggaaaggaagaaagaaaaaaaaaaaaaaaaaaaaaaaaaaaaa

SEQ ID NO: 1146 - DNA, 597 bp, Canis familiaris
acaagtttgtacaaaaagcaggctggtaccgtccgggattcccgggatctgggcccccctctccctctcctgcccagaattcagagtcaagacaagacctacgagtgtccgattgtggaaatgcctggcgggggaccgttgctgtgtgacrcraaatggagttcttcctgatggcaggagccagcatcgctgggcgaccactgggcatctgcctgaggcccagggggatttgctcccagctcacatgctggccctgattttatgtgtgtttctascctgatctcagatatcctgtcgagattcccgactccgcctgaagcctgctctgcgtatcgctgagctgggtgcttttttttggggtctcmctgcccccaaactttgttctaggggttatttattgaaatgaagcccatggggctggtcaagggagtaagagggggggtgtccaggccccgtgaaagtcaggcaggggcttcttggttctggggctaagggacacaattctcacaggtttggtgcttggagaccacccaccaggggggttgggcagggaatcaattaaagatgcttcatttccaaaaaaaaaaaaaaaaaaaa

SEQ ID NO: 1147 - DNA, 975 bp, Canis familiaris
cggtcaatgggtggagtattttacggtaaactggcccacttggcagtacatcaagtgtatcatatgccaaagtacgccccctattgacgtcaatgacggtaaatggcccgcctggcattatgcccagtacatgaccttatgggactttcctacttggcagtacatctacgtattagtcatcgctattaccatggtgatgcggttttggcagtacatcaatgggcgtggatagcggtttgactcacggggatttccaagtctccaccccattgacgtcaatgggagtttgttttggcaccaaaatcaacgggactttccaaaakgtcgtaacaactccgccccattgacgcaaatgggcggtaggcgtgtacggtgggaggtctatataagcagagctcgtttagtgaaccgtcagatcgcctggagacgccatccacgctgttttgacctccatagaagacaccgggaccgatccagcctccggactctagcctaggccgcgggacggataacaatttcacacaggaaacagctatgaccattaggcctatttaggtgacactatagaacaagtttgtacaaaaaagcaggctggtaccggtccggaattcccgggatcggtgatgatcccagaagcagtctccaggaacaatcctaaatttatggagactgtggcagagaaggctcttcaggagtatcgccaaaagcaccgagaggaatgagatgtgaacattgcttctccaaatatgggagggctgagttcctttgacccccacatgagtgctaggcccctaaaagaagaagctctgcaatgtcaccaagtgaccaggccttgcctcgaggcgctcctgtctcctaacccagctttccttcctctggactccgcactgtaacgcctacgtttgctgatcatgggaagaactcctgtgtgccactaactcaataaaaccgccaaggaatctgaaaaaaaaaaaa

SEQ ID NO: 1148 - DNA, 606 bp, Canis familiaris
ggagaagttcaccaagctctacgacgagctgctgcagtcctaccaggagaagatgttcaacacgtcctccctgctgaagcagctgaacgagcagtttagctgggtgtcccaactggctaacctcactcaaagtgaagacccattctatctccaggtcacgacggtgggttctcagacttctgactccaatgttcccgtgggcttcactaaggtggttgtgaagctctttgattctgaycccatcacggtgatgatcccagaagcagtctccaggaacaatcctaaatttatggagactgtggcagagaaggctctttcacggagtatcgccmaaagcacccgagagggaatgaagaagtggaccattggctttctcccaaatattgggaggcctgagttccctttgaccccaagatgagtgctaggcccctagagagagctctgcatgtcaccaagtgaccaggccttgcctcgaggcgctcctgtctcctaacccagctttccttcctctggactccgcactgtaacgcctacgtttgctgatcatgggaagaactcctgtgtgccactaactcaataaaaccgccaggaatctgaaaaaaaaaa

SEQ ID NO: 1149 - DNA, 612 bp, Canis familiaris
ttctttcagtcctaccaggagaagatgttcaacaacgtcctccctcttgaatcagctgatacgatcagtttatctggggtgtcccaatctggctaacctcacttcaaakgtggagacccaytkctatctscaggtcacgacggtgggttctcagacttgckgagctccgartgttcccgtgggcttcactaaggtggttgtgaagctcttggtgattctgaccccatcacggtgatgatcccagagagcagtctgscaggagacaatccgtgaaatttatggagactgtggcagagaaggctcttgcaggagtatcgccaaaagcaccgagaggaatgagatgtgaacattgcttgctccgaaatatgggagggctgagttcctttgaccccaagatgagtgctaggcccctagagagagctctgcatgtcaccaagtgaccaggccttgcctcgaggcgctcctgtctcctaacccagctttccttcctctggactccgcactgtaacgcctacgtttgctgatcatgggaagaactcctgtgtgccactaactcaataaaaccgccaaggaatctgaaaaaaaaaaaaaaaaaaaaaaaaaaaaaaaaaa

SEQ ID NO: 1150 - DNA, 645 bp, Canis familiaris
ggattcccgggattgcagtcctatcagggagaagatgttcaacacgtcgcgaccctgctgaagcagctgaacggagcagtttaactgggtgtcccaactggctaacctgcactcgaagtgagacccacttctatctccaggtcacgaacggtgggttttcagactttctgactgcccaatgttccccgtgggctttccactaaggtggtttgaaagctctttggattctgaccccawtcacggtgatgatcccmgaagcagtctccaggracaatcctaaatttatggagactgtggcagagaaggctcttcaggagttatccgccyaaagcacccgagaggaatgagatgtgaamcattgcttctccmaattatgggaggcgctgagttcctttgaccccmagatgagtgctaggcccctagagagagctctgcatgtcaccaagtgaccaggccttgcctcgaggcgctcctgtctcctaacccagctttccttcctctggactccgcactgtaacgcctacgtttgctgatcatgggaagaactcctgtgtgccactaactcaataaaaccgccacaggaatctgaaaaaaaaaaaaaaaaaaaaaaaaaaaaaaaaaaaaaaaaaaaaaaaaaaaaaaaaa

SEQ ID NO: 1151 - DNA, 651 bp, Canis familiaris
agaatttcgggagaaagttcacccaagcttctacgacgagctgctgcagttcctaccaggagaagatgttcaacacgtcctccctgctgaaagcagctgaacgagcaggagtttagctgggtgtcccaactggctaacctcactcaaagtgaagacccatgtctatctccaggtcacgaacgktgggttctcagacttctgactccaatgttccccgtggggcttcactaaggtggttgtgaagctcttkkattctgaccccatcwcggtgatgatcccagaagcagtctycaggamcaatcctagatttatggagactgtggcagagaaggctcttcaggagtatcgcctataawgcaccgagaggaatgagatgtgaacattgcttctccwaatatgggagggctgagttcctttgaccccaagatgagtgctaggcccctagagagagctctgcatgtcaccaagtgaccaggccttgcctcgaggcgctcctgtctcctaacccagctttccttcctctggactccgcactgtaacgcctacgtttgctgatcatgggaagaactcctgtgtgccactaactcaatawaaccgccaaggaatctgarwaaaaaaaaataaaaaaaaatatgaaaaaaaagaagatat

SEQ ID NO: 1152 - DNA, 821 bp, Canis familiaris
ctgctgcagtcctagcaggagaaagatgttcaacacgtcctcccgtggctgaagcaagctgaacggagcagtttagcctgggttgttccccaacctggctaaccgctcacctcaaagtggaggaccccattctatctcccaggtcacgacgctgggttctcagacttctgactccaatgttcccgtgggcttcactaaggtggttgtgaagctctttgattctgaccccatcacggtgatgatcccagaagcagtctccaggaacaatcctaaatttatggagactgtggcagagaaggctcttcaggagtatcgccmaaagcaccgagaggaatgagatgtgaacattgcttctccaaatatgggagggctgagttcctttgaccccaagatgagtgctaggcccctagagagagctctgcatgtcaccaagtgaccaggccttgcctcgaggcgctcctgtctcctaacccagctttccttcctctggactccgcactgtaacgcctacgtttgctgatcatgggaagaactcctgtgtgccactaactcaataaaaccgccaaggaatctgaatgtgctggggtgtcgtccttttatgctgggcttttctatctcccacacaccttcatcttgacatgggaaaaaaaaaaaagtagaaaagaaaagcactagctaagatggtataaggaatatcatataattgagaataaaaggagtgacaaagttaaaccaaggatttcttgcttttagaagcagagatgtgttccaatggccaagtaaaataaatttctgaaaagtgaaaaaaaaaaaaaaaaaaa

SEQ ID NO: 1153 - DNA, 631 bp, Canis familiaris
agtcctatccaggtagaagtagtgttctacacgtcctccctgctgaatgcatctgatcgagcctgtttacctggtgtccccactggcttacctcactctaagtgtagaccccttcgtatctccaggtcatcgtcggtgggttctcatgacttctgactcccatgttcccgtgggcttcactaaggtggttgtgaagctctttgattctgaccccmwtcacggtgatgatcccagaagcacgtcttccaggkacaatcctwaatttatggagactgtggcagagaatggctcttcaggagtatcgcccaaagcacccgagaggaatgagatgtgaacattgcttctccaaatatgggagggctgagttcctttgaccccaagatgagtgctaggcccctagagagagctctgcatgtcaccaagtgaccaggccttgcctcgaggcgctcctgtctcctaacccagctttccttcctctggactccgcactgtaacgcctacgtttgctgatcatgggaagaactcctgtgtgccactaactcaataaaaccgccmaggaatctgaaaaaaaaaaaaaaaaaaaaaaaaaaaaaaaaaaaaaaaarraaaaaaaaaaaaaaaaaaaaaaaaa

SEQ ID NO: 1154 - DNA, 772 bp, Canis familiaris
gaccgtacaaagcacgaggccgaaatgaggaccagtggaaaaggccaagaatcctgtcackgrwtgktcktccgacaaccygcgcaggtccagctgcgacaggaacttagtwrktcccyccagattgcggagaakttyaccaagctytacgwcgrgctgctgcmgtcstaccaggagaagatgktcracacgtcskscctgctgaagcarstgdacgasmmsttwasctgggtgtcccmactggckaacstcastcrragtrragacccvktctatcyccaggtcacgacggtggkttctcagacttckgackccmawgttcccgtgggcttcacwaaggtggttgtgaagctctttgattctgaycccatcmcggtgatgatcccagaagcagtctccaggracmatcctaratttatggagactgtggcagagaaggctcttcaggagtatcgccmwaagcaccgagaggaatgagatgtgaacmttgcttctccmaatatgggagggctgagttcctttgaccccmagatgagtgctaggcccctagagagagctctgcatgtcaccmagtgaccaggccttgcctcgaggcgctcctgtctcctaacccagctttccttcctctggactccgcactgtaacgcctacgtttgctgatcatgggaagaactcctgtstgccactaactcmataaaaccgccmaggaawhwraamaaaaaaaaawaawaraaaaaaraaaaaaaaaaaaaaaaaaaaaaaaaaaaaaaaa

SEQ ID NO: 1155 - DNA, 729 bp, Canis familiaris
gatgttctccaacaccctgcgcagtccagttgcgacaggcactagtaagtccctccagattcggagaagttcacccaagctctaccgacgagctkctgcagtcctacgcaggagaagatggttcaacacggtcctvcctgctgaagcagctgwacgagcagtttagctgggtgtcccmactggctaacctcactsaargtgwagacccmktckatctvcaggtcacgacggtgggttctcagacttykgactccmatgttcccgtgggcttcacwaagktggttgtgaagctctttgattctgaccccatymcggtgatgatcccmgaagcagtctccaggracmatcctraatktatggagactgtggcagagaaggctcttcaggagtatcgccmaaagcaccgagaggaatgagatgtgaacattgcttctccmaatatgggagggctgagttcctttgaccccmagatgagtgctaggcccctagagagagctctgcatgtcaccaagtgaccaggccttgcctcgaggcgctcctgtctcctaacccagctttccttcctctggactccgcactgtaacgcctacgtttgctgatcatgggaagaactcctgtgtgccactaactcaataaaaccgccaaggaatctgaaaaaaaaawawaaawaaahaawawwaaaaaaaawawaaaaawaaaaaaaaaarrraaagaaaaaaaaaaaaaaaa

SEQ ID NO: 1156 - DNA, 987 bp, Canis familiaris
  misc_feature (985)..(985): n comprises a, c, g, or t, or includes no nucleotide
taccccctcgctggtggatgcgtgcatttatcatgtctttccatccggtcacctcctccggctccgccggggtcggctccgcgtcttttgttgactctagataacctcggcccgatctcacgccccccgtgyyggcgactgacccattcgwacgtctgccctatcwactttcgatggtagtckccgtgcytaccatggtgaccmygggtgtwcggkgaatcagggttcgattccggagakgkgagcctgagaaacggctaccacatccaaggaagkcakcaggcgcgcaaattacccactcccgacccggggaggtaktgacgwwaaatwacwatacaggactctttcgaggccctgtaattggaatgagtccactttaaatcctttaacgaggatccattggagggcaagtctggtgccagcakccgcggtaattccagctccatagcgtatattwaagttgctgcagtkwawaagctcgtagttggatcttgggagcgggcggkcggtccgccgcgaggcgagccaccgcccgtccccgccccttgcmyswsggcgccccctcgatgctcttagctgagtgtcccgcggggcccgaagcgtttactttgaaaaaattagagtgttcaaagcaggcccgagccgcctggataccgcagcyaggaataatggaataggaccgckgttctattttgttggttttcggaactgaggccatgattaagagggacggccgggggcattcgtattgcgccgctagaggtgaaattcttggaccggcgcaagacggaccagagcgaaagcatttgccaagaatgttttcattaatcaagaacgaaagtcggaggttcgaagacgatcagataccgtcgtagttccgaccataaacgatgccgactggcgatgcggcggcgttattcccatgacccgccgggcagcttccgggaaaccamagtctttgggttccggggggagtatggttgcnaa

SEQ ID NO: 1157 - DNA, 724 bp, Canis familiaris
tggcgctgtcaactaggctctggaggaccaccacatctacctggaaggcactttgctgaaggccccataatgggaaaccccaggccatgcctgcacccatraatattctcatgaggagatkgccatggcamytgtcacmagcrctgcgccgcacagtaccccccgctgttactgggatcaccttcctatcaggcggccagagtgaggaggaggcatccatcaacctcratgccatcwacaagtgccccctgctgaagccmtgggccctgacsttctcctatggccgagccctacaggcttctgccctgaaggcctggggtggaaagaaggagaacctgaagkctgcccaggaagagtatatcaagcgagccctggccmacagcctcgcctgtcaaggaaagtacaccccmagtggtcaggccggggctgcagccagcgrgtccctcttcatctctaaccacgcctactaagcggaggtgttctaaggctgccccctcaacactccagcccccaccctctcccactcactcttgaagagagggcctcacctggggctccaggctgctctttcccatcactttggcctcccatgtgacattggtgtgtggtgttgtctgtatatgctaactccgttgctctttccagcccmctgccmataaacaactatttaagggrraaaaaaaaaaaaaaaaraaaraaaaaaaaaaaaaaaaaaaaaaaaaaa

SEQ ID NO: 1158 - DNA, 680 bp, Canis familiaris
cagaccctgcgcagttccagctgcggacaggaactttgtgaattccctcccagaattgcgggagaaggtttcaccaagctctacgacgagctgctgcagtcctaccaggagaagatgttcaacacgtcctssctgctgaagcagctgwacgascagtttakctgggtgtcccaactggctaacctcactcamagtgaagacccattckatctycaggtcacgacggtgggttctcagacttctgactccmatgttcccgtgggcttcacwaaggtggttgtgaagctctttgattctgaycccatcacggtgatgatcccagaagcagtctccaggracmatcctaaatttatggagactgtggcagagaaggctcttcaggagtatcgccvaaagcaccgagaggratgagatgtgaacmttgcttckccmaatatgggagggctgagttcctttgaccccmagatgagtgctagscccctagagagagctctgcatgtcaccaagtgaccaggccttgcctcgaggcgctcctgtctcctaacccagctttccttcctctggactccgcactgtaacgcctacgtttgctgatcatgggaagaactcctgtgtgccactarctcaataaaaccgccmaggaawmwraaaaaaaaaaaaaaaaaaaaaaaaaaaaaaaa

SEQ ID NO: 1159 - DNA, 771 bp, Canis familiaris
ggacctgcctgctttgggtaaccgcctcaattggccttggacttcgaagcacgttgcacgtgaacacagtcacagatgatgactatgctkgcttcatctttggctaccagacagctccagcttctacgtggttatgtgsaacagatggagcagacatactggcaggcgaatcccttcaggccgtagctgaacccggcattcagctcaagrckstgaagtcctccacagkccccsgggakcagctgcggaatkcactctgkcacacaggggacacagcatcacaggtgcgkctgctgtggaaggaccccckcwacgtgggttggaaggacwagacatcctaccgctggttcctgcagcatcggccccaagtggsctacatcagagtsyggttctacgagggycctgagctggtgkccgacwrscwacgtggtcctggacacaaccatgcggggtgkccgcctgrggrtcttytgcttctcccaagagaacatcatctgggccaatctgyrctaccggtgcaatgacaccataccagaggactacgagactcagaggcttctgcaggcctagggatgggggtggggacccattgctggaagatggcaccatcgtggctaccctcactgcaacamacagggagcttggcacccggctccaagagstagctgccctagaggggctcagaaaggaccaaaataaagtgtgtgtggtggaaaaaaaaaaaaaaawahaaartatawaaaaatatataawaattaatataataaaaaa

SEQ ID NO: 1160 - DNA, 740 bp, Canis familiaris
cgtggaagtttataataacagagctcgtttagtgaaccgtcagattcgcctggagacgccatccacgckgttktgacctccatagaagacaccgggmcsgatccagcctccggactctagcctaggccgcgggacggataacvatttcacacaggaaacagctatgaccattaggcctatttaggtgacactatagaacaagtttgtacaaaaaagcaggctggtaccggtccggaattcccgggatcttagtgaggtgcaggggtggctgttgctcgccgagcttcgctatgccgcccaaggacgacaagaagaagaaagatgccggaaagtcggccaagaaggacmaagacccagtgaacaagtctggaggcaaggccmaaaagaagaagtggtccmaaggcaaagttcgagacaagctcaataatctggtgttgtttgacmaagcgacatatgacaaactctgtaaggaggttcccaactataagcttataactccagctgttgtctctgagagactgaagattcgaggttctctggccagggcagcccttcaggagctcctcagtaaaggacttattaaactggtttcaaagcacagagctcaagtaatttacaccagaaacaccaagggtggagatgccccagctgccggtgaagatgcatgaacaagatcccaccaactgtacattttgggaaataaaactttattaaatgaaaaaaaaaaaaaaaaaaaaaaa

SEQ ID NO: 1161 - DNA, 764 bp, Canis familiaris
aagtaggaccattaggcctattaaggtgacactataggaaccaggtgtgtacaaaaaagcggctggtaccggtccggrattcccggratkcycsggadgaggcamaggtgcaactgtctysggtcgtcccgdatccgggttcatccgacaccagctgcytccgccatkccgcytwagttcgaccccracgagatcmaagtcgtgtacctgaggtgcaccggtggcgaggtcggtgccacgtctgcsmtggccccgaagatcggcccgctgggtctgtctcchaaaaaggttggtgatgacatcgccaaggcaaccggtgattggaagggtctaaggattacagtgaaactgaccattcagaacagacaggcccagattgaagtggtaccttctgcctctgscctgattatcaaagccctcaaggaaccmccmagagacagaaagaagcagwaaaacattaagcacagtggaaatatcacttttgatgagattgtcaatattgcccgacagatgcgacaccgatctttagccagagaactktctggaaccattaaagagatcctggggactgcccagtctgtgggctgcaatgttgatggccgtcaccctcatgacatcatagatgacatcamtagtggtgcagtggaatgcccagcgagttaactacmaaggaaaatatttcaataaaggatcatttgacaammmvwrraaaaaaaaaaaaaamwmraraaaaaaaraaaaaaaaaaaaaaaaaaaaaaaaaaa

SEQ ID NO: 1162 - DNA, 711 bp, Canis familiaris
tgtaccaaaaaacaggctggtaccggtccggaattccgcgggatgctcggaggaggcaaaggkgcacacgtgtcttcggtcgtcccgaatccgkgttcatccgacaccarctgcctccgccatgccgcctaagttcgacccchacgagatcaaagtcgtgtacctgaggtgcaccggtggcgaggtcggtgccacgtctgccctggccccgaagatcggcccgctgggtctgtctccmaaaaaggttggtgatgacatcgccaaggcaaccggtgattggaagggtctaaggattacagtgaaactgaccattcagracagacaggcccagattgaagtggtaccttctgcctctgccctgattatcaaagccctcaaggaaccaccacagagacagaaagaagcagaaaaacattaagcacagtggaaatatcacttttgatgagattgtcaatattgcccgacagatgcgacaccgatctttagccagagaactttctggaaccattaaagagatcctggggactgcccagtctgtgggctgcaatgttgatggccgtcaccctcatgacatcatagatgacatcaatagtggtgcagtggaatgcccagcgagttaactacmaaggaaaatatttcaataaaggatcatttgacaammmaaaaaaaaaaaaaaaaaaaaaaaaaaaaaaaaaaaaaaaaaaaaaaaaa

SEQ ID NO: 1163 - DNA, 719 bp, Canis familiaris
acactataggacaagtgtgtacaaaaaacaggctggtaccggtccggratyccsggwytcggagkdgcaaaggtgcaactgtcttcggtcgtcccgaatccgggttcatccgacaccagctgcctccgccatgccgcctaagttcgaccccaacgagatcaaagtcgtgtacctgaggtgcaccggtggcgaggtcggtgccacgtctgccctggccccgaagatcggcccgctgggtctgtctccaaaaaaggttggtgatgacatcgccaaggcaaccggtgattggaagggtctaaggattacagtgaaactgaccattcagaacagacaggcccagattgaagtggtaccttctgcctctgccctgattatcaaagccctcaaggaaccaccaagagacagaaagaagcagaaaaacattaagcacagtggaaatatcacttttgatgagattgtcaatattgcccgacagatgcgacaccgatctttagccagagaactttctggaaccattaaagagatcctggggactgcccagtctgtgggctgcaatgttgatggccgtcaccctcatgacatcatagatgacatcaatagtggtgcagtggaatgcccagcgagttaactacaaaggaaaatatttcaataaaggatcatttgacaaccmrwrrammwwwaaaaaaaaaaaaaaaaaaaaaaaaaaaaaaaaaaaaaaa

SEQ ID NO: 1164 - DNA, 693 bp, Canis familiaris
tatttaggtgacactatagaacaagtttgtacaaaaagcaggctgtaccgtccggaattcccgggatgcaaaggtgcaactgtcttcggtcgtcccgaatccgggttcatccgacaccagctgcctccgccatgccgcctaagttcgaccccaacgagatcaaagtcgtgtacctgaggtgcaccggtggcgaggtcggtgccacgtctgcctggccccgaagatcggcccgctgggtctgtctccaaaaaaggttggtgatgacatcgccaaggcaaccggtgattggaagggtctaaggattacagkgaaactgaccattcagaacagacaggcccagattgaagtggtaccttctgcctctgccctgattatccaagccctcaagggacccacccagagacaggaagaagccaggaaaaccattaaggcaaccagttgggaaaaatcaacctttgaatgaagattgtccatattgccccgacagatgcgacaccgatctttagccagagaactttctggaaccattaaagagatcctggggactgcccagtctgtgggctgcaatgttgatggccgtcaccctcatgacatcatagatgacatcaatagtggtgcagtggaatgcccagcgagttaactacaaaggaaaatatttcaataaaggatcatttgacaaccaaaaaaaaaaaa

SEQ ID NO: 1165 - DNA, 681 bp, Canis familiaris
tttaaagagtagcttgagaaagaaaatgctctttgtagaaaaagacggaggttaagagatgaagcttaatggagtggaaagaaatctaattttagaagaattgttgagaggactgcaaagtccgggattcaataaatcctttaaatctgagggcagcctttcaggttgtcgttgaaatgtaaatgacctaagtagagcctaaatgttttagaccggttgtagatggtaaagatttaaaaagtttgtcttttaaaaagcttaacttgaaggtgwtttaagagcccttcaaattcatgggttagtgattgcgtcatttgacacctagatcttaagctaatccttgctaaaacttgcaaatattaattagtggtaggatgaaaatttgaagagattagaaaattgaagtggagaactcgcaagaccgaagtacaggaaggtgaagatttaaaagaccagaagtaaaggtgaagaaaagacttagagaagataggaaaattggaagaaaaattacacgccttttagaagacaaaataatttaaacctcgaaggcaggaagcagaagaaaaaaatatttagagaagaacaaggcaacaaggtctcagatacaaattgagaaagccagaaattggaaacgaggtggaaaataaggtcagggaaagacatcaggtagaaaatgcaagc

SEQ ID NO: 1166 - DNA, 753 bp, Canis familiaris
gcacgagmrcgakccggaccgcgcagcctaacgctcgtccttggtgcctgcggcatcctctgctttttccccgggcagcgctatcggcggccagaaagtcaccatgtctattctcaagatccacgccagggagatctttgactctcgcgggaaccccactgttgaggttgacctctacacctccaaaggtctcttcagagctgctgtgcccagtggtgcctccactggtatctacgaggccctcgagctccgggacaatgacaagacacgctacatggggaaaggtgtctcaaaggctgttgagcacatcaataaaactattgcacctgccctgattagcaagaaagtgaatgttgtggagcaggaaaagattgacaaactgatgatcgagatggacgggacagagaataaatctaaatttggtgcaaacgccattctgggagtgtccctggctgtctgcaaggcgggggctgtcgagaagggggtgcccctgtaccgccacattgctgatttggctggcaattctgaagttatcctgccagttccggcyttcaatgtcatcaacggtggttcccatgctggcaacaagctggccatgcaggagttcatgatccttcccgtcggtgcagcgaacttcaaggaggccatgcgcattggagcagaggtttatcataacctgaagaatgtcatcaaggagaaatatggaaaagatgccaccaatgtgggcgatgaaggtggatttgctcctaatat

SEQ ID NO: 1167 - DNA, 796 bp, Canis familiaris
  misc_feature (238)..(238): n comprises a, c, g, or t, or includes no nucleotide
ctgaagcackmkggtgtcgccatggktcgccgccccgcccggtgtwaccggtactgtdrgaacaascbgtatccaargtcacgcttcygcagaggtgtcccygatkccmagaktyscatcykkgatctgggssggaarraggcmmaagkkgatgagtyccsmhwatkkksccacmtggtgtmagaygrgtatgascagcyctcctbtgrakchctggagsytgcccgtattkgtkccnwcaagkacayggkgwwaakskgtggchaagatggktttcacatcsgagtkyggctccatcccdkccawgttatccgtatcdmmmrratgttgtcctgtgcwggagctgacmgkctkcagacagdtatgcgaggtgcyyytkggaagcccmagggcacmgtagccagggtccacattggccmagtcatcawgtccatccgtaccmmgctgcagwacmmggagcawgtgattgaggcccwacgcaggscmaagttcaagttbbckggcckccagaagatccacatctccmagaagtggggctttactwagtytaawgcggacgaatttgaagatatggtggccgaaaagcggctcatcccagatggctgtggggtcaaatacatccctaatcgtkgccccttggacmaatggagggctctccactcatgagaaccttgcaccacccgaaccctattcatgcccayvhataaatcctgcttyctgtchaaaaaaaaawaaawmaaaaaawaaawrarrraaaaaaaaaaraaaaaaaaaaaaaaaaaaaaaaaaaaaaaaa

SEQ ID NO: 1168 - DNA, 751 bp, Canis familiaris
cccatggtcccgccccgcccggtgtacccggtacctgtaagaccaagccgtattccaaagtcacgcttctgcagaaggtgtccccgatccaagattcgcatctttgatctgggcggaagaaggcaaagtggatgagttcccattatgtggccacattgktgtcagatgagtatgakcagctctcctctgaagccctggaggctgcccgtatttgtgccmacaagtacatggtgaaaagctgtggcaaagatggttttcacatccgagtkcggctccatcccttccatgttatccgtatcaacaagatgttgtcctgtgctggagctgacaggctgcagacaggtatkcgaggtgcctttgggaagccccagggcacagtagccagggtccacattggccaagtcatcatgtccatccgtaccaagctgcagaacaaggagcatgtgattgaggccctacgcagggccaagttcaagttccctggccgccagaagatccacatctccaagaagtggggctttactaagtttaatgcggacgaatttgaagatatggtggccgaaaagcggctcatcccagatggctgtggggtcaaatacatccctwatcgtggccccttggacaaatggagggctctccactcatgagaaccttgcaccacccgaaccctattcatgcccaccaataaatcctgcttcctgtcaamaaaaaaaaaaaaaaaaaaaaaaaaaaaaamaaaaaaaaaaaaaaa

SEQ ID NO: 1169 - DNA, 692 bp, Canis familiaris
tctgcggaggtgtccccgatgccaagaattcgcatcttgattctgggcggaagaaaggcaaaaatgggatgagtttcccactatgtggccamcmtggtgtcagatgagtwtgacagctctcctctgaagccctggaggctgcccgtatttgtgccmacaagtacatggtgwaaakctgtggcmaagatggttttcacatccgagttgcggctccatcccttgccatgttatccgtatcmacmagatgttgtcctgtgctggagctgacaggctgcagacaggtatgtcgaggtgcctttgggaagccccagggcacagtagccagggtccacattggccmagtcatcatgtccatccgtaccmagctgcagaacmaggagcatgtgattgaggccctacgcagggccaagttcaagttccctggccgccagaagatccacatctccmagaagtggggctttactaagtttaatgcggacgaatttgaagatatggtggccgaaaagcggctcatcccagatggctgtggggtcaaatacatccctaatcgtggccccttggacmaatggagggctctccactcatgagaaccttgcaccmcccgaaccctattcatgccccacccaataaatcctgcttcctgtcmaaaaaaaaaaaaaaaaaaaaaaaaaaaaaaaaaaaaaaaaaaaaaa

SEQ ID NO: 1170 - DNA, 723 bp, Canis familiaris
  misc_feature (439)..(439): n comprises a, c, g, or t, or includes no nucleotide
cggtactgtaaggacacccggtatcccaagtcacgcttctgcagaggtgtcccctgatgccaaagattcgcatctttgatctggggcggaagaaggcaaaagtggatgagttcccattatgtggccacatggtgtcagatgagtatgagcagctctcctctgaagccttggaggctgcccgtatttgtgcccaacaagtacatggtgaaaagctgtggcaaagatggttttcacatccgagtgcggctccatcccttccatgttatccgtatcaacaagatgttgtcctgtgctggagctgacaggctgcagacaggtatgcgaggtgcctttgggaagccccagggcacagtagccagggtccacattggccaagtcatcaagtccatccgtaccaagctgcagaacaaggagcatgtgattgaggccctacgcaggnccaagttcaagttccctggccgccagaagatccacatctccaagaagtggggctttactaagtttaatgcggacgaatttgaagatatggtggccgaaaagcggcgtcatacccacgatgggctctggggggctcaaaacacactccctaatgcgkggccccytgggacaaatggagggctctccactcatgagaaccttgcaccacccgaaccctattcatgcccaccmataaatcctgcttcctgtcaaaaaaaaaaaaaaaaaaaaaaaaaaaaaaaaaaa

SEQ ID NO: 1171 - DNA, 758 bp, Canis familiaris
gcacgagcgccactgaagatctggtgtcgccatgggtcgccgccccgcccggtgttaccggtactgtaagaacaagccgtatccaaagtcacgcttctgcagaggtgtccctgatgccaagattcgcatctttgatctggggcggaagaaggcaaaagtggatgagttcccattatgtggccacatggtgtcagatgagtatgagcagctctcctctgaagccctggaggctgcccgtatttgtgccmacaagtacatggtgaaaagctgtggcaaagatggttttcaacaatccggagtgcggctccaatccctgtccaatgttaatccgtatccaaccagatgtttgtccctgtgctgggagctgacaggctgcagacaggtatgcgaggtgcctttgggaagccccagggcacagtagccagggtccacattggccaagtcatcatgtccatccgtaccaagctgcagaacaaggagcatgtgattgaggccctacgcagggccaagttcaagttccctggccgccagaagatccacatctccaagaagtggggctttactaagtttaatgcggacgaatttgaagatatggtggccgaaaagcggctcatcccagatggctgtggggtcaaatacatccctaatcgtggccccttggacaaatggagggctctccactcatgagaaccttgcaccacccgaaccctattcatgcccaccaataaatcctgcttcctgtcaaaaaaaaaaaaaaa

SEQ ID NO: 1172 - DNA, 696 bp, Canis familiaris
ctatagaacaagttgtacacaaaacagctggtaccgtccgaattcccgggataagaagccaaaagtggatgagttcccattatgtgccacatggtgtcagatgagtatgaccagctctcctctgaagccctggaggctgcccgtatttgtgccaccaagtacatggtgaaaagctgtggcaaagatggttttcacatccgagtgcggctccatcccttccatgttatccgtatcaacacagatgttgtcctgtgctggagctgacaggctgcagacaggtatgcgaggtgcctttgggaagccccagggcacagtagccagggtccacattggccmagtcatcatgtccatccgtgaccacagctgcagwacaaggagcatgtgattgaggccctacgcagggccaagttcaagttccctggccgccagaagatccacatctccmagaagtggggctttactaagtttaatgcggacgaatttgaagatatggtggccgaaaagcggctcatcccagatggctgtggggtcaaatacatccctaatcgtggccccttggacaaatggagggctctccactcatgagaaccttgcaccacccgaaccctattcatgccccaccaataaatcctgcttcctgtcmaaaaaaaaaaaaaaaaaaaaaaaaaaaaaaaaaaaaaaaaaaaaaaaaaaaaa

SEQ ID NO: 1173 - DNA, 680 bp, Canis familiaris
caaaagttgaatgagttccccacttaatgtgggccaacatgggtgttcagatgagttatgagcagctctcctctgraagccctggaggctgcccgtatttgtggccacacaagtaccatggtgaaaagctgtggcmaaagatggtttttcacatccgagtgcggctccatcccttccatgttatccgtatcaacacagatgttgtccctgtgctggagsytgacmggctgcagacaggtatgcgaggtgcctttgggaagccccacgggcaccagtagccagggtccacawtggccmagtcatcawgtccatccgtaccmagctgcaggaacmaggagcatagtgattgaggccctacgcagggcccaagttcaagttccctggccgcccmgaagatccacatctccacagaagtggggctttactaagtttaatgcggacgaatttgaagatatggtggccgaaaagcggctcatcccagatggctgtggggtcaaatacatccctaatcgtggccccttggacmaatggagggctctccactcatgagaaccttgcaccacccgaaccctattcatgcccaccmataaatcctgcttcctgtcmaaaaaaaaaaaaaaaaaaaaaaaaaaaaaaraaaaaaaaaaaaaaaaaaaaaaaaaaaaaaaaaaaaaaaaaaa

SEQ ID NO: 1174 - DNA, 763 bp, Canis familiaris
gtgtgaggattgcaggggcggcggccatggaggccgtactgaacgagctggtgtctgtggacgacctgctgaakttkgaaaagaaatytcmatctgagaaggcakcaggctccgtgtccaagascackcagtttgagtatgcctggtgcctggtgckcagcaagtacracgacgacatccgtwaaggcatcgcattgctggaggaackgctgcccaaggggagtwargaggagcabcgggattatgtcttctacctggctgtggggaattaccggctcaaggaatatgagaaggcactwaagtatktkcgggggctgctacagacagagccccmgracaamcaggccaaggaactggaacggctcattgacaaggccatgaagaaagatggactagtgggcatggccattgtcggaggcatggccctgggcgtggcgggcctggctggactcatcggacttgctgtatccaagtccmaatcctgwatgagaccacacctccacctctgcccagggatatgttggagactgtagaggacagtcgaagaggggggacccrtccatccttgctgtcctttccrtaccctgtcactgcccaccggccttcattcttctttccccagagaattgtccaacagccccmaaccatgtgctccggaatgagtgtaaataaaactgggccttggvwwrrraaaaaaaaaaaaaaaarraaaaaaaaaraaaaaaaaaaraaaaaaaaaaaaaaaaaaaaaaaaaaaaaaaag

SEQ ID NO: 1175 - DNA, 708 bp, Canis familiaris
cccagaagcagcgggagcgtgaagaaagagaggagcgcgagcttgggaacgggacgcagcgcaggaaacaagggcaagagttgtcagcggctcggcagcggctgcaagaagatgagatgcgccgggctgctgaggagcggaggagggaaaaggctgaagagttagcagccagacagagagtccgagaaaagattgaaagagacaaagcagagagagctaagaagtatggtggtaatgtgggctctcggccgtctccaccaacagagccagggccggttccgtcctctcccagccaggagcctccctccaagcgggagtatgaccagtgtcgcatacaggtcaggctgccagatgggacctcactgacccagacgttccgggcacgggaacagctggccgctgtgaggctctatgtggagctccaccgtggagaagagcctgggggagaccaggaccctgtgcagttgctcagtggctttccccggcgggccttctcagaggctgacatggaacggcctctgcaggagctgggacttgtgccttctgctgttcttattgtggccaagaaatgtcccagctgagaggcctttatcccaccatctctctctgacctcttcatctttgataaagcactgacatctycttcctaataaatagaccctgagttctctaaaaaaaaaaaaaaaaaaaaaaaaaaaaaaaaaaaaa

SEQ ID NO: 1176 - DNA, 755 bp, Canis familiaris
  misc_feature (660)..(660): n comprises a, c, g, or t, or includes no nucleotide
  misc_feature (666)..(666): n comprises a, c, g, or t, or includes no nucleotide
  misc_feature (696)..(696): n comprises a, c, g, or t, or includes no nucleotide
  misc_feature (724)..(724): n comprises a, c, g, or t, or includes no nucleotide
  misc_feature (742)..(742): n comprises a, c, g, or t, or includes no nucleotide
  misc_feature (749)..(749): n comprises a, c, g, or t, or includes no nucleotide
ggaggaggttgaggtctgaagagcagatccgagacctggccgagctggatgccgcgctggagcaggagatggactgtctgcgtgctctggccagccctgagcagctggcccagctgccctcctcgggagtcccacggctggggccctctgcgcccaatgggccctccgtctgagcctcccttccctcacaatgtgcctttgggggctgccacagctaccaggccttgtgccagctgcccacccccacttcctatgcagctttaatgcctccggatccctggggatgggagttgaaggctcagaatcggcctgtccccccactcttcctcagtctccccctaatgcccagggactgggcagcggcatccccaggccttgaaggaggagggagggcttcgggatagggtgttagatagagccctcctccccactcccgaggtgtcagtgttctgggaaccctggcagtagatgtctgggcgagttggagtctcccgggcggacaccccatccccaccttgttccctcaaagtacccattctyctctgcccmagggagggagtatggacagtctgcaagttctgggattcaggktgktattaaaataataattataattaaaaatctgaagaacttgaawmwrraaaaaaaaaaaaaaaargngggcgnttaaagatcaaagttactaccgtgatgcangtatagtttttatagggactaaataatnatggccgcgtttaaacgnggatggnaaaccg

SEQ ID NO: 1177 - DNA, 617 bp, Canis familiaris
  misc_feature (486)..(486): n comprises a, c, g, or t, or includes no nucleotide
  misc_feature (538)..(538): n comprises a, c, g, or t, or includes no nucleotide
  misc_feature (550)..(550): n comprises a, c, g, or t, or includes no nucleotide
  misc_feature (567)..(567): n comprises a, c, g, or t, or includes no nucleotide
  misc_feature (587)..(587): n comprises a, c, g, or t, or includes no nucleotide
  misc_feature (616)..(616): n comprises a, c, g, or t, or includes no nucleotide
attgtgacaccacgcacacctcctccatcgcaaggaaaggggcgaggactgtccctcagcagattagctggggagccgagggccagaagccgggatttggctacggaggccgcgctccagctcacaaggggctcaagggcaccgacgcccagggcacgctttccaaaatcttcaaactgggaggaagagatagtcgttccgggtcacccatggctagacgctgaagcccgcctcgtggccgcagaaccctgtcctcagcttcttaatatcaccgccttcgacgttaacaccgccccgtacctccccacccgtagcgagcaccctcctgcctaacgcccgtccagttgtgcccgcagcagggtcaggcgcgcccaggcccaccggcggtttcggccacgagcttcgatggaggaaacacagaccgggtattccacarscacgctgagcctggagacgacgcgtccccggggcctcagccccggcagngcagccccgggccgacgcgcgccttcgtcttcgaccgggtttggtgagccgnatccttcgcttngaagcgcttgccgtggncccgccgcggacaaaaaacnttgcaggcgcttaggaccgcggtccaggnt

SEQ ID NO: 1178 - DNA, 849 bp, Canis familiaris
ccggtactacgcgctcaagagcatgaccgaggcggagcagcagcagctcatcgacgaccacttcctcttcgawawkcccgkgtcgmcccwgctcctggcctcgggcatggcccgcgactggccggacgcccgcggcatctggcacaatgacaataagaccttcctggtgtggatcaacgaggaagaccacctgcgggtcatctccatgcagaaagggggcaacatgaaggaggtgttcactcggttctgcaacggcctcacccagattgaaacacttttcaagtcaaagaattacgaattcatgtggaaccctcacctgggctacatcctcacctgcccatccaacctgggcacargcctgsgggcaggtgtgcacatcaarctkscccacctgggcaagcacgagaagttcccggaggtgctcaagcggctgcggcttcagaaacgaggcacaggtggtgtggacacagctgcggtgggtggcgtctttgatgtctccaacgcaraccgcctgggcttctcaraggtggagmtggtacaratggtggtggatggtgtgaagctgctcatcgagatggagcagcggctggagcagggccaggccatcgatgaccttgtgcctgcccagaagtgaggccccagcccgcacctgccaccaccaccagccccgctgcttcctaacttattgcccgggcagtgcccgccatgcacccctctgatgttcgccacttggcggctgagcccttagcctcgctgtagagacttctgtygcccttggtagagtttatttttgtgatggctaagatgttgctgatgctgaaataaactagggtttcggcctgcaaaaaa

SEQ ID NO: 1179 - DNA, 584 bp, Canis familiaris
cagcgtggattggcggacctgatcggcctcaaccttgtcatgtcccggaacgcaggcaagggggagtacaagatcatggttgctgmcactgggctgggccaccgccgagctcattatgtcccgctgcatccctcatctgggttggagcccggggcattgagtttgactggaagtacatccagatgagcattgactccaacatcagtctggtccattacatcgtcgcatctgcccaggtcctggatgataacacgctacgacctgtaccacacttttcggccagcggtcctcctcctgatgttcctcagcgtctacaaggcctttgtcatggagaccttcgtccacctctgttccctgggcagctggacagcactgctggcccgggcagtggtgacagggctgctggccctcagcaccctggccctctacgtagccgtcgtcaacgtgcactcctaggcttggtgccccccagaaattcacataccctttccctgcctcccggtttcagtgaagtaaacagtatttggaamrwwaaaaaaaaaaaaaaaaaaaaaaaaaaaaaaaaaaaaaaaaaaaaaaaaaaa

SEQ ID NO: 1180 - DNA, 707 bp, Canis familiaris
  misc_feature (535)..(535): n comprises a, c, g, or t, or includes no nucleotide
  misc_feature (556)..(556): n comprises a, c, g, or t, or includes no nucleotide
  misc_feature (561)..(561): n comprises a, c, g, or t, or includes no nucleotide
  misc_feature (581)..(581): n comprises a, c, g, or t, or includes no nucleotide
  misc_feature (609)..(609): n comprises a, c, g, or t, or includes no nucleotide
  misc_feature (626)..(626): n comprises a, c, g, or t, or includes no nucleotide
  misc_feature (642)..(642): n comprises a, c, g, or t, or includes no nucleotide
  misc_feature (653)..(653): n comprises a, c, g, or t, or includes no nucleotide
  misc_feature (676)..(676): n comprises a, c, g, or t, or includes no nucleotide
  misc_feature (703)..(703): n comprises a, c, g, or t, or includes no nucleotide
  misc_feature (705)..(705): n comprises a, c, g, or t, or includes no nucleotide
gcacgagctcgactcttagcttgtcggggacggtaaccgggacccggtgtctgctcctgtcgcctgcgcctgctaccccgcagccaccatgcgtgagtgtatctcgatccacgttggccaggcaggtgtccagatcggcaatgcctgctgggagctctattgcctggaacacggcattcagcccgatggccagatgccaagtgacaagaccattgggggaggagatgactccttcaacaccttcttcagtgagacgggcgctggcaagcatgtgcccagggcagtgtttgtagacctggagcccacagtcattgatgaagttcgcactggcacctaccgccagctcttcaccctgagcagctcatcacaggcaaggaagatgctgccaataactatgcccgagggcactacaccattggcaaggagatcattgaccttgtcttggaccgaattcggaaactggctgaccaagtgcacgggtcttcagggcttttttggttttcacaactttggcgggggaactgggtctgggttnacttccttgttgatggaacgnttttntgtcgattatgggaagaagnccaagctagagttttcatttacccttgnccccaggtgtccacagntgagtagagcctaaantcatcttacancaacacctggaccttgatgtgcntttgtgaaagaggcattataattgggnanaa

SEQ ID NO: 1181 - DNA, 473 bp, Canis familiaris
gcacgagctccttcaacaccttcttcagtgagacgggcgctggcaagcatgtgcccagggcagtgtttgtagacctggagcccacagtcattgatgaagttcgcactggcacctaccgcmmgmkcttccaccctgagcagctcatcacaggcaaggaagatgctgccaataactatgcccgagggcactacaccattggcaaggagatcattgaccttgtcttggaccgaattcggaaactggctgaccagtgcacgggtcttcagggcttcttggttttccacagctttggcgggggaactggttctgggttcacctccctgctgatggaacgtctctctgtcgattatggcaagaagtccaagctagagttctccatctaccctgccccccaggtgtccacagctgtagtagagccctacaactccatcctcaccacccacaccaccctggagcactctgattggccttat

SEQ ID NO: 1182 - DNA, 1011 bp, Canis familiaris
agccccaaggggctctcgcttctggcgccaagcgcccggccgcgccggccgggcgcgacccgctccggggacagtgccaggtggggagtttgactggggcggtacacctgtcaaacggtaacgcaggtgtcctaaggcgagctcagggaggacagaaacctcccgtggagcagaagggcaaaagctcgcttgatcttgattttcagtacgaatacagaccgtgaaagcggggcctcacgatccttctgaccttttgggttttaagcaggaggtgtcagaaaagttaccacagggataactggcttgtggcggccaagcgttcatagcgacgtcgctttttgatccttcgatgtcggctcttcctatcattgtgaagcagaattcaccaagcgttggattgttcacccactaatagggaacgtgagctgggwttagaccgtcgtgagacagktwagttttacccwactkatgatgtgttgttgccatggtaatcctgctcagtacgagaggaaccgcaggttcagacatttggtgtatgtgcttggctgaggagccaatggggcgaagctaccatctgtgggattatgactgaacgcctctaagtcagaatcccgcccaggcggaacgatacggcagcgccgcggagcctcggttggcctcggatagccggtcccccgccgtccccgccggcgggccgccgcgcgcgccccgcgtggcgcggcgtgccccgccgcgcgtcgggaccggggtccggtgcggagagcccctcgtcccgggaaacggggcgcggccggaaagggggccgccccctcgcccgtcacgcaacgcacgttcgtggggaacctggtgctaaaccattcgtagacgacctgcttctgggtcggggtttcgtacgtagcagagcagctccctcgctgcgatctattgaaagtcagccctcgacacaagggtttgtaaaaaaataaaaaaaaaataaaaaaaaaaaaaaaaaagaaaaagtaaaaaaaaaaa

SEQ ID NO: 1183 - DNA, 719 bp, Canis familiaris
tagacaagtttgtacaaaagcaggctggtaccggtccgggaatttcccgggatggcgagagcagagagtaccgctattgaaggccctcsggcacgctgcgagagtacaagktgktagggcsctgtctgcccacccctrawtgtcgcactccgcccctgtatcggatgcgaatctttgcacctaatcatgttgtcgccaagtcccgcttctggtactttgtgtctcaactgaagaagatgaagaagtcttctggagaaattgtctactgtggacaggtgttcgagaaatctcccttgcgggtgaagaacttcggcatctggctgcgctatgattcacgcagtggcacccacaacatgtaccgggaataccgggatctgaccaccgcaggcgcygtcacccagtgctaccgagacatgggtgcccgacaccgtgcccgggcccactctatccagatcatgaaggtggaggagattgcagccagcaagtgccgccggccagcggtcaagcagttccacgactccaagatcaagttcccactgccccatcgggtcttgcgtcgtcagcacaagccacgcttcaccaccaagaggcccmacaccttcttttagatgcagagcgtgccggtgcccmagtctgctcaaataaactcctcgggtaaaaccmarrmrmwmaraaaaaaaaaaaaaaaaaaaaaaaaaaaaaaaaaaaaaaaaaaaaaa

SEQ ID NO: 1184 - DNA, 579 bp, Canis familiaris
  misc_feature (437)..(437): n comprises a, c, g, or t, or includes no nucleotide
  misc_feature (459)..(459): n comprises a, c, g, or t, or includes no nucleotide
  misc_feature (467)..(467): n comprises a, c, g, or t, or includes no nucleotide
  misc_feature (499)..(499): n comprises a, c, g, or t, or includes no nucleotide
  misc_feature (520)..(520): n comprises a, c, g, or t, or includes no nucleotide
  misc_feature (527)..(527): n comprises a, c, g, or t, or includes no nucleotide
  misc_feature (567)..(567): n comprises a, c, g, or t, or includes no nucleotide
  misc_feature (576)..(576): n comprises a, c, g, or t, or includes no nucleotide
gcgagagcagagagtacgctatgaaggcctcgggcaccgctgcgagagtacaaggtggtagggcgctgtctgcccacccctaaatgtcgcactccgcccctgtatcggatgcgaatctttgcacctaatcatgttgtcgccaagtcccgcttctggtactttgtgtctcaactgaagaagatgaagaagtcttctggagaaattgtctactgtggacaggtgttcgagaaatctcccttgcgggtgaagaacttcggcatctggctgcgctatgattcacgcagtggcacccacaacatgtaccgggaaataccgggatctgaccaccgyaggcgccgtcacccagtgctaccgagacattgggtgcccgacaccgtgcccgggcccactctatycagatcatgaargtggaggagattgcagccagcaagtgccgncggccagccggtcaagcagttncacgactncaagatcaaagttccacttgcccatcggggtnttgggttgtagacaagcaccnttaccancaaaaggccaacaccttctttaatcaaaacgtgccggggnccaaatttntta

SEQ ID NO: 1185 - DNA, 640 bp, Canis familiaris
gaggagcagagagtacgctatgaaggcctcggggcacgctgcgaagagtacaaggtkgttagggcgcygtctgcccmmcccctaaatgktcgyactccgcscctgtatcggatgcgaatctttgcacctaatcatgttgtcgccaagtcccgcttctggtactttgtgtctcaactgaagaagatgaagaagtcttctggagaaattgtctactgtggacaggtgttcgagaaatctcccttgcgggtgaagaacttcggcatctggctgcgctatgattcacgcagtggcacccacaacatgtaccgggaataccgggatctgaccaccgcaggcgccgtcacccagtgctaccgagacatgggtgcccgacaccgtgcccgggcccactctatccagatcatgaaggtggaggagattgcagccagcaagtgccgccggccagcggtcaagcagttccacgactccaagatcaagttcccactgccccatacgggtcttgcgtcgtcagcacaagccacgcttcaccaccaagaggcccaacaccttcttttagatgcagagcgtgccggtgcccaagtctgctcaaataaactcctcgggtaaaaccaaaaaaaaaaaaaaaaaaaaaaaaaaaaaa

SEQ ID NO: 1186 - DNA, 677 bp, Canis familiaris
  misc_feature (674)..(674): n comprises a, c, g, or t, or includes no nucleotide
taaaccgagctttgctattaaacaaagtgagaccttatgagagaatcaggcgggaatgtgcctcccgtcctcctggtgcagggcttcccctatctggggcgagatagccctcacctgaagacaagctcagtgtaaggatggattgacctaccttagcagaaaaagttcttattgcttggtcctccatttataacacaaagcagagtagtatttttatatttaaatgtaaaaacaaaaaaaattatatatatgggtgtgcagatatgtgtggtttttttcctaaaggaggaaaaacattctggtcacggagagccagatttgaggtgaatagtctggaaataaggatctcctactgagtggagacttggtattccctcactgccactatagggctcccatgtgccctgcccactcttctgcaattgggggtagacaccggtcggttgacaggtggaaagcacgttgtagaaggaggagtcacctgagccccgtggctttggtttaaaagacacacatgtacacacagaggtttagaaataaagagttggctggtcaacttgcatgttactgacaagggggttattgggattattttctgatgggactagcatgtcactaaacaggccttttgatatwtaaaattttttaaaagcaaaaccaaagtttaaaatttnatc

SEQ ID NO: 1187 - DNA, 664 bp, Canis familiaris
aaggctaaccctgactccggcagtgaatgcctataacatgataatgaaaagaagctagaattttttataatataaacagtatcatttatagcttatcagtcatgtattgttgtccagcaaaaaataagtccaatggagagttaagtatcttcacacctgccaatggtggaggctatttttgttaagactgtcagaatttactaaccgcagttacgacgtagagtccaaagagtgcagtaacctccttatcatggtaattaattgttctcttctgaagatctgtgttgtctaattgaacaataattcaggtagagcgtcccagaaaaaaccacttggactcccgctctggagtctagctggcggctccgagccctgccaggggccccgactcggcctgcctcggcgtcccctgagaggcctgaattctgctcgcagcttcattaccactgggctggaaacatccttgggttgagtgttttgtttgggagttatttcatgagggccttttaaacagtagtgtcccaatgaagtactagatattatttatgtaagaatgagcttttttttttttaaacaatatcctttcaaaatttctaactactttgtaactgcatgacttaacctggtgataaaagcagttattaaaagtctaccttttccaaaa

SEQ ID NO: 1188 - DNA, 707 bp, Canis familiaris
ggtaccagtggctaaaatcggagttctcctctgtccgtcaaatggtgaatgggccttgctgtcttcactagwaacktaatggcatatgttaatgatgtgttmwamytgtcccccccaackttttcawtagattgssgggatatcttggctttgtcacacagktaaagactgaacgtgaygttctttkttaaaaatgacttgcaggattaagtgtgcttattktaaataatcctggtagccagtctcctcatawatgtacgtatactgtgtgaacacagagggaggagcctctggggttkcgatttagcacctccacatgtcctcatgaacagsmacaggggtgtttwacctgcckacaccyggcctatcacmaatgtcacggcatttgaaagctctcccggtttcctaaaaagtgacacaccttttcaggagggcagagttttgcctttgtcttgtgggtgttkctgagtgattctcmagatccmgtagacytmaggacacgtgtattcttacmatcttggctgtatttaacggcagagcttgacttcsgcagatgagggcagcatttcaggattaacatttttttcaaccctttgatcatgtaatctgtgtgacagactggaatgaatgatgcctttccgmaaataaaatgtcagcmagtgaaaaaaaaaaaaaaaaaaaaaaaaaaaaaaaaaaaaaaaaaaaaa

SEQ ID NO: 1189 - DNA, 714 bp, Canis familiaris
ccccagcagtctgtttccgagggtacagtgctaaaatcgagtctcctctgtccctcaattgtgaatggccttgctgtcttcaactagaaaacttaatggcatatgttwatgatgtgttaaaaactgtccccccaacttkttcattagattggcgggatatctyggctttgtcacacagttaaagwctgaacgtgaygttctttgytwaaaatgacttgcaggattaagtgtgcttattkktaaataatcctggtagccmgtctcctcatatatgtacgtatactgtgtgaacacagagggaggagcctctggggttgcgatttagcacctccacatgtcctcatgaacagcwacaggggtgttttacctgcckacacccggcctatcacaaatgtcacggcatttgaaagctctcccggtttcctaaaaagtgacacaccttttcaggagggcagagttttgcctyttgtcttgtgggtgttkctgagtgattctcmagatccmgtagacttaaggacacgtgtattcttacmatcttggctgtatttaacggcagagcttgacttcsgcagatgagggcagcatttcaggattaacatttttttcaacccyttgatcatgtaatctgtgtgacagactggaatgaatgatgcctttccgaaaataaaatgtcagcmagtgaaaaawaaaaaaaaaaaaaaaaaaaaaaaaaaa

SEQ ID NO: 1190 - DNA, 725 bp, Canis familiaris
tcttccgagggttacagtggcttaaatcggagttctcctctgtccctcatggtgaatggcctcgctgtcttcactagaaaaacttaatggcatatgtaatgatgtgttaaaactgtccccccacttgttcattagattggccgggatatcttggcgtttgtcacacacttatagactgatacgtcgatgttctttgttattaaatgacttgcaggatttaagtgtgcttatatttaataatcctctggtagaccactctctctcactatatgtacagtatatctcgtgtgtacacacgagaggagagagaccctcttcgtggggttttcgcagtttagcccggacactctcaccaacagtctctctactgtgaccgagcacacagggtttttttacccgcctaacaccggccctttcacaaaggtcacgccatttgaaagttcttcccggtttccttaaaaagtgacacacccttttcaggagggcagagttttgcctttgtcttgtgggtgttkctgagtgattctcaagatccagtagacttaaggacacgtgtattcttacaatcttggctgtatttaacggcagagcttgacttcsgcagatgagggcagcatttcaggattaacatttttttcaaccctttgatcatgtaatctgtgtgacagactggaatgaatgatgcctttccgaaaataaaatgtcagcaagtgaaaaaaaaaaaa

SEQ ID NO: 1191 - DNA, 665 bp, Canis familiaris
  misc_feature (528)..(528): n comprises a, c, g, or t, or includes no nucleotide
  misc_feature (554)..(554): n comprises a, c, g, or t, or includes no nucleotide
  misc_feature (559)..(559): n comprises a, c, g, or t, or includes no nucleotide
  misc_feature (569)..(569): n comprises a, c, g, or t, or includes no nucleotide
  misc_feature (593)..(593): n comprises a, c, g, or t, or includes no nucleotide
  misc_feature (600)..(600): n comprises a, c, g, or t, or includes no nucleotide
  misc_feature (608)..(608): n comprises a, c, g, or t, or includes no nucleotide
  misc_feature (653)..(653): n comprises a, c, g, or t, or includes no nucleotide
agttctagatcgctcgcgatctagaactagkcgagctgactggttgtgtggccgcttctcggagaccggtagccgcttgcagcatggctgaccaactgactgaggagcagattgcagaattcaaagaagccttttcactatttgacaaggatggcgatggaactataacaacaaaggaattgggaactgtaatgaggtctcttgggcagaatcccacagaagcggagttacaggacatgattaatgaagtagatgctgatggaaatggcacaattgacttcccggaatttctgacaatgatggcaagaaaaatgaaagacacagacagtgaagaagaaattagagaagcattccgtgtgtttgataaggatggcaatggctatattagtgcagcagagcttcgccatgtgatgacaaacctgggagagaagttaacagatgaaraggttgatgaaatgatcagggaarcagatattgattggtgatgggcaagtaaactatkaaaaagttttgtccaaatggatgacnggcaaagtggaaaaccattggacaanaatgngttaaaattnttgtaccaaaatgggttaatttgnctttttntttgttgnaacctaatttggaaaaggtttccccctgcttgccaaaaaaatgcntgtttaggaaat

SEQ ID NO: 1192 - DNA, 700 bp, Canis familiaris
cgcaaatgcttctagcggactgttacttagttgcgttacacccttcgtgaccaaacctaacttgcgcagaaaccgagatgagattggcatggctttatctgtttttttttttttttggtaatttttgtttttgaatttttaaatttttgttatgtttgttgtttatttttttttttcggttttgttttgtttttttggcgcttgactcaggatttaaaaactggaacggagaaggtgacagcagtgggttggagcgagcatccccaaagttctacaatgtggccgaggactttgattgtacattgttctttttttttttttttaatagtcattccaaatatcgtgagatgcattgttacaggaagtcctttgccttcccaaaagccaccccgtttctccctgcagagaagggcctgtcctcgcccgagtccacacaggggagggaaagagaattgcttttgtgtaaattatgtagtccaaattttttttaatcttcgccttaatacttgttctttttgttttattttgaatggtctgccatcacggcccttgttttttgtcccccaattgaagatttatgaaggcttttggtctccctgggagtggggctgaggcatggaggcatccagggcttacctgtacactgacttgagaccagttcaataaaagtgcacaccttaaagraaaaaaaaaaaaaaaa

SEQ ID NO: 1193 - DNA, 683 bp, Canis familiaris
  misc_feature (438)..(438): n comprises a, c, g, or t, or includes no nucleotide
  misc_feature (451)..(451): n comprises a, c, g, or t, or includes no nucleotide
  misc_feature (484)..(484): n comprises a, c, g, or t, or includes no nucleotide
  misc_feature (535)..(535): n comprises a, c, g, or t, or includes no nucleotide
  misc_feature (540)..(540): n comprises a, c, g, or t, or includes no nucleotide
  misc_feature (578)..(578): n comprises a, c, g, or t, or includes no nucleotide
  misc_feature (586)..(586): n comprises a, c, g, or t, or includes no nucleotide
  misc_feature (594)..(594): n comprises a, c, g, or t, or includes no nucleotide
  misc_feature (607)..(607): n comprises a, c, g, or t, or includes no nucleotide
  misc_feature (632)..(632): n comprises a, c, g, or t, or includes no nucleotide
  misc_feature (650)..(650): n comprises a, c, g, or t, or includes no nucleotide
  misc_feature (660)..(660): n comprises a, c, g, or t, or includes no nucleotide
ggacagcgcagccactcccgagggcctggatgtgatggcgtcacagaaaagaccctcccagaggcacggatccaagtacctggcctcagcaagcgccatggatcacgccaggcatggcttcctcccgaggcacagagacacgggcatccttgactccctcgggcgcttctttggcggtgacaggggtgtgcccaagcggggctcaggcaaggatggacatcacgcagcgagaactgcccactatggctccctgccccagaagtcccagcatggccggccccaagacgaaaaccccgtagtgcatttcttcaagaacattgtgacaccacgcacaccttcttcatcgcaaggaaaggggcgaggactgtccctcacaratttagctggggagccsagggccaraarccsggatttggctacggaggccgcgcttcactnacaaggggttaanggcaccgaccccaaggcacgctttcaaaatttnaaactgggaggaagagatagtcgttccgggcacccatggctagacctgaanccccnctcgtgggccgaaaaacctgtcttaagtttttaatatnaccgcttngacgttanaccgcccgtcctnccaccctaggagaacctcttctaancccgtcaatttgcccaanaggtaggccnccagcccccggggtttcggccag

SEQ ID NO: 1194 - DNA, 913 bp, Canis familiaris
  misc_feature (723)..(723): n comprises a, c, g, or t, or includes no nucleotide
  misc_feature (733)..(733): n comprises a, c, g, or t, or includes no nucleotide
  misc_feature (772)..(772): n comprises a, c, g, or t, or includes no nucleotide
  misc_feature (794)..(794): n comprises a, c, g, or t, or includes no nucleotide
  misc_feature (814)..(814): n comprises a, c, g, or t, or includes no nucleotide
  misc_feature (823)..(823): n comprises a, c, g, or t, or includes no nucleotide
  misc_feature (897)..(897): n comprises a, c, g, or t, or includes no nucleotide
gtttgatgatgagtcaatctgtggaatggtttaaagtacatgccactattgggcttcttgggctacgtgatcaacttccagagtttgtagaaccttgcaagaagggtatatttgctgtcagtaactcaggttcaagattcccaggccccataggtattagtgatttccaatttcctaacaagtttttggcccaatcccatcgttcttccatattagagtgtgctcagcttgactgccttagccaggcaagcacagtaatggttgtgttttattcagcattattatgcaaaaacccactggttaggttggtttgttttaggataggaaatgaaattgcctctcagtgacaggaatggcccaagcctgcttcctattttagtttttggtttattttatttttttaaactgatggatggtgcagcatgtctacatggttgtttgttgctaaactttatataatgtgtggttttgattcagcttgaaaaataatctcactacatgtagcagtacattatatgtacattatatgtaatgttagtatttctgctttgaatccttgatattgcaatggaattccaactttattaaatgtatttgatatgctarwwawwrtgtgcgatttaaactttttttgctttctcccttttctggttgtgcgcttccttttacaacaagcctctagaaacagtttctgagaattattgagctatgtttgtaatgcanatgtacttanggagtatgtaaaataatcattttacaaaagaaatagatntttaaaattaatactaactacnggaaaagggtccattggggnaaaaaatanttatctttgaatcaaggttggctttggtttaccaaagacttgattttcaagatttttactaatagggaaaaggnaacaattgcagcctta

SEQ ID NO: 1195 - DNA, 540 bp, Canis familiaris
  misc_feature (453)..(453): n comprises a, c, g, or t, or includes no nucleotide
  misc_feature (474)..(474): n comprises a, c, g, or t, or includes no nucleotide
  misc_feature (504)..(504): n comprises a, c, g, or t, or includes no nucleotide
  misc_feature (526)..(526): n comprises a, c, g, or t, or includes no nucleotide
ctttttgaaaaattagtggtggacacatttggatcacatgtatacagttaaataaagatttgattttggtcattcttcagatattggctctgaatgacttaagctgaaatggctcctttttttaaatactgcaccaccattaacctgataggattcttggagcctgttagatattgttagatgctgagactgtaaagatgttctcagcagaatgtaaacataagcttacttgtaattatcttaatcagccattgaaaaatatagtacttttcaagtgttcagtccttcaaattggcatatggtaatgtacattctttccatgctgaggtggactgatcatcaaaatggcagtgcaacatctttatcttcttgagaagtgaaaatgacctgagtgkcctataaataattttaagagcaggttttgaaacytggaatkgggttttttcagttcgngkwtacttaaccccmaawtgnagtctttggagkcatgtgcattggacgttnggtgagcccggggaatttttcntttaccaaccagct

SEQ ID NO: 1196 - DNA, 683 bp, Canis familiaris
ccagggaaccaagcctcatggatgagtggtgaaagccactgttaggggstgcatcaccatcatagtggtggagacactgccacttgctgtgccacaatggracacagaggataaagtcagccatgtgagcactgggggtgktgcgagtttagaactcttggaaggtaaagtccttcctgggktggawgctctcagcagtgtttagtactttcctgccttttggttcctgtgcacagtccctaagtcaacctagcacttgctgcatctctccttggcattagctaaaatcttccctcacgtcaagattcagctagtggccaagagatgcagtaccaggaacccttaaacaggcgcacagcatctcagytcctctttactgcamsstggatttgcctacattcttcaggatcccatttgaatttcttagtgactaaaccmttgtgcattctagagtgcawatatttatattttgcctgttagaagaaaatgagctgtgttggcttttctttttgaagtagcttattctgattatagctgtgtcattgtttcactactcagtatggaaataagatgaaattccrattgtaggtaggtaggaagacmaagttggtgatctattaaatccaataaaagtatccmctgaaacggaaaaaaaaaaaaaaaaaaaaaaaaaaaaaaaaaaa

SEQ ID NO: 1197 - DNA, 643 bp, Canis familiaris
ccagttcagctcaattcacagcttctccaagcatcaccctgggagtgttttgagacttttctcaaaaatgagggccgtacaatcctgttttgctccgaagtattcagtaccgctcagtattttaaatgaaatgattctcacttgtgatttggtttgggatccataggggagcacaggcacccacccacatataccatgtattgaaatgattttctcagaatttgaagttagggaaagttaccccaacacattctgcttccacttaactggcctgccaataattgtaagaatggcataataccttgttactgtgataatttaaaataatcccccagtgtcccaccttttcccaaagattcttagtaatgatctagaaatatctttctcttatctgttatttatccaatttttcccccgtatttttatatgggaaaaattgtattgaagacatttagtatgccagttgataagagggatttggtataattatggttggtgtgattattttttatactgtatgtgcccaagctttactactgtgggaagacaactgtttaataaaagatttacattccacmamwaaaaaaaaaaaaaaaaaaaaaaaaaaaaaaaaaaaaaaaaaaaaaaaaaaaaaaaaaaaaaa

SEQ ID NO: 1198 - DNA, 730 bp, Canis familiaris
cttccatccagatgctaagttctgtttgagaacctgtgccagaggatatttgacaggagtatccttcgcttatctttgtagtactgaaattgccagaagtaactgctgtgcagaatgtaatagaagcttttcgtattcttttattcttaaaatcagtatcttttwacagtattctttctacgtgatcttttttgtacaatttaaggatattttgattaccattaaataagactgctgattttgctactttttttaaggggtcttcaagtacgtaaaaaccatacattataggtagaggaaaagtgttccttgattttgcatctaccctctcacacccaagctgtaaacagttgacatattttgtcttaaaagacttggttcaatatatgcttatttgttttaaaacttgtatcatcaaactctctctttagattraaaatgctgttgaatatgacacttttgaggagagagtgtgctcagaacgtggacaggatacagtaggccaagcatgctaagcataccataaattttctaattttacacctaaaacaaggagatgaggtcactaaaaaataaaaatacatatgtaagacttaatgtactcttgctttgtcaagctgtttgctgtactttctgagatcataatgttacgctaactctgaaaagtgatgtaatctggtagcaatgcattagttcaaataaaggcatttacataawmaaaaaaaaaaaa

SEQ ID NO: 1199 - DNA, 696 bp, Canis familiaris
tggcaggaagtaatctggctgttcgcaggaatgttattagaaagcttcttcggtaktcttttattctgtaaratcagtatcttttstacagtattctttctacgggatctgttttgtacatttaaggatattttgagttacattaaataagactgctgattttgctactttttttaaggggtcttcaagtacgtwaaaaccatacattataggtagaggaaaagtgttccttgattttgcatctaccctctcacacccaagctgtaaacmgttgacatattttgtcttaaaagacttggttcmatatatgcttatttgttttaaaacttgtatcatcmaactctctctttagattgaaaatgctgttgaatatgacacttttgaggagagagtgtgctcagaacgtggacaggatacagtaggccmagcatgctaagcataccataaattttctaattttacacctaaaacmaggagatgaggtcactaaaaaataaraamtacatatgtaagacttaatgtactcttgctttgtcaagctgtttgctgtactttctgagatcataatgttacgctaactctgaaaagtgatgtaatctggtagcmatgcattagttcaaataaaggcatttacataawmmaamaaaaawmaaamaaaaaaaaaaaaaaaaaaaaaaaaaaaaaaaaaaaaaaaaa

SEQ ID NO: 1200 - DNA, 863 bp, Canis familiaris
cccaggagacctgtctgcgtgtgtgtgagtggttcaccctcctctgtccccagacccgacccttcccgcggcacagagagacagggcaggatccacgtgcccaccatggaggcagagaaagtgttttatatacgataattatttaatatccctttttaattagaaattaaaacagttaatttaattaaagagtagggtttttttcagtattcttggttaatatttaakttcractatktatgagatgtatctctctattgctctctcttgcgctcttatatgtaccggtcttkgtgtttaaagattcatgtttccmatctctctctccctgatcggtgacagtcactagcttgtcctgagcagatatttaattttgctaacactcagctctgccctccccttgcccccggctccccaccacacattcctttgaaataaggtttcaatatacatctacagactatatatatatttggcaacttgcgtttgtgtgtatatatatatatatatatatatatatatatgtttatgtatatatgtgattctgataaaatagacattgctattctgttttttatatgtaaaaacaaaacaagaaaaaatagagaattctacatactaaatctctctccttttttaattttaatatttgttatcatttatttattggtgctactgtttatccgtaataattgtgggggaaaaagatattaacatcacatctttgtctctagtacagtttttcgagatattccgtagtacatatttatttttaaacaacaacaaagaaatacagatatatcttaaaaaaaaaaaaagcattttgtattaaagaatttaattctgatctcaaaaaaaaaaaa

SEQ ID NO: 1201 - DNA, 684 bp, Canis familiaris
  misc_feature (386)..(386): n comprises a, c, g, or t, or includes no nucleotide
cttaaaagtagacacatgcccagcctgattgggactgggttaatactcagactcttcgacccagggagttccaaaactggaccccttatctacgcgtttttcatctgcacgggaaagaaactgttccaatagccacggagggttctacacaaggtttgggtgttcggggatattggtgaactatgagagcgtttaattgttggtttttgagatataagccatcccgaagttggtcccccgaaggtgaaagaggaaccccactattggttttggcccttaaaatttctttctgtggagaattttccaaaagtgtggaaccttttaagttccttcccaaaggaattggtaattccctcccccaccaatggaagtctagagaatcgccnagtgcatcctgagggaagtacttgaaggcatgcctggaagttgtcatgtttgtgccacatttcagttgagttccgcagtgttattttaaatgtgttcctcagcgacaatgtagtgtcacrttacaaaggaaatgacccaaccctccagtttgtacatcacgtcctgcatgtcccacaccactttttcatgaccttttaataatatattggtctctgtgctgtagtggaaatctttggttttgcatcagagtaaaataaaataaacccatcacatttggaacataaaaaaaaaaaaaaa

SEQ ID NO: 1202 - DNA, 654 bp, Canis familiaris
cccgttttggcatcgctgctaataccagcttggattgtagaacttccctatctgtaaagtaaacaatgccagcctgattggactgggttatactcagactcttcgaccaggagtcaaactgaccctatcagctttaatcgacggaaagaacttcaatgcaggaggtcacaaggttgggttgggatttgaactagaagcttaatgtggttttgagtaaagcatccgatttgtccccggaggtgaagagaacccactatgttttggccttaaaattcttctgtgaaatttcaaaagtgtgaactttttattcttccaaagaattgtaatcctccccacagtgaagtctagagatcgcaagtgcatcctgagggaggtacttgaaggcatgcctggaagttgtcatgtttgtgccacatttcagttgagttccgcagtgttattttaaatgtgttcctcagcgacaatgtagtgtcacgttacaaaggaaatgacccaaccctccagtttgtacatcacgtcctgcatgtcccacaccactttttcatgaccttttaataatatattggtctctgtgctgtagtggaaatctttggttttgcatcagagtaaaataaaataaacccatcacatttggaamawaaaaaaaaaaaaaaa

SEQ ID NO: 1203 - DNA, 619 bp, Canis familiaris
  misc_feature (425)..(425): n comprises a, c, g, or t, or includes no nucleotide
  misc_feature (427)..(427): n comprises a, c, g, or t, or includes no nucleotide
  misc_feature (517)..(517): n comprises a, c, g, or t, or includes no nucleotide
  misc_feature (586)..(586): n comprises a, c, g, or t, or includes no nucleotide
  misc_feature (602)..(603): n comprises a, c, g, or t, or includes no nucleotide
tccttttaaaagtgtgagatgcactcttttgctgtaccaaatagggctccccacaaagtgctcttccgggaggggttcccgccagaagcactggtatgaatggaagaagcagctagccacagttcacacagatgaaattgcacttcttagtgaaaaagaaactttataaaaagtttgggttttttttttttcctaattataaaaatatccccagaaagagcctgagcaatgttcagacagaagcctcgaaattactttaaattgtttactttgtaatgtttacatgcatacacttttcactttttaaaaaaagaaaaaaaatgcaaactctgactttttaacaacttttcagatttttcatgggacggtggaactctgactcaccaactggatttacatcttaatttaraaatgtatttatttgngnggtttccctccctacccatgtggktttcccctaagatcctggcaaagggatgsccccttctgccaramccttgtttkgttttcccsgggnggctcttgctttttgctttgcagactgccttgcagccatgattttgtcactgacatttgtgagccaaanactgagcctttttggnngaatataaacaaactc

SEQ ID NO: 1204 - DNA, 664 bp, Canis familiaris
  misc_feature (482)..(482): n comprises a, c, g, or t, or includes no nucleotide
  misc_feature (508)..(508): n comprises a, c, g, or t, or includes no nucleotide
  misc_feature (520)..(520): n comprises a, c, g, or t, or includes no nucleotide
  misc_feature (610)..(610): n comprises a, c, g, or t, or includes no nucleotide
  misc_feature (631)..(631): n comprises a, c, g, or t, or includes no nucleotide
  misc_feature (653)..(653): n comprises a, c, g, or t, or includes no nucleotide
  misc_feature (659)..(659): n comprises a, c, g, or t, or includes no nucleotide
ggagccgggcggcgcggtgcgatcgcgcaggcgcggcggggccgggcagggactccggaatctcggctcgscmcgrkccgcatcgcacgccgagccgscgccatggccgcgtacaagctggtgctgatccggcacggcgagagcgcttggaacctggakawyykyttcagcggctggtacgacgccgacctgagcccggcggkgcacgaggaggcgaagcgcggcgggcaggcgctgcgagatgctggctatgagtttgatatctgcttcacctcagtgcagaagagagcaattcggactctctggacagtgctggatgccattgaccaaatgtggctgccagtagtgaggacttggcgcctcaatgagcggcactatgggggtctgactggcctcaataaagcagaaactgctgccaagcatggtgaggcccargtaaagatctggaggcgttcctatgatgttccaccaccttcaatggnacctgacatccttttacagcaacatnagtaaggatcgncggtttcaaacctacttgaaaataacttccttctttgagagtttaaggataccattgcagaactttggccttttgaatgaaaaaaaattncccaaatcaaggaaggaaacnagtcttgttgaacccttggaanaacttngggat

SEQ ID NO: 1205 - DNA, 657 bp, Canis familiaris
atctcagccagctgaacatcactgggacgtgtctgatctaaggcatcctaccaacagcaccatcaaggcacgttggagctttcttgcccagaactgatctcttttggtatgggaggaccatgggttaccacctacactcwacwaatcwatgagggacttctttttaacttggtaggatttggactggttttgcaacaataggactattattaatagagttacctatgacaaacmatagggggttacctagataatgccmaagccagcatytatactaggtttcctcctgttacctgttcgaactatgttttctttctttttcctacttgctcaccagcttgggcttccactctagttcttttaccaaggtttgtatgaccatgttgaacttgtttcattctgattgtcctctttggatttctgtgtgaaaacacacttcactttctcttgacccttagctgaaatgtttargtagcttctggtgatatcctttcataaatttatgkctcttaaaarggkgatagatgggatacctcatagaaaggagctttgaactgtatataactyctaaagaggacttcattttagagaattaaaatatttgtgctcaactgcctaamaaaaaamaaaawmaaaaaamaaaaaaaaaaaaaaaaa

SEQ ID NO: 1206 - DNA, 993 bp, Canis familiaris
  misc_feature (42)..(42): n comprises a, c, g, or t, or includes no nucleotide
acttcggagccgcacctctctggtgaggcccttgcccccagnatgctgccggggcagagatgccctctcactgacttcagacccactcccagccgcggcctgtctcatcttcatgggctgggaccacagctccagcttcctcctctgctcccacagcaccacagccacatctcagctctggccaacatgcactgtcctagcaggcctcacttgtcttgtggcctccttggcaccctcggcaggtcccagacctttctctgtgtctcttcctggccaggggctctttacagccagcagggtatgggctttgggcagtcatcctcgggggcttcttggctggccctgcacccctcaccagcacttagatttagacttgtcacctgatgttcaaggagacattgcagtgagtttcyctkggttggaagggaggstckgtgaggcctagaccttagaaatacaaggttaggaaggatctcgcggaacccaaagcctttctctccctggcgctawaacacccggagggccttgtggtccattctgcagcctaactgtagtaggctgaatagtgtcccccacccccccgatgtccatgttcttatcccatgaacctgggaacattactctatcgggcaaaggggactttgcagatgtaattacattaatgatttttggacaaggtgactcctggaataaccccgtgggcttcatgtaatcctgggrattccttccttatgggaggaaggcaggaggtcagagargaagtaggagatatagtgggaaggggtcaragctgtggratgcaggccggcgcccacagaggctagaaaaggcaacaaatggattctcccttcagagcttcctgagggaaccagccctgctgacactttgactttagcccagatcttagaattctgactgccagaactataagagaataaatacgtgttgttttaaaaaaaaaaaaaaaaaaaaaaaaaaaaaaaaaaaaaaaaa

SEQ ID NO: 1207 - DNA, 900 bp, Canis familiaris
  misc_feature (656)..(656): n comprises a, c, g, or t, or includes no nucleotide
  misc_feature (731)..(731): n comprises a, c, g, or t, or includes no nucleotide
  misc_feature (733)..(733): n comprises a, c, g, or t, or includes no nucleotide
  misc_feature (748)..(748): n comprises a, c, g, or t, or includes no nucleotide
  misc_feature (801)..(801): n comprises a, c, g, or t, or includes no nucleotide
  misc_feature (823)..(823): n comprises a, c, g, or t, or includes no nucleotide
  misc_feature (864)..(864): n comprises a, c, g, or t, or includes no nucleotide
  misc_feature (872)..(872): n comprises a, c, g, or t, or includes no nucleotide
  misc_feature (893)..(893): n comprises a, c, g, or t, or includes no nucleotide
gaaccaaagatatttccatatgaaatgctgatggtgaccaacagagggcgcaacaaaatcctaagagacgtggacagaaccaggctggagcgccacctagccccagaagtgtttcgggaaatctttggaatgtccatacaggaatttgacaagttacctctttggagacgcaacgacatgaagaagaaagcgaaactcttctaagtcccccgcgtagacagcagttagaaaaaggactgacatggcggtgacacataggatgttgtgttaaggcccaaacttgattggagaatttgcaaactattgtccctcaacaacaacaaaatgggaaagccgattaaaacacccataagccaaatatggggccagccatcggcaacacttgccaagcaacaacggggtagaaatttctgtgttccccacactcgacagtagtgttcacacgtgacctttttacatcaccttatgtacacaacaggagctacttccttcatttcctttaactgttgtctaacaatagtgttgactgtatgggtaagagccagcaagtgcccttaggatgccgcatggaaaaaagcagttgtaataattccaaagtgggaatctatttattatgtagcaccgtggctaagaaggaagagcctgagggacatatncatgtggtcgcaccacttttgcacacccctgtcctcactggcctcatgaagcccggcacgatgggaatcagagtncnggatctgggcggctntgggtaagtgggctgattagcagcccaagtcatttttaacatgctcctttttnttactttttgctaggacctggntggcaaattacttaactggtttttaaaaaaaaaaatttagnaaaagagngggggaagggacaaaaggaanttttcct

SEQ ID NO: 1208 - DNA, 687 bp, Canis familiaris
cacacacagaaaaggccaccagactccacttggactacattgggccttgcaaatacatccccccctgcctggactccgagctgactgaattccctctgcgcatgcgggactggctcaagaacgttctggtcactctgtatgaaagggatgaggacaacaaccttctgaccgagaagcagaagctgcgagtgaagaagatccacgagaacgagaagcgcctggaggctggagaccaccccgtggagctgctggcccgggactttgagaagaactacaacatgtacatcttccctgtgcactggcagtttggccagctggaccagcaccccattgacgggtacctgtcccacacggagctggccccactgcgtgcacccctcatccccatggagcactgcaccacccgcttctttgagacctgtgacctggacaatgacaagtacatcgccctggacgagtgggcgggctgcttcggcatcaaggagcaggatattgacaaggatctggtgatctaaatccacgcctccttccgcagtcccggatcctccctctttgatctttcccttcctgtttcccccaatgtttaaaatgtttggatggtctgttgttctgcctggggacaaggtgctaatatagatttaagcgaatacmwwaamrrwrmwaaaaaaaaaaaaaaaaaaaaaaaaa

SEQ ID NO: 1209 - DNA, 716 bp, Canis familiaris
  misc_feature (53)..(53): n comprises a, c, g, or t, or includes no nucleotide
ggcacctggaggcccaagaaggcccaactccacctggatacatgggcctgcanaaacatcccccctgcctggactccgagctgacggaattccctctggcgcatgcgggaactggctccaagaacgttctggtcactctgtatgaaargggatgaggaacaacaaccttctgaccgagaagcagaagctgcgagtgaagaagatccacgagatacgagaagcgcctggaggctggagaccaccccgtggagctgctggcccgggactttgagaagaactacaacatgtacatcttccctgtgcactggcagtttggccagctggaccagcaccccattgacgggtacctgtcccacacggagctggccccactgcgtgcacccctcatccccatggagcactgcaccacccgcttctttgagacctgtgacctggacaatgacaagtacatcgcccctggacgagtgggcgggctgcttcggcatcaaggagcaggatattgacaaggatctggtgatctaaatccacgcctccttccgcagtcccggatcctccctctttgatctttcccttcctgtttcccccaatgtttaaaatgtttggatggtctgttgttctgcctggggacaaggtgctaatatagatttaagcgaatacattaacggtgctaaaaatgaaaawwrwaaaaaaaaaaaaaaaaaaaaaaaaaaaaaaaa

SEQ ID NO: 1210 - DNA, 853 bp, Canis familiaris
gacaacttggaattcatcctataaataagacttggttggsmcatggtatctctgtgtatagtctttgctatgacttctggccagatgtggaatcatatccgtggacctccatatgctcataagaacccacacaatggacaagtgagctacattcacggaagcagccaggctcaattcgtggcagagtcccacatcattctggtactaaatgctgctatcaccatggggatggttcttctaaatgaagcagcaacatccmagggagatgttggtaaaagacggataatttgcctagtgkgattaggcctggtggtcttcttcttcagttttctactttcratatttcgttccaaataccacggctatccttatagctttttaattaaatgaagccaagtgggatttgcataaagtgaatgtttaccatgaagataaagtgttcctgagatatagtttgatttcttgaattcatttccacattgattgtgacaattctagcttattcttgtataattttttttaaatgtgagctttcctagtgaatttaatttatagaagtggatggttatatttcatattagcactggaaagaacmaagtttctcaagcatattatattcagtatatgtcataggactgaaataaatgacmatgtaattatgaattcatgtgktagaactgttcactcattagtaaagraaaccaccaatgttagtaagggaaaactatgaaatatatgttaaagaacccttaaggktgtacmgagataaggkwtatgcatgaaaawatgkcmcatactgraaaatatactcattgtcatttcagtataaaaaaaaaaaaaaaaaaaaaaaaaa

SEQ ID NO: 1211 - DNA, 674 bp, Canis familiaris
cggaattccccggatcgccaccgactaaatagtcccsgggtcytgctgtcacggacaaccaagcctgagacacaccttcctccggggccatcccggcgtaaacgcgggacgaggaggagccccgggcagggcggccggccctcggcggcgcggccccggggcggcctgcgggacgcggagggatctcgggctatataaaggcgcgaggccggcgctgctccctctcggtcggcgcccaggatgacgaasmasagarggaacaatggccgtgccaagaagggccgcggccacgtgcagcccattcgctgcaccaactgcgcccgctgtgtgcccaaggacaaagccattaagaagttcgttattcggaacatcgtggaggccgccgccgtcagggacatttccgaagcgagtgtcttcgacgcctacgtgcttcccaagctgtacgtgaagctccattactgcgtgagttgtgccattcacagcaaggtagtccggaatcgctctcgtgaagcgcggaaggaccgaacacccccgccccgatttagacccgcgggagccgccccacgacctccaccgaagcccatgtaagcagctgagtccttaacgactgaagaaaaagtgttctccgggaaaaaaataaatggcgattatactttaaaaaaaaaaaaaaaaaa

SEQ ID NO: 1212 - DNA, 666 bp, Canis familiaris
gagcgtcgggtcggaggctgagaggctgcagcggccaggagcgaccccgccccctccccgctcgctctgggctatgtctggcttttgtggaaagcagattcracatatcgaagggaaatgaaaacgcagacggcagcttccagatcaacagccattactggtgcmatgatgacaggagtcactcagaaaacatttgccacgaggactgtcaagacgtactgagcctcmatcttctctcagccatcagctgtgcaaaaaaagattgtctctggagcagggggtatgaagaactgggtagcatggaggttgcactgtgcaggccgkccactctcctactggatgacaggatgtttctcgggatgagacaggacacagggctgccgtagagtcattccagagctcctcttctcactcaggaattcatttctccttcctcttgcctctgcttcaggttattttctttccttcccatttaccmataaacctgaccatagcccccaggaataaatggttttctcgggcttcctccttgtacctgtctgggcccaggcctctggttctgactctcatttgcmaaccmagaggaccacmatgaagaagttgktatatttggataattattaaagcattccttgtgcmaaraaaaaaaaaaaaaaaaaaaaaaaa

SEQ ID NO: 1213 - DNA, 832 bp, Canis familiaris
  misc_feature (728)..(728): n comprises a, c, g, or t, or includes no nucleotide
  misc_feature (794)..(794): n comprises a, c, g, or t, or includes no nucleotide
  misc_feature (798)..(798): n comprises a, c, g, or t, or includes no nucleotide
  misc_feature (826)..(826): n comprises a, c, g, or t, or includes no nucleotide
  misc_feature (828)..(828): n comprises a, c, g, or t, or includes no nucleotide
tttacacttacctttatatcagcaattttttttgacactatgctggaagaaacttttttcaatagtaacatccagagtgacaaaatgcaggaaatttattacataaaatttctaggaggtaaaagtttaacccccaaattcttcatccatacatgttcttgctataagaaattacagaattaaaacttaatgtacctcagttatttgcaaatgcctaaatttttcctcctttggaaataaaaatatcagttttattttgcaattgcccaacttcttttgttatgtagtctgattagagacaacaaatagcagctatttttcaccttcagtttcatttttttccaaattgtcaatctctgctagtaattatgaatcttaaacaattttatcaaaaacctagagaccaaagacatgcctattaaaatagtctccttcctgtcactgggaactatgcatcgaacatcctgggtcattctaagcctcaggagagattgtaaagatcctttcaaagtgctggtatgaaatcaatgggaaaaagaaaagccaactttaatagcaacaagaaattatgtaccatatatacatcatagcaaatactttatatttgagaatctttacagcttacatttccattccattattatgagatgaaaaacaaaaaattgcaggtagcatgcaaattataaatacagccttccactttactaaacaaattcttactttccagnggtacttcccaatttatgcaggaactggctgcaagctgaactgatagaaattctttaaggttaaanatcnttctcatttaggagaaaccaatacccancntcac

SEQ ID NO: 1214 - DNA, 642 bp, Canis familiaris
cgggcggagtggttcatcgccgccgagggcatccacactggcccgttcgtgttctgcggcagtaagccccgctcaacatagscaatgtgctcccggtgggcmctatgcccgagggcaccatcgtgtgctgtctggaggagaagcctggtgacacggggcacagttggcccgagcctccgggaactacgcgactgtcatctcccacwacccggagwcacmagaagacccgagtgaagctgccgtccggttcacaagaaggtcatttcttccgccyacagagccgtggtgggtgtggtcgctggaggtggccgcattgacacagcccmttctgaaggctggccgtgcttaccmcacagtacacaggccaagaggaattgctggccacgtgtgcggggtgtggccmtgaatcctgtggagcatccttttggaggtggcaaccaccaacacatcggccaaccctctactatccgcagagatgcccctgctggccgccaagtgggtcttattgctgctcgccggactgggcgtctgcggggaacccagactgtgccggagaaggagaactaggcttgaggggctccaataaagtgtgtccttctgcccaaaaaaaaaaaaaaaaaaaaaaaaaaaaaaaaaaaaaaa

SEQ ID NO: 1215 - DNA, 739 bp, Canis familiaris
  misc_feature (2)..(2): n comprises a, c, g, or t, or includes no nucleotide
gnaattcccgggtcgacccacgcgtccgattccgctgtaatgttttcacaatatttaaagcagaagcacgtcagttaggatttccttctgcataaggtttttttgtagtgtaatgtcttaatcatagtctaccatcmaatattttwggagtatctttaatgtttagatagtatattasmagcatgchatrattacatcctaagttctcaagcagaggcagtctattgcaaggaccttctttgctgccagttatcataggctgttttaagttagaaaactgratagcmacactgaatactgtagaaatgcactttgctcagtaatacttgagttgttgcmatatttgattatccatttggttgttacagaaaaattcttaactgtaattgatggttgttgccgtaatagtatattgcctgtatttctacctctagtaatgggctttatgtgctagattttaatatccttgagcctgggcaagtgcacaagtctttttaaaagaaacatggtttacttgcacmaaactgatcagttttgagagatcgttaatgcccttgaagtggttttgtgggtgtgaaacmaatggtgagaatttgaattggtccctcttattatagtattgaaattaagtctacttaatttatcaagtcatgttcatgccctgattttatatacttgtatctatcmataaacmttgtgatacttgaaaaaaaaaaaaaaaaaaaaaaaaaaaaaaaaa

SEQ ID NO: 1216 - DNA, 2367 bp, Canis familiaris
gggcaagcagtggtaacaacgcagagtacgcgggaagcagtggtaacaacgcagagtacgcggggagacacaccactaccctcaccatgagccccaggcagcccctggtcctggtgttcctggtgctgggctgctgctctgcagctcccagaccacacaagcccaccgttgtggtctttccaggagacctgagaactaatctcactgacaagcagctggcagaggaatatctgtttcgctatggctacactcaagtggccgagctgagcracgacaagcagtccctgagtcgcgggctgcggcttctccagaggcgcctggctctgcctgagactggagagctggacaaaaccaccctggaggccatgcgggccccgcgctgcggcgtcccggacctgggcaaattccagacctttgarggsgacctcaagtggcaccacaacgacatcacttactggatacaaaactactcggaagamttgccccgcgacgtgatcgacgacgcctttgcccgagccttcgcggtctggagcgcggtgacrccgctcaccttcactcgcgtgtacggccccgaagccgacatcatcattcagtttggtgttagggagcacggagatgggtatcccttcgatgggaagaacgggcttctggctcacgcctttcctcccggcccgggcattcagggagacgcccacttcgacgacgaggagttatggactctgggcaagggcgtcgtggttccgacccacttcggaaacgcagatggcgccccctgccacttccccttcaccttcgagggccgctcctactcggcctgcaccacggacggccgctccgatgacacgccctggtgcagcaccacggccgactatgacaccgaccgtcggttcggcttctgccccagcgagaaaytctacrcccaggacggcaatggggacggcaagccctgcgtgtttccgttcaccttcgagggccgctcctactccacgtgcaccaccgacggccgctcggacggctaccgctggtgctccaccaccgscgactacgaccaggacaaactctacggcttctgsccaacccgagtcgattccgcggtgaccgggggcaactccgccggggagccgtgtgtcttccccttcatcttyctgggcaagyagtactcgacgtgcaccagggagggccgcggagatgggcacctctggtgcgccaccacttcgaactttgacagagacaagaagtggggcttctgcccggaccaaggatacagcctgttccttgtggccgcccatgagttcggccacgcgctgggtttagatcattcatcggtgccagaagcgctcatgtaccccatgtacagcttcaccgagggcccccccctgcatgaagacgacgtgaggggcatccagcatctgtacggtcctcgccctgaacctgagccacagcctccaaccgccccgcccaccgccccgcccaccgtctgcgctactggtcctcccaccacccgcccctcagagcgccccactgctggccccacaggcccccctgcagctggccccacgggtccccccactgctggcccctctgaggcccctacagtgcctgtggatccggcagaggatatatgcaaagtgaacatcttcgacgccatcgcggagatcaggaactacttgcatttcttcaaggaagggaartactggcgattctccaagggcaagggacgccgggtgcagggccccttccttatcaccgacacgtggcctgcgctgccccgcaagctggactccgcctttgaggacgggctcaccaagaagactttcttcttctctgggcgccaagtgtgggtgtacacaggcacgtcggtggtaggcccgaggcgtctggacaagctgggcctgggcccggaggttacccaagtcaccggcgccctcccgcaaggcgggggtaaggtgctgctgttcagcaggcagcgcttctggagtttcgacgtgaagacgcagaccgtggatcccaggagcgccggctcggtggaacagatgtaccccggggtgcccttgaacacgcatgacatcttccagtaccaagagaaagcctacttctgccaggaccgcttctactggcgtgtgaattctcggaatgaggtgaaccaggtggacgaagtgggctacgtgacctttgacattttgcagtgccctgaggattagrttcagcactgcagagtggatcctatagggatggtcccaatggggagggagccatttgccggacacaaactggtgggtttgttctggaggacaaggagagttgaggtgggctgggctgggcccctctttccaccttccttttttgctggatgtttttaataaactt

SEQ ID NO: 1217 - DNA, 752 bp, Canis familiaris
  misc_feature (2)..(2): n comprises a, c, g, or t, or includes no nucleotide
  misc_feature (672)..(672): n comprises a, c, g, or t, or includes no nucleotide
  misc_feature (683)..(683): n comprises a, c, g, or t, or includes no nucleotide
  misc_feature (724)..(724): n comprises a, c, g, or t, or includes no nucleotide
  misc_feature (733)..(733): n comprises a, c, g, or t, or includes no nucleotide
  misc_feature (735)..(735): n comprises a, c, g, or t, or includes no nucleotide
gnaattcccgggtcgacccacgcgtcckcgtcwccaacgtggcctcgcacatgaggcaagacggacgtwaactacactcagcttgtcgacctgcacgcccgatatgctgagtccggtttacgcatcctggccttcccctgcaaccmgttcgggaggcaggagkccakgggagcaatgcggagatcwaagagttcgccgccggctataatgtcaagttcgatatgtacagcaagatctgcgtgaacggagacgatgctcacccgctgtggaagtggatgaaaatccagcccaaggggaggggcatcctgggamatgccatcaagtggaacttcaccmagttcctcattgacaagaatggctgtgtggtgaagcggtatggtcccatggaagagcccctggtaatagagaaggacttgccctgctacctctagctccacaagtatgcgcctccccacggcccctgcccctcggagccttccacccggcacccatgacagtctgtctaaaaaccagcccgctggtggggcagacccgagaacccggcgtgcamcccctgccggaggaaggttcctttgcccggctcgaggcttggcgccccccccacccctggttatcttgtgggaataaaacgtacaaattggaaaaaaaaaaaaaaaaaaaarrmmrggccgntctaaaggatncaagcttaccttccccgtgcatgcgacggagatagctcttntatagttgngncctaaattcaattcact

SEQ ID NO: 1218 - DNA, 632 bp, Canis familiaris
  misc_feature (29)..(29): n comprises a, c, g, or t, or includes no nucleotide
cccacgcgtccgcacgtctccctgcaagnagtacatggccttcatgatcagccgtgaaacggagaacgttaaatccagtgaggagattgagagcgccttccgggccctgagctccgagggaaagccctacgtgaccaaggaggagctgtatcagaacctgactcgagaacaagccgactactgcgtctcccacatgaagccctacgtggatggcaagggccgcgaactccccactgccttcgactacgtggagttcacccgctcgctctttgtgaactgatcctgctcccagcctagcctggcctgcgctgcctgccccgccgtcagccttgctgcatgtcacctcctctctgtgctcaagtattccagtgtcacctcccacctgtaagcttatgtctgcttagcttgggataagacttagtagaaatggtgcttcactaagccacttccggtccagtggcacttgccctgtggttgtggggacccagattcctgttgtgaagccagctgccccattccgactcgagaaatctaaacagctggctatttcccttcttgttctcccccctccattttgttttcatgtaaaagacaaataaaggactcttccccccgtaaaaaaaaaaaaaaaa

SEQ ID NO: 1219 - DNA, 637 bp, Canis familiaris
cccgacggtggtggacagcgagtcactgcaggtgtacatgaagccaccggcccacgaggagtcmaggcaccatccmrsgcktysyggtgcsggacgctcmctggaccgctwacagcagcgagaaggctccggatatgagcagctctgaagagtttcctagctttggggctcaggtggcccccaagaccctcccatggggccccmwwacgataatgatcmawaagcagaaagctctccagcctgctgaccchwaccccwccacacatggtttgtttcgatctgacccagcggctggaccctccatacattgacgcttccccctccccgaggtctcgcagtgaagccgggcgcgccagcaccgcgcgtgcgctcaggatctgctccctgacacctttgctctgggacggctcgccactgttgtgaacactaacgaggtaattggacatttcccgataagcgtcctggctcatccagcatgtcagtaaggctcgggcctccgcgatgagagytgcacagctgtggctgagtctacttcctgtgtcatgacctcaggaaataaatttccttgactttawaaaarmmmaaraaaaaaaaaaaaaaaaaaaaaaaaaaaaaaaaaaaaaaaaaaaaaaaaaaa

SEQ ID NO: 1220 - DNA, 186 bp, Canis familiaris
caggggtagscctgaggcctgccccaggcagaaccagaaccctccatttccaggctgggaaacggccgagggtgcttgagccgaaccacgtgcaggccgttcttcagccatttctaccacgatagcagaattgaacacattggccaaataaagttgaaattttactaaaaaaaaaaaaaaaaaaaa

SEQ ID NO: 1221 - DNA, 772 bp, Canis familiaris
tacgtgcccaccgctggacccataccctgcgactccagccatctgggccagagcacgaggactccggcgcgtcttcgcctcccamawgcgcaarctgcgcaagcsggtgctgcggacsycgaggacctgcagaggcgcctgsccgtctacaaggccggcgtgcgcgagggtgccgagcgcagcgtgagcagcatccgcgagcgcctctggccgctgctggagcaggcccgcgagcgcaacgccaaggtgggcgmmctggccacgcagccgctgctcgagcgggccgacgmcctgggccagcagctgcgcgggcagctggaggagatgagcagccgggcccgcggccacctggaggagatgcgcgagcagatacaggaggtkckggtgaagatggaggagcaggccgaccagatacgccmaaaggccgaggccttccaggcgcgcctcaagagctggttcgagcccctgctggaagacatgcagcgccagtgggacgggctggtggagaaggtgcaggcggccgtggccaccatccccacctctaagcctgtggaggaaccatgagcgccccgcatgccacctgctgggccycccccaactccttcccgtgccccctgcctgctcccaccggcctycaggaggcctgcccctgcccccagctgtcctcctgaaagggccctagcttaataaagattcaccmagctccammrmmrmwrmaaaaaaaaaaaaaaaaaaaaaaaaaraaaaaaaaaaaaaawaaaaaaraaaaaaa

SEQ ID NO: 1222 - DNA, 701 bp, Canis familiaris
cgcctcccacatgctgcaatctgctgcaactggtgtgctgcgggackccgaggacctgtcagaggcgctctggccgtctatcaaggccggcgtgcgcgagggtkccgagcgcagcgtgagcagcatccgcgagcscctctgkccgctgytggagmaggcccgcgagcgcaacgccaaggtgggcgymctggccacgcagccgctgctcgagcgggccgacgccctgggccagcagctgcgcgggcagctggaggagatgagcagccgggcccgcgsccacsygkmsgagatgcgcgagcagatacaggaggtgcgggtgaagatggaggagcaggccgaccagatacgccmaaaggccgaggccttccaggcgcgcctcaagagctggttcgagcccctgctggaagacatgcagcgccagtgggacgggctggtggagaaggtgcaggcggccgtggccaccatccccacctctaagcctgtggaggaaccatgagcgccccgcatgccacctgctgggccycccccaactccttcccgtgccccctgcctgctcccaccggcctccaggaggcctgcccctgcccccagctgtcctcctgaaagggccctagcttaataaagattcaccaagctccamarmmaaaaaaaaaaaaaaaaaaaaaaaaaaaaaaaaaaaaaaaaaaaaaaaaaaaaaaaaa

SEQ ID NO: 1223 - DNA, 1250 bp, Canis familiaris
cgggagccggtgagaaaccgagttgagggcacagagaccagctcagggctcccgggagcgacgggctggggcgagaccaatcgcaggctggaagatgaaggttctgtgggctgcgctggtggtcacgctcctggcaggatgctgggccgatgtgcagccggagccggagctggagcgcgagctggagccgaaggtccagcaggagctggagccagaggccgggtggcagactggccagccctgggaggcggcgctggcccgcttctgggattacctgcgctgggtgcagacgctgtctgaccaggtgcaagagggcgtgctcaacacccaggtcacccaggaactgacggcgctgatggatgagaccatgaaggaggtgaaggcctacaaggcggagctggacsagcarstkggccccatgacctcggagacgcaggcccgcgtggccaaggagctgcaggcggcgcaggccctggctgcgctcggacatggaggacgtgcgcaaccgcctgacgcagtaccgcggcgagctgcaggccatgctgggccagagcagcgaggagctgcgggcgcgcttcgcctcccacatgcgcaagctgcgcaagcgggtgctgcgggacgccgaggacctgcagaggcgcctggccgtctacaargccggcgtgcgcgagggtgccgagcgcagcgtgagcagcatccgcgagcgcctctggccgctgctggagcaggcccgcgagcgcaacgccaaggtgggcgccctggccacgcagccgctgctcgagcgggccgacgccctgggccagcagctgcgcgggcagctggaggagatgagcagcccgggcccgcggycacctggaggagatgcscgagcaratacaggargtgcgggtgaaratggaggagcaggccgacccagatacgcccaaaggccgaggccttccaggcgcgcctcaagaagctggttcgagcccctgctggaagacatgcagcgccagtgggacgggctggtggagaaggtgcaggcggccgtggccaccatccccacctctaagcctgtggaggaaccatgagcgccccgcatgccacctgctgggccccccccaactccttcccgtgccccctgcctgctcccaccggcctccaggaggcctgcccctgcccccagctgtcctcctgaaagggccctagcttaataaagattcaccaagctccacagcaaaaaaaaaaaaaaaaaaaaaaaaaaaaaaaaa

SEQ ID NO: 1224 - DNA, 1250 bp, Canis familiaris
tttttttttttttttttttttttttttttttttgctgtggagcttggtgaatctttattaagctagggccctttcaggaggacagctgggggcaggggcaggcctcctggaggccggtgggagcaggcagggggcacgggaaggagttggggggggcccagcaggtggcatgcggggcgctcatggttcctccacaggcttagaggtggggatggtggccacggccgcctgcaccttctccaccagcccgtcccactggcgctgcatgtcttccagcaggggctcgaaccagcttcttgaggcgcgcctggaaggcctcggcctttgggcgtatctgggtcggcctgctcctccatyttcacccgcacytcctgtatytgctcgsgcatctcctccaggtgrccgcgggcccgggctgctcatctcctccagctgcccgcgcagctgctggcccagggcgtcggcccgctcgagcagcggctgcgtggccagggcgcccaccttggcgttgcgctcgcgggcctgctccagcagcggccagaggcgctcgcggatgctgctcacgctgcgctcggcaccctcgcgcacgccggcyttgtagacggccaggcgcctctgcaggtcctcggcgtcccgcagcacccgcttgcgcagcttgcgcatgtgggaggcgaagcgcgcccgcagctcctcgctgctctggcccagcatggcctgcagctcgccgcggtactgcgtcaggcggttgcgcacgtcctccatgtccgagcgcagccagggcctgcgccgcctgcagctccttggccacgcgggcctgcgtctccgaggtcatggggccmasytgctsgtccagctccgccttgtaggccttcacctccttcatggtctcatccatcagcgccgtcagttcctgggtgacctgggtgttgagcacgccctcttgcacctggtcagacagcgtctgcacccagcgcaggtaatcccagaagcgggccagcgccgcctcccagggctggccagtctgccacccggcctctggctccagctcctgctggaccttcggctccagctcgcgctccagctccggctccggctgcacatcggcccagcatcctgccaggagcgtgaccaccagcgcagcccacagaaccttcatcttccagcctgcgattggtctcgccccagcccgtcgctcccgggagccctgagctggtctctgtgccctcaactcggtttctcaccggctcccg

SEQ ID NO: 1225 - DNA, 850 bp, Canis familiaris
  misc_feature (599)..(599): n comprises a, c, g, or t, or includes no nucleotide
  misc_feature (614)..(614): n comprises a, c, g, or t, or includes no nucleotide
  misc_feature (628)..(628): n comprises a, c, g, or t, or includes no nucleotide
  misc_feature (641)..(641): n comprises a, c, g, or t, or includes no nucleotide
  misc_feature (671)..(671): n comprises a, c, g, or t, or includes no nucleotide
  misc_feature (718)..(719): n comprises a, c, g, or t, or includes no nucleotide
  misc_feature (747)..(747): n comprises a, c, g, or t, or includes no nucleotide
  misc_feature (770)..(770): n comprises a, c, g, or t, or includes no nucleotide
  misc_feature (778)..(779): n comprises a, c, g, or t, or includes no nucleotide
  misc_feature (789)..(789): n comprises a, c, g, or t, or includes no nucleotide
gaggcgaaggaggaggattcccgggagccggctggaagatgaaggttctgtgggctgcgctggtggtcacgctcctggcaggatgctgggccgatgtgcagccggagccggagctggagcgcgagctggagccgaaggtccagcaggagctggagccagaggccgggtggcagactggccagccctgggaggcggcgctggcccgcttctgggattacctgcgctgggtgcagacgctgtctgaccaggtgcaagagggcgtgctcaacacccaggtcacccaggaactgacggcgctgatggatgagaccatgaaggaggtgaaggcctacaaggcggagctggacgagcagctgggccccatgacctcggagacgcaggcccgcgtggccaaggagctgcaggcggcgcaggcccsgctgcgctcggacatggaggacgtgcgcaaccgcctgacgcagtaccgcggcgagctgcaggccatgctgggccakagcagcgaggagctgcgggcgcgcttcgcctyccacatgcgcaagctgcgcaagcgggtgctgcgggacgccgaggacctgcagaggcgcctggccgtctacaangccggcgtgcgcganggtgccgagcgcancgtgagcagcatncgcgagcgcctctggccgctgctggagcangcccgcgagcgcaacgcccaaggtgggcgccctggccacgcagccgnntgctcgagcgggccgacgccctgggcancagctgcgcggcagctggagganatgaacannccgggcccgnggcacctggagaaatgcccagcaaatacagaagggccggtgaaaatggagaacagcccacc

SEQ ID NO: 1226 - DNA, 586 bp, Canis familiaris
  misc_feature (26)..(26): n comprises a, c, g, or t, or includes no nucleotide
  misc_feature (38)..(39): n comprises a, c, g, or t, or includes no nucleotide
  misc_feature (71)..(71): n comprises a, c, g, or t, or includes no nucleotide
  misc_feature (87)..(87): n comprises a, c, g, or t, or includes no nucleotide
  misc_feature (131)..(131): n comprises a, c, g, or t, or includes no nucleotide
  misc_feature (136)..(136): n comprises a, c, g, or t, or includes no nucleotide
  misc_feature (158)..(158): n comprises a, c, g, or t, or includes no nucleotide
cgcaactgcgcaagcgtcggagccgnccactggccaanncgcaagccgtctgcttcgagcgggccgacgcncctgggccagcagacntggcgcagggcatgctggagcgagactgagccagcacgggcccncgagngccaccttggaggagatgcgcngagcagatacaggaggtgcgggtgaagatggaggagcaggycgaccagatacgccwaaaggccgaggccttycaggcgcgcctcaagtagctggttygagcccctgctggaagacatgcagcgccagtgggacgggctggtggagaaggtgcaggcggccgtggccaccatccccacctctatagcctgtggaggaaccatgagcgccccgcatgccacctgytgggcctcccccmactccttcccgtgccccctgcctgctcccacccggcctcccaggaggcctgcccctgcccccagctgtcctcctgtaaagggccctagcttaataaagattcaccacagctccacagcagctgctggaaaaaaaaaaaaaaaaaaaaaaaaaaaaaaaaaaaaaaaaaaaaaaaaaaaaaaaaaaaaaaaaa

SEQ ID NO: 1227 - DNA, 614 bp, Canis familiaris
cccacgcgtccgctttaatgatcactcaagtgagatcctcgtgcagagtsctgctggagaggagggctggcttgcacggggcgccgtccaccccttggcgcaggccggccccgccctccttcccagggaggacaatcgccacacacaggagccacgtcacttatgagggccgctgaacaacaaacgctggaaatttcatgaaaacaawatgacctgcctttttatttgatagtgtaatatcatttattttataaatttttagggtttttttctcattgtaatattattgtacagttttgcatggcctaggtgtaatcattttgtttgtttagaatataatgctgacaaatgtgtgtatggaagggaaaaagatgctttggcctctcctctttattgacttttgtttggttttataccctcaatgtcttagagaggtttataagcaattctctgctaccagacaatggtgtggattcttttgcacagaaatatttaaggtgggatagtcaaaaatgtaacaagactcctcaccaatattttatgttggtatcacttaatattaaccagaatttgatgtattgcaataaaacagggaactgttagacctgaaaaaa

SEQ ID NO: 1228 - DNA, 709 bp, Canis familiaris
  misc_feature (381)..(382): n comprises a, c, g, or t, or includes no nucleotide
  misc_feature (410)..(410): n comprises a, c, g, or t, or includes no nucleotide
  misc_feature (417)..(417): n comprises a, c, g, or t, or includes no nucleotide
  misc_feature (459)..(459): n comprises a, c, g, or t, or includes no nucleotide
  misc_feature (461)..(461): n comprises a, c, g, or t, or includes no nucleotide
  misc_feature (497)..(498): n comprises a, c, g, or t, or includes no nucleotide
  misc_feature (516)..(516): n comprises a, c, g, or t, or includes no nucleotide
  misc_feature (530)..(530): n comprises a, c, g, or t, or includes no nucleotide
  misc_feature (536)..(536): n comprises a, c, g, or t, or includes no nucleotide
  misc_feature (573)..(573): n comprises a, c, g, or t, or includes no nucleotide
  misc_feature (603)..(603): n comprises a, c, g, or t, or includes no nucleotide
  misc_feature (643)..(643): n comprises a, c, g, or t, or includes no nucleotide
  misc_feature (689)..(689): n comprises a, c, g, or t, or includes no nucleotide
  misc_feature (695)..(695): n comprises a, c, g, or t, or includes no nucleotide
gaaactttacctttagcagtgagacttaatttcctttttactgttcgttcagctgcatctacataagatgttttgaagcttatcagaaactcagtatactttaaaaacatagggttagggttgggggaaaaaagtgcaggtatttagtaagaaaagtgacccatctagaaagcattgtgaggttgtgtgttggttgactgtgacggaaatgaagggcggggttaagttgtaaatggtggctgattgctctctaactatgtacatgtttgttgggatggctgtcccatattttgtatattggaataaaaatttctataaattatcgtaactgaaagtaaatattctaaattaagtctcactgctaawgtcgtatgggttctnnctttggaaacctttacctttaaaaaatngtttaanacaggggccatgaaactttaggagaaaggggagaaaggaaangngtaatatatgggtcttggttgcctcttaaccatcannatcgggtttttttttttntgtgatggcagtanaaaggnctccttttataacatactactcttgatcttttttaangatactttcattaaaaattcttcatgaggnatttaactgggagctgggagggtaaggcgtccggcctggntttcatgaattaactggggaccttgggcaagtacttaacctttggnttaagntcctttttggaaag

SEQ ID NO: 1229 - DNA, 839 bp, Canis familiaris
  misc_feature (555)..(555): n comprises a, c, g, or t, or includes no nucleotide
  misc_feature (564)..(564): n comprises a, c, g, or t, or includes no nucleotide
  misc_feature (590)..(590): n comprises a, c, g, or t, or includes no nucleotide
  misc_feature (606)..(606): n comprises a, c, g, or t, or includes no nucleotide
  misc_feature (742)..(742): n comprises a, c, g, or t, or includes no nucleotide
  misc_feature (768)..(768): n comprises a, c, g, or t, or includes no nucleotide
  misc_feature (781)..(781): n comprises a, c, g, or t, or includes no nucleotide
  misc_feature (805)..(805): n comprises a, c, g, or t, or includes no nucleotide
  misc_feature (815)..(815): n comprises a, c, g, or t, or includes no nucleotide
  misc_feature (838)..(838): n comprises a, c, g, or t, or includes no nucleotide
gcacgagcggcggtgtgctgcggctgggacgatgctgggctggagccgggtaacgctggtcctcgcggccgcggctgtcacctgcgcctccgcgcagcaggcgccgccgtggacagaaaactgcagaaaatcaacctatcctccttctggaccaacctacaggggttcagttccgtggtacaccataaatcttgacttaccgccctacaaaagatggcatgaattgatggctgacaaggcaccagcgctaaagattatagtgaattccctgaaggatctagtaactgcatttgtgccaagtggaaaaattatgcagatagtggatcaaaagttgcctggtctccttggcaattttccaggtccttttgaggaggaaatgaaggggattgcagcggttactggtatacctttaggagagattcttacattcaatgttttctacgaatttttcaccatttgtacctcaataataacagaagacaaagaaggtcatctactacatgggcgaaacatggattttggaatatttcttgggtggaacataaacaataatanctgggtcgnaacttgacaacttcaaaccttttttnagtgaacctggctttncaaagaaaataataaaacccgcttcaaggcttcaagctttgctgctatgtgggcatgttaacaggattaaaccgggctgttcagtcttacgttaaatgaacgtttcaacataaatggcggtacctgggtgtcatanaatggattttgggaaaaaaaaaagcntgtggacgggttntactaaaataattttggaaatggncaggtacaanaaccaaaatccttgtcaaaacana

SEQ ID NO: 1230 - DNA, 727 bp, Canis familiaris
  misc_feature (561)..(561): n comprises a, c, g, or t, or includes no nucleotide
  misc_feature (598)..(598): n comprises a, c, g, or t, or includes no nucleotide
  misc_feature (662)..(662): n comprises a, c, g, or t, or includes no nucleotide
  misc_feature (682)..(682): n comprises a, c, g, or t, or includes no nucleotide
  misc_feature (692)..(692): n comprises a, c, g, or t, or includes no nucleotide
  misc_feature (706)..(706): n comprises a, c, g, or t, or includes no nucleotide
  misc_feature (708)..(708): n comprises a, c, g, or t, or includes no nucleotide
  misc_feature (719)..(719): n comprises a, c, g, or t, or includes no nucleotide
acgcgtgggttcaactggagaagttattaacttgatgtcagcagatgcccagcagctcatggacttgacagcaaacctcaatctcctctggtcagccccttttcaaatcctgatggccatatcacttctttggcaggagctggggccagcagtgttagcaggggtggcagtccttgtatttgttataccagtgaatgctttagttgcaactagagtgaaaaaactaaagatcctcaaactttatgcatgggagccttcctataaaaagaagattattgaaattcgtgaacaggaattggaagttcaaaaatcagctggatatcttgctgtgttttctatgctgacattaacttgcattccattcttggkttctctgggcgacatttggcatctatttcttattagatgaargraacattttaacagccactaaagtgktcacatycatgtctttgkttaatatttttgaggcttcctttgtttgatttaccagtggtgatctcagctgtggtccagacaagaatatcattggatcgtctggaagactttctcaacgctgangagcttcttcctcaaaatattgaaacaaactacgtangagatcatgccatttggatttacaaatgctttccttctcctgggataaaaaagggattccagtnccttaaaaaacttggacatnaagattccanaaggagcttttacngncctgtttgtanggcaagtt

SEQ ID NO: 1231 - DNA, 930 bp, Canis familiaris
  misc_feature (884)..(884): n comprises a, c, g, or t, or includes no nucleotide
  misc_feature (919)..(919): n comprises a, c, g, or t, or includes no nucleotide
cacgttgcattgaagacgaaacctcggagaggtcaggcgctgtctctccttccctcccggcttggcggctcctccacacttgcaccctgcgaggggccaggcgaacaccaccctctgcagaagccaaggttctgtgtccaaagccatcactgatcccccagcccaagcacccagccacccccaaccactaccatggccgaagacgcagacatgcgcaatgagctggaggagatgcagcgaagggctgaccaactggctgatgagtcactggaaagcacccgtcgtatgctgcaactggttgaagagagtaaagatgctggtatcakgactttggttatgttggatgaacaaggagaacaactggaacgcattgaggaagggatggaccaaatcaataaggacatgaaagaagcagaaaagaatttgacggacctaggaaaattctgcgggctttgtgtgtgtccctgtaacaagcttaaatcaagtgatgcttacaaaaaagcctggggcaataatcaggatggagtggtggcyagccagcctgctcgtgtggtggacgaacgggagcagatggccatcagtggtggcttcattcggagggtaacaaatgatgcccgagaaaatgaaatggatgaaaacctggagcaggtgagcggtatcattggaaaccttcgtcacatgggccctggatatgggcaatgagattgatacacagaaccgccagatcgacaggatcatgggagaaggctgattycmacaaaaccagaattgatgaggccmaccaacgkgcaacaaagatgctgggggagtggttaaatgtgcccacctgtgttctcttccaaatgctgttgggcaagatagcaccttcatgcttttctcatcgnattacctagtaggtctgcacacatacacatattanttcccccccat

SEQ ID NO: 1232 - DNA, 796 bp, Canis familiaris
tcatgtggggagatgaccttgatctttgattgctaccctaaccttgacctctaacctgtgattcccctcagctcctgagagatgccctaatatctagatattaggacagatgtcctaatatctcttagggacccagacccctaaattatccctctccttcattctggtgttacggtggagagggcacgtgtcccctctccctaatctaggtgtccatagataagggataagaggttgtggtagtcgtcccawggtgcccccaccagactctcsctgcttaccccactgcaaggggagtgggacttggggcttgggactccattcaccmaagctgatatggcttctcattaaccctgtcagatctctgaagagtatgggcctaaatgaatgtgtgtcagagaaggcttgctggtgggttagtggtcctcagggtggggtagagwcatccmgtgtgtgaaacggaagtcggaatggtgggctgtgaacaagtctgagggaaggatcagagctggggcmataggaaggggcctggggccattggctgcactaactttggtagctgtgtagacagtgtgtgtctacagtgggagggggagggagctcagctgggacaggcgctgcttggggcttggcgtaggggtggggaagggctgccttggggctctgcccacmctgtgtcgtgtgcggagggtgccctcctgtgtcccacaacttctgctgtaacaataaactgtagaggaactgaaaaaaaaaaaaaaaaaaaaaaaaaaaaaaaaaaaaaaaaaaaaaaaaaaaa

SEQ ID NO: 1233 - DNA, 718 bp, Canis familiaris
  misc_feature (9)..(9): n comprises a, c, g, or t, or includes no nucleotide
caattgtgntgaccaggtggcgccctggctccggctttcaccaataccatgcgtgtggtgctgtgccgtgacgggccccagagtccctcctycagccsctgtcccacccccttcsccracccatccattaggccagcaatgcttgtagtgctcactcgggggttgtcatgtggcactggtggsctgggatgccagggaagatgaaygcctctgtaaracaygacttttttaggaccctgttcagtgcaggtggcccagagctgggctgcacatcaggtgacctcaccgcagcaacggacgagggaagggtgcaggactggaagccccagagctttaacacggagggcaacagctcctgcttctcctcctctgtgtactccattcggttcctatagaaaatggrtacgcagagaactcccaacccwggcctggctgggtctagagaccmccgcaagaatcgcagcccagggcagtggttccagttacactggctcaggcccttactcgcttctccacccccctgtctcccccactcccacctgcccttctgttcctaggctcagctgcaggcaaacactccaccctccatttcccccactcctgcagctgcctccaggcctgttgctatagagcctacctgtgtgtcaataaacaacaattgaagcmmmmmaaaaaaaaaaaaaaaaaaaaaaaaaaaaaaaaaaaaaaaaaaaaaaaa

SEQ ID NO: 1234 - DNA, 694 bp, Canis familiaris
  misc_feature (440)..(440): n comprises a, c, g, or t, or includes no nucleotide
  misc_feature (461)..(461): n comprises a, c, g, or t, or includes no nucleotide
  misc_feature (477)..(477): n comprises a, c, g, or t, or includes no nucleotide
  misc_feature (513)..(513): n comprises a, c, g, or t, or includes no nucleotide
  misc_feature (529)..(529): n comprises a, c, g, or t, or includes no nucleotide
  misc_feature (603)..(603): n comprises a, c, g, or t, or includes no nucleotide
  misc_feature (613)..(613): n comprises a, c, g, or t, or includes no nucleotide
  misc_feature (646)..(646): n comprises a, c, g, or t, or includes no nucleotide
  misc_feature (691)..(691): n comprises a, c, g, or t, or includes no nucleotide
agaacgtggagaagcggaggagccgcgagagcctcactgtggacgtggtcaagtacgagagcggccctgatggaggggaggaaatgagaaaaatgaagctcgggctggttaaatgacttgctgagcgtcccatggcctagctgccttatgtggcgctcacactgtctcctgcatgacgggcggctcctccagctttacttctctctccagtgctgactgctgtgtttagcaatcccctaggattcttgtcagagctccacctctctgtgactggccattcctttcggtgctgctgtcctttttggggggttccttatctctgtatacatgtagctttgccagatatgtacttagtaatataaactgtgttaataaaaaccatttactgtgtgatcatgagaattaaaaataagarccgatwagttgtymcttttgataanaggaagttaagaagtctcccncaggtgttaatgcagnggcatgaccgttgacactagctaggctgtaacaagnagggcatgtgctgctnccggcgtgctccgaggcctgccgaggccacccggccccggctcccctaggatctcgctcaagaacatttgctgngtagctctgngaaatttggaatttgctttttccctaacttaangtcagggattgggattgggctttaactctaaaaactactccatgnaaa

SEQ ID NO: 1235 - DNA, 678 bp, Canis familiaris
aatttgtcctggaacagtcaagaaaaatattatgggaagaaaatctaatatcgcagcataaccccaccctttgtattttgtgcagtgattattttttaagatcttctttcatgtaagtagcacaacagggcttcactctcttttcatctcattaattcaattaaaaccattaccttttaaaaatcttttcttctttctaagtgtggtgtcttttatcttgaattagtagttgtatgaagtcatagataataatacacttcaccatagatcttatgtgttaggaagaacttaaatgttctktaattcatttatccagatttttatgtttgaattatgcattttccagaagaggggttatctcaagaataatcatatatatgcatacgtaaaaatggaccacagtgacttattagtagttgttagctgccctgctacttagtttgttagagcatttgagcacacattttaattttacctaattaaaatgtgcagtattttcagtgtcatatttaactatttagagtatgatttccacctcgatgttttaatatcctagacatctgctgtaataatattttagaaaatgtttggaatttaaggaataacttgtgttactaatttgtataacccgtatctgtgcaatggaatataaatatcacgaagttgtttgaaaaaaaa

SEQ ID NO: 1236 - DNA, 551 bp, Canis familiaris
  misc_feature (537)..(537): n comprises a, c, g, or t, or includes no nucleotide
gcggctcggaccgagcagggttttccttgccccagtggattgtgtagaatacactgccagtctcttgtcttctgttcaccatggcttcttctgatatccaggtgaaagaactggagaagcgtgcctcaggccaggcttttgagctgattctcagccctcgatcaaaagaatccgtcccagaattccccctttcccctccaaagaagaaggatctttccctggaggaaattcagaagaaattagaagctgcagaagaaagacgcaagtcccatgaagctgaggttttgaagcagctggctgagaagcgggagcacgagaaagaggtgcttcagaaagcgatagaggagaacaacaacttcagtaagatggcggaagaaaagctgacccacaaaatggaggccammaaaragaacccgagaggcccagatggytgccaaactggarcgcttgcgggagaaggacaagcacattgaggaagtgcgaaagaacaaagaatccaaagatcctgttgtgaaactgaagccgctaaatttgttntgagactgactttt

SEQ ID NO: 1237 - DNA, 424 bp, Canis familiaris
gcggtggtagcagccgmwygwgccgacatggctaagattaasgctcgagatcttcgcggcaagaagaaggaagagctgcttaaacagctggaagacctgaaggtggagctgtcccagctgcgcgtcgccaaagtgacaggcggcgcggcctccaagctctctaagatccgagttgttcgcaaatccatcgcccgygttctcaccgtcatcaaccagacacagaaagagaacctcaggaaattctacaagggtaagaagtacaagcccctggatctgcggcccaagaagacacgtgccatgcgccgccggctaaacaagcatgaggaaaatctgaagaccaagaagcaacagcggaaggagcggctktaccctctgcggaagtatgcggtcaaagcctgagccctggcgttaataaaacacaaac

SEQ ID NO: 1238 - DNA, 643 bp, Canis familiaris
agtacaagcaagtacgcttaattggaagaagccctgatggcagacatcttgtcgcgagctgctgatacggaagagatggacatgaaatggacagtggagatgaggcctaagagtatgatcaggtaactttcgaccaactttccccaagagcaaatttctagaattgaacacaaagcgtttgccactgggttttgcctgtaagaaaaaaagtacccgagcacatagagctttttaatagtgctaaccaatgcctttttagatgtatttttgatgtatatatctattattcaaaaaatgatgtttattttgagtcctaggacttaaaattagacttttgtaatatcaagcaggacccttaagatgaagctgagctttcgatgccaggtgcaatctactggaaatgtagcacttcgcgtgaaatatttgttttcccccctgttttaatatgaaccgatcaggagtaccaaataaatctcccaattaaagattattgtgacttcactgtatataaacagatttttatactttattgaaagaggacacctgtacattcttccatcatcactgtaaagacaaataaatgattatattcacagammaaaaaaaaaaaaaaaaaaaaaaaaaaaaaaaaaaaaaaaaaaaa

SEQ ID NO: 1239 - DNA, 781 bp, Canis familiaris
cggccagatgtggggcgggaggaccggcgccttgctccgggtgtgcgggctgtggccggcaggggccctcggaaggagaccgctgagctgcgatgctgcgtctctggcggggagcggttcctcccagtgttggaactgcggcggccccgggggccccacgcggggggacgggttcttctgcccacagtgccgcgcgctgcagccgcctgaccccactcgagattacttcagcctcatggactgtaaccgtgccttcagagttgacacagcaaagctccagactcggtaccagcaactacagcgtcttgtccaccctgatttcttcagccagagatcccagactgaaaaggacttctcagaraarcattcaaccttggtgaatgatgsctataaraccyttctggytcctctgagcaggggactatatcttctaaagctccatggagtagagattcctgaagggacagattataaaatggacaggcagttcctcatggaaataatggaaatcaatgaaaaacttgcagaagctcaaagtgaagctgccatgaaagagattgaatctattgtcagagctaaacagaaagaaatgactgactatgtgagcagagcttttgaacagatgatttggaaaaagccaaggaaatgttaacaaagatgagatacttttcaaatgtagaagaaaaaatcaagttaaagaagatttccctctaatgattactagtttaaaagtttcaaaaataaagttcttgtctatttctaaaaaaaaaaaaaaaaaaaa

SEQ ID NO: 1240 - DNA, 806 bp, Canis familiaris
ctctctctctctctctgtgactatcataaataaataaaaattatttaaaaaaaaaaagaagtctaactgtgttcttcttcaaggaaagtggtccagtggctcccaggagcctctgagtaaactctttggcacagaaaagcatctcagtgtggatctctgctgccccctcatamcctgataaacctagactccagcagaatttattttgagaattcttcatttttttacagtctttctggactttatcacccttgttttctctgcttggaatattcccctgcttacctgtgtgatctcctcctgtccccttctagactcatttcaagtaccacctcctaataagttttatttgacctttagacggccaggktctttctccyctctgkatctctgrgkttttcatatatgaaaacttattaaaaatggggccagttctttttaaagcttcagctgcctcatctggaaaatggggtaaatagtcagaggtcctgtatccaaccccctcttactcaggccttcctctgcatcctctctgctcccctgcagagcatgctgactgatgctcacagtgcaccgaatgctcttagccacgcttatgttcacagtgtaccgaatgctcttagccatgcttatgtccgccagctcccacccgtgactgcagaatgctatttgttttgttaattttaatcatgtaaattgactaaatattatgcaaatcaatgaaatgtgaaggcaaaaagaattgcatctatgaaaactgaatgttttggaatgactcaataaaagcagttgctaaaaaaaaaaaa

SEQ ID NO: 1241 - DNA, 2961 bp, Canis familiaris
  misc_feature (2273)..(2273): n comprises a, c, g, or t, or includes no nucleotide
  misc_feature (2288)..(2288): n comprises a, c, g, or t, or includes no nucleotide
  misc_feature (2324)..(2324): n comprises a, c, g, or t, or includes no nucleotide
  misc_feature (2446)..(2446): n comprises a, c, g, or t, or includes no nucleotide
  misc_feature (2535)..(2535): n comprises a, c, g, or t, or includes no nucleotide
atggagatgtttacatttttgttgacgtgtgtttttctacccttcgtaagagggcacagtcttttcacttgtgaaccaatcactgtgccccgatgtatgaaaatggcctacaacatgacgtttttccctaatttgatgagacattatgaccagagtacagctgctgtgaaaatggagccctttcttccccttgcaaatttggaatgttcaccaaacattgaaactttcctttgcaaagctttcgtaccagcgtgcacagaccaaattaatgtggttccaccttgtcgtaagttttgtgagaaagtatattctgattgcaaaaaactaatcgacacttttggtatgcgatggcctgaggaacttgaatgtgacagattgcagtactgtgatgagactgttcctgtaacttttgatccacacacacagtttcttggtcctcagaagaacacagagcaagtccagagagacattggattttggtgtccaaggcatcttaagacttctgggggacaaggctataagtttctggggattgaccagtgcgcgcctccatgccctaacatgtattttaaaagcgatgagctagagtttgcaaaaagttttattggaatagtttcaatattttgtctctgtgcaactcttttcacattccttactttcttaattgatgttaaaagattcagatacccagagagaccaattatatattactccgtctgctacagcattgtgtccctgatgtactttatcggattcttgttaggcgatcgcacagcctgcaacaaggcagatgagaagctagaactaggtgacacagtagttctgggttctcagaataaggcttgcactgttctgtttatgtttctgtattttttcacaatggctggcaccgtgtggtgggtgattcttaccattacgtggttcttagctgcaggaagaaaatggagttgtgaagccattgaacaaaaagcagtgtggtttcatgctgttgcatggggaataccaggttttctgactgttatgcttcttgctatgaacaaagttgaaggagacaacattagtggcgtttgctttgttggcctttatgacctggatgcttctcgctactttgtactcttgccactgtgcctttgtgtgtttgtcgggctgtctcttcttttagctggcattatttccttaaatcatgttcgacaagttatacaacatgatggccggaaccaagagaaactaaagaaatttatgattcgaattggagtctttagtggcctgtatcttgtgccactggtgacacttctgggatgttacgtctatgagcaggtgaataggatcacctgggagataacctgggtctctgaccactgtcgtcagtaccatatcccgtgtccttatcaggctaaaacagaaactcgaccagaattggctttatttatgataaaatatctgatgacattaattgttggcatctctgctgtcttctgggttggaagcaaaaagacatgcacagaatgggctgggttttttaaacgaaatcgtaagagagatccaatcagtgaaagtagaagagtactacaggagtcatgtgagttcttcttaaagcacaattctaaagttaagcacaaaaagaagcactacaaaccaagttcgcacaagctgaaggtcatttccaaatccatgggaaccagcacaggtgctacagccaatcatggcacttctgcagtggcaatcactaaccacgattacttaggacaagaaactttgacagaaatacaaacctcccctgaaacatcagtgagagaggtgagagcagatggagcgagcacccccagrtcaagagaacaggactgtggggagccagcctccccagcagcatccagctcccgactctgtgaggaacaggctgacaggaaaggccgggcaggcaatgggactgataagatcagcatatctgaaagtacacggagtgaaggaagggtaactccaaaaagtgatgtcactgaaaccggcccaatgcagagcagcagcttgcaggtcccaggctcttcagagcccggcagcctgaaaggctccacatcactgctcgttcactcagcttcaggaggtagaaaagagcatggcactggaagtcactctgatacgtgagaagcaggttgtcccgatgctgaggagtgggttcatgttacactggaggtgacagtacgctgtcttgtccatgtcactgttgtattcttctgcactgacagctgcattgcctactgttacgctggacacaatanatccgaaaataatanaattaatttcactcagaggtcaatgatgacagtatncccagaaagcagaaatatgccagggtttaatatttttttaagttgccgtgggagaagggattagaggatcttcccttttctatttaggaagttctattcttgttaaaagtattttaagatgnactatatgttatttcacttttatggcataaaatcaagatatttccttgctaaagtatttaaaacttatcttggtatcttttttatatanttgaaaataagtttatatgtatttgaacttttttttagaattcctggaaaagctattcaaatatttttatgttattctgatattttagcactactttggtagcttttacactgagtttctaagaaaattgaaaaatagtattcttttatagtataaaaaataactggcacctgacacactggaaagtgttataacagaaattcaactttaaaaatccatttattccacttcatcatcttccttgtgtgaattttgtaaagtcttgttttaggaattttatacatctgttatgccactaaaataaggtgcttgatgtccagtgttgattgtattatgctgctcattgatcgttccacatttttaaataatatgtcctgaaggattagatgaaatgttactcttttaagccaagtgcaattgatttcc

SEQ ID NO: 1242 - DNA, 625 bp, Canis familiaris
agccaatttgctaatgtaggtgctgacttctttaacgatttcctcgtatctcttctggctgtagggtggttcagtggaataccattttgttaacaccaacaattagttgttttacacccagtgtgtaagccagaagggcatgctcacgggtctgcccattcttgragatacctgcttcaaattcaccamcaccagcagcamcawtcaggacagcacagtcagcytgagatgtgcctgkaatcatgtttttgataaagtctctgtgtcctggggcatcaatgatggtcacgtaatacttgctggtctcgaatttccacagggagatatcaatggtgataccacgttcacgttcagctttcagtttatccaagacccaggcatacttgaaggagccttttcccatctcagcagcctccttctcaaatttttcgatagttcttttgtcgatcccaccacatttgtagatcagatggccagtagtggtagacttgcccgaatctacgtgtccaatgacgacgatgttgatgtgagtcttctcctttcccattttggtttaggtttagcggtggttttcacgacacctgtgttctggcggcaaacccgttgcgaaaaaaaaaaaaaaaaa

SEQ ID NO: 1243 - DNA, 447 bp, Canis familiaris
ccgggctgcaggaattcggcacgaggccagaacacaggtgtcgtgaaaaccaccgctaaacctaaaccaaaatgggaaaggagaagactcacatcaacatcgtcgtcattggacacgtagattcgggcaagtctaccactactggccatctgatctacaaatgtggtgggatcgacaaaagaactawygaaaaatttgagaaggaggctgctgagatgggaaaaggctccttcaagtatkcctgggtcttggataaactgaaagctgaacgtgaacgtggtatcaccattgatatctccctgtggaaattcgagaccagcaagtattacgtgaccatcattgatgccccaggacacagagactttatcaaaaacatgattacaggcacatctcaggctgactgtgctgtcctgattgttgctgctggtgttggtgaatttgaagcag

SEQ ID NO: 1244 - DNA, 827 bp, Canis familiaris
  misc_feature (457)..(457): n comprises a, c, g, or t, or includes no nucleotide
aatctgagaagagcccattgagctaaagtgcaggagccccgtgaagccacccccggaagagagggttctcgggaagagaaccagaagcccaggcttgassgraaagaggagragaaggctgctgcmcckgctcctgaggaggaaatggatgaatgtsagcagsmactgbctgckgagccmmrrgccrvwracmccyktgctcacstgccmaagagtacctttgtkttggacgaatktwagcgcaagtactccvatgaggacactctcactgkgscactkccgtatttctgggagcacttcgataaggatggctggtcccyktggtacgctgagtwccgcttccctgaggagctcamtcagaccbttatgagttgtaacctcatcrctggrawgttccmacggttggacarrctgaggaagaawgcctttgccagtgtcawcctctttggraccmacnacagcagctccatttctggartctgggtcttccgaggccaggagcttscctttccgctgagtccagawtggcaggtggactacgagtcctatacvtggcggaaactggatyctggmagcgaggagacccagacgctggttcgagagtacttttcctgggmrsgrgccttccagcatgtgggcmaaaccttcaatcagggcaagatyttcaagtaaacatctcttgtcatcatcgcctagctgcctgtacctgcccttcagggagatgggggtcattaaaggrmactgaacattgaavmmhwwaaaawaawaaaawmawaaaaaaaaaaarraaaaaaaaaaaaaaaaaaaaaaaaaaaaaaaaaaaaaaa

SEQ ID NO: 1245 - DNA, 677 bp, Canis familiaris
aggccaaagaccccctggctcacctgcccaaggagtacctttgtgttggacgaatttaagcgcaagtactccaatgaggacactctcactgtggcactgccgtatttctgggagcacttcgataaggatggctggtccctgtggtacgctgagtaccgcttccctgaggagtctcactcagacctttatgaggttgtaaccgtcatcacttggaatgttcccaacggcttggaccaagctggaggaacgaatgcctcttgccacgctgtcatcactcctttggtagagcccaccaccagccagagccatcatttggagtctgggtcttccgagggcacgagactttccccttctccctgagatgctccacgagattgtgcacagtgtgagatcatcgcagatctccataatacggtgccggaaatgtggattcctggcaggcgaggagaccccagacgctggttcgagagtacttttcctgggaggggsccttccagcatgtgggcaaaaccttcaatcagggcaagatcttcaagtaaacatctcttgtcatcatcgcctagctgcctgtacctgcccttcagggagatgggggtcattaaaggaaactgaacattgaaccccttaaaaaaaaacaaaaaaaaaaaaaaaaaaaaaaaaaaaaaaaaaaaaaaaaa

SEQ ID NO: 1246 - DNA, 500 bp, Canis familiaris
cccgggtccaggggagttttcagcccctwacccctgagtctccccctccccgcttgctcggggtcagacctgggttcccgtggcctcgggccacggggctcagcacggacagactcgcacccagcgtyttccagcccaacagcaggccatggcgccctcaagcccgcgtcccctgagccccgagaaccaaggtgctatcctgcagacccccccgtctactcggaagcctgggcccctgggccttcagtggcacacaagcgaggtgttgctttttaaacmaaaaaaccaaaccaaacaaccccaagctcttcttccttaggagagtgattggttctacgttttactgaaaaccctctttatgtgttagttttctgattccttgtgtttgctcactgtgtccacgtcagccacttttcagaataaaggtgttcattccymmaaaaaaaaaaaaaaaaaaaaaaaaaaaaaaaaaaaaaaaaaaaaaaaaaaaaaaaaaaggg

SEQ ID NO: 1247 - DNA, 715 bp, Canis familiaris
agatccagacaaggaggcatcccccctgaccaccagaggttgatcttkcysgcaaacagctggaagatggcgcamcctgtcygackacacatccagaaggagtcyaytctgcacctggtccttcgccwcagggggggcatkcagayswkcgtgaagaccttgmcgggtaagaccwtcaymytggaggtggagcccagtgacaccatcgagaacgtcaaggcgwagatccaggacawggagggcatcccccctgaccagcagaggttgatctttgcyggcmaacagctggaagatgggcgcaccctgtccgactacaacatccagaaggagtccactctgcacctggtccttcgcctcagggggggcatgcagatcttcgtgaagacyttgacgggtaagaccatcaccytggaggtggagcccagtgrcaccatcsagaaygtyaargsgragatccmrgammargagggcatcccccctgaccagcmgaggttgatctttgcyggcaaacagctggaagatgggcgcaccctgtccgactacaacatccagaaggagtccmctctgcacttggtcctgcgcttgaggggaggtgtctaatttcccccctttaagctgttgacmaaattcattgcacttttctttcaataaagttgttgcattcccmaaaaaaamaaaaaaaaaaaaaaaaaaaaaaaaaaaaaaaaacaaaaaa

SEQ ID NO: 1248 - DNA, 700 bp, Canis familiaris
gatccagtacaagagggcatcccccctgatccatcagaggttgatcttccggcaacagctggaagatgggccagcctgtccgactacaacatccagaaggagtctaactctgcaccgtggtccttcgcctcagggggggcatcagatcttcgtgaagaccttgacgggtaagaccatcawcccttggaggtggagccccagtgacaccatcgagaacgtcaaggcgmagatccagkacaaggagggcatcccccctgaccagcagaggttgatctttgccggcaaacagctggaagatgggcgcaccctgtccgactacaacatccagaaggagtccactctgcacctggtccttcgcctcagggggggcatgcagatcttcgtgaagaccttgacgggtaagaccatcaccttggaggtggagcccagtgacaccatcgagaatgtcaaagggaagatccaagaaaaagagggcatcccccctgaccagcagaggttgatctttgctggcaaacagctggaagatgggcgcaccctgtccgactacaacatccagaaggagtccactctgcacttggtcctgcgcttgaggggaggtgtctaatttcccccctttaagctgttgacaaaattcattgcacttttctttcaataaagttgttgcattcccmaaaaaaaaaaaawaaaaaaaaaaaaaaaa

SEQ ID NO: 1249 - DNA, 590 bp, Canis familiaris
gcacgagggttgttcgtctccgtgcgcttctgtcacagccgcttgacaatgcagatcttcgtgwagacyttgacgggtaagaccatcaccctggaggtggagcccagtgacaccatcgagaacgtcaaggcgaagatccaggacaaggagggcatcccccctgaccagcagaggttgatctttgcyggcataacagctggaagatgggctgcaccctgtccgactacwacatccagaaggagtccactctgcacctggtccttcgcctcagggggggcatgcagatcttcgtgaagaccttgacgggtaagaccatcaccytggaggtggagcccagtgacaccatcgagaaygtcaargsgaagatccargamtaargagggcatcccccctgaccagtcagaggttgatctttgccggcaaacagctggaagatgggcgcaccctgtccgactacaacatccagaaggagtccactctgcacttggtcctgcgcttgaggggaggtgtctaatttccccctttaagctgttgacaaaattcattgcacttttctttcaataaagttgttgcattccccaaaaaaaaaa

SEQ ID NO: 1250 - DNA, 1327 bp, Canis familiaris
gcacgaggctgcgcggtgctcctgaccttcagtgtgtcgctcccagcgccatggcgccctccaggaagttcttcgtcggggggaactggaagatgaacgggcgcaagaagaacctgggggagctcatcaccaccctgaacgcggccaaggtgccggccgacaccgaagtggtttgtgcacctcccactgcctacatygacttcgctcggcagaagctagatgccaagattgctgtggctgcacagaactgctacaaagtgactaacggggcctttactggggagatcagccctggcatgatcaaagactgcggagccacatgggtagtcctggggcactcggraagaaggcatgtctttggggagtcggatgagctkattggacagaaagtggcccacgccctggcagagggactcggagtaattgcctgcattggggagaagctagatgagagggaagctggcatcactgagaaggttgttttcgagcaaaccaaggtcatcgcagataacgtgaaggactggagcaaggttgtcctggcctatgagcctgtatgggccattgggactggcaagactgcaacaccccaacaggcccaggaagtacatgaaaagctccggggatggctcaagtccmacgtytctgatgcagtggctcagagcacccgtaymatttacggaggttcygkkractggagcamccygcmaagagctggcaagccagcctgatgtggatggcttcctcgtgggtggggcttccctyaagcctgagtttgtggatatcatcracgccrdmcrrtaagcccatycatbtbccctattyctgctaagycagggactaggtagctyaraagctcagtaactgtsctcctacccccacccccaccctgcacatgcttctgatggtgtcacckgccccctttgtggccmaactatacctcttccttaccgtttacaccttaccctgtaatggttgggaccaggccaatcccttctccacttactgtaatggttggaactaaacatgtcaccaaggtgacttctccttggctgagaggtggaaggggtgggatttgcctatgggccccctcagtccccagtgagggcaggagaaagaagccgtcctcctctcccatctcgctccatgaggccaagggctgagagaaaagccctgtcctcccctcagaggccaggggtgctgctctctcccatggtgccaacgcctgtgtgtgttgtgtatgtgagcaatcccacatgtggggggaaataaacacctggcactgaaaaaaaaaaaaaaaaaaaaaraaraaaaaaaaamaaarraaaaa

SEQ ID NO: 1251 - DNA, 698 bp, Canis familiaris
caggggctcagggcacccggtatcatttaccggagggttctgtgactggrgcaaacckgcaaaagagctggcaagscmagcctgatgtggatggcttcctcgtggkkgggcttccctcaagcmtgagtttgtggatatcatcracgccdacmwtaagcccatccatctcccctattcctgctaagccagggactaggtagctcagaagctcagtaactgtgctcctayccsccacccccarccctgcacawgcttctgatggtgtcacctgccccctttgtggccmaactatacctcttccttaccgtttacaccttaccctgtaatggttgggaccaggccaatcccttctccacttactgtaatggttggaactaaacatgtcaccaaggtgacttctccttggctgagaggtggaaggggtgggatttgcctatgggccccctcagtccccagtgagggcaggagaaagaagccgtcctcctctcccatctcgctccatgaggccaagggctgagagaaaagccctgtcctcccctcagaggccaggggtgctgctctctcccmtggtgccaacgcctgtgtgtgttgtgtatgtgagcwatcccacatgtggggggaaataaacacctggcactgaaaaaaaaaaaaaaaaaaaaaaaaaaaaaaaaaaaaaaaaaaaaaaaaaaaaaaaaaaa

SEQ ID NO: 1252 - DNA, 722 bp, Canis familiaris
gtggctcagagcacccgtatcatttacggaggttctgtgactggagcaacctgcaaagagctggcaagccagcctgatgtggatggcttcctcgtgggtggggcttccctcaagcctgagtttgtggatatcatcaacgccaaactataagcccatccatctcccctattcctgctaagccagggactaggtagctcagaagctcagtaactgtgctcctacccccacccccacgcctgcacatgcttctgtatggtgtcacctgcccccttctgtggccaaactatacctcttccttaccgtttacacctctaccctgtaatgattgggagccagcgcgcaactcccctctcttccaccattatctgctagattggttttggagacataatacactagtgcaatcacaacagagtgagcatttctcctccctgtgctgagagagtggaaaagggggggaatgcgccaagggcgccccccccagtccccawgtgaggscaggagaaagaasccktccctccctctcccatctcgctccatgaggccaagggctgagagaaaagccctgtcctcccctcagaggccaggggtgctgctctctcccatggtgccaacgcctgtgtgtgttgtgtatgtgagcmatcccacatgtggggggacaataaacacctggcactgaaaaaaaaaaaaaaamaaaaaaaaaaaaaaaaaaaaaaaaaaaa

SEQ ID NO: 1253 - DNA, 703 bp, Canis familiaris
ttgcctgcccacataggagtcctttcctctgttctagctgactctccggttcctaaagttcttaagtatgscagtttatgttctaatttcagraccatttgcaggttgcatartgtgggagaatcaaaagaggkcctaggcctgcttctrttaggtccctgcagywacggggctrctgccggagtatctctgggcccttccagtctgcatggtggagaactctgggccacaaggtgcttggggggagagggaggaaaccagctgcagtgaaagttwacaccagacggtgcccctcgtcagtgtccttttaaaaaaawacatatactgtagttcagtaagatagcmactgtataaaattgctaaaatagattttagaatcatacagtgtgtctcttggttcatcttcmaaatcagactgatctttgaaactagcagtttttaatcaaagctggctttataggaggagtataatgtatgcactactgttttaaaacaattagtgtgtgtgtgtttttgtatgattgagcccattcatcgtaagtctaaactygttagcgttaatgtacccatgtagactagcmaagtagtatgtagatgtgatctcagttgtaaatagaaaaatctaattcaataaactctgtatcacsccctgaaaaaraaaaaaaaaaaaaaaaaaaaaaaaaaaaaaaaaaaaaaaaaaaaa

SEQ ID NO: 1254 - DNA, 683 bp, Canis familiaris
  misc_feature (550)..(550): n comprises a, c, g, or t, or includes no nucleotide
  misc_feature (617)..(617): n comprises a, c, g, or t, or includes no nucleotide
  misc_feature (624)..(624): n comprises a, c, g, or t, or includes no nucleotide
  misc_feature (658)..(658): n comprises a, c, g, or t, or includes no nucleotide
  misc_feature (664)..(664): n comprises a, c, g, or t, or includes no nucleotide
tcagtgcacarmrtggsgccttacagcctactggtgacccggctgcagaaagccctgggtgtgcggcagtaccatgtggcctcagttttgtgccaacgggccaaggtggccatgagccactttgagcctcacgaatacatccgctatgacctgctagagaagaacattgacattgttcgcaaacgattgaatcggcctctgactctctcagagaagattgtatatggacacctggatgacccagccaaacaggatatcgagcggggcaagacgtacctgcggctgcggccggaccgcgtggccatgcaggatgccacggcccagatggccatgctgcagttcatcagcagtgggctgccaaggtgggctgtgccatccaccatccactgtgaccatctgatcgaggcccagctygggggktgagaaaaaacttgcgcccggcccaaggacataaaccaaggaagtgtataattttctggcaactgcaggtgccaagtatggtgtggggcttttggaggcccgcttttggaaatattcaccaaaatcattntgggaaaactatgcataccctggggttctttttgattgggacttgattccacacccccaatggtggngggcttnggggcatttcatttgaatcggaggtgcttatccntggacntatggccgggattcctgga

SEQ ID NO: 1255 - DNA, 911 bp, Canis familiaris
ggaagtacatcaccaagtccggcactcgtgttggaccaaccagacgggccccatcgtgtggggggagccagggaccaatggccagcaygccttctatcagctcatccaccaaggcaccaagatgataccctgtgacttcctcatcccggtccagacccagcacccrataaggaagggtytgcatcacaagatcctcctggccaactttttggcccaaactgaggcccygatgaaggggaagtcgacagaggaggcccggaaggagctgcagscsgcaggaaagagtccagaggacttagagaagctgttkccacacaaggtytttgaaggaaatcgcccahcwractctattgtgttcaccaagctcacgccattcattctgggagccttgaykkccatgtacgarcacaagatcttcgttcagggtgtcatctgggacatcwacagctttgaccmgtgggggkyggakctgggaaagcagctggccmagaaaattgagcctgaacttgatggcagtagcccagtcacctctcacgactcttccacgaacgggctaatcmacttcatcaagcaggagcgtgaggccagaagccmatwaactcatgcccggctgcarwmmmwrttgtaactggtccttrtctctcctcaccagagatgcgctgcacagtctttcccagagcaccctctggttkcgggcttggagcacaagccctttgggggaagccggtctggaattgccacccctgcccatccatgtccatgtgccctctgttttacgattggctgaagtgttccagtgcagctgatatttctgaccgtgttcgctttgttcgtgtaccagatagaaaaataaagatgccacmaaggaaaaaaaaaaaaaaaaaaaaaaaaaaaaaaaaaaaraaaaaaaa

SEQ ID NO: 1256 - DNA, 625 bp, Canis familiaris
  misc_feature (399)..(399): n comprises a, c, g, or t, or includes no nucleotide
  misc_feature (442)..(442): n comprises a, c, g, or t, or includes no nucleotide
  misc_feature (461)..(461): n comprises a, c, g, or t, or includes no nucleotide
  misc_feature (482)..(482): n comprises a, c, g, or t, or includes no nucleotide
  misc_feature (491)..(491): n comprises a, c, g, or t, or includes no nucleotide
  misc_feature (527)..(527): n comprises a, c, g, or t, or includes no nucleotide
  misc_feature (530)..(530): n comprises a, c, g, or t, or includes no nucleotide
  misc_feature (536)..(536): n comprises a, c, g, or t, or includes no nucleotide
  misc_feature (557)..(557): n comprises a, c, g, or t, or includes no nucleotide
  misc_feature (588)..(588): n comprises a, c, g, or t, or includes no nucleotide
gtgccaggctgagcactgagccctgaacatgggcaccaccatgcctccccacccaggagctgcctgcccactcatcactcactttcttcccctctgagagcaggaagtgacatggcaccttgtccaggaccccggaatcctgggtgccagtgtgtgtgccaaagcccaccgccccacccaaagggagggtgtccccagagcaacagagtaggagcctatcccttctttgccacttcctcatcctgtccccattccccactcttggccagaagccccgtatgctgctgggtaccccactgagtccagaggtggcttggtaccacccgctgcactcctgccacctcagctggctcctgcccatcttcccarcgtgaacgggawtggcttaaaatgacaggngggagaataattaatkgacccaagytctacttgtcaccctttncaaaaggggccttgttatnttgccagcactgataagcaancctggctanggtctggggacaatgccaaattgagggtacctgaantgngcaggncagcttggttctggggtaganaaattccccgccttcttttttagcatatggncagcatgtttaccatctggacagctctgggcctgctc

SEQ ID NO: 1257 - DNA, 267 bp, Canis familiaris
gatttcgtgtaccagtttaaggscgagtgctatttcaccaacgggacggagcgggtgcggcttctgacgagaagcatctataaccgggaggagttsgtgcgcttcgacagcgacgtgggggagttccgggcggtcacggagctcgggcggcccgtcgctgagtactggaacgggcagaaggagmtcttggagcggaagcgggccgmggtggacasggtgtgcagacacaactacgggagggaagagctcaccacgttgcagcggcga

SEQ ID NO: 1258 - DNA, 553 bp, Canis familiaris
gaattcggcacgaggggaattcggcacgagggcgcatctgacaccatgccctccctggggaccatgtgcagcctgctgctcttcagtgtgctctgggtggacctggccatggcgggctccagcttcctaagtcccgaacaccagaaactacagcagagaaaggagtccaagaagccgccggccaaactgcagccccgagccctagaaggctcccttggcccagaagacacaagtcaagtggaagaggcagaggatgagctggaaatccggttcaatgccccctttgatgttggaatcaagctgtcagggcctcagtaccaccagcatggccaggcactcgggaagtttcttcaagaggttctttgggaagacaccaacgaggccctggcagacgagtgatcatccacaagatgggcctgcctgttctccccccaccctagaagcactcacctgacttttacactgtttctgcagctactcccagttctgagtggtactagttgaagaggtgaataaacattcaaaccataaaaaaaaaaaaaaaaaactcgag

SEQ ID NO: 1259 - DNA, 659 bp, Canis familiaris
ttcgaccccgtgckgysgcggatgatgatgcagtccgggcgcaarggagcygacatcatgtacaaggggaccgtcgactgctkgcggaagatcttcaaagatgaagggggcaaagccttcttcaagggcgcgtggtccaaygtcctaaggggcatggggggcgccttcgtgctggttctgtacgacgagctgaagaaagtcatctagacattcctcctccagacacgggggccaagggaatcacgtagaatccttttaactgttacggaccattgatcttcgagaaattccagtgtccttgtcccggccagatcacgtagacagggctggggaaggttccaaagggggctcattgtgatcratcatcggcaccaggttccatgttttgattccggggggaggscmatcatgacgtcttcgtgggtccmcgggctgscagytccgccgctcagaccatagagtccaggtgcttgtgggacccgggttgtgtttaagtatttattwwaaamaaagaatcatgtctccatttgtacttaagcactgttctcttttgcacagccgaatatttgcaattatgttccacrtcgggcattctgctgcaaaaccataamaactgggrmammrwwaaaaaaaaaaaaaaaaaaaaaaaaaaaaaaaaa

SEQ ID NO: 1260 - DNA, 671 bp, Canis familiaris
gccaagggcatgctcccagaccccaagaacacgcacatcgtggtgagctggatgatcgcccgactgkgacggccgtggccggcgtggtctcctaccccttcgacaccgtgcggcggcggatgatgatgcagtccgggcgcaaaggagccgacatcatgtacaaggggaccgtcgactgctggcggaagatcttcaaagatgaaggggscaaagccttcttcaagggcgcgtggtccmaygtcctaaggggcatggggggcgccttcgtgctggttctgtacgacgagctgaagaaagtcatctagacattcctcctccagacacgggggccaagggaatcacgtagaatccttttaactgttacggaccattgatcttcgagaaattccagtgtccttgtcccggccagatcacgtagacagggctggggaaggttccaaagggggctcattgtgatcgatcatcggcaccaggttccatgttttgattccggggggagggcaatcatgacgtcttcgtgggtccacgggctggcagctccgccgctcagaccatagagtccaggtgcttgtgggacccgggttgtgtttaagtatttatttaaaaaaaagaatcatgtctccmwwwrwamwwaaaaaaaaaaaaaaaaaaaaaaaaaaaaaaaaaaaaaa

SEQ ID NO: 1261 - DNA, 441 bp, Canis familiaris
  misc_feature (417)..(417): n comprises a, c, g, or t, or includes no nucleotide
  misc_feature (433)..(433): n comprises a, c, g, or t, or includes no nucleotide
tcatggtgagtcatcgctcaggagagactgaggacacgttcattgccgacctggtggtggggctgtgcacaggccagatcaagactggagccccatgccgttctgagcgtctggctaagtacaaccagctcatgagaattgaagaagagctgggagacgaagcccgctttgccggacataatttccgcaatcccagcgtgctgtgatcccttgactttgcgcggagacctggaacccccctcccgtcctcctggagcttcttccttcctgtcctgctctaggacatttcaccctggacacccctgctgacctgctgcaccatgttccttggcttktykggccccctgctgtgtgctcccccccactaacccccccccgcccccgcctggtccatactctccacttttctgtcctttnttcttcaaaaaatggncatgggac

SEQ ID NO: 1262 - DNA, 578 bp, Canis familiaris
tctttccttttggtctttgtttctggttatagaaggagagatttaaaactgcacagtattaaacccttgaaatcccccsttgtccttcattcaccaaaagtaacctttgtctacagtgaattcttccatctggcaaaaatacttttctaaattttccagcaaaagtttccttaatggtatcagggaagtaaaagatgtacccttgagagcctgggggcgtaggttatcagggcaaaattttttwaaaatctccctttttagtgaaagataatagggattttctactccataatatacccatatttgtcttaatagcagtaatcctttcaaataattttccccaaatctccaaagaaaacggattctcgggatccctgggtggcgcagcggtttggcgcctgcctttggccygggrcgcgatcctggagacccgggatcgaatcccgcgttgggctccctgcatggagcctgcttctccctctgcctgtgtctctgcctctctgtctctctctgtgtgactatcatgaataaataaataaaatctttaaaaaaagaaagaagaaagaaaaaaaaaaaaa

SEQ ID NO: 1263 - DNA, 752 bp, Canis familiaris
  misc_feature (7)..(7): n comprises a, c, g, or t, or includes no nucleotide
ctcaganacgaggagaagatgtggagacttccaagaaatgggctgctggccagaacaaacagcattcaatcmccaagracacggccaagctggaccgggagactgaggagctgcatcatgaccgtgtgactctggaggtgggcaaggtgatccasscagggtcgbyagagcaaggggctgacccagaaggatttggcaacgaaaatcaacgaaaagccgcaggtcatcgcggactatgagagcggacgggccattcctaataaccaggttctgggcammaatcgagagagccatcggcctcaagctgcgggggaaggatatcgggaagccgattgagaaggggccaagggcgaaatgaacacaaagcctcgaaatcagtgcattccggctgatgtcgcctggctggttgcccttgaccaccagcgccagtgcgggtctcttgacgtggccgcgcggaacgcggggcgccagccctgcccaggaacccccttacccatacctgctgtcaaacaaacaaaaccttgtatagcattgcttctcctgaaattttttcctctccatctccagtgtctgcccagacggggtggctccccggggacctctgagtgggactacctcaggttggtggggctgtgggatggggcaacctgatcgggagagaagacccgtctccggtccggcttttagagaagccaataaacatttgttgcccttmaaaaaaaaaaaaaaaaaaaaaaaaaaaaaaaaaaaaa

SEQ ID NO: 1264 - DNA, 431 bp, Canis familiaris
  misc_feature (405)..(405): n comprises a, c, g, or t, or includes no nucleotide
gcacgagwgccagtagcatatgcttgtctcaaagattaagccatgcatgtctaagtacgcacggccggtacagtgaaactgcgaatggctcattaaatcagttatkgttcctttkgtsgstcgctcctctcctacttggataactgtggtaattctagagctaatacatgccgacgggcgctgacccccctcgcgggggggatgcgtgcatttatcagatcaaaaccaacccggtcagcctccctccggccccggccggggggcgggcgycggcggctttggtgactctagataacctcgggccgatcgcacgccccccgtggcggcgacgacccattcgaacgtctgccctatcaactttcgatggtagtcgccgtgcctaccatggtgaccacgggtgacggngaatcagggttcgattccggagaggg

SEQ ID NO: 1265 - DNA, 618 bp, Canis familiaris
cagcactttctcatctgtggtgaagacagaatcttaaaatatatttggagttttatctatcttacaagttcattgatggccccatttccttccagttccctgccatttgagctctgagggattcctgttactaattatgaagaatgtggaacattcataaggcctctgaagcatkktggggggggggggcatttgtttcttaggggtttttatgcttatcttttggaaatattgatgtcatattcaactttcagagaatcatactgcgttttattgcatttaggttaagtagaaggcattgaagaatgcattgactttcaggaagtattttgatatatgaagttttccmattgaaggaattatttaataagtaaaagctaagaaatttcattaaaatcataaggcagttaaaaataaaatgggaaaaataactgtactaatggagaattactcaaccaagaggagagtcaagtgaatattttttgtttattggttagtaacagtatttgtaatcctgaatatattcaaagataatgttctgttagtatgttctgtattaataaaaatgaacmmaaattaaaaaaaaaaaaaaaaaaaaaaaaaaaaaaaaaaaaaaaa

SEQ ID NO: 1266 - DNA, 583 bp, Canis familiaris
aaagatggggatgatgagaacagtacctgcaaatttgtgggaggactaattatgtgtccaaatgtgtaatgcacctagagcagtgtctgccgcttttcacttggtatccaggactgtagaagattaaataagcacatcttttatattctctatttaccatttctttcacttgcagtctttggttcctataataaaagaaacttgtagaatatatatattcatatattcatgttgatacaatatttaaaataaatgctaccatcctcatttaattcagcataagactaacagaagtctctaaattgcttaaagatggatgttttgcmaaataccacactactctatatttctttagagaaagtttatagttattgatagttctggtcatttcattatttagtctaatgagtccttttactatgtatagatttatgacagctaattagtactgactgatttggaggtttggacttatgtaagaaaaagtcccatcatttggacttatgtacaaaaaattggatgcaaactattacaattagaaaataaaatatgaaataacttttaaaaaaaaaaaaaaaaaaaa

SEQ ID NO: 1267 - DNA, 896 bp, Canis familiaris
  misc_feature (17)..(17): n comprises a, c, g, or t, or includes no nucleotide
gaccctgaccggcaagnaccatcaccctggaggtggagcccagtgacaccatcgaaaatgtgaaggccaagatccaggataaagagggcatcccgcctgaccagcagaggctcatctttgcaggcaagcagctggaagatggccgcactctttctgattacaacatccagaaagagtcaactctccacctggtcctgcgcctgaggggykgtatgcagatcttcgtgaagamcctgaccggcaagaccatcascctggaggtggagcccagtgacaccatcgraaatgtgaagsccaagatyyaggatawagagggcatcccgcctgaccarcagaggctcatctttgcaggcaagcagctggaagatggccgcactctttctgattacmacatccagaaagagtcaactctccacctggtcctgcgcctgagggstgktatgcagatcttcgtgaagaccctgacyggcaagaccatcaccctggaggtggagcccagtgawaccmttgaaaawgtgaaggccmagatccaggataaagagggcatcccgcctgaccagcagaggctcatctttgcaggcaagcagctggaagatggcckcactctttctgattacmacatccagaaagagtcmactctycacctggttctccgtytgaggggkrgctgktaattcttcmatcttgaattyttagtgcccmatgatggcattgctctgcactctagccatttgccccmatttaagtttagraattaccagtttcagtaagagctgaatcamtrgktttctcmmtagctgktcmmahygktaataaaagttttgttgcatggtarmmwaaaaaaaaaaaaaaaaaaaaaaaaaaaaaaaaaaaaaaaaaaaaaaaaraaaaaaaaa

SEQ ID NO: 1268 - DNA, 681 bp, Canis familiaris
gtaacaaatcttcgtgagacccgaccggcaagaccatcaccstggaggtgrgcccakgacaccatcgaaaatgtgaagscmcagatccaggataaagagggcatcccsscctgaccagcagaggctcatctttgcaggcaagcagctggaagatgkccgcactctttctgattacracatccmgawagagtcaactctccacctggtcctgcgcctgaggggtggtatgcagatcttcgtgaagaccctgacyggcmagaccatcaccctggaggtggagcccagtgataccmhtkgaaaatgtgaaggccmagatccaggataaagagggcatcccgcctgaccagcmgaggctcatctttgcaggcaagcagctggaagatggccgcactctttctgattacmacatccmgaaagagtcaactctccmcctggttctccgtctgaggggtggctgttaattcttcaatcttgaattcttagtgcccmatgatggcattgctctgcactctagccatttgccccmatttaagtttagaaattaccagtttcagtaagagctgaatcmctggttttctcaatagctgttcmaaatgttaataaaagttttgttgcmtggtarmawaaaaaaaaaaaaaaaaaaaaaaaaaaaaaaaaaaaaaaaaaaaaaaaaaaaaaaaa

SEQ ID NO: 1269 - DNA, 745 bp, Canis familiaris
ggtctgcgctgagggtgtatgcagatcttctgaagagcgtgaccgcaagaccatcaccttggagttggagcccagtgacaccatcgaatatgtgaaggccaagatctcaggataaagagggcatcccgcctgaccagcagaggctcatctttgtcaggcaagcagtctggaagatgccgcactctttctgattacracatccagaaaagagtcaactctccacctggtcctgcgcctgaggggtggtatgcagatcttcgtgaagaycctgaccggcaagaccatcaccctggaggtggagcccagtgataccattgaaaatgtgaaggccaagatccaggataaagagggcatcccgcctgaccagcagaggctcatctttgcaggcaagcagctggaagatggccgcactctttctgattacaacatccagaaagagtcaactctccacctggttctccgtctgaggggtgtgctgttaattcttcaatcttgaattcttagtgcccatatgatggcattgtctctgcactctagccatttgccccaatttaagtttagaaattaccagtttcagtaagagctgaatcactggttttctcaatagctgttcwaaatgttaataaaagttttgttgcatggtagcataattgtggtctgtcgtgaaattatgtaatggtgtggggctcctagctgattaaaactggtcaaggaagggaaaaaaaaaaaaaaaaaaaaaaaaaaa

SEQ ID NO: 1270 - DNA, 659 bp, Canis familiaris
agcgcatggtccaggaagctgagaagtacaaagccgaagatgagaagcagagagacaaggtgtcttcmaagaattcacttgagtcttatgctktcaacatgraagcmactgttgaagatgaaaaacttcagggcmraatcaatgatgaagachwmcagaagattcttgacaagtgcmatgaaatcatcaactggctcgataagaaccagactgcagagaaggaagaatttgracaycagcagaaagagctggagaaagtctgcaatcccatcattacgaagctataccagagtgcaggaggcatgccaggaggaatgcctggaggctttcctggtggtggagctcctccctctggtggtgcctcctctgggcctaccattgaagaggktgattaagccaacctgatgacaggtctagcattgttccacacatttgaaggacccmaatttgtagcmaattccmtggcagttttaaagtcgaagctgctwtagtaaatatactgggcattcttgatacttgaatatggaatatgtgcmcagggaaaggaaataaacattgcactttwtaagcactgtattgttaagtggaaaawgcaatgtyttaaawaaaactgtwtttaaaattgrmmmmawaaaaaaaaaaaaaaaaaaaaaaaaaaa

SEQ ID NO: 1271 - DNA, 672 bp, Canis familiaris
taagaaggccccgtttaaagaagaggtgcagataacactttkggggratccmcaaaggagctgcagttttaaaattttctaatgtaccawgtcactgtctagactrmcacacagattttaattggaggttgtgtatgttgtccttattatctgacctgttactcaagtcgtaatattaaaatggcctaagwwwawacatcagtttcctaaagttacacataggaatggttcacmawaccctgcagctatgtcctgatgctggatgagacctgtcttgtgtagtcctaaattggttaacgtaatatcggaggcaccactgccmatgtcatatatgctgcagctactccttwaaccagatgtgtatttactgtgttttgtaacttctgattccttcatcccvacatccvacatgcctaggccatcttttcttcttcagtcacatcctgggatccmatgtataaattcmatattgcatgtattgtgcataactcttctaaaggatcttattttgtgtactatatatgtcagaatatagtgtacattgccatataatgtaaaaagacmatgcraccvactgtcataccmactaaaataccmaaataaattttgmaccagtgaaaaaaaaaaaaaawwaaaaaaaaaaaaaaaaaaaaaaaaaaaaaaaaaaaaaag

SEQ ID NO: 1272 - DNA, 644 bp, Canis familiaris
ggccccgtttaaagaagagkscaagatacmctttgggggatcccaaaaggagcygccagtttttaaaattttctaatgtaccakgtcactgtctagactacamcmagattttaattggaggttgtgtatgttgtccttattatctgacctgttactcaagtcgtaatattaaaatggcctaagaaaaaaacatcagtttcctaaagttacacataggaatggttcacmraaccctgcagctatgtcctgatgctggatgagacctgtcttgtgtagtcctaaattggttaacgtaatatcggaggcaccactgccaatgtcatatatgctgcagctactccttaaaccagatgtgtatttactgtgttttgtaacttctgattccttcatcccaacatccaacatgcctaggccatcttttcttcttcagtcacatcctgggatccaatgtataaattcaatattgcatgtattgtgcataactcttctaaaggatcttattttgtgtactatatatgtcagaatatagtgtacattgccatataatgtaaaaagacaatgcraccaactgtcataccaactaaaatacccaaataaattttgaacagtgarwmwwwaaaaaaaaaaaaaaaaaaaaaaaaaaa

SEQ ID NO: 1273 - DNA, 701 bp, Canis familiaris
tgattctccttagatccctccatctggacgcacgatcttcgatttgtgaggtactctgcttcctgtggaaagggccgtttaaagaagagtgcagatacactttgggggatccaaaggagctgcagttttaaaatgtttctaatggtaccagtcactgtttagactacaacgagattttaattgggaggcttgtggtatgtttgtccctattatctgaccctgttactcaagtcgtaatatttaaatggccttagattaacatcagtttccttaagtttacacataggaatggttcacttaaccctgcagctatgtcctgatgctggatgagacctgtcttgtgtagtcctwaattggttwacgtwatatcggaggcaccactgccaaatgtcatatattgctgcagctactccttaaaccagatgtgtatttactgtgttttgtaacttctgattccttcatccctacatccracatgcctaggccatcttttcttcttcagtcacatcctgggatccmatgtataaattcmatattgcatgtattgtgcataactcttctaaaggatcttattttgtgtactatatatgtcagaatatagtgtacattgccatataatgtaaaaagacatgcraccactgtcataccaactaaaataccaaataaattttgaacagtgaaaaaaaaaaaaaaaaaaaaaa

SEQ ID NO: 1274 - DNA, 714 bp, Canis familiaris
gttcttcgtagtggtgcgtgcatcttgggacagagtggaatctctgagtgttgtgcaaggtgacttctgacttcctgaggaagagcccgttagagaagagtgcagatacactttgggggatccaaaaggagctgcagttttaaattgttcgtaatgtaccatgtcacggtctagactacgtcaagattttaattggagttgtgtatgttgtccttattatctgacctgttactcaagtcgtaatagttaaatatggcctaagggttacatcagtttccttaagttacacataggaatggttcacaaaaccctgcagctatgtcctgatgctggatgagacctgtcttgtgtagtcctaaattggttaacgtaatattcggaggcaaccactgccaatgtcatatatgctgcagctactccttagacccagatggtgtatttactgtgttttgtaacttctgattccttcatcccaacatccaacatgcctaggccatcttttcttcttcagtcacatcctgggatccaatgtataaattcaatattgcatgtattgtgcataactcttctaaaggatcttattttgtgtactatatatgtcagaatatagtgtacattgccatataatgtaaaaagacaatgcgaccaactgtcataccaactmaaataccaaataaattttgaacagtgaaaaaaaaaaaaaaaaaaaaaaaa

SEQ ID NO: 1275 - DNA, 665 bp, Canis familiaris
  misc_feature (70)..(70): n comprises a, c, g, or t, or includes no nucleotide
ccattgctgtcccgcaaccatgaacgcggcgtgtgcctgtgcgtgctgctgcggtactggcggcgggcgnccctggcgcagcccgtcccggccgacccggcgggcccgggggcgcagcgggaggacgaggcgccccggaggcagctgagggcagtgcagaaggtggacggcgagccccgcgcgcacctgggcgccctgctggccaggtacatccagcaggcccggaaagctccttctggccgaatgtccgtcattaagaacctgcagaacctggaccccagtcacaggataagcgaccgggactacatgggctggatggattttggccggcgtagtgctgaggagtatgaatacccctcctaagggaccctgcctttgtcggcacaccaggaagcaaccgcctggctcagaagaggcagaaaaagaaaacaatcacactcataagtcattgtctctgaagtttgacattttcattatctatttattaagttttcaatgtgaaaaatgtctgtaagattgtccagtgcaacctcacacctcaccagaattgtacaaatggaaagcaaaacattttcctcgtctgtgatgcgkggtcctaaagkgttgytwtgctatttaaaaaawaatttcatttctgctccctaaaaaaaaaaaaaaaaaaaaaa

SEQ ID NO: 1276 - DNA, 652 bp, Canis familiaris
ctcggctacattgtgagagtgatctttcaaatggacctgatcttagatgtaaacattcagatttaccckgtagacttgggtgacaagttccggttggtcatagccagtacattatatgaagatggtaccctggatgacggtgaatacaaccccacagatgataggccttccagggctgaccagtttgagtatgtaatgtatgggaaagtatacagaattgaagggcgaygaaacttctactgaagcagcaacgcgtytctctgcctatgtgtcctatggtggcctgctyatgaggctgcagggtgatgccaacaacctgcatggatttgaagtggattccagagtttatctgctgatgaagaaactggcattctgaaacacccaggaagccaaccttgctgttcagtcactcaggcccttggacatcctttcgagcctgagaagcagttactgttgaccacctggtcagaaagggctggctgactgttctctgggggtacatctttaggtgatctggactcaatgggaaacttgcctgtgaaagacccagtgggagagcttaaaacgaatcagaagttgttttgtgtatatgattttttaattaaactttgctttttcagaaaaaaaaaaaaaaaaaaaaaaaaaaaaaaaa

SEQ ID NO: 1277 - DNA, 627 bp, Canis familiaris
tgccctcactgctggcccggaggtccaaggcagaagagttgggccttcccgtcttggggtcctgaggtcctatcggtgttgggtcccacctgacatcatgggcattgggccagcctatgccatcccgtgtagctttgcaaaagcagggctgacggtaaaaggacgtgggacatctttgagatcaatgaggcctttgcaagccaggctgtctactgtgtggagaagctaggactcccccccgagaaggtgaaccctctggggggtcagtggccttgggtcacccattgggctgcactggagctcgacaggtcatcacgctcctcaatgaactgaagcgccgtgggaagagggcgtacggggtggtgtccatgtgcatcgggaccgggatgggagctgctgctgtctttgaatacsctggaaactgagtcgaggccccgggctaggggcgctccctggctctgctctggtggtggtggcggcactgggactaacatgagcactggtgacacagtacaggagtggctgaggtacagagctgccctctgccaggtcacccaggccactgtgtaagtcctgggagtgaggaatgcagcasacagtaaatatgtattctcaaaaaaaaaaaaa

SEQ ID NO: 1278 - DNA, 639 bp, Canis familiaris
  misc_feature (622)..(622): n comprises a, c, g, or t, or includes no nucleotide
  misc_feature (629)..(629): n comprises a, c, g, or t, or includes no nucleotide
accggggaccccagtgaggccagtgcgcctgttcaaggggccagacctccggccggattgtagtgccccgaggctgccgagactttggctgggaccctgctttcagcctgatggatatgagcagacgtatgcagagatgcccaagccaagaagaatgccatctcccatcgcttccgggccctgcttgagctacagaatactttggcagcctcactcctctggtagttggtgatgattgccctggcaggggatctggggaaggctagyttgccatctctcccatcagacaggcagccctccaggtactgccttcagggttagaccttcctaggggtgttgagaccaacctcaccagccytgtttggaggagcagctggctctgcttgtagaaacttgggataagggacactattttcttgccctcggggattcagtggtccctcctatagcctcctggcctgggatcctgaaaggaccttggatgttaaactggtcatggcaggatccagggtttgggaagaaccacacaaatagcccttgacatttttaaagtggaagaaataaaaatactggaaggcacttgcctccagaataaactggaaaaaaaaaaaaaaaaaaaaanaaagggncggccgcttt

SEQ ID NO: 1279 - DNA, 904 bp, Canis familiaris
ccgggctgcaggaattcggcacgagcgacggaggagtaggcggtgggatctcgctggctgtctgactagtcctttctctgccttgcttgtttgagcttcagcagaattcgaaatggctggcggtaaggctgggaaggactccggaaaggccaagacaaaggcggtttcccgctcacagagagccggcttgcagttcccggtgggccgtattcatcgacacctgaaatctaggacgaccagtcatggacgtgtgggcgcgactgccgckgtgtacagcgcagccatcctggagtacctcaccgcagaggtacttgaattggcaggaaatgcatcgaaagacttgaaggtaaagcgtattacccctcgtcacttgcaacttgctattcgtggagatgaagaattggattccctcatcaaggctacaattgctggtggtggtgttattccacacatccrcraatctctgattgggaagaaaggacrwcagaagactgttwaaaggatgcctggattcmttattatctcaggactctaaatactcttaacarctgtccagtgttggkgattccagtggactgtatctctgtgawaaacacmattttgcctttttgtaattctatttgagcaagttggaagtttaattagctttccaaccaaccaaatttctgcattcgagtcttaaccatatttaagtgttactgtggcttcaaagaagctattgattctgaagtagtgggttttgattgagttgactgtttttaaaaaactgtttggattttaattgtgatgcagaagttatagtaacaaacatttggttttgtacagacattatttccactccagtggataagctcaataaaggtcatatcccmaamwaamaawaaaaaaaaaaaaaaaaaaaaaa

SEQ ID NO: 1280 - DNA, 2344 bp, Canis familiaris
cgattaagagaccgagctcctcctcgtcgcggagcccgaccgcctttcggaaacctgaacgtgagcctgagcgcgggcagggaagcgggacgccgtcatggctaagagcgcggccatcggcatcgacctgggcaccacctactcctgcgtgggggtgttccagcacggcaaggtggagatcattgccaatgaccagggcaaccgcaccacccccagctacgtggccttcaccgacaccgagcggctcatcggggatgcggccaagaaccaggtggcgctgaacccgcagaacaccgtgttcgacgcgaagcggctcatcggccgtaagtttggcgacccggtggtgcagtcggacatgaagcactggcctttccaggtggtcaacgacggggacaagcccaaggtgcaggtgagctacaagggggagaccaaggcgttctaccccgaggagatctcgtccatggtgctgaccaagatgaaggagatcgccgaggcctacctgggctacccggtgaccaacgcggtgatcaccgtgccggcctacttcaacgactcgcagcgccaggccaccaaggacgcgggggtgatcgcggggctcaacgtgctgaggatcatcaacgagcccactgccgccgccatcgcctacggcctggacaggaccggcaagggggagcgcaacgtgctcatctttgacctgggcgggggcaccttcgacgtgtccatcctgacgatcgacgacggcatcttcgaggtgaaggccacggccggggacacgcacctgggcggggaggacttcgacaacaggctggtgaaccacttcgtggaggagttcaagcggaagcacaagaaggacatcagccagaacaagcgagccgtgaggcggctgcgcaccgcctgcgagagagccaagaggaccttgtcgtccagcacccaggccagcctggagatcgactccctgttcgagggcatcgacttctacacgtccatcaccagggcgcggttcgaggagctgtgctccgacctgttccggagcaccctggagcccgtggagaaggccctgcgcgacgccaagctggacaaggcccagatccacgacctggtcctggtggggggctccacccgtatccccaaggtgcagaagctgctgcaggacttcttcaacggccgcgatctcaacaagagcatcaatcccgacgaggcggtggcctatggggcggccgtgcaggcagccatcctgatgggagacaagtccgagaacgtgcaggacctgctgctgctggacgtggcgcccctgtcgctggggctggagacggccgggggcgtgatgaccgccctgtcgcgcaactccaccatccccaccaagcagacgcagatcttcaccacctactcggacaaccagcctggagtgctgatccaggtgtacgagggtgagagggccatgacgcgcgacaacaacctactggggcgcttcgagctaagcggcatccccccggcgccgcggggcgtgccccagatcgaggtgaccttcgacatcgacgccaacggcatcctgaacgtcacggccacggacaagagcacgggcaaggccaacaagatcaccatcaccaacgacaagggccgcctgagcaaggaggagatcgagcgcatggtgcaggaggccgagaagtacaaagccgaggacgaggtgcagcgcgacagggtgtctgccaagaacgccctggagtcctacgccytcwacatgwagagtscggtggaggacgagggtctcaaggggaagatcagcgaggccgacaagaagaaggtgctggacaagtgccaggaggtgatttcctggctggacgscwhcaccytggcggaraaggacgagtttgagcacmagaggaaggagctggascaggtgtgtaaccccatcatcaccggactgtaccmgggagcgggtggtcctggggctggtggctttggggctcaggctcccmaagggggctctgggtctggccccaccmtcgaggaggtggattaggacttcttccccagattgttcctgtttgtgtcagaaacggttaggattaaggattctracmttgccytatatgtctgtgtttcatcmgtctcmactctgcmagttgtttgcmaagtttcmactgtcttttggtgaagttatgaagttccytttttttttagagtccmaatgtaggaagaatttatactgccmttttttttttcttttttgtagtattgacgttgaacctgggcctttgttataactgatttttgcmgagtaaataaactcmatcmtttgtcttgccaaaaaaaaaaaaaaaaaaaaaaaaaaaaaaaaaaaaaa

SEQ ID NO: 1281 - DNA, 805 bp, Canis familiaris
tattaactataatatggttacagctattacatatatctctatattctggttatagttctaataggaagtggtgcgtgtgacactggcctggggcaagtccctattgctcttcagctcatttggaggaggccgggcacagagccgaggtgtggcttaaaccctccccygtacccattcttcactgtagagctgtgaaggtgtcacttgtccccctctgccttttagtggtatctgaaatatacacaaagaatgtcctagtcacactgttatccgatgttctgtgaataatttccacgtggacatataccaatttgaactccgaagccacccccagtccaggtacagggcagcctgcaggttacccaccacacgcgcatcctytacatggtccttgtcacccaagtgcgacagggtccaagcattccttttaaacctcagaggtagcagwaaacctttyagtgttgctgttagcaagtgtgtatttgccaatagctacccatttgtactcacgtgccaacaaataaacatcagctgcacatctgcttccgctgtgtcccttcgggtgccgtgacatgtgtgaggagcctctcttctgtaggagcgaagctgcgttgactactgctgtcaggattgtgttgtgtggaataatcatctacataaattttatatgcacagtactttcccttttatatgtcaggtaaatatttgtaaaagttatactcacacaaatgaaattattataatgattactaatatattttttccatgtttcattgcctgaataaaaactgtttaccactgttaa

SEQ ID NO: 1282 - DNA, 561 bp, Canis familiaris
actggtggctctttttgccttcttcatctcccacagatgtgatgaccgtctctgaraaagaccgttcgtccagtctggttgttggtgaccttgtgaatttctcggtgcacatggatggtattatttccaaccctggtttccgtgttggtctcattgtgatagctggaaggtaagttttgccaggttcacttctgatgttttagcagcagcttcttcggcttccatcgtcctccaccgcgctgcgcagtttgtgctgcgtgtcctccatcagctcctccacctcgcggaacatctcgttgagggtggcctcctcctgcgggtagctgagagccgggccggcctcggcgggagccgggggcgccgtgggggccggcgcgggggccgtggggaccagccgccgccagcagcaggcacagcagggtgcaccccgagccgccgcatctccgctctgcgcccgccgccgccgagctgtgcgcgggctggagctgccgggcctcgccggggacgccgccgcgggctgcgcgcacgacacgggagcggcgcggaggggagcgcgggatg

SEQ ID NO: 1283 - DNA, 436 bp, Canis familiaris
gcacgagggcaagatgsacgagtgcaaatttccaagaagaggaagtttgtcgctgatggcatcttcaaagctgaactgaatgagtttctcactcgggagctcgctgaagatggctactctggggttgaggtccgagttacaccaaccaggacagaaatcattatcctggccaccaggacacagaatgttcttggtgaaaagggccggaggatccgggaattgactgctgtggttcagaagaggtttggttttcctgagggcagtgtagagctctatgccgaaaaggtggccacaagaggtctatgtgctattgcccaggcagagtcactgcgttacaaactcctaggaggccttgctgtgcggagggcctgctatggtgtgctgcggttcatcatggagagtggggccaaaggctgtgaggtcgtggtgtctggga

SEQ ID NO: 1284 - DNA, 607 bp, Canis familiaris
gtgctgtcccgttgctattgctgagttgggcatctatccagcagtggatcctctggattctacctctcgaatcatggatcccaacattgttggaaatgagcattatgatgttgctcgtggggtacacaaagattctgcaggactacaaatctctccaggacatcattgccatcctgggtatggatgaactttctgaggaagacaagttgactgtgtcccgtgcacggaaaatacagcgtttcttgtctcagccattccaagtagctgaggttttcacaggtcatatggggaagctggtacctctgaaggagaccatcaaaggattccagcagattttggcaggtgaatatgaccatcttccagaacaggccttctatatggtgggacccattgaagaagctgtggcaaaagctgacaagctggctgaagagcattcatgaggaggtccttttggcaaactaagcactgatcatcctcggwgctgwgctgcttgcccctaatctaagaaaaatctgtttgctctgtargccacatgaaagcctgtgttctgtctgaagagtatttaaagtttccaataaaatgtacatccctcaaaaaaaaaaaaaaa

SEQ ID NO: 1285 - DNA, 687 bp, Canis familiaris
gtgcccctgtgacaggctacagccccagcgaggattggctgcccctcccgccaactctttccccagtgggatgccccccttttccccccggcctattgcggggtgggctctatccaccagtgaccccgggattctccccccggaaccatggctccaacagttttggaaatggccattttgatgtccccggcgggtccaaaagttcttcagggctacaaatctcctcaggacatcattcccatcctgggtatggatgactttctgrggaagacaagttgactgtgtccktgcmcggraaatmcrgcgtttcttgtctcagccattccaagtagctgaggttttcacaggtcatatggggaagctggtacctctgaaggagmccatcaaaggattccagcagattttggcaggtgaatatgaccatcttccagaacaggccttctatatggtgggacccattgaagaagctgtggcaaaagctgacaagctggctgaagagcattcatgaggaggtccttttggcaaactaagcactgatcatcctcggtgctgtgctgcttgcccctaayctaagaaaaatctgtttgctctgtaggccacatgaaagcctgtgttctgtctgaagagtatttaaagtttccaataaaatgtacatccctcaaaaaaaaaaaaaaaaactcctcgtgc

SEQ ID NO: 1286 - DNA, 562 bp, Canis familiaris
caaaaggtgtagagcctccttatttgtacagactggattcgtcacaaagtttacaaagtcaagaattccggataaagtakkgtcaacckkcacctgcagatcatgaaaaatatggtggggatccacagcaccctcatgaaacgtgcatattgttaccagaatraaaagtacaaagagacgtccatattgggaaaaagatataataaagatgcttggattagaaaaagcacatactcctcaagttcacaagaatatcccttcagtgaatgcaaaactgaaagtggttaagcatttgataaggatcaagcscctgaagctgccacagggacttccaacagaggaggacatgtctaacacgtgcctcaagagcactggggaattaatagtgcggtggcatctaaaccctgtagatcaggaagctgttaagtcctaatgtgcagagcmatttcmtwttaaaaaatwtaaatcatttaaaggtagtgagaaagtgttctcattaaaatatattttaaatagttgtcaaaaaaaaaaaaaaaaaaaaaaaaaaaaaaaaaaaaaaaaa

SEQ ID NO: 1287 - DNA, 556 bp, Canis familiaris
  misc_feature (425)..(425): n comprises a, c, g, or t, or includes no nucleotide
  misc_feature (479)..(479): n comprises a, c, g, or t, or includes no nucleotide
  misc_feature (499)..(499): n comprises a, c, g, or t, or includes no nucleotide
  misc_feature (502)..(502): n comprises a, c, g, or t, or includes no nucleotide
  misc_feature (511)..(511): n comprises a, c, g, or t, or includes no nucleotide
  misc_feature (535)..(535): n comprises a, c, g, or t, or includes no nucleotide
  misc_feature (537)..(537): n comprises a, c, g, or t, or includes no nucleotide
ggaggtagccctggttatggaggaggaagaggaggatatggtggtggaggacctggatatggcaaccagggtgggggctacggaggtggttatgacaactatggaggaggaaattatggaagtggaaattacaatgattttggaaattataaccagcaaccctctaactatggtccaatgaagagtggaaactttggtggtagcaggaacatggggggaccatatggtggaggaaactatggtcctggaggcagtggaggaagtgggggttatggagggagaagccgatattgagcttcttcctacttgccatgggcttcactgtataaataggagaggatgagagcccagaggtaacagaacagcttcaggttatcgaaataacaatgttaaggaaactcttatctcartcatgcctaaatatngcagtggttttggcaggaagacaccaataaccagatgcccgagaggcattttgngaatggattggattattttnaanaacaattanccttacttggggagggaagggttngnaaaaaaaaaaatgcctttg

SEQ ID NO: 1288 - DNA, 626 bp, Canis familiaris
ccagaagccgggaagcccatgggagaacgtgtgtcaccgttcgcagagcttgacccagacagcccgcggcgccatgtcaccttatcaccaagtcctactgggccagagaaagtgaaggcagaggccacaagctcggagcccacgccaacaccgcgcacctctcagcaccccacagtcctcacttccccgggcccaggagccccaggagccagccccctccgtcgggagcggggagcccgggacactgctctcctccctgcccccagcctgctaagccaagtggatgggcctgtgagaggaccccgcatgtgcgcagatggcagagacgggcgtgtgaagggtgaggcggcatcggcagttggaccccggggggatctggacagccccgcgtgcagaacgtcaggcctggaggggagacagggcttgccagctccacccagctgcaggtcccagcctggcaggccggggaggcgggcggggagcaaggcactccctcctctgcctcccctccgagcagagggatcagagtgggatcacatgaataggggagaaaaaaaaaaagagtctatttttgtctaataaagaatttctagaacawwwaaaaaaaaaaaaaaaaaaaaaaaaaa

SEQ ID NO: 1289 - DNA, 375 bp, Canis familiaris
agatctaccacaatgatcaagagggtttaggacacacataaatggggcatggggcacatatgcccagcaaagaaaactacctgggcwcaatgcctagtgcctggcaagaggcaaggagcctggcaggtgcaggtgtgatgggcagtgtaaggggsaggagcagagggatccagtcctgggcaggtgctgggagggaaagctggccccaactgasatgtgttctacttggagtttaagacagtaaagsaagagatgaggtcctgcccccactcccaccatcctgtgcctggragatagggtagccctcctggtcttcacacttccctgcrgactccctggggaatgtgggtttmtgggctgcacccctcgagatct

SEQ ID NO: 1290 - DNA, 684 bp, Canis familiaris
cctgatgccagcctacccccggacccaccacccctcactgtgccccagacacacaatgcccgtgaccagtggctgcaggacgcctttcacatcagcctctgaagagctgagggtggggggaacatgcacccatgcaaaaggctcagaaactcaccccttagtaagtactcagacttatagtgcctgctttcccctatacccacttcacaaggcaagcctcgagcccctcagaggcaaaactgccaaccacctcttttctgactctggttagctaacactggggcaggcacctgggccacagcctttgcccaccgcactggacctccactactcccacatgtgtgcaccccagcttggccaaccttcagtctagtggtggggcccaaagcatctggcactcccyttgacgtctctgggattgggatgagtgcttggttcccatcttttcaccttttgctgctatggcagctgctggctcaggggcatcccacctttggtccctgggttccactgctctagaccagggcattcccattcttgcacccacccacggccgggagggccaaggctccgtgctggatatttaagtttaggggccagactcttgggcacgtagttaaataaatcctctctcggttttaaaaaaaaaaaaaaaaaaaaaaaaaaaaaaaaaaaaaaaaaaaa

SEQ ID NO: 1291 - DNA, 640 bp, Canis familiaris
ggataaagtaagatatggttaaaaatgtgcgctgttttgtcctgaattttagtccagttctggataaataggattttctagttcagatatgagaagttgtagctcttgatatctagctttagccttggtctgctgattgcgttgttttgatttgcttttctggaaaagcatttttgctagcagccatacagacttcctccttcatacctagcagtactttatatcgtcaaaactttgtgccatgcagcatttgaagactcagtttttaaaattgttagcctgttgctgactttattgtgttaattcctagtttcaacagctatttcccttaattcaggatacmacttcttgtgtatgacagctttccttcacacaccatttttgtgggctgtgtatatatctgacttggggagaattggaaaaaaacacagctttttaatttgtttaaaacagaccttctgcctgttacacttttgtgctcttaaccmattaaagaagccagtggcatttttaattttatattgtgtatgttttccactagtatatctccmttgatttgtttgtgccctttattaactgccmttttctaaaatttttttcaataaaaggacaagaagatgtgaaaaaaaaaaaawaaaaa

SEQ ID NO: 1292 - DNA, 668 bp, Canis familiaris
atcatgtagcccaggcactccgggacaacttacaatgggctatatgatggccaaaagcatctggagatcaascctgaccaccccattgtggagacgctkcggcagaaggcagaggcagatwagracgacaaggctktcaaggacctggtggtkctactgtttgaaacagctctactctcctccggcttctcactggaggatccccagactcactccaaccgcatttaccgcatgatmaagctaggcctgggcatcgatgaagatgaagtggcakcggaggaacccagtgctgctgttcctgatgagatccctccacttgagggtgatgaggatgcctctcgcatggaagaagtcgaktaatttctccttgcagaycttgtgccctctgtatagtgtccccatggctccccagcagccctgagtggccccggttcacctggttccctctgctgatgtctagtggatkttttttttttctcytcctgtctttgttagaggcaggacagaagggccttaagccctagccctcatgacatttgacaaggggtttggatgtgtattgtggtgtttgtttattttgttctgagattaaagtatgyaaaataaagaagatacggttttatacmvwwaaaaaamaaaraaawawaaaaaaaaaaaaaaaaaaaaaa

SEQ ID NO: 1293 - DNA, 647 bp, Canis familiaris
aaggccagggcactccggggacaaactytaccaattgggctatatgatggccmmaaagcattctggagatcaaagccctgaccaccccattgtggagacgctgcggcagaaggcagaggcagatwagwacgacaaggctgtcaaggacctggtggtgctactgtttgawacagctctactctcctccggcttctcactggaggatccccagactcactccaaccgcatttaccgcatgatcaagctaggcctgggcatcgatgaagatgaagtggcagcggaggaacccagtgctgctgttcctgatgagatccctccacttgagggtgatgaggatgcctctcgcatggaagaagtcgattaatttctccttgcagaccttgtgccctctgtatagtgtccccatggctccccagcagycctgagtggccccggttcacctggttccctctgctgatgtctagtggattttttttttttctcctcctgtctttgttagaggcaggacaraagggccttaagccctarccctyatgacatttgacaaggggtttggatgtgtattgtggtgtttgtttattttgttctgagattaaagtatgcaaaataaagaagatacggttttatacaaaaawawaaaaaaaaaa

SEQ ID NO: 1294 - DNA, 502 bp, Canis familiaris
gcacgaggccgctamgrkgctcggtccttccgaggaagctaaggccgcgttggggtgaggccctcacttcagccggcgactagcaccgcgctcggcacgcgccctcgccatggcctccgtctcggagctcgcctgcatctactcggccctcatcctgcacgacgacgaggtgacggtcacggaggataagatcaatgccctcattaaagcagcgggtgtgaatgttgagcctttctggccgggtttgtttgcaaaggccctggccaacgtgaacattgggagcctcatctgcaatgtaggagctggtggacctgccccagcagctggcgctgcgccagcaggaggtcctgctccttccaccgctgctgccccagctgaggagaaaaaagtggaagccaagaaagaagaatctgaggagtctgatgatgacatgggctttggtctctttgactaaacttttataagctgctcaataaaaaagcttgaagtccytgaaaaaaaa

SEQ ID NO: 1295 - DNA, 1381 bp, Canis familiaris
ctgcaggtcgacactagtggatccaaagaattcggcacgaggggtcagaagggtgttgggagacctgaggccagcctgagcccggctctggggatcctctccatctagaagaaccaaataaccatcctgttcacctgttgccgggaccatgggggctggggccagcgctgaggagaagcactcaagggagctggaaaagaagctaaaagaagatgctgagaaggatgctcgaaccgtgaaactgctgcttttgggtgcgggggagtccgggaagagcaccatcgtcaagcagatgaagattatccaccaggacgggtactcgctggaagagtgcctcgagttcattgccatcatctacggcaacacgctgcagtccatcctcgccatcgtgcgcgccatgaccacgctcaacatccagtacggagactctgcccgccaggacgatgcccggaagctgatgcacatggcagacaccatcgaagagggcacgatgcccaaggagatgtcggacatcatccagcggctgtggaaggactcgggtatccaggcctgtttcgaacgcgcctctgagtaccagctcaacgactccgcgggctactacctctcggacctggagcgcctggtcaccccgggctacgtgcccactgagcaggacgtgctgcgctcgcgtgtcaagaccacgggcatcattgagacccagttttccttcaaggacctcaacttccggatgttcgatgtgggcgggcagcgctcagagcgcaagaagtggatccactgcttcgagggtgtgacctgcatcatcttcatcgcggcgctgagcgcctacgacatggtgctggtggaggacgacgaagtgaaccgcatgcacgagagcctgcacctgttcaacagcatctgcaaccaccgctacttcgccaccacgtccattgtgctcttcctcaataagaaggacgttttctccgagaagataaaaaaggcgcatctcagcatctgcttccccgattacgacgggcccaacacgtacgaggacgcgggcaactacatcaaggtgcagttcctcgagctcaacatgcgacgtgacgtgaaggagatctattcccatatgacttgtgctacagacacacagaacgtcaaatttgtcttcgatgccgtcaccgatatcatcatcaaggagaacctcaaagattgcggcctcttctgaggtgcctgaactcaggcttgttcctgacaccctatagtcctagcctcctagtagccctagcccacaggagcctatcagcacccccaacacacccccagaatcctgggccccagcctgtggtcccacctgccacagacccaaaaccctgagccccactagccttgaggccccctcgtgccg

SEQ ID NO: 1296 - DNA, 685 bp, Canis familiaris
atcgggacatcttttggaagaggaggatagattcctcaatcattttgcaaatactcgctggtttggtggtgtacctctcatttccttgggcaagaagactgtgaaacaaccagtatatgttgtagatgtatcaaaaggaattgttaatgcaattaaggatccagatgccaaagggaaatcttttgcctttgttgggcccaatcggtaccttctttttgacctggtgcaatatgtctttgctatggctcacagacccttcctgccgtaccctttgccacattttgcctatcggtgggtggcacgactcttcgaaatgagtccatttgaaccctggacaacaagggataaagtggagcggcttcacatcacagacatgatattgcctcacctgccaggcttggaagacctgggaattcaggcctcacccctggagctcaaggccattgaggtactgcggcgccaccgtacttaccgctggctgttgtccgaaattgaagacgtgaagccggccaagactgtcaacttttagctgcccctgtgatgccctggagttttggtggtcagtcaggttgcctggctggtgactagcccactttcttcagggaatcctgtatatagtgaataagatccctctattaaagcatctgaggataaaaaaaaaaaaaaaaaaaaaaaaaaaaaaaaa

SEQ ID NO: 1297 - DNA, 691 bp, Canis familiaris
  misc_feature (529)..(529): n comprises a, c, g, or t, or includes no nucleotide
  misc_feature (541)..(541): n comprises a, c, g, or t, or includes no nucleotide
  misc_feature (543)..(543): n comprises a, c, g, or t, or includes no nucleotide
  misc_feature (559)..(559): n comprises a, c, g, or t, or includes no nucleotide
  misc_feature (594)..(594): n comprises a, c, g, or t, or includes no nucleotide
  misc_feature (618)..(618): n comprises a, c, g, or t, or includes no nucleotide
  misc_feature (627)..(628): n comprises a, c, g, or t, or includes no nucleotide
  misc_feature (643)..(643): n comprises a, c, g, or t, or includes no nucleotide
  misc_feature (673)..(673): n comprises a, c, g, or t, or includes no nucleotide
  misc_feature (690)..(690): n comprises a, c, g, or t, or includes no nucleotide
gagggacggggagcggcagccgcggagtaggatgctctgcggggcgccctgagccgggggcgcttgaagcagcttcgggggccggggccacagggcagctttcaccatgcatcagtccctgactcagcagcggtccagcgacatgtccctgcccgattccatgggagccttcaatcgaaggaaacgaaactccatctatgtcaccgtgactttgcttatcgtgtccgtgttaattctcacggtgggccttgccgcaaccactaggacccagaatgtgactgtcggaggttattacccaggagttattctcggctttggatcattccttggaatcatcggatcaaacctcgttgaaaacaaacggcagatgctggtggcctctatcgtctttatcaagcttggtgtgattgcagccttttgttgtgccatagtcgacggggtctttkstkgcagacacatttgatctgraacctytttwtgtaaccggtgccactacgtcccaagacatccaaaaaggaacttgagaggncataagttcctnancaaaaattttcttcgnggggtatgaggaaccttaccaagcagctaagaggngaatgcctaacttagcctggattntgacgcctnnatccgggcaacactntttggtggactttaaactggggaaccgggngggaaacgggggtctant

SEQ ID NO: 1298 - DNA, 710 bp, Canis familiaris
cctttggccagatcttcaggcccgacaacctcgtgttcggcccagagcgggtgccgggaacaactgggccaaggccactacaccgaagggcgccgagctggtagactckgtgctggacgtgktgaggaaggagtcggagagctgcgactgcctgcagggcttccagctgacgcactcgctgggcggcggcacgggctcgggcatgggcacgctgctcatcagcaagatccgcgaggagtaccccgaccgcatcatgaacaccttcagcgtcatgccctcgcccaaggtgtcggacacggtggtggagccctacaacgccaccctgtcggtgcaccagctggtggagaacaccgatgagacctattccatcgacaacgaggccctgtacgacatctgcttccgcaccctgaagctgaccacccccacctacggcgacctcaaccacctggtgtcggccaccatgagcggcgtcaccacctgcctgcgcttcccgggccagctcaacgccgacctgcgcaagctggccgtgaacatggtgcccttcccgcgcctgcacttcttcatgcccggcttcgccccgctcaccagccgcggcagccagcagtaccgcgcgctcacggtgcccgagctcacccagcagatgttcgactycaagaacatgatggccgcgtgcgacccgcgccacggscgstacytgacggtggccgcta

SEQ ID NO: 1299 - DNA, 666 bp, Canis familiaris
tccataagaagacaccgggccgatccagcctccggacttagcctaggcccgggacggataacaatttcacacagggaaacagctatgaccattaggcctatttaggtgacactatagaacaagtttgtaccaaaaagcaggctggtaccggtccggaattcccgggatcggktkctgtcggttggggccgtcccgcatctaaggcasgraagatggtggccgcgaagaagacgraaaagwcgctggagtcgatcaactctaggctccmactggttatgaaaagtggaaagtmcgtgctggggtacaagcagaccctgaaaatgatcagacacggcmaagsgaaactggtcatcctggccmacaactgsccggctctgaggaaatctgaaatagaatactacgccatgttggccmaaactggtgtccatcactatagtggcmataatattgaattgggcacagcatgtgggaaatactacagagtatgcacactggctatyattgatccaggtgattctgrtatcattagaagcatgccagaacagactggtgaaaagtaaatcatgcmaaatttttctttaataaaactggccmgagcttgttttaaaraaaaaaaaaaaaaaaaaaaaaaaaaaacaaaaaaaaaaaaaaaaaaaaaaaaaaaaa

SEQ ID NO: 1300 - DNA, 483 bp, Canis familiaris
gcmctgmstggcgtgtgccaacgaagaaaaggctatctgcgagtcgaagtggccatcacatttagaaagtggtgacctacaactgttccctctatgggcctcctgctgcaggtctgcggcagggaagcacgcccacctccctccttggtggagccatagcgatattcctgcttggggcagcagtctctctcgcttgatgagctctctccacttgccaatgctcccctgagccctttcccatgttttctcccacgttcattgcaaaagctcagatgggccatcagcttacagcccccgccccgggtttggcaggccagaaggcagtgccacagcagattttccatgatgatgtcatgtggcacggcatcccaagggagagatgacactcttgttgcctaacatgcaagtgaggtctttggatggtatacaattgacagaagtgcaaggttcttggggggagaaagggaggcactccagggggtt

SEQ ID NO: 1301 - DNA, 966 bp, Canis familiaris
  misc_feature (693)..(693): n comprises a, c, g, or t, or includes no nucleotide
  misc_feature (725)..(725): n comprises a, c, g, or t, or includes no nucleotide
  misc_feature (731)..(731): n comprises a, c, g, or t, or includes no nucleotide
  misc_feature (747)..(747): n comprises a, c, g, or t, or includes no nucleotide
  misc_feature (757)..(757): n comprises a, c, g, or t, or includes no nucleotide
  misc_feature (783)..(783): n comprises a, c, g, or t, or includes no nucleotide
  misc_feature (802)..(802): n comprises a, c, g, or t, or includes no nucleotide
  misc_feature (829)..(829): n comprises a, c, g, or t, or includes no nucleotide
  misc_feature (849)..(849): n comprises a, c, g, or t, or includes no nucleotide
  misc_feature (882)..(882): n comprises a, c, g, or t, or includes no nucleotide
  misc_feature (890)..(890): n comprises a, c, g, or t, or includes no nucleotide
  misc_feature (919)..(919): n comprises a, c, g, or t, or includes no nucleotide
  misc_feature (924)..(924): n comprises a, c, g, or t, or includes no nucleotide
  misc_feature (946)..(946): n comprises a, c, g, or t, or includes no nucleotide
ttgaaaggagatgacccttcaaaccattaagaaggagttgacccagattaaaccaaaagtggatttctctactggaagccctgggaaaaatttggagaaaagaacaggagcacaacaaggagagatgaagaatgataagtcagaagaggagcagagcaacagctccctgaagaaagatgagactaatgtgaagatggagtctgaggggggtgcagatgactctgctgaggaggggggacctactggatgatgatgataatgaagatcggggggatgaccagctggagttgatcaaggatgatgaaaaagaggctgaggaaggagaggatgacagagacagcgccaatggcgaggatgactcttaagcacatagtggggtttagaaatcttgtcccattatttctttacctaggcgcttgtctaagatcaarattttcaccagatcctctcccctagtatcttcttcagcacatgctcactgttctccccatccttatccttcccatgttcattaattcatattgccctgcgcctagtcccattttcacttcctttgacgctcctagtagttatgttaagtcttaccctgtaatttttgcttttaattttgatacctctttatgacttaacaataaaaaggatgtgtggtttttaccaactgtctccaaaataatctcttgttatgcagggagnacaggtttttccattcatacatgagctcaagnagttgntttcctaactggaaangcaatcgcantaagttggggagcacctgggagcagntttgagttaaagggttggnggttataccccaaaaaaaaagctttgnggggttgttaacacaaaggnacaatgtattttttgaatgaaagttggattgtnaaagcctnctttaaaaaaaaataggggaaagcttaanattgnttttaaagttgaactgggggtnttttgggacaacctatgttg

SEQ ID NO: 1302 - DNA, 630 bp, Canis familiaris
  misc_feature (411)..(411): n comprises a, c, g, or t, or includes no nucleotide
  misc_feature (523)..(523): n comprises a, c, g, or t, or includes no nucleotide
  misc_feature (557)..(557): n comprises a, c, g, or t, or includes no nucleotide
  misc_feature (575)..(575): n comprises a, c, g, or t, or includes no nucleotide
  misc_feature (626)..(626): n comprises a, c, g, or t, or includes no nucleotide
actaccacccctactacgcartgctgtcagattctcactgcacatttttttaatagaagtgtcccagcttacctgtgagtctgcttctgcatatactcggaccgatatcttctgtaccagaaggcccggacaaaagctcgggaaagcttgtacttcttcacgaggtcattgattgcttcctgtaggcctggaggtgtaactacttgtctttcagcatcagtggtgctgataacttgcctgtctgcaacctatgcacaaacatttcatatttgtcactatatcacaattcccaccaaaagattgtagctatttcattttagtaacagtcctcattgtacagccaagtgcaacactgtcagatagtaacctactagaacaaatacagaatgcaactgcattaaaaatttatanggtgccctggagtggcttaatgggttgagctttccaacttttggtttcaagctcaaggtctaatctcaagggtcctgacataaaagctccacattgggcttttgtgcacagngggggaggcaccttgagggtctcctttgcctctncccctggctcaggaactncatgttcattaatcttttttaaaaaaaaattatgaattttgtttgcaaaancagg

SEQ ID NO: 1303 - DNA, 660 bp, Canis familiaris
tgtggaaaggaccacccccgcaaagatactggcaattgctcgagtacccacttggctggagctgcaggagttcctggggttggcagggcagctggcagargagttccaagctgktgttccaattccccaggctcctgctggattagcaggccctgtccgagggsttgggggaccatcccaacaggtaatgactccacagggaagaggaactgtagcagcggctgcagttgctgctactgccagcattgctggggccccaactcaatacccaccaggacgggggaccccacccactcctgtagggcgagcaacaccacctccaggcattatggctcctccacctggtatgagaccacctatgggcccaccaattgggcttccgcytgctcgagggacgcctataggcatgccccctycaggaatgagaccccctccaccaggaattagaggtccacctcccccaggaatgcgtccaccaagaccctaggatactgttgatccttcttaagtccattttttccctgctatgtgtcttgtgaaactgtgtgattgtttgtgagcttttgttccctccttgatgaattaatattagctaataaatgcacaaagcaattaaactgsaaaaaaaaaaaaaaaaaaaaaaaaaaaaaaaaaaaaaaa

SEQ ID NO: 1304 - DNA, 661 bp, Canis familiaris
gggtcaaatactacatacagggccgagctggacactgggaaggctgctgtgggatggaggtgtagagaagsmacagctccaagtcagcagtcctgcgtctagcccagttcagccctctgtctcttgaggtggagtggacttctactactctttcttagctcctaatctatcttctgcttcctttcttccagggaactagtgccaaatggccttttcctgccagttttggtaccttttctggcttctctattcctgctcacttctctatttttaaagtgccaaataaatcccttcccctttgtcagaaagcacagtgatggccctgagccctacctgagacctcatgggaggggcccggcttgctctttgttaggggcagcaatgtttgctgagttgaggctggcgggggtggtggcagagctcctgcgccctaggaggacgatagggacatggtgccccgtgcccaggtgataaatactgagctgccaaaactttttatatcagaggagcccaaggggaagggggggaaggctcacccccgctatttttggggagggagggctgtggatagagccatgttctccagaatctattttactaactgacctgttttgggacttgttacccgaataaaagcagtttctataaaaaaaaaaaaaaa

SEQ ID NO: 1305 - DNA, 1948 bp, Canis familiaris
ccggggcgcaggctgtgggggccgcgcgggcgagcgcagagcaccccgcgagctggatgcggcttcccggcgcccgctcgctgcccgcggcgccgcccccgaggtccgcccgctgaggcgcccgtgcgctcacctgccggcccgcgcgccatgggccagcccgcgaaccgcagcgtcttcttgctggcgcccaacgggagccacgcgccggaccagggagactcgcaggagcggagcgaggcgtgggtggtgggcatgggcatcgtcatgtcgctcatcgtcctggccatcgtgttcgggaacgtgctggtcatcacggccatcgccaggttcgagcgtctgcagacggtcaccaactacttcatcacctccctggcctgtgctgacctggtcatgggcctggcggtggtgccctttggggccagccacatcctcatgaaaatgtggaccttcggcaacttctggtgtgagttttggacttccattgacgtattgtgcgtcacggccagcatcgagaccctgtgcgtgatcgcggtggaccgctactttgccatcacctcgcccttcaagtaccagagcctgctgaccaagaataaggcccgggtggtcattctgatggtgtggatcgtgtccggcctcacctccttcttgcccatccagatgcactggtaccgggccacccaccaggaagccatcaactgctacgccaaggagacgtgctgtgacttcttcacgaaccaagcctatgccattgcctcctccatcgtgtccttctacctacccctggtggtcatggtcttcgtctactccagggtcttccaggtggcccagaggcagctccagaagatcgacagatcggagggccgcttccatgcccaaaacctcagccaagtggagcaggatgggcggagcgggcacggacatcggaggtcctccaagttctgcttgaaggaacacaaggccctcaaaactctgggcatcatcatgggcactttcaccctgtgctggctgcccttcttcatcgtcaacatagtgcatgtgatccaggataacctcatccctaaggaagtttacatcctcctaaactgggtgggctacgtcaactctgctttcaatccccttatctactgccggagccctgacttcaggattgccttccaggagcttctgtgcctgcgcaggtcttccctgaaggcctatgggaatggctactccaacaacagtaacagcagaagcgactatgctggggagcacagtggatgtcacctggggcaggagaaagacagcgaactgctgtgtgaggaccccccaggcacggaagaccgtcaaggtactgtgcctagcgatagcgttgattcgcaggggaggaattgtagtacaaacgactcactgctgtaatgcagcttttctactttttatgaaccccctccccgcaacgaaacactatacagactatttaacttgagtgtaataaatttagaataaaattgtatagagatgtgcaggaggagggacggccttctgcctttttttttttatttttttaggctgtaaaaaaaagagaaagcatattcgagtgattgtttgttgtacagttcagttccttttttgcatggaacgtgtaagtttgtgtctgaagggctttggtcccagaggacctggggctgctatgttttgatgacttttccgtggatctacctcattgatcaagtattaggggtaatatatattgctgctggtcatctgtatgtgaaggagtcttttcttcctgcacccttgcactggaggatcttgagtatctcggacctttcagctgtgaacacggactctgctggcccctcttatttgctcaaacagggtgttgttgtaggcagggatttgaggggcagcttcagttgtgttcctgagcaaagtctaaagtttacagtaaataaattgtttgaccatg

SEQ ID NO: 1306 - DNA, 466 bp, Canis familiaris
attttaagaagtttcacctttccagtattttatttcacatttagatggaaagtgtatcttatgcatagagacatgttaaaataatgttgatgtcttacacaaaaacagaaatagtgttagtcattttgcttatatttgcaatatatggattcagaaatacattttcattatccagattcacacatggtttctggaaacaagtagtttgttttcattattgttgtgcgattagaatttacgggttaactatttattttttgactaaatgtgcaatttcttaccactaggtaactttcagtgtcagtggtggctacttgtcacttatttttacgttagaagtgggatcttataaaaattagtaaatttatcagtaaatattcctgtgatttagaaaagaatatcaacttgctaatttaaattttttttttcatttttaaaaagccctttcttttaaagcatctacctg

SEQ ID NO: 1307 - DNA, 597 bp, Canis familiaris
aaacttcatttaktatrmwwkraggtaatttttttttttgcatgcgtagctttatcatgattaacttaaccttctttcagtgactgaaaatcctgcttatttccaaatttgcagtattgtacatgacgctaacgaacgacttttggaataaaatgttttcatgtatttcaaactactcccttaagctggtctctcggkgcccaattgtcaaaatctctgtttggcccctctccccactctcctgctactttagggcaggaaaatgaaaaataaagcaaaaaagcatacaaataacaaaaaccataaaaccaaaaagccaccacccataatgatgatgggcgaaagtggtatcctgtttgacattctaactctttgcttatcagtgaccttgatcatkgttctctctagaaaawccttgggcatttttatttctagtcatgtgactttgtctttaaattttggctgtgtgttttactttttaaaagaatcaaacaaattactcttgacctgcgtgattttgttttcctattaaatatggaaacctttcccaatctggagattgaataaatattcattttcctttaaaaaaaaaaaaaa

SEQ ID NO: 1308 - DNA, 686 bp, Canis familiaris
aagattatgccttcgtgcacatggagcgggcagaggatgcagtggaggccatcaggggcctkgacaacacagagtttcaaggcaaacgaatgcacgtgcagttgtcccacccagccggctttaggacctgcgccccggggatgggagaccagagcggctgctatcggtgcgggaaagaggggcactggtccaaagagtgtccgatagatcgttcgggccgagtggcagactttaccgagcaatataatgagcaatatggagcagtgcgtacaccttacaccatgagctatggggattcgttgtattacaacaacgcgtacggagcgctcgatgcctactacaagcgctgccgtgctgcccggtcctatgaggcagtggcggctgcagctgcctctkcgtataattacgcagagcagaccctgtcccagctgccacaagtccagaacacagccatggccagtcacctcacctccacctctctcgatccctacgatagacacctgttgccgacctcaggagctgctgctgctacagctgctgctgctgcagcagccgctgctgctgttactgcagcttccacttcatattacgggcgggatcggagccccctgcgtcgcgctacagccccagtccccactgttggagagggctacggttacgggcatgagagtgagttgtcccaagct

SEQ ID NO: 1309 - DNA, 648 bp, Canis familiaris
gcgctggggacgaggcgcgcacgcttctgtgcgagagcctgctggagcccggcagccggctgcagtccctgtgggtgaagtcctgcaacttcacggccgcatgctgccaccawcttcggckcgatgctgacccagracmagcgcctggtggagctgcagctgagcarsracmagctgggggactccggcgtccgggagctgtgccaggcgctgggccmgtcggggaccgcgctgcaggtgctctgcctgggggactgcgacgtggcyaacgatgkctgcgccagcctggcctcgctcctgctggccaaccgcagcctgcgggagctggacctcagcamcaaccgaatgaacgaccagggtatccggcggctcatggagagtgtggagcagccaggctgcgcgctggagcagctggtcctctacgacatctactggtcccaggacmttgaggacagcctgcgggccctggaggaacggaagcccagcctgaagatcatctcctgagcagcccccccactctgcccccccccacgtcctggcttggagtacacagaaatgctctaatcaactcagttctgcaacmaagttttagacmctttattaaagcmctttttttggcmraaaaaaaaaaaaaaaaaaaaaaaaaaa

SEQ ID NO: 1310 - DNA, 653 bp, Canis familiaris
tggggtttcattgctttacatcggctgggacaagacactatggctttcagctctatcagagtgaccctagtgggaattatggaggatggaaagccacgtgcatcggaaaccatagtgctgcagcggtgtcgatgttaaracmagactwcyaagaaggagaaatgactctgaagtccgcacttgctttagctatcacaagtcctaaacacagaccactggatgtgagtaaactctcggctgaaaaaggtggagattgccaccctgacaagagagcaacgggaagacggtcatcagggtcctgaagcagaaggaagtggagcagctgatcaagaaccmcgaggaggaagaagcgaaagcggagcgagagaagaaagaaaaagagcagaaagagaaggagaaataggaggagaaccctgggctctggcggctccggggccgtgtgcccgctgcccggcctccctcgcccggtgggcagactggggcgggcaccagcgcaggcctgccgtctctgtccggttgagtcttgtagtgacggctcggtcgtagtggacgcgctcgtccctccctgtgttggtaataaaacttggaaagaaaaaaaaaaaaaaaaaaaaaaaaaaaaaaaaaaaaaaaaaaaaaaaaaaaaaaaaaaaaaa

SEQ ID NO: 1311 - DNA, 815 bp, Canis familiaris
ggggaagcagttctgtgtcctttccaccatggcacccaagaaagccaagaagagagcagaaggcgccaattccaacgtgttctctatgtttgaacagacccagatccaggaatttaaggaggctttcaccatcatggaccagaacagggatggcttcatcgacaagaatgatttaagggacacctttgctgctcttgggcgtgtgaacgtgaaaaatgaggaaattgatgaaatgctcaaggaagctccaggtccaattaactttactgtgttcctaacmatgtttggggagaaacttaagggggcagaccccgaggagaccattctcaacgcattcaaagtgtttgaccctgaaggcaaaggggtgctcagggctgattatgttcgggagatgctgaccacacaggcagagagattttccmaagaggagattgaccagatgttcgccgccttcccccctgatgtgactggcaacttggactataagaacctggtgcatatcatcacccaccggagaagagaaggactgagggggctcaccaaccaaccctgggcttgtctttggtggggatgtagtccctgccctcctctcactttgcccagtaatgctgccatccctgctaccggcccgttagtcgtgtggctgcctcattagccaccttcatcttctttgcagcctctgtggcatatagataccatgtggccacatatcctgtagatggaaatccatccagaagctgtgttcaaataaatgagaggttgtctctytrwwmaaaaaaaaaaaaaaaaaaaaaaaaaaaaaaaaaaaaaaaaaa

SEQ ID NO: 1312 - DNA, 612 bp, Canis familiaris
atactgattatttctttaagataaagtacatgtagatattatttctttaaaaaaatttttaaagatctattttatttttagagagagcacatgtgtacatgtgcacgcatgtgcagtggctgagggaggaagaatcctaaagcagactcgctgccaatcaggaaagccccatgcagggctcagtcccatgaccctgagatcatgacctgagctgaaatcaagagttggctaggtaaccaaccgagctagccaggtacccctaaatactaataatttctaataaaaccttaaagattagtagtgtaaattccagaatgtgtctatggtacagaatagatggtacagaaaaaaatttctgtagctttgtggatgtgcctctgttaatttctcatttaagacatatggaaatcacttaagtgatgtttgaattgttcctaatagcagccaacctccataccatgtggttggctcagcctgtcctacagttgattatactccatgttgttttccagcattgtatattcaggaatttggcaaatgtcctgtgagtgaaaatgkgkgttatctataatcctttaaaataaaaatactaatgctaccccaaaaaaaaaa

SEQ ID NO: 1313 - DNA, 634 bp, Canis familiaris
gcacgagcmygmgcggctgttctgaggaacagtagtygtgtgtctccgtccgccttctctcccacctaagtgcgtgccaccgccccatggaagattcgatggacatggacatgagccccctgsggssccagaasyayswktttggttgtgaactaaaggctgacaaagattaccactttaaggtggataatgatgaaaatgagcaccagttatctttaagaacggtcagtttgggagctggtgcaaaggatgaattgcacattgttgaagcagaggcaatgaattatgaaggcagymcraktaaagtcactctggcaactttgaaaatgtctgtacagccaacggtgtcccttgggggctttgaaataacaccacctgtggtcttacggttgaagtgtggttccggtcctgtgcatattagtggacagcacttagtagctgtagaggaagatgcagagtcagaagatgaagaagaggaggatgtgaaacttcttartatatctggaaagcgttctgcccctggaagtggtagcaaggktycacaraaaaaagtaaaacttgytgytgatgaagatgatgacgacgacgacsatgacgacgacsatgatgaaaaagatgatgatgatgatttgtg

SEQ ID NO: 1314 - DNA, 612 bp, Canis familiaris
  misc_feature (453)..(453): n comprises a, c, g, or t, or includes no nucleotide
  misc_feature (475)..(475): n comprises a, c, g, or t, or includes no nucleotide
  misc_feature (557)..(557): n comprises a, c, g, or t, or includes no nucleotide
  misc_feature (560)..(560): n comprises a, c, g, or t, or includes no nucleotide
  misc_feature (577)..(577): n comprises a, c, g, or t, or includes no nucleotide
  misc_feature (601)..(601): n comprises a, c, g, or t, or includes no nucleotide
  misc_feature (606)..(606): n comprises a, c, g, or t, or includes no nucleotide
gacctgcctgctgtgtcagagaagsacgakccaggatctgaaattcggggtggagcaggacgtagatatggtgtttgcgtctttcatccgcaaggcrgctgatgtccatgaggtcaggaaggtcctgggagagaaagggaagaacatcaagataatcagcaaaattgagaatcatgagggagttcggaggtttgatgagatcctggaagccagcgatggcatcatggtggctcgaggtgatctaggcattgagattcctgcagagaaggtcttccttgctcagaagatgatgattgggcggtgcaaccgagcgggcaagcctgtcatctgtgcgacacagatgctggagagcatgatcaagaagcctcgtcccacccgggctgagggcagtgatgtggccaatgcagtgctggatggagctgactgcatcatgctgtctggagagacccgccnaagggggattacccccttggangcttgttccatgcagcacctgatacttgtgaggctgaggcagccatgtttcaccgaagctggttgaagaacttgtgcgaggnttnaagcacttcacaacctnatggaagccttggcatgggcaggngggangctttt

SEQ ID NO: 1315 - DNA, 849 bp, Canis familiaris
  misc_feature (18)..(18): n comprises a, c, g, or t, or includes no nucleotide
  misc_feature (37)..(37): n comprises a, c, g, or t, or includes no nucleotide
  misc_feature (41)..(41): n comprises a, c, g, or t, or includes no nucleotide
  misc_feature (66)..(66): n comprises a, c, g, or t, or includes no nucleotide
  misc_feature (88)..(88): n comprises a, c, g, or t, or includes no nucleotide
  misc_feature (105)..(105): n comprises a, c, g, or t, or includes no nucleotide
  misc_feature (107)..(107): n comprises a, c, g, or t, or includes no nucleotide
  misc_feature (127)..(127): n comprises a, c, g, or t, or includes no nucleotide
  misc_feature (138)..(138): n comprises a, c, g, or t, or includes no nucleotide
  misc_feature (183)..(183): n comprises a, c, g, or t, or includes no nucleotide
  misc_feature (197)..(197): n comprises a, c, g, or t, or includes no nucleotide
  misc_feature (219)..(219): n comprises a, c, g, or t, or includes no nucleotide
  misc_feature (240)..(240): n comprises a, c, g, or t, or includes no nucleotide
tttgtctttggccagtcnttatgtatgagcctgcctnttanaaaaactcaagcctcaagggcctgnaactgtagtaacctggtcccancctccaaaatcatgggntnagtagcatgaaggccaaccncccaggcaagnccttgtccaccttgtcacaagccaaaaagtccttgtcaaaaaagnaaaacaaggtcccntctttcaagaaaccactggccntccacattgccggtgactganaaagcccagcaggacccacacatgccctggtccttgactttggtgacagcccccttactcctccagtcccattcaggtggtggggcatgatcgctaatggactttgctaggcgcatcttcttgccacggttctctcttaagagtggattcaggtaaatggtacggaactcctcctctgtaaggtcactgaacttggtgatcccatactgagctgtgccacggtctagtgcctggatcttctgtgctcgtaccatgttgttggaaaagacggacatgcgccactcggcttcctcttttgtctcataagtccgattataggtggtaacaaactccttgaagactgaagccattttcactgaaaaatcctggggcagggggtccttgttcaacagtggaaggactgaactcagagtctcatttctgtcatctgtaaccttggtatccactgggccacagtcccgtctcagcagcatgtgttttcctagctcatctaagacttcgaagctgcagagcagggttttcttggacacagggagctggcacaccgtggggtcgttgcagggaggctcctctagggtcgccttcagggagaacagcgacccgtggccc

SEQ ID NO: 1316 - DNA, 620 bp, Canis familiaris
  misc_feature (421)..(421): n comprises a, c, g, or t, or includes no nucleotide
  misc_feature (451)..(451): n comprises a, c, g, or t, or includes no nucleotide
  misc_feature (455)..(455): n comprises a, c, g, or t, or includes no nucleotide
  misc_feature (458)..(458): n comprises a, c, g, or t, or includes no nucleotide
  misc_feature (483)..(483): n comprises a, c, g, or t, or includes no nucleotide
  misc_feature (503)..(503): n comprises a, c, g, or t, or includes no nucleotide
  misc_feature (558)..(558): n comprises a, c, g, or t, or includes no nucleotide
  misc_feature (573)..(573): n comprises a, c, g, or t, or includes no nucleotide
  misc_feature (577)..(577): n comprises a, c, g, or t, or includes no nucleotide
  misc_feature (588)..(588): n comprises a, c, g, or t, or includes no nucleotide
gggctgysswgkgtgggagtggggagcagacttgtcttgctgtctttgtcagaagagtttctaastaagggctgtgtctttgtggattaccttcttttattcttcctgccaragctcatgctargaggatgttgggggtaggattagcttgatttttctctattcattcttctctccttctgtctgctccctgcttagccctcggttttctcattcctctggagttctcttaaagcagcccctgttagttggctggcaagggaatttctggtgactgtagttccttagttaagtcttagcaatcaaaccaaatcaatgtctcccttgattctcctctgtatatctgtgtgtatgtatgtgtgtgtcttggtttggggtaaaggggagggaggggcaagacaatgtggaatctctaaggtgnatgcataaggaacctacaccggtaagtctnaatnggnccttattgttaaaaacctttggggnggctgctttgggggggaaanctggtcaagccccttaggccatttggcccaaaactacttggccttgggttgttgntttccaaaaggtttngggnaaaacccttgnggaaagaccttaagcctttgcttggaacggtt

SEQ ID NO: 1317 - DNA, 654 bp, Canis familiaris
tctgtttgatgttgtgttkacacgaaacmacttccacctccagtggctgtgrctggtcccagtgattgtaccatattggtcgctgtgggtctgggcgggcctggagccagaaggcgactattgtgtcacccccacccccaccccckaaccccaagtctggggagagggagggaaggaggaaggtttcagactccagttctttcccttgccctcttactcctgagcctcctgggcccagtagaagttgttgggactctctgccagcttcctgagctcttcctgaagatggccatccagcactggttggggacaagggctgaactgatggccaccagccatgcctaggagctgggccctgaaagccaggcacctctggccgcaggggccactttgtgccctcccagctgaaaggggccactattttcgccttgtctgtcartgcagtgcctgtgcmagaagtggaggggtgagtcctccrgagtttcctgagctggggttcttcacctgctctggctcctctgctccmacgctcgctgtaccttttcttattttggtggatcctgcctcctcccttgattaaagwctctttttgcccctttggggctgcatgaaaaaaaaaaaaaaaaaaaaaaaaaaaaaaaaaaaaaaaaaaaa

SEQ ID NO: 1318 - DNA, 2748 bp, Canis familiaris
tagacagccggacaccatgagcctcagtgaggagcaggtgcagcacttcctrrrccagaaccccgacttcacggaccagtacttcgggaagacgctgagccccgagcatgtggctggcgcctgcggggacgggcagcccacggactgcgccagcttccgcgagctgtgccaggtggaggagagcgcggcgctgttcgagctggtgcaggacatgcaggagagcgtgaacatggagcgcgtggtgttcaagatcctgcggcgcctctgcaccatcctgcgtgctgaccgctgcagcctgttcatgtaccggcagcgcaacggcgtggccgagctcgccacgcgcctcttcagcgtgcagccaggcagcgccctggaggactgcctggtgccccccgactcggagatcgtcttcccgctggatattggggtggtgggccacgtggctcagaccaagaagatggtgaacgtccaggacgtgacagagtgcccccacttcagccccttcgccgatgagctgaccggctacgagaccaggaacatcctggccacacccatcatgaacggcaaggasstggtggctgtcatcatggccctgaacaagctcgacggcccgtgtttcacragygaggacgaagacgtttttctgaagtacctgaacttcggcaccttaaacctgaagatctaccacctgagctaccttcacaactgcgagacgcgccgaggccaggtgctgctgtggtcggccaacaaagtgtttgaggagctgacggacatcgagaggcagttccacaaggccttctacacggtgcgggcctacctgaactgtgaccgctactccgtgggcctcctggacatgaccaaggagaaggaattctttgacgtgtggcctgtgctgatgggagaagcgcagccgtactcgggcccacgcacacccgacggccgtgaaatcgtcttctacaaggtcatcgactacatcctccatggcaaggaggacatcaaggtcatcccctcgccccccgccgaccactgggccttggccagcggccttccgacctacgtggcagaaagcggctttatctgtaacatcatgaacaccgccgcggacgagatgttcacgttccaggaagggcccctggacgactcgggctgggtcatcaagaacgtcctctccatgcccatcgtcaataagaaggaggagatcgtgggggttgccacgttctacaacaggaaggacgggaagcccttcgatgagcaggatgaggtcctcatggagtccctcactcagttcctgggctggtcggtactgaacaccgacacctacgacaagatgaacaagctggagaaccgcaaggacatcgcccaggacatggtcctgtaccacgtgagatgcgacaaggacgaaatccagctgatcctgccaacgagggagcgcctggggaaggagcctgcggactgtgaggaggatgagctgggaatactcttgaaggaggtgctgccggggccaagcaagttcgacatctacgagttccacttctcggacctggagtgcacggagctggagctggtcaagtgcggcatccagatgtactacgagctgggcgtggtccgcaagttccagattcctcaggaggtcctggtgcgcttcctgttctccgtgagcaaagggtaccggaggatcacctaccacaactggcgccacggcttcaacgtggcccagaccatgttcacgctgctcacgacgggcaagctgaagagctactacacggacctggaggccttcgccatggtgacggcgggcctgtgccacgacatcgaccaccgcggcaccaacaacctgtaccagatgaaatcccagaaccccctggccaagctccacggctcctccatcctggagcggcaccacctggagttcgggaagttcctgctctccgaggagaccctgaacatctaccagaacctgaaccggcggcagcacgagcacgtgatccacctcatggacatagccatcatcgccaccgacctggcactctacttcaagaagaggacaatgttccagaagatcgtggatgagtctaagaactacgaggacaggaagagctgggtggagtacctgtccctggagacgacgcggaaggagatagtcatggccatgatgatgacggcgtgtgacctgtctgccatcaccaagccctgggaagtccagagcaaggttgctctgttggtggcggctgagttctgggaacaaggggacttggaaagaacagttctggatcagcagcctattccgatgatggaccggaacaaggcagccgagctccccaaactacaggttggcttcatcgacttcgtgtgcacgttygtgtacaaggagttttcccgtttccacgaagagatcctgcccatgttcgaccgactgcagaacaacaggaaggaatggaaggccttggctgatgagtacgaggccaagctgaaggccctggaggaggagaagcagcaacaagaggacaggacgacagccaagaaagcgggcacagagatttgcaacggtggccccgcacccaagtcttccacctgctgcatcctgtgagctgctcccgggttcggacggcgcccccgcctctaagggtttgctacatgtgaggaagccccagaaaatgactaaagacaattttggatatcttgaaacttttttaagatctgtgtttttataaactcaactatgaataaagtttagtgtacctcaaaaaa

SEQ ID NO: 1319 - DNA, 481 bp, Canis familiaris
gctatgaccggggcggctaccgaggccgaggcggggaccgagggggcttccgagggggccggggtggtggggacagaggtggctttggccctggcaagatggactccaggggtgagcacagacaggatcgcagggagaggccgtattagcttggctcctgaggttctgcaacagcttttcttcttgtacccagtgttaccctcattattttgtaaccttccaactcctgatcacccacgggttttttgtgtcggactatgtaattgtaaccatatctctggttcccattaaaaaccatcgttttagttaawwwwtttcctcttccccctcttcactccactggaggattgatacctgggtcaagaatgtgggcaggttttctctttcagatcatctgcctaacaagaactgggaaaaatttgttctgcttaacaagaactggaataaaatgtttgataacttggaaaaaaaaaaaaaaaaa

SEQ ID NO: 1320 - DNA, 318 bp, Canis familiaris
ggccgcagccggggaccgagggggctcccgcaggggaccggggtggtggggacagaggtggcctttggccctggcaagatggactccaggggtgagcacagacaggatcgcagggagaggccgtattagcttggctcctgaggttctgcaacagcttttcttcttgtacccagtgttaccctcattattttgtaaccttccaactcctgatcacccaccgggttttttgtgtcggactatgtaattgtaaccatatctctggttcccattaaaaaccatcgttttagttaaaaaaaaaaaaaaaaaaaaaaaaaaaaa

SEQ ID NO: 1321 - DNA, 270 bp, Canis familiaris
cacatttcttggaggtggcaaagkccgagtgccatttcaccaacgggacggagcgggtgcggttcgtggaaagatacatccataaccgggaggagttcgtgcgcttcgacagcgacgtgggggagtaccgggcggtcacggagctcgggcggcccgacgctgagtcctggaaccggcagaaggagctcttggagcggaagcgggccgaggtggacacctactgcagacacaactacggggtgattgagagcttcacggtgcagcggcgag

SEQ ID NO: 1322 - DNA, 769 bp, Canis familiaris
gcacgtgatkcttgkcragatgttyctgggctgggraactagtgggagaaagtcytgcagagcccagcarccagrrccgcagatgacaargcggtcactcacasccaggrcctgagtctgtgttargaaracatakkraktstcakatraacscmgttcctcaccadkkktcctstcatcktbcagygccadttctskkcatgttagsctgtttgtacmaacttttgggarccgggktggtacawcagttctctggaatccgycaggcckctgggggktggatcaccacaccctgtagggcttctcccctcctagctgtctttggraaacgcaggactgggagsctgttttgaccagagaggccaaggtcaagagcaaggtgtagaaaaattgtaaaatagmaaaagtggtgttggtgaattggttttgttttgttttgttktgttttcacatttggatagctgtcacmagaggtctttccctcagtttccagcatgttcttccktktctccctktctcacgtttttcctcctattaatcmagagaaacttcaaagtccatgggatggtcggatctcacaggctgagaactcgttcacctccaagcatttcatgaaaaagctgcttcttattaatcgtgcaaactcttgccacgatgtggggagtttgacaaatctttcaaaataaaaagtaatgacttagaaamwrmmaaaaaaaaaaaaaaaaaaaaaaaaaaaaaaaaaaaaaaaaaaaaaaaaaaaaaaaaaaaa

SEQ ID NO: 1323 - DNA, 717 bp, Canis familiaris
ggactagtggaaaaartcctgcagagcycagcagccrgackcgccagakgacmagcggtcaytcacagccaggacctgagtctgtgttaggmamacawaktaaktstcakatwaacccmgttcctcaccaktktcctctcatctttcagygccawttctcttcatgttagsykgtttgtacmaacttttgggagccggggtggtacatcagttctctggaatccgccagbccgctggggkktggatchccacacccwgtaggkcttctcccctcctagctgtctttgggawwmgcaggactgggagkctgttttgaccmgagaggccmaggtcmagagcmaggtgtagawwamttgtvwaataghaaaastggtgttggtgaattggttttgttttgttttgttttgttttcacatttggatagctgtcacaagaggtctttccctcagtttccagcatgttcttccktttctccctttctcacgtttttcctcctattaatcmagagaaacttcraagtccmtgggatggtcggatctcacmggctgagaactcgttcacctccmagcmtttcatgaaaaarctgcttcttattaatcgtgcmaactcttgccmcgatgtggggagtttgacmaatctttcaaaataaaaagtaatgacttaraaamhrmmaaaaaaaaaaaaaaaaaaaaaaaaaaaaaaaaaaaaaaaaaaarg

SEQ ID NO: 1324 - DNA, 619 bp, Canis familiaris
aaacccagttcctcaccattgtgtcctctcatctttcagtgccatttctcttcatgttaggctgtttgtacacaacttttgggagccggggtggtacatcagttctctggaatccgccaggccgctggggggtggatcaccacaccctgtagggcttctcccctcctagctgtctttgggaaacgcaggactgggagsctgttttgaccagagagsccmaggtcaagagcamaggtgtagaaaaattgtaaaatagaaaaagtggtgttggtgaattggttttgttttgttttcacatttggatagctgtcacamagaggtctttccctcagtttccagcatgttcttccttttctccctttctcacgtttttcctcctattaatcaagagaaacttcaaagtccatgggatggtcggatctcacaggctgagaactcgttcacctccaagcatttcatgaaaaagctgcttcttattaatcgtgcaaactcttgccmcgatgtggggagtttgacaaatctttcaaaataaaaagtaatgacttagaaactgmmaaaaaaaaaaaaaaaaaaaaaaaaaaaaaaaaaaaaaaaaaaaaaaaaaaaaaaaaaaaaaaaa

SEQ ID NO: 1325 - DNA, 510 bp, Canis familiaris
cgccaggccctggggggtggatcaccacaccctgtagggcttctcccctcctagctgtctttgggaaacgcaggactgggaggctgcttttgacccgagaggcccacggtcaacgagcaacggtgtagaaaaaattgtgaaatagaaaaaagtggtgttgtgtgaattggttttgttttgttttgttttgtgtttcacacattggagtaaactcgtcacccacgaggtctttccctcaaggttccagcaagttcttccctttctcccctttctcacggttttcctcctagttaatccaggaggaacttccaaggtccaatgggatggtcggatctcacaggctgagaactcgttcacctccacagcatttcatgaaaaagctgcttcttattaatcgtgccaactcttgccccgatgtggggagtttgaccaatytttcmaaataaaaagtaatgacttagaaaaaaaaaaaaaaaaaaaaaaaaaaaaaaaaaaaaaaaaaaaaaaraa

SEQ ID NO: 1326 - DNA, 686 bp, Canis familiaris
tagtggagaatccttcagacccccactcagaccccaggatgacagcgggtcactcacagccaggacctgagtctgtgttagggaaaacatattaaattyctcatattaaaccccacgttcctcaccattttcctctcatctttcaggccatttctcttcatgttaggctgtttgtacaamyttttgggagccggggtggtacatcagttctctggaatccgccagccgctggggggtggatcaccacaccctgtagggcttctcccctcctagctgtctttgggaaacgcaggactgggaggctgttttgaccagagaggccmaggtcaagagcaaggtgtagaaaaattgtaaaatagaaaaagtggtgttggtgaattggttttgttttgttttgttttgttttcacatttggatagctgtcacaagaggtctttccctcagtttccagcatgttcttccttttctccctttctcacgtttttcctcctattaatcaagagaaacttcaaagtccatgggatggtcggatctcaccaggctgagaactcgttcacctccmagcatttcatgaaaaagctgcttcttattaatcgtgcaaactcttgccacgatgtggggagtttgacmaatctttcaaaataaaaagtaatgacttagaaactgcaaaaaaaaaaaaaaaaaaa

SEQ ID NO: 1327 - DNA, 406 bp, Canis familiaris
cccaacccactctccaaaggtaattttgcccttgccctgaggaccccgttgaggagccacctggagtccacgggaggaaaggggaagggccagactgggctaccagcttctagtctcctttgcacctgagggccagacgatcacccatgagaggagggccactgggaggctgagaattcactgctcmagaagacatggacactcctgccctgctgtgtatagatggaagatatttatatatatttttggttgtccaatattaaataccagaccactaagttatagtatatctggaccaaaccmacttgtaaatacaccaccttactccttctgtaacttacctaaacagatataaatggctggtttttagaaaaaaaaaaaaaaaaaaaaaaaaaaaaaaaaaaaa

SEQ ID NO: 1328 - DNA, 663 bp, Canis familiaris
tgatattcccgtttgggaccaagaattcctgaaagttgaccaggacactttttgacttattctggctgcgaactacttagacatcaaaggtttgcttgatgttacatgcaagactgttgccmatatgatcaaggggaaaactcctgaggagatccgtaagaccttcaatatccaaaatgactttactgaagaagaggaagcccaggtacgcacaagagaaccmmgtggtgtgaagagaagtgagatgttatgcctgacactgtaacactgtaaggattgttccmaatactagttgcactgctctgtttataattgttaatattagacmaacacgtagacmaatgcagcagcaaatcagttgttttagcagaatattgtcctccttgcatgtgtagtttgagtacagattccmaacttatggctgagtttcttctagtatgatcgaaagtttctttttttccttgctcttaataaactgaactgtgggttctctgtagaaggtggcattttgggctttccctctctttgtaaagcgatttctgcctagtttattgtctggttaactttagtttaatgaccttttaaaagttggcattgtaaataaaacmagttgaaaaaagttttctgaaatagaaaaaaaaaaaaaaaaaaaaaaaaaaaaaa

SEQ ID NO: 1329 - DNA, 641 bp, Canis familiaris
atattcctgtttgggaccaagaattcctgaaaggttgaaccmaggaacactttttgaacttattctggctgcgaactacttagacatcaaaggtttgcttgatggttacaatgcaagacttgttgccaatatgatcaagggggaaaactcctgaggagatccgtaagaccttcaatatcaraaatgactttactgaagaagaggaagcccaggtacgcaaagagaaccagtggtgtgaagagaagtgagatgttatgcctgacactgtaacactgtaaggattgttccmaatactagttgcactgctctgtttataattgttaatattagacmaacagtagacaaatgcagcagcacaatcagttgttttagcagaatattgtcctccttgcatgtgtagtttgagtacagattccaaacttatggctgagtttcttctagtatgatcgaaagkttctttttttccttgctcttaataaactgaactgtgggttctctgtagaaggtggcattttgggctttccctctctttgtaaagcgatttctgcctagtttattgtctggttaactttagtttaatgaccttttaaaagttggcattgtaaataaaacaagttgaaaaaaaaaaaaaaaaaaaaaaa

SEQ ID NO: 1330 - DNA, 659 bp, Canis familiaris
gcgggacaggaagyccacgtcgccgtcagccggcccgccagccgcgccgcgccgaggaccgcaccwtgttggcctgcgccaagctcgcctgcgcccccgctctgatccgagctggatccagagttgcatacagaccaatttctgcatcagtgttatatcgaccagaggctaggcctggagagcgctctacggtatttwatggggcccagaatggtgtgtctcagcgaatccaaagggagtttcagaccagtgcaatcagcagagacattgatactgctgccmaatttattggtgcaggtgctgcaacagtgggagtggctggttctggtgctggtattggaacagtctttggcagccttatcattggttatgccagaaacccttcgctgaagcagcagctgttttcatatgctatcctgggatttgccttgtctgaagctatgggtctcttttgtttgatggttgctttcttgatcttgtttgccatgtaacagaaattactgcttgaaatgttgtcattcatattaattacggatgtaattctgtgtatcttactgtgactccgtaaactgtactattggtgtcatggaaatgtacattatttccaaggtcatttcattaaagatgwaaactttwaaaaaaaaawwaaaaaaaaaaaa

SEQ ID NO: 1331 - DNA, 593 bp, Canis familiaris
cgggacgccatcatctagtgacgactatgaggatttcccggatcgacaagccacaggtggtcctgaagagcaaggatgaccaggtgactgtgattggggccggagtgaccctacatgaggccttggctgctgctgaactgctgaagaaagagaagatcaacattcgtgtgttggaccccttcaccatcaagcccctggacagaaatctcattctcgaaagcgcccgtgcgaccaagggcaggatcgtcaccgtggaggaccattactatgaaggtggcataggtgaggcagtgtcctctgccttggtgggtgagcctggcatcaccgtctcccgccttgcagttggtgaggtaccmagaagcgggaagccagctgagctgctgaagatgtttggcattgacagggacgccatcgcacaagctgtgagggaccttgtcgccaaggcctakggagggtaggggatgtgaggtargggttctacacattcctgaaattctggccaaggtgctcacaagatgtacggaatggagtgataaaatatatgttttaagaaaaaaaaaaaaaaaaaaaaaaaaaaaaaaaaaaaaaaaaaa

SEQ ID NO: 1332 - DNA, 661 bp, Canis familiaris
  misc_feature (432)..(432): n comprises a, c, g, or t, or includes no nucleotide
  misc_feature (438)..(438): n comprises a, c, g, or t, or includes no nucleotide
  misc_feature (440)..(440): n comprises a, c, g, or t, or includes no nucleotide
  misc_feature (461)..(461): n comprises a, c, g, or t, or includes no nucleotide
  misc_feature (466)..(466): n comprises a, c, g, or t, or includes no nucleotide
  misc_feature (479)..(479): n comprises a, c, g, or t, or includes no nucleotide
  misc_feature (507)..(508): n comprises a, c, g, or t, or includes no nucleotide
  misc_feature (519)..(519): n comprises a, c, g, or t, or includes no nucleotide
  misc_feature (580)..(580): n comprises a, c, g, or t, or includes no nucleotide
  misc_feature (591)..(591): n comprises a, c, g, or t, or includes no nucleotide
  misc_feature (607)..(607): n comprises a, c, g, or t, or includes no nucleotide
  misc_feature (654)..(654): n comprises a, c, g, or t, or includes no nucleotide
tttttgctatggtctgtggttggtgacctcaaaataagttttgactgttaaatgtttttgtttggaaaagtaacttttatttggaagatgatctcacatgagaattagggccgagattgtaagctcttgcagcagtgatgtttgttcttgggctttggtgatttctaggttttgaggtgctttgtgctttcttgtgtgacttgatatagctccctggatctttgatktctgtgtcacatgagactcaagagttggagtcttccagctctggaggtgctgaaggagctgcttacttytggaagattgcttcgtgcagcaactgctcaagaagctgaagaagaagggaccagacttcaactgggaatgtgaatggggttgacctgctaggactgaggagtcgaaaggaggtgtggaggatgatagtaatgctgnattttncngactttaattctgtgtgaganccaangaaaaaagatganttttgttcaaaattaaatttatgtgggnnctatttgatgnacctgctggcagtttatttgacaacccacccaatttatttgttttggacctaaataacaanacttggtttgnacaagtgatggatatntgacatttagggatccatggaaaaaatattcaaagctttgagggtgntggaaaa

SEQ ID NO: 1333 - DNA, 322 bp, Canis familiaris
ataaactaatgctgagggagttcattactactagaactgccccacaagaaatgttcaaaggagccctgcagagagaaatgaaatgacagtagacagtaacttcaagctttatgaagaaataaaaatctcaataaaggtaaatacataagcaattaaaagctaatattggggcacctgagtggctcagtcatgtcacctgacttcaggtcatgatctcaggatcctggtattgagccccacccacatcaggctccatgcctctccctctgcctttcctcccgttcatgctcatgctctctccctctttctcaaataaataaat

SEQ ID NO: 1334 - DNA, 863 bp, Canis familiaris
  misc_feature (40)..(40): n comprises a, c, g, or t, or includes no nucleotide
  misc_feature (127)..(127): n comprises a, c, g, or t, or includes no nucleotide
  misc_feature (612)..(612): n comprises a, c, g, or t, or includes no nucleotide
  misc_feature (648)..(648): n comprises a, c, g, or t, or includes no nucleotide
  misc_feature (655)..(655): n comprises a, c, g, or t, or includes no nucleotide
  misc_feature (661)..(661): n comprises a, c, g, or t, or includes no nucleotide
  misc_feature (696)..(696): n comprises a, c, g, or t, or includes no nucleotide
  misc_feature (713)..(713): n comprises a, c, g, or t, or includes no nucleotide
  misc_feature (724)..(724): n comprises a, c, g, or t, or includes no nucleotide
  misc_feature (750)..(750): n comprises a, c, g, or t, or includes no nucleotide
  misc_feature (781)..(781): n comprises a, c, g, or t, or includes no nucleotide
  misc_feature (815)..(815): n comprises a, c, g, or t, or includes no nucleotide
  misc_feature (836)..(836): n comprises a, c, g, or t, or includes no nucleotide
  misc_feature (848)..(848): n comprises a, c, g, or t, or includes no nucleotide
  misc_feature (851)..(851): n comprises a, c, g, or t, or includes no nucleotide
attaagccttcgggggcctaattaattttcctggccaagncctgggaacgattggaaaaggaaagcccaggttcgttgttaaaaaaggttgggttatggagcacaaagccagccacggttaaaaatnttaagctgcactgttaagctagattagaggtttaaagaaaaactagtctttcatactgggcaggcgttgtccagttggtgtagaattggaagtttcaagaaagttagtttacctttgcttttaggtcataagtttcttatgtgattgctgtatgtgaacacacagctctttgtaacattytctatttggtgatttgaaactactcaagataccagtgtcctgccagtttaagggtacattgtagagctgaactttgagttactgtgcaagatttttttcatgctgtcatttgtaatatgtttgtgaaaatccttgggattaaagttttggttacaaattgttgtttaammwraaagcctatttttccttgcaaaactaaaatctgtgagcttggtatcaagtccaggtataacattcctattggaagccatacttatattttcttgtaaagtgcttttgaattaataaaatattagcataattgngtaatagtcaaacccactattaccatagtctttggnccacggnaataanttggttacacagatcttaaaaaaaacaattgaggntgaagggaatttttggntgtcacctaantgacttttcatcttaaccatatttangagtaggagccagttcaaagaccatgaactntgtgaccaacatttttaaagagaacaaccctggnccattttactggaagtgaccntttaaaactttntanttgctgagactt

SEQ ID NO: 1335 - DNA, 847 bp, Canis familiaris
tgaggctcttcctggggacatgtgggcttcaatgtcaagacgtatctgtsmamgakgttcgtcgtggcaatgtggctgtgacagcaaaaatgacccaccmatgggaagcagcttggcttcacagctcaggtgattatcctgaaccatccaggccaaatcagtgctggawakgcaccbktgctggrkkgtcacmcrgctcacattgcytgcmagtttgctgagytgaaggdaargatagatcbtcgttctggraagaagctggdagatggtcccmrgktcttgaaatctggggatgctgccmttgttgatatggttyctggcmaacctawgtgtkttgagagcttctctgactatcctcctctgggccsttttgctgttcgtgacmtgrgacmkacggttkctktgggtgtcatcmaagcmgtggacmagaaggcagctggagctggcmaagtcaccmagtctgccmagraagctcagaaggctwaatgratattatccctdatacctgccmccccagtyttaatcmgtggtggaagaacggtytcagaactgtttgtgkymattggccmtttaagkttaatagtraaagactggktaatgatwammawrmawmrwaaaaccytcagaaggaaaggagaatgttttgtggascmttkgtttttttttttttttttttgtgcgtgtgtggcagttttaagttattagtttttaaaatcagtactttttaatggraacmacttgaccmaaaatctgtcacagaattttgagacccmttaaaacmaaagtttaatgaraaraaaaaaaaaaaaaaaaaaaaaaaaaaaaaaaaaaaaaaaaaaaaaaaaaa

SEQ ID NO: 1336 - DNA, 655 bp, Canis familiaris
ctgggaagatggtccccagttcttgaaatctggggatgctgccattgttgatatggttcctggccaacctatgtgtgtttgagagcttctcttgactatcctccttctgggccgttttgtctgttcgtgtacaatgagacacagccggcttgctgtgggggttcattcaaagcagtcggaccagcaaggacagtctggtaggctggcgaacagttcatccccagctagtgtctcccacgcagagaatgtctgcaaggagtgctatagatgtattatttctcccataatcatcgctcgcaccaccccctagttcttatacctagcagtgggtgggaagacgctgttcacagaactctgtttgtgctcaatgtggccactttaagtttaatagtaaaagactggttaatgataaccacatgcatcgtaaaacccttcagaaggaaaggagaatgttttgtgggacccactttgtttttttttttttttttttgtgcgtgtgtggcagttttaagttattagtttttaaaatcagtactttttaatggaaacmacttgacccaaaatctgtcacagaattttgagaccccattaaaacmaaagtttaatgagaaaaaaaaaaaaaaaaaaaaaaaaaaaaaaaaaaaaaaaaaaaaaa

SEQ ID NO: 1337 - DNA, 713 bp, Canis familiaris
ttatcctgaaccatcaggcccaatcagtgctggatatgcacctgtgctgggattgtcammmcagctcacatkgcytgcmaktttgctgagctgawrgrhaaagatagmtcktcgttctggaaagaagctggaagatggtcccmagktcttgaaatctgggratkctgccmttgtkgatatgkttcctggcmaacchawgtgtgttgagagcttctctgactatcctcctytgggccsttttkctgttcgtkacatgagacmgacggttgctktgggkgtcatcmaagcmgtggacmagraggcagctggagctggmmaagtcaccmagtctscccmgaaagctcagaaggctaaatgratattatcccydrtacctgccaccccmgtyttaatcmgtggtggragaacggtyycagaactgtttgtgtcmattggccmtttaagtttaatagtwaaagactggttaatgatmacmatgcatcgtraaaccytcagaargraaggagaatgktttgtggmcmmwwkgkttttttttttttttttttgtgcgtgtgtggcmgttttaagttattagtttttaaaatcagtactttttaatggraacmacttgaccmaaaatctgtcmcagrattttgagacccmttaaaacmaargtttaatgagraaaaaamaaaaaaaaaaaaaaaaaaaaaaaaaaaaaaaaaaaaaaaaaa

SEQ ID NO: 1338 - DNA, 671 bp, Canis familiaris
cacagctcacattgcttgcaagtttgtctgaagctgtaaggaawgatagatcgtcgtttctggrragmagctggdagatggtccccagktcttgaaatctggggatctsccmwtgttgawawggktcctggcmaacctaatgtgtgttgagagcttctctgactatcctcctytgggccsttttgctgttcgtgacatgagacagacggttgctgtgggtgtcatcaaarscagtggammmagaaggcagctggakctggcmaaagtcacccagtctgcccmmgraagctcagaaggctaaatggatattatcccttatacctgccacccccarygtbttaatcagtggtggaagaacggttctcagaactgtttgtgtcmattggccactttaagtttaatagtwaaagactggttaatgatwacamatgcatcgtaaaaccttcagaaggagaaggagaatgttttgtggasccwytktkttttttttttttttttttgtgcgtgtgtggcacgttttaagttaattagtttttwaaatcagtactttttaatggraacmacttgacccaaaatctgtcacagaattttgagacccmttwaaaccaaagtttaatgagaaaaaaaaaaaaaaaaaaaaaaaaaaaaaaawaaaaaaaaaaaaaaaaaaa

SEQ ID NO: 1339 - DNA, 687 bp, Canis familiaris
  misc_feature (378)..(378): n comprises a, c, g, or t, or includes no nucleotide
tgtgctggattgtcacacagctcacattgcttgcaaatttgctgagctgaaggaaaagatagatcctcgttctggaaagaagctggaagatggtcccaagttcttgaaatctggggatagctgcccattgttgaaatggttcctggcaaaacctaatgtgtgttgagagcttctctgactatcctcctctgggccgttttgctgttcgtgaacactgagacagacggttgctgtgggtgtcatcaaagcacgtggagcaagaaggcacgctggagctggcacaagtcaccaagtctgcccagaaagctcagaaggctaaatgaatattatccctaatacctgccacaccccacgttcttaatcacgtggtggaagaancggttctcagaactgtttgtgtcaaattggccactttaagtttaatagtaaaagagctggttaatgataacacaatgcatcgtaaaacctctcagaaggagaaaggagaaatgttttgtggagccactktgtttttttttttttttttttgtgcgtgtgtggcagttttaagttaattagtttttaaaatcagtactttttaatggraacmacttgacccaaaatctgtcacagaattttgagaccccattwaaaccaaagtttaatgagaaaaaaaaaaaaaaaaaaaaaaaaaaaaaaaaaaaaaaa

SEQ ID NO: 1340 - DNA, 651 bp, Canis familiaris
cttgcaagtttgctgagctgaaggcaaagatagatcgtccttctggaaagaagctggaagatggtcccaagttcttgaaatcttggggattctgccattgttgatatggttcctggcaaacctatgtgtgttgagagcttctctgactatcctcctctgggccggttttgctgttcgtgacatgagacagacggttgctgtgggtgtcatcaaagcagtggacaagaaggcagctggagctggcaaagtcaccaagtctgcccagaaaggctcagaaggctaaatggatattatccctgatacctgccaccccagtgcttaatcagtggtggaagaacggtctcaggactgtttgtgtcaattggccaatgtaaggttaaatagtaaaagagctggttaatgagtaacaaatgcatcgtaaaaccttcagaaggaaaggagaatgttttgtggagccacatttgttttttttttttttttttttgtgcgtgtgtggcagttttaagttaattagtttttwaaaatcagtactttttaatggraacaacttgaccmaaaatctgtcacagaattttgagacccattaaaacaaaagtttaatgagaaaaaaaaaaaaaaaaaaaaaaaaaaaaaaaaaaaaaaaaaaaaaaa

SEQ ID NO: 1341 - DNA, 635 bp, Canis familiaris
ttgccgcagtttgtctgagctgaaggaaagatagatctcgttctgggaagaagctggaagatggtccccagtttcttgaaatctggggatctgccatggttgatatgggtcctggcaaacctatgtgtgttgagagcttctctgactatcctcctctgggccgttttgctgttcgtgacatgagacaagacggttgctgtgggkgtcatcaragcagtggacaagaaggcagctggagctggcagaagtcaaccayagtctgcccagaaagctcagaaggctataatgratattatccctwatacctgccaccgccagtctttaatcagtggtggaagaacggtctcagaactgtttgtgtcaattggccatttaagtttaatagtaaaagactggttaatgataacmatgcatcgtaaaaccttcagaaggaaaggagaatgttttgtggaccatttgtttttttttttttttttgtgcgtgtgtggcagttttaagttattagtttttaaaatcagtactttttaatggraacaacttgaccmaaaatctgtcacagaattttgagacccattaaaacmaaagtttaatgagaaaaaaaaaaaaaaaaaaaaaaaaaaaaaaaaaaaaaaaaa

SEQ ID NO: 1342 - DNA, 628 bp, Canis familiaris
gatagattagattcggtcgttctggaaaagaaagctggaagatggtccccaggtcttggatctggggatgctgccattgktgatatggttcctggcmaaccwatgtgtsttgagagcttctctgactatcctcctytgggccsttttgctgttcgtgacmatgagacmgacggttkyctgtgggtgtcatcaaagccgtggaccagaaggcacgctggagctggccaagtcacccagtctgcccmgaaagctcagaaggcttaatggatattatcccttatacctgccamcccmcgttttaatcacgtggtggaagaacggttytcagaactgtttgtgtccattggccmtttaagtttaatagtaaaagactggttwatgataaccatgcatcgtaaamccttcagaaggaaaggagaatgttttgtggaccmmtttgttttttttttttttttttgtgcgtgtgtggcagttttaagttattagtttttaaaatcagtactttttaatggaaaccacttgacccaaaatctgtcmcagaattttgagaccccattaaaaccaaagtttaatgagaaaaaaaaaaaaaaaaaaaaaaaaaaaaaaaaaaaaaaaaaaaaaaaaaaaa

SEQ ID NO: 1343 - DNA, 740 bp, Canis familiaris
gcacgagctttgctccagtcaatgttacaactgaagtaaagtctgttgaaatgcaccatgaagctttgagtgaggctcttcctggggacaatgtgggcttcaatgtcaagaacgtatctgtcaaagatgttcgtcgtggcaatgtggctggtgacagcaaaaatgacccaccaaatggaagcaagctggcttcacagctcaggtgattatcctgaaccatccaggccaaatcagtgctggatatgcacctgtgctggattgtcacacagctcacattgcytgcaagtttgctgagctgaaggaaaagatagatcgtcgttctggaaagaagctggaagatggtcccaagttcttgaaatctggggatgctgccattgttgatatggttcctggcaaacctatgtgtgttgagagcttctctgactatcctcctctgggccgttttgctgttcgtgacatgagacagacggttgctgtgggtgtcatcaaagcagtggacaagaaggcagctggagctggcaaagtcaccaagtctgcccagaaagctcagaaggctaaatgaatattatccctaatacctgccaccgccacttcgaccttccttcacagcttgctgcactttttatatgccagtgcttgacacattgccttattcacgtagcgtgctaataaccaaagcatacatgctgcagaataaaaataacggtgcttctttcttaatgttcaattaaaaaaaaaaa

SEQ ID NO: 1344 - DNA, 541 bp, Canis familiaris
gcaaccaatgtgtgttgagaatctttctcttgactatcctcctcctgggccgctttttgcttgttccggacatgaggacagacggtttctgtgggttgtcatcaagcagttggaccagaaggcatctggagctgscaaagtcacccagtctgccccagaaagctcagaaggctaaatgatattatcccttatacctgcccaccccmagtctttaatccagtggtggaagaacggttctcagagactgtttgtgtcacaattggccactttaagtttaatagtaaaagactggttaatgataaccatgcatcgtraaaaccttcagaaggagaaggaggaatgttttgtggaccactttgttttttttttttttttttgtgcgtgtgtggcacgttttaagttattagtttttaaaaatcagtactttttaatggraacmacttgacccaaaatctgtcacagaattttgagaccccattaaaaccaaagtttaatgagaaaaaaaaaaaaaaaaaaaaaaaaaaaaaaaaaaaaaaaaaaa

SEQ ID NO: 1345 - DNA, 565 bp, Canis familiaris
cgtcctactacgacaaccaggacttccctgccatcaactgggatgacaagagcatccgccaggccttcatccggaaggtgttcctcgtgctgaccctgcagctgtccgtgacgctgtccactgtggctgtgttcacctttgtcggggaggtaaagggcttcgtccgggagaacgtgtggacgtactacgtgtcctatgctgtcttcttcatctccctcatcgtcctcagctgctgtggagacttccggcgaaagcacccctggaacctcgtggcactgtccatcctgaccgtcagcctgtcctacatggtgggtatgatcgccagcttctacaacacggaggcggtcatcatggccgtgggcatcacgacaaccgtctgcttcacggtggtcatcttctccatgcagacccgstacgacttcacgtygtgcatgggtgtgctcctggtgagcatggtggtgctggtcatcttcgccatcctctgcatctttatccggaaccgcatcctggagatcgtgtatgcctcgctgggcgccctgctcttacctgcttctggcagtggaca

SEQ ID NO: 1346 - DNA, 629 bp, Canis familiaris
tgaagcttctcttagttctactggattctcagagagccctctggggccttttgctttgaggtgtctgtgtttcccctttaccagaggcagcactgcataagtccggtgtgtgtcccccatagcatgttctgttggattgcatttactggcatagaaaggacagatcacatactgggcagaagtcacccattcaaggctaaggtgggcttccacgttgccctaatagaagtactcaagtctcttgggtaatgagctggaatgcccacaagaagaggggttcctgttttcatttgaaaactttatgattaagagaacctttagaaaactgatttcaagtaagtttttggtgcccattaaaatggtggctgtggttcactactttcctagatggatgagactcttactattataacttaacgtgttcctttgccccctagctgassccatccttccccagagggatggcattgggatcaaaagataggactctggcttctgtgtagtgtaaatgtaaacacctgtttcaagcaactttaatgtttctgattggtttgtatttcatagctcagtagctgataataaagtymmmaattctgaaaaaaaaaaaaaaaaaaaaaaaaaaaaaaaaa

SEQ ID NO: 1347 - DNA, 443 bp, Canis familiaris
gcacgagggttcctaccgcagtcccgcaggcgcccggctcgktcctttcaatatgacagatgccgstgtgtccttcgccaaggacttcctggcgggtggagtggccgctgccatctscragacggcggtcgcgcccatcgagcgggtcaagctgctgctgcaggtgcagcacgccagcaagcaaatcactgcagataagcaatacaagggcattatagactgcgtggttcgkattcccaaggagcagggagtcctgtccttctggcgtggtaacctggccaatgkcatcagatacttycccacccaggctctcaacttcgccttcaaagataaatacaagcagattttcctgggtggtgtggacaagagaacccagttttggcgctactttgcagggaacctggcgtcaggtggcgccgctggggccacatcttgtggtttgg

SEQ ID NO: 1348 - DNA, 267 bp, Canis familiaris
catttcgtgaagatgtttaaggccgagtgccatttcaccaacgggacggagcgggtgcggcttctggcgagaagcatctataaccgggaggagttcgtgcgcttcgacagcgacgtgggggagttccgggcggtcacggagctcgggcggcgcgacgctgagtcctggaaccggcagaaggagctcttggagcagaggcggsccgcggtggacacctactgcagacacaactaccgggtgggcgagagcttcacggtgcagcggcga

SEQ ID NO: 1349 - DNA, 2925 bp, Canis familiaris
gaggcccaacaagcacagccggggaaggaaaatgcgttgtggacctctgtgccgattcctgtggctttggccctatctgtcctgtgttgaagctgtgccaatccgaaaagtccaggatgacaccaaaaccctcatcaagacgattgtcgccaggatcaatgacatttcacacacgcagtctgtctcctccaaacagagggtcgctggtctggacttcattcctgggctccaaccagtcctgagtttgtccaggatggaccagacgttggccatctaccaacagatcctcaacagtctgcattccagaaatgtggtccaaatatctaatgacctggagaacctccgggaccttctccacctgctggcctcctccaagagctgccccttgccccgggccaggggcctggagacctttgagagcctgggcggcgtcctggaagcctcactctactccacagaggtggtggctctgarcagactgcaggcggccctccaggacatgcttcggcggctggacctcagccctgggtgctgagacctcgaaggcttctcttccccaagtcgaggagagaacctgggctcccaggtgtctccaggaaagagaccgtatgggtgtcctttatcctggcccctagccgtttctctctcacaccacagagccactcttccaaaggcataagcctccacggcacaaaaccaaagataagaatgcaggattccatgctcaccgggaagggggacccacctggcaaacagtgacctgcatctggggttctcacaaaaggcttccttcctgtgccacctcccccctcactgcatgcttcagcgtgacctggggtgatgtcaggaggcacccgctgagcctttggaccatcaagcaaggttctgtctgaaaattctgggagcaccatgaaagctacatccacatagctgcaaactcccaagcaacacattatttattatgcattttattctggatggatttaaagcaaaacatcagcctttccaggctctttggggccagccagagctaggaatgctatttccaatcccatcggtgggcctggctgaggcaaacccatttctagtgacttgagggctctcaagttagttctttggtaactggctatgtttctactgtgacggatgttaaattacagtgtttgcaatggcattgccctgagcggatctccaaggaccaggttatttcaaaaagaagatgaattttgtcatgtgtgatatatagatgtgtgtacctggaggtaggagaacgtgttagcaggaaggggaaggatccaggatgtattttttgaattacatttgtgcgatgggctcttcgaatggaggggggttcatgttctcatctctgcaaccacttagtgtggttttaatgagaataacaaaggatatgactccttcagcgggggttgtggggttttgccagccacccatggggggggcagtggcactgacgactgtttactggggcagttgtgagcgctggccttctccaattgctggagacaggtctttcttatcagggaatgaggatccctcactggaggtggtgatccccagagcaggggtccttagtatgggccttggaatggtctagggatgatcccacactggatttgtaacatggaagtacccctacttgggatttgcatgccaaattgtggttctcatctgactggctcacccaaacaagaccatgtttccctctcattcggggtagatttatactccagggggaagttctagggctttagcgaatagtcccaagacctggactggcactggtgagtgccgggccgccaggaatgcccttcccaccagaggtcacgtttggtgggatgaacaaggaggcttgggttttccaccatcctgccactatgatgaggccatcatactctaggtggtggatctgttcaaggaaatttgaatcaaagctattaactttaagaccgagcacctactttgtgctcagtcctgattggtgctatgggctagagaagctcaccaagtaaacgttaaaatccagccttaccctcagggaccttgcattccagatggtaaaaatgccacacaccagtatgcaaaggctggcctcgcaccatggcaactgagcagctgaaccagcgcactcctcagcaggcggaaatgctgaactgagaatgtcagtgctcaggggcccacaggctaaccctgctcccacttcgtagcatttttgcttttcagggcacggcagcatttattactgtgtagccacatccctctgaagcagcagcatagctgacaatttaaaaataagaactaagaacatacctaagaccataacggcagacaagtagcagggccgagactagagttcaggacctctgactcccagagtgtcccgggagccaggtaatgctccctggaggtgcaaatagggttgggcaggggagaccagaagtgcttacagggagagaggacttggaggtgattttgcaggaggtgagggatgtgaattgcctgaatggcggaggctgttttgttcatgctgagacaccggggtgaaggtatgtgcagtcagttataaagaaaggctgccaaaggcaaggcgggagggaaagtgacatgttgaagaggtcttcagtggtcaaagaaatttgatatcagaagggtcaagaatcgaaagttctagaacggagattcatgagatagacagagtaagacccgttctggagagtatgacctagataatcattaccacccagccaggctgggatcttttaagcctttcacttacccaaacctggcaccatggctcattctcagagtgtgaaagttctaaaatgtaaatgaatgtctttttttgtaacttaaaaaattttttttcttgttaaaaaaaaaaaagtcaaataaattaactttgccccc

SEQ ID NO: 1350 - DNA, 485 bp, Canis familiaris
  misc_feature (447)..(447): n comprises a, c, g, or t, or includes no nucleotide
  misc_feature (456)..(456): n comprises a, c, g, or t, or includes no nucleotide
atgcaattccagcccaagcaccatttcccgcggtacccgggacccctgcccagccctgtgggaggtgggtagcctccctgggcccctaccaaggggccagggccttctgtttaaccataatggttgtgtgctgtaccattttgttacatataacatataagtcaatataattttgttaagactccaacccttccaattcccctcccagccctggtacccattccccagtgtgatttagggccctgagcgggaagggggtactgaggcctgaaccactcggcatcttcttccagcatcttcctccaacctctgtagggccatggctgtatgtgctgtcgctgtgttttttaattttttgtttttgatttttaactgggtttggggtttgatttttatttctttgggggctttatttttcttgggagataactaaaaatcttgcaatgnaaattctgnggtttctatttaacttggggttcatgttt

SEQ ID NO: 1351 - DNA, 737 bp, Canis familiaris
  misc_feature (236)..(236): n comprises a, c, g, or t, or includes no nucleotide
gcacgasgctttcaggatgaccgagtgggagacarctgcaccagcarkkgcsgrgacscckgacatcragctcttkgggaaatggagcrctgatgatgttcagatcmakgacawktctkygcaggrmymcattscmgtgaaggagaagtakgccaagtacctgccccacartgcaggccgctatgcagccaagcgsttccgtaaggcacagtgccccmttgtggagcgcctgaccnactcaatgatgatgcatggccgtracmatggcaagaagctcatgactgtgcgcattgtcaagcatgccttcgagatcatccatctgctcactggtgagaaccccctgcaggtcctggtgaatgccattattaacagtggtccccgggaagactcaacccgcattgggcgagctggaacagtgaggcgtcaggctgtcgatgtgtcccccctacgccgtgtgaatcaggccatttggctgctgtgcacaggtgcccgtgaggccgccttccggaacatcaagactattgctgagtgcctagcagatgagctcatcaatgcagccaagggctcttccmattcctatgctatcaagaagaaggatgagctggaacgtgtggccaagtctaaccgttgatcacctggctgtggcttcaataaacctgtctgcccttggggcagcctchmmmmaawaaaaaaaawaaaawwaaaaaaaaaaaaararraaaaaaaaaaaaaaaaaa

SEQ ID NO: 1352 - DNA, 737 bp, Canis familiaris
  misc_feature (502)..(502): n comprises a, c, g, or t, or includes no nucleotide
ttttttttttttttttttyytytttttttttttttwwttttwttttttttwttkkkkdgaggctgccccaagggcagacaggtttattgaagccacagccaggtgatcaacggttagacttggccacacgttccagctcatccttcttcttgatagcataggaatkggaagagcccttggctgcattgatgagctcatctgctaggcactcagcaatagtcttgatgttccggaaggcggcctcacgggcacctgtgcacagcagccaaatggcctgattcacacggcgtaggggggacacatcgacagcctgacgcctcactgttccagctcgcccaatgcgggttgagtcttcccggggaccactgttaataatggcattcaccaggacctgcagggggttctcaccagtgagcagatggatgatctcgaaggcatgcttgacaatgcgcacagtcatgagcttcttgccatkgtyacggccatgcatcatcattgagtnggtcaggcgctccacaakggggcactgtgccttacggaascgcttggctgcatagcggcctgcaytgtggggcaggtacttggcmtacttctccttcackgsaatgkrkycctgcrmagamwtgtcmtkgatctgaacatcatcagygctccatttcccmaagagctygatgtcmggsgtcycsgcmmytgctggtgcagytgtctcccactcggtcatcctgaaagcstcgtgc

SEQ ID NO: 1353 - DNA, 746 bp, Canis familiaris
ggctgccgcctttcagggaggaccgagtggaracaactgcaccagcagtggcggagacccctgacatcaagctctttkgggaaatggrgcactgatkratgttcagatcmatgacatttckttgcaggactacattgcagtgaaggagaagtatgccawgtacctgccccacagtgcaggccgctatgcagccaagcgcttccgtaaggcacagtgccccattgtggagcgcctgaccwactcmatgatgatgcatggccgtaacmatggcaagaagctcatgactgtgcgcattgtcaagcatgccttcgagatcatccatctgctcactggtgagaaccccctgcaggtcctggtgaatgccattattaacagtggtycccgggaagactcmacccgcattgggcgagctggaacagtgaggcgtcaggctgtcgatgtgtcccccctacgccgtgtgaatcaggccatttggctgctgtgcacaggtgcccgtgaggccgccttccggaacatcaagactattgctgagtgcctagcagatgagctcatcaatgcagccaagggctcttccaattcctatgctatcaagaagaaggatgagctggaacgtgtggccaagtctaaccgttgatcacctggctgtggcttcaataaacctgtctgcccttggggcagcctcammmmaaaaaaaaaaaaaaaaaaaaaaaaaaaaaaaaaaaaaaaaaaaaaaaaaaaaaaaaaaa

SEQ ID NO: 1354 - DNA, 735 bp, Canis familiaris
cgattgggagccagctgcaaccagcagtggcgggagrmcsccygacaatcaagctccttttggggaaatggagcactgatgaatgttcagatcradgacawttctttgcaggamtacattgcagtgaaggagaagtatgccaagtacctgccccacagtgcaggccgctatgcagccaagcgcttccgtaaggcacagtgccccattgtggagcgcctgaccaactcwatgatgatgcatgscsgtracaatggcaagaagctcatgactgtgcgcattgtcaagcaygccttcgagatcatccatctgctcactggtgagwaccccctgcaggtcctggtgaawgccmttattaacagtggtccccgggaagactcaacccgcattgggcgagctggaacaktgaggcgtcaggctgtcgawgtgtcccccctacgccgtgtgaatcaggccatttggctgctgtgcacaggtgcccgtgaggccgccttccggracatcaagactattgctgagtgcctagcagatgagctcatcaatgcagccmagggctcttccaattcctatgctatcaagaagaaggatgagctggaacgtgtggccaagtctaaccgttgatcacctggctgtggcttcaataaacctgtctgcccttggggcagcctcammmaaaaaaraaaaaaaaaawaaaaaaaaaaaaaaarraaaaaaaaaaaaaaaaaaaaaaaaaaaaaa

SEQ ID NO: 1355 - DNA, 447 bp, Canis familiaris
gcaskrgctcttcggatcatgtctggtggctccgcggactataacagagaacatggaggcccagagggaatggaccccgatggtgtcatcgagagcaactggaatgagattgttgataactttgacgatatgaatttaaaggagtctcttcttcggggcatctatgcttacggttttgagaagccttcagctattcaacagagagctattattccttgtattaaagggtatgatgtgattgctcaagctcagtcaggtactggcaagacagccacatttgctatttccatcctgcaacagttggagattgagttcaaggagacccaagcactagtattggcccccaccagagaactggctcaacagatccaaaaggtaattctggcacttggagactatatgggagcaacttgtcatgcctgcattggtggaccaatggtcggaatg

SEQ ID NO: 1356 - DNA, 884 bp, Canis familiaris
gtcagcctctacattctctcctgatgggagagttttccaagttgaatatgctatgaaggctgtggaaaacagtagctattggaatcagatgtaaagatggcgttgtctttggggtagaaaagttagtcctttctaaactttatgaagaaggttccaacaaacgactttttaatgttgatcggcatgttggaatggcagtagcgggtttgttggctgatgctcgttctttascagacattgcaagagaagaagcttccaactttagatctaattttggctataacattccaktwaaacatcttgcagacagagtggccatgtatgtacacgcatatacactttacagtgctgttagaccttttggctgcagtttcatgttagggtcttacagtgtgaatgacggtgcacagctctacatgattgacccatcaggagtttcatatggttattggggttgtgccattggcaaagccaggcaagctgcaaagacagwaattgraaaacttcagatgwaagaaatgacctgccgtgatrttgttaaagaagttgcmaaaataatttacatwgtacatgatgaagttaaggataaagcttktgaactagarctcasctgggttggtgaaataactaaaggaagacatgaaattgttccaaaagatataagggaagaggcagagaaatacgctaaggaatccttaaaggaagaagatgaatcagatgatgataatatgtaacatttacttcagcatctattttaaatttctactatagtcccatgtaactctttagcyctgtggattcttacctacccagagaccagttttcattaaacttttgtcttctawmaawwraaaaaaaaaaaaaaaaaaaaaaaaaaaaaaaaa

SEQ ID NO: 1357 - DNA, 449 bp, Canis familiaris
  misc_feature (311)..(311): n comprises a, c, g, or t, or includes no nucleotide
  misc_feature (421)..(421): n comprises a, c, g, or t, or includes no nucleotide
tttgaaagggaaaatgcctatcgatttggtgatagacgatagagaaggaggatcaaaatcagacagtgaagatataacaagatcagcaaatctaaccgaccagccctcttggaacagagatcacgatgacacggcatccactcgttccggaggaaccccgggcccttccagcggtggccacacatcacacagtggagataacagcagtgagcaaggtgatggcttggacaacagtgtagcttcccccagcacaggtgacgatgatgatccagataaggacaaaaagcgtcacaaaaagcgtggcatctttnccaaagtagccacaaatatcatgagggcgtggctgttccagcatctaacacatccttacccttctgaagaacagaaaaagcagttggcacaagacacgggactcaccatncttcaagtgaacaattggtttattaatg

SEQ ID NO: 1358 - DNA, 515 bp, Canis familiaris
  misc_feature (497)..(497): n comprises a, c, g, or t, or includes no nucleotide
gcacgagccgcgccgagctcgagaggacggagctgagatttcagaatgacttccatcttgacttacacatttaaaaatcttcctaatgcatcaacatgggccctccgattttctgtaagacctctgagctgttcctcccagctacgagctgccccagctgcacagaccaaatcaaagaaaaccttagccaaacccaacataaggaatattgtggtagtgggattgtgtgggttcgcattycgttttttgcagtcaggcaccttcatataaggacctgatgccacatgatttggctagagcagcactttcgggtttgttgcaccggaccaatgtcccaaaggatgttgttgattatatcatctttggcacagttatacaggaagtgaaaactagcaatgtggctagagaggctgcccttggagctggcttctctgataagactcctgctcacactgtcaccatggcctgcatctctgccaaccaagccatgaccacangtggtggcttggaccctt

SEQ ID NO: 1359 - DNA, 714 bp, Canis familiaris
aacgtgactaagagagtggaatggcatttctattcgactacgtttctgtgtgcatatgtgctttataaggtgaaatgtacccacckgtatatagagagccttttaatcaagcccttcagtataatttatatgtttttatcatttccttactgatacaaatgttttgtgtttgagaaagttacatgggatagtagtacaaggaagacttgcttaaccttacaaagttaagttctcatgattagtttttaggaaggattaatggttaagcttatataaaatactggatttcaggaaacttcatattggccaacaccagggtgtatcctatgaatgtcactttgaattgggagttaatgtttaacgttcccaaattatgttttaaatgattgatttgtaagaaaggkttattttcagtgtttcttgacatttaaagcaaagcctctatttaaagcgtctgktttgtgatcagtgkgctatgacggcagtaaccgattacctaacatttttaagctttttgagactgttcttgttttattttgttttctaagagcatttcagcagcttcggtggtatctagaaaaatagaaattataaaaagaaagtctcttattatattcccttctcccctttgacaataattgcttttttcctgtgcttattactgatatttaccatttttattaaagtatccttattatgcaaaaaaaaaaaaaa

SEQ ID NO: 1360 - DNA, 1453 bp, Canis familiaris
agtgctcaggacaccacacagacaaatcaccatggagtctgtgctcttctgggttttccttgtcactattttaaaaggtgtccagggtgaggtacgtttggtggagtctggaggaaccctggtgaagcctggggggtccctgaaactctcttgtgtggcctctggattcaccttcagaagatactccatggactgggtccgccaggctccaggcaagagcctgcagtgggtcgccgggattaacggtgatggcacaggaacatcctattcacagactgtgaagggccgattcaccatctccagagacaacgccaagaacaccctctatctgcagataaacagcctgagagccgaagactctgctgtgtattattgtgccaagagctggtctcgtaatggggatcttgactactggggccagggaaccctggtcaccgtctcctcagcctccaccacggccccctcggttttcccactggmccccagctgcgggtccacttccggctccacggtggccctggcctgcctggtgtcaggctacttccccgagcctgtaactgtgtcctggaattccggctccttgaccagcggtgtgcacaccttcccgtccgwcctgcagtcctcagggctctactccctcagcagcatggtgacagtgccctccagcaggtggyccagcgagaccttcacctgcaacgtggcccacccggccagcaaaactaaagtagacaagccagtgcccaaaagagaaaatggaagagttcctcgcccacctgattgtcccaaatgcccagcccctgaaatgctgggagggccttcggtcttcatctttcccccgaaacccaaggacaccctcttgattgcccgaacacctgaggtcacatgtgtggtggtggatctggrmccagaagaccctgaggtgcagatcagctggttcgtggacggtaagcagatgcaaacagccaagactcagcctcgtgaggagcagttcaatggcacctaccgtgtggtcagtgtcctccccattgggcaccaggactggctcaaggggaagcagttcacgtgcaaagtcaacaacaaagccctcccatccccgatcgagaggaccatctccaaggccagagggcargcccatcagcccagtgtgtatgtcctgccgccatcccgggaggagttgagcaagaacacagtcagcttgacatgcctgatcaaagacttcttcccacctgacattgatgtggagtggcagagcaatggacagcaggagcctgagagcaagtaccgcacgaccccgccccagctggacgaggacgggtcctacttcctgtacagcaagctctctgtggacaagagccgctggcagcggggagacaccttcatatgtgcggtgatgcatgaagctctacacaaccactacacacagraatccctctcccattctccgggtaaatga

SEQ ID NO: 1361 - DNA, 659 bp, Canis familiaris
tgaccaaaccaaaattaagatggtgagacctcgattctgagaccaaatcctkkatcctatctktgccctaactgcttacagaatgggatcatgttccccttatgtcgaggtgaccacttatttgctctcctgcctccttgaaagaaaaaagagaattatgttcgccactgatttagccacatgaatcaaactcatctcatcacccttttctgggtccaaagctgctgcctctaaacgtgccatctcattgtgctttgtatcagttagtgctggagaaatcttgaatagcttatgtacmaaactgtttttaaattttatattattttgaaactttgcttctttagggttggggcacattgaccaccccgtctggctgagaactctctacartytatgggctgacagtgtgstgatyttttaaaagtttytttccctcccmaactccccttttaggtgaggtttccgtgaggtctgttaggtgtgcatcctgcagcttattggcttaaaatgcactcttcctttggtggcctctctttgggggccgattgggagaaagaaaccaatrgtgcmaactgttttgatactsaaaattgacaagtgtctttttgaaataaagaaccagtccctctgawmmhmaraaamaaaamaaaaaaaaaaaa

SEQ ID NO: 1362 - DNA, 496 bp, Canis familiaris
tgaatcttaaaaactttttaatgtttcaattagcattgtcagtatgattgtgattcatctggccacatcacagcttccttgtgacatcagttataaaatgctggactaaggttttactcttcaaagcaaaattaagcctcaactaatagattcaccaaaatgatacatcacgacctccttccaccaaatatgctccggtcagatttagaaatgcctgcgctccatatgctgaaatcatatctgtccttgcaatcaatgggcaaatattggccacagctgctgaagtccgcctgctgaacccacctcgcggatctgatcctcctgccattatacttgccgaaagatggagggaaaaaaggagttactgtcccctcccccctgctttatagagggaatctaacattaagatcggtgccctttatcttcccgcccgccgatccgcctgtgtgatcgcaactcgaaaacagagagaaatcccctgaccaacttctattaa

SEQ ID NO: 1363 - DNA, 1017 bp, Canis familiaris
  misc_feature (118)..(118): n comprises a, c, g, or t, or includes no nucleotide
  misc_feature (972)..(972): n comprises a, c, g, or t, or includes no nucleotide
gtgggtcgagtggctgctacctcggcctccggggccttacggggactcggcccctcgccgctaccccaagtcaaggtcttgctgcgggccagcccggcagcgctccagtccgccaganactatgccacccaaacatctccttcgccgaaggcaggcgctgccaccgggcgcatcgtggcggtcattggtgcagtggtggatgtccagtttgatgaaggactaccacccatcctaaatgccctggaagtgcaaggcagggagaccaggctggttttggaggtggcccagcatttgggtgaaagcacagtgaggactattgccatggatggcacggaaggcttggttagaggccagaaagtcctggattctggtgcaccaatcaaaattcctgttggtcctgagaccttgggcagaatcatgaacgtcattggagaacctattgatgagagaggtcccatcaaaaccaaacaatttgcagctattcatgctgaagcccctgagtttgtggaaatgagtgttgagcaggaaattctggtaactggtatcaaggttgtggatctgctggctccctatgccaagggtggcaaaattgggctgtttggtggtgctggagttggcaagacagtactgatcatggagttaatcaacaatgtcgccaaagcccatggtggttactctgtgtttgctggtgttggyrmraggacccgtgaaggcaatgacttataccatgaaatgattgagtctggtgttatcaacttaaaagatgctacctccaaggtagcgctggtgtacggtcaaatgaatgaaccgcctggcgctcgcgcccgggtggctctgactggactgactgttgccgaatacttcagagaccaagagggtcaagatgtactgctctttatcgataacattttccgcttcacccaggctggctctgaggtgtctgctttattggggcaggatcccttctgctgngggctatcagcctaccttggccactgatatgggtaccatgcagga

SEQ ID NO: 1364 - DNA, 589 bp, Canis familiaris
gacagctgagctgggcatccggcatgtcctgctgaccatcaagtgcctgctgatccaccccgaccccgagtcggccctcaatgaggaggcaggccgcctgctcttggagaactacgaggagtatgccgcccgcgcccgcctgctcacagagatccatgggggtgccagcgggtccagcagcgggagcaccgaggcgggcagggccctggccagtgggggtgccaccccctccactgaccccatggccccggggggcccaggtggagccgatggccccatggccaaraagcatgcgggtgagcgggataagaagctggcakccaagaaaatagacggacaagaagcgggcactgcggcggctgtagtgggtttttctcccggttctacccacccctgaccccaacccccaactctgtctctaagttatttaaattatggctggggtgggggagggtgtgggggcmctgggacctggatttgtttttctaaataaagttggaaaagcacctgctctgccttgcagacatcccagaaaaaaaaaaaaaaaaaaaaaaaaaaaaaaaaaaaaaaaaaaaaaaaaaaaaaaaaa

SEQ ID NO: 1365 - DNA, 777 bp, Canis familiaris
cgggacgcttgccatagctatttgtggaccttagacagttttacacaaggcagctgtaccggtccgaattccccggatcgatcccccgccgagatcacagcctccccctygagcccctcgcttcccgacgctccgtccccccccgcccggcyttctcccgccgccgccttccgcaggccgtttccaccgaggaaaaggaatcgtatcgtatgtccgctatccagaacctccactctttcgacccctttgctgatgcaagtaagggtgatgatctgcttcctgctggcactgaggattatatccatataagaattcaacagagaaacggcaggaagacccttactactgtccaagggatcgctgatgattacgatwaaaagaaactagtgaaggcgtttaagaagaaatttgcctgcaayggtactgtaattgagcatccagaatatggagaagtaattcagctacagggtgaccagcgcaagaacatatgccagttcctggtagagattggactggctaaggacgaccagctgaaggttcatgggttttaagtgcttttggctcactgaagcttaagtgaggatttccttgcaatgagtagaatttcccttctgtcccttgtcacaagtttaaaaacctcacagcttgtataatgtaaccatttggggtctgcttttaacttggactagtgtaactccttcatgcaataaactgaaaagagccawrmwraaaaaaaaaaaaaaaaaaaaaaaaaaaaaaaaaaaaaaaaaaaaaaaa

SEQ ID NO: 1366 - DNA, 732 bp, Canis familiaris
tccggtcccggattccccgggattctgasccgccgccgaggactcagcagcctccccctcgagccccctygcttcccgacgctccgtcccccccgcccgccttctcccggccgccgscttccgcaggccgtttccaccgaggaaaaggwatcgtatcgtatgtccgctatccagaacctccactctttcgacccctttgctgatgcamagtaagggtgatgatctgcttcctgctggcacctgaggattatatccatataagaattcaacagagaaacggcaggaagacccttactactgtccacagggatcgctgatgattacgatwaaaagaaactagtgaaggcgtttaagaagaaatttgcctgcmayggtactgtaattgagcatccmgaatatggagaagtaattcagctacacgggtgaccmgcgcaagaacatatgccmgttcctggtagagattggactggctaaggacgaccagctgaaggttcatgggttttaagtgcttttggctcactgaagcttaagtgaggatttccttgcmatgagtagaatttcccttctgtcccttgtcacacagtttaaaaacctcacagcttgtataatgtaaccmtttggggtctgcttttaacttggactagtgtaactccttcatgccaataaactgaaaagagccmwwaaaaaaaaaaaaaaaaaaaaaaaaaaaaaaaaaaaaaaaaaaaaaaaaaa

SEQ ID NO: 1367 - DNA, 809 bp, Canis familiaris
aagaagtgtatgatgagccacaagttcataagaatatgggaaacactagtcacagaactcaggaccmaatkgcgtctgatgtctcarggtcggttttttgaagwtwvcyytgctgatctgcagaatgatgaartkscatytaggrawtycaagctwatcmhtgrggwtgtkcmggsmmrwwvykgcskgrmtrwttttsatggcawgratstwrcccgkgacmaartgtgctccmhggtcvvraaatggcagaccakgattgaagctcatgttgawgtaaagactaccgatggttatttgcttcgtctattttgtgttggttttactrawraacgchataatcagattcggaagacctcttacgctcagcaccwacaggkccgccmaattcggraaaagatgatggraatcatgacccgagaggkgcmaacmaatgacttgaaagaagtggtcmataaactgattccagacagcatcggraaagatatagraaaagcttgtcagtctatttatccactccatgawgtttttgttagaaaagtaaaaatgctgaagaagcccmagtttgmattgggraaactcatggagcttcatggtgaaggtagtagttctggraaagctacgggggatgagaccggtgctaaagttgaacgagctgatggatatgaaccaccagtccmmgaatctgtttwaaawtcagacawttaatggkgaccmaataaaaacawatttgtgawrwwwwaaaaaaaaaaaaaaaawaraaaaaaaaaaaaraaraaaaaaaaaaaaaaaaaaaaaaaaaaaaaaaa

SEQ ID NO: 1368 - DNA, 791 bp, Canis familiaris
  misc_feature (314)..(314): n comprises a, c, g, or t, or includes no nucleotide
  misc_feature (319)..(319): n comprises a, c, g, or t, or includes no nucleotide
  misc_feature (368)..(368): n comprises a, c, g, or t, or includes no nucleotide
ggagccagctagtcaaatagatatggaaacactagtcacagactcaggaccaattgcgtctgatgtctcaagktcggtttttgaagktwccykgctgatctgcasratgatgradktgcatttaggaaattcaagytdwtcactgrggatgtkcagkgchaaaactgcckgactrrwkkkcmtrgcatggatcttacccgkgacmmawwgtgstccatggtchwmraatgscagaccatgrttgaagctcmtgktgawgtwaagactaccgatggttawdtgcttcgtctatdttgtgttkgttttackwdwdnvcgcnvtwatcagatycggdagacctsttacgctcagcacchacaggtccsccnaattcggdwaaagatgatggaaatcakgacccgagaggtgcmwacmadkgacttgaaagaagtggtcmataaactgatkcsmgacagcatcggwwaagatatagwwwaagcttgtcmgtctatttatccactccmtgatgtttttgttagaaaagtaraaatgctgaagaagyccmagtttgaattgggraaactcatggagcttcatggtgaaggtagtagttctggraaagctacgggggatgagaccggtgctaaagttgaacgagctgatggatatgaaccmccagtccmagaatctgtttaaaattcagacmtttaatggtgmmcmmatawaaacatatttgtgatgtwwwmmaawmaaawraaraaadrrmmraawaaaaaaaaaaaaaaaaaaaaaaaawaaaaaaaaaaaaaaaa

SEQ ID NO: 1369 - DNA, 909 bp, Canis familiaris
  misc_feature (237)..(237): n comprises a, c, g, or t, or includes no nucleotide
tttttgaagttacyttgctgatctgcagaatgatgrarsttgcatttaggaaattcaagctaatcactgaggatgttgcagggmcaaaactgcctgactaattttcatggcatggatcttacccgtgacaaatgtgctccayggtcaaaaaatgscagaccatgattgaagctcatgttgatgtaaagactaccgatggttawytgcttcgtctaytttgtgktggttttactadwnacscataatcagattcggaagacytcttacgctcagcamcmacaggtccsccmmattcggwaaaagatgatggraatcatgacccgagaggtgcmamcmratgacttgaaagaagtggtcmataaactgattccmgacagcatcggaaaagatatagmaaaagcttgtcmgtctatttatccmctccmtgatgtttttgttagaaaagtwwaaatgctgaagaagcccmagtttgaattgggaaaactcmtggagcttcatggtgaaggtagtagttctggraaagctacgggggatgagaccggtgctaaagttgaacgagctgatggatatgaaccmccmgtcchagaatctgtttaaaattcagacatttaatggtgaccmataawaacatatttgtgatgtwwarwwwmwwawmawwctttttaaataatcaggctcggtgaagcagatgttttgaactgaccgtgtgaacttttcagaactattgtatggatcttatccmttgctcttggctactaaatagctgcmaaagggtagtgatctattttaagctgtagtgatctggatggaagtgttctagatggttaataaaaggaaacttttttaamrwrwaaaamamaaaaaaaaaaaaaaaaaaaaaaaamaaaamaaaaaaaaaaaaaaaaaaaa

SEQ ID NO: 1370 - DNA, 880 bp, Canis familiaris
caagcgccttacgaaaggcggcaaaaagggagccaagaagaaagtggttgatccattttctaagaaagattggtatgatgtgaaagcgccagctatgttcaatataagaaatattggaaaaacactagtcacaagaactcaaggaaccaaaattgcgtctgatggtctcaagggtcgggtttttgaagttagccttgctgatctgcagaatgatgaagttgcatttaggaaattcaagctaatcmctgaggatgtgcagggcmmaaactgcctgactaattttcatggcatggatcttacccgtgacmaaatgtgctccmtggtcmaaaaatggcagaccmtgattgaagctcatgttgatgtaaagactaccgatggttatttgcttcgtctattttgtgttggttttactaaaaaacgcmataatcagattcggaagacctcttacgctcagcaccmacaggtccgccmaattcggraaaagatgatggaaatcatgacccgagargtgcaaacmaatgacttgaaagaagtggtcmataaactgattccagacagcatcggaaaagatatagaaaaagcttgtcagtctatttatccactccatgatgtttttgttagaaaagtaaaaatgctgaagaagcccmagtttgaattgggaaamctcatggagcttcatggtgaaggtagtagttctggaaaagctacgggggatgagaccggtgctaaagttgaacgagctgatggatatgaaccaccagtccmagaatctgtttaaaattcagacatttaatggtgacccaataaaaacayatttgtgatgtttaaaaaaaaaaaaaaaaaaaaaaaaaaaaaaaaaaaaaaaaaaaaaaaaaaaaaa

SEQ ID NO: 1371 - DNA, 704 bp, Canis familiaris
gtctattttgtgttggtttttacttaaatacgcataattcagatttcggrragacctctatacgctcagcaccaacaggtccgccacaattcgggaacaagatgatgggaatcakgacccgagaggtgcmaacmaatgackkgaaagaagtggtcmataaactgattycmgacagcatcgggwaagatatagkaaaagcttgtcacgtctatttatccactccatgatgtttttgttagaaaagtaaaaatgctgaagaagcccacagtttgaattgggraaactcatggagcttcatggtgaaggtagtagttctggraaagctacgggggatgagaccggtgctaaagttgaacgagctgatggatatgraccaccmgtccacagaatctgtttaaaattcagacatttaatggtgacccatwaaracatatttgtgatgtttaatttcttatcattctttttaaataatcaggctcggtgaagcagatgttttgaactgaccgtgtgaacttttcagaactattgtatggatcttatccacttgctcttggctactaaatagctgcmaaagggtagtgatctattttaagctgtagtgatctggatggaagtgttytagatggktaataaaaggraacttttttaamrwraaaaaaaaaaaaaaaaaaaaaaaaaaaaaaaaaaaaaaaaaaaaaaaaaaa

SEQ ID NO: 1372 - DNA, 644 bp, Canis familiaris
cttgacgcataatcaggagtcggagaccctcttacgctcagcaccacaggtccgcccaatttcggraatagatgatggaatcatgacccgagaggtgcaaacaaatgacttgaaagaagtggtccataaactgattccagacagcatcggaaaagatatagaaaaagcttgtcagtctattkatcccactccatgatgtttttgttagaaaagtaaaaatgctgaagaagcccaagtttgaattgggaaaactcatggagcttcatggtgaaggtagtagttctggaaaagctacgggggatgagaccggtgctaaagttgaacgagctgatggatatgaaccaccagtccaagaatctgtttaaaattcagacatttaatggtgaccmataaaaacatatttgtgatgtttaatgttcttatcattctttttaaataatcaggctcggtgaagcagatgttttgacactgaccgtgtgaacttttccagaacctattgtatggatcttatccacttgctcttggctactaaatagctgcacaaagggtagtgatctattttaagctgtagtgatctggatggaagtgttctagatggttaataaaaggaaacttttttaacgtgaaaaaaaaaaaaaaaaaaa

SEQ ID NO: 1373 - DNA, 713 bp, Canis familiaris
gttttaagtactctgatctcagaatgatgaagtgcatttagraattcaagctaatcactgaggatgtgcagggcaaaactgcctgactaatttttcatggcatggatcttacccgtgaccaaaatgtgctccatggtcaaaaaatggcagaccatgattgaagctcatgttgatgtaaagactaccgatggttatttgcttcgtctattttggtgttggttttactwawaaacgcaataatcagattcggaagacctcttacgctcagcaccaacaggtccgcccaaattcggaaaaagatgatggaaatcatgacccgagaggtgcaaacaaatgacttgaaaggaagtggycaataaactgattcccagaccagccatcgcgatacaagatgatagaataaagcttgtccacgtctatttatccactcccatgcatgttttttgttagataagagtatataatgtactgaatgaagcccccagcttgtgaaattggggaaaactcattggaggctttcaatgggtgaaagggtagtagatttcttgggaaaagactatcgggggaatgagaaccgggtggcttaaaaggttggaacggagctgatggatatgaaccaccagtccaagaatctgtttaaaattcagacatttaatggtgaccaataaaaacatatttgtgatgtttaaaaaaaaaaaaaaaaaaaaaaaaaa

SEQ ID NO: 1374 - DNA, 642 bp, Canis familiaris
  misc_feature (20)..(20): n comprises a, c, g, or t, or includes no nucleotide
  misc_feature (126)..(126): n comprises a, c, g, or t, or includes no nucleotide
  misc_feature (339)..(339): n comprises a, c, g, or t, or includes no nucleotide
  misc_feature (341)..(341): n comprises a, c, g, or t, or includes no nucleotide
  misc_feature (358)..(358): n comprises a, c, g, or t, or includes no nucleotide
  misc_feature (368)..(368): n comprises a, c, g, or t, or includes no nucleotide
  misc_feature (525)..(525): n comprises a, c, g, or t, or includes no nucleotide
ctgagtgagaatgggccttnctgaacttctctgggtcccagtttctttcttcataaagtagaaataaggatggtttgtaccttagcgttctggggtagaaatggacataaatgatgcatggtggtnagggtggtgatggtggtgatgatggtgataaaggtgatggtgatgatggtggtggtggtgatggtggtgatggtgatgatgttgataatggtgatggtgatgatggagatggtgatggtggtagtggtgatggtagtsatggtagttatggcagagagagatctgggatggcagcccctggggatgtcacagttgggtggtggtggtggtggntnaggtcccatgagctccnagaccctagntgccccccagatacagcccctaccactcactcatcctgacccttccttcccatccccagaaactacgttttccagaggcggtttgtgcagttcaatgggaggagtctgatgtactttggcagtgataaggtgagggtctgagagatgctgtgttggncctggcaaaagagagggaaagggagggctcagaaaggctcaggatggtagaggggaagcccgtggtagggggttaccacatggctgatgtgagcatcaaaagtagctaggttagcag

SEQ ID NO: 1375 - DNA, 506 bp, Canis familiaris
gcacgaggcgtgatggcttcaaggttacttcgcggagttggagcgctggccgcgcaggccctcagggctcgcggtcccaatggagtcgccgcrgwgcgctcaatggcgtctggaggtggtgttcctactgatgacgagcaggcgacagggctggagagggaggtcatgatggccgcacggaagggactggacccatacaatattctagccccaaaggcagctgcaggcaccaaagaagaccctaatttagtcccatctatcaccaacaagcgaatagtgggctgcatctgtgaagaggacaatagtaccgtcatctggttttggctgcacaaaggcgaggcccagcgatgccctagctgtggaacccattacaagctggtgccccaccagttggcccactgagcctttgcactaatttactcaaaatgtgctgtgaagtttcttctttccaataaagactagccattgcattggctccttctcccgtaaaaaaaaaaaaaaaaaac

SEQ ID NO: 1376 - DNA, 699 bp, Canis familiaris
ccgggctgcaggaattcggmagcrargttacaacacaccccacttgctaaagacaaaatgatgaatggaagtcattacagctactytgagaaccgtgtggagaaggackgcctgatcctcacgagccgtgggcctggaaccagctttgagtttgcgcttgcaattgtcgaggcgctgakcggcaaggatgtggctgaccmagtgaaggccccgcttgttcttaaagattaaagcagaaatcttcgatgatgaagtagagaaatgtgccgtttgtcatccttctcattgtgttcactttaagcraaatgggcagttcccgcgcagtctggctgcgaagtggcagcctcaccgagcttccccacctgcgcccaggtcctcatggtcctgagccttgatggcagagtaaatggcatttagcmaactactggttgttactccatttatctctcaattcctcctttttgtgtgtgaaaccmaattcactgtcagcgtcacttgcagctgttaagtgttgatacagcgactgagataaaagagcagtgaacatgtttgacatggccaaggaggaaaagcataaaagcmaagatttaagaagcttgtgattttcccccccatttgttaattgtatattgttaatgtgctattaaaaatacccgtgaagttgttaaaaaaaaaaaaaaaaaaaaaaaaaaaaaaaaa

SEQ ID NO: 1377 - DNA, 634 bp, Canis familiaris
caactccactggtgaagaggttgccatgcgcaagctggtgcgctccgtgaccgtggtcgaggacgatgaggatgaggatggagatgacctgctccatcaccaccatggctcccactgcagcagctcgggggaccccgccgagtacaacctgcgctcgcgtcwccgtgcctgtgcgggacttggcggscagcctgcagacaaggcttccgccagcagctcgggagcccagtgtgggcggatccatctcctctggctcttccgcctccagtgtcacagtcagcccgcagctaccgcagtgtggggggcagtgggggtggcagcttcggggacagcctggtcacccgctcctacctcctgggcagctccagcccccgaacccagagcccccagaactgcagcatcatgtgatctgggacctgccaggccgggtgagggtggaggctgcctgcctcctttctgcctcacgcccaccctgcccacaccggcccagcacctcatgggaggggcttgaagccaaagaaaatacccctttggtttttttcttccatgttttgttttttttctaagagaagttattttctacagtggttttatactgaaggaaaaacacaagcaaaaaaaaaaaaaaaaaaaa

SEQ ID NO: 1378 - DNA, 800 bp, Canis familiaris
ccgggctgcaggaattcggcacgagcccgggtgtgggaggcgacgttcgtcatggcgatgtttgagcagatgagagcgaacgtgggcaagttgctcaagggtatcgacaggtacaatcctgagaatctggccaccctggagcsgtatgtggaaacacaggccaaggagaatgcstacgatctggaagccaacctkgctgtcctgaagctgtaccrgttcamcccagccktckktcaaactacggtcwccgcccagatcctgctaaaggccctcaccmatctgccccacwccgrcttcacmctgtgcaagkgcatgatcgatcaggcacatcmagaagaacggccmatccggcagattttatacctcggagacctgctggagacctgccacttccaggccttctggcaagccctggatgaaaacmtggacctcctggaaggtataactggcttcgaagactctgtccgaaratttatctgccmcgttgtgggcatcacttatcagcmcmttgatcgctggctgctggctgagatgctcggggatctaacagacagccagctaaaagtgtggatgagcmagtacggctggagcgcagatgagtcmggccagatcttcatctgtagccmagaggagagcatcaagcccmagaacmtcgtggagaagatcgactttgmcmgtgtgtccagcattatggcctcctcccagtaacctggcmggtgtttaataaagatttgttgatttawwaaaaaaaaaaaaaaaaaaaaaaaaaaaaaaaaaaaaaaaaaaaaaaaaaaaaaaaa

SEQ ID NO: 1379 - DNA, 553 bp, Canis familiaris
  misc_feature (204)..(204): n comprises a, c, g, or t, or includes no nucleotide
aggttgccaatggattccggatcccacgggccaacacattctcacaagtgagaataccgcgccccacattctccgcgccagaatatgtgtgataacacctctcgcgagaaaacctcggctggagaaggagcctcggccacctctgtccacaggccctcttctctggcacaaggcccttggagtagagaaacacttggacctctntctggaaaggtaaatactctggctttccggaagagacttctcttgtcccggaaaatttaatcttgcccacctttttgtgggccatccaccttatccagccccattgatcgctggctgctggctgagatgctcggggatctaacagacagccagctaaaagtgtggatgagcaagtacggctggagcgcagatgagtcaggccagatcttcatctgtagccaagaggagagcatcaagcccaagaacatcgtggagaagatcgactttgacagtgtgtccagcattatggcctcctcccagtaacctggcaggtgtttaataaagatttgttgatttaaaaaaaaaaaaa

SEQ ID NO: 1380 - DNA, 1800 bp, Canis familiaris
tgcgccgcctagaaaaacttgtgcggggccatttttggggcagtaagatcgagcgaggagcccaagagcgagcgcgcagcccgagagctcgagccgcctccgccgcgagacgcccccggccgccgccgcctgcgccgcgcgatccgcaccggcctcccgagagcgagccccggagccgcgaccgccagccgcgctaaccgcccaccaaccgccaccgagcgcccgagcgagagcagacgaggcggcatgagcgaggcgggcgaggccaccggcaccaccagcagcagcagcagcagcctcccgcaggctccggcggaggcggcccccgcggcgccccaggaccccgcgcccaagagcccggggggcagcggcgcgccccaggccgcggccccgccgcccgccgcgctcgccgcgggaaaccccggtggggacgcggcccccgcagccacgggcaccgcggcccccgcctcttcggcccccgccggcggtgaggacgcggagaagaaagttctcgccaccaaagtccttggcactgtcaaatggttcaacgtcagaaatggatatggatttataaatcgaaatgacaccaaagaagatgtatttgtacatcasactgccatcaagaagaataacccacggaaatacctgcgcagtgtaggagatggagaaactgtasaatttgatgtggttgaaggagagaagggtgcagaagcagccaatgtgactggaccagacggagttcctgtagaagggagccgttaygctgctgatcggcgtcgatacagacgtggttactatggcagacgccgtggacctccccgtaatkmcgstgrgattggagagatgaaggagggagtcccagaggggacacagctgcagggaccggttcatcgaaatccaacttaccgcccaaggtaccggagaggccctcctcgcccccgacctgccccagctgttggtgaggctgaagataaagagaaccaacaagcagccaatggtccaaaccagccatctgctcgccgtggataccggcgcccatacaactatcggcgtcgcccccgcccccctaatgctccttcacaagatggcaaagagaccaaggcacctgaagttccatctgagaaccccgctccagccaccgagcagagcagtgctgagtaacaccaggctccccaggcacctttaccatcaccaggtgacctagagaattaatgaccattagagaagataaagcataaagcagaccatgaccttaccaacaccaaagagacatccaagcaataatgtggaagactaataaccaagatgtggacattagaatgtttactattattctttatgatacagacaactacaaaacaaaaatgtcagccaatatttctagcaagctgagatcccgggaatgcctgcacaaaagacaagagagcaacctccccagtttcagcaaccactaggtttatatttttttcctggtttttactgttttggtaatatgaattgaaaaaaaaaatattaataccacatggggagaaccccaaccaaagaaacctgaaatatatagtaaatgcttttttttccttttttgttcattttggtagctggtgctaaacttccaagtgtcgtgatttaaaaagaaattttatgcccttcttatttatttctaggatgaggggaggataacatttttgctttcttatgtgactctttaaaaatgtgcagtatgaagttcctcaaaaataaaatttttacccttgaaaaaaaaaaaaaaaaaaaaaaaaaaaaaaaaaaaaaaaaaaaaaa

SEQ ID NO: 1381 - DNA, 654 bp, Canis familiaris
gacaccggcgccggatccagcctgcgggactttagcctaggccgcgggaccggataaacaagtttccacacargggaaacagctatgaccattaggcctattttaggtgacactatagaacaagtttgtacaaaaaagcaggctggtaccggtccggaattcccgssawmmwkggccgcgtgcgcaccaaaaccgtgaagaaggcggcccgagtcatcatcgagaagtactacacgcgcctggggaacgacttccacaccaataagcgcgtgtgcgaggagattgccatcatccccagcaagaagctccgcaacaagatcgcaggctatgtgacacatctgatgaagcggattcagcggggcccggtgagaggcatctccatcaagttkcaaraggaggagagagaaakkagggataattacgtgcccsaggtttcagccctsratcakgagatcatcgaggtagatcctgacactaaggagatgttgaaactcttggactttggaagcctgtccaacctgcaggtcactcagcctacagttgggatgaattttaaaacaccacggggagctgtttgaatctttctgctgtgctgtaatatcttcaataaaccttggacaacaaaaaaaaaaaaaaaaaaaaaaaaaaaaaaaa

SEQ ID NO: 1382 - DNA, 645 bp, Canis familiaris
ccatagaagaccycgggwcgcgatccaagcctcccggacttctagcctargccgcgggacggataacaatttcacacaggaaaacagctatgaccattaggcctatttaggtgacactatagaacaagtttgtacaaaaaagcaggctggtaccggtccggaattcccgggatcgccaacatgggccgsgtgcgcaccmaaaccgtgaagaaggcggcccgagtcatcatcgagaagtactacacgcgcctggggaacgacttccacaccawtaagcgcgtgtgcgaggagattgccatcatccccagcaagaagctccgcaacaagatcgcaggctatgtgacacatctgatgaagcggattcagcggggcccggtgagaggcatctccatcaagttgcaagaggaggagagagaaaggagggataattacgtgcccgaggtttcagccctggatcaggagatmwtcgaggtagatcctgacactarggagatgttgaaactcttggactttggaagcctgtccamcctgcaggtcactcagcctacagttgggatgaattttaaaacaccacggggagctgtttgaatctttctgctgtgctgtaatatcttcaataaaccttggacacacaaaaaaaaaaaa

SEQ ID NO: 1383 - DNA, 585 bp, Canis familiaris
ccgggctgcaggaattcggcacgagatgagcttccgagacgcacaggtttaattttctagcgcatccactcaaccgaccgggcccgtgctggaggaggagggagagcccgagtcgtccccttccctccctggctctgctcaccttccctggcccgsrcsmsccgccacactccgggggctcgggtcagccggctgcwctgascgcacacttcacgcgctcaggcgatgagggaccgagctctgacggtaaaggtagagtttcggaaaagagrrrsgaggggggcgcaacggccaggtgggtcctgccctggtacatcagctcacaaggagatgaatgcgctgaacgtgggtgtgtattacgggtgtgttgcaaaggacttaaaatggcatttgcccgtcctgttttgttcttcaagaacttcatctggcaccaacgactattgcgaacatcagacccgccgacgttttaagattcttggtcctctctaggactagaagcaaatgcaatggcgacgttcaaaaacagcaaacaagcaaaatgtaatagtacctcgttccttgccactaactcacaatttcttatat

SEQ ID NO: 1384 - DNA, 478 bp, Canis familiaris
gywcgargatgtcgaagcgaggacgtggtgggtcctccggtgcaaaattccggatttccctgggccttccggtaggagccgtcatcaattgtgctgacaacacaggagccaaaaatctgkatattatctctgtgaaggggattaagggacgattgaacagacttcctgctgctggtgtgggggacatggtgatggccacagtgaagaaaggcaaaccagagctcaggaagaaggtacatccagcagtggtgattcgacaacgaaaatcataccggagaaaagatggtgtgtttctctattttgaggataatgcgggggtcatagtaaataataaaggtgaaatgaaaggttctgctattacaggaccagtcgcaaaggagtgtgcagacttgtggcccaggattgcttccaatgctggcagcattgcatgattctttggtgtatttgttttaaaaaaaaataaaaattatttgttctc

SEQ ID NO: 1385 - DNA, 937 bp, Canis familiaris
  misc_feature (368)..(368): n comprises a, c, g, or t, or includes no nucleotide
  misc_feature (485)..(485): n comprises a, c, g, or t, or includes no nucleotide
ttagtgaaccggtcagatcgcctggagaacgccaatcgcaacgcctgttttgaccctccatagaaggacaccggggcccgatccaagcctccggactttagcctagcgcgcgggacggataacaatttcacacaggaaacagctatgaccattaggcctatttaggtgacactatagaacaagtttgtacataaaaagcaggctggtaccggwmsrgaattsccgksatcgaagctgctaactaccaaracactawtggccgcyygcaggatgagattcakaacatgaaggarrrwatggctcgtcacmttcgggagtaccaggacytsckgaatgktaarawkgctctygacattgagatkgccacntacarkaagctgytggaakgcgaggrrakcaggattgctctgcctsttccvamvtttkcttscctgaacctgagggaaacchacctggattcactccctctggttgacactcactcnaaragdmcgcttctgattaagacggttgwamytagggatggacaggttatcaacgaaacttctcagcatcatgatgaccttgagtgaagcttgcccagattcggtgcagcmattactaccagcmagaataawwrwraawagraattcgtatcttaaagaaacagctttcaagtgcctttctgcagtttttcaggagcgcaagatagatttggaattmggastaacctctagttctymagaacchacactcttaaaagatttaggagaaagtttacaacataatctagtttacgaagaaaacttgtgctaraatactttttaaaaagtatttttgaataccattaaaactgcttttttcmamcaarwawmwrammmamttgtttctgcttcaataaatctttggraaactmhaaaaaaaaaaaaaaaawaraaaaaaaaaaaaaaaaaaaaaa

SEQ ID NO: 1386 - DNA, 1030 bp, Canis familiaris
ggcccaaatcaggaccagcatgtccaaatcgatatgrakgtttccaarcckgactcacggctgccctgcgtgatgtacgccagcwatatgaaagcgtgkctgccaagaacyttcaggaggccgaggaatggtacaagtcmaagtttgccgacctctctgagkctgctaaccgrracaatgatgycctgcgccakgcgaagcaggagtcaaatgagtaccggagacaggtgcagtccctcacctgcgaagtggatgcactcwaagggactaatgagtctctggaacgccagatgcgtgaaatggaagagaacttybccgtcgaagctgctaactaccwagacactattkgccgcctgcaggatgagattcagaacatgaaggaagaaatggctcgtcaccttcgggagtaccaggacctgctgaatgttaagatggctctsgacattgagattgycacctacaggaakctgctgkaaggcgaggagagcaggattgctctgcctcttccmhacttytcttccctgracctgagggaaaccammctggattcactccctctggttgayactcactcaaaaagwacgcttctgattaagacggttgaaactagggatggacaggttatcaacgaaacttctcagcatcatgatgaccttgagtgaagcttgcccagattcggtgcagcaattactaccagcharaawaaaaaaaaaaaaraaawdsgtatcttaaagaaacagctttcaagtgcctttctgcagtttttcaggagcgcmagatagatttggaattaggagtaacctctagttcttaagaaccaacactcttaaaagatttaggagaaagtttacaacataatctagtttacgaagaaaacttgtgctagaatactttttaaaaagtatttttgaataccattaaaactgcttttttccaacaagtatctgaccmacttgtttctgcttcwataaatctttggraaactmhwaaaaaaaaaaaaaaaaaaaaaaaaaaaaaaaaaaaaaaaaag

SEQ ID NO: 1387 - DNA, 680 bp, Canis familiaris
cgaagcgtgcttaacttacsmaagacactatbggccgcsctgcaggatgagattcagaacatgaaggmagaaatggctcgtcaccwtcgggagtaccaggacctgstgaatgttaagatggctctcgacattgagattgccacctacaggaagctgctggaaggcgaggagagcaggattkctctgcctcttccvaacttttcktscckgrmcctgagggaaaccmwcctggattcactccctctggttgacactcactcmawaagdacgcttctgattaagacggttgaaactagggatggacaggttatcaacgaaacttctcagcatcatgatgaccytgagtgaagcttgcccagattcggtgcagcmattactaccmgcaagaatawaaaaaaaaagaaattcgtatcttaaagaaacagctttcaagtgcctttctgcagtttttcaggagmgcaagatagatttggaattaggagtaacctctagttcttaagaacchacactcttaaaagatttaggagaaagtttacmacataatctagtttacgaagaaaacttgtgctagaatactttttaaaaagtatttttgaataccmttaaaactgcttttttccmammarwawmwraaaaaaaaaaaaaaaaaaaaaaaaaaaaaaaaaaaaaaaaaaaaaaaa

SEQ ID NO: 1388 - DNA, 1079 bp, Canis familiaris
aagccgacctcacggctgcctgcgtgatgtacgccagcaatatgaaagcgtggctgccaagaaccttcaggaggccgaggaatggtacaaggtccaaagtttgccgacctctctgaggctgctaaccggaacaatgatgcccctgcgccaaggcgaagcaggacgtcaagatgagtagccggagacaaggcagcagtccctccaccagccgaacgtaggatgcacgccacaacgggagcgtgaatgagtgattccggaagcggccggacagaggtcagatatgagataggaaggacgatatctgccgctcgtagacatggctgatcatagctcacacgaacgaacaactagttcgcgcccgccctagcaaggaatgagactatcaagcaccaatgagaggaagaataggtggtcttgatcaccctttcggggaagtacccagggacctcgtgtcgtgaartgtatagagatkgkctctcgcacattgagattsccacctacagkaagctsctggaaggcgaggagascaggattgctctgcctcttccarackkktcktscctgaacctgagggraaccmacctggattcactccctctggttgacactcactcmwaaagracgcttctgattaagacggttgaaactagggatggacaggttatcaacgraacttctcagcatcatgatgaccytgagtgaagcttgcccmgattcggtgcagcmattactaccmgcmagaatwaaaawwaawagraattcgtatcttaaagaaacagctttcaagtgccyttctgcagtttttcaggagcgcaagatagatttggrattmggagtaacctctagttcttaagaaccmacactcttaaaagatttaggagaaagtttacaacataatctagtttacgaagaaaacttgtgctagaatactttttaaaaagtatttttgaataccmttaaaactgcttttttccmacaagtatctgaccvacttgtttctgcttcmataamtctttggraaactchwaaaaaaaaaaaaaaaaaaaaaaaaaaaaaaaaaaaaaaaaaaaaaaaaaaaa

SEQ ID NO: 1389 - DNA, 674 bp, Canis familiaris
acgatggagttccagacatgaagaargaaatgsctcgtcacmttcggggaktamcaggaccckgctgaatgttaagaatggctctcgacmttgagattgccmcctacaggaagctgctggaagkcgaggagagcaggattgctctgcctcttccmaacttttcttccctgaacctgagggaaaccaacctggattcactccctctggttgacactcactcmaaaagaacgcttctgattaagacggttgaaactagggatggacaggttatcracgaaacttctcagcatcatgatgaccttgagtgaagcttgcccagattcggtgcagcmattactaccmgcmagaataaaawarawaaagaaattcgtatcttaaagaaacmgctttcaagtgcctttctgcagtttttcaggagcgcmagatagatttggaattaggagtaacctctagttcttaagaaccmacactcttaaaagatttaggagaaagtttacmacataatctagtttacgaagaaaacttgtgctagaatactttttaaaaagtatttttgaataccattaaaactgcttttttccmacmagtatctgaccmacttgtttctgcttccaataaatctttggaaaactcmwaaaaaaaaaaaaaaaaaaaaaaaaaaaaaaacaaaaaaa

SEQ ID NO: 1390 - DNA, 910 bp, Canis familiaris
  misc_feature (173)..(173): n comprises a, c, g, or t, or includes no nucleotide
ggagtccgaggaatggtacaagtccaagtttgccgacgctcttctgaggctgtctaaccgggaacaatgatgcccctgcgcctaggcgaagtcaggagtcaaatgagtactcggagaccaggtgcagttcccttcaccctgtcgaatgtggatgcacttcaatggtgactaantgagtctctggaacgtccagatggcgtgaaatggtaagagaatctttgccttcgtaagctgtctaactacccaagacactattggccgcctgcaggatgagattcagaacatgaaggaagaaatggctcgtcaccttcgggagtaccaggacctgctgaatgttaagatggctctcgacattgagattgccacctacaggaagctgctggaaggcgaggagagcaggattgctctgcctcttccmaacttttcttccctgaacctgagggaaaccmacctggattcactccctctggttgacactcactcaaaaagaacgcttctgattaagacggttgaaactagggatggacaggttatcaacgaaacttctcagcatcatgatgaccttgagtgaagcttgcccagattcggtgcagcaattactaccagcaagaataawawawawaagaaattcgtatcttaaagaaacagctttcaagtgcctttctgcagtttttcaggagcgcaagatagatttggaattaggagtaacctctagttcttaagaaccaacactcttaaaagatttaggagaaagtttacaacataatctagtttacgaagaaaacttgtgctagaatactttttaaaaagtatttttgaataccattaaaactgcttttttccacaagtatctgaccmacttgtttctgcttcaataaatctttggaaaactcaaaaaaaaaagaaaaaa

SEQ ID NO: 1391 - DNA, 944 bp, Canis familiaris
tactccagcaatatgaagcgtgtctgccaagaaccttcaggagccgaggaatggtacaagtcccaaggttgccgactctctgaggcttgcttaaccgggaacatgaatgccctggcgccaggcgaagcaggagtcaaaatgagtaccggagacaggtcagtccctcaacctgcgaagtggatgcactcaaaagggactaatgagtctttggacgccagatgcggtgraatgraagagaactttgccgtcgaagctgctaacctaccaagacactattggccgcctgcaggatgagattcagaacatgaaggaagaaatggctcgtcaccttcgggagtacccaggacctgctgaatgttaagatggctctcgacattgagattgccacctacaggaagctgctggaaggcgaggagagcaggattgctctgcctcttccaaacttttcttccctgaacctgagggaaaccaacctggattcactccctctggttgacactcactcaraaagaacgcttctgattaagacggttgaaactagggatggacaggttatcaacgaaacttctcagcatcatgatgaccttgagtgaagcttgcccagattcggtgcagcmattactaccagcaagaatawawaaaaagaaattcgtatcttaaagaaacagctttcaagtgcctttctgcagtttttcaggagcgcaagatagatttggaattaggagtaacctctagttcttaagaaccaacactcttaaaagatttaggagaaagtttacaacataatctagtttacgaagaaaacttgtgctagaatactttttaaaaagtatttttgaataccattaaaactgcttttttccaacaagtatctgaccaacttgtttctgcttcaataaatctttggaaaactcwaawaawwaawaaaaaaaaaaaaaaaaaaa

SEQ ID NO: 1392 - DNA, 889 bp, Canis familiaris
agagacgcaggcagtgcagatacaagagggactcagcacggacaaggcagcagtccctccactccacctgagatagaggacagcactcaggagggtacttgatgacgtctggtggcaccaccagatgcgtgatatggaagagaatcttccccgtcgaagctgctacactacccaacacactattggcccgccctcgcagggatgagattctcgagacacagtgagaggagagaaagtggtctgctgcttcaccttgcgggatgtaccaggacctgcgtgaatgttaagatggctctcgacattgagattgccacctaccaggaagctgctggaaggcgaggagagcaggattgctctgcctcttccmaacttttcttccctgaacctgagggaaaccmcacctggattcactccctctggttgacactcactcawaaagaacgcttctgattaagacggttgaaactagggatggacaggttatcaacgraacttctcagcatcatgatgaccttgagtgaagcttgcccagattcggtgcagcmattactaccagcacagaataaaaaaaaaagaaattcgtatcttaaagaaacagctttcaagtgcctttctgcagtttttcaggagcgcaagatagatttggaattaggagtaacctctagttcttaagaaccacactcttaaaagatttaggagaaagtttacaacataatctagtttacgaagaaaacttgtgctagaatactttttaaaaagtatttttgaataccattaaaactgcttttttccaacaagtatctgaccacttgtttctgcttcaataaatctttggaaactccaaaaaaaaaaaaaaaaaaaaaaaaaaaaaaaaaaaaaaaaaaaaaaa

SEQ ID NO: 1393 - DNA, 649 bp, Canis familiaris
gcgatatgaagcggggctgccaagaaccttcaggaggccgaggaatggtacaagtccaagtttccgacctctctgaggctgctaaccggaacaatgatgccctgcgccaggcgaagcaggagtcaaatgagtaccggagacaggtgcagtccctcacctgcgaagtggatgcactcaaagggactaatgagtctcgtggaacgccagatgcgtgaaatggaagagaactttgccgtcgaagctgctaactaccaagacactattggccgcctgcaggatgagattcagaacatgaaggaagaaatggctcgtcaccttcgggagtaccaggacctgctgaatgttaagatggctctcgacattgagattgccacctacaggaagctgctggaaggcgaggagagcaggattgctctgcctcttccaaacttttcttccctgaacctgagggaaaccaacctggattcactccctctggttgacactcactcaaaaagaacgcttctgattaagacggttgaaactagggatggacaggttatcaacgaaacttctcagcatcatgatgaccttgagtgaagcttgcccagattcggtgcagcaattactaccagcaagaaaaaaaaaaaaaaaaaaccctgcagcccgg

SEQ ID NO: 1394 - DNA, 451 bp, Canis familiaris
ccgggctgcaggaattcggcacgaggcaaagatggtgaatgttcctaaaacccgccggactttctgcaagaagtgtggtaagcaccaaccccacaaagtgacacagtacaagaaaggcaaagattctctttacgctcagggaaagcggcgttatgaccggaagcagagtggctatggtgggcagactaagccgatcttccggaaaaaggctaaaactacaaagaagattgtgctgaggcttgaatgtgttgagcccaactgcagatcgaagagaatgctggctattaagagatgcaagcattttgaactgggaggagataasaasagaaagggccaagtgatccagttctaaacttcatattttgttatgaagacaataaaatcttgatgttacgttcmcttccaaaaaaaaaaaaaaaaaaaaaaaaaaaaaaacctcgwgsgggggccc

SEQ ID NO: 1395 - DNA, 736 bp, Canis familiaris
cccggacggataacaattcacaccaggaaacagctatggaccattaggccatttaggtgacactatagagcaagtttgttacaaaaaagcaggctggtaccggtccggaattcccgggatwggcagacattcagaccgagcgtgcctaccraaagcagccmaccatctttcmaaataagaagagggtcctacttggagaaactggcaaggagaagctcccgcggtactacmaaaacatcggtctgggcttcaagacgcccmaggaggccmttgagggcacctatattgacmagaaatgccccyttactggcmawgtctccatccgagggcggattttgtctggtgtggtgaccmaaatgaagatgcagaggactattgtcatccgccgagactacctccmctacatccgraagtacmaccgctttgaraaacgccmcmagracatgtcggtgcacttgtctccttgcttcagggatgtccakatcggcgacattgtcacagtgggtgagtgccgccctttgagcmagactgtgcgtttcaacgtgctcaaagtcacmaaagctgctggcacgaagaagcagttccagaagttttgaggcaagacttctgtytacacccctgaagaaaataaaactgtytacacccctgaagaaaataaaactgtytacacscctgrmaaaaaaaaaaaaaaaaaaaaaaaaaaaaaaaraaaaaaaaaaaaaaaaaaaaaaaaaaa

SEQ ID NO: 1396 - DNA, 738 bp, Canis familiaris
gagaccagtgtcaacacagggaaacagctatgaccattaggcctatttaggggacactatagaccaagtttgtacaaaaaagcaggctggtaccggtccggaattccsgggatcgggaagatggcagacattsrgaccgagcgtgcctaccmraagcagccwaccatctttcrarataagaagagggtcctacttggagaaactggcaaggagaagctcccgcggtactachrwacatcggtctgggcttcaagacgcccaaggaggccmttgagggcacctatattgacmagaaatgcccctttactggcaawgtctccatccgagggcggattttgtctggtgtggtgaccmaaatgaagatgcagaggactattgtcatccgccgagactacctccactacatccgraagtacaaccgctttgagawacgccacaagwacatgtcggtgcacttgtctccttgcttcagggatgtccagatcggcgacattgtcacagtgggtgagtgccgccctttgagcaagactgtgcgtttcaacgtgctcaaagtcacmaaagctgctggcacgaagaagcagttccagaagttttgaggcaagacttctgtytacacccctgaagaaaataaaactgtytacacccctgaagaaaataaaactgtctacacvccctgaaaaaaaaaaaaaaaaaaaaaaaaaaraaaaaaaaaaaaaaaaaaaaaaaaaaaaaaaaaaa

SEQ ID NO: 1397 - DNA, 683 bp, Canis familiaris
gataacaatttcacacaggaaacagctatgaccattaggcctatttaggtgacactatagaacaagtttgtacaaaaagcaggctggtaccggtccggaattcccgggatccgagcgtgcctaccaaaagcagccaaccatctttcaaaataagaagagggtcctacttggagaaactggcaaggagaagctcccgcggtactacaaaaacatcggtctgggcttcaagacgcccaaggaggccattgagggcacctatattgacaagaaatgcccctttactggcaatgtctccatccgagggcggattttgtctggtgtgrygaccmaaatgaagatgcagaggactattgtcatccgccgagactacctccactacatccgaaagtacaaccgctttgagaaacgccacaagaacatgtcggtgcacttgtctccttgcttcagggatgtccagatcggcgacattgtcacagtgggtgagtgccgccctttgagcaagamtgtgcgtttcaacgtgctcaaagtcacaaaagctgctggcacgaagaagcagttccagaagttttgaggcaagacttctgtctacacccctgaagaaaataaaactgtctacacccctgaagaaaakaammctgtctacacccctraaaaaaaaaaaaaaaactcgagggggggcccgg

SEQ ID NO: 1398 - DNA, 443 bp, Canis familiaris
gcacgagcaagcaaaagaacacactcgcctagagatagcccttgtgatatttaaatgtgtgggttaattttwtatccactttaataactggattattcccctctgcccctcctttgctttctatttctrcttcgaagccgtgggcacagaaatctctgcaggcaacttactccagagcgtgttgcaggacaatcctataacgaacagttacattcgccgcatctggattcctgatcctgtctcaccatggcaggtgtgagtggctgtataaaatattccatgtttatcttcaacttcttgttctggctctgtggcatcttgatcctggcggtagcgatttgggtacgattaagcaaagatgggcaagagattcttagccctggtgattctggtactagcccctatattgctgtgaatatcttgattgctgtgggttctatcat

SEQ ID NO: 1399 - DNA, 658 bp, Canis familiaris
gcacgagggccatggcgttctgcgggccgggcgcctacctgacccaccagcagaaggtgttgcggctttacaagcgggcgctgcgccacctggagtcgtactgcgtgcacagggacacaataccggtactttgcttgtttgatgagagcccggtttgaagaacataagaatgaaaaggacatggtgaaggccacccaactgctgaggggcggcagaggaagaattctggcacaatcagcatcctcagccttacatcttccctgagtctccaggaggcacctcctatgagaggtacgagtgttacaaggttcccgagtggtgcttagatgactggcatccctccgagaaggcgatgtatcctgattactttgccaagagagagcagtggaagaagctgcagagggaaagctgggagcgggaggtgaagcagctgcaggaagaaaccccgcatggtggtcccaccactgaagctttgcccccagcccgaaaggaaggtgatttgcctcccctgtggtggcacattgtgaccaggccccgggagcggcccatgtagaggaagaggaagacaccgcaccagccagcttgcaagtgaaataagttacagaacgtaacacacttgccctaataaaaataactcaacacggtgaaaaaaaaaaaa

SEQ ID NO: 1400 - DNA, 347 bp, Canis familiaris
agcaggagagctcactgaggatgaggtggaacgtgtgatcactattatgcagaatccacgccagtataagatccctgactggtttttgaacagacaaaaggatgtaaaggatggaaagtacagccaggtcctggccaatggtctggacaacaaacttcgtgaagacctggagagactgaagaarattcgagcccacagggggctgcgccacttttggggacttcgtgtccgaggccagcacaccaagaccacagggcgccgtggtcgcaccgtgggtgtgtccaaraagaaataaacctgtaggccttgtcttgttaataaatcgtttatacacctaaaaaaaaaaa

SEQ ID NO: 1401 - DNA, 708 bp, Canis familiaris
acagctatgaccatagcctattaggtgacacctatagacaagttgtacaaaaagcaggctggtaccgtccggatttcccgkgmygtcscgagcccacaccckccgcccccgcgcccagctcccagctcccagctcccagcgctgcgctcccccgccgccgccgccgccggaccgcttcgtgcccgtcccgcgaacacatggcawaaatgtccagccctacggagactgagcggtgcatcgagtctctgattgctgttttccagaagtttgctggaaaggagggtaacaactgcacactctccaagacagagttcctaaccttcatgaatacagaactggctgccttcacaaagaaccagaaggaccctggtgtccttgaccgcatgatgaagaaactggacctcaactctgatgggcagctggatttccaagaatttcttaatcttattggtggcatggccatagcttgccatgactcctttacaaggtctccccatttccggaagtaaatcggaggggttcctgggcctggcctccagaccacctctttccttcaaaacagcttcccaatcatcacatccttctcacatcctacacagacctgagcccacagtgtccaccaccctgtgcaggccagtcctgctggtagtgaataaagcaatagcatttttttaaagcacmaaaaaaaaaaaaaaaaaaaaaaaaaaa

SEQ ID NO: 1402 - DNA, 600 bp, Canis familiaris
ccgggctgcaggaattcggcamrakgtcccagccctacgggagactgagcggtgcatcgagtctctgattgctgttttccagaagtttgctggaaaggagggtaacaactgcacactctccaagacagagttcctaaccttcatgaatacagaactggctgccttcacaaagaaccagaaggaccctggtgtccttgaccgcatgatgaagaaactggacctcaactctgatgggcagctggatttccaagaatttcttaatcttattggtggcatggccatagcttgccatgactcctttacaaggtctccccatttccggaagtaaatcggaggggttcctgggcctggcctccagaccacctctttccttcaaaacagcttcccaatcatcacatccttctcacatcctacacagacctgagcccacagtgtccaccaccctgtgcaggccagtcctgctggtagtgaataaagcaatagcatttttttaaagcacacactagagtcagtacatttgtgccagggaggaagaaacgtgggaggaatggaatttgcatgatggaagcagtttccagagctgcacaataaatagtgaaa

SEQ ID NO: 1403 - DNA, 626 bp, Canis familiaris
ccaagctcccagctcccagctcccagctcccagctcccagctcccagytcscagmgctgcgctcccccgccgccgccgccggaccgcttcgtgccsgtcccgcgaacacatggcaaaaatgtccagccctacggagactgagcggtgcatcgagtctctgattgctgttttccagaagtttgctggaaaggagggtaacaactgcacactctccaagacagagttcctaaccttcatgaatacagaactggctgccttcacaaagaaccagaaggaccctggtgtccttgaccgcatgatgaagaaactggacctcaactctgatgggcagctggatttccaagaatttcttaatcttattggtggcatggccatagcttgccatgactcctttacaaggtctccccatttccggaagtaaatcggaggggttcctgggcctggcctccagaccacctctttccttcaaaacagcttcccaatcatcacatccttctcacatcctacacagacctgagcccacagtgtccaccaccctgtgcaggccagtcctgctggtagtgaataaagcaatagcatttttttaaagcacaaaaaaaaaaaaaaaaaaaaaaaaaaaaaaaaaa

SEQ ID NO: 1404 - DNA, 774 bp, Canis familiaris
tcatctaggatacttgccagcgagctktgctkraattkctgccgctactgraccactcytaktgctgccgcttcactcctggvamvttcwctraccrgatbcagscavcyytycgagasccmarkcttytkgtggktactratvbcaggkstgaccmccmgcctytcacrgaggcatcttacgktracstgcskaccvwkgctctktgtdacmcagactctcctytgcgytackkggacatkgscatccskkgcmacamcamrggwgctcactcagtgggtctratrtggtgkatkctagcccgggaagtcctgcgcatkcstgscaccmttbcccgtgagcacccatgggaagtcatgcckgatctctacttctacagagatcctraagagattgaaaaggaagaacaggctgctgctgaaaaggctgtaactaaggaggaatttcmgggtgaatggacggctccmgctcctgagttcactgstactcagcctgaagttscagactggtytgaaggcgtgcaggtgccctctgtgcctattcagcagttccctactgaagactggagcgctcmgycagccmctgaagattggtctgcagctcccmctgctcaggccmctgaatgggtaggwacmaccmctgagtggtcttaagctgctcttccmcagaaggaacagaatggaaatamggttgacggmmaatahacmgtttctaaaarwmwdrwmmmraaaaaaaaaadrrmaaaaaaaaaaaaaaaaaaaaraaaaaaaaaaa

SEQ ID NO: 1405 - DNA, 757 bp, Canis familiaris
gcacgaggctgtgctgaaatttgctgccgctactggagccactcctattgctggccgcttcactcctggaaccttcactaaccagatccaggcagccttccgagagccwwggcttctggtggttactgatcccmrggctgaccaccagcctctcacagaggcatcttacgttaacctgcctaccattgctctgtgtaacacagactctcctctgcgctacgtggacattgccatcccttgcaacaacaagggagctcactcagtgggtctgatgtggtgratgctagcccgggaagtcctgcgcatgcgtggcaccatttcccgtgagcacccatgggaagtcatgcctgatctctacttctacagagatcctgaagagattgaaaaggaagaacaggctgctgctgaaaaggctgtaactaaggaggaatttcagggtgaatggacggctccagctcctgagttcactgstactcagcctgaagttgcagactggtctgaaggcgtgcaggtgccctctgtgcctattcagcmgttccctactgaagactggagcgctcagccagccactgaagattggtctgcagctcccactgctcaggccactgaatgggtaggaacaaccactgagtggtcttaagctgctcttccacagaaggaacagaatggaaataaggttgacggaaaataaacagtttctaawaawaaraawwawaaaaaawaaawawataaagtaataaaaatgagaaagaaaaaa

SEQ ID NO: 1406 - DNA, 641 bp, Canis familiaris
aggggtgaccagcagcctttcacagaggcatctttaacgttaacctgcgtgaccattgctgcttgtgtgcacacagactctcctgtgcgctagcgtggacatttgccattcccttgcaacaacaaagggagtctcactcagtgggtctgatgtggtggatgctagcccgggragtcctgcgcatgcgtggcaccatttcccgtgagcacccatgggaagtcatgcctgatctctacttctacagagatcctgaagagattgaaaaggaagaacaggctgctgctgaaaaggctgtaactaaggaggratttcagggtgaatggacggctccagctcctgagttcactgctactcagcctgaagttgcagactggtwctgaaggcgtgcaggtgccctctgtgcctattcagcagttccctactgaagactggagcgctcagccagccactgaagattggtctgcagctcccactgctcaggccactgaatgrgtaggaacaaccacctgagtggtcktaagctgctcttccacagaaggracagaatggaaataaggttgacggraaataaacagtttctaaaaaaaaaaaaaaaaaaaaaaaaaaaaaaaaaaaaaaaaaaaaaaaaaaaaaaaaaaaaa

SEQ ID NO: 1407 - DNA, 611 bp, Canis familiaris
tctcacagaggcatcttacgttaacctgcctaccattgcctctgtggtaacacagactctcctttgcgcttacgtggacattggccatcccttgcaaccaacatagggaggctcactcagttggktctgattggtggatgctagcccgggaagtcctgcgcatgcgtggcaccatttcccgtgagcacccatgggaagtcatgcctgatctctacttctacagagatcctgaagagattgaaaaggaagaacaggctgctgctgaaaaggctgtaactaaggaggaatttcagggtgaatggacggctccagctcctgagttcactgctactcagcctgaagttgcagactggtctgaaggcgtgcaggtgccctctgtgcctattcagcagttccctactgaagaccttggagcgctcagccagccactgaagatttggtctgcagctcccactgctcaggccacctgaatgggtaggaacaaccacctgagtggtcttaagctgctcttccacagaaggaacagaatggaaataaggttgacggaaaataaacmgtttctaaaaaaaaaaaaaaaaaaaaaaaaaaaaaaaaaaaaaaaaaaaaaaaag

SEQ ID NO: 1408 - DNA, 678 bp, Canis familiaris
ggctggtaaccggtccggaatttcccgggatggacctttcactaaccagatcaggcagccttccgagagccaaggcttctggtggttactgatcccaggctgaccaccagcctctcacagaggcatcttacgttaacctgcctaccattgctctgtgtaacacagactctcctctgcgctacgtggacattgccatcccttgcaacaacaagggagctcactcagtgggtctgatgtggtggatgctagcccgggaagtcctgcgcatgcgtggcaccatttcccgtgagcacccatgggaagtcatgcctgatctctacttctacagagatcctgaagagattgaaaaggaagaacaggctgctgctgaaaaggctgtaactaaggaggaatttcagggtgaatggacggctccagctcctgagttcactgctactcagcctgaagttgcagactggtctgaaggcgtgcaggtgccctctgtgcctattcagcagttccctactgaagactggagcgctcagccagccactgaagattggtctgcagctcccactgctcaggccactgaatgggtaggaacaaccactgagtggtcttaagctgctcttccacagaaggaacagaatggaaataaggttgacggaaaataamymgtkyckaawtcctgcagcccgg

SEQ ID NO: 1409 - DNA, 591 bp, Canis familiaris
tcacagagtcatcttacgttaacctggccgtacctgtgtctcttgtgtacacagactctcctctgcgtctacgtggacattgccatcccttgcgacaacaagggagctcactcwgtgggtctgatgtggtggatgctagcccgggaagtcctgcgcatgcgtggcaccatttcccgtgagcacccatgggaagtcatgcctgatctctacttctacagagatcctgaagagattgaaaaggaagaacaggctgctgctgaaaaggctgtaactaaggaggaatttcagggtgaatggacggctccagctcctgagttcactgctactcagcctgaagttgcagactggtctgaaggcgtgcaggtgccctctgtgcctattcagcagttccctactgaagactggagcgctcagccagccmctgaagattggtctgcagctcccactgctcaggccmctgaatgtggtaggaacaaccactgagtggtcttaagctgctcttccacagaaggaacagaatggaaataaggttgacggaaaataaacmgtttctaaaagtmwwrtccaaataatattataatcaaataaaaa

SEQ ID NO: 1410 - DNA, 620 bp, Canis familiaris
gcattttacgttgaaccggccgtaccaattgctctgggtaacacaggactttcctctgcgctacgtggacatgtgccatcccttgcaactacaagggagctcaatcaatgggtctgaagtggtggatgctagcccgggaagtcctgcgcatgcgtggcaccatttcccgtgagcacccawgggaagtcatgcctgatctctacttctacagagatcctgaagagattgaaaaggaagaacaggctgctgctgaaaaggctgtaactaaggaggaatttcagggtgaatggacggctccagctcctgagttcactgctactcagcctgaagttgcagactggtctgaaggcgtgcaggtgccctctgtgcctattcagcagttccctactgaagactggagcgctcagccagccactgaagattggtctgcagctcccactgctcaggccactgaatgggtaggracaaccacctgagtggtyttaagctgctcttccacagaaggracagaatggaaattaaggttgacggraaataaacagtttytaaaaaaaaaaaaaaaaaaaaaaaaaaaaaaaaaaaaaaaaaaaaaaaaaaaaaaaaaaaaaaaaaaaaaaaaa

SEQ ID NO: 1411 - DNA, 521 bp, Canis familiaris
gcaggcttggttaccggtccggaattcccgggatgccgcctgcgsacgwgkgtcagccatcgatcgctgggcatcatggcttgccctctagacctctggtgaagcccaagatcgttaaaaagaggaccaagaagttcatccggcaccagtcwkaccgatatgtsrraattaagcgcaactggcggaaacccagaggcattgacaatagggtacgcagaagattcaagggccaaatcttgatgcccaacattggttacgggagcaacaagaaaacaaagcacatgctgcccagtggcttccggaagttcctagtccacaacgtcaaggagcttgaagtgctgctgatgtgcaacaaatcttactgtgcagagattgctcacaatgtatcctccaagaaccgcaaagccatcgtggaaagagcagcccagctggccatcagagtcaccaatcccaatgccaggctgcgtagcgaagaaaatgaataaacagcttatgtgcgcgtcatatttgtgttaataaaa

SEQ ID NO: 1412 - DNA, 617 bp, Canis familiaris
ggatccctcgcccagctgctggtagagcagaacttcccagccattgccatccaccgagggatgccccaggaggagaggctttctcggtatcagcagtttaaagattttcaacgacgaattcttgtggctaccaacctatttggccgaggcatggacattgagcgggtgaacattgccttcaactatgacatgcctgaggattctgacacttacctgcatcgggtggcccgagcaggccggtttggcaccaagggcttggccatcacatttgtakcagakgaaaatgatgccaagatcctcaatgatgtgcaggatcgctttgaagtcaatattagtgagctgccagatgagatagacatttcctcttacattgaacagacgcggtagaggacttacccacccattttggaatgtgacagtctgtccctcttcaggagacgacagtagacatggggtgaaggagacactactgccacctacccgtgacaacccccaccccccaccccatggcttcccccttttgcatcaccaccactcctgaatccctgtttcctgaattgtcggaatwtttttttttttttttaacacaaacttaaaaaacammaaaaaaaaaaaaa

SEQ ID NO: 1413 - DNA, 431 bp, Canis familiaris
  misc_feature (393)..(393): n comprises a, c, g, or t, or includes no nucleotide
ttcggcacgmrmgmgcggaggccgcacgatgcctggagttactgtaaaagacgtgaaccagcaggagttcgtcagagctctggcagccttcctcaaaaagtctgggaagctgaaagtccctgartgggtggacactgtcaagctggccaagcataaagagcttgctccctacgatgagaactggttctacacgcgagctgcttccacagcacggcacctgtacctccggggcggcgctggggtcggctccatgactaagatctacgggggacgtcagagaaacggggtcatgcccagccacttcagcagaggctccaagagcgtggcccgcagggtcctccaagccctagaggggctgaaaatggtggaaaaggaccaagatgggggccgcanactgacacctcagggacagcgggatctggacagaatcg

SEQ ID NO: 1414 - DNA, 461 bp, Canis familiaris
ggctcgagtggcaygrkgtcgagatgggcaagttcatgaaacccgggaaggtggtgctggtcctggccggacgctactccggacgcaaagcggtcatcgtgaagaacattgatgatggcacctcagascgkscctacagccatgctctggtggccggaatagaccgctatccccgaaaagtgacagctgccatgggcaagaagaaaatcgccaagaggtcaaagatcaagtcttttgtgaaagtttataactacaatcacctcatgcccacaaggtactctgtggatatccctttggacaaaactgtcgtcaacaaggatgtcttcagagaccctgctcttaaacgcaaggcccgacgagaggccaaggtcaagttcgaggagaagtacaagactggcaagaataagtggttcttccagaagctgcggttttagatttctttcagtcattaaaaataaatt

SEQ ID NO: 1415 - DNA, 731 bp, Canis familiaris
gcacgagccgggatttgaggagctctcgcgagacccgggcctcttcctaagccggcgcwctsasgcagsacgaggccatgttcagttcgagcgccaagatcgtgaagcccaacggcgagaagccggacgagttcgagtccggcatctcccaggctctcctggagctggagatgaactccgacctcaaagcccagctgagggagctgaacatcacggcggccaaggagattgaagttggcggcggccgcaaagccatcatcatcttcgttcccgtccctcaactgaagtctttccagaaaatccaagtgcggctcgtgcgggagttggagaagaagttcagcgggaagcacgtggtgttcattgctcagaggagaattctgcccaagccaactcgaaaaagccgtacaaaaaataagcaaaagcgcccgaggagccgcactttgacagcggtgcacgacgcgatcctggaggacttggttttcccaagtgaaattgtgggcaagagaatccgcgtgaaactggacggcagccggctcataaaggttcatttggacaaagcacagcagaacaacgtggagcacaaggttgaaaccttttctggggtctataagaagttgacgggcaaggatgttaactttgagttcccagagttccagttgtaaacaaaaaatgattaaataaaactttcacagtaaaaaaaaaaaaaaaaaaaaaaaaaaaaaaaaaaaaaa

SEQ ID NO: 1416 - DNA, 996 bp, Canis familiaris
gcacgagcaccaaatggcggatgacgccggtgctgcgggagggcccggaggccccgggggccccggaatgggaggccgcggcggcttccgcggaggcttcggcagcggcatccggggccgcggccgtggccgtggtcggggccggggccggggscrcgrrgctcgcggaggcaaggcggaggacaaggagtggatccccgtcaccaagctgggccgcctggtcaaggacatgaagatcaagtccctggaggagatctatckgttttctckgccsakcaaggratctgagatcwbtgacktkttcttgggggcgtyccycaaggatdrgktyttgaaaatcadkscsstgchmaagcagacccktgbtgbcmmacggamcargttcmagsmattcgttgccatcggagattacmacggacacgtggktctgggcgtcaagygctycmaggaggtwbcmmctgccatccgtgggsscatcatcctggccmagctktycmttgwcsmsgtgcgacgaggctactgggggdacmagatcggcmagccccacwctgtcccmhgcmagktgactgbtcgctgtggttctgtgctggtgcgtctcatccctgcccccagaggcactggcmttgtctcggcccctgtgcccmagaagctactgaygakggctggtattgacgactgctatacttcggccmggkgctgcmctgccmmmctggggaactttgccmrggctacttttgawgcgatytytwagacctwcagytwtctcacccctgatctctggraagagactgtgttcaccmagtctccctatcaggaattcactgaccatcttgtaaagacccacaccagagtctccgtgcmgaggacccaggctccmgctgtggccmccacatagttttatacmagaaaaatamaagtgaattaaagcttrwwaamaamhwaaaaaaamararaarraamaaaaaaaaaaaaaaraaaaaaaaaaaaaaaaaaaaa

SEQ ID NO: 1417 - DNA, 738 bp, Canis familiaris
actgagatcagttccgagagatcatcgttctccccatsmaggatcckgagatcatgacttttctggggcgtccctcaaggatgagktcttgaaatcatgcccgtgmaaagcagacccgtgctggccaacggaccaggttcwagscattcgttgccatcggagattacvwcgracamgtggktctgggcgtcaagtgctccaaggaggtagccactgccatccgtgggkccatcatcctggccmagctttycattgtccccgtgcgasgaggctactkggggwmcmagatcggcaagccccacactktcccatgcaaggtgactggtcsytgtggttctgtkctggtgcgtctcatccctgcccccagaggcactggcattgtctcggcccctgtgccchagaarctactgatgatggctggtattgacgactgctatacttcggccaggggctgcactgccaccctggggaactttgccaaggctacttttgatgcgatctctmagacctacagctatctcacccctgatctctggaaagagactgtgttcaccmagtctccctatcaggaattcactgaccatcttgtaaagacccacaccagagtctccgtgcagaggacccaggctccagctgtggccmccacatasttttatacmagaaaaataaaagtgaattaaagcttrwwaaawaaaaaaaaawaawaaaaaaaaaaaaaaaaaaaarraaaaaaaaagg

SEQ ID NO: 1418 - DNA, 744 bp, Canis familiaris
ggaggggatctatctgtttctctccctcaggaatctgagatctcgacttttcttggggccgtcccctcaaggatgaggtcttgmaatcatgcccgtgcmrwagcagacccgtgctggcccacggaccagkttcaaggcattcgttgccatcggagattacaacggacacgtgggtctgggcgtcmagtgctccmaggaggtagccactgccatccgtggggccatcatcctggccaagctttccattgtccccgtgcgacgaggctactgggggaacaagatcggcaagccccacmctgtcccawgcaaggtgactggtcgctgtggttctgtgctggtgcgtctcatccctgcccccagaggcactggcattgtctcggcccctgtgcccmagaagctactgatgatggctggtattgacgactgctatacttcggccaggggctgcactgccamccctggggaactttgccaaggctacttttgatgcgatctctaagacctacagctatctcacccctgatctctggaaagagactgtgttcaccmagtctccctatcaggaattcactgaccatcttgtaaagacccacaccagagtctccgtgcagaggacccaggctccagctgtggccaccacatagttttatacmagaaaaataaaagtgaattaaagcttrwwwaaaaaaaaaaaaaaaaaaaaaaaaaaaaaaaaaaaaaaaaaaaaaaaaaaaaaaaaaaaaa

SEQ ID NO: 1419 - DNA, 674 bp, Canis familiaris
tctggggggcgtccctcaaggatgaggtcttgaaataatggcccgtgcaaaagcagagcccgtggctgggccaacggaaccagggtgcaaggcattcgtgccaatcggagattacracggacacgtggtctgggcgtcaagtgctccaaggaggtagccactgccatccgtggggccatcatcctggccaagctttccawktgtccccgtgcgacgaggctactgggggaacaagatcggcaagccccacactgtcccatgcaaggtgactggtcgctgtggttctgtgctggtgcgtctcatccctgcccccagaggcactggcattgtctcggcccctgtgcccaagaagctactgatgatggctggtattgacgactgctatacttcggccaggggctgcactgccaccctggggaactttgccaaggctacttttgatgcgatctctaagacctacagctatctcacccctgatctctggaaagagactgtgttcaccaagtctccctatcaggaattcactgaccatcttgtaaagacccacaccagagtctccgtgcagaggacccaggctccagctgtggccaccacatagttttatacaagaaaaataaaagtgaattaaagctwrwwaaaaaaaaaaaaaaaaaaaaaaaaaaaaaaaaaaaaaa

SEQ ID NO: 1420 - DNA, 655 bp, Canis familiaris
gcggcgcgaaaggatggcgacacccgtccctccggccctccccgcgacacgtgcgggctgctgcgggtcttctgctctgcgcctcgtcctcggcgcggccctgcgcgggcctcgcgccgccgcccggatgcagctgcctgtcgctgggagcctggactgtgccctgaagaggcgggcacggtgccccccaggcgcgcatgtctgtgggccctgccttcagcccttccaagaagacccacaagggctctgtgtgcacaggatgcgccggcctgtgggggagagcctgccaggscmcgaktagaagatgagattgacttcctgggcccaggagctggcccatcaggagccacagccccccatgctcgctgcccagccccagcctgacaagggacagcagcacctggagcctgcagccaccctggggctctcagagcgccgccagggccccaacctgggcacctcctctactgggggaacccctgcacccacaccccacacctccttgggcccccccgtgtcgtcagtaccggtgcacatttcccccttggagccccggggcgggcgcggtgacggactcgtcctcgtgctcatcgtggcgagctcggtagccggcgcggccgccgtcgccgtggccgctctgtgctggtgcaggctg

SEQ ID NO: 1421 - DNA, 655 bp, Canis familiaris
aaggagccagactcsacccacctggccktccgcctggtcccgtggccctcgcgtgggtgtggggaacgtgaagtktggggaagggcaacttctgccatgatwaccagacctgcttgtcgagatagccgagggaggctgggcctgctgtccctatcaccagggtgtctgttgtgcggakcagmgtcactgctgccccactggcttccactgtggggccaagggcaccaaatgtctacggagggagagcctgcgctgggacatgccactgagggacccagccccaagaccgctgctgtgaggcgagccgaaggactatagagtctgcagcccttgggaccctgctcggagggtccccactgctcaggcctccccagcacctctcccccaccaaattctcccaagtcccccatcctgagtcccacccccatcatggttgctggggcctcaacctaaggccttccctatctcaagggaggctgtggcgaaagccatgttacaagctgccatccctccctgtttccgtctaccctgtggccaggtgctcttccctatccacaggtgtatgtgtgtatgtgctgcagtaaagtttgtacactytmwwaaaaaaaaaaaaaaaaaaaaaaaaaaaaaaaaaaaaaaaaaaaaaaaaaaaaaa

SEQ ID NO: 1422 - DNA, 658 bp, Canis familiaris
tatttaggtgacactatagaacaagtttgtaccaaaaagcagggctgggtaccsgtccggaattcccgggatcggagtytgaagaagacgcgcagaaatggcacctcgtaaggggaaggaaaagaaggaagaacaggtcatcagccttggacctcaagttgctgaaggagaaaatgtgtttggtgtctgccacatwtttgcatccttcaatgacacttttgtccatgtcactgatctttctggcaaggaaaccatctgtcgcgtaactggtgggatgaaggtgaaggctgaccgagatgagtcttctccctacgctgccatgttggctgcccaggatgtggcccagaggtgcaaggagctgggcatcactgctctscacakcaaactccgagccacaggaggaaatagaaccaagacccctggacctggggcccagtcagccctcagagcccttgcccgctcaggaatgaagattgggcggattgaggatgtcacccccatcccctccgatagcacccgcaggaagggaggtcgccgtggtcgccgtctgtgaacaggattcttcaaactattttctgttaataaattgcctttgtgtaagctaaaaaaaaaaaaaaaaaaaaaaaaaaaaaaaaaaaaaaaaraaaaaaaaaaaaaa

SEQ ID NO: 1423 - DNA, 625 bp, Canis familiaris
  misc_feature (577)..(577): n comprises a, c, g, or t, or includes no nucleotide
  misc_feature (595)..(595): n comprises a, c, g, or t, or includes no nucleotide
  misc_feature (605)..(605): n comprises a, c, g, or t, or includes no nucleotide
  misc_feature (608)..(608): n comprises a, c, g, or t, or includes no nucleotide
gcacgagaagacgcgcagaaatggcacctcgtaaggggaaggaaaagaagkaagaacaggtcatcagccttggacctcaagttgctgaaggagaaaatgtgtttggtgtctgccacatatttgcatccttcaatgacacttttgtccatgtcactgatctttctggcaaggaaaccatctgtcgcgtaactggtgggatgaaggtgaaggctgaccgagatgagtcttctccctacgctgccatgttggctgcccaggatgtggcccagaggtgcaaggagctgggcatcactgctctccacatcaaactccgagccacaggaggaaatagaaccaagacccctggacctggggcccagtcagccctcagagcccttgcccgctcaggaatgaagattgggcggattgaggatgtcacccccatccccttcgatagcacccccaggaagggaggtcgccgtggtcgccgtcttgtgaacaagaatttttaaactattttttgttaataaatggcctttgggtagctaaaaaaaaaaaaaaaaaggcgggccgttttaaggatccaagcttacgtacnctcatgcgacgtcatagnttttttttgngtncctaaattaattaatgg

SEQ ID NO: 1424 - DNA, 724 bp, Canis familiaris
gagaatcgtgcaactgcctcckgcttaaagtgaaccagattgsctctgtgaccgaktctcttcagssgtgcmwrytgkcccmgtccmwtkggtggsgcktcatggtgtcgcatcgctccggggagaccgwagataccytcatcgctgacytgktgktgkkactctgcackrggcagatcaagacgggtgcaccatgcagatctgagcgcttggccaagtacaaccagatcctcagaattgaagaggaactgggtagcaaggccaagttcgccggcagaagcttcagaaacccccttgccaagtaaggtccaggtggcgcaccctgtggtcctgagtcagctcgttagacctctgctcccccgggcagctcaaggcccccagcccmaagtggcagggccctgtgctagttagctgccctctcccttccccgtgatgttctcaaagcttccttagaattgctacagaagccagagttgacmtctggaaccctgctgggaaccctagctctgtaaacatgtaattggtccmaatcattgctttctcacctcacttccaccmagcatctggagccaggtctgtctatgtaataatctcaaggtrtccmcaggcmagatccccmgtggttttatgtgcagaataaaaaggcctcagtgacccataraaawaaaaaaaaaaaaaaaaaaaaaaaaaraaaaaaaaaaaaaaaraaaaaaaaaaaaaaaaa

SEQ ID NO: 1425 - DNA, 704 bp, Canis familiaris
agtgaaccagattgggctctgtgacccgagtctcttcaggccgtgtcaagctggcccagtccaatgtgtttggggctttaatggtttcgcatcgctccggggagacccgaagataccttcatcgctgaccctggtggttggactctgcactgggcagatcaagacgggtgcacacagcagatctgagccgcttggcccagtaccacccgatccttccggaatttgagaagggaacttgggttaagccaagcccaagtttcgccggccagaagcttccagaaaccccccttggccaagttaaaggtcccaggtggcgcaaaccctgtggtccctgagtcagctcgttagacctctgctcscmcgrgcagstcaaggccccccagcccaaagtggcagggccctgtgctagttagctgccctctcccttccccgtgatgttctcaaagcttccttagaattgctacagaagccagagttgacatstggaaccctgctgggaaccctagctctgtaaacatgtaattggtccaaatcattgctttctcacctcacttccaccaagcatctggagccaggtctgtctatgtaataatctcaaggtgtccacaggcaagatccccagtggttttatgtgcagaataaaaaggcctcagtgacccataraaawaaaaaaaaaaaaaaaaaaaaaaaaaaaaaaaaarraa

SEQ ID NO: 1426 - DNA, 655 bp, Canis familiaris
gccccaagtgccaatgggctgggggcgttcattgggtcgcatcgctccgggggagaccggagataccttcatcgctgacctggtggtgggactcttgcactgggcagatcaagacgggtgcaccatgcagatmtgagcgcbttggccaagtacaaccagatcctcagaattgaagaggaactgggtagcaaggccaagttcgccggcagaagcttcagrwacccccttgccaagtaaggthcaggtggcgcaccctgkggtcctgagtcagctcgttagacctctgctcccccgggcagctcaaggcccccagcccaaagtggcagggccctgtgctagttagctgccctctcccttccccgtgawgttctcaaagcttccttagaattgctacagaagccagagttgacatctggaaccctgctgggraccctagctctgtaaacatgtaattggtccaaatcattgctttctcacctcacttccaccaagcatctggagccaggtctgtctatgtaataatytcaaggtgtccacaggcaagatccccagtggttttatgtgcagaataaaaaggcctcagtgacccataraaaaaaaaaaaaaaaaaaaaaaaaaaaaaaaaaaaaaaaaaaaaaaaaaaaaaaaaaaaaaa

SEQ ID NO: 1427 - DNA, 625 bp, Canis familiaris
cttggcccagtcccatgggttgggcttcaatgtttcgcatcgctccggggagaccgaagatacskttatcggctgacctgtgktgggactctgcactggkcagatcwagacgggtgcaccatgcagatctgagcgcttggccaagtatcaaccagatcctcagaattgaagaggaactgggtagcaaggccaagttcgccggcagaagcttcagtawacccccttgccaagtaaggtccaggtggcgcaccctgtggtcctgagtcagctcgttagacctctgctcccccgggcagctcaaggcccccagcccaawgtggcagggccctgtgctagttagctgccctctcccttccccgtgatgttctcaaagcttccttagaattgctacagaagccagagttgacatctggaaccctgctgggaaccctagctctgtaraacatgtaattggtccmaatcattgctttctcacctcacttccaccaagcatctggagccaggtctgtctatgtaataatctcaaggtgtccacaggcaagatccccmgtggttttatgtgcagmataaaaaggcctcagtgacccataaaawaaaaaaaaaaaawaaaaaaaamaamwaatat

SEQ ID NO: 1428 - DNA, 730 bp, Canis familiaris
  misc_feature (157)..(157): n comprises a, c, g, or t, or includes no nucleotide
  misc_feature (397)..(397): n comprises a, c, g, or t, or includes no nucleotide
aatccagggktgaaaagaaaaagaaggagaagttcttgctaccsbwacrrmvmcmbytkkkggkkacmagaatggkkgdaccsgagkkgkdwaacttckcmawtgcctagrkawtatcctactgaagatgtkcctcgcaagctgktgagccmtgkcnwdawmcytktcagtcagcwtgtgagaaakttgcgagctagcatcactcckgggaccmytktgatcatcctcactgggcgccmcagaggcaagagggtagttttccygaagcmactgagcmstggcttgctacttgtgactggacctctggccctcaaccgagttcctctgcgtagracacaccvgraatttgtcattgccactkccmccmwaattgatataakcmgtgtgraaatccccndacatctcacygatgcttatttcmagaagaagaagctgcgtwaacccmgacmccmggaaggggagatttttgacmcagagaaggaghmatacgagattmcagakcagcgcmaggttgatcagaaagctgtggactcgcmmattctgccmamaatcmaagctgttcctcagcttcagggctacctccgctctgtgttttctctcacmaatggagtttaccctcmchaattggtgttytaaatttcttacmaagaacctaattaaacmactgatcchwwwmhaaaaaaaaaaaaaaaaaaaaaaaamaaaaaaraaaaaaaraaaaaaaaaaaaa

SEQ ID NO: 1429 - DNA, 677 bp, Canis familiaris
  misc_feature (61)..(62): n comprises a, c, g, or t, or includes no nucleotide
ggaacaaaaagggggtacccgaggggtaaactcgcgaaaagcctaggtataatcctactgnnagatggcctcgcaactgttgaccatggccaagacctttcagtcagcatktgagaaattkcgagctagcatcactcctgggaccattttgatcawcctcactgggcgccacagaggcaagagggtagttttcctgwagcaactgagcastggcttgctacttgtgactggacctctggccctcaaccgagttcctctgcgtaggacacaccagaaatttgtcattgccacttccacccaaattgatataagcagtgtgraaatcccccaacatsstcactgawgcktatttcaagaagaagaagctgcgtaaacccmgacaccaggaaggggagatttttgacacagagaaggagaaatacgagattacagagcagcgcaaggttgatcagaaagctgtggactcgcmaattctgcccaaaatcmaagctgttcctcagcttcagggstacctccgctctgtgttttytctcacmaatggagtttaccctcacaaattggtgttytaaatttyttacmaagaacctaattaaacaactgatccatwwaaaaaaaaaaaaaaaaaaaaaaaaaaaaaaaaaaaaaaaaaaaaaaaaaaaaaaaaaaaaaaaaaaaaa

SEQ ID NO: 1430 - DNA, 663 bp, Canis familiaris
gttggtgacacagaaatggtggggaacccgagtggtttaaactttcgcccagatgcctaggkattatcctackygaagatgtgcctcgcaagctgtgagccatggcaraaaaccstttcagtcagcatgtgagaaagttgcgagctagcatcactcctgggaccaytkttgatcatcctcactgggckccacagaggcaagagggtagttttcctgaagcwactgagcagtggcttgctacttgtgactggacctctggccctcaaccgagttcctctgcgtagwacacaccagraatttgtcattgccacttccaccmraattgatataagcagtgtgaaaatccccmaacatctcactgatgcttatttcaagaagaagaagctgsgtaaacccagacaccaggaaggggagatttttgacacagagaaggagaaatacgagattacagagcagcgcaaggttgatcagaaagctgtggactcgcawattctgccmawaatcaaagctgttcctcagcttcagggctacctccgctctgtgttttctctcacaaatggagtttaccctcacaaattggtgttctaaatttcttachaagaacctaattaaacaactgatccawwwmwaaaaaaaaaaaaaaaaaaaaaaaaaaaaaaaaaa

SEQ ID NO: 1431 - DNA, 661 bp, Canis familiaris
gctactgactgtgacttacacaggagcgactcccccgagtcagccctacatgcaccacgcttcttgggccctcagacstccctcktcctgctatcccagaaccgggtagctgagttscacacagasttggagcggctgcctgccaaggacatccagaccaatgtatacatcaagcatcccgtgtccctggagcaatacctgatggagggcagctataacaaggtgttcctggccaaaggcaacatccctgctgagagctataccttcttcattgacatcttgcttgacacgatcagggatgagattgctgggtgcatcgagaaggcctatgagaaaatccttttcactgaggccacccggatcctcttcttcaacacacccaaaaagatgacggactacgccaagaagcgagggtgggttctgggcctcaacmactactacagctttgccagccagcagcagaagccagaagacaccaccatccyctccacggaactggccmaacaggtcatcgagtatgcccggcagctggagatgatcgtctgagtccaccagsccctggggtgggcgcagggcttgcagtatttaaascagtgscagtgtcagggcttcctccmataaaggtggattgacattccaaaaaaaaaaaaaaaaaaaaaaa

SEQ ID NO: 1432 - DNA, 570 bp, Canis familiaris
tcactgtgccctccacatggcaggaagggggggtggtcacttttattgagtcaccgatcccatccatgagggctccatcctgaagacttgacaccttcccaaggctgccascwcmkaattatcgtcgcactgggggttaagaatttcracatagaagtttgggggagacacmaatattcmgtctatggtagcatagtatgttyatttgctagcmaaacmtggcctggttcaagtcctatgccctgttttgcttctgtattttgtatttttgtattttgtactttctccctagaracmaaaccmatagactgtacagtagtcccccattatctgtgaaggatatgttccmagaccctcagtggatgcctgaaaccacagatagtactaaaccttatatagattatgctccccccccaaatatacatacctatgataaagtttaatttataacttaggcacagttaagaggttaacaacagcaataataaatagaacmattataacmatatactgtaataaaagttgtatgaacgtgraaaaaaaaaaaaaaaaaaaaaaaaaaaaaaaaaa

SEQ ID NO: 1433 - DNA, 568 bp, Canis familiaris
gcgagcggtttgcrygrsggcggccttgcgagttcgctccagcagacgcagagatgcagatytttgtraagaccctgacgggcaaaactatcacccttgaggtcgagcccagtgacaccattgaaaatgtcaaagccmaaatccaagacaaggagggcatcccgcctgaccagcagcgtctgatttttgcgggcaaacagctagaagatggccgaactctgtcagactacaatatccagaaagagtccaccttgcacttggtgcttcgcctgcgaggtggcatcattgagccttcactccgccagctggcccagaaatacaactgcgacaagatgatctgccgcaagtgttatgctcgcctgcacccccgtgctgtcaactgccgcaagaagaagtgcggccacaccaacaacctgcgccccaaaaagaaggtcaaataaggcccctccaccagctcttcctttgcccgcagggcggcamwcctgcccgagcctcaataggtcctggggcctcaataaagtttccctttcattgactggagcwarwmtcgagtttttttttttttttt

SEQ ID NO: 1434 - DNA, 678 bp, Canis familiaris
gttttcagaccatgagattaggaacagctttaagagtaattatgagagaacttttaaagcagtataactctacgggagattatagaagcgatgcmgtagacacagattccaaatacgttacmttgttgtggtgtcaccgactatagagatttggagggatactaattattactcagaaaaaggatttcccmagagttgctgtaaacttgaaaattgttctccacagagagatgcagataaagtaaacaatgaaggttgttttataaaggtgatgaccattatagagtcagaaatgggagtggttgcgggaatttcttttggagttgcttgctttcagctggttggaatctttctttcctactgcctctctcgcgccataacaaataaccagtatgagatagtgtaatcatcaaaccacgggcttactattgttcagctttaaggacatttacattcccccctgtgagctatgagattgcctgratgraagattgcctaatactacttacgatagaccmaaaaattccatcagtaatagtctgattcaatcaagacatttgtgtaggtccaccttttgtcccattggtgttaatcattgaaacccctgtatcactgtgaaacactggaagagskaataaattataaatgaagcmamaaaaaaaaaaaaaaactcgaggg

SEQ ID NO: 1435 - DNA, 762 bp, Canis familiaris
atgggtaatacctataggaggctttcacaactagcttctgtaaagaggtaaatgctctgggactctctgttagctgcaagtctttggctgccaaataatgtctagtagacatagagttgagagagaacgtgaatgggattttccttgcttgttctgaaatagcatgagagcagtagatgcccttataggaatcacattttatgagactcaacgatgggttgctgcaggccatgttcgttactagttactattccgttttatagtgcgattcctcataggagttttctagatgagcttttccagtttttactgttcaagcactccagtcaagcttttcactccactgaaaccacatgtcaaggtcagcagtgatgagcagattgagaggtccagtcttcttcctactggactttcagtcctgttggacagggttgactagttcttcttgaactcactttgttagctttgttctgcagggatgtgctactttgctcctccgtctcttgctttagttctgattcttttttccagggatttgttcttagacgtctctacactcatttccttgttgaaacccaccttcttttcatggctttaaatatttgtgctgaagatccaaaatttatatctagcctctctctcctgaactctagagttgtcaattgcttatttgctattttgatttggatatctaataaacatstccatcttaamatgaaaaaaaaaaaaaaaaaaaaaaactcgaggggggggcccggtacc

SEQ ID NO: 1436 - DNA, 712 bp, Canis familiaris
ctccttaacagattgtattggcatagctctgtgatggtcatccaggtttttgaaaatgtgcttatccagaaaggctcaagtcccatgcagctgtggcagagktacagttctgtggtttcatgttagttaccttatagttactgtgtaattagtgccacttaatgtatgttaccavaarataratctatctaccccagactagatgtagtattttttgtataattggayttcctaatactgatatttgtcatccctgcagaaagtgtattggtttttttaaaaaagaaagtgtatttgaaaataaagtcagatggaaaattcatttttaaaattcccgttttgtcagtttctctgataaaagatggcctgtttctcctgttttcaacgccacatatcccagtacccttccccagagctgggctaaataaataagaatttggtttcatgcctgagacactcagacacttcaaaaggtggcataacctctcacctggactgcagggtctggctctagttcacagtgctctttttcctcactgtatccaggttccctaccagagaagccaccagttctcttgggtggcactcartttcttctctccagctgactaaactttttttctgtaccagttaatttttccaactactaatagaataaaggcagttttctaaamwwmmwrwaaaaaaaaaaaaaaaaaamwcgagggggagg

SEQ ID NO: 1437 - DNA, 736 bp, Canis familiaris
tcatgcggttaattttgaagtgctgtttattaatcttagtgtatgattactggcctttttcatttatctataatttacctaagattacaaatcaaaagtcatcttgctaccagtatttagaagccaaccatgattaktaatgatgymcracccacstgaccaccgaggtcctcctgacaccgctctaacagccctcctctgcactcccacctgacacaycaggcgctaattcaaggaatttcttaacttctkgcttctttctagaaagagaaacagttggtaacttttgtgaattaggctgtaactactttataactaacatgtcctgcctgtcatctgtcagctgcaaggtactctggtgagtccctacttcagagctttactccttaacagattgtattggcatagctctgtgatggtcatccagttttttgaaaatgtgcttatccagaaaggctcaagtccatgcagctgtggcagagttacagttctgtggtttcatgttagttaccttatagttactgygtaattagtgccacttaatgtatgttaccaaaaaataaatctatctaccccagactagatgtagtattttttgtataattggatttcctaatactgatatttgtcatccctgcagaaagtgtattggtttttttaaaaaagaaagtgtatttgamaataaagtcagatggaaaattcawwwwwaaaaaaaaaaaaaaaaaaaaaaaaaaaa

SEQ ID NO: 1438 - DNA, 466 bp, Canis familiaris
ctgcccggtcaacatcctgtccagcctgccaaggtactcttctggtgagtcccctacttcacagagcctttatctccctttaaccagattgtattggcacatagctcttctgtgatggtacatcccagtttttgtgaaaatggtgccttatcccacgaaaggtctccaagtcccatgccagctctgtggccagagttaccagttctgtggtttacatgttagttccctatatagttacctgtgtaattagtgcccaccttaatgtatgttacccacaaaaataaatctatctaccccacgactagatgtagtattttttgtataattggatttcctaatactgatatttgtcatccctgcagaaagtgtattggtttttttaaaaaagaaagtgtatttgaaaataaagtcagatggaaaattcawwwwwaaaaaaaaaaaaaaaaaaaaaaaaaaaaaaaaaaaa

SEQ ID NO: 1439 - DNA, 668 bp, Canis familiaris
aacttacgtacatcgaatcggcagagtaggaagagctgaaaggatgggatctggccatttcctggtggcaacagagaaagaaaaggtgtggtaccatgtatgtagcagccgtggaaaaggatgttataacacaagactcaaggaagatggtggttgtaccatatggtacaatgagatgcagttgctgtctgagatcgaagagcatctgacattgcaccatttctcaggttgaaccagatataaaggtaccagtggatgaatttgatgggaaagttacctatggtcagaaaagggccattggcggtggaaactataaaggccatgtggatattttggcacctacggttcaagagttggctgcccttgaaaaggaggmgcagacatctttcctgcatcttggctaccttcctaaccagctgttcagaaccttctgattttaacatacactgaataagatttgaataataaaattctgtagtcttaaaactctaaaaacagttgtactgcttccaagcagcagtatttatagtaacataagctattaatgctaactcttgcatgtcaagaaacattaatcttaggaattcttcataaaatggcaacctaatgagaataataaatttgatgmctatawwwwwawraaaaaaaaaaaaaaaaaaactcgaggg

SEQ ID NO: 1440 - DNA, 695 bp, Canis familiaris
aagctcttctgggagtggggactgcaggaagaagaaagaagaaggatgtcggcgagagggggaggactatgagaaagtgaagctgctgggagatcagtcccagaagatccagaaagtatgggaaaaggaagaagaggaggaaaaaccctgacctgggattctcagattatgctgctgcccagttacgccagtatcatcggctgacgaagcagatcaagcctgacagtggaaacctatgagagactgagagaaaaacatggagaagagtttttcccaacttccaacagtcttcttcatggaacacatgtgccttccacagaggaggttgataggatggtcatagatctggaaaaacaaattgaaaaacgagacaagtacagccggagacgtccttataatgatgatgcagacattgactacattaacgaaaggaatgccaaattcaacaagaaggcagaaagattctacgggaaatatacagctgaaattaaacagaatttggagagaggaacagcggtctgatcccttcaggaactgtttctggaagcttgagaatgctagggaaattgaagttctcttcaaagttatcccaggaaaccagcactcagtctactatgcttgcccactcagcgtttacaaataaatgcttcktcttmmmmawaaaaaaaaaaaaaaaaaaaaaaaaaaactcgagg

SEQ ID NO: 1441 - DNA, 636 bp, Canis familiaris
gggtccttcccgtgttcttgcctaatcaggttggctcgagtgattcatgagcgcaccctctcgcaccgtttggagctctggggacgacaaggagcatkctgktgtwagwacacctacgtccttgtgaaggccctgccagccagatgtcacccttcctcaggactccctgttgacgaagagaacctgggaagggaggggacacaagtgtcgaatgtgtgtgtgctttttaaaatagagtgattggattgtatttgtgcgatcattagggctccgggtctgtttgttactccagaaggtaagagggctgcttcctgctctcccarctgggtctgctttgggaccctcttggaggagggctctgccccagaccagagtcagctactcttcggtttagttcttcactccaggtattggttttctttgcttacattgaatcctgtagcatccattcccattacmaaagtaatgtaatagtttcctttgatttgtggttttgttgtttgtttgttttttawataagtggaaacmaaagttttttttattaggattctgaaaggaagagaaaaaatgtacaagtttaataaaargascctycccttwaaaawaaaaaaaaaaaaaaawaactcgaggggggag

SEQ ID NO: 1442 - DNA, 722 bp, Canis familiaris
tgaacttttcctccagcaataggaacattctgggttcaagaccagttcatgcagtatacctatctgcaggcgtgatktcccaattttgtcagttacgtgtgtaaagttgccacaggaagatatggaccatcactcggtgcatcaggtgcaatcatgacggtccttgctgctgtctgcacaaagatcccagaagggaggcttgccattatcttccttccmatgttcacattcacggcagggaatgccctwaaagccmttattgccatgsatacagcagsaatgatcctgggctgsaaattttttgatcatgcagcacatctcgggggagctctctttggaatatggtatattacttatggtcatgaactcatttgsaagaacagggagcctctagtgaaaatttggcatgaaatgaggactaacagccccmaaaaagkaggcggctctaagtagaactgggatcagatgatactggtgcatgtgccccgtgmtgcctggagagtcccaggaactcawcagccctggagtgaccacatctttgctcctgcttggaagacacccagcatctagctttcccagtattttaaactctgtctccagtacatgtcttaccagaaagtgaattatgacmaagttgtgaaataaaggtttatatctctagtttgtaaaaaaaaaaaaaaaaaaaaaaaaaaaaaaaaaaaaaaaaaaaaaaaaaaaaaaaa

SEQ ID NO: 1443 - DNA, 678 bp, Canis familiaris
agcctagccagtctttgtcctcctagagagcctgagttagctctttctactcccttgctcaggacccctgttaaggggacaacataacaaacaagggtgagagtggcccccagcgctccccaatgctaactttgattgagcccattttgccctctctcccaaagccaactgctgggtgaaacaccagaagtggggggtaatggccctttctttgtacagccttttagatggcttccttttctctggtgaaaagccagcccctttaccctaggtcaagaaattccctgctcataggagatcttagaatcagatagatctggcttaaagtcttggctttgctacttcctggctctcacaccttatctttctaaacctcttcttctgtaagacaggatactagctcccttccagagttgtcctgaggagtaaagaactcaacacagggcctgacacaggacagctttttgggtgaaagactagctgacgggatccctgggtggcgcagcggtttggcgcctgcctttggcccagggmgcgatcctggagacccgggatcgaatcccacatcgggctcccggtgcatggagcctgcttctccctctgcctgtgtctctgcgcctctctctctctctctgtgactatcataaataaataaaaattaaaaaaaaaaaaaaaaaa

SEQ ID NO: 1444 - DNA, 506 bp, Canis familiaris
ttttttttttttttttttattcttcatgttttaattttatacaatggctagcaggcaccttagtaaccagccagaaatcaatttcaaccaccatcaacccctaaactacagtaccaggatggctggctaaagaaaggaaacggactggctgtagtctgacgcgtgcccagtacaaggtgtctggctgactttgtcctaaataaggctaacattagtgaactaagaacagcgtcatgtggcggccgtgcctggccttcaggagcacccctccccgatgcgctggcaggagcgccccactttccggtccagtttcaccattttcatgatggcttcctctcggcctcggcccatgtggtcaaacgtacagtcatgctgctcggggaggcgatgtaacatacagaacacataaccgcagcggcatgatcccagttcctgctgcaccagctccagtttggtttggcactggaagcaccgacgtcgactcttctgtttcgatcggctggttt

SEQ ID NO: 1445 - DNA, 645 bp, Canis familiaris
  misc_feature (623)..(623): n comprises a, c, g, or t, or includes no nucleotide
ctctgaaacctatttaagccaatgacaactgaccctggagacaaaacaatggatttgccagctttaaatcagcaggtgaagaaagaaaagaaattacatcaggagagtacagtatttactaccccgcagaaatgcctttaagaaataycagagaagctataacatagaatatgagmcattaaaaacacagttgcaagaaaatggagacacattctcagcttacaaatttggagaggaagtggcaaccacccatgagcaaaataattttgtgatgaaagaattcatagcaaccaagagtcaagagagtgattmccagtcaattatgaagaatgtggaccaagcagattgcagaatmcaataaaagcattgtggacgctctacatagcatgagcagaaactgagtytgaaccaactgcaagtctctataatagtatgctttctgctaaactgtatgttgactgaaaaagaatctcatacccttgaagagttttacctaaaatttttaactactataatttttgtgmcctctttgaagaggtatactactttaaacagcataatagttcaataaaaagtttgcatmcaaaaaaaaaaaaaaaaaaaaaaaaaaaaaaaaaaccgangggggggcccgggtacccaatt

SEQ ID NO: 1446 - DNA, 638 bp, Canis familiaris
  misc_feature (635)..(635): n comprises a, c, g, or t, or includes no nucleotide
aagctattgtgacacctttaaatccgttttgaatgttgttttkgagcccacaagaaatgatgttttaaagttattcccttgctactttactgatacctttatcattcctgggacmgtctgctgatttaaaaaatgtagcattccattkgtatttakttttctcccttgccmaaaagattttctaatactgcttgtaccagccagggaaatgctccmaracactattcagatctcttgcactgaggaacttctattttttctccccttaatgaatcctggctttcatcagccmagcttaccttagtgtggtttggatttgatagctcattagttctgtgctggttgcmaagagttcatattgagatgatttttaatacccagcagattgtcttcctttatattgtatcttttttatgttgcatgttgctttttggtatcagcctgactctttgcccagtatatgatagttctgctgatgttttattgtttattggtgaacatatcttcattaagagtttttggaaaactcatcaaactcaataagttttcttcataacccatttggaattattcctaataaaatgataaaaatgtawaaaaaaaaaaaaaaaaamwmrarrrggggcccgggtacncca

SEQ ID NO: 1447 - DNA, 776 bp, Canis familiaris
aagtgcgggaaccttgtacaccgatcatgaactcgtttttgtaggagagatttggtgttcctctcggatgactgcaatgcattggaatacccaatcccagtgaccaccatcctgccagaccgtcagagatagggcatctggaccagagagagagccccaggggaccacagttatgtcacttgcccagaggcggtgggctaaagccacgccccccaccaggcctccctgttactatagcatcagaaactgtcacatctctccccttccggagagcagggcttgcactcttcccctagaacctactttgaaggcaattagaagctttgttttcatttccccctggtattgtcttgccaggatggttaggtacacaaggacgcttattagatcactgagaagaaaaagccaaacccgcttctctggtatgaacatctagtttgagagcaagcaaaacagtaggcttgtattagtgctttaatggagtactggtaacatttttctttcttgataggaatctgcttatatttagccaggcttctatttcataccctctcccactacaaactttccgtgcagttacctttcatttttaaagcaatttcactgctaaatataaattgtatttgtggggttcatagttatataatgctgaagggaaccactctttcgttgaaaggtgataaaagttaaataaagactgtctccacagtaaaaaaaaaaaaaaaaaaaaaaaaaaaaaaaaaaaaaaaaaaaaaaaaaaaaaaaaaaaaaaaaaa

SEQ ID NO: 1448 - DNA, 659 bp, Canis familiaris
gatgtgcaagcttggatacccatcccgggacaccatcctgcsascckttcagagatakggcattkgaccagagagagagccycagggaccacaggttatgtcacttgcccagagkcgktgggctwaasccacgccccccwmmrggcctccctgttactatagcatcagaaactgtcacatctckccccttccggagagcagggcttgcactcttcccctagaacctactttgaaggcmattagaagctttgttttcatttcccctggtattgtcttgccaggatggttaggtacacaaggacgcttattagatcactgagaagaaaaagccaacccgcttctctggtatgaacatctagtttgagagcaagcaaacagtaggcttgtattagtgctttaatggagtactggtaacatttttctttcttgataggaatctgcttatatttagccaggcttctatttcataccctctcccactacaaactttccgtgcagttacctttcatttttaaagcaatttcactgctaaatataaattgtatttgtggggttcatagttatataatgctgaagggaaccactctttcgttgaaaggtgataaaagttaaataaagactgtctccacagtaaraaaaaaaaaaaaaaaaaaaaaaaa

SEQ ID NO: 1449 - DNA, 644 bp, Canis familiaris
catcgccagaccgtccgaaataggcatctggacagagaggaggccccagggccacaagtaagtcaattgcccagagcgttggctaaccacgccccccascaggcctccctgttactatagcatcagaaackgtcacatcststycccttccggagagcagggctkgcactcttscccctagaacctactttgaaggcaattagaagctttgttttcatttcccctggtattgtcttgccaggatggttaggtacacaaggacgcttattagatcactgagaagaaaaagccmaacccgcttctctggtatgaacatctagtttgagagcaagccaaacagtaggcttgtattagtgctttaatggagtactggtaacatttttctttcttgataggaatctgcttatatttagccaggcttctatttcataccctctcccactacaaactttccgtgcagttacctttcatttttaaagcmatttcactgctaaatataaattgtatttgtggggttcatagttatataatgctgaagggaaccactctttcgttgaaaggtgataaaagttaaataaagactgtctcccmcagtaaaaaaaaaaaaaaaaaaaaaaaaaaaaaaaaaaaaaaaaaaaaaaaaa

SEQ ID NO: 1450 - DNA, 710 bp, Canis familiaris
ccggaattcccgggatctcggatgactgcaatgcatggaatacccaaatcccagtgaccaccatcctgccagaccgtcaggagatagagcatctggaccagagagagagcccaggggaccacagttatgtcacttgcccagaggcggtgggctaaagccacgccccccmamcaggcctgcccygktactatagcatcagaaactgtcacatctctccccttccggagagcagggcttgcactcttkcccctagaacctactttgaaggcaattagaagctttgttttcakttsscccctggtattgtcttgccaggatggttaggtacacaaggacgcttattagatcactgagaagwawaagccmaacccgcttctctggtatgaacatctagtttgagagcaagcmaaacmgtaggcttgtattagtgctttaatggagtactggtaacakttttctttcttgataggaatctgcttatatttagccaggcttctatttcataccctctcccactacmaactttccgtgcagttacctttcatttttaaagcmatttcactgctaaatataaattgtatttgtggggttcatagttatataatgctgaagggaaccactctttcgttgaaaggtgataaaagttaaataaagactgtctcccaccagtaaaaaaaaaaaaaaaaaaaaaaaaaaaaaaaaaaaaaaaa

SEQ ID NO: 1451 - DNA, 697 bp, Canis familiaris
tttgtaggagaggattttgggtgttcccttctctggatgacttgcatgcactggratacccbatcscagtgaccaccatcctgccagaccgtcagakatagggcatctggaccagagawgagagccccaggggaccacagttatgtcacttgcccagagkcgktgggctaaagccacgccccccamcaggcctcccygttactatagcatcagaaactgtcacatctctcccsttccggagagcagggcttgcactcttcccctagaacctactttgaaggcaattagaagctttgttttcatttccccctggtattgtcttgccaggatggttaggtacacaaggacgcttattagatcactgagaagaaaaagccaaacccgcttctctggtatgaacatctagtttgagagcaagcaaaacagtaggcttgtattagtgctttaatggagtactggtaacatttttctttcttgataggaatctgcttatatttagccaggcttctatttcataccctctcccactacaaactttccgtgcagttacctttcatttttaaagcaatttcactgctaaatataaattgtatttgtggggttcatagttatataatgctgaagggaaccactctttcgttgaaaggtgataaaagttaaataaagactgtctccacagtaaaaaaaaaaaaaaaaa

SEQ ID NO: 1452 - DNA, 576 bp, Canis familiaris
cggtggggcaaagccacgccccccagacagggcctaccgggtactatagcatcagggaactgtcacatcttgccccttccggagacagggcttgcactcttcccctagaacctactttgaaggcaattagaagctttgtttttcattgtcccsctggtattgttcttgccaggatggttaggtacacaaggacgcttattagatcactgagaagaaaaagccaaacccgcttctctggtatgaacatctagtttgagagcaagcaaaacagtaggcttgtattagtgctttaatggagtactggtaacattgtttctttcttgataggaatctgcttatatttagccaggcttctagtttcataccctctcccactacaaactttccgkgcagttacctttcatgttgttaaagcaatttcactgctaaatataaattgtatttgtggggttcatagttatataatgctgaagggaaccactctttcgttgaaaggtgataaaagttaaataaagactgtctccacagtaaaaaaaaaaaaaaaaaaaaaaaaaaaaaaaaaaaaaaaaaaaaaaa

SEQ ID NO: 1453 - DNA, 743 bp, Canis familiaris
tttttgtaggagagattttggtgttcctcttcgatggactgcaagccattggaatacccatccccagtggaccaccatctctgccagacccgtcaggagatagggcatctggaccagagagagagccccaggggrccacagktatgtcacttgcccagagcccggtgggctaaagccacgccccccascaggcctccctgttactatagcatcagaaactgtcacatctgctgccccttccggagagcagggcttgcactcttcccctagracctactttgaaggcaattagaagctttgttttcatttccccctggtattgtcttgccaggatggttaggtacacaaggacgcttattagatcactgagaagaaaaagccaaacccgcttctctggtatgaacatctagtttgagagcaagcaaaacagtaggcttgtattagtgctttaatggagtactggtaacatttttctttcttgataggaatctgcttatatttagccaggcttctatttcataccctctcccactacaaactttccgtgcagttacctttcatttttaaagcaatttcactgctaaatataaattgtatttgtggggktcatagttatataatgctgaagggaaccactctttcgttgaaaggtgataaaagttaaataaagactgtctccaccagtaaaaaaaaaaaaaaaaaaaaaaaaaaaaaaaaaaaaaaaaaaaaaaaaaaaaaaaaaa

SEQ ID NO: 1454 - DNA, 565 bp, Canis familiaris
ttttaagtccacgcgcccccacgcaggcctccctgttactatagcatcagaactgtcacatctgctccccttccggagatgcacgggcttgcactcttccccctagaacctactttgaaggccattagaagctttgttttcatttccccctggtattgtcttgccaggatggttaggtacacaaggacgcttattagatcactgagaagwtwawagcccwacccgcttctctggtatgaacatctagtttgagagcacagccaaacacgtaggcttgtattagtgctttaatggagtactggtgaacatgtkttctttcttgataggaatctgcttatatttagccacggcttctatttcataccctctcccactacmaactttccgtgcagttacctttcatttttaaagccatttcactgctaaatataaattgtatttgtggggttcatagttatataatgctgaagggaaccmctctttcgttgaaaggtgataaaagttaaataaagactgtctccmcmgtaaraamaaawaaaaaaataaaaaaaaaaaaaaaaaaaaa

SEQ ID NO: 1455 - DNA, 761 bp, Canis familiaris
  misc_feature (176)..(176): n comprises a, c, g, or t, or includes no nucleotide
  misc_feature (202)..(202): n comprises a, c, g, or t, or includes no nucleotide
cgtgtaccccatctgaactcgttttgtaggagaatatggtgtcctctcggaatgactgcrawksmattggratacscvawcscagtgascmmccatcckgycagaccstcagagatagggcatctgraccagagagagagcccmrggggrccacmgtdadgtcactkgscmaragnsggtgggytaaarccacgccycccancaggcctsccbsttactatagcatcagawackgtcacatckstcccyktccggagagcagggcttgcactcttcccctagracctactttgaaggcmattagaagctttgttttcaktycccsctggtattgtcttgccaggatggttaggtacacmaggacgcttattagatcmctgagaagaawwagccmaacccgcttctctggtatgaacatctagtttgagagcmagmmaaacmgtaggcttgtattagtgctttaatggagtactggtracmytkttctttcttgataggaatctgcthayawttagccaggcttctawttcawaccctctcccmctacvaactttccgtgcagttacctktcattbtwamagcmatttcactgctaaatataaattgtatttgtggggttcatagttatataatgctgaagggraccmctctttcgytgaaaggtgataaaagttaaataamgactgtctccmmcagtaarvmaaaawammaaaaaaarawaaaaaaavaaaraaaraaaaaaaaaaaaaaaaaaaaaaaaa

SEQ ID NO: 1456 - DNA, 724 bp, Canis familiaris
tctgtaagagagattgggttcctctcggaatgacgcaagcatggaagtasccsatcscagkkrmcmmccawcckgsmagaccgtcagagatagggcatctggaccaragagagagccccaggggaccacagttawgtcacttgcccagagrcgktgggytwaakccacgccccccamsaggccthcctgttactatagcatcagaractgtcacatctctcccyktccggagascagggcttgcactcktyccctagracctactttgaaggcmattagaagstttgttttcatttcccsctggtattgtcttgccaggatggttaggtacacaaggacgcttawtagatcmmtgagaagdawaagccmamcccgcytyyctggtatgaacatctagtttgagagcmagcmaamcmgtrggcttgtattagtgctttaatggagtactggtaacaydktttctttcttgataggaatctgcttatatttagccaggcttctatytcataccctctcccmctacmaactttccgtscagttacctttcatttttaaascmatttcactgctaaatataaattgtatttgtggggttcatagttatataatgctgaagggaaccactctttcgttgaaaggtgataaaagttmaataaagactgtctccmmmgtaaraaamrwrrararraaaaaaaaaaaaaaaaaaaaaaaaaaaaaaaaraaa

SEQ ID NO: 1457 - DNA, 754 bp, Canis familiaris
accaccgatcatggaactcgtttttttaggagaaaatttggtgttcctcttgggatgactgcaatgcaattggaatacccawycccagkgaccaccatcckgccagacsgtcagagatargggcatctgraccagagagagasccccaggggaccacagtwatktcactkgcccagagscggtgggytwaagccacgccccccamcaggcctscctgktactatagcatcagaaactgtcacatctctccccttccggagagcaggkcttgcactctkcccctagaacctactttgaaggcmmattagaagstttgttttcakttcccsctggtattgtcttgccmggatggttaggtacacaaggacgcttattagatcactgagaagaaaaagccmaacccgcttctctggtatgaacatctagtttgagagcmagcmaaacmgtaggcttgtattagtgctttaatggagtactggtaacatttttctttcttgataggaatctgcttatatttagccaggcttctatttcataccctctcccactacmaactttccgtgcagttaccyttcatttttaaagcmatttcactgctaaatataaattgtatttgtggggttcatagttatataatgctgaagggaaccactctttcgttgaaaggtgataaaagttaaataaagactgtctccmmcagtaaraaamrwraaaaaaaaaaaaaaaaaaaaaaaaaaaaaaaaaaaaaaaaaaa

SEQ ID NO: 1458 - DNA, 742 bp, Canis familiaris
  misc_feature (199)..(199): n comprises a, c, g, or t, or includes no nucleotide
tggctcaggtggaacggcttgaaaggacaaagaatttggtgttcctctyggatgactgcaatgcattggaatacccaatcccagtgaccaccatcctgccagaccgtcagaratagggcatctkgaccagagagagasccccaggggaccacarktatgtcamttscvcagagcggtgggctwaadccacgccccccmncmggcctscykgkkactatagcatcagaaactgtcacatctckyscstkccggagakcagggcttgcactsktsccctagracctactttgaaggcmattagaagstttgttttcakttcccsctggtattgtcttghcaggatggttaggtacacaaggacgcttattagatcmctgagaagwwwaagccmaacccgcttctctggtatgaacatctagtttgagagcmmgchaaacmgtaggcttgtattagtgctytaatggagtactggtaacaktbktstktcktgataggaatctgcttatakttagccaggcttctatttcataccctctcccactacmaactttccgtgcagttacctttcatktttaaagcmattkcactgctaaatataaattgtatttgtggggttcatagttatataatgctgaagggraccactctttcgttgaaaggtgataaaagttaaataaagactgtctccmmagtaaraaaaaaaaaaaaaaaaaaawaaaaaaaaaaaaaaaaaaaaaaaaaa

SEQ ID NO: 1459 - DNA, 708 bp, Canis familiaris
gtctctcgatgactgcatgcatggaaccaatccaggacacatcgccagaccgtcagagataggcatctggaccagagagagagccccaggggaaccacagtwaygtcacttgcccagaggcggtgggctaaagccacgccccscmmcaggcctccctgttactatagcatcagawactgtcacatctctccccttccggagagcagggcttgcactcttcccstagaacctactttgaaggcmattagaagctttgttttcatytcccsctggtattgtcttgccaggatggttaggtacacaaggacgcttattagatcmctgagaagrwaaagccmwacccgcttytctggtatgaacatctagtttgagagcmmgcmaaacmgtaggcttgtawtagtgctttaatggagtactggtaacatttttckttcttgataggaatctgcttatatttagccaggcttctatttcataccctctscchmctacmaactktccgtgcagttacctttcattktwaaagcmatttcactgctaaatataaattgtatttgtggggttcatrgttatataatgctgaagggraccactctttcgttgaaaggtgataaaagttaaataaagactgtytccmmcagtaamaaaamamamaaaaaaaamaaaaaaaaaaaaaaaaaaaaaaaaaaaaaaaaaaaaaaaaaaaaa

SEQ ID NO: 1460 - DNA, 776 bp, Canis familiaris
  misc_feature (216)..(216): n comprises a, c, g, or t, or includes no nucleotide
caaagtgcgggactgtacaccatcaggaatcgtgttggtagggaagaatttggtgttcctctcggawgacctgcaatgcatkggaaaacgcratcccagggaccaccatcckgccagaccgtcagaratagggcatctggaccagagagagagccccaggggaccmcamgttatgtcacttgcccagaggcgktgggctaaagccacgccccccancaggcctscctgttactatagcatcagaaactgtcacatctctccccttccggagagcagggcttgcactcttcccctagracctactttgaaggcmatkagaagctttgttttcawttcccmctggkattgtcttgccaggatggttaggtacacaaggacgcttattagatcactgagaagraaaagccmaacccgcttctctggtatgaacatctagtttgagagcaagcmwaacmgtaggcttgtawtagtgctttaatggagtactggtaacatttttctttcttgataggratctgcttatatttagccaggcttctatttcataccctctcccmctacmaactttccgtgcagttacctttcatttttaaagcmatttcactgctaaatataaattgtatttgtggggktcatagttatataatgctgaagggraccactctttcgttgaaaggtgataaaagttaaataaagactgtytccmmcagtaaaaaaaaaaaaaaaaaaaaaaaaaaaaaaaaaaaaaaaaaaaaaaaaaaaaaaaaaaaaaaaaa

SEQ ID NO: 1461 - DNA, 757 bp, Canis familiaris
ggacaccttcatgaactctttttaagagagattttggtgttcctctcggatggactggcaatgcatktggaataccgcaatcccagtgaccacmatcctggccagaccgtcagagatagggcatmytggaccagagagagagccccaggggrccacagttatgtcacttgcccagagkcggtgggctaaagccacgccccccaccaggcctccctkktactatagcatcagaaactgtcrcatctstccccttccggagagcagggcttgcactcttcccctagracctactttgaaggcmattagaagctttgttttcakttcccsstggtattgtcttgccaggatggttaggtacacaaggacgcttattagatcactgagaagdaaarsccmaacccgcttctctggtatgaacatctagtttgagagcmagcmaaacmgtaggcttgtattagtgctttaatggagtactggtaacatttttctttcttgataggaatctgcttatatttagccaggcttctatttcataccctctcccactacmaactttccgtgcagttacctttcatttttaaagcmatttcactgctaaatataaattgtatttgtggggttcatagttatataatgctgaagggraccactctttcgttgaaaggtgataaaagttaaataaagactgtctccmccagtaaraaaaaaaaaaaaaaaaaaaaaaaaaaaaaaaaaaaaaaaaaaaaaaaaaaaaaaa

SEQ ID NO: 1462 - DNA, 741 bp, Canis familiaris
ccatcatgactcgttctgtaggagagattggtgtccctcttcggatgactgcaatgcattggaataccaatcccagtgaccaccatcctgccaagaccgtcagagatagggcatctggaccagagagagagccccmrgggaccacagttatgtcacttgcccagaggcggtgggctaaagccacgccccccavcaggcctccctgtkacwatagcawcagaaactgtcacatctstccccttccggagakcagggcttgcactcttcccctagrmcytactttgaaggcmattagaagctttgttttcakttcccsctggtattgtcttgccaggatggttaggtacacaaggacgcttattagatcactgagaagwaaaagccmaacccgcttctctggtatgaacatctagtttgagagcaagcmaaacagtaggcttgtattagtgctttaatggagtactggtaacatttttctktcttgataggaatctgcttatatttagccaggcttctatttcataccctctcccactacaaactttccgtgcagttacctttcatttttaaagcaatttcactgctaaatataaattgtatttgtggggttcatagttatataatgctgaagggraccactctttcgttgaaaggtgmtaaaagttaaataaagactgtctccaccagtaaaaaaaaaaaaaaaaaaaaaaaaaaaaaaaaaaaaaaaaaaaaarrrmrmaa

SEQ ID NO: 1463 - DNA, 317 bp, Canis familiaris
agatctcactggggggccctgctgcctgtcttcctcagcaagtcattaaggtcrctaagggtgaaatctgtatgaagcaaggatcaagagcaaattgagagagagagtggtggctgaagggacagcctgggtgtgttggggggcaggtgagtggtgtctgkgtgtactgtggataagctggtgtgaaaccctctcctccccaaggcactgatgagcagcttctcagagctcccatctctgcccccctccaggtgtccagatgcctcccttctcacacctggtatacagttctgactggtccagaggtgcctagatct

SEQ ID NO: 1464 - DNA, 1477 bp, Canis familiaris
aggccaatgtgcaataccaacatgtctgtgtctactgrtggtgctgtaagcacctcacagattccagcttcggarcargagaccctggttagaccaaagccattgcttttgaagttgttgaagtctgtaggtgcacaaaaagacacttatactatgaaagaggtgatattttatcttggccagtatattatgactaaacgattgtatgatgagaagcaacagcatattgtgtattgttccaatgatcttctaggagatttgtttggagtgccaagcttctctgtgaaagagcacaggaaaatatatacaatgatctacagaaacttggtagtagtcaatcagcatgaaccatcagattcaggcacatctgtgagtgaaaatagctgtcaccgtgaaggtgggagtgatcaaaaggaccctgtgcaagagttgcaggaagagaaaccttcatcttcagatttgatttctagaccatctacctcatctagaaggagarcaattagtgagacagaagaacatgcagatgatttacctggtgaacgrcagagaaagcgccacaaatctgatagtatttccctttcctttgatgaaagccttgctctgtgtgtaataagggagatatgttgtgaaagaagcagtagcagtgagtcaacagggacgccatcaaatccggatcttgatgctggtgtaagtgaacattcaggtgattggttggatcassattcagtttcagatcaattcagtgtagaatttgaagttgagtctcttgattcagaagattatagccttagtgaagaaggacaagaactctcagatgaagatgatgaggtgtatcgagtaactgtgtatcaggcaggggagagtgatacagattcatttgaagaagatcctgaaatttccttagctgactattggaagtgtacctcatgcaatgaaatgaatcctcctcttccacctcattgcaatagatgttgggcccttcgtgagaattggcttcctgaagataaagggaaaatccctgagaaagccacaccagaaaactcaacacaagtagaagagggctttgatgtccctgattgtaaaaaagctgcagccagtgattccagagaatcatgtgctgaggaaattgatgataaaatcacacaagcctcccactcccaagaaagtgaggactattctcagccatcaacttctaacagcatcatttatagcagccaagaagatgtcaaagaatttgagagagaagaaacacaagacaaagaagaaattgtggaatctagttttccccttaatgccattgaaccttgtgtgatttgccaaggtcgacctaaaaacggttgcattgttcatggcaaaacaggacatcttatggcatgcttcacgtgtgcaaagaagctaaagaaaaggaataagccctgtccagtatgtagacaaccaattcaaatgattgtgctaacttatttcccctagwwgmcct

SEQ ID NO: 1465 - DNA, 598 bp, Canis familiaris
attgtcgtgtgttaattactcctctagaggctcatgcctgctgttactcttgtgtccaagttcctgtcccagttgtcccatggtgaccccattggttacagtagcaggtgtccttttgggctcgcgtccccacaggtctaggtcatcccctgcacataggagtccccgaggtttggagagatgaacttccagatccatccactctccccctcccagatggagtcccacatcgggctcctttcatggagcctgcttctycctytgcctgtstctctgcctctctctctctctcttctctctcatgaataaatatataaaatcttttttaaaaaaaataaggagtactgtgggataccctgtggtgtgcccacacgcgtttgtgggccccgcccttgggccccatgggcgccgaattcctgggaataccccgggatcgaatcccacgtcgggctcccggtgcatggagcctgcttcttcctctgcctgtgtctctgcctctctctctctctctctgtgattatcataaataaaataaataaaaattttaaaaaaataaaaaaaaaaaaaaaaataaaaaaaaaaaaaaaaaaaaaaaaaa

SEQ ID NO: 1466 - DNA, 382 bp, Canis familiaris
tggccctggaggttccaatgtgaagtgctgctgccaagacctgaaccacagttctctggtagatgagggcatccagttgcaagtctcccaccagctctgtaacaagagtctgaggcatttcgtgtcagtcattgtagctttggagaagctgaagaagccctgcccacaggtcctccaggaggatgacctgaagagcatcttttgctacatctttgaagaagaacctatcatctgcaaaacagatgcggataattttatgagtgatgcagccatgcaatcggtggactgcaagttacaggacataagccacaaatacctggtgctgtctaactcatatgagcttcgggctctccacctcaatggggaaaatgtgaacaaagca

SEQ ID NO: 1467 - DNA, 708 bp, Canis familiaris
caaggttgtacaaaaatagcggctggacccgggtccggaattcccgrrayrgtccatytwaatgtggggattgggraccactagttcttwcagatggtattcttcagactatagaaggagcttccmrkkgaattcaccmgtggrmmaawkgaggacwacaggtgaacacgctttttbctatgkttacataccmrgtcagatccgttatgaataagtaatttagtgttawatagacttccmgctttatgctggaataaatagcatgtgagcagctgtttgttggcctggggkyggaggggtaaggtgggcgctaagcctttttttaagatttttcaggtacccctctaaaggcaccgaaggyttaagtaggacaaccatggagccttcctgtggcaagagmgacaacmwagcgctattacactaaggtcaataaaaatggtgtcagcctcctaaccccagcttctgttagaaatgaggacttggggatccctgggtggcacagcggtttggcgcctgcctttggcccagggcgtgatcctggagacccgggatcgaatcccacgtcgggctcccggtgcatggagcctgcttctccctctgcctatgtctctgcctctctctctctctctctctctatgtgactatcataaataaataaaaattttaaaaaaaaaaaaaaaaaaaaaaaaaaaaaaaaaarmaaaraaa

SEQ ID NO: 1468 - DNA, 699 bp, Canis familiaris
taaggagaaaaaatagcttatttactktrrataacagtccatyktaaatgtkgggattgggaaccactagttctttcagawggtattcttcagactatagaaggagcttccmgtkgraktcaccagtggacmmwatgaggacaacaggtgracacgctkttktctatgtktacataccmagtcagatccgttatgmataagtaatttagtgttwmatagacttccagctktatgctggaatdaatagcatgtgagcagctgtttgttggcctggggktggaggggtaaggtgggcgctaagcctttttktaagatttttcaggtacccctctaaaggcaccgaaggcttaagtaggacmaccatggagccttcctgtggcmagagagacmacmaagcgctattacactaaggtcmataaaaatggtgtcagcctcctaaccccagcttctgttagaaatgaggacttggggatcmctgggtggcacagcggtttggcgcctgcctttggcmcagggcgtgatcctggagacccgggatcgaatcccacgtcgggstcccggtgcatggagcctgcttctccctctgcctrtgtctctgcctctctctctctctctctctctatgtgactatcataaataaataaaaatttwaaaaaaaaaaaaaaaaaaaaaaaaaaaaaaaaaaaaaaaaaaaaaaaa

SEQ ID NO: 1469 - DNA, 732 bp, Canis familiaris
cgacgtatcgagggccagagagccagagcagtaaggaaaaatagctatttacttgagtaacagtcccatttaaatgtggggattgggaccactaggtctttcagatggtattcttcagactatagaaggagcttccacgttgaattcaccagtggacvaaakgaggacaacaggtgacacgctktkttctatgkktacataccaagtcagatccgttatgaataagtaatttagtgttaaatagacttccagctttatgctggaataaatagcatgtgagcasctgtttgttggcctgggggtggagggkyaaggtgggcgctaagccbtttttttaagatttttcaggtacccctctaaaggcaccgaaggcttaagtaggacaaccatggagccttcctgtggcaagagagacmacaaagcgctattacactaaggtcaataaaaatggtgtcagcctcctaaccccagcttctgttagaaatgaggacttggggatmccctgggtggcrcagcggtttggcgcctgcctttggcccagggcgtgatcctggagrcccgggatcgartcccacgtcgggctcccggtgcrtggagcctgcttctccctctgcctatgtctctgcctctctctctctctctctctctatgtgactatcataaataaataaaaattttaaaaaaaaaaaaaaaaaaaaaaaaaaaaaaaaaaaaaaaaaaaaaaaaaaaaaa

SEQ ID NO: 1470 - DNA, 1259 bp, Canis familiaris
tttagggcagaggtgggtgtccccagataagctcatcatcagagctcagtaaagtctacaaggaaggggtggaggcttgctgtttcaagaatgctaacttacttcaatcagaagggagttgaaagcaacactagcatctggaaaatgccactccacctgttccacttcccatgagactgaccactcaaccaacagcttgtcgatgcaagctgcattagggaggactcctgtgtttcatgtaacacccccctgacccttccagaagacctgagctcagggccatcccttcctcccagtgatgggcacacctaggtgcccacccccggtgataccccttactttcccacaggaattcaccttcactggagcatcaatctctttctcctcgtaaatgtgcatgttttctgcacactagccaaacgttccctcctgtttccaattatttttaacaattaagcatgcaaatgtctgagcaaaatttgttaaacttctgtgggcttttaggagggaggaaaaaaaaagatgaaccaacatgaatctgaatcatcaaagagctcttacaaaaccagcatttttgagcctttaattggaagtgaatcagaaacaggcgtgtgaaatttcccatgaaatgcacacagggttttaaaaatcaagcggggtgtgtgtgtgtgtgtgtgtgtgtgtgtgtgtccgtgtgtgtctgtgtgtgtgtgcgtgtgcagggtcagagaagagtctgggtcatacccaccccaaagtgatgggaagaaacggttaattctgatatgctctgaacccagtcttactgcctggaccaggcttatctawaacactttccagggcaaactctaagaaggcagtgaggatggctgcsttacttgtttaccacactatggacccagaaaggatatggagacccaccagtctccagaaggaagggctcagaggccgtggtgtccagaacagtaaagccatacctggatgctttcacggaggcaccctggaaaactctccacatgccagttttcctgaaatgacatgtccaggaaagtagtctgttctttctccctccccattctaggaaaagtgcagaaaatacaggtgctcctcaagttcttgacctctggggaagttctatttgcacaaagaccctatttgagcaaggttacctgtgctctttggcccaatatgctcttattgaggagaattccaaggtcagtataaggttctttatagagatagattatcaggggtggggg

SEQ ID NO: 1471 - DNA, 1625 bp, Canis familiaris
ggcacgagctgcaacgccggtacctgaggagcgatgccgagggagatcatcaccctacagttgggccagtgcggcaatcagattgggttcgagttctggaagcagctgtgcgccgagcatggtatcagccccgagggcatcgtggaggagttcgccaccgagggcactgaccgcaaggacgtctttttctaccaggcagacgatgagcactacatccccagggcagtgctgctggacctcgagccacgggtgatccactccatcctcaactccccctatgccaagctctacaacccagagaacatctacctgtcagagcatggaggaggagctggcaacaattgggccagtggattctcgcagggagagaagatccacgaagacatttttgacatcatagaccgggaggcagatggtagtgacagtctagagggcttcgtgctgtgtcactccattgctggggggacaggctctggcctaggctcctacctcttagaacggctgaatgacaggtaccccaagaagctggtgcagacatactcagtgtttcccaaccaggacgagatgagcgatgtggtggtccagccctacaactccctgctcacacttaagaggctgactcagaatgcagactgtgtggtggtgctggacaacacaaccctgaaccggatcgccacaaaccgtctgcacattcaaaacccgtccttcttccaaatcaaccaactggtgtccaccatcatgtcggccagcaccaccaccctgcgctaccccggctacatgaacaatgacctcatcggcctcattgcctcgctcattcccactcctcgactccacttcctcatgactggctacaccccgctcaccacggaccagtcggtggccagcgtgaggaagaccacggtcctggatgtcatgaggcggttgctgcagcccaagaacgtgatggtgtccacagsccgggatcgccagaccaaccactgctacatcgccatcctcaacatcatccagggggaggtggaccccacccaggtgcacaagagtctgcagaggatccgggaacggaagctggccaacktcatcccctggggccctgccagcatccaggtggccctgtcaaggaagtctccctacctgccttcggcccaccgggtcagtgggctcatgatggccaaccataccagcatctcctcgctctttgagcggacctgtcgccagtatgacaagctgcggaagcgggaggccttcctggagcagttccgcaaggaggacatcttcaaggagaacttcgacgaattggacacgtccagggaagttgtgcakcagctcattgacgagtaccatgcagccacacggccggactacatctcctggggcgcccaggagcagtgagtaccccaggatggggacctcatctgccttaccggttggcccaggccctgcctgactgaccaccccctyagagaacagatcagggacctcacatatttctttctcagaaatacactcacacgtattctgtatcggcttggggatgtgtttatgtctcctcttatgagactatttatgtttaataaagcactggacataaatcaaaaaaaaaaaaaaaaaaaaaaaaaaaaaaaaaa

SEQ ID NO: 1472 - DNA, 747 bp, Canis familiaris
  misc_feature (197)..(197): n comprises a, c, g, or t, or includes no nucleotide
  misc_feature (311)..(311): n comprises a, c, g, or t, or includes no nucleotide
tataggaccaagtgtgacaaaaaaagcagggttggtaccggtccggrattcccgggatkscygagcakgaggcgccatcatgggagtcgacatccgccacaamarggaccgaaaggttcggcgcaaggagcccaagagcsagracatctacctgagactgttggttwakctgkacagktttctggcmrgrcgwaccnmstctacctkkarccaggttgtgttgaagagkttgttcatgagtcgcaccaaccggccacctctgtcccttkcccggatgatccggaagatgwrmytgcctggccgggdwwmcnwwvmakctgtggttgtaggraccatwacggatgatgtgcgtgtycaggaggtgcccaagctgaaggtgtgtgcactgcgcgtgagtakccgtgcccggagccgcatcctcaaagctggaggcmagatcctcaccttcgatcagttggcmctggactcccctaagggttgtggcaccgtcttrctctctggtccacgcaagggccgagaggtgtacagacactttggcaaggccccaggaaccccacacagccacaccmaaccctacgtgagatccaagggccggaagttcgagcgtgccagaggccgcagggccagccgaggctayaaaaactaacccmagatcctgccttgttattaaraagattttgaatgccvaaaaaaaaaaaaaaaaaaaamamaaaaaaaaaaaaaaaaaaaaaaaaaaaaaaaaaaaaa

SEQ ID NO: 1473 - DNA, 716 bp, Canis familiaris
  misc_feature (33)..(34): n comprises a, c, g, or t, or includes no nucleotide
accgtccggattcccggatctgagcaggagccnncatcatggagtcgacatccgccacacaaggaccgaargkttcggcgcaaggagcccaagagccaggacatctacctgagactgttggttaagctgtacaggtttctggccagacgaaccmactctacctttaaccaggttgtgttgaagaggttgttcatgagtcgcaccaaccggccacctckgtccctttcccggatgatycggaagatgaractgcctgkccgggwaamyawacakctgtggttktaggaaccatwwcggatgatgtgcgtgtycaggaggtkcccaagctgaaggtgtgtgcactgsgcgtgagtarccgtgcccggakccgcatcctcaaagctggaggcaagatcctcaccttcgatcagttggcmctggactcccctaagggttgtggcaccgtcttrctctstggtccacgcaagggccgagaggtgtacagacactttggcaaggccccaggaaccccacacagccacaccmaaccctacgtgagatccaagggccggaagttcgagcgtgccagaggccgcagggccagccgaggctacmaaaactaaccccagatcctgccttgttattaaaaagattttgaatgcccaaaaaaaaaaaaaaaaaaamaaaaaaaarrraaaaaaaaaaarrraaaaaaaaaaaaaaaaaaaaaaaaaaaa

SEQ ID NO: 1474 - DNA, 397 bp, Canis familiaris
gcacgagctcttgcttcaacagtgtttggacggaacagacccagggacgccccttctaccagccaacggccaccctccaaccttttttccagtcgcwmccttcggagccatcttcctggccatcttctgccaccggcagcgaacacccaagtttgmatttaattccttgtccasgaycamccatgagctcccasattcgtcagamttmttctaccgaggtgsaggccgccgycaaccgcctggtcaacatgcacctgcgggcctcctacacctacctctctctgggcttctatytcgaccgtgacgatgtggctctggagggtgtgggccacttcttccgcgagttggctgaggagaagcgcgagggcgccgagcgtttcttgaagatgcaaaacca

SEQ ID NO: 1475 - DNA, 6806 bp, Canis familiaris
gagagagacaagatgtccgccagagctgcggccgccaagaacacagcaatggaggaaacagctatatgggaacaacacacagtgacgcttcacagggcacctggatttggatttggaattgcaatatctggtggaagagataaccctcattttcagagtggagaaacttccatagtaatttcagatgtgctgaaagggggacctgctgaaggacagctacaggaaaatgaccgagttgcaatggttaatggagtttcaatggataatgttgaacatgcgtttgctgttcagcaactaaggaaaagtgggaagaatgcaaaaattaccattcggagaaagaagaaagttcagataccagttagtcgtcctgatcctgaaccagtgtctgagaatgaagatagttatgatgaggaagtccatgacccaagaagcagccgtggtggtctggtcagtagaaggagtgagaagagttgggcaagggacaggagtgcaagcagagagaggagtttgtctccacggtctgataggcgatctgtggcctccagtcaacctcccaaacctaccaaagtcacattggtgaaatcccggaaaaatgaagaatatggtcttcgattggccagccatatatttgtaaaggaaatttcacaagatagtttggcagcaagagatggcaatattcaagaaggcgatgttgtattaaagataaatggtactgtgacagaaaatatgtcactgacagatgcaaagactttgatagaaagatctaaaggcaagttaaaaatggtagttcaaagggatgaacgggctaccctattgaatgtccctgatctttctgacagtatccactctgctaatgcttctgagagagatgatatttcagaaattcagtcactggcatcagatcattctggtcgatcacatgatagacctccccgccacagccggtcacggtcacctgaccaacgatcagagccttctgatcattccagacactctccacagcagcccagcagtggcagtctccggagcagagaggaagagagaatttctaaacctggggctgtctcaactcctgtaaagcatgcagatgatcatacacataaaacagtagaagaagttgtagttgagagaaatgagaaacaagcacccagtcttccagaaccaaagcctgtgtatgctcaagttggacaaccagatgtggatttacctgtcagtccatctgatggcgtcctacctaattcaactcatgaagatgggattctccggcccagcatgaaattggtaaaattcagaaaaggagatagtgtgggcctgcgcctggctggtggaaatgatgttggaatatttgtagctggtgttctagaagatagccctgcagccaaagaaggcttagaagagggtgatcaaattctcagggtaaacaatgtagatttcacaaacatcataagagaagaagccgtccttttcctactcgacctccctaaaggagaagaagtgaccatattggctcagaagaagaaagatgtttatcgtcgcattgtagaatcagatgtgggagattctttctatattagaacccactttgaatatgaaaaggaatctccctacggacttagttttaacaaaggagaggtgtttcgtgttgtggataccttgtacaatgggaaactaggctcttggctcgctattcgaattggcaaaaatcataaagaagtagaacgaggcatcatccctaataagaacagggctgagcagttagccagtgtacagtacacacttccaaaaacagctgggggagaccgtgctgacttctggagattccggggtcttcgcagctccaagagaaatcttcgaaagagtagagaggatttgtcagctcagccagttcaaacaaagtttccagcctatgaaagagttgttcttcgagaagctggatttctgaggcctgtaactatctttggacccatagctgatgttgccagagaaaagctggcaagagaagaaccagatatttatcagattgcaaaaagtgaaccacgagatgctggaactgatcaacgtagctctggtattattcgtcttcatacaataaaacaaataatagatcaggacaaacatgctttattagatgtaacaccaaatgcagttgatcgtctgaattatgcccagtggtatccaattgtagtattccttaaccctgattctaagcaaggtgtgaaaactatgaggatgaggctatgcccagaatctcgaaaaagtgccaggaaattatatgaacggtctcataaacttcgtaaaaataatcaccatctttttacaactacaattaacttaaattcaatgaatgatggttggtatggtgcattgaaagaagcaattcagcagcaacagaaccagttggtatgggtttctgagggaaaggcggatggtgctacaagtgatgaccttgatttgcatgatgatcgtctctcctacctgtcagccccaggtagtgaatactcaatgtatagcacggacagtagacacacttctgactatgaagacacagatacagaaggcggggcctacactgatcaagaactagatgaaactcttaatgatgaggttgggactccaccggagtctgccattacacggtcctctgagcctgtaagagaggactcctctggaatgcatcatgaaaaccaaacatatcctccttattcaccacaagcgcagccacaaccaattcatagaatagactcccctggatttaaaacagcttctcaacagaaagcagaagcctcatctccagtcccttacctttcgcctgaaacaaacccagcatcatcaacctctgctgttaaccataatgtaactttaactaatgtcagactggaggggcctaccccagctccttctacttcttactcaccacaagctgattctttaagaacaccaagcactgaggcagctcacataatgctaagagatcaagagccatcattgccgtcgcatgtagagccagcaaaggtgtatagaaaagatccctatcctgaggaaatgatgagacagaaccatgttttgaaacagccagctgttggtcacccagggcagaggccagacaaagagcctaatctgagctatgaatcccaacccccatatgtagaaaaacaggccaacagagacctcgagcagcccacatacagatacgactcctcaagctatacagaccagttttctcgaaactatgatcatcgtctccgctatgaagagcgcattcccacatatgaagagcagtggtcatattacgatgacaaacagccctaccagcctcggccttctcttgataatcagcaccctcgggaccttgactccagacagcatccagaagagtcctcagaaagagggtcttacccacgttttgaagagccagcccctctgtcctatgacagcagaccacgctatgaccagccacctagaacctctaccctacgacacgaagagcaaccaactcctggatatgacatgcataacagatacagaccagaagcgcagtcctattcttcagcaggccctaaggcatctgaaccgaagcagtattttgaccagtacccacgaagttacgagcaagtaccatcacagggattttcctcgaaagccggccactatgagcctctccatggtgctgcggttgtccctcctctaatacccgcatctcaacataagccagaagttctgccttcaaataccaaacctctgcctccacccccaactctgactgaagaggaggaagatccagcaatgaaaccccagtctgtactcactagagtaaaaatgtttgaaaacaaaagatctgcatcattggagaacaagaaggatgaaaaccacaccgctggttttaagcctccagaggtagcttctaaacctccaggtgctcccatcattggtcctaaacccactcctcagaatcagttcagtgaacatgacaaaacactgtacaggatcccagaacctcaaaaacctcagatgaagccacccgaagatattgttcggtctaatcattatgatcccgaagaggatgaagaatattatcgaaagcagctctcctactttgaccgaagaagttttgaaaacaagccttctacacacattcctgctggccatctctcagagcctgccaagccagttcattctcagaatcaaacaaacttttctagttattcttcgaagggaaagtctcctgaagctgatgcccctgatagatcatttggtgagaagcgctatgagccagtccaggccactccccctcctcccccattgccctcccagtatgcccagccttctcagcccggtaccagctcctctcttgccctccacacgcatgccaagggggcacatggtgaaggtaattcaatatcactggactttcagaattctttagtgtccaaaccagacccacctccatcacagaataagccagcaactttcagaccaccaaaccgagaagatactgttcagtctactttctatccacagaaaagtttcccagataaagctccagttaatggagctgaacagactcagaaaacggtcactccagcatataatcgattcacaccaaaaccatacacaagttctgcccggccatttgaacgcaagtttgaaagtcctaaattcaaccacaatctcctgccaagtgaaacagcacataaacctgacttgtcttcaaaagcccctgcttctcccaagactcttgcaaaagcacatagtcgagcacagcctcctgagtttgacagtggagttgaaactttctccatccatgcagataaacctaaatatcaaatgaacaatctcagcacagtgcctaaagctattcctgtgagcccgtcagctgtggaagaagatgaagatgaggatggccatactgtggtggccacagcccgaggcgtctttaacaacaatggtggggtgttgagttccatagaaactggcgtcagtatcatcatcccccaaggagccattccggagggagtcgaacaggaaatctacttcaaggtctgccgagacaacagcatcctcccccctttagataaggagaaaggtgagacactgctgagccccttagtgatgtgtgggccccatggcctcaagttcctgaagcccgtggagctgcgcttgccacactgtgcgtccatgactcctgacggttggtcttttgctctaaaatcatccgactcctcgtcgggtgatcctaaaacctggcaaaacaagtgtcttcctggagatccaaattaccttgttggagcaaactgtgtttctgtcctgattgaccacttttaattcttaaaatataggaacttgattaaataatgtgaaactgggttaaacttactaaatctaaatggaagcactctatcaagtattatactttccttagaattgatactgcagttcttagtattaagcattttgtctgaacagatgaagattagtgagcatgcccctgcaccgtggtcagaaaacatgctgcagactgcgtgtttgtgatggaaaaaccgtcagtattggctggagggtcagagatggtttgctttgtaatgatttttgtacttttttacagtcactgcttacttcactgatttccgttaaaataccagccagtaaatggggtgcatttgagttttattctttccaaagtacactgtttcaaacttgattatggccctggcttggcatacacattttattttattatgcatgaggtaatatgcacacatttaaaaaatatacctggagcatataaaccagtgtagtagatttaacagaaatgtacagcaaggggaatttgtagctttgggggggtgggggggatggtagggaagtcaagtgaagacaattacttattgtatatggaaacacatttttttagggaaggacaccaaagcatgtgagactggttctgtggcctctttggatctataaattaaccatatcaccacagacatactaaccagcaggaatgccttaccctcatatttttaattcttagatcattctctctgtgtattactaagtttatatggcttttgtgcacatctagttactgtatcatgaaaaagattgagtaaattgtggatttggtkgtttcagaaatgtataatcacccagagaaaataatggtgtgatttggggattcccccacccaccacccccaccaaggggcagtggtggtttttctgttcttttggctatgcatttgaaaattttgacattttaaggatgcttgtacataatgcgtgcataccacttttgttcttggtttgtaaattaacttttataaactttaccttttttatacataaacaaaaccgagtttcttaaggctacctttgtatttctctcctgtacctcttgagccttgaactttgacctctgcagcaataaagcagcatttctatgacacatacaaggtcattttttaaagaaaaagaatgcacagagttgttacatttttaagtgctgcatttaaaagatacagttactcagaattctctagtttgattaaattcttgcaaagtatcctgactgtaatttgtgataccatgctgtgccctaaagtgtatttttttactaatagacaatttattatggcacatcagcacgatttctgtttagataatacaccactacattctgttaatcaatcattaggtgtgactgaatttcttttgcagttattaaaaaatctcaaatttctaaatctgcggaataaaactttttaaaataaaaaaaaaaaaaaaaaaaaaaaaaaaaaaaaaaaaaaa

SEQ ID NO: 1476 - DNA, 1856 bp, Canis familiaris
caggatcctgaaaggtttyrctctrcttcytgaagacctgaacactgctccataaagccatggctggctttggattccggaggcatggggytcagccggacctggcytctaggacctggccctgcactgctctgttttctcttctctttatccccgtcttctscaaagggatgcatgyggctcagcctgcagtggttctggccagcagccggggtgttgctagcttcgtgtgtgaatatgggtcttcaggcaacgcagccgaggtccgggtgacartgctgcggcaggctggcagccagatgactgaagtctgtgccgcgacatacacagtggaggatgagttggccttcctggatgattctacctgcaccggcacctcmagtggaaacaaagtgaacctcaccatccaagggttgagggccatggrcacggggctctacatctgcaaggtggagctcatgtacccaccaccctactatgtaggcatgggaaatggaacccagatttatgtcatcgatcctgaaccttgcccagattctgacttcctcctctggatccttgcagcagtcagttcgggcttgtttttttatagctttcttatcacagctgtttctttgagcaaaatgctaaagaaaagaagccctcttaccacaggggtctatgtgaaaatgcccccaactgrgccagaatgtgaaaagcaatttcagccttattttattcccatcaattgagagatcattatgaagaagaaagaatattttccaatttccaggagctgaggcaattyyaactttgtgctatccagctatgtgtacttgtttgtatattttggggggggtttcatctctctttaatataaagctggatgcagaacccaaatgaagtgtactacaaattcaaagcaaaggtgcaagaaaacagagccaggatgtttctgtcacatcagatccaattttcgtaaaagtatcacttgggagcaatatggggatgcagcattaggacatgcgctctaggatataggttagggagtggtgcggtccaaagaaagcaaaggagagagagtcagggagaggatgatattgtacacactttgtatttacatgtgagaagtttatagctgaagtgacgttttcaagttaaatttttgtgctatgttatttttcataaatgtaaaatcacgtgaagactttaaaaatattcacatggctatattttagccagtgattccaaaggttgtattgtaccaatatatatttttttatctgatagtattatgcatgggggccacatgtgcttttgtgtatttgttgatggtttcaatataaacactatatggcagtgtcttcccaccaggggctcaggggaagttttatggagggattcaggacactaatacgccaggtaaaatacaaggtcacttggtaactggcttggaaactggatgaggtcatagttgattcttgtagacgtgttgggctaaattggtgttgacatgtgctttgggcttttatgttagctcctttcaaagatttgtaagggagtcaaaactggtatatctgatttaactccatagaacaccatcgtcaagtaaacggctcattccaggagtcttggaggtatgaacttcaaggaagctctagtttcacaagggccccaattccttgctcatggttaatgccatgggcagaaaacagcagcaggtggcagaacagggtgatgaaggtttccgaaaacaaacactgttggtgtttttttaactcactattttctgtgaaaatgcaacaacatgtataatatttttaattaaataaaaatctgtggtggtcattaaaaaaaaaaaaaaaaaaaaaaaaaaa

SEQ ID NO: 1477 - DNA, 652 bp, Canis familiaris
ggtctgkttttggtaaactttctgggagatggccaattgggttcacgatctgagggggctccttattagtctcctggactaagggggtcaaagagatcacacgtgtcatccaacgtggccaaaagctcatctggcatggtttccaggtcatctatactgaacagagtgtcaaaaatcaaactccttcagatccattttctccaccatccaatctgtcccggagaaggcatcctccttgccgttgtctgaggcactgaccaacccatccaaagccagcccattcggaggagcccgccttagccttgtcgctggagaacccatgaggtttgaagtgcttggccacctccaggtagtcgtctaagagacctaggctttcctcagcccccaaacccgactggtcgaagggggacatcaagtcccccaccaacacctcgctgctcaggaaactcatctcggccatgtcgcgggactttactggaatcgaggaatgtgcttaattcgaaggtgtctttgtcggtkacagcaacgctgctgctggatgccgtgaaaagcgycrtgscttaagccgctggggggtgccgctgcagagcctggtgctgctgccgccgctgcaaaggccactgctgccgcaggcactgctgcctctaatacg

SEQ ID NO: 1478 - DNA, 615 bp, Canis familiaris
agttatgtgaagattcttgacacttcagtaaaccttgcttggacatcaggtaccaactgcactcgctttggcattgcagccaaatatcagttggatcccactgcttccatttctgcaaaagtcacaactctagtttaattggagtgggctacactcagactctgaggcctggtgtcaagcttacactgtctgccctggtagatgggaagagcattaatgctggaggccacaaacttgggcttgccctggagttggaggcttaatccagctraaagaaacctctgggaatggttatcagaagatttggccttaatatatttccagtgtgaccagcaggcttcccctcctccctcccccaagaaggtgatcaaaacaaaggatgatctgaacaagagctgtattttaaatatttagacagttacttgttagctggtttctagttaaattggttatctatctagttaccaatactgcagtcgtgcagtcacctatacattatttaaatgtatttaactgttaaatgcgctacccaccamtmrtgmaatagacctttatgaaaactgtgccaaaaaaaaaaaaaaaaaaaaaaaaaaaaaaaaaaaaaaaaaaaaaaaa

SEQ ID NO: 1479 - DNA, 651 bp, Canis familiaris
aagggaatccgactgtgaataaaccaagcatcgcgaaggcccgcggcgggtgttgacgcgatgtgatggtctgcccagtgctcgtgaatgtcaaagtgaagaaattcaatgaagcgcgggtaaacggcgggagtaactatgactctcttaaggtagccaaatgcctcgtcatctaattagtgacgcgcatgaatggatgaacgagattcccactgtccctacctactatccagcgaaaccrcagssarrggaacgggcttggcggaatcagcggggaaagaagaccctgttgagcttgactctagtctggcacggtgaagagacatgagaggtgtagaataagtgggaggcccccggcgcscctccgtccccgcgagggggcggggcggggtccgccggccttgcgggccgccgsygaaataccactactcttatcgttttttcactgacccggtgaggcgggggggcgagccccgaggggctctcgcttctggcgccaagcgcccggccgcgccggccgggcgcgacccgctccggggacagtgccaggtggggagtttgactggggcggtacacctgtcaaacggtaacgcaggtgtcctaaggcgagctcagggaggacagaaacctcccgtggagcagaagggcaaa

SEQ ID NO: 1480 - DNA, 945 bp, Canis familiaris
gagtggttatataggtcttagccaaaacatgtgatagtcactgtaggggttcctggaaagagaagtgcatagctcagttaactggctcaagcagatctgtgaggactagaggaagaagaatgctggtggctgctttgcgctgtctgctgtggagtttccgaacctccactggccatttccctcgagcctgtgcctcctccaagagcctgatggagaaggaatgctgcccaccatggagtggtgacgggagtccctgtggccagctttcaggcaggggtgcctgtcaggacatcgtactatccaatgccccattcgggcctcagttccccttcacgggggtggatgaccgggaatcttggccttctgtcttttacaatcggacctgccagtgctttggtaacttcatgggattcaactgtggaaattgcaagtttggcttttggggacaaaactgcacagagarrcgacttttggtgagaaaaaacatctttgatttgagtgtcccagagaagracaaatttcttgcctaccttactttagcaaagcatactaccagcccagactatgtcatccccacaggtacctatggccaaatgaataatggatcaacacccatgtttaatgacatcaacatttatgatctctttgtctggatgcattattatgtgtcaagggacacactgcttggagggtcygaaatctggaaagacattgattttgctcatgaagccccaggtttcctgccttggcacacactcttcttgttgctgtgggaacaagaaatccagaagctgaccggggatgagaacttcactattccatattgggattggcgagatgctaaaagctgtgacatttgcacagatgagtacatgggagggcgcaacccagcaaaccctaacttactcagcccagcatccttcttctcctcctggcaggtaagat

SEQ ID NO: 1481 - DNA, 723 bp, Canis familiaris
ccagaaaatcgtwacamtactacagacgaccacgcagtggaccacggggcaacmcaggcctggrggaccmmwkaatgaaaccagmcccagtgttcaagaggattcagaacccttcratccagacamcccttaccaccarcaggaaggggaaagcatsacwkktgaccctagactggatcacgaaggaatctgctgtatagaatgcagacggagctacactcattgccagaagatctgtgaacccctggggggctactatccatggccttataattatcaaggttgccgatcagcctgcagagttgtcatrccttgtagctggtgggtggcccgcatyttgggtatggtgtgaaagctcagttcgtatacccggkgcttgtatcatdaawactcwagagachaccmgagtatgaggcatcttgatgctgaagggaccacmmagtattttatactcaatttcagcgatgctattcmagatacttttaacagctctcmattgcttyacagmacttcatccagaatgtgcmaatgtactgaaagggtagtttaagtctaaaatgccctaacvatccctttattactggctatttttaatttgctttgctttgccmataaggcctacttacaagactaactttccmagctactttgaaataaacatgaaaaaatcammmwrwmararaaaaaaaaaaaaaaaaaaaaawawaaaaaaaaaaaaaaaaa

SEQ ID NO: 1482 - DNA, 445 bp, Canis familiaris
  misc_feature (26)..(27): n comprises a, c, g, or t, or includes no nucleotide
  misc_feature (36)..(36): n comprises a, c, g, or t, or includes no nucleotide
attgatgcaagggtttgccggatcanngcctgctancgagttgttcatagcctttgtagcttggtgggtggcccgcatcttgggtatggtgtgaaagctcagttcgtatacccggtgcttgtatcataaaaactcaagagacaaccagagtatgaggcatcttgatgctgaagggaccacaaagtattttatactcaaatttcagcgaagctaattccagaaaactttttaccagttttccaatggctttacagaacttcatccagaatgtgcaaatgtactgaaagggtagtttaagtctaaaatgccctaacaatccctttattactggctatttttaatttgctttgctttgccaataaggcctacttacaagactaactttccaagctactttgaaataaacatgaaaaaatcamaaaaaaaaaaaaaaaaaaaaaaaaag

SEQ ID NO: 1483 - DNA, 4579 bp, Canis familiaris
gtccggctccgccgcagcatgaccgcccgccgccccgccgtcggcctcgtcctgctgctgctctgccccgcgcaggtgtttgcacagtcctgtgtatggtatggagagtgtggaattgcatctggagacaagaggtataactgccaatattcggggccaccaaaacccttgccaaaggatgggtatgacttaatgcaggagctctgtccaggattattctttgacaatgtcagcgtgtgctgtgacgtgcagcagctccggactctgaaggacagcctacagcttcccctgcagttcctgtccagatgtccatcctgtttttataacctaatgaacctgttttgcgagctgacatgtagccctcggcaaagtcagtttctgaatgttacagaaactgaagattatgttgatcctgttacaaaccagacaaaaacgaacgtaaaagaattacagtactatgtcggagagagttttgccaatgccatgtacaacgcctgccgggacgtggaggccccctccagtaatgacaaagccctgggactcctgtgtgggaaggaggccgaggcctgcaatgccaccaactggatcgagtacatgttcaataaggacaacggccaggcacctttcaccatcatacccatattttcagatcttccagcccatgggatgaagcccatgaacaatgccaccaagggctgtgacgagcctgtggacgaggtcacggcaccgtgcagttgccaagattgctcggtggtctgtggccccaagccccagcccccacccgctccggctccctggagaattttgggcctggatgccatgtatgtcatcatgtggatcacctacatggcatttttgctcatgttttttggagcattttttgctgtgtggtgctacagaaaacgctattttgtctctgagtacacccccattgatagcaacatagctttctctgtaaatgccggtgacacaggggaggcatcctgctgcgacgcacttggtgcagcatttgagggctgcctgaggcggctcttcacacagtggggctccttctgcatccgaaacccaggctgcatcatcttcttctccctggccttcattgctgcctgctcttcaggcctggtgttcagccgggtcacgaccaacccagtggacctgtggtcggcccctggcagccaggcacgcctggagaaagagtactttgatgcgcacttcgggcctttcttccgcacggagcagctcatcatccaggccccccacaccagtgtgcacacttaccagccgtacccctcaggatctgacgtgccctttgggcccccgcttgacatagggatcttgcaccaggttctagacttacaaaccgccattgaaaacatcaccgcaacttacaacaacgagactgtaacacttcaagacatctgtgtggccccgctctcaccctataacaagaactgcaccattatgagcgtgttaaattacttccagaacagccattctatgttggaccacaaaataggggatgacttctatgtgtatgcagattaccacacgcacttgctatattgtgtacgggctcctgcatctctgaatgataccagtttgctccatgatccttgcctgggtacatttggtgggccagtgttcccgtggcttgtgttaggaggctatgatgatcaaaactacaataatgctacagcccttgtgattacctttcctgtcaataattactacaatgatacagagaagctccagagggcccaggcctgggaaaaagagtttattaattttgtgaaaaactacgagaatccaaatctgaccatttctttcactactgagcgaagtattgaggatgaactgaatcgggaaagtaacggtgatgtcttcactgttctgatcagctatgccgtcatgtttctatacatttccatagccttggggcacatcaaaagctgtagcaggtttctagtggattctaaaatctcccttggcatcgctgggatcctcattgtgttgagctcagtgatgtgctcattgggcatcttcagctactttgggatccccctcaccctcatcgtgatcgaagtcatcccattcctggtgttggctgttggggtagacaacatcttcattctggtccaaacctaccagcgcgatgaacgtcttcaaggagaaactctggaacagcagctgggcagggtcctaggagaagtggctcctagtatgttcctgtcctccttttcagaggctgtagcatttttcttaggagccttgtcacagatgcccgcagtgcacactttctctctgtttgccgggatggcggtcctcattgacttccttcttcagattacctgttttgtgagtctcttggggttagaccttaagcgtcaagagaaaaatcgcctggacgtcctttgctgtctcacaggctctgaaggtggaaccggcatccaggcctcagaaagctgcttatttcggttcttcaaaaactcctactccccatttctgcttaaggattggatgcggcccattgtgatagcggtatttgtgggcattctctcattcagtatcgcagtcctgaacaaagtggagattggattggatcagtctctttcaatgccagatgactcctacatgatggattatttcaagtccctcaaatacctgcatgcaggtccccccgtgtactttgtcctcgaggaaggacacgattacacctctttggaagggcagaacatggtgtgcgggggcatgggctgcaataatgactccctggtgcagcagatcttcagcgcggctcagctggacaactatacccacataggctttgcgccctcgtcctggatcgacgattattttgattgggtcaagcctcagtcttcctgctgtagagtctacaacagcacagatcagttctgcaacgcctcagtggttgaccctgcctgcgtccgctgcaggcctctgacccaggagggcaaacggaggcctcaaggtgaagacttcatgagattcctgcccatgttcctttctgataacccaaaccccaagtgcggcaaagggggacatgctgcctacggctcagcagttaacctcgtcggcaatgacacgagtgtcggagccacttacttcatgacctaccacaccgtgcttcagacctctgctgactttactgacgccatgagaaaagccatcctcattgccagtaacatcaccaaaaccatgagccttaaaggaagccactaccgcgtgttcccgtacagtgtgttctatgtcttctacgaacagtacctgaccattattgatgacacgatctttaaccttagcgtgtcactgggagccatcttcttggtgaccttggttctcctgggctgtgaactgtggtctgcagtgatcatgtgtgtcaccattgccatgatcttggtcaacatgtttggcgtcatgtggctgtggggcatcagtctgaacgcggtttccttggtcaacctggtcatgagctgtggcatctccgtggagttctgcagccacataacgagagcgttcacagtgagtgcgaagggcagccgcgtggaacgggccgaagaggcgctctctcacatgggcagttctgtgttcagtggaatcacactaacgaaatttggagggattgtggtgttggcctttgccaaatcgcagattttccaggtttttattacaggcatgtacctggctatggtcttgctgggagccacgcacggcttgatattcctccctgtgttactcagctacataggcccatcaataaataaagccaaaagtttggcctcccaggagcgatacaaaggtacagagcgagagcagctcctgaacttctagcctctcgtgaggtttggggaccttgaactgtgtctgcgggtcggtcggtttaccactggacagtagctgctkcrtcagggcggagctggacaccagacagtaccagacaccaccagaacagctttcaacctcaggactgcaagatctgacgtgtgaarcagtattaccagaatcgggaaggcaactccaggacgctgaggggccttccggcttctccaggaacatagacccagggcaggcagaaggcgacactggcaaggctgagtgggatctgctccctgacacgtttttaaaggccacatcaatgcaatgtttttcttttgtttgtttgtttttggagtaagccatcacaacacaggttctataccatatttttagtaacatttgaggatattgtagatacactttactataacyttttgtagtttaaagagctttattaatgccataaattaactttgtacacatttttatatatataaaaaaaaacctagcaagggatttcagaatgttgtaggcctcattagagcttggtctcccaaaacctgtttgaaaaaggcaacatgttcttcacaatgttctcctataaaggaaatacagatttcatcagatgtgacgtgaaaagaggaaaacaagagaatgaacactttagggctcatagatctgtatggtgggttttaacttatttttctttcataaatactttgttttcctaaaaaaaaaaaaaaaa

SEQ ID NO: 1484 - DNA, 713 bp, Canis familiaris
gcacgagccttgtcggagctggacctggtcttgcccttccgtgtgaacttccggctgaaggggaaggatgtggtggtggacatccatcggcggcacctccgggtggggctcaagggacaaccgssggtcattgatggggagctctacaatgaggtgaaggtggaggagagctcatggctcattgaggacggcaaggtggtgacggtgcatctggagaagatcaacaagatggagtggttggacccgcttggtgtccagtgaccctgagatcaataccaagaagatcaaccctgagaactctaagctgtcagacctggacagtgagacccgcagcatggtggaaaagatgatgtatgaccagaggcagaagtccatggggctgcccacctcggatgagcagaaaaagcaggagattctgaagaagttcatggatcagcatccggagatggatttttccaaggccaaattcaactagttcctgtgtctgcctccctgaactcttggggctgagccaccagccgtccaccttcttttcctacccttccctgggacttgggggcctcaaggctggggcaggcatgggacccgctcaggcacaacggtcccagggcatcatgggagaagggctggggccttggtgggggggtgccttatcttccccagttggcctcctgttacacattaaaactatttactccaaaaaaaaaaaaaaa

SEQ ID NO: 1485 - DNA, 474 bp, Canis familiaris
gcacgagggcagctgcagcggctctcatctcttctgaccctttttgctatctccctttcgcttccggaaacatggcctctggcgtggcggtttctgatggcgtcatcaaagtgttcaatgacatgaaggtgcgtaagtcttcaacacccgaggaagtgaagaagcgcaagaaggcagttcttttctgcctgagcgaggacaagaagaacatcatcctcgaggagggcaaggagatcctggtaggtgatgtgggccagactgtagatgacccctacgccacctttgtcaagatgctaccagacaaggactgccgctatgccctctatgacgcaacctatgagaccaaggagagcaagaaggaggacctggtgtttatcttctgggcacctgagtctgcaccccttaagagcaaaatgatttatgccagctccaaggatgccatcaagaaaaagctgactgggatcaagcatgagt

SEQ ID NO: 1486 - DNA, 747 bp, Canis familiaris
  misc_feature (119)..(119): n comprises a, c, g, or t, or includes no nucleotide
  misc_feature (137)..(137): n comprises a, c, g, or t, or includes no nucleotide
  misc_feature (194)..(194): n comprises a, c, g, or t, or includes no nucleotide
caccgggacagaattcatkwtcckggmmccaggacmcmgaatgttctkggtrwraargscsgraggatccggrratkgactsytgtggtymaraagrgbytbkktttycytkaggscmntktrgagctctatkccgndarggkggccamhagaggtcyatgtgctatkgcccaggcagagtcwctgcgktmcvnmytcctaggagbccttsytgtgcrgagggcctgctatggtgtkctbcggttcatcatggagagtggggccmaaggckgtgagktcktggtgtckgggadactccgaggacagagggctarwyccatgaartttgtggatggcttgatgattcacmgtggagaccctgttaactactacgttgacaccbctgtgckccatgtgctgctcagacagggtgtgctgggcatcaaagtcwagatcatgcttccctgggaccctagtggtaagattggccctaagaagcccctgccagatcatgtgagcattgtggaacccaaggatgagatactgcccaccacccccatctcggaacmgaagggtgggaagccagagccgcctgctatgccgcagccagtacccacagcataaatagggtctccttggcagttggatctggaggctggattttactctgtgaagacctttaataaaatatttgagtaaaammmrwrrmavmamdvraaaaaaaaawaawaaaaaaaaaaaaaaraaarraaaaaaaaaaaaaaaaaa

SEQ ID NO: 1487 - DNA, 1007 bp, Canis familiaris
ggtctatataagcagagctcgtttagggaaccgtcagatcgcctggagacgccatccacgctgttttgacctccatagagacaccgggaccgatccagcctccggactctagctaggccgcgggacggataaacaatttcacacaggaaacagctatgaccattaggcctatttaggtgacactatagaacaagtttgtacaaaaaagcaggctggtaccggtccggaattcccgggatccaaaggctgtgaggtcgtggtgtctgggaaactccgaggacagagggctaaatccatgaagtttgtggatggcttgatgattcacagtggagaccctgttaactactacgttgacaccgctgtgcgccatgtgctgctcagacagggtgtgctgggcatcaaagtcaagatcatgsttccctgggaccctagtggtaagattggccctaagaagcccctgccagatcatgtgagcattgtggaacccaaggatgagatactgcccaccacccccatctcggaacagaagggtgggaagccagagccgcctgctatgccgcagccagtacccacagcataaatagggtctccttggcagttggatctggaggctggattttactctgtgaagacctttaataaaatatttgagtaaaacacgtggmavaaawaramwrwmcactatttggtctgagaattctattgcctgaagggaacattaacttggttggctgccggcctcattttccctgaaatccttggtttcagctgttgttgtgaggcaagagccagaacaggaagacccaaacagctaaccagagtaatatcctataaatctgtgtaaagtgaaggctgattgctagttggatagcaccttgattaattcacccacagtttgaggttataggtttggaagagggatatatttaagatgtttttcttttctaatgcataaagaaatcttattgcacatagaaaataaatacggtgcctattgtaaaaaaaaa

SEQ ID NO: 1488 - DNA, 682 bp, Canis familiaris
cttggtgaaaaggccggaggatycgggattgactcctgtggttcagaagaggtttggttytcctgaggscagtgtagagytctatgccgwaaaggtggccacaagaggtctatgtgctattgcccaggcagagtcactgcgttacaaactcctaggaggccttkctgtgcggagggcctgctatggtgtgctgcggttcatcatggagagtggggccaaaggctgtgaggtcgtggtgtctgggaaactccgaggacagagggctaaatccatgaagtttgtggatggcttgatgattcacagtggagaccctgttaactactacgttgacaccgctgtgcgccatgtgctgctcagacagggtgtgctgggcatcaaagtcaagatcatgcttyccctgggaccctagtggtaagattggccctaagaagcccctgccagatcatgtgagcattgtggaacccaaggatgagatactgcccaccacccccatctcggaacagaagggtgggaagccagagccgcctgctatgccgsagccagtacccacagcataaatagggtctccttggcagttggatctggaggctggattttactctgtgaagacccttyaataaaatatttgagtaaaacamrwrrmavaaaaaaaaaawaaaaaaaaaaaaaaaaaraaaagggc

SEQ ID NO: 1489 - DNA, 690 bp, Canis familiaris
gttcttggtgataaggctcggagaatccgggaatttgactgctgtggttcagaagtaggctttgttttttccttgagggcagtgtagagctctattgccgaataaggtgtccacaagaggtctatgtgctattgcccaggcagagtcactgcgttacwaactcctaggagkccttgctgtkcggagggcctgctatggtgtgctscggttcatcatggagagtggggccmaaggctgtgaggtcgtggtgtctgggaaactccgaggacagagggctaaatccmtgaagtttgtggatggcttgatgattcacagtggagaccctgttaactactacgttgacaccgctgtgcgccatgtgctgctcagacagggtgtgctgggcatcaaagtcaagatcatgcttccctgggaccctagtggtaagtattggccctaagaagcccctgccagatcatgtgagcattgtggaacccaaggtatgagatatctgcccaccacccccatctcggmacagtaagggtgggtaagccagagccgcctgctatgccgcagccagtacccacagcataaatagggtctccttggcagttggatctggaggctggattttactctgtgaagaccctttaataaaatatttgagtaaaaaaaaaaaaaaaaaaaaaaaaaaaaaaaaaaaaaaaaaaa

SEQ ID NO: 1490 - DNA, 1018 bp, Canis familiaris
attgactgctgtggttcagaagaggtttggttttcctgagggcagtgtagagctctatgccgaaagtggccacaagaggtctatgtgctattgcccaggcagagtcactgcgttacacaactctctatggaggccctttctgtgcgcgagggcctgctataggtgtgtcttcggttctatcatggagagatggggcccaagagctcgttgagggtctctggtgtcttgggagaaactccgaaggacacgaagggctataaatcccatgagaagtttgttggaatggccttgaatgagatttcaaccaggtggaagaacccctggtttaaccttactgaaccgggtgaaccacccgccttggtggcggcccattgttggccttggccttccaggaccaggggtgtgctgggcatcaaagtcaagatcatgcttccctgggaccctagtggtaagattggccctaagaagcccctgccagatcatgtgagcattgtggaacccaaggatgagatactgcccaccacccccatctcggaacagaagggtgggaagccagagccgcctgctatgccgcagccagtacccacagcataaatagggtctccttggcagttggatctggaggctggattttactctgtgaagacctttaataaaatatttgagtaaaacacgtggcacaaatagactgtccactatttggtctgagaattctattgcctgaagggaacattaacttggttggctgccggcctcattttccctgaaatccttggtttcagctgttgttgtgaggcaagagccagaacaggaagacccaaacagctaaccagagtaatatcctataaatctgtgtaaagtgaaggctgattgctagttggatagcaccttgattaattcacccacagtttgaggttataggtttggaagagggatatatttaagatgtttttcttttctaatgcataaagaaatcttattgcacatagaaaaaaaaaaaaaaaaaaaaaaaaaaaaa

SEQ ID NO: 1491 - DNA, 430 bp, Canis familiaris
gcacgagtgrykmdcgrsggttagtctcctcagcgctgcccatagcaagatgtcttcaggaaatgccaaaattgggcatcctgctcccaacttcaaagccacagctgttatgccwgwtggccagktswragacctcagcctatctgactacaaaggaaaatatgttgtattcttcttttatcctcttgacttcacctttgtgtgccccacggagatcattgctttcagtgacagggcagaagaatttaagaaactcaactgtcaagtgattggtgcttctgtggattctcatttctgwcacctggcttggatcaacacacccaagaaacaaggtggwctgggacccatgaacattcccttggtatcagaccccaagcgtaccattgctcaggactatggagtcttaaaggctgatgaaggcatctcgttc

SEQ ID NO: 1492 - DNA, 743 bp, Canis familiaris
gcacgagggaagatggcggcggccgtggcggcccgcgccgtgcccgtgtgcttccgacggctgctgtgcgcctgcagccgccgcggcccgagagccgcagggcccggagccgcttccctgggatctgcttcccaaagatttggttcacagagtacttcagttccacaagggtacgttcctaaracatcactgagttcaccaccttggccagaagttgtcctgccagacccagctgaggagaccagacaccatgcagaggtcgtggggaaggtgaacgagctgatcgccacaggccagtatggcaggctgtttgctgtggtgcacttcgccagccaccagtggaaggtgacctctgaggacctgattttaatcaacaacgaattagacattgcatgtggagagaggatacggctggagaaggtcctattggttggagctgacaacttcacgttacttggcaagccactccttggaaaggatctcgttcgagtagaagccacggtcatcgaaaagacagaatcatggcccaaaattaatatgaaatttaagaagaggaaaactacaggaagacgaaagttatcgtgaacccacagactgtccttcggataaacaccattgagatcgctccatgtttgtgctgatcctgaagctcatgtttacagaatgtaaaaataaacccctgttttctggaaaaaaaaaaaaaaaaaaaaaaaaaaaaaaaaaaaaaaaaaaaaaaaaaaaaa

SEQ ID NO: 1493 - DNA, 770 bp, Canis familiaris
gcacgagccgccaacatggtgttcaggcgtttcgtggaggttsgccgggtggcctacgtctccyttgggcctcatgccgggraactggtcgcgattgtaratgttatkratyagamcagggctttggttgatggascctgcactcaggtgaggagacagsygatgccyytcaagtgcatgcagctgactgacttcatcctcaagttccctcacagtgctcgccagaagtatgtccggcaagcctggcagaaggctgatatcmatacvaaatgggcagctacaagatggsccmagaagattgaagccmgagaaaggrargccmagatgacagactttgatcgttacmaagtcmtgaaggcmaagwaaatgaggwmcagwataatcaagcttgaagttaggaagctacmaamagcagctctcctgraagcttctccwaaawaagcacctgctgctaagggtkcggcggcagcacctgctgcmaaggttccagccmaaaaggtggctgctgcgggcmagaaggctccagcccagaaggttcctgccccraaagctgcaggccagaaagcagcacctccmaasgctcagaagggtcagaaagctccagcccagaaagcmcctgctccgaaggcatctggcmagaaggcataawaaacataagaggctgttataaataagtaataaaggttctttttgammmmwwrrmaarwrmmaaamaaaamaaaaaaaaaaaaaaaaaaaaaaaaaaaaaaaaaaaaaaaaaaaaaaaaaaa

SEQ ID NO: 1494 - DNA, 756 bp, Canis familiaris
aggcagcggtaccgtccgattccggatcgcaacatgggttaaggctttcttgaagttgccggkkggcstacgtctcccttkggcytcatgccgggaackgtcgcgattgtagatgttattgatcagracagggstttggttgatggamccygcactcaggkgaggagacaggcgatsccyttcaagtgcatgcarctgactgasktcatcctcaagttccctcacagtgctcgccagaagtatgtccggcaagcctggcagaaggctgatatcratammaaatgggcagctacaagatgggccaagaagattgaagccagagaaaggwaagccmagatgacagactttgatcgttacaaagtcatgaaggcmaagaaaatgaggracagaataatcaagctygaagttaggaagctacmaaaagcagctctcctgaaagcttctcctaaaaaagcacctgstgctaagggtgcggcggcagcacctgctgcaaaggttccagccmaaaaggtggctgctgcgggcmagaaggctccagcccagaaggttcctgccccgraagcygcargccagaaascascacctccmaaggctcagaagggtcagaaagctccagcccagraagcacctgctccgaaggcatctggcaagaaggcataaaaaacataagaggctgttataaataagtaataaaggttctttttgacmmmwwrrmaarwrmaaaaaaaaaaaaaaaaaaaaaaaaaaaaaaaaaaa

SEQ ID NO: 1495 - DNA, 728 bp, Canis familiaris
aggctttttggagttgccgggtggctacgtctcttggsctcatgccggrraactgtcgcgatkgtagakgtkattgatcagacagggctttggtktgatggascctgcactcagktgaggagacaggcgatgcctktcaagtgcatgcagctgactgacttcatcctcaagttccctcacagtgctcgccagaagtatgtccggcaagcctggcagaaggctgatatcaakacmaaatgggcagctacaagatgggccmagaagattgaagccagagaaaggaaagcchagatgacagactttgatcgttacaaagtcatgaaggcmaagaaaatgaggaacagaataatcaagcttgaagttaggaagctacmaaaagcagctctcctgaaagcttctcctaaaaaagcacctgctgctaagggtgcggcggcagcacctgctgcaaaggttccagccmaaaaggtggctgctgcgggcaagaaggctccagcccagaaggttcctgccccvaaagctgcaggccagaaagcagcacctccmaaggctcagaagggtcagaaagctccagcccagaaagcacctgctccgaaggcatctggcaagaaggcataaaaaacataagaggctgttataaataagtaataaaggttctttytgacammwwrrmaarwrmamwwaaaaaaaaaaaaaaaaaaaaaaaaaaaaaaaaaaaaaaaaaaaaaaaa

SEQ ID NO: 1496 - DNA, 573 bp, Canis familiaris
gcacgaggtttcctcctcaacagcaaactaaatatttatagtatctgaaggaagcattatatttgatggcacaaacggtagactgttatcttcttttccacctcctgcaggaagcagaataggggcagacagcacctggtaggcaggatggtttgcccctcctccctccatcccttctggaagtcctggggcctcagtgcctgcaacagctggccttaggcaaataaaagactaggttgtttactagctttgcctggagcttcatctttagaaaccagtggcaccccacatcccctgagccaaggtccctgatccaacctctctgccctcagcctagggcttccagagctgcccttcacccraaaagagggcaggggttaaaaaccagaccacagaaactgtctgggagagatggtctaatagggtccatctggagaaggggatggcagagccagtccgtgctgaccgatctgggtcccaggacacttctctacttgtctgtccaaggccaggctttgtcctaccagtctgcagccagcagccccagaaaccagaatagggatggcatagaag

SEQ ID NO: 1497 - DNA, 743 bp, Canis familiaris
  misc_feature (127)..(127): n comprises a, c, g, or t, or includes no nucleotide
  misc_feature (241)..(241): n comprises a, c, g, or t, or includes no nucleotide
  misc_feature (259)..(259): n comprises a, c, g, or t, or includes no nucleotide
ggctccagtccaagaaagacgggccctgggtctaggstgghaagggyytamcmaggatgracmcagcccaccgcacckgcckrgcgcacgttcsycbytytcgtkkgytkysggctcccvrcsgtmnbtgsmytggyctrctgctcstgkcctcscmmcccsccsybktbtgcragttcatggcytgscccgtccatccamscccckktcckskactggcctccagaccaggatcktccbnvstggctcsctctctctncbtgtccctctccacgtgtccgtytcrtcctccckstcctctstcacatbycccagctgggtccgctgtctgtggcvcggggcctctgctcagcccctacccaggcmagccccggggcagagggcagctgcccccmmgcctggacmgtcctggaggaggtcarcaggtggagacgawgcaccctgcawgcactccgcactccmaaggggagcattggccccggaaassscccagcctcccactggagccccmsccagctttcatcgtccccctctccccacgagatggctagctctcccctcccttcgccttctggcccctggtatggtgggggtttctaacgatcacacccmgcttgaggaggggctgcttstgagstcggttgttgtctttcaattmaagmamchctgtgmmmwhaaaaamaaaaaaamaaaaaaamaaaarvarvrrraaaaawraaaaraaaaaaaaaaaaaaaaarrma

SEQ ID NO: 1498 - DNA, 707 bp, Canis familiaris
  misc_feature (83)..(83): n comprises a, c, g, or t, or includes no nucleotide
gttggaagggctacaggatgacacagccaccgcacyssggcgcacgttcctccttstcgtgtgcttccggctcccaaccgkcntkggscwkgvcctgctgctcctggcctcccaccccccccyybkstgcaagttcatggcctggcccgtccatccragccccttkcctstactggcctccagaccaggatcttcctssctggctcgctctctcbccctgtccctctccacgtgtccgtstcatcctccctctcctctctcacatctcccagctgggtccgctgtctgtggcssggggcctctgctcagcccctacccaggcaagccccggggcagagggcagctgcccccmagcctggacagtcctggaggaggtcagcaggtggagacgatgcaccctgcatgcactccgcactccmaaggggagcmttggccccggaamgggcccagcctcccactggagccccagccmgctttcatcgtccccctctccccaygagatggctagctctcccctcccttcgccttctggcccctggtatggtgggggtttctaacgatcacacccagcttgaggaggggctgcttctgaggtcggttgttgtctttcaattaaagaaacmctgtgcmmawaaaaaaaaaaaaaaaaaaaaaaaaaaaaaaaaaaaaraaaaaaaaaaaaaaaaaaaaaaaaaaaaaaaaaaggg

SEQ ID NO: 1499 - DNA, 596 bp, Canis familiaris
ggctcccaccgtcttgctggcctgctgctccgggcccccacccccccccttcgcaagttcatggcctggccccgtccatccaagcccckktkcctbkactggcctccagaccaggatcttcctccctggctcgctctctctccckgtccctcgtccacgtgtccgtctcatcctccckkctcctctctcacatsctcccagctgggtccgctgtctgtggcrcggggcctctgctcagcccctacccaggcaagccccggggcagagggcagctgcccccaagcctggacagtcctggaggaggtcagcaggtggagacgatgcaccctgcatgcactccgcactccaaaggggagcattggccccggaaagggcccagcctcccactggagccccagccagctttcatcgtccccctctccccacgagatggctagctctcccctcccttcgccttctggcccctggtatggtgggggtttytaacgatcacacccagcttgaggaggggctgcttctgaggtcggttgttgtctttcaattaaagaaacactgtgcaawaaaaaaaaaaaaaaaaaaaaaaaaaaaaaaaaagg

SEQ ID NO: 1500 - DNA, 589 bp, Canis familiaris
tccggcttccaccggtcttggctggcctgctgctcgggcctcccacccaccacacttctgcaagttcatggccttggcccgtccatccaagcccctgttcctctactggcctccagaccaggatcttgcctacactggctcgctctctctcccstgtccctctgccacgtgtccgtctcatcctccctctcctctctcacatctcccagctgggtccgctgtctgtggckcggggcctctgctcagcccctacccaggcaagccccggggcagagggcagctgcccccaagcctggacagtcctggaggaggtcagcaggtggagacgatgcaccctgcatgcactccgcactccaaaggggagcattggccccssaarggsccagcctcccactggagccccagccagctttcatcgtccccctctccccacgagatggctagctctcccactccacttcgccttctggcccctggtatggtgggggtttctaacgatcacacccagcttgaggaggggctgctctctgaggtcggttgttgtctttcaattaaagaaacacctgtgcaaaaaaaaaaaaaaaaaagg

SEQ ID NO: 1501 - DNA, 536 bp, Canis familiaris
gtgttccgtggtctggcctccgagagccaggatcttcgctcccctggctcagctctctgtcccgggtccctctgccacgtgtccgtctcatcctgccctctcctctgctcacatctcccagctgggtcckctgtcttgtggcgtcggggcctctgctcagcccctakcycaggcaagtccccggggcatgagggcagctgccctccaatgtcctggacagtcctggaggaggtcatgcaggtggatgacgatgcaccctgcatgcactccgcactccaaaggggagcattggccccggaaagggcccagcctcccactggagccccagccagctttcatcgtccccctcatccccacgagatggctagctctcccctcccttcgccttctggcccctggtatggtgggggtttctaacgatcacacccagcttgaggaggggctgcttctgaggtcggttgttgtctttcaattaaagaaacactgtgcamaamaaaaaaaaaaaaaaaaaaaaaaaaaaaaaaaaaaaaaaaaaa

SEQ ID NO: 1502 - DNA, 660 bp, Canis familiaris
cagcccacagcactgcacggcgcacggtcctccttctcgtgtgcttccggctccaaccgtcctggcccttggcctgctgctccctgccgtcccacccccccgccttctggcaagttcatggccctggcccgcccatgccaagcccctttcctgtactggccctccagaccaggatcttcctcctggctcgctctctctccgtgtccctgctccacgtgtccgtctcatcctccctctccytctctcacatctcccagctgggtccgctgtctgtggcgcggggcctctgctcagccccttacccaggcaagccccggggcagagggcagctgccccccawgcctggacagtcctggaggaggtcagcaggtggagacgatgcaccctgcatgcactccgcactccmaaggggagcacttggccccggmcaagggcccagcctcccactggagccccagccagctttcatcgtccccctctccccacgagatggctagctctcccctcccttcgccttctggcccctggtatggtgggggtttctaacgatcacacccagcttgaggaggggctgcttctgaggtcggttgttgtctttcaattaaagaaacmctgtgcmawaaaaaaaaaaaaaaaaraaaaaaaaaaaaaaaaaaaaaa

SEQ ID NO: 1503 - DNA, 726 bp, Canis familiaris
ttcccacaacatgttgtgttatcatatctccgcccctcacttgatctgcaactactgggttccggtaggtgcggtgctattctgatcgcgttatgggtgcgtatttataatatccagacagttcgtctttttaaatcccgctcaagcatcgtcgtggaggacgaccgactcactcccaccttgcttttttgatcgcatccctctcagtaagaaacaccgcgcgggcgcaatgactacagtcctcgcggatctagtcgcacgagccccggcgggagcggatcacatagtctcacacgaggacacagctatgacccattgaggccatattataggtgcacacatatagacacaagtttgtcacaaaaacgcaggctggtaccggtccggaakycccgggakggcagctgcccccaagtcctggacagtcctggaggaggtcagcaggtggagacgatgcaccctgcatgcactccgcactccaaaggggagcattggccccggaaagggcccagcctcccactggagccccagccagctttcatcgtccccctctccccacgagatggctagctctcccctcccttcgccttctggcccctggtatggtgggggtttctaacgatcacacccagcttgaggaggggctgcttctgaggtcggttgttgtctttcaattaaagaaacactgtgcaaaaaaaaaaaaaaaaaaaaaaaaaaaaaaaaagg

SEQ ID NO: 1504 - DNA, 707 bp, Canis familiaris
actctacctagccgcgggacggataacattgtcacacagggaacagctatgaccattagcctattttaggtgacacctatagaacaagtttgtacaaaaaagcaggctggtaccggtccggaattcccgggatctggcctgctgctcctggcctcccaccccccccccgtctgcaagttcatggcctggcccgtccatccaagcccctttcctctactggcctccagaccaggatcttcctccctggctcgctctctctgcctgtccctctccacgtgtccgtctcatcctccctctcctctctcacatctcccagctgggtccgctgtctgtggcgcggggcctctgctcagcccctacccaggcaagccccggggcacgagggcagctgcccccacagcctggacagtcctggaggaggtcagcacggtggagacgatgcaccctgcatgcactccgcactcccaaggggagccttggccccggaaagggcccagcctcccactggagccccagccagctttcatcgtccccctctccccccgagatggctagctctcccctcccttcgccttctggcccctggtatggtgggggtttctaacgatcacacccagcttgaggaggggctgcttctgaggtcggttgttgtctttccaattaaagaaacmctgtgccaaaaaaaaaaaaaaaaaaaaaaaaaaaaa

SEQ ID NO: 1505 - DNA, 684 bp, Canis familiaris
aaagtcatggtagagttgctaggaagttacacagaggacaacgcttcccaggctcgagttratgcccmcaggtgtattgtacgagcattgaaagatccawkgcatttctctttgaccatcttctcactttaramccagtcvaatttttggaaggcgagcttattcatgatctttkaaccatttttgtgagtgctaaactggcatcatatgtcaagttttatcagaataataaagacttcattgattcacttggtctattacatgaacagaatatggccmaaaatgagactgcttactttcatgggaatggcagtggaaaataaagaaatttcttttgacacaatgcwgcaagaacttcagattggagccgatgatgttgaagcatttgttattgatgcagtaagaactaaaatggtctactgcmaaattgatcagacccagaggaaagtagttgtcagtcatagtacacatcggacatttggaaaacagcagtggcagcaactgtatgacacactaaatgcctggaaacmaaacttgaacmaagtgaaaaacagccttttgagtctttctgatacatgaatttttatgctatataaaatttggttctttttggaagaaatctaaatcatagtaaaacmaactaaaatttgamwamaaaaaaaaaaaaaaaaaaaaaaaaaaaaa

SEQ ID NO: 1506 - DNA, 702 bp, Canis familiaris
gctaggagtttgctaggaatgttacacagaggaccaacgctttctcaggctcgagttaatgcccacaaggtgttattggtacgaggcattggaaagatccaaatggcatttctcctttgaccatcttgctcacgttgaaacgcaggtcaaattttttggaaggcgagcttattcatgatctgtttgaaccagatgttgtgagtgctaaactggcatcatatgtgcaagttttatcagaataataaagacttcattgattcacttggtctattacatgacagaatatggcaaaaatgagactgcttactttcatgggaatggcagtggaaaataaagaaatttgctttgtgacacaatgcagcaagaacttcagattggagccgatgatgttgaagcatttgttattgatgcagtaagaactaaaatggtctactgcaaaattgatcagacccagaggaaagtagttgtcagtcatagtacacatcggacatttggaaaacagcagtggcagcaactgtatgacacactaaatgcctggaaacaaaacttgaacaaagtgaaaaacagccttttgagtctttctgatacatgaatttttatgctatataaaatttggttctttttggaagaaatctaaatcatagtaaaacaaactaaaatttgamkamaaaaaaaaaaaaaaaaaaamwmgagacctcgtgc

SEQ ID NO: 1507 - DNA, 825 bp, Canis familiaris
aatgccattggctattagggaccaaaggacaaggtggacaaaagcggctggaccggtcctggaattcccggggatcggcaccaatcagggtagaccgagatgggstgcgtacaagtacatcccaggagctatkgkwggrrarrrrrcaktcsgacgtcatgcgctktcwyctccgsgtgcgctkctggcartatygccagctctctgcgcyccacaggscmcvccgcccaacccggccygatwwrkcgcgcagactgggswacaaggscaagsaaggttatgtcwwatatcggattcgtgtgcrtcktggtggccgcaaacgccsagttcctaagggtgctacctatggcaagcctgtccatcatggtgttaaccagctaaagtttgcccgaagccttcagtctgttgcagaggagcgagctggacgccactgcggagctctgagagtcttgaattcttattgggttggcgaagattccacatacmaattctttgaggttatcctcattgatccattccataaagctatcagaagaaatcctgacacccagtggatcaccmaaccagtccacaaacacagggagatgcgagggctgamctctgcaggccgcaagagtcgtggccttgggaagggtcacaagttccaccacactattggtggttctcgccgtgcggcatggagaaggcgcaatactctccagctccaccgttaccgctaatataagtaatgtttgtaaaattcttacctaataaacmatttaggacagtmhwrwmwrvwwararaaaaaaaaaaaaaaaaaaaaaaaaaaaaaaaaaaaaaaaaaa

SEQ ID NO: 1508 - DNA, 825 bp, Canis familiaris
ttttttttttttttttttttttttttttttttttttttttttytytwwbywkwywdkactgtcctaaatkgtttattaggtaagaattttacaaacattacttatattagcggtaacggtggagctggagagtattgcgccttctccatgccgcacggcgagaaccaccaatagtgtggtggaacttgtgacccttcccaaggccacgactcttgcggcctgcagagktcagccctcgcatctccctgtgtttgtggactggttkggtgatccactgggtgtcaggatttcttctgatagctttatggaatggatcaatgaggataacctcaaagaattkgtatgtggaatcttcgccaacccaataagaattcaagactctcagagctccgcagtggcgtccagctcgctcctctgcaacagactgaaggcttcgggcaaactttagctggttaacaccatgatggacaggcttgccataggtagcacccttaggaactsggcgtttgcggccaccamgaygcacacgaatccgatatwwgacataaccttscttgsccttgtwscccagtctgcgcgmywwatcrggccgggttgggcggbgkgscctgtggrgcgcagagagctggcrataytgccagmagcgcacscggagrwgamagcgcatgacgtcsgamtgyyyyytyyccwmcmatagctcctgggatgtacttgtacgcascccatctcggtctaccctgattggtgccgatccccgggaattccaggaccggtccagccgcttttgtccaccttgtcctttggtccctaatagccaatggcatt

SEQ ID NO: 1509 - DNA, 1004 bp, Canis familiaris
gcaggctgtaccggtccggattcccggaatgtgcgtacaagtacatccaggagctatggaggaagaaagcagtccgacgtcatgcgctttcttctccgggtgcgctgctggcagttatcgccaagctctctgcgctccacagggccccccgcccaacccggcccgataaagcgcgcagactggggctacaaggccaagcaaaggttatgtcatatatcggattcggtgtgcgtcgtggtggcccgcaaaacgcccagttccttaagggtgctacctatggcaagccctgtccatcatgggtgttaaccagctaaaagttttgcccgaagccttcagtctgktgcagaggagcgagctggacgccactgcggagctctgagagtcttgaattcttattgggttggcgaagattccacatacrawttctttgaggttatcctcattgatccattccataaagctatcagragaaatcctgacacccagtggatcacccmaacccmgtccacmaacacagggagatgcgagggctgacctctgcaggccgcaagagtcgtggccttgggaagggtcacaagttccaccacactattggtggttctcgccgtgcggcatggagaaggcgcmatactctccagctccaccgttaccgctaatataagtaatgtttgtaaaattcttacctaataaacmmtttaggacagtcatgtctgcttaaaagtgttctttaatttgtctgttaaaattagttgtctgcagattgtccscatgaatgcattgtcaaattatgaaaagtgccaataatgtttgaagactataagtgatggtgtatcttgtttctaataagataaacgcttttgtctttgctttatcttattagggagtttatatgtcagtgtttaaaatgctgtttggtataataggtgtaaaataaattctgtaaaagtggaawrmamaaaaaaaaaaaaaaaaaaaaaaaaaaaaawaaaaawaaaaaaaaaaaa

SEQ ID NO: 1510 - DNA, 843 bp, Canis familiaris
gcacgaggtgttggtagaattcgctgctccatccgccgctcatcggtctttgcctcagccatccagactcggggaccctgtgtcctcggagctcctcctgccacctgtgcggcgcgagttcgggtaggccgagatgggtgcgtacaagtacatccaggagctatggaggwagaagcagtccgacgtcatgcgctttcttctccgggtgcgctgctggcaatatcgccagctctytgcggctccacagggccccccgcccaacscggcccgataaagcgcgcagactgggctacaaggccaagcaaggttatgtcatatatcggattcgtgtgcgtcgtggtggccgcaaacgcccagttcctaagggtgctacctatggcaagcctgtccatcatggtgttaaccagctaaagttttgcccggaagccttcagtctgttgcagaggagcgagctggacgccactgcggagctctgagagtcttgaattcttattgggttggcgaagattccacatacmaattctttgaggttatcctcattgatccattccataaagctatcagaagaaatcctgacacccagtggatcaccmaaccagtccacaaacacagggagatgcgagggctgacctctgcaggccgcaagagtcgtggccttgggaagggtcacaagttccaccacactattggtggttctcgccgtgcggcatggagaaggcgcaatactctccagctccmccgttaccgctaatataagtaatgtttgtaaaattcttacctaataaacmatttaggacagtcmmaaaaaaaaaaaaaaaaaaaaaaaaaaaaaaaaaaaaaaaa

SEQ ID NO: 1511 - DNA, 889 bp, Canis familiaris
gcctttctttctccgaggtgccgctgcctggccagtttcgccagctctctgcgctcccacagggccccccgccccaaccccgggcccggataaagcggcgcagactggggctacaaggccaagcaaggttatgtcatatatcgggattcgtgtgcgtcgtggtggccgcaaacgcccagttcctaagggtgctacctatggcaagcctgtccatcatggtgttaaccagctaaagtttgcccgaagccttcagtctgttgcagaggagcgagctggacgccactgcggagctctgagagtcttgaattcttattgggttggcgaagattccacatacaaattctttgaggttatcctcattggatccattccataaagctatcagaagaaatcctgacacccagtggatcaccmaaccagtccacaaacacagggagatgcgagggctgaccttctgcaggccgcaagagtcgtggccttgggaagggtcacaagttccaccacactattggtggttctgcgccgtgcggcatggagaaggcgcaatactctccagctccaccgttaccgctaatataagtaatgtttgtaaaattcttacctaataaacmatttaggacacgtcawrwmwrmwtaaaagtgttctttaatttgtctgttaaaattagttgtctgcacgagttgtcccactggaagccttgtccaaattaattggaaaagtgccaattaatgtttgaagactataagtgatggtgtatcttgtttctaataagataaacgcttttgtctttgctttatcttattagggagtttatatgtcagtgtttaaaatgctgtttggtataataggtgtaaaataaattctgtaaaagtggaaaaaaaaaaaaaa

SEQ ID NO: 1512 - DNA, 776 bp, Canis familiaris
cgtgtgcgccgccacgctcggtgcgcccggggaggcatgttcccccgcgggctttctgcctcggtttggagctcagcgcgtggagcggcgttggccggaccccctattgccgcccagktcagctcggctccaggcgccatggcttctcssgggagraagcggaagccgagcggcgggggtcgcggcggcggagaaacgggasaagccggcgacggcaggaaggccgtggaggaggcgacsgtcgtgatcgagcattgcacgagctgacgcgtctacgggcgcaacgccgcggccctgagccaggcgctgcgcctggagaccccggagctcccggtggaggtgaatccggccaagccccggcggggcagcttcgaggtgacgctgctgcgcccggacggcagcagtgtggagctttggactgggattaagaaggggcccccacgcaaactcaagttccctgagcctcaagaggtggtgaaggcgctgaagcagcacctttcgtagggtgtttgggcagaagtcctcgtgctgagcawatccctggtgatgttggagcatttatgacggaacatggccaaacttcagtcatgtacctgaagccatggtttcttccctccagaaatgatggttcatttgtgaggcagccctctagtaaggcaatgaaaagttcttggtttgtttaataaaarttgaaataaagtwawwwraaarwaaaaaaaaaaaaaaaaaaaaaaaaaaaaaaaaaaaaaaaaaaaaaaaaaaaaaaaaaaaaaggg

SEQ ID NO: 1513 - DNA, 754 bp, Canis familiaris
gcacgagccgcagaggcgcgccgtcgcgatgtgtgatttcaccgaggaccagaccgccgagttcaaggaggsctytcavctgttcgatcgamcaggggatgkcaagatcctgkacagsmagtgtgggsacgtgatgagggccctgggcmagaaccccacsamsgccgaggtgctcaaggtcctggggaaccccmagagcgatgagatgaatgtgaaggtkctggactttgaacacttcctgcccatgctgcagactgtggccmagaacaaggaccagggcacctatgaggactacgtcgaaggccttcgggtgtttgacaaggaagggaatggcaccgtcatgggtgctgaaatccggcacgttcttgtcacgctgggtgagaagatgacggaggaagaagtagagatkctggtggcggggcatgaggacagcmatggttgtatcaactatgaagcgtttgtgaggcatatcctgtcggggtgaccggcccatgggkcggagctcgtccgtatggtgctgaatggctgaggacgttcctggtgtgcccgagccccgtgccttcccccgtgtgagactgcatgtagccccgaaggcgtcctaggtcctcttgtcacagcacctttgccagcttgtctctcttggatatttgctatcagcagtcaccaaataaacttgctctgtgccctaaaaaaaaaaaaaaaaaaaaaaaaaaaaaaaaaaaaaaaaaaaaaaaaaaaaaaaaaaaaaaaaagg

SEQ ID NO: 1514 - DNA, 741 bp, Canis familiaris
gatcccgtgtaccagccacgtgttggggacacttgatgaagggcccttgggcccagagacccccaccttacgcccgaaggttgcttcacaaggttccttggggggacccgcacaagagagccgaattgagagagttgggaattgttgagaaaggtgtgccttggagaccttttgggaacacgctttgcgcctttgcgcccaattgcttgcacagagacctggtggccccaaggaaccaagggaacccagggccaaccctaattggagggaattaccgttccgaagggccctttccggggttgttttggaccaagggaaaggggaatggccaccccgtccatggggtgctgaaatccggcacgttcttgtcacgctgggtgagaagatgacggaggaagaagtagagatgctggtggcggggcatgaggacagcaatggttgtatcaactatgaagcgtttgtgaggcatatcctgtcggggtgaccggcccatggggcggagctcgtccgtatggtgctgaatggctgaggacgttcctggtgtgcccgagccccgtgccttcccccgtgtgagactgcatgtagccccgaaggcgtcctaggtcctcttgtcacagcacctttgccagcttgtctctcttggatatttgctatcagcagtcaccaaataacttgctctgtgccctaaaaaaaaaaaaaaaaaaaaaaaaaaaaaaaaaaaaaaaaaaaaaaaaaaaaaaa

SEQ ID NO: 1515 - DNA, 367 bp, Canis familiaris
  misc_feature (329)..(329): n comprises a, c, g, or t, or includes no nucleotide
gcacgagcgggtscmcgasgccagagccgcagcagcgcgcccgccgcccgcagccaccgcgccctcgcccgccggtcctccccgagccggtccgtgccgccgcagccgcgcagcccaccgscgccctccgsaccatgtccaccaggtctgtgtcctcgtcctcctaccgcaggatgttcggcggcccgggcaccgggagccggccgagctccacgcggagctacgtgaccacgtccacccgcacctacagcctgggcagcgcgctgcgccccagcaccagccgcagcctctacgcctcgtccccgggcggcgcgtacgccacgcgctcntccgcggtgcgcctssggagcagtgtgcccggcgtgcg

SEQ ID NO: 1516 - DNA, 734 bp, Canis familiaris
acagcttgtagtaccgtcagtgctggagacgccatccactggttggacctccatggagacccgggccggtccagcctccggacttttatcctagccgcgggcggaataacaatttcacaacaggaacagctatggaccattaaggcctatttagggtggacactatagaaacaaggtttgtacaaaaaagcaggctggtaccggtccgsamkwsscggatcgcagctagacggagctcagggcgccccgctcccgctcctgactcaccgctgttcgctgaggaacaagtcggtcaggaagccgcgccgcagccatggcgtttaaagacactgggaagacgcccgtagaaccagaggtggcgattcaccgaattagaattactctaaccagccgcaacgtaaaatccttggaaaaggtgtgtgctgacttgatcagaggtgcaaaggaaaagaatctcaaagtgaaaggaccagtgcggatgcctaccaagactctgagaatcactacgagaaagactccttgtggtgaaggttctaagacttgggatcgttttcagatgaggatccacaagcgactcattgatctgcacagtccttctgagattgttaagcagattacctccatcagtattgagcctggagtcgaggttgaagtcaccatcgcagatgcttaaatcaacctttttttaataaattgatattctgttgttaaaaaaaaaaaaaaaaaaaaaaaaa

SEQ ID NO: 1517 - DNA, 463 bp, Canis familiaris
gcacgagtggtcagcaagtgctgccccgcamgaggmttgcagctcccagcccagtgcccagccatggcgtgccccctggatcaggccattggcctcctcgtggccatcttccataagtactcgggcaaggaaggcgacaagaacactctgagcaagaaggagctgaaggagctgatccagaaggagctgaccattggcccgaagctgcaggatgctgacattgcmaagctgatggacgacctggaccgaaacaaggaccaggtggtgaacttccaggagtacgtcaccttcctgggggccttggctctgatctataatgatgccctcaagggctgagcatacagcaggaaggtggagacaccaccytccatcgggcctgcctaattcagatccagtgctgggtaactgttcaataaatacctttctttggtcaagtccaaaaaaaaaaaaaaaaaaaaaaaaa

SEQ ID NO: 1518 - DNA, 452 bp, Canis familiaris
gcacgagcggcagtctcattcctgtgtttccckcmcsasagatagacttcactgctgaccagattgaagagttcaaagaggctttctcgttgtttgaccggacaccgactggagagatgaagatcacctatgggcagtgtggagacgkrskgcgggcactgggccagaaccccaccaatgccgaggtgctgcgtgtcctgggcaagcccaagcctgaagagatgaatgccaagatgctggactttgagacgttcctgccaatcttgcagcacatctcccgcaacaaggaacagggcacctatgaggactttgtggaggggctgcgtgtgtttgacaaggagagtaatgggacagttatgggtgctgagcttcgccatgtccttgccaccctgggagagaagatgactgaggccgaagtggagcagctgttggccgggcaagaggatgccaat

SEQ ID NO: 1519 - DNA, 775 bp, Canis familiaris
catgtctggagtaacgtgttctttatatatgagagattgttttcctggtaagcatcttcatcttcctccattaggtmacgcatataatctgcaacattctgmcccatgatgtgctttcgatgwacttctgcrttgaattccttgctttctgaatcataaccagggaatcgtttggtactgtgagggatagacaggcctccgtccactgctccsttgagggccccmaaaacttkatttccagtggtagttctggcaagccctgcatccaaatagcaggtgaaggcaccaggttgaccatcaatgctttccacattgtattcatctccagtcacttccacttggccttcatagatcttgtccatgccaaatctattgaggagcctgcgggccagcagcaggccggtacaatatgctgcagcataatttgtcaggccaaccttcacaccatactttgggagttcatgagcataagccgcacmaacgatcatgtctccttctatgcgggcataagcaatctgacaaatgatatctcggttggttacacgaactatcatcctgtatttaggtgtgttgtacttatttttgtcctgaattaccaagcgtttccgggcataataatcagttttaccctctcgtcgtcttctaaatttcacttggtatctcttgaagtaagccttattcttgacaaccttaacaaaccccatcctgcggaacagagtccggcggccgcggctcaccacagaccagcaggcccagcagcgctcctcgtgccgaa

SEQ ID NO: 1520 - DNA, 479 bp, Canis familiaris
tgcaaccagtggccaccagaaagtgaggtgctccgtgggccaaaacatccttctgaaatgcactggtgtcttcatctggatggcacccactcctgtgtgtgagggacattggacgcagtctccgtgacctatggccggcgcatcccctggctgagtgggaaagccggattgcggaagtggatgccacgtgtggtgcgtgaggtctgctccaagtacttctatgaccagtgtccagcagtggctggattgggccccattgagcagctcccagasyacrascggatccgtagcggcatgttctggctgcgtttctaggcaagaaggctgtacgggcaagagggctgggccagggttcatggtccctccccaccacaaacatgccacctcggctcttcagacctgtgtgcagattaccttacctcccaataaagtcctgtgttgagaaaaaaaaaaaaaaaaaaaaaaaaaaaaaaaaaaaa

SEQ ID NO: 1521 - DNA, 2204 bp, Canis familiaris
tcttcggagctgtgcccagcagtggatgagctgctgctcccagagagcgtcgtgaactggctagacgaagactcagatgatgctcccaggatgccagccacttctgcccccacagcccctggaccggccccctcctggcccctatcatcctctgtcccttccccgaagacctaccctggcacctatgggttccgtttggggttcctgcattccgggacagccaagtctgttacttggacggtcagtggccctgcgaggcgggtttccatggggctggccggggcctggctgtggcccctgggtttctctgtttgggattttgagactcctctcggtccgcactgtcagtcttcctgcattacctatgtattctgtgacctttggcctcrgctctgtgtcaaagttgacatttccccccttgaccttgggctttcacctttcctgtcatggggcaaagggactcttcttcattttccttcacttgttcattccttggcttttaaagtaagcttctgggagatgcctgggcagctcagcagttgagcgtctgcctttggttcagggtgtgagccccaggtcctgggatcgaatcccataccacttctccctctgcctgtgtctctgcctctctctgygtgtctaaaataaagtaagcttctggaatagaccccgacccctctacttctcaccacccaccccgggcacacatgccctgacctgtccatctgtccttttcttacagtcyccyctcctcaacaagttgttttgccagctggcgaagacctgccccgtgcagctgtgggtcagctccccacccccacccaatacctgcgtccgcgctatggccatctataagaagtcggagttcgtgaccgaggttgtgcggcgctgcccccaccatgaacgctgctctgacagtagtgacggtaagccatcgggggctacagatgggacaaggctgctccccagaggcccaaagccctgattcctccccgatggctcttaggtcttgcccctcctcagcatctcatccgagtggaaggaaatttgcgggccaagtacctggacgacagawacacttttcgacacagtgtggtggtgccttatgagccacccgaggtctggtttggcatctgaggggtctctgggaggagggggctggagggatttgtgaggcgggagttgagggggctttctcctccttcarcctccccgcagccctgtgaggagtgcagaggcaggtgggtcatcccattctgcggttgggaaagactgaggctgatagactacaggcctgcccagggctgagtggcccgaccctgggcctaccttctacctcaggttggctytgactataccaccatccactacaactacatgtgtaacagttcctgcatgggaggcatgaaccggcggcccatcctcactatcatcaccctggaagactccaggtagggacctgcctgccaccctgctcctggccacttccttactgtacccccctccatccttcccatccattcctgtcccaatgtggaatctcctctgccatccgcctcccctggttttctttcctctggctttggrrcctccctgacctgtggcttctcaatagtctgtaggctttggctctacgtaggatgagggtggctaggagtcagtggggcccaccaccctcacggccccctgcttctctcttctcacctgggtagtggaaacgtgctgggacgcaacagctttgargtacgcgtttgtgcctgtcccgggagagaccgccggactgaggaggagaatttccacaagaagggggagccttgtcctgagccaccccccgggagtaccaagcggtaagcaagcaagacaagaggaggtgaaggagggacacctgggtggctcaggggttgagcatcaggcatgatcccagggtcctgggatcgagtcccgtgtcagggtccctgtagggagcctgcctctccctctgcctatttttttgcctttgtgtgtatgtctcatgaataaataaatataatcttgaaaaaaaaaaaaaaagaggaggatgtggggcagatacagagggtgcaattctgctcaaaacatactcttctcttgtcttttcctcctctctttcccagcactgcctcccagcaccagctcctctcccccgcaaaagaagaagccactagatggagaatatttcacccttc

SEQ ID NO: 1522 - DNA, 1247 bp, Canis familiaris
gctcccctgaggttcggcacccacactcccttcccaggagctcgcgatgcaagagccacagtcagagctcaatatcgacccccctctgagccaggagacattttcagaattgtggaacctgcttcctgaaaacaatgttctgtcttcggagctgtgcccagcagtggatgagctgctgctcccagagagcgtcgtgaactggctagacgaagactcagatgatgctcccaggatgccagccacttctgcccccacagcccctggaccggccccctcctggcccctatcatcctctgtcccttccccgaagacctaccctggcacctatgggttccgtttggggttcctgcattccgggacagccaagtctgttacttggacgtactcccctctcctcaacaagttgttttgccagctggcgaagacctgccccgtgcagctgtgggtcagctccccacccccacccaatacctgcgtccgcgctatggccatctataagaagtcggagttcgtgaccgaggttgtgcggcgctgcccccaccatgaacgctgctctgacagtagtgacggtcttgcccctcctcagcatctcatccgagtggaaggaaatttgcgggccaagtacctggacgacagaaacacttttcgacacagtgtggtggtgccttatgagccacccgaggttggctctgactataccaccatccactacaactacatgtgtaacagttcctgcatgggaggcatgaaccggcggcccatcctcactatcatcaccctggaagactccagtggaaacgtgctgggacgcaacagctttgaggtacgcgtttgtgcctgtcccgggagagaccgccggactgaggaggagaatttccacaagaagggggagccttgtcctgagccaccccccgggagtaccaagcgagcactgcctcccagcaccagctcctctcccccgcaaaagaagaagccactagatggagaatattycaccyttcagatccgtgggcgtgaacgctatgagatgttcaggaatctgaatgaagccttggagctgaaggatgcccagagtggaaaggagccagggggaagcagggctcactccagccacctgaaggcaaagaaggggcaatctacctctcgccataaaaaactgatgttcaagagagaagggcccgactcagactgacttcccctgcttcctgtcctcccccaacacgcacaccctcactctcgtcctcctt

SEQ ID NO: 1523 - DNA, 621 bp, Canis familiaris
aagcaggctggtaccgtccggaattcccgggatsywcgagtggaaccgccgccacagatgcagattttcgtgaagacccttacggggaagaccatcactctcgaggttgagccctcggatacmatagaaaatgtaaaggccmagattcaggataaggaaggaatccctcctgatcagcagagactgatatttgctggcaagcaactggaggatggccgtactttgtctgactacaacattcmaaaggagtccactcttcatcttgtgttgagacttcgtggtggtgctaagaaaaggaagaagaagtcttacaccactcccmagaagaataagcataagagaaagaaggttaagctggctgtcctgaaatactacaaggtggacgagaatggcmaaatcagtcgccttcgtcgagagtgcccttcagatgaatgtggtgctggagtttttatggctagccaccttcgacagacattattgtggccaatgttgtctgacctattgcttcaaccaaccagaagacaagtaattgtatatggattgataataaaagaagtgaactgataaccaaaaaaaaaaaaaaaaaaaaaaaaaaaaaaaaaaaaaaaaaaaaaaaaaaaa

SEQ ID NO: 1524 - DNA, 660 bp, Canis familiaris
  misc_feature (206)..(206): n comprises a, c, g, or t, or includes no nucleotide
gaaacaatttcacacaggaaacagctatgaccattaggcctatataggtgacactatagaacaagtttgtacaaaaaagcaggctggtaccggtccggaattcccggatcgccgccaagatgcagattttcgtgaagacccttacggggaagaccatcactctcgaggttgagccctcggatacaatagaaaatgtaaaggccaangattcaggataaggaaggaatccctcctgatcagcagagactgatatttgctggcaagcaactggaggatggccgtactttgtctgactacaacattcaaaaggagtccactcttcatcttgtgttgagacttcgtggtggtgctaagaaaaggaagaagaagtcttacaccactcccaagaagaataagcataagagaaagaaggttaagctggctgtcctgaaatactacaaggtggacgagaatggcaaaatcagtcgccttcgtcgagagtgcccttcagatgaatgtggtgctggagtttttatggctagccacttcgacagacattattgtggcaaatgttgtctgacctattgcttcaacaaaccagaagacaagtaattgtatatggattgataataaaagaagtgaactgaaaaaaaaaaaaaaaaaamwgagactagctcgtgc

SEQ ID NO: 1525 - DNA, 656 bp, Canis familiaris
aaggctctcagtaaagaaatctatamcgagatactccagccsaaaatgcacmaaaatcawaccagaatggaaaagactcawamccatcaacaccaagaacaaaggtcaagaatctttcaaaaaacaggaaaagactcccmwacaccgaaaggacctagttctgtagaagacattaaagcmaaaatgcaagcaagtatagararaggtggttctcttcccmaagtggaagccaagttcatcaattatgtgaagaattgcttccggatgactgaccaagaggctattcaagatctctggcagtggaggaagtctctttaagaaaatagtttaaacagtttgttaaaattttccgtcttctttcatttctgtaacagttgatatctggctgtcctttttataatgcagagtgagaactttccctaccgtgtctgataaaygttgtccaggttccayygccaagaatgtgttgtccaaaatgcctgtttagtttttaaagatggaactccaccctttgcttggttttaagtatgtatggaatgttatgataggacatagtagtagtggtggtcagacaaatggaaatggyggggagacaaaaatactacatgtgaaataaactcagtattttaataaarwaaaaaaaaaaaaaaaaaaaa

SEQ ID NO: 1526 - DNA, 645 bp, Canis familiaris
  misc_feature (52)..(52): n comprises a, c, g, or t, or includes no nucleotide
gaagctgaagaaaggctcttcgtaaagacatctatacgagatactccagccnaaaatgcaccaaatccaacccgaatggaaaagactcaaaccatcacaccagaacaaaggtcagaatctttcaaaaacaggwaaagactccctawacacccgaaaggacctagttctgtagaagacattaaagccaaaatgcaagcaagtatagaaaaaggtggttctcttcccmaagtggaagccacagttcatcmattatgtgaagaattgcttccggatgactgaccacagaggctattcaagatctctggcagtggaggaagtctctttaagaaaatagtttaaacagtttgttaaaattttccgtcttctttcatttctgtaacagttgatatctggctgtcctttttataatgcagagtgagaactttccctaccgtgtctgataaatgttgtccaggttccattgccgagaatgtgttgtccaaatgcctgtttagtttttaaagatggaactccaccctttgcttggttttaagtatgtatggaatgttatgataggacatagtagtagtggtggtcagacmaatggaaatggtggggagacaaaaatatacatgtgaaataaactcagtattttaataaagtaaa

SEQ ID NO: 1527 - DNA, 718 bp, Canis familiaris
atgccagctccaaggatgccatcaagttaagcttgtactgggatcaagccatgattacaascaaactgctacgaggargtcaaggaccgctgcaccctgkcagagwaactggggggcagtgccgtcatctctctggaggscaagcctttgtgagccccctccagccscctgcctggagcatctggcagccccagacctgcccatgggggttkcaggctgcccccktcctgccagaccggaggggctggggkgatcccakcagggggagggcmatcccttcaccccagttgccaamcagccccctcacmcsctggaccttcctcctccctctatscctgacggttctggctttcccraaccgcttttgatcttctgattcctcttgggttgaagcagaccaagttccccccaggcaccccagtttggggggggcctgtattttttttaacgacaccccagttcctcacctgttcctcccttttcccatgctgccaacttctaaccgcaatagtgactctgtgcttgtctgtttagttctgtgtataaatggmaygwtgtggagatgacccttccttgcgccacctggttcccctccccttttcccctggtcttggcactcatggaaacaggaccagtaagggaccttcawttaaaaaaaaaccawcaacacacacaacaawaaaaaaaaaaaaaaaaaaaaaaaaaaaaaaaaaaaaaa

SEQ ID NO: 1528 - DNA, 630 bp, Canis familiaris
gatcaagtcccagcagagcgagggtgacscrssakcctggatgggwagcggcatccmgtaccwgctagtggacatctcccaggacaacgccctgcgggatgagatgcgagccttggcgggcaaccccaaggccaccccaccccagattgtcaacggggaccagtactgtggggactatgagctcttcgtggagsctgtggamcmaaacacactgcaggagttcctgaaattgscctgagcccacykgggctccatcaccacatcccccagccaccgcccggccatgaaggaccttataactccctgttgttcctagccttctgaccttggaacctctcccctcaacccmagccccttctcctcctctctcctccattcraaggcaacattccttacccmctagtctcagaaattgtcttaagcaacagcccmagtgctggctgtcctcagccaggccctgaggctgccaccctgcctggcactggctgatgggcacctttgttggttccattaaccagggctctgcccaaggccccgcattccccgtcctgggaacaccctagagacmattaaatgtcccattccmttgaaaaaaaaaaaaaaaaaaaaaaaaaaaaaaaaaaaaaaaaa

SEQ ID NO: 1529 - DNA, 760 bp, Canis familiaris
gcacgagcatctctacaacatgatcatccgacgctactcggatgaaggagggaacatggattttgacaacttcatcagctgcctggtcaggctggatgccatgttccgtgccttcaaatctcttgacaagaatggcactggacaaattcaggtgaacatccaggagtggctgcagctgacgatgtattcctgaatgggaaccccagacctgccccctcatcgcctcgctataggagtcaccttggattcttckgtctctcccagggccgagccagtctgcagtytcgtcttcatgggtcctackgacccacaggtcttttggttcccccagcccttggcactyggcttctcagccaacagccagggcccwamakgccccwacaagccatgccccaagtwaccyckggctstgagacactctaacacaccttgtcctgagggtcacccmaccctsggcacacccatcccacacccgctccgtaacccctgtcatgcacctgtgccaaacccggtagttatgttgcttccacaccccaagggcccttctctcagtctcgggaagatcactccagtccctacacactctggcacacttgttcacagttaccaccctggcagccaaactccaggccataacaggcccgggcgccaccgtgcctttgtctgtactctgctctcagcctgccaggcccaggaggaaataaaagcaccccagttgctgctctctctaaaamaaamaamaaaaaaacaaaaaaacaaa

SEQ ID NO: 1530 - DNA, 769 bp, Canis familiaris
ctctcaaaactcgggaccaacatgttctgaactcccattcytgtkggmagaarggggtcgcgrcctggacktcgcagacchagttactmattgggtggacattcgccacaacttgaggaacgtktwgcagcacsycgtcgactgktaggaccacaacatsttgmaragctggtbggycgtcaacgacgtcwagcasgactttacgtccctctgggaagtccgtaasgtgagtgaaactcaacagggattgtatgtgrmcctgagcagcctcccttgtgacagttktcagtggaaycttgkgctcccgttgagwaacctcyttctcaacgtgkttcattgtcaggggatgagcctcatcatgggacaacgrctgtggaccmagaatggtaaatttatccacagtctccgrcacaaccgtgttgaccactatgcggraaacgaggcacaccaatcacatctcaagrttcgttgtggraatatcccacccgtcacttggtttcaggggaacatcactcgtaccggggtacacacacgtgtcgatctgaggaactcaggaccggttcggtgcaccgcgtggtctgtggtaagggacgtttggttggtgtccagtggcgagtctaagcggtagctttcgtcatgatcccaacaagtggtctctcggagtaagtgaataaaaggcggraccaatkycaaaaaraaaaaaaraaaaraaaaaamaaaaaaaaaaaaaaaaaaaaaaaaaaaaaaaaaaaaaaaaaaaaaaaaaaaa

SEQ ID NO: 1531 - DNA, 769 bp, Canis familiaris
gagagttttgagccctggttgtacaagacttgagggtaagracamccktcttyccccagcgcyggacctgmagcgtctggdtcaatgaktaacccacctgtaagcggtgttgaactccttgcamawcgtcgtgsrgcagctgacmatcctggtgttgtasaacktytcgaccavccrgcagttgctgcagwtcgtsctgaaatgcagggagacccttcaggcattscactcactttgagttgtccctaacatacacykggactcgtcggagggaacactgtcaamagtcaccttrgaacmcgagggcaactcwttggagraagagttgcacmaagtaacagtcccctactcggagtagtaccctgttgcygacacctggktcttaccatttaaataggtgtcagaggcygtgttggcacaactggtgatacgccytttgctccgtgtggttagtgtagagttcyaagcaacaccyttatagggtgggcagtgaaccaaagtccccttgtagtgagcatggccccatgtgtgtgcacagctagactccttgagtcctggccaagccacgtggcgcaccagacaccattccctgcaaaccaaccacaggtcaccgctcagattcgccatcgaaagcagtactagggttgttcaccagagagcctcattcacttattttccgccytggttamrgtttttytttttttyttttyttttttktttttttttttttttttttttttttttttttttttttttttttttttttttt

SEQ ID NO: 1532 - DNA, 943 bp, Canis familiaris
  misc_feature (71)..(72): n comprises a, c, g, or t, or includes no nucleotide
  misc_feature (309)..(309): n comprises a, c, g, or t, or includes no nucleotide
  misc_feature (469)..(470): n comprises a, c, g, or t, or includes no nucleotide
gttttttttttttttgttttcttttttgttgttttgtcttcttttttgttttctctgttcttttttctttnncaaccccggaggacacgcagaaggagtccacagacagaggcaacagccaaatggggacccaggccatcacgcgggacacggcaacacgcagcagactccccgtcccggggtcagaatccccccggcagcaccttgctctgcgagcaccgcacctcagaagccgtcatccggctcaaagggaatccggctgaggcacascaggktcacmwawmctgttctraaggatdkctgcmckdnacacamcsgtwadkgkgkshagactatgatcgagtamcgktcacagwagrmytygcgcctccccaycadkgacwddgcgcccakggacataggaggkcccgagcaggaatwtggtgtggacatcgggcctgtctgcttybkgtwhaaacccgdmycchynnvdrcacdrtccaktgccmatccagaggacccaagtactttccagtcccagtcactctagggctctgcactgaatggctgacctgacctgatgtccattcatcccacccgctcacagtgtggacttttctcccctctttctaagagacctgawctgggyagactgcmawatvwaatctcggtgttctatttatttattgtcttcctgtaagacctttgggtcgaggcagaggcmggmaacymactggtgtgagtcmmacgccscctgagtgactgtccccagcccaggcmagaagatctcccttcaggtgccgggcgcaggaactgcgtgtgtcctacacmatggtgctattctgtgtcmaacacctctgtattttttmaaacatcmmttgatattaaaammmahmaamwwawwrraaarwamvaaaaawaaaaaaaaaaaaaaaaaaaaaaaaaaaaaaaaaaaaaaarraaa

SEQ ID NO: 1533 - DNA, 585 bp, Canis familiaris
ttgcgcccaatggacatatggagggcccgagcaggaatttggtgtggacatcggcctgtcttgcttcttgtgaaaacccgtgacccgctatactacaacagatcgcagttgccaatccagaggacccaagtacgtttccagtcccagtcacgtctagggctctgcactgaatggctgacctgacctgatgtccattcatcccacaccgctcacagtgtggacttttctcccctctttctaagagacctgttactgggcagactgcaaaatgtaaatctcggtgttctatttatgttatgtgtcttcctgtaagacctttgggtcgaggcagaggcaggaaactaactggtgtgagtcaaacgccccctgagtgactgtccccagcccaggcaagaagatctccsttcaggtgccgggcgcaggaactgcgtgtgtccrtacacaatggtgctattctgtgtcaaacacctctgtattttttaaaacatcaattgatattaaaaacaaaaaaattattgggaaagtaaaaaaaaaaaaaaaaaaaaaaaaaaaaaaaaaaaaaaaaaaaaaaaaaaaaaaaaaaaa

SEQ ID NO: 1534 - DNA, 571 bp, Canis familiaris
gcctccccatctattgacattgcgcccatggacataggtagtggccccgtatcaggtaatttggtkgtgkacatcgggcctgtctgcttcttgtwwwacccgtaccctctactacacaagtkccattgccaatccagaggacccaagtactttccagtcccagtcactctagggctaytgcactgaatggctgacctgacctgatgtccattcatcccacccgctcacagtgtggacttttctcccctctttgctaagagacctgaactgggcagactgcaaaataaaatctcggtgttctatttatttatgtgtcktcctgtaagacctttgggtcgaggtcagaggcaggaaactaactggtgtgagtcaaacgccccctgagtgactgtccccagcccaggcaagaagatctcccttcaggtgccgggcgcaggaactgcgtgtgtcctacacaatggtgctattctgtgtcaaacacctctgtattttttaaaacatcaattgatattaaaaacaaaaaaattattggaaagtaaaaaaaaaawaaaaaaaaaaaaaaaaaaaaaaa

SEQ ID NO: 1535 - DNA, 734 bp, Canis familiaris
  misc_feature (145)..(145): n comprises a, c, g, or t, or includes no nucleotide
  misc_feature (238)..(238): n comprises a, c, g, or t, or includes no nucleotide
  misc_feature (249)..(251): n comprises a, c, g, or t, or includes no nucleotide
  misc_feature (442)..(442): n comprises a, c, g, or t, or includes no nucleotide
actgttctgaaggatgcgtgcacgaaacacaccggtaagtggggcaagactatgatcgagtaccggtcacagaagacctcgcgcctccccatcattgacattgcgcccatggacataggagggcccgagcagggaaatttgggtngtgggaacatccgggggccctgtctggcttttcttggtgaaaaaaacccccgaaagccccatcccttaaccgaagcacgaattccccattggncccccaaattnnngcccaggagggaaccgcccacaggtaagctgttgtcgcccaggtttccccccacgttccaccttcctaaggggccttccttgcaacttggaaattggggcccttggaaacctggaacctgaatggtcccattccatccccaaccccgcttcaacaagtggtggacttttttcttccccgtctgttctaagnagacctgaactggscagactgcaaaataaaatctcggtgttctatttatttattgtcttcctgtaagacctttgggtcgaggcagaggcaggaaactaactggtgtgagtcaaacgccccctgagtgactgtccccagcccaggcaagaagatctcccttcaggtgccgggcgcaggaactgcgtgtgtcctacacaatggtgctattctgtgtcaaacacctctgtattttttaaaacatcaattgatattaaaaacaaaaaaattattggaaagtaaaaaaaaaaaaaaa

SEQ ID NO: 1536 - DNA, 645 bp, Canis familiaris
cggttctgaaggatggctgcactgttaccacacccggtaagtggggcaagaactatgatcgagtaccggtcacaagaagacctcgcgctctccccagtcattgacattgcgccccatggacataggagggcccgagcaggaatttggtgtggacatcgggcctgtctgcttcttgtaaaaacccgaacccaccttatctatcacaatccacttgcccatccacgaggacccacagtacttgtccagtcccagtcactctagggctctgcactgaatggctgacctgacctgatgtccattcatcccacccgctcacagtgtggacttttctcccctcttttctaagagacctgaactgggcagactgcaaaataaaatctcggtgttctatttatttattgtcttcctgtaagacctttgggtcgaggcagaggcaggaaactaactggtgtgagtcmaacgccccctgagtgactgtccccagcccaggcaagaagatctcccttcaggtgccgggcgcaggaactgcgtgtgtcctacacmatggtgtctagttctgtgtcaaacacctctgtattttttaaaacatcaattgatattaaamaccacmaaaattattggaaarwaacaaaaaaaaaaaaaaaa

SEQ ID NO: 1537 - DNA, 498 bp, Canis familiaris
aatttggtgtggacatcgggcctgtctgcttcttgtcatacccggacccacgagccacccatgcccttgccagtcccgaggaccccagtactttccagtcccagtcacttctagggctctgcactgaatggctgacctgacctgatgtccagtcatcccacccgctcacaagtgtggacttttctcccctctttctaagagacctgaactgggcagactgcmaaataaaatctcggtgttctatttatttattgtcttcctgtaagacctttgggtcgaggcagaggcaggaaactaactggtgtgartccaaacgcccccctggaggkgackgtcccccagcccaggcaagaagatctcccttcaggtgccgggcgcaggaactgcgtgtgtcctacacaatggtgctattctgtgtcaaacacctctgtattttttaaaacatcaattgatattaaaaacmaaaaaattattggaaarwaaaaaaaaaaaaaraaa

SEQ ID NO: 1538 - DNA, 4986 bp, Canis familiaris
  misc_feature (4340)..(4340): n comprises a, c, g, or t, or includes no nucleotide
  misc_feature (4500)..(4500): n comprises a, c, g, or t, or includes no nucleotide
  misc_feature (4504)..(4504): n comprises a, c, g, or t, or includes no nucleotide
gccaggccccgcggtgagccatgatccgcctcggggctccccagacgctggtgctgctgacgctgctcgtcgccgctgtccttcggtgtcacggccaggatgtccagaaggctggcagctgtgtgcaggacgggcagaggtataatgataaggatgtgtggaagcccgagccctgccgaatctgtgtctgtgacactgggactgtcctctgcgacgacataatctgtgaagacatgaaagactgcctcagccccgagacccccttcggagagtgctgtcccatctgctcaactgacctcgccactgccagtgggcaaccaggaccaaagggacagaaaggagaacccggagacatcaaggatatcgtaggacccaaaggacctcctgggcctcagggacctgcaggtgaacaaggacccagaggtgatcgtggtgacaaaggtgawaaaggcgcccctggacctcgtggcagagatggagagcctgggacccctggaaatcctggcccccstggtcctcctggcccccctggccaccmctggccttggtggaaactttgctgcccagatggctggaggatttgatgagaaggctggtggcgcccagatgggggtgatgcaagggccaatgggccccatgggacctcgaggacctccaggccctgctggtgctcccggacctcaaggatttcaaggcaaccctggggaacctggggaacccggcgtctctggtcccatgggtccccgtggtcctcctggcccccctggaaaacctggtgatgatggcgaagctggaaagcctgggaaatctggtgaaagaggccctcctggccctcagggtgctcgcggcttcccgggaaccccaggccttcctggcgtcaagggtcacagaggctacccaggtctagatggtgctaagggagaagccggtgctccaggtgtgaagggagagagcggttcaccgggtgagaatggttctccaggcccaatgggtccccgcggcctgcccggagagagaggacggaccggtcctgctggtgctgcgggcgcccgggggaacgatggccaaccaggccccgcgggccctccgggtcctgtaggtcctgccggcggtcctggcttccctggtgctcccggcgccaagggggaagctggccccactggcgcccgaggtcccgaaggcgctcaaggtcctcgcggcgagcctggcactcctgggtcccccgggccggctggtgcctctggtaaccccggaactgacggaattcctggagctaaaggatctgctggcgctcctggcatcgctggcgcccccggcttcccggggccccgtggtccacctggccctcaaggtgcgactggtcctctgggcccgaaaggtcagacgggcgaacctggaattgctggcttcaaaggcgaacaaggccccaagggcgagcccggccctgctggcccccaaggagcccccggtcctgctggtgaagaaggcaaacgaggtgcccgtggagagcctggtggcgctgggcccgttggtccccccggagaaaggggggctcctggcaaccgcggtttcccaggtcaggatggtctggcaggtccaaagggagcccccggagagcgtgggcccagcggccttgctggtcccaagggagctaatggggaccctggccgtcccggagagcctggccttcctggagcccggggtctcactggtcgccctggcgatgctggtcctcaaggcaaagtcggtccttctggagcccctggtgaagatggtcgccccggacctccaggtcctcagggcgctcgtgggcagcctggtgtcatgggtttccctggtcccaaaggtgccaacggcgagcctggcaaggctggtgagaagggacttcccggtgctcctggtctgagaggtcttccaggcaaagatggtgagactggtgctgcaggaccccccggacctgctggacctgccggtgaacgaggcgagcagggtgctcctgggccatctgggttccagggacttcctggccctccgggtcccccaggcgaaggtggaaaaccaggtgaccagggtgtccctggtgaagcgggagcccccggcctcgtgggtcccaggggtgaacgaggcttcccaggcgaacgtggctctcccggcgcccagggcctccaggggccccgtggcctccccggcactcctggcacagacggtcccaaaggcgcatctggcccggctggcccccctggggctcagggccctccaggtctgcaggggatgcccggtgagaggggcgcggctggcatcgccgggcccaaaggagacaggggagacgttggtgagaaaggccccgagggagcccctggaaaggacggaggacgaggcctgactggtcccattggcccccctggccccgctggcgccaatggtgagaagggagaagttggacctcctggtcctgcaggaaccgctggtgctcgtggcgccccgggtgaacgtggagagactggaccccctgggcccgctggattcgcaggtcctcccggtgctgatggccagccgggtgccaaaggcgagcaaggagaggccggccagaaaggcgatgctggtgccccaggtcctcagggcccctctggagctcctgggcctcagggtcctactggtgtgactggtcctaaaggagcccgaggtgctcaaggccccccgggagccaccggattccctggagctgctggccgcgtcggacccccaggctccaatggaaaccctggaccccctggtccccctggtccttctggaaaagatggtcccaaaggcgctcgaggagacagcggcccccctggccgcgctggtgaccctggtctccaaggtcctgctggaccccctggcgagaagggagagcctggagatgatggtccctctggtcccgatggtcctccaggtccccagggtctggccggtcagaggggcatcgttggtctacctgggcagcgtggtgagagaggattccctggcttgcccggcccatcgggtgagcccggcaagcagggagctcctggtgcatctggagaccgaggccccccaggccccgtgggtcctcctggtctgactggtccttctggtgaacctggacgagagggcagccccggtgctgatggtcctcctggcagagatggcgcagctggagtcaagggtgatcgtggtgagactggtcccgtgggtgctcctggagcccctgggtcccctggctctcctggccccgctggcccaactggaaagcagggagaccgaggagaagctggtgcacaaggtcccatgggtcctgcaggaccggctggagcccggggaatcccaggccctcaaggtccccgaggtgacaaaggagaagctggagaggctggcgagaggggactgaagggacaccgtggcttcactggtctgcagggactgcccggccctcctggtccttctggagatcaaggtgcttctggccctgctggtccttctggccctagaggtcctcctggtcccgtcggtccctctggcaaagatggtgctaacggaatccctggccccatcggacctcctggtccccgtggacgttcaggcgaaactggccctgctggtcctcccggaaaccccggaccccctggccctccaggtccccctggccctggcatcgacatgtctgcctttgctggcctgggccagagagagaagggccccgaccccctgcagtacatgcgggctgaccaggcggccggcgacctgagacagcatgatgccgaggtggacgccacgctcaagtccctcaacaaccagattgagagcatccgcagccccgagggctcccgcaagaaccccgctcgtacctgccgggacctgaaactctgccaccctgaatggaagagcggagactactggattgaccccaaccagggctgcaccttggatgccatgaaggttttctgcaacatggagactggcgagacgtgcgtctaccccaacccagcgagcgttcccaagaagaactggtggagcagcaagagcaaggacaagaaacatatctggtttggagaaaccatcaatggtggcttccacwtcagstacggtgrwgacaacctggctcccaacactgccracgtccagatgaccttcctccgcckgctgtccaccgagggctctcagaatatcacctaccactgcaagaacagcattgcctacctggacgaagcagccggcaacctcaagaaggccctgctcatmcagggctccmawgabgkggaratcsggsytgaggscaacavcaggkycamawakasygttckgaaggatkgctgcwcgrnmcmcamcsgtaadtgggscmagactatgatcgaktaccggtcacagaagacytcgcgcctccccatcatkgacmttgcgcccatggacataggagggcccgagcaggaattwggtgtggacatcgggcctgyctgcttytygtrwwaacccgdwccchcnwacnwcacmdyccmttgccvatccagaggacccmagtactttccagtmccagtcactctagggctctgcactgaatggctgacctgacctgatgtccattcakcccacccgctcacagtgtggacttttctcccctctttytaagagacctgaactgggcagactgcmaratdraatctyggtgttctattwawwwawwrtcttcctgtaagaccyttgggtcgrggcmsaggcmggaaacthacyggtgtgagtcmaacgcccccygagtgactgtccccagcccaggcawgaagatctcccttcaggtgccgggcgcaggaactgcgtgtgtccwacachatggtgctattctgtgtcmaacmcctctgtatttyttaaaacatcmaytgatattaaamammmaaaaawwmwdrraaarhamvaaaaaaaaaaaarraaaaaaaaaaaaaaaraaaaaaaaaaaaaaaaaaaaaaaaaaaaaaa

SEQ ID NO: 1539 - DNA, 676 bp, Canis familiaris
cgcgacctggacgttcgcagacccaagtttactaattggggtggacaattcgccacaaccttgaggaacgttttgcagccaacgtcgtcgactggtaggaccaacaaacaaccttgaaagaagcctggtgggycgtcaaasgaacgtccaagccacgacttttacgtccctcttgggaagtccgtaaggtgagktgaaactcaacagggattgtatgtggacctgagcagcctcccttgtgacagttgtcagtggaatcttgggctcccgttgagwaacctccttctcaacgtgtttcattgtcakgggatgagcctcatcatgggacaacgactgtggaccaagaatggtaaatttatccacagtctccgacacaaccgtgttgaccactatgcggraaacgaggcacaccaatcacatctcaagattcgttgtggaaatatcccacccgtcacttggtttcaggggaacatcactcgtaccggggtacacacacgtgtcgatctgaggaactcaggaccggttcggtgcaccgcgtggtctgtggtaagggacgtttggttggtgtccagtggcgagtctaagcggtagctttcgtcatgatcccaacaagtggtctctcggagtaagtgaataaaaggcggaaccaatgtcaaaaaaaaaaaaaaaaaaaaaa

SEQ ID NO: 1540 - DNA, 676 bp, Canis familiaris
gcgctggacctgcaagcgtctgggttcaaatgattaaccccacctgttaagcggtgttggaactccttgcaaaacgtcggttgcagcagctgaccatcctggttgtttgttggaactttcttcggaccacccrgcagtttscttgcaggttcggtgctgaaaatgcagggagaacccttcaggcattccactcmactttgagttgtccctaacatacacctggactcgtcggagggaacactgtcaacagtcaccttagaacccgagggcaactcwttggaggaagagttgcacaaagtaacagtmccctactcggagtagtaccctgttgctgacacctggttcttaccatttaaataggtgtcagaggctgtgttggcacaactggtgatacgccytttgctccgtgtggttagtgtagagttctaagcaacacctttatagggtgggcagtgaaccaaagtccccttgtagtgagcatggccccatgtgtgtgcacagctagactccttgagtcctggccaagccacgtggcgcaccagacaccattccctgcaaaccaaccacaggtcaccgctcagattcgccatcgaaagcagtactagggttgttcaccagagagcctcattcacttattttccgccttggttacagtttttttttttttttttttttt

SEQ ID NO: 1541 - DNA, 793 bp, Canis familiaris
  misc_feature (302)..(302): n comprises a, c, g, or t, or includes no nucleotide
  misc_feature (313)..(313): n comprises a, c, g, or t, or includes no nucleotide
  misc_feature (318)..(319): n comprises a, c, g, or t, or includes no nucleotide
  misc_feature (323)..(323): n comprises a, c, g, or t, or includes no nucleotide
  misc_feature (334)..(334): n comprises a, c, g, or t, or includes no nucleotide
  misc_feature (702)..(702): n comprises a, c, g, or t, or includes no nucleotide
accagtttgaccaaaagcagctgtccgtccggattccgggagtccgcaaacctcaagaagcccctgctcatccaggggctcccawkratgtggarathcsgggcygagsgchmcarcrggttcacawakackgttytgaagkawgsctgcacgrdrcacmmsgbwaakkkggscaaracwatgatcgagtaccgktymcagdagacmtcgcgcctccccatcakkgachkbgcscccmtggacataggagggcycgascmggaatttggtktggacatcggscctgtctgcttcttgthwwnaccsgdvyccnhddvnncmcndyccmtkgccnatccagaggacccaagtacttkscagkcccagtcactctaggkctctgcactgaatggctgacctgacctgatgtccattcatcccacccgctcacagkgtggacttttctcccctctttctaagagacctgaactggscagactscvaaataaaatctcggtgttctatttatttattgtcttcctgtaagacctttgggtcgaggcagagscmggmmactaactggtgtgagtchaacgccccctgagtgactgtccccagcccaggcaagaagatctcccttcaggtgccgggcgcaggaactgcgtgtgtcctacachatggtgctattctgtgtcwaacacctctgtatttytwmmaacatcnmttgatattaaaaammaaaaaawwawwrraaavwmmawahwmaaraaaaaaaaaaaraarraaaaaaraaaaaaaaaaaaaaaaaaaaaaa

SEQ ID NO: 1542 - DNA, 650 bp, Canis familiaris
gcttacggtgatgacacctggctcccaacactgccaacgtccmgatgaccktcctccgcctgctgtccmccgagggctctcagaatatcmcctaccmctgcmagwacagcmttgcctacctggacgaagcmgccggcmacctcmagaaggccctgctcatccagggctccmatgatgtggagatccgggctgagggcmacagcaggttcacatatactgttytgaaggatggctgcacgawacacaccggtaartggggcmagactatgatcgagtaccggtcacagaagacctcgcgcctccccatcattgacmttgcgcccawggacataggagggcccgagmmggaatttggtgtggacatcgggcctgtctgcttcttgtaaaaacccgaacccmcmaacmacacmatccmttgccmatccmgmggacccmagtactttccmgtcccagtcactctagggctctgcactgaatggctgacctgacctgatgtccattcatcccmcccgctcacagtgtggacttttctcccctctttctaagagacctgaactgggcagactgcmaaataaaatctcggtgttctatttaaaaaaaaaaaaaaaaaaaaraaaaaaaaaaaaaaaaaaaarrrmamaaaaaaaaaa

SEQ ID NO: 1543 - DNA, 750 bp, Canis familiaris
tacctgtttctgaaagggattggccttgcaccggaaaccaacaaccgggtaaagctgggggccaaagaacttatgaattccgaagtaccgggttcaaccaggaagaccttcggcgctctcccccccattcattggaccatgtgcggcccaatgggaacaataggaaggggcccccgaagccaaggaaaaatttttggttggtgggaaccaattcgggggccgtgttcctggccgttctttggtgagaaaccccggtaacccctcccacctaccaccaatccaattgcccaatcccaagagggaccccaaggaaccttcccaagtccccagtcacttttaggggctctgcacctggaatggctgaccctggacctgaatggcccattcatccccacccggttccaccagtttgggactttttcttccccttcgtttttaaggaggaaccttgaactgggccagactgscaaaataaaatcctcggtgttctattwatttattgtcttcckgtaagacctttgggtcgaggcagaggcaggaaactaactggtgtgagtcaaacgccccctgagtgactgtccccagcccaggcaagaagatctcccttcaggtgccgggcgcaggractgcgtgtgtcctacacaatggtgctattctgtgtcaaacacctctgtattttttaaaacatcamttgatattaaaaacaaaaaaattattggaaagtamaaaaaaaaaaaaaaaaaaaaaaaa

SEQ ID NO: 1544 - DNA, 689 bp, Canis familiaris
atccgcctgagggcaacagccaggttcacatatactgttctgaaagtatggctgcacgwacacaccggtaagtggggssagactatgatcgagtaccgtcwcagwagacctcgcgcctccccatcattgacattgcgcccatggacataggagggcccgagcaggaatttggtgtggacatcgggcctgtctgcttctttgtaaraacccgaacccackwacgtacacaatccmyttgccmatccagaggacccmagtactttccagtcccagtcactctagggctctgcactgaatggctgacctgacctgatgtccattcatcccacccgctcacagtgtggacttttctcccctctttctaagagacctgaactgggcagactgcmaaataaaatctcggtgttctatttatttattgtcttcctgtaagacctttgggtcgaggcagaggcaggamactaactggtgtgagtcmaacgccccctgagtgactgtccccagcccaggcmagaagatctcccttcaggtgccgggcgcaggaactgcgtgtgtcctacacmatggtgctattctgtgtcaaacacctctgtattttttaaaacatcmattgatattaaaaaccaaaaaaattattggaaarwaaaaaaaaaaaaaaaamaaaaaaaagaaagaaaaaaaaggtcggc

SEQ ID NO: 1545 - DNA, 696 bp, Canis familiaris
tgagggcaacagcagggtcacatatactgttctgaaggatggctgctcggtacaccccggtaagtggggcacagactatgatcgagtaccggtcaccgaagacctccgcgcctccccactcattgacmttgcgcccmtggacataggagggcccgagcmggaatttggtgtggacatcgggcctgtctgcttcttgtaraaacccgkacccycctrwcacacsatccsttgcccatccacgaggaccccagtactttccmmgtccccgtcactctagggctctgcacctgaatggctgacctgacctgatgtccmttcatcccacccgctcacmgtgtggacttttctcccctctttctaagagacctgaactgggcagactgccaaataaaatctcggtgttctatttatttattgtcttcctgtaagacctttgggtcgaggcagaggcmggaaactaactggtgtgagtcmaacgccccctgagtgactgtccccmgcccmggcmagaagatctcccttcaggtgccgggcgcmmggaactgcgtgtgtcctacaccatggtgctattctgtgtccaacacctctgtattttttaaaacatccattgatattaaaaaccmaaaaattattggaaagtammmaaaaaaaaaaaaaaaaaaaaaaaaaaaaaaaaaaaaaaaaaaaaaaaaaaaa

SEQ ID NO: 1546 - DNA, 598 bp, Canis familiaris
aggattccctggcttgcccggcccatcgggtgagcccggcaagcagggagctcctggtgcatctggagaccgaggccccccaggccccgagcaggaatttggtgtggacatcgggcctgtctgcttcttgtaaaaacccgaacccacmaacaacacaatccattgccaatccagaggacccaagtactttccagtcccaggtcactctagggctctgcactgaatggctgacctgacctgatgtccattcatcccacccgctcacagtgtggacttttctcccctctttctaagagaccgtgaactgggcagactgcaaaataaaatctcggtgttctatttatttacttgtcttcctgtaagacctttgggtcgagscagaggcagcgaaactaactggtgtgagtcaaacgccccctgagtgactgtccccagcccaggcaagaagatctcccttcaggtgcccgggcgcaggaactgcgtgtgtcctacacaatggtgctattctgtgtcaaacacctctgtattttttaaaacatcaattgatattaaaaacaaaaacaattattggaaagtaaaaaaaaaaaaaaaaaaaagc

SEQ ID NO: 1547 - DNA, 544 bp, Canis familiaris
catggaccataggaggggcccgagccaggaagtttggttgtggacactcgggccctgttctgctttcttgtaaaaaccccgaaccccaccttacgacacaatccattgccaatccagaggacccaagtactttccagtcccagtcactctagggctctgcactgaatggctgacctgacctgatgtccattcatcccacccgctcacagtgtggacttttctcccctctttctaagagacctgaactgggcagactgcaaaataaaatctcggtgttctatttatttattgtcttcctgtaagacctttgggtcgaggcagaggcaggaaactaactggtgtgagtcaaacgccccctgagtgactgtcccccaaggcccccaggcaagaagatctcccttcaggtgccgggcgcaggaactgcgtgtgtcctacacaatggtgctattctgtgtcaaacacctctgtattttttaaaacatcaattgatattaaaaacaaaaaaattattggaaagtaaaaaaaaaaaaaaaaaaaaaaaaaa

SEQ ID NO: 1548 - DNA, 421 bp, Canis familiaris
gcacgaggcgagtgggagcagccggcgcgggctcgcagcggaactcctcgggtcgctctaagaacatggcagacaagccagacatgggggaaatcgccagcttcgataaggccaagctgaagaagacggagacgcaggagaagaacaccctgccgaccaaagagaccattgagcaggagaagcggagcgagatttcctaagaacctacaggatcccccacccccgtcatcttcgagacaccccagtcgtgatgtggaggaggaagagccacctgcaagatggacacgagcgacaggctgcactgtgaacccgggcactccgcgccgacgccaccggccttgcgggtctctgaggggacccccccaatcggactgccaaattctccggtttgccctgggatattatagcaaattatttgtat

SEQ ID NO: 1549 - DNA, 629 bp, Canis familiaris
  misc_feature (23)..(23): n comprises a, c, g, or t, or includes no nucleotide
tagctagccgcgggacgataacnatttcacacaggaaacagctatgaccattaggcctatttaggtgacactatagaacaagtttgtacaaaaaagcaggctggtaccggtccggaattcccgggatggcccgtggcgccggcaggatgggcaagtgtcgcggcctccgtacsgcccggaagctccgcagccaccggcgggaccagaagtggcatgataagcagtacaagaaggcccacctgggcacggcgctgaaggccaaccccttcgggggcgcttcccacgcgaagggaatcgtgctggagaaggtgggggttgaagccaaacagccaaattctgccatcaggaagtgcgtccgggtccagctgatcaagaacggcaaaaagatcacagcctttgtacccaatgatggttgtttgaactttattgaggaaaatgatgaggttctgktggctggatttggtcgtaaaggtcatgctgtcggtgacattcctggagttcgctttaaagtggtcaaagtagccaatgtctctctcctggccttgtacaaggcaagaaggaaagaccaagatcataagttttggtggtaaaaacaggacaataaattttcatataccaaaaaaaaaaaa

SEQ ID NO: 1550 - DNA, 741 bp, Canis familiaris
gcacgagagcgccgagagcgatgggcatctctcgggacaactggcacaagcsccgcmagaccsggggcmagaggaarscytaccaymrraarcggaagtatgagcygggacgccccgcgsccmacactaagatkgscccccsccgcatacacacagtacgagtccggggaggcmataagaagtaccgagcyttgaggctaracgyggggaacttctccykgggctcggagtgttgtacacgcmaaaccaggattatcgawgttgtctawaadgcatccmacmatgaactggtccgcaccaagmmcctggkgaagaactgtatcgkgctcattgacagcacmccgtaccgacagkggtacgagtcccmctacgcactgcccctgggacgcaagaagggggccaagctgacgcctgaggaggaagagattttaaataaaaaacgatcmaagraaatccagaagaagtatgatgaaaggaamaagaatgccmaaatcagcagtcttctggaggagcagytccamcagggcaagcttcttgcatgcatcgcttcgagaccaggccagtgcggccgggcagatggctatgtgctagagggcaaggagctggagttctatctgaggaaaatcmaagcccggaaaggmaaataaatyttctgtcytcgstcatgtaawaaarrwrwwwawtstkmhddhvwddraaaaaaaaaaraaarraaaaaaaaaaaaaaaaaamaaaaaaaaa

SEQ ID NO: 1551 - DNA, 741 bp, Canis familiaris
tttttttttkttttttttttttttttttyytttyttttttttttyhhwbdhhdkmasawtwwwywyytttwttacatgascgargacagaaratttatttkcctttccgggcttkgattttcctcagatagaactccagctccttgccctctagcacatagccatctgcccggccgcactggcctggtctcgaagcgatgcatgcaagaagcttgccctgktggarctgctcctccagaagactgctgatttkggcattcttkttcctttcatcatacttcttctggatttycttkgatcgttttttatttaaaatctcttcctcctcaggcgtcagcttggcccccttcttgcgtcccaggggcagtgcgtagkgggactcgtaccmctgtcggtacggkgtgctgtcaatgagcmcgatacagttcttcmccaggkkcttggtgcggaccagttcatkgtkggatgchttwtagacaacwtcgataatcctggtttkgcgtgtacaacactccgagcccmrggagaagttccccrcgtytagcctcaargctcggtacttcttatkgcctccccggactcgtactgtgtgtatgcggsgggggscmatcttagtgtkggscgcggggcgtcccrgctcatacttccgyttyykrtggtargsyttcctctkgccccsggtctkgcggsgcttgtgccagttgtcccgagagatgcccatcgctctcggcgctctcgtgc

SEQ ID NO: 1552 - DNA, 793 bp, Canis familiaris
gggcaggtggccaaaccggctgtccggtcggattccggatcgcgcccggagccatggcattttcggaccactgccacaacggcgcagaccgggggccagagaagccyctcccmcaagdmcggrrbtatgagctkggacgccccscggscaacmctaagaktggccsccgccgcatacacacagtacgagtccggggaggshataagaagtaccgagccbtgaggctagacktggggaacttctcctggggctcggagtgttgtacacgcmaaaccaggattatcgatgttgtctataawgcatccracaatgaactggtccgcaccmagaccctggtgaagaactgtatcgtgctcattgacagcacaccgtaccgacagtggtacgagtcccactacgcactgcccctgggacgcaagaagggggccaagctgacgcctgaggaggaagagattttaaataaaaaacgatcmaagaaaatccagaagaagtatgatgaaaggraaaagaatgccmaaatcagcagtcttctggaggagcagttccmacagggcaagcttcttgcatgcatcgcttcgagaccaggccagtgcggccgggcagatggctatgtgctagagggcaaggagctggagttctatctgaggaaaatcmaagcccggaaaggcmmataaatyttctgtcttcggtcatgtaataaaggtgtttattgtychrwvhwrhrwhmmaaaaaaaaamwaaaaaaaaaaaaaaaaaaaaaaaaaaaaaaaaaaaaaaaaaaaaaaaaaaaaaa

SEQ ID NO: 1553 - DNA, 726 bp, Canis familiaris
gatccagcgccgagacgatggcatctctcgkgacaactggcacaagcgccgcwagaccggggggcmagaggaagccctaccacaagaagcggaagtatgagctgggacgccccgcggccwacactaagattggcccccgccgcatacacacagtacgagtccggggaggcmataagaagtaccgagccytgaggctagacgtggggracttctcctggggctcggagtgttgtacacgcwaaaccaggattatcgatgttgtctataatgcatccvacaatgaactggtccgcaccmagaccctggtgaagaactgtatcgtgctcattgacagcacaccgtaccgacagtggtacgagtcccmctacgcactgcccctgggacgcaagaagggggccaagctgacgcctgaggaggaagagattttaaataaaaaacgatcaaagamaatccagaagaagtatgatgaaaggaaaaagaatgccmaaatcagcmgtcttctggaggarcagttccmmcagggcaagcttcttgcatgcatcgcttcgagaccaggccagtgcggccgggcagatggctatgtgctagagggcaaggagctggagttctatctgaggaaaatcmaagcccggaaaggcaaatraatcttctgtcttcggtcatgtaawaaaaaaaaaaaaaaaaaaaaaaaaaaaaaaaaaaaaaaaaaaaaaaaaaaaaaaaaaa

SEQ ID NO: 1554 - DNA, 615 bp, Canis familiaris
accgagccttgaggctagacgtggggaacttctcctgggctcggagtgttgtacacgcaaaaaccaggatttatcgattgtttgtctataagtgcatccgacaatgacactggtccgcatccgagaccctggtgaagaacatgtatcgtgttcagttgacagcacacagccagctaccggacagtgcgtatcgagtcgccatctcacgcacggaccgccgggagggcacagcaagggaggcgcgaaccaagacgcctcacggaggaggaagagatttaataataaacgactgcatcgaagatactcgcagaagaagtaatgatgaggaggaaagaagaaccgccaaactccgcagttttgtggaggcacagttcccaacacaggcgcaagcttcttcgcatgcatcgcttcgagaccaggccagtgcggccgggcagatggctatgtgctagagggcaaggagctggagttctatctgaggaaaatcaaagcccggaaaggcaaataaatcttctgtcttcggtcatgtaataaaggtgtttattgttctgtcctgtgaaaaaaaaaaaaaaaaaaaaaaaaaaaaaaaaaaaaaaaaaaaaaaaraaaaaaaaa

SEQ ID NO: 1555 - DNA, 733 bp, Canis familiaris
tttagggacacaaaggaccaggtctggacaaaaaagcaggcttggtaaccggtccgrattcccgggatsctgaggtgamctccggagatggttcgctactcgctggrmcccasraaaccstwcmaatcatgcaagtcgagaggttcaaatcttcgtgktcactkkaagaacacmcgtgaaactgcccaggccatcaagggtatgcatattcgaaaagccmccmagtwtctgaaagatgtcactttgcagaagcagtgtgtsccattccgtcgctacmatggtggagttggtaggtgtgcgcaggccmaacagtggggctggacacagggtcggtggccchagaagagtgctgartttttactgcacatgcttaaaaatgcggagagtaatgctgaacttaagggtttagatgtagattctctggtcattgagcacatccaggtgaataaagcccccmagatgcgacgtagaacctacagggctcatggccggattaatccatacatgagctctccctgccacattgagatgattcttactgaaaaagagcagattgttcctaaaccagaagaggaggttgcacagaagaaaaagatatcccagaagaaactgaagaaacmaaaacttatggcccgggagtaaattctgcatagaataaatgcmaataaaaataaaaaaaaaaaaaaaaaaaaaaaaaaaaaaaaaaaaaaaaaaaaaaaaaaaaaaaaaaaag

SEQ ID NO: 1556 - DNA, 697 bp, Canis familiaris
gtgacaactatagaacagtttgacaaagaagcaggctyggtaccggtccggrattcccggvaykyctgaggtgacctccggagatggttcgctactcgctggacccagaaaccctaswaatcatgcaagtcgagaggttcaratcttcgtgttcactktaagaacacacgtgaaactgcccaggccatcaagggtatgcatattcgaaaagccaccaagtatctgaaagatgtcactttgcagaagcagtgtgtcccattccgtcgctacaatggtggagttggtaggtgtgcgcaggccaaacagtggggctggacacagggtcggtggcccaagaagagtgctgagtttttactgcacatgcttmaaaatgcggagagtaatgctgaacttaagggtttagatgtagattctctggtcattgagcacatccaggtgaataaagcccccaagatgcgacgtagaacctacagggctcatggccggattaatccatacatgagctctccctgccacattgagatgattcttactgaaaaagagcagattgttcctaaaccagaagaggaggttgcacagaagaaaaagatatcccagaagaaactgaagaaacaaaaacttatggcccgggagtaaattctgcatagaatamatgcaaataaaaawaaamaaamraaaaamamaaaaamaaaaaaaa

SEQ ID NO: 1557 - DNA, 697 bp, Canis familiaris
ttttttttktttttktktttttyktttktttwtttttatttgcatktattctatgcagaatttactcccgggccataagtttttgtttcttcagtttcttctgggatatctttttcttctgtgcaacctcctcttctggtttaggaacaatctgctctttttcagtaagaatcatctcaatgtggcagggagagctcatgtatggattaatccggccatgagccctgtaggttctacgtcgcatcttgggggctttattcacctggatgtgctcaatgaccagagaatctacatctaaacccttaagttcagcattactctccgcattttkaagcatgtgcagtaaaaactcagcactcttcttgggccaccgaccctgtgtccagccccactgtttggcctgcgcacacctaccaactccaccattgtagcgacggaatgggacacactgcttctgcaaagtgacatctttcagatacttggtggcttttcgaatatgcatacccttgatggcctgggcagtttcacgtgtgttcttamagtgaacacgaagatytgaacctctcgacttgcatgattwstagggtttctgggtccagcgagtagcgaaccatctccggaggtcacctcagrmrtbccgggaatyccggaccggtaccragcctgcttctttgtcaaactgttctatagttgtcac

SEQ ID NO: 1558 - DNA, 711 bp, Canis familiaris
aacaggctaaggaccattaggcctattaaggtgacactatagaacaagtttgtacaaaaaagcaggctggtaccgtccggaattcccgggatccggagatggttcgctactcgctggacccagdaamccctacvaaatcatgcmagtcgagaggttcaratcttcgtgttcactttaagaacacacgtgaaactgcccaggccatcaagggtatgcatattcgaaaagccmmccaagtatctgaaagatgtcactttgcagaasmagtgtgtcccattccgtcgctacmatggtggakttggtaggtgtgcgcaggccmwacagtggggctggacacagggtcggtggcccmagaagagtgctgagtttttactgcacatgcttaaaaatgcggagagtaatgctgaacttaagggtttagatgtagattctctggtcattgagcacatccaggtgaataaagcccccaagatgcgacgtagaacctacagggctcatggccggattaatccatacatgagctctccctgccacattgagatgattcttactgaaaaagagcagattgttcctaaaccagaagaggaggttgcacagaagaaaaagatatcccagaagaaactgaagaaacmaaaacttatggcccgggagtaaattctgcatagaataaatgcaaataaaaataaaaaaaaaaaaaaaaaaaaaaaaaaa

SEQ ID NO: 1559 - DNA, 688 bp, Canis familiaris
atagaacagtttgtacacaaagcaggctggtaccggtccggaattcccgggataggtgacctccggagatggttcgctactcgctggacccagawacctayymaaatcatgcaagtcgagaggttcaaatcttcgtgttcactttaagaacacacgtgaaactgcccaggccatcaagggtatgcatattcgwaaagccaccaagtatctgaaagatgtcactttgcagaagcagtgtgtcccattccgtcgctacaatggtggagttggtaggtgtgcgcaggccmaacagtggggctggacacagggtcggtggcccaagaagagtgctgagtttttactgcacatgcttaaaaatgcggagagtaatgctgaacttaagggtttagatgtagattctctggtcattgagcacatccaggtgaataaagcccccaagatgcgacgtagaacctacagggctcatggccggattaatccatacatgagctctccctgccacattgagatgattcttactgaaaaagagcagattgttcctaaaccagaagaggaggttgcacagaagaaaaagatatcccagaagaaactgaagaaacaaaaacttatggcccgggagtaaattctgcatagaataaatgcaaataaaaataaaaamarwraaaaaawaaaaaawaawwaaaaaaat

SEQ ID NO: 1560 - DNA, 639 bp, Canis familiaris
gtaccggtccggaattcccggatcgctactcgctggacccagagaccctgacgagatcatgcaagtcgagaggttcaaatcttcgtgttcactttaagaacacagcgtgaaacgtgcccaggccatcaagggtatgcatattcgraaagccaccaagtatctgaaagatgtcactttgcagaagcagtgtgtcccattccgtcgctacaatggtggagttggtaggtgtgcgcaggccaaacagtggggctggacacagggtcggtggcccaagaagagtgctgagtttttactgcacatgcttaaaaatgcggagagtaatgctgaacttaagggtttagatgtagattctctggtcattgagcacatccaggtgaataaagcccccaagatgcgacgtagaacctacagggctcatggccggattaatccatacatgagctctccctgccacattgagatgattcttactgaaaaagagcagattgttcctaaaccagaagaggaggttgcacagaagaaaaagatatcccagaagaaactgaagaaacaaaaacttatggcccgggagtaaattctgcatagaataaatgcaaataaaaataaaaaaaaaaaaaaaaaaaaaaaaaaaaaaaaaaa

SEQ ID NO: 1561 - DNA, 683 bp, Canis familiaris
cggaagttcccggatcgacgccttgaggtgacctccggagatggttcctactcgctggacccaggaaaccctacggaatcatgcaagtcgagaggttcaaatcttcgtgttcactttaagaacacacgtgraactggcccaggccatcaagggtatgcawattcgsaagccmccmagtatctgraagatgtcactttgcagaagcacgtgttgtcccattccgtcgctacaatggtggakttggtaggtgtgcgcaggccmaacagtggggctggacacagggtcggtggcccmagaagagtgctgagtttttactgcacawgcttaaaaatcgcggagagtaatgctgaacttaagggtttagatgtagattctctggtcattgagcacatccaggtgaataaagcccccmagatgcgacgtagaacctacagggctcatggccggattaatccatacatgagctctccctgccacattgagatgattcttactgaaaaagagcagattgttcctaaaccagaagaggaggttgcacagaagaaaaagatatcccagaagaaactgaagaaacmaaaacttatggcccgggagtaaattctgcatagaataaatgcaaataaaaataaaaaaaaaaaaaaaaaaaaaaaaaaaaaaaaaaaaaaaaaaaaaaaaaaaaaaaa

SEQ ID NO: 1562 - DNA, 883 bp, Canis familiaris
atttatatacaaaaaacaagacagagaaaaagcagcacatgcagaactacacggtcgtcattcgttgtccgtggccaccaggccggacccggcgcacctttcccgcgtccattgctccacagtgagactttctgagccggagactcgcaattgcaagcaccaagtgcgcatgtggaaargactgctcsccgaagaagaagtggttcatagacagctacagcagatgataaaacttcagttctccttaaagaagttaggggtaaacaatatctctggtattgaagaagtgaatatgttcacmaaccmargdacagtgatccattkkaacaaccctaaagttcaggcatcgctggcagcraacactttcaccattacaggccatgctgagacmwagcagctgacagaaatgctacccagtatcttaaaccagcttggtgcagacagtctgactagtttaagaagactggctgaagctctgcccaaacratccgtggatggaaaagcaccacttgctaccggagaggatgatgatgatgaagttccagatcttgtggagaattttgatgaagcttccaagaatgaagmaaactgaattgagtcaacttctgaagaagataaaacttgaagaagttactgggagctgctattttatattatgactgctttttaaaattttgttcatggatctgataaaatctagatctctaatatttttaagcccaagccccttggacactgcagctcttttcagtttttgcttatacacaattcattctttgcagctaattaagctgaagaagcctgggaataaagtttgaaacaaggttaataaagttctttgcctargawaaaaaaaaaaaaaaaaaaaaaaaaaaaaaaaaaa

SEQ ID NO: 1563 - DNA, 866 bp, Canis familiaris
gcacgagccgcgtgtgtgcgcctaacctcagctggtccgcctgagaccccccgagcgccaaccctagtcccccgcgcggtcccatttgcgctccaacaagatgaaagaaactatcatgaaccaggagrawctcgccaaattgcaagcacaagtgcgcattggtkggaaaggamytgctcgccgaragaagaaggtggttcatagaacagctacagcagatgatwaaaamcttcagttctccttaaagaagttaggggtaaacaatatctctggtattgaagaagtgaatatgttcacaaaccaaggaacagtgatccattttaacwaccctaaagttcaggcatcgctggcagcraacactttcaccattacaggccatgctgagacaaagcagctgacagaaatgctacccagtatcttaaaccagcttggtgcagacagyctgactagtttaagaagactggctgaagctctgcccmaacaatccgtggatggaaaagcaccacttgctaccggagaggatgatgatgatgaagttccagatcttgtggagaattttgatgaagcttccaagaatgaagcmaactgaattgagtcaacttctgaagaagataaaacttgaagaagttactgggagctgctattttatattatgactgctttttaaaattttgttcatggatctgataaaatctagatctctaatatttttaagcccaagccccttggacactgcagctcttttcagtttttgcttatacacaattcattctttgcagctaattaagctgaagaagcctgggaataaagtttgaaacaaggttaataaagttctttgcctaggraaaaaaaaaaaaaaaaaaaaa

SEQ ID NO: 1564 - DNA, 685 bp, Canis familiaris
tcaggcatcgctggcagcgaacactttcaccattacaggccatgctgagacaagcagctgacagaaatgctacccagtatcttaaaccagcttggtgcagacagtctgactagtttaagaagactggctgaagctctgcccaacatccgtggatggraaagcaccacttgctaccggagaggatgatgatgatgaagttccagatcttgtggagaattttgatgaagcttccrcagaatgaagcmractgaattgagtcaacttctgaagaagataaaacttgaagaagttactgggagctgctattttatattatgactgctttttaaaattttgttcatggatctgataaaatctagatctctaatatttttaagcccaagccccttggacactgcagctcttttcagtttttgcttatacacaattcattctttgcagctaattaagctgaagaagcctgggaataaagtttgaaacaaggttaataaagttctttgcctaggatacggttttatttttttatttcattgacactgatttgtacacagaaacaaggttgtttatagaaagctaatcatggcatgtaatctggctgataatctttgatgaaatttgattaaagattttaaatggccgtctaacgtaaaaaaaaaaaaaaaaaaaaaaaaaaaaaaaaaaaaaa

SEQ ID NO: 1565 - DNA, 2455 bp, Canis familiaris
gtgatgtacctttgatcaatagattttagacaaaagtggtttttgagtccaaagatcagggctgggttgacctgcagactggatacagagtgtataaaaacaggggcaaggcgcaggctgatagcagagcaatcgccaagtctgtaatagctgcaaaggctcagctgtaggctgcctgaggagccagggagtaaggatggagaaaggaatggatgtgctccatgactttggaatccagtcaacgcactacctccaggtgaattaccaggactctcaggattggttcatcttggtgtccgtgattgcagacctcaggaatgccttctatgtcctctttcccatctggttccatctgcgtgaagctgtgggcatcaaacttctctgggtagctgtgattggagactggctcaacctcgtctttaaatggattctgtttggacagcgtccatactggtgggtcatggacaccgactactatagcaacacctctgtgccactgataaagcaatttccagttacctgtgaaactggaccagggagtccctctggtcatgccatgggtacagcaggtgtatactacgtgatggtcacatctaccctttctatctttcgggggagaaaaaggccaacctacagatttcggtgcttgaatatccttctgtggttgggattctgggctgtgcagctgaacgtctgtctgtcccgaatctaccttgctgctcatttcccccatcaggttgttgctggagtcctgtcaggcattgctgttgctgaaactttccgccacatccagagcatctacaatgccagcctcaagaaatattttctcattactttcttcctgttcagttttgccattggattttacctgctgctcaaggggctgggtgtggacctcctgtggacactggaaaaagccaggagatggtgtgagcggccggaatgggttcacattgacaccacaccctttgccagccttctcaagaacgtggggaccctctttggcctgggggtgactctcaactccagcatgtacagggaaagctgcaagggcaagcttagcaagtggttcccattccgcctcagctgcattgtggtgtctctcatcctcctgcacctctttgactctttgaaacccccatcccaaactgagctgatcttctacaccttgtccttctgcaagagtgcagcagtgcccctggcatctgtcagcctcatcccctactgccttgcccgggtcttcgaccagccagacaagaagtctttgtaatctttgtaaggcatgtggagtcttcagtatcaagccaatgactgtgccaatcatcgaggtggctggggtcttgtgccagcccattttgaggccagaggtgctagagtcagctcaggtaaccccttcctcctttgcaattctaattgtattgggtggggtgtttgtttttttgtgtttttttgtttttgttttgttttggtttggtttttttggtttttttttaaagctaataaggctagttgagaaagtcttatctgttagttggggtgttctggattttttttttcccctgaaaacttacttgctcttcttttagatacacaaaagcaaggcttccaggtagggccagctcacaatcccaggctggggatctcagctgcaggattttctacctgtcccatccttacaagaaaagggaaaggagcagtggcatttgatagagaagaagaatggattaaggaaagacttcttcgtatcctgcatatcatgcaaattcatgttacacaaaatctaaatcgctttgattatatttgaatttttaggtaaggaactctcaatagtgggggaccaacttaaagcataactaataggtagttaatggggtaattctgcttcttctatgtttctactatgtattcagtgacctagatttgtgctgggtcagagcattcagatatagtcagcttctctatcacactacatcttcctccttgtcagcctagctcagctttccctagaactttccactgctctacatcgtgctgacacagagatgcctaaaggcagctctagggtagtgcttttgtatggtttagtcaagctctgaaatcttgggcaaaaaggtgaggagagggcaaggagaggaaaggattcctctctccagaaggtcactccaatgttacttttgattcctagagggtaaatatgactcctttttctatcccaagccaaccaagagtgctcttggaggaaaagccagctcttccttgcctgttgtcaagtctcagctgatttgcagaatatgtcttttaaaaatgtttaagcctatttatttgagagtccttgtttttgctactaattatatagttcatcatatattaccattcacaccaaccatcgtggtcataacatctttgaaaagaaaaatatatatgcgcagtattttattaaaacaacattttattt

SEQ ID NO: 1566 - DNA, 470 bp, Canis familiaris
gcacgaggggacgctcgcggctctcggcgcccggcccagcttcctkcamratgtctactgttcacgaaattctctgcaagctcagcttggagggtgatcattccacacccccgagtgcatacgggtcgswcrargcatacactaattttgatgctgagcgtgatgctctgaacattgaaacggccatcaagaccaaaggtgtggatgaggtcaccattgyyaacattttgaccaaccgcagcrrkgrrsagagacaggacattgcctttgcctaccagagaaggactaaaaaggaacttgcatcagcattgaagtcagccttgtccggccacctggagaccgtgattttgggcctattgaaaacacctgctcagtatgacgcttctgaactgaaagcctycatgaaggggctggggactgatgaggactccctcattgagatcatctgctcaaggaccaaccaagaactt

SEQ ID NO: 1567 - DNA, 422 bp, Canis familiaris
gcacgagggttgscamgakgtcggcccccaagtaccagccgtcgtctctggctaccctgcccgctaccctcgacccagccgagtacgacatctctccggaagcccggagggcgcaagccgagcggttggccataagatcccgacttaaacgggagtacctgcttcagtacaacgaccccagccgccgggggctcatcgaggaccctgccttgattcgttggacctatgcaagatcaaacatctatcccaattttaggcccactcccaagacttcacttttaggagctctgtttggaattgggcccctcttcttctggttttatgttttcaaaactgacakagataggaaagaaaaacttatccaggaaggaaaattggatcgaacattgaacatttcatattaagtctggcaatgatgataa

SEQ ID NO: 1568 - DNA, 825 bp, Canis familiaris
  misc_feature (529)..(529): n comprises a, c, g, or t, or includes no nucleotide
  misc_feature (534)..(534): n comprises a, c, g, or t, or includes no nucleotide
ctgctgccgaacttcattgaagtggatgatgagcgcaactgcgtacctgttatgagaagcgtatgscccacaggaarktgctgccsgatgctctgggcgaggawtggrarggktacstggtgcgwaycagtggkkbchatgacvaacmadgbtyccccakrrrvmasgktgtcktgacmcmcgsscgcgtccgcctsctgctgagwaarsgbmattcctgctaccgacymrggaggactggagagagkaagcscmvatctkttcgggbttscattgtggatscmvwtstcagtgttctcvadttggttaykgtgwaaaaaggggagaaggatattcctggactsacggatastactgtgcctygtcgcctgggscccmhargagccmgcagaatccgaaagctttktaatctgtcgaaagwagacgatgtccgccmgtatgttgttagmaagcccctawhmmwagaaggtaagaaacctagracchwagcaccchrgattcagcgtcttgttactccacgtgtcctccnacacnaacgtcggcgtattgcyttgaagaaacagcgtactaagaaaaataaggaagassctscagaatatgctaaacttttggccmagagaatgaaggagsccmaagadaaacgccaggracagattgccmmgagacggaggctgtcctctctgagagcttctacctctaagtctgagtccagtcmwwaatgagattttctaagastgacmwaataaataagatcagacammmmaaaaaaaahaaaaaaaaaaaaaaaaaaaaaaaraaaaaaaaaaaaaaaaaaaaaaaaaaaaa

SEQ ID NO: 1569 - DNA, 744 bp, Canis familiaris
cttgcgcgaaggaatggaaaggggatacgtggtgcgaaatcattggtggcaatgacaaaacaaggcttcccccatgaascagggtgtctkgacmcmcasgccgcgtccgcctgctgctgartaaggggcattcctgctaccgaycyagkaggactggagagaggwagcgcmwatctgttysgggttgcattgtggatvcmmmatctcagtgttctcmawttggttattgtgaamaaaggggagaaggatattcctggactcacggatactactgtgcctcgtcgcctggggcccmwaagagccmgcagdatccgwaagctttttaatctgtcgaaagaagacgatgtccgccmgtatgttgttagwaagcccctawacmaagaaggtaagaaacctagaaccmwagcacccmagattcagcgtcttgttactccacgtgtcctccmacacmwacgtcggcgtattgctttgaagaaacagcgtactaagraaaataaggaagaggctgcagaatatgctawacttttggccmagagaatgaaggaggccmaagaraaacgccaggracagattgccmagagacggaggctgtcctctctgagagcttctacctctaagtctgagtccagtcmaaaatgagattttytaagagtgacmaaataaataagatcagacaccmmaaaaamaaaaaaaaaaaaaaaaaaaaaaaaaaaaaaaaaaaaaaaaaaaaaaaaaaaaaaaaaa

SEQ ID NO: 1570 - DNA, 669 bp, Canis familiaris
gggtgttgcttgacgccaacgggccgcgttccgccctgcttggctggargtaaaggggccattcctggctaccggaccccaggagggactggagagaggaagcgcaaatctgttcggggttgcattgtggatsccaatctcagtgktctcwawttggktattgtgaaaaaaggggagaaggatattcctggactcacggatactayctgtgcctcgtcgcctggggcccmaaagagccagcagaatccgwaagctttttaatctgtsgaaagaagacgatgtccgccagtatgttgttagaaagcccctaawcwswagaaggtaagaaacctagraccmaagcacccmagattcagcgtcttgttactccacgtgtcctccarcacaaacgtcggcgtattgctttgaagaaacagcgtactaagawaaataaggaagaggctgcagaatatgctaaacttttggccmagagaatgaaggaggccmaagaaaaacgccaggaacagattgccmagagacggaggctgtcctctctgagagcttctacctctaagtctgagtccagtcaaaaatgagattttctaagagtgacmaaataaataagatcagacaccmawaaaaaaaaaaaaaaaaaaaaaaaaaaaaaaaaaaaaaaawaaaaaaaaaaaa

SEQ ID NO: 1571 - DNA, 851 bp, Canis familiaris
  misc_feature (627)..(627): n comprises a, c, g, or t, or includes no nucleotide
cgcttcaggatgaagctgaacatctctttcccagctactggctgccagaaactcattgaagtggatgatgagcgcaaactgcgtaccttttatgagaagcgtatggccacagaagttgctgccgatgctctgggcgaggaatggaagggttacgtggtgcgaatcagtggtggcaatgacaaacaaggcttccccatgaagcagggtgtcttgacccacggccgcgtccgcctgctgctgagtaaggggcattcctgctaccgacccaggaggactggagagaggaagcgcaaatctgttcggggttgcattgtggatgccmatctcagtkttctcaatttgsttattgtgaaaaaaggggagaaggatattcctggactcacggatactactgtgcctcgtcgcctgggccccaaagagccagcagaatccgaaagctttttaatctgtcgaaagaagacgatgtccgcccagtatgttgttagaaagccccctatacacagagaggtatagagaacctatgagacccatagcaccccctagagttctagcgtctcttggtaatccaagggtcctcccacaccaaacgtcggcgtattggccttggaaggaaccaggcgttacttnagaaaaataaaggaagaggctgcagaatatgctaaacttttggccaagagaatgaaggaggccaaagaaaaacgccaggaacagattgccaagagacggaggctgtcctctctgagagcttctacctctaagtctgagtccagtcaaaaatgagattttctaagagtgacaaaataaataagatcagacaccaaaaaaaaaaaaaaaaaaaaaaaaaaaaaaag

SEQ ID NO: 1572 - DNA, 726 bp, Canis familiaris
tttatgaaagcttatgccacagaagttgcttgccgatgtctggcgagtaatgaaggttaacttgttgcgaatcagtgttggcaatgacawacaaggcttccccattgaagcagggtgtcttgacccacgkccgcgtccgcctgctgctgagtaaggggcattcctgctaccgacccaggaggactggagagaggaagcgcaaatctgttcggggttgcattgtggatgccaatctcagtgttctcaatttggttattgtgaaaaaaggggagaaggatattcctggactcacggatactactgtgcctcgtcgcctggggcccaaaagagccagcagaatccgaaagctttttaatctgtcgaaagaagacgatgtccgccagtatgttgttagaaagcccctaaacaaagaaggtaagaaacctagaaccawagcacccaagattcagcgtcttgttactccacgtgtcctccaacacaaacgtcggcgtattgctttgaagaaacagcgtactaagaaaaataaggaagaggctgcagaatatgctaaacttttggccaagagaatgaaggagggcccacacgagagacgccacggagcagcagtgcccacgagacggagagtgtctcctctgagagagtttacacttctaagtctgagtccagtcaaaaatgagattttctaagagtgacaaaataaataagatcagacaccaaaaaaaaaaa

SEQ ID NO: 1573 - DNA, 1460 bp, Canis familiaris
atgaccatggacacaatggaatctcagcaggatggaagtgtaacagattctgtggcagagaacgaatctgcacatatgcagaaccagactggtcaaaattcaatccctactttaactcaggtttctgtagctggatcaggcaccggaagaggctccccagctgtaactctagtacagttaccttcgggccaaactgttcatgtccagggaataattcagacaccacagccatcggttattcagtcaccacaaatacaaactgttcaggtagcaacaattgcagagacagatgagtctgcagaatcagaaggtgtaattgattctcataaacgtagagaaatcctttcacgaagaccctcttatagaaaaatactgaatgaactttcctctgatgtgcctggtgttcccaagattgaagaagaaaaatcagaggaagaaggaacgccacctaacatcgctaccatggcagtaccgactagcatatatcagactagcacggggcaatacattgctatagcccaaggtggaacaatccagatttctaacccaggatctgatggtgttcagggactacaggcattaacaatgacaaattcaggagctcctccaccaggtgctacaattgtacagtatgcagcacaatcagctgatggcacacagcagttctttgtcccaggcagccaggttgttgttcaagatgaggaaactgaacttgccccaagtcacatggctgccgccactggtgacatgccaacttaccagatccgagctcctactactgcattgccacagggagtagtgatggctgcctcgccaggaagtttgcacagtccccagcaactagctgaagaagcaacacgcaaacgagagctgaggctaatgaaaaacagggaagctgcccgggagtgtcgcaggaagaagaaagaatatgtcaaatgtcttgaaaatcgtgtggctgtgcttgaaaaccaaaacaagactctcattgaggaactcaaagccctcaaagatctttattgccataaagcagagtaactgtctttgacttggaccttgtttactgtgaactctaatcaaggcaggagatgcagcaattctactaattgccatgtggacttgtggaagggacacttgtgacccttgagaatccagtgtggcttagtgtttgacattgaattgggtatgctgttccaagatttggaatgcagccatgatcagatttaccaagcttacttcagtctgcttgtcaatagcacgcaaaaaaaatgttttgtttgccctcttgcttctactttttttcagggaagctgctaaagaatgtcgacgtcgaaagaaagaatatgtaaaatgtctggagagtcgagttgcagtgctggaagttcagaacaagaagctcatagaggaactcgaaactttgaaagacatttgctctcctaaaacagattagtagaaatatttaa

SEQ ID NO: 1574 - DNA, 1868 bp, Canis familiaris
caaaatttccttttcagtcatgcttttaagatactttttctaaaaagatttatttccagagtgttcccatgttggtttaaaattcactgttttcaacattttagagcaatacctcatctacttgattttgtgtctgctgaagtcttcggttgctgccaggcggcacttgaccctggggttgcacctgcagacctgaaatgggtaaaggcacaagcatgagtaaactatgattccagatacattttttataagtatgaagacattatcccaaggcatcactgtttagaggttcagaacttaagcagaaaaagaaacccttcctacagtaaggaacaaaggttctaatgacatttcttctaattcctctataatttccaggattcatcatatgttaaaagtgagcagggtctcaagtgaaggtttaatatcactttctatcactgaggcacctgatcttaagatcagggatcctaagatagagaaactctaccttccagttttttatttaaatgcacacatctacttaaatgcactcagtactctcctgaactctcattgtggcgagaactgttttcatggttatgaacaattacagaatgccacttttccagtttggagaaatatattcatttatataaacagggtcaggaacatcaagaggcaaggaggagggggtggtgtgagtgggaaaggtgagatgaagcagtgccttcctctcttaaaaggtacttctcttttcaaatcctcaactgaaggcctattgctctccagccagatctttcttgaccactgtggctttgaagtccttatcgcttccgtttcttggctggccatgcttttcatttttcacacacacatacacacacagctgacccttgaacaaggtggggtgtttggggtgccgacgccgacccctccccctccccatggttgaaaatctgcatataacttttgactcctcccaaaatttaactactaatagcctactgctgaccaaaggccttaccaataacataaacagtcgattaacaagtattttgtatattatatgtatcatacactgtgttcttacagtaaagtaagctagagcagaaaatgttaagaaaatcgtaagacaagggcaggccaggtggctcagcagtttagcgccaccttcagcccaggactgatcctggagacccgggatggagtcccatgtcgggctccctgcatggagcctgcttctccctctgcctgtgtctctctcatgaataaatacataaaatcttaaaaaaaaaaaaaaaaaaaaaaaaggaaatcgtaagacagagaaaatacgtttacattactgtattgtatttattggaaaaaaacccacctgtaagtggaccagcacagttcaaacccatattgttcaagggtcatctgtaatgtcttgccttccctgatagatcacagctcctgtgtcttacaggtctcttccctgtacccaagacagcacctagcctgggccttgactacaacagctactgatgcacccactgattcaagttattttatacctaccacatgtcaaagaccagggatgcagcagatcccatgcctgcccttacactttatttttattctctgataggtaatagcgaagaaccatgcaatggcacattttctcacttagcatttttctcattcagtcctttcaactctttgagggtgtgtgtgtgtactactatcaaccccatttctggaagcaaaaagtgggatttagaaagtcaacagtgctggttgcagtggaacctgtcttagaccaggtctcctataattccaccgatctagaccttaattaaccattgtgatttactggcacggcagccgcggcaggtacactc

SEQ ID NO: 1575 - DNA, 791 bp, Canis familiaris
  misc_feature (402)..(402): n comprises a, c, g, or t, or includes no nucleotide
  misc_feature (515)..(515): n comprises a, c, g, or t, or includes no nucleotide
gcgccgccgtgggacttccccgaccggcaccggtacatcaagggcatcgtgaagggacatcatccacggamccggcccgsgggcaacccctcgccaaggtcgtctycsgggaycsktaccsstttaaraabsbgrmvgrrctgktcatybccbcsgrgggsawmmacacdgscmvgttcgtgkwcykcggmmdddargcccagctchacatagscvawgkgctcccggkggscamwatgyccgagggcaccatcgtgkgctstctggaggagaagcctggtgwcmgkgscmagtkggcccgagcctccgggdactacgcgwckgtcatstsccamwmcccggagrcchrgdrracccgagtgaagctgccgtccggktcawagaaggtcatttctycmgccnacagarccstggtgggtgtgktcsctggaggtgsscgcattgacaagcccatkctgaargctggccgtgcttaccacmagtacmaggcmaagaggaatygctggccacgtgtnsggggtrtgsccatgaatcctgtggagcatccttttggaggtgscaaccaccmayacatcggcmaaccctctactatccgcagagatgcccctgctggcmgcmaagtgggtcttattgctgctcgccggactgggcgtctgcggggracchagactgtgcagraraarraraamwarrmytgaggggctcmataaagtgtgtccttctgccmmhmaaaaaamaaammaaaawaaamwwawraaaaavaaaawaaaaaaaraaaaaaraaaaaaaaa

SEQ ID NO: 1576 - DNA, 430 bp, Canis familiaris
gcacgaggccgcmsgaggcatcgagcagcagcagccgcctgcagccatggctctgcgctaccccatggccgtgggcctcaacaagggccacaaggtgacgaagaacgtgagcaagccgaggcacagccgccgccgcgggcgcctcaccaagcacaccaagttcgtgcgggacatgatccgggaggtgtgcggcttcgccccgtacgagcggcgggccatggagctgctcaaggtgtccaaggacaagcgcgccctcaagttcatcaagaagcgggtcgggacgcacatccgcgccaagaggaagagagaggagctgagcaacgtgctggcggccatgcggaaagcggccgccaagaaggactgacccccctcccgtaacaataaagccttctcggaacctcggggtcttgtgctggtccgggcgcaccgg

SEQ ID NO: 1577 - DNA, 800 bp, Canis familiaris
cgccgtccgctcccgcccgcgctgcggccccagccatggccctcgccgtccgagtcgtctactgtggcgcttgaggctacaagtccaagtaccttcagctcaagaagaagttagaggatgagttcscmsgatgcctggacatctgtggcgaggggactccccaggccaccggcttctttgaagtgacggtakcggggaagttggttcactccmagaagagaggtgatggctacgtggacacggagagcaagtttctgaggctggtggccgccatcaaaaccgctttggctcagggctaatgtgccctgaaggcagagcccagtgaccttggcccagcccctcgtggcagacgcttcatgatgggaagaactgaaatgtctcgtggacgcctggtctttccctgatgtccctgcgactgccaygtaggggcagagactgatgcccctggtctttgcctctgtgtgtgtgtgtgtttgtgtgtgtgcgcgcatgcacgcctccgggagtgtagctctgcaccccacctgccttgctccttcccctccccgcctttccccacctccccgcatcccccagccccctggtacttccctggcattaggctttcggggtggtcctgctcctggcttccttctcgggtggccaggagagggatctgagtgagtgagtcgtgagtgagttgtaggatccagcagtattggcaacggttcacagttcaataaacattggatgagtttaaccagaaaaaaaaaaaaaaaaaaaaaaaaaaaaaaaaaaaaaaaaaaaaaaaaaaaaaaaaa

SEQ ID NO: 1578 - DNA, 800 bp, Canis familiaris
tttttttttttttttttttttttttttttttttttttttttttttttttttttttttctggttaaactcatccaatgtttattgaactgtgaaccgttgccaatactgctggatcctacaactcactcacgactcactcactcagatccctctcctggccacccgagaaggaagccaggagcaggaccaccccgaaagcctaatgccagggaagtaccagggggctgggggatgcggggaggtggggaaaggcggggaggggaaggagcaaggcaggtggggtgcagagctacactcccggaggcgtgcatgcgcgcacacacacaaacacacacacacacagaggcaaagaccaggggcatcagtctctgcccctacrtggcagtcgcagggacatcagggaaagaccaggcgtccacgagacatttcagttcttcccatcatgaagcgtctgccacgaggggctgggccaaggtcactgggctctgccttcagggcacattagccctgagccaaagcggttttgatggcggccaccagcctcagaaacttgctctccgtgtccacgtagccatcacctctcttctkggagtgaaccaacttccccgmtaccgtcacttcaaagaagccggtggcctggggagtcccctcgccacagatgtccaggcatcskgsgaactcatcctctaacttcttcttgagctgaaggtacttggacttgtagcctcaagcgccacagtagacgactcggacggcgagggccatggctggggccgcagcgcgggcgggagcggacggcg

SEQ ID NO: 1579 - DNA, 744 bp, Canis familiaris
gcacgagagctgaccccctccactcaaccttagccaccatggacatcgccatycaccacccctggatccgccgccccktctttccsttccactcccccagccgcctctttgaccagttcttcggagagcacctgttggagtccgatctctyccmacttctacttccctgagccccttctaccttcggccaccctcattcctgcgggcacccagctggattgacaccgggctctcagagatgcgtctggagaaggacagattctctgtcaacctggatgtgaagcacttctccccagaggagctcaaggtcaaggtgttgggaratgtgattgaggtgcatggcaaacatgaagmrcgmsaggatgaacatggtttcatctcccgggagttccacaggaaatacaggatcccagccgatgtggatcctcttgccattacttcatccctgtcatctgatggggtcctcactgtgaatggaccaaggaagcaggcctcaggccctgagcgcaccattcccatcacccgtgaagaaaagcctgcagtcactgcagcccccawgaaatagatgccctttctctaactgcattttttaaaacaagaaaatttccccaccagtgaatgaaaatcttgtgattagtgctgaagcttattaatgctaagggcaggcccaaattattaagctaataaaatactattcagcamcarawaaaaaaaaaaaaaaaaaaaaaaaaaaaaaaaaaaaaa

SEQ ID NO: 1580 - DNA, 732 bp, Canis familiaris
ccagaccagacagacctgtccttccagccaaggactgggaccttctatcttctgggtccaacastggaaattcactcccatgagcaggatgagtttakctgccgtgtaaagcatgttactctcagtgagccccmmgatygttwaagtggrrccgagacaactgactagcatcacagctttgaagatgatgcatktattgractaatccchaatgctttggtttttcttcatgctgataggttttkatgctttaatcataaagttatattgwaacmaatacvaakacmatctagttgttaattctacmttgggcactgtgtcactatgcttgacctatctgggccmgtagctatagttgtggggctggaagcttagagatacggaggagagaattctcatactcaccatcaatatcttggtcagacctgaactcttcagtctcttcagaaaaactggataagaagataattatgcctgtttagagttaatctccmatttgcatactttgcttagaatttgggagacattttttgaaagatawatgccmaattattggaaatttgttacagtggataatataccttattgtataaaattcatatttacctcttccatatgttagagacactgttgcacatgattctacttacgttaattttgtttcaataattaaaacmatggtaaaacttraaaaaaaaawaaaaaaaaaaaaaaaaaaaaaaaaaaaaaaaa

SEQ ID NO: 1581 - DNA, 696 bp, Canis familiaris
ttcagcaaggactggaccttckatcttctgggtccacackgaattcactcccawtgagcmggatgaktttakctgccgtgtaaagcatgttactctcagtgagccccagatcgtyaagtgggaccgagacaactgactagcatcacagctttgaagatgatgcatttattgaactaatcccmaatgctttggtttttcttcatgctgataggtttttatgctktkaatcataaagttatattgaaacaswatacaratacvatctagttgttaattctacattgggcactgtgtcactatgcttgacctatctgggccagtagctatagttgtggggctggaagcttagagatacggaggagagrattctcatactcaccatcaatatcttggtcagacctgaactcttcagtctcttcagaaaaactggataagaagataattatgcctgtttagagttaatctccaatttgcatactttgcttagaatttgggagacattttttgaaagatawatgccaaattattggaaatttgttacagtggataatataccttattgtataaaattcatatttacctcttccatatgttagagacactgttgcacatgattctacttacgttaattttgtttcaataattaamacaatggtaaaacttgaaaaaaaaaaaaaaaaaaahwmrarctcgtgc

SEQ ID NO: 1582 - DNA, 687 bp, Canis familiaris
ggactggacctcgatcttctggtccacacggattcactccccatgagcaggatgagtttagctgccgtgtaaagcatgttactctcagtgagccccagatcgttaagtgggaccgagacacactgactagcatcacagctttgragatgawgcatttattgractwatcccmaatgctttggkttttcttcatgctgataggtttttatgctttaatcataaargttatattgraaccaataccaataccatctagttgttaattctacattgggcactgtgtcactatgcttgacctatctgggccagtagctatagttgtggggctggaagcttagagatwcggaggagagaattctcatactcaccatcaatatcttggtcagacctgaactcttcagtctcttcagraaaactggataagaagataattatgcctgtttagagttaatctccmatttgcatactttgcttagaatttgggagacattttttgaaagataaatgccmaattattggraatttgttacagtggataatataccttattgtataaaattcatatttacctcttccatatgttagagacactgttgcacatgattctacttacgttaattttgtttcaataattaaaacmatggtaaaacttraaaaaaaaaaaaaaaaaaaaaaaaaaaaaaaaaa

SEQ ID NO: 1583 - DNA, 555 bp, Canis familiaris
ctcccgcgctttgttttggtccaagaactcttcagtgaagatgggacgtcgaaggtggagaagccatcacagtccccaccttgtgtccaattcaagagcgtattcatgagcccagagcccgagtcctctgttcttgatcttcttttcctggatcttctccgtgcacatcttgtaggcttccgactgctggtaggcgcgcagctccttcatgtactsstgcttctcccgctcggcctcatccaggtaccgctgcttctccgccggctgcagcttgctccactcggcacccagcatcttggtgatctcgggaaagggcagatccgggtggcgcgtgcgaatctgctcgcgccgctcgttcaggaagcgcacgtagccggtgaccggtgccttgggcccatttggcaggatcttcttccgcttcttgcccttgggccagccgcgcttcttcacagggctcactcctcgtgggaccccttctcgccggcccgggggcacctcgccgcgctcctgcttgacggccaccacgaagcaccaccgtgcggtcccggagccttg

SEQ ID NO: 1584 - DNA, 752 bp, Canis familiaris
  misc_feature (116)..(116): n comprises a, c, g, or t, or includes no nucleotide
  misc_feature (194)..(194): n comprises a, c, g, or t, or includes no nucleotide
  misc_feature (201)..(201): n comprises a, c, g, or t, or includes no nucleotide
  misc_feature (210)..(210): n comprises a, c, g, or t, or includes no nucleotide
cctcctsgsccccgccscarccatgkccgcctcytccgcgcgscccvccktcctggmcctkrcsgcgctggcgctgctccygctsctgtgcckggbcccggktggcawargkgggnwtwaaytcmrdctkytgsttcaraabckbgrascachtgstycarytaagactwatgtskmavtgggcgagagcmasnmsmrrrnattcttgancggcctgwagcgccagawgcgacakctktgggaccggaytcgkccmgaggtccavcagtggtatcascagttcctctatatgggtttcgacgaagcgaaatttgaagatgacatcacttactggytgaacagagatcgaaatgggcacgactatgattactaccagcgtcactatgacgaggacgccgccatcggtccccagagcccctacagcttcaggyayggagccagcgtcaactacgatgactactgaccwaccacscctcggccctcggcgcccyggccgcggaggtgacccmctgggctgccttgcaccacgtggsttycgctgggctttamtccagcagatcttgcctaccccctttctgcagccaggaaggaagagttaaacmatataaatgcstttgatatttcatscaagtgcctaacatcgcatttcatytmraaaatagaaataaaascmgtttgttmaawahmrmawawaaaaamamaaaawaaaaaaaaaarrraaaaaaaaaaaaaaaaaaarrraaaaaaaaaaa

SEQ ID NO: 1585 - DNA, 747 bp, Canis familiaris
tcgcaccgccgcagccatgacccctccttccgccggccccccgtcctgcctgaccgcccttggcgctgctcctgctgctgtgcctgggccccgggtggcataaagtgggaatatactcaagctgtctgcttcagaascgggaaagcaccttgctccagctaaggactaatgtgscartgggcgagagcaaggccacaagaattcttgagcggcctgaagcgccagaagcgacagctgtgggaccggactcggccagaggtccagcagtggtatcagcagttcctcwatatgggtttygacgaagcraaatttgaagatgacatcacttactggctgaacagagatcgaaatgggcacgactatgattactaccagcgtcactatgacgaggacgccgccatcggtccccagagcccctacagcttcaggcayggagccagcgtcaaytacgatgactactgaccaaccacccctcggccctyggcgccccggccgcggaggtgacccactgggctgccttgcaccacgtggcttccgctgggctttactccagcagatcttgcctaccccctttctgcagccaggaaggaagagttaaacaatataaatgcctttgatatttcatgcaagtgcctaacatcgcatttcatttaaaaaatagaaataaaagcagtttgttaaaaamaaaaaaaaaaaaaaaaaaaaaaaaaaaaaaaaaaaaaaaaaaaaaaaaaaaaaaaaaaaaaa

SEQ ID NO: 1586 - DNA, 701 bp, Canis familiaris
gccagaccccgtcctggcctgaccgcgctgcctgctcctgcctgctgtgcctgggcccggtggcataagtgggmataaacctcaagcttgctgcttcagaagcggraagcacctgctccagctaagactaatgtggcagtggkcgagagcaaggccacaagaattcttgagcggcctgaagcgccagaagcgacagctgtgggaccggactcggccagaggtccarcagtggtatcagcagttcctctatatgggtttcgacgaagcgaaatttgaagatgacatcacttactggctgwacagagatcgaaatgggcacgactatgattactaccagcgtcactatgacgaggacgccgccatcggtccccagagcccctacagcttcaggcayggagccagcgtcaactacgatgactactgaccaaccacccctcggccctcggcgccccggccgcggaggtgacccactgggctgccttgcaccmcgtggcttccgctgggctttactccagcagatcttgcctaccccctttctgcagccaggaaggaagagttaaacaatataaatgcctttgatatttcatgcaagtgcctaacatcgcatttcatttaaaaaatagmaataaaagcmgtttgttaaaaaaaaaaaraaaaaaaaaaaawaaaaaaaaaaaaaaaaaaaaaaaaaaaaaaaaaaa

SEQ ID NO: 1587 - DNA, 690 bp, Canis familiaris
ctatgaccattaggcctatttaggtgacacctataagaacaagtttgtacacaaaaagcaggctggtaccggtccggaattcccgggatgtgggaataaactcaagctgctgcttcagaakcgkgaagcacctgctccagctwagactaatgygbcagtggktcgagakkcmaggychaagaattcttgagcggcctgaagcgccagaagcgacatgctgtgggaccggactcggccagaggtccagcagtggtatcagcagttcctctatatgggtttcgacgaagcgaaatttgaagatgacatcacttactggctgaacagagatcgaaatgggcacgactatgattactaccagcgtcactatgacgaggackccgccatcggtccccrgagcccctacagcttcaggcatggagccagcgtcaactacgatgactactgaccaaccacccctcggccctcggcgccccggccgcggaggtgacccactgggctgccttgcaccacgtggcttccgctgggctttactccagcagatcttgcctaccccctttctgcagccaggaaggaagagttaaacmatataaatgcctttgatatttcatgcmagtgcctaacatcgcatttcatttaaaaaatagaaataaaascmgtttgttawaaaaaaaaaaaaaaaaaaaaaaaaaa

SEQ ID NO: 1588 - DNA, 670 bp, Canis familiaris
ggccccgcgtggcataagtgggaataaactcaagctgctgcttcagaagcggggaagcacctgctccagctaagactaattgtggcacttggggcgaggacaaaggcccaagaattcttgagcggcctgtaagcgccagaagcgacarctgtgggaccggactcggccmmgaggtccasacagtggtatcagmcagttcctctatatgggtttcgacgaagcgaaatttgaagatgacatcacttactggctgaacacgagatcgaaatgggcacgactatgattactaccagcgtcactatgacgaggacgccgccatcggtccccagagcccctacagcttcaggcacggagccagcgtcaactacgatgactactgaccmaccacccctcggccctcggcgccccggccgcggaggtgacccactgggctgccttgcaccacgtggcttccgctgggctttactccagcagatcttgcctaccccctttctgcagccaggaaggaagagttaaaccatataaatgcctttgatatttcatgcacagtgcctaacatcgcatttcatttaaaaaatagaaataaaagcmgtttgttawaaaaaaaaaaaaaaaaaaaaaaaaaaaaaaaaaaaaaaaaaaaaaaaaaaaaaaaaaaaaaaaaaaaaaa

SEQ ID NO: 1589 - DNA, 697 bp, Canis familiaris
  misc_feature (14)..(14): n comprises a, c, g, or t, or includes no nucleotide
  misc_feature (504)..(505): n comprises a, c, g, or t, or includes no nucleotide
  misc_feature (515)..(516): n comprises a, c, g, or t, or includes no nucleotide
  misc_feature (523)..(524): n comprises a, c, g, or t, or includes no nucleotide
  misc_feature (526)..(526): n comprises a, c, g, or t, or includes no nucleotide
  misc_feature (534)..(535): n comprises a, c, g, or t, or includes no nucleotide
  misc_feature (547)..(548): n comprises a, c, g, or t, or includes no nucleotide
ggccgccgtccctngcctgaccgcgctggcctgctcctgctgctgtgcctgggcccgggtggcataagtgggmatawactcaagctgctgcttcagaagcgggaagcacctgctccagctaagactaatgtggcagtgggcgagagcaaggccaaagaattcttgagcggccctgaagcgccagaagcgacagctgtgggaccggactcggccagaggtccagcagtggtatcagcagttcctctatatgggtttcgacgaagcgaaatttgaagatgacatcacttactggctgaacagagatccgaaatgggcacgactatgattactaccagcgtcactatgacgaggacgccgccatcggtccccagagcccctacagacttcacggcayggagaccacgcgtctaactacgagtagactactgagcccaccaccccttggcccttgggcgccccccgcccccgggaagggttggaaccccaaccttggggcctgccctnntgccaccacnngtggctnntnccgctggnngctttactccanngcagatcttgcctaccccctttctgcagccaggaaggaagagttaaacaatataaatgcctttgatatttcatgcaagtgcctaacatcgcatttcatttaaaaaatagaaataaaagcagtttgttaaaaaaaaaaaaaaaaaaaaaa

SEQ ID NO: 1590 - DNA, 737 bp, Canis familiaris
gcaacatgcgctctccgagcgccccgttctgccctgaccgcgctggcgcctgctcccgctgctgtgcctgggcccgggtggcataagtgggaataaactcaagctgctgcttcagaagcgggaagcacctgctccagctaagactaatgtgcagtgggcgagagcaaggcccaagaattcttgacggcctgaagcgccagaagcgacagctgtgggaccggactcggccagaggtccaaccagtggtatcaaccagttcctttatatgggttttcgacgaaaccggaaattggaaagaagaccatccaacctaccttgggctggaaccaggaagattcggaaaatggggccacggaactaatgaattactaccagcgtcactatgacgaggacgccgccatcggtccccagagcccctacagcttcaggcacggagccagcgtctaactacgatgactactgaccaaccacccctcggccctcggcgccccggccgcggaggtgacccactgggctgccttgcaccacgtggcttccgctgggctttactccagcagatcttgcctaccccctttctgcagccaggaaggaagagttaaacaatataaatgcctttgatatttcatgcaagtgcctaacatcgcatttcatttaaaaaatagaaataaaagcccagtttgttaaaaaaaaaaaaaaaaaaaaaaaaaaaaaaaaaaaaaaaaaaaaaaaaaaaaaaa

SEQ ID NO: 1591 - DNA, 621 bp, Canis familiaris
cactgtacagtttgcagaatatattcagaaaaatgtgcaactttaataagaatgcgaaatggttacgaattgtctccccaacagcagcagctaattttcacgcgccgaaacttggctgactgtcttcggagtcggaccccgtatcatgtcaacctcctcctggctggctacgatgagcatgagggtccagcgctsyackasatggactacttggcagccttggccaaggccccttttgcagcccatgkctatggtgctttcctgactctcagtatcctggaccgatactacacaccaaccatctctcgggagagggccgtggagctccttaggaaatgtctggaggagctccagaaacgcttcatcctgaacctgccaaccttcagtgttcgaatcattgacaaaaatggcatccatgacctggacaacatttccttccctaaacagggctcctaaccatatgctgtccctcccacttgccagggaacttttttttgattggctccttcatctttttctactcttttgacatgtatccttgatagatagttaattcagaataaagcygaatctggataaattaaaaaaaaaaaaaaaaaamwmrarrrrraaaaaaaaaaa

SEQ ID NO: 1592 - DNA, 891 bp, Canis familiaris
ggcacgaggtcctccgctgccctcggactgctgcagccgtcggagcccggcccggagcgcgcccgccctcgcgagtcatggagatgaaggccgtgtgcgtgttgaagggccagggccccggtggagggcaccatccacttcgtgcagaagggaagtgggcctgttgtggtatcaggaaccattacagggctgactgaaggcgagcatggattccacgtccatcagtttggagataatacacaaggctgtactagtgcaggtcctcactttaatcctctgtccamaaaacatggtgggccamaagatcaagagaggcatgttggagacctgggcaatgtgactgctggcaaggatggcgtggccattgtgtccatagaagattctctgattgcactctcaggagactattccatcattggccgcaccatggtggtccacgagaaacgagatgacttgggcaaaggtgacmatgaagaaagtacacagacaggaaacgccgggagtcgtttggcttgtggtgtcattgggatcgccaagtaaatattccctaggatgcgatctgagttctagttaactcctatgttatcttgctagtcgtagaaatttaacttgataaacattaaacattgtaaccttaaaagtgtaatttgtgtgactttttaattgctttaagtacctgtaatgagaactgatttatgatcacttggaagatttgtataattttataaaactcctattcagttaaaatgtatgtttcaacgatctctgtattttgccaggcttaatcatatatgggtattaaacttaattgtctgaatttcttcaattctcattcaagcccgcaataaacaaatataacataaaaaaaaaaaaaaaaaaaaaaaaaaaaag

SEQ ID NO: 1593 - DNA, 819 bp, Canis familiaris
caggtgcggtgcatctggtgcggtcttatctggtcggaccaggtccagacccaaccagtgccgtacggattcgagaggaggggaggtacattctgcaggtccctgatgaacccagggaaccctccaccatatccaggccctggtccaacagccccgtacccaccttatccaccacaaccaatgggaccaggggcctaccctcmaggacctatggggggaccctacccacctcctcaggggtacccctaccaaggatatccacagtatggctggcagggtggacctcaggagcctcctwaaactacagtgtatgtagtggaagaccmaagacgggatgacctgggcccatccacctgcctcacagcatgctggactgcactctgttgctgctgtctctgggacatgctcacttgaccagctcggccttcctgtcctgccagttcggccaccaccttcaacaggtgtgcctgccccatstcttctgattgctgaaataaatgaaaatgactagctctgcacagatacttctaccttcgacacagtgggattctagattagcagggattgtgctgcgtttaattcagtgactgtctttttaatgttcaaaatccatttcttattggcctttcacaaatgtgctaaatgacttatttttttggcccaaggcttagctataaaatatatatttataagattatacgttcacggtagtgacataatgtaataccactgaatgatttatttgcttacaccctgtatgtttccaataaatttgtctgaacctcmaaaaaaaaaaaaaaaaaaaaaaaaaaaaaaaaa

SEQ ID NO: 1594 - DNA, 518 bp, Canis familiaris
gcacgaggctccgtgcaggcgcccagccaccgggtccgacccatcagcagcagcgcggccagcgtctatgcaggcgcagggggctcgggctcccggatckccgwrtcccgctccaccagcttccggggcggctgggggtccgggggcttggccgcggggatggccgggggtctggcgggcatagggggcatccagggcgagaaggagaccatgcaggacctgaatgaccgcctggcctcctacctggagaaggtgaggagcctggaggctgataatcagagactggagatgaaaatccgggaacacctggagaagaagggcccccaggtcagagactgggggcattacttcaagaccatcgaggacctgagggctcagatctttgcaagtgccgtggacaatgcccgcatcgttctgcagattgacaacgcccggctcgctgctgacgacttccgcgtcaagtatgagacggagctggccatgcgccagtccgtggagagcgacatccatgggctccg

SEQ ID NO: 1595 - DNA, 1428 bp, Canis familiaris
cagactcctgggccttggcgatcggtggggttcgcctgcgcactgtgggcgccgcagtttttgaaacatgaatccttcactcttcttgactgccctttgcttgggaatagcctcagcagctcccaaatttgatcaaagcttaaatgcacagtggtaccagtggaaggcaacgcacaggagattatatggcatgaatgaagaaggatggaggagagcagtgtgggagaagaatatgaaaatgattgaactgcataatcgggaatacagccaagggaaacatggcttcacaatggcaatgaatgcctttggtgacatgaccaatgaagaattcaggcaggtgatgaatggctttcaaaaccagaagcacaagaaagggaaaatgttccaagaacctctctttgctgagatccccaaatcagtggactggagagagaaaggctatgtaactcctgtgaagaatcagggtcagtgtggttcttgttgggcttttagtgcaactggtgcccttgaaggacagatgttccggaaaacgggcaaacttgtgtcactgagtgagcaaaacctggtggactgctctagggctcaaggtaacgagggctgcaatggtggcctgatggataacgccttccggtatgttaaggacaatggaggcctggactcagaggaatcttatccgtatcttggaagggacacagagacctgcaattacaagcctgagtgttctgctgccaatgacactggctttgtggacctccctcaacgggagaaggccctaatgaaagcagtggcaactctagggcccatctctgttgctattgatgcaggccatcagtctttccaattctacaaatcaggcatttattttgatccagactgcagcagcmaagatctagatcatggtgttytggtggttggctatggctttgaaggaacagattcmaataataaattttggattgtcaagaacmgttggggtccagaatggggctggaatggctatgtaaaaatggccmargaccagaacaaccactgtggaattgccacagcagccagctatcccmctgtgtgagctgatggatcgcaagattagaggacttgaaggcagcatatctggargaattttatcttaaagctgaccagactcttattgtrtaagataagacacttgaatcattgaggatccmagttgtgatttgaattctgtgacactttttatcagggtaaaacattaccmctactttaattactgttatatatggctttataacgttgaagactcattacttaattctaagacttttgacttctcattttttcaaaagatatataaaactttgcccytttgaaataaattttaattccaatatgtwaaaaaaaaaaaaaaaaaaaaaaaaaaaaaaaaaaaaaaaaaaaaaaaaaaaaaaaaaa

SEQ ID NO: 1596 - DNA, 706 bp, Canis familiaris
acacaggaaacagctatgaccataggcctatttaggtgacaactatagaacaagtttgacaaaaaggcaggcctggtaccggtccggaattcccksrakgtgaaaaggagaaccccatgcgggagcttcgcatccgcarrctctgcstcaacatctgtgtgggggagagtggagacagactgacccgcgcggccaaggtgctggagcagctcacgggccagaccccagtgttctccaaagctaggtacacggttagatcctttggtatcaggagaaatgaaaagattgctgtccactgcacagtccgtggggccmaagcagaagaaatcctggagaaaggtctaaaggtgcgagagtatgagttaagaaaaaataacttctccgatactggaaactttggttttgggatccaggagcacatcgatctggggatcaaatatgacccaagcattggtatctacggcctggacttctatgtggtgctgggtaggccaggtttcagcatcgcagacaagaagcgcaggacaggctgcattggggccaaacacagaatcagcaaagaggaagccatgcgctggttccagcagaagtatgatgggatcatccttcctggcaaataaattcccgtttctatccvaaaggccaataaaaacttttcagtgaaawrwaaaaaaaaaaaaaaaaaaaaaaaaaaaaaaaaaaaaaa

SEQ ID NO: 1597 - DNA, 702 bp, Canis familiaris
cacaggaacagctagaccattaggcctatttagkgacactatagracaagttkgtacaaaaagcaggctggtaccgktccsgaattcccgggatcmmcrkrkcgcaggatcaaggtgaaaaggagaaccccatgcgggagcttcgcatccgcawactctgcctcaacatctgtktgggggagaktggagacagactgacccgcgcggccaaggtgctggasmagctcacgggccagaccccagtgttctccmaagctaggtacacggttagatcctttggtatcaggagaaatgaaaagattgctgtccactgcacagtccgtggggccmaagcagaagraatcctggagaaaggtctaaaggtgcgagagtatgagttaagraaaaataacttctccgatactggaaactttggttttgggatccaggagcacatcgatctggggatcaaatatgacccaagcattggtatctacggcctggacttctatgtggtgctgggtaggccaggtttcagcatcgcagacaagaagcgcaggacaggctgcattggggccmaacacagaatcagcmaagaggaagccatgcgctggttccagcagaagtatgatgggatcatccttcctggcaaataaattcccgtttctatccmaaaggccaataaaaacttttcagtgaaawrwaaaaaaaaaaaaaaaaaaa

SEQ ID NO: 1598 - DNA, 689 bp, Canis familiaris
aggtatgaccataggcctatttaggtgacaacctatagaacaagtttgtacacaaaagcaggctgkwaccggtccggawttcccgggatcgcaggatcaaggtgaaaaggagaaccccatgcgggagcttcgcatccgcaactctgcctcaacatctgtgtgggggagagtggagacagactgacccgcgcggccaaggtgctggagcagctcacgggccagaccccagtgttctccmaagctaggtacacggttagatcctttggtatcaggagaaatgaaaagattgctgtccactgcacagtccgtggggccmaagcagaagaaatcctggagaaaggtctaaaggtgcgagagtatgagttaagaaaaaataacttctccgatactggaaactttggttttgggatccaggagcacatcgatctggggatcaaatatgacccaagcattggtatctacggcctggacttctatgtggtgctgggtaggccaggtttcagcatcgcagacaagaagcgcaggacaggctgcattggggccaaacacagaatcagcaaagaggaagccatgcgctggttccagcagaagtatgatgggatcatccttcctggcaaataaattcccgtttctatcccaaaggccaataaaaacttttcagtgaaawrwaaaaaaaaaaaaaaaaaaaa

SEQ ID NO: 1599 - DNA, 440 bp, Canis familiaris
ttcggcacgagcccctgkcatcgmcgccccgctgccgctgccgcccccgcaaggctttgccatcgccaaagccacctgcagcgactcgtcgcacccgattctctttacttcgttccccgccaaccgcaaccattgacgccatgtcgggttattcgagtgaccgagaccgcggccgggatcgagggtttggtgcacctcgatttgggggaagtagggcagggcccctatctggaaagaagtttggaaaccctggggagaaattagtcaaaaagaagtggaatcttgatgagctgcccaaatttgagaagaatttttatcaagaacaccctgatttggctaggcgcacagcacaagaggtggagacatacagaaggagtaaggaaattacggttagaggtcacaactgcccaaagccagttctgaatttttatgaagcaaac

SEQ ID NO: 1600 - DNA, 698 bp, Canis familiaris
ggattttgtgtcacctccagaaagtatttgaaaggtacaagactacagcctttatgacatgsctggagagcattcaagaaggagggtcaaaaggagaacctgggaaaatgctttyctgaacctggtccagtgcattcagaacaagccsctgtattttgctgaccgactgtacgactccatgaagggcaaggggactcgtgataaagtcctgattagaatcatggtctctcgcagtgaagtggacatgttgaaaattaggtctgaattcaagagaaagtatggcaagtccctgtactactacatccagcaagacaccaagggcgactaccagaaagcgctgctgtacctgtgtggtgggsaygactgaagcccaccacggcatgagcgtctaggaaaggtgcccctttgtttgcagctaacagttctagaaaatagcttgtgactaacagtccccttatgcccatccctgcgaggwtggtgttagcatagccccctccccatccttattttagttacctaagcattgcctgcctctcatstctagtctctccttttagccaaagaaatgaacattccaaggagttggaagtgaaatctatgatgtgaaacactttgcctcttgtgtactgtgtcataaacagatgaataaactgaatttttacattawaaaaaaaaaaaaaaaaaaaaaaaaaaaaaaa

SEQ ID NO: 1601 - DNA, 3943 bp, Canis familiaris
  misc_feature (844)..(844): n comprises a, c, g, or t, or includes no nucleotide
  misc_feature (863)..(863): n comprises a, c, g, or t, or includes no nucleotide
ggatcctcaataatctgtgagacggtgtagatgccctgtgggaacagaatgttctagactcactgcctcacacagctccctgaccaggactcagggagtcagagtgacaagagcgctgtggggcaaggtgtcaggaccccgggctgcctctcaggctctcaggccccagggcgggtccggggcggggacgctcaggctcgggagtccccacctccccggggatttcacttcttctcccaacctggctctgggccccctgcctggagactcatgacgcagccccagcgcgcactcccattgggtgcagcctttctggaggagccaatcagcggcaccgggtcccgggctctgaagtccacaccagaaccgccaggacgcagctgctccaccgaccctaaaggtctgggctatggtgcccggaaccctagccctgctgctgtcgggggccctggccgtgaccctgacccgggcgggtgagtgcgggcgggagcgaggggaccggcgggcggggacgcgggaccccgggaagccgcctctccgccgcccccggcccctcccgcctccgccccgccccgggcatctcccctgggccccgggccccgcggcgggagggggtcgggcggggtctcagccctcggctccgcaggctcccactccctgaggtatttcbrsacckccgtgtcccggcccggccgcggggaccccckctwcatcdcygtsggctacgtggacgacrcgcagttcgtgcggttcracagcgacgcggcsastsrgargvyggagccgcgggcgccgtggrtggagcaggaggggccggagtattgggacssgsagacgcggrhmnycarggagamcgcacrrvnktdccgagtgrrcytggacmccctgcrcggytactacaaccagagcgaggccggtgagcggcgcgggcccggggccggggcacgacccccatccccccgaccggccgggtcgccccgagggtccgggtccgggcgtcaccccgagtccgaggccccccaccctaaacgggtcctcagagccaggaagaggccgtgcgccctttcgagcggttttcctttcggtttgaacttagaagtcttgcggtcccgggactactagggtgttcaccgcggggcggggcctcggggcctcggggcggagctgaccgcgggggcggggccagggtctcacaccttccagtggatgtttggctgtgacctggggcccggcgggcgcctcctccgcgggtacagtcaggacgcctacgacggcgccgattacatcgccctgaacgaggacctgcgctcctggaccgcggcggacgcggcggcgcagatcacccggcgcaagagggaggcggcaggtgatgcagggcacctgaggaactacctggagacgacgtgcgtggagtggctgcggaggtacctggagatggggaaggagacgctgctgcgcgcaggtaccggggccccgggcctccccgatctcgcctccactagggagggcttccctccaggaagggaatatggactcagggtcagaacacggcccctcccacgggtggggagaggggatccgcctgggtgttgatagtcctactagggtgactcacccagaggccgcttttctcgaaggacaatggagcaatccacggtctccggggaggcaggtggaggccatcctgagataaccgccagtggtgccctttgacctggcagctgggtgggaaccatgactttccctcaaggccttcttcaatgaaaacatatttggagcttgaactgggagttttctgactccttcagcctccaccacggtcaggaccattagtgtgctctccaccttagacctgcagcctcctaccctggactctctccctgattctagaatttctaaagattaggacatcccaaaggctaggttggtgactgggctttgtgcttcttccaagtgaaccaactgccctgtccaccctaggatggtcacacaaatgcagtctcagtggaccccgcagttaaccaaagtgtgggttttccaattcttccttctcagaaccccccagcacacgtgtgacccgccaccccgtctctgaccatgaggtcaccctgaggtgctgggcgctgggcttctaccctgcggagatcaccctgacctggcagcgggatggggaggaccagacccaggacacagaggttgtggacacaaggcctgcaggagatgggaccttccagaagtgggcggccgtggtggtgccctctggacaggagcagagatacacgtgccacgtgcagcatgaggggctggtggagcctgtcacgcggagatggggtaaggagggcctcggggtagagcttctactcagggcaagtggagctcttctggagaatttcagcagagtcaggtctcaagccagaggctggaccctcatcctccctcccctttccagagccttcccctctgtccaccattgtcatcgtcagcattgctgctctggttctcctcgtggtcgctggggtgattggagctgtgatctggaggaagcagcgctcgggtagggaaccgactgaatactctgtgttttcctgtcctgttggggggtttcctagggagcacgctgtcctgccttgttaacgggaggtgccgtccatacgcggttactctcccacactggagctgtgtactcacactcactgtgcagcaaacacttgggaaaatgaaggccagagtttcgccttggtgattctggtgacggggactgattcccagccgtcacaggacagagcggaaggcccctgctgaggacagacctccagcaagtcaggtggtccagtgacccctcacctcatggcttgtctcctgaccctgacctgggcggtcagtcagaattctgcagactcactctgcaccaggactgggagcttcctcgaggatctcctggcccagccctgtgcccggcctctcacatgatgttttcttcccacaggaggaaaaggaccaggctactctcatgctgcacgtgagtatgtagggagtgatccctgagaccccgggggagtgtagacaggaccccatggggagctcacccccacagcttctcctttagtctcacctcctgtgagctctgaccacgtcctgtttattctcctctaggcgatgacagtgcccagggctctgatgtgtctctgacagctcctagaggtgagaccccagagaccttgaagtggggagggttggggccttggggacctgatgagtgcgagggggactgttgagaatgtcagcacttatgtgactgacctcagtttgtacttgattgtttttcagtgtgagaccagctgcctgtgggactgagcgatgcaagatgtgttcacatctcacgtgatgacatcaacaaccctggcttgtctctgcaaacagtgtcaggatgtgcctgtgtccctaggagcataatgtgaggaggtggggagattggcccaccctgcccaccatgacctgtccctaatctgatgtgcgctctcttctctgatgtgctttcctgtccagcagagggagggctggaccatctccatccctgtctttgtttcatgttgggctgagtgtagtgccttacttttctattcaaaatgagaatccagggtagccctggttgctctgtggtttagcgccaccttgagcccagggcctgatcctggggacccggatggagtcccatatctggctccctgcatggaacctgcttctccctctgcctgtctctcatgaataaataaataaaatcttaaaaaaaaaacaaaatgagaatccagatatattttctaattcatggcacgtgaggctgatgaagtaataaaagtgaaatttgtaaggttgagacagaaatgaatggatattgaatgcaccatcctaaaggaaatggtagctaggtgacatgatgcacgtg

SEQ ID NO: 1602 - DNA, 706 bp, Canis familiaris
catgccaagtccaagtaccacaccacgcacraycagtcmcrraarkggcacagaaasggcatcargwrmccccggtcachaagakacgratctcttaagggggtagaccccaagttcctgaggaacatgcgctttgccaagaagcacwacaagaagggcctgaagaagatgcaggccaacaatgccaaggccatgkctgcgcgtgctgaggctatcaaggctcttgtcaagcccaaggaggttaagcccmagatccsvaaggscggcascygcaagctcaatcgacttgcctacatcgctcaccccaagctcgggaaacgtgctcgtgcccgcattgccmaaggtctcaggctctgccggccmaaggccaaggccmaggctcaaaccaargsycaggctgcagctgcgaccccggctccggctccggctccggctccggyycskgytcctgctcctgctcctgctcctgcttctactcctgcagcgcaggctcccaaaggtgcccaggcccccacaaaggccccagtgtagaggyttctgcctgccagtgtgaggacggaaggactggtatgacccctgggcttctgtctgcatgggcccggtgtcctcckgtgctatttgtacaaataaacctgcggcaggawmwrwmmaaaaaaaaaaaaaaaaaaaaaaaaaaaaaaraaaaaaaaaaaaaaaaaaaaaaaaa

SEQ ID NO: 1603 - DNA, 3742 bp, Canis familiaris
ggatcctcagtaatctgtgacactgtgtagatgccctgtgggaacagaatgttctagactcactgcctcacacaactcccgggccaggactcagggagacagtgcgacaagagccctgtgtgccctaggtgaggagtcagggcaaggtgtcgggaccccggactgcctctcaggctctcaggccccagggcgggtccggggcggggacgctcgggctggggagtccccacctccccgggtttcacttctgcgtctcccaacctggctcagggccccctgcctggagactcgtgacgcagccccagcgcgcactcccattgggtgcagcgtttctggaggagccaatcagcggcaccgggtcccgggctctaaagcctccgccgccgcctccgccccccagtccagcggcgacggccagtgtccccggagcccggagatggaggtggtgatgccgcgagccctcctcgtgctgctgtcggcggccctggccgtgaccctgacccgggcgggtgagtgcgggcgggagcgaggggaccggcgggcggggacgcgggaccccgggaagccgcctctccgccgcccccggctcctcccgcctccgccccgccccgggcatctcccctgggccccgggccccgcggcgggagggggtcgggcggggtctcacccgtcggctccgcaggctcccactccctgaggtatttctacacctccgtgtcccggcccggccgcggggacccccgcttcatcgccgtcggctacgtggacgacacgcagttcgtgcggttcgacagcgacgcggccactgggaggatggagccgcgggcgccgtggatggagcaggaggggccggagtattgggaccgggagacgcggaccgtcaaggagaccgcacagaggtaccgagtggacctggacaccctgcgcggctactacaaccagagcgaggccggtgagcggcgcgggcccggggccagggcacgacccccatccccccgaccggccgggtcgccccgagggtccgggtccgggcgtcaccccgagtccgaggcccccgcccctccccctcgtccccgtcccgaacccgcgggaactcccgggaggttttactttctctttggactgattggcggcctgtcggggcggggccagggtctcacacchkccagwssaygtwyggytgtgayctggggcccggcgggcgcctcctccgcgggtacwgkcaggwsgcctacgacggcgccgattacatcgccctgracgaggacmygcgctcctrsaccgcggcggacrcggcggcgcwgatcacycggcgcaagwsggargcggcaggtrhwgcagrgcrcsddargarctacctggagaygacgtgcgtggagtggctgcrgagrtacctggagatggggaaggagacgctscwgcgcrcaggtaccggggccccgggcctccccgatctcgcctccactagggagggcttcccaccaggaagggaatatggactcagggtcagaacaccgcccctcccacgggtggggacaggggatccgcctgggtgttgatagtcctactagggtgactcacccagaggccgcttttctcgaagggcaatggagcaatccagggtctccgggaggcaggtggaggccatcctgagataaccgccagtggtgccctttgacctggcagctgggtgggaaccatgactttccctcaaggccttcttcaatgaaaacatatttggagcttgaactcggagttttctgactccttcagcctccaccacggtcaggaccattagtgtgctctccaccttagacctgcagcctcctaccctggactctctccctgattctagaatttctaaagattaggatatcccaaaggctaggttggtgactgggctttgtgcttcttccaagtgaaccaactgccctgtccaccctaggatggtcacaaaatgcagtctcagtggaccacgcagttaaccaaattgtgggttttccaattcttccttctcagaaccccccagcacacgtgtgacccgccaccccatctctgaccatgaggtcaccctgaggtgctgggcgctgggcttctaccctgcggagatcaccctgacctggcagcgggatggggaggaccagacccaggacacagaggttgtggacacaaggcctgcaggagatgggaccttccagaagtgggcggccgtggtggtgccctctggacaggagcagagatacacgtgccacgtgcagcatgaggggctggcggagcctgtcacgcggagatggggtaaggagggcctcggggtagagcttctactcagggcaagtggagctcttctggagaatttcagcagagtcaggactcaagccagaggctggaccctcatcctccctcccctttccagagccttcccctctgtccaccattgtcatcgtcagcattgctgctctggttctcctcgtggtctctggggtgattggagctgtgatctggaggaagcagcgctcgggtagggaaccgactgaatactctgtgttttcctgtcctgttggggggtttcctagggagcacgctgtcctgccttgttaacgggaggtgccgtccatacgcagttactctcccacactggagctgtgtactcacactcactgtgcagcaaacacttgggaaaatgaaggccagagtttcgccttggtgattctggtgacggggactgattcccagccgtcacaggacagagcggaaggcccctgctgaggacagacctccagcaagtcaggtggtccagtgacccctcacctcatggcttgtctcctgaccctgacctgggcggtcagtcagaattctgcagactcactctgcaccaggactgggagcttcctcgaggatctcctggcccagccctgtgcctggcctctcacatgatgttttcttcccacaggaggaaaaggaccaggctactctcatgctgcacgtgagtatgtagggagtgatccctgagaccccgggggagtgtagacaggacccaatggggagctcacccccacagctgctcctttagtctcacctcctgtgagctctgaccacgtcctgtttattctcctctaggtgatgacagtgcccagggctctgatgtgtctctgacagctcctagaggtgagaccccagagaccctgaagtggggagggttggggcactggggaccagatgagtgcgagggggctgttgagaatgtcagcacttatgtgaccgacctcaatttgtacttgattttttctcacagtgtgagaccagctgcctatgggactgagcgatgcaagatgtgttcacatctcacgtgatgacatcaacaaccctggcttgtctctgcaaacagtgtcaggatgtgcctgtgtccctaggagcataatgtgaggaggtggggagattggcccaccctgcccaccatgacctgtccctaatctgatgtgcgctctcctctctgatgtgctttcctgtccaggagaggcagggctggaccatctccatccctgtctttgtttcatgttgagtactaatctcttactatccgattgaaaataagaatccagatatgagtttgtgtttcctgagtcttgggatgtgaggctgatgaggtaataaaaggagatttgtgaagttgagagagcaaataaatggaagccctgagaaccttccagaactctcatgtttgctgtgttgagtctgttgaagt

SEQ ID NO: 1604 - DNA, 714 bp, Canis familiaris
gtgtcccaggacccacaccacgcaccaaccagtccccgaaaatgggcccagaacggggcatccaagaccccccggttcccaaagatccgaatctcctaaaggggttagacccccaagttccctgaggaacaatgcgcttggccaaggaagcccaacaagaagggcctgaagaagatgcaggccaaacaatgccaaggccatggctgcgcgtgctgaggctatcaaggctcttgtcaagcccaaggaggttaagcccaagatcccacaagggcggcagccgcaagctcaatcgacttgcckacatcgctcaccccaagctcgggaaacgtgctcgkgcccgcattgccmaaggtctcaggctctgccggccmaaggccaaggccaaggctcaaaccaaggyscargctgcrrcyscgrccccggytccrggctccggctccggctccggctccggctcctgctcctgctcctgctcctgcttctactcctgcagcgcaggctcccaaaggtgcccaggcccccacaaaggccccagtgtagaggcttctgcctgccagtgtgaggacggaaggactggtatgacccctgggcttctgtctgcatgggcccggtgtcctcctgtgctatttgtacaaataaacctgcggcaggatctgwmaaaaaaaaaaaaaaaaaaaaaaaaaaaaaaaaaaaaaaaaaaaaaaaaaaaaaaaa

SEQ ID NO: 1605 - DNA, 1563 bp, Canis familiaris
atggaggtggtgatgccgcgagccctcctcgtgctgctgtcggcggccctggccctgaccccgacccgggcgggctcccactccctgaggtatttctacacctccgtgtcccggcccggcgcgggggacccccgcttcatcgccgtcggctacgtggacgacacgcagttcgtgcggttcgacagcgacgcggccactgggaggatggagccgcgggcgccgtgggtggagcaggaggggccggagtattgggaccggcagacgcggaccatcaaggagaccgcacggactttccgagtggacctggacaccctgcgcggctactacaaccagagcgaggccgggtctcacaccmkccagaccatgtacggctgtgacctggggcccgrcgggcgcctyctccgcgggtacagkcaggwcgcctacgacggcgccgattacatckccctgaacgaggacctgcgctcctggaccgcggcggacrcggcggcgcagatcacycrgcgcaagtgggargcggcaggtgtagcagagctacaatggaggaactacctggagacgacgtgcgtggagtggctgcrgaggtacctggagatggggaaggagacgctgctgcgcgcagaccccccaagcacacgtgtgacccaccaccccgtctctgaccatgaggtcaccctgaggtgctgggcgctgggcttctaccctgcggagatcaccctgacctggcagcgggatggggaggaccagacccaggacacagaggttgtggacacaaggcctgcaggagatgggaccttccagaagtgggcggccgtggtggtgccttctggacaggagcagagatacacgtgccacgtccagcatgaggggctgccggagcctrtcacscggagatgggasmyttcccctctgtccaccatkgtcatcgtcagcattgctgctctggttctcctcgtggtckctggggtgattggagctgtgatctggaggaagcagcgctcrggaggwaaaggaccaggctactctcatgctgcacgygatgacmgtgcccagggctctgatgtgtctctgacrgctcctagagtgtgagaccagctgccctgtggggactgassgatgcmagatgtgttcacatctcacgtgatgacatcaacaaycctggcttgtctctgcmaacagtgtcaggatgtgcctgtgtccctaggagcataatgtgaggaggtggggagattggcccaccctgcccaccatgacctgtccctaatctgatgtgcgctctcytctctgatgtgctttcctgtccagsagaggcagggctggaccatctccatccctgtctttgtttcatgttgagtactaatcwcttactayccgattgaaaataagaatccagatatgagtttgtgtttcctgagtcttgggatgtggggctgatgaggtaataaaaggagatttgtgaagttgagagagcaaataaatggaagccctgagaaccttcmaraamwmwmaaaaaaaaaaaaaaaaaaaaaaaaaaaaaaaaaaaaaaaaaaaaaaaaaaaaaaa

SEQ ID NO: 1606 - DNA, 3580 bp, Canis familiaris
gagctcactatctggcatccagtttcctggcggtgatttttctttcagaagagtacggagaagtaaggagtagttcagctcaagtcgagggtttccacaaacgtaagggacaaaaaggggctgatccctgcctggtgtctgtccccggtttcctcagaaggaccgccggccaggcctcagggagacggtgagagaaagcgctccgtgcaggtggaggggaatcagggcaaagccctgggtctccgggaagacctagagcggtgtctgggggcggggaagcccagttccgtcccccgcgcgcctccctcccctctcccaacccgcctcagggcctcccgcctggatactcgggacttggccccagcgcgcacccccattgggcggcggggttctaggggagccgatcggcgtccccggggtccgggcctgcggggccaccctgccggctcttcgggtctctggaacctcaaggatgcgagtcgtgatgcgcgccccccccccccgcccctgctgccttcgggggccctggccgtgaccctgacccgggcgggtgagtgcgggcgggagcgaggggaccggcgggcggggacgcgggaccccgggaagccgcctctccgccgcccccggcccctcccgcctccgccccgccccgggcatctcccctgggccccgggccccgcggcgggagggggtcgggcggggtctcacccgtcggctccgcaggctcccactccctgaggtatttctacacctccgtgtcccggcccggccgcggggacccccgcttcatcgccgtcggctacgtggacgacacgcagttcgtgcggttcgacagcgacgcggccactgggaggatggagccgcgggcgccgtgggtggagcaggaggggccggagtattgggaccgggagacgcggaccgccaaggagaccgcacggactttccgagtggacctggacaccctgcgcggctactacaaccagagcgaggccggtgatcggcgcgggcccggggccggggcacgacccccatccccccgaccggccgggtcgccccgagggtccgggtccgggcgtcacaccgagtccgaggccccccaccctaaacgggtcctcagagccaggaagaggccgtgcgccctttcgagcggttttcctttcggtttgaacttagaagtcttgcggtcccgggactactcgggtgttcaccgcgggggcggggcctcggggcctcggggcggagctgaccgcgggggcggggccagggkctcacacchtccagwssatgtwyggctgtgacctggggcccggcgggcgcctcctccgcgggtacwgkcaggacgcctacgacggcgccgattacmtsgccctgaacgaggacctgcgctcctggaccgcggcggacacggcgrcgcagatcacccggcgcaagwgggaggcggcaggtrmtgcagrgcacswkaggaactacctggagacgacgtgcgtggagtggctgcrgaggtacctggagatggggaaggagacgctgcwgcgcrcaggtaccggggccccgggcctccccgatctcgcctcaggctgaggccgtgggagaggataggaagaaatagaatccacaccagtatatggccctcccatgcgtcatggatggagagactaactctgcctaggttttcagatccggtactagagagtggccctaagggtctgcctttctcctagggaccattaaggtcacattccctccagggatggaggaggagaccatttctgaaataactgatgagcagttctttttgactcactccctttgggagccttgggggattttctcaggctttgttctcagccctgtacctcaagtgtttggaatcaggcctcacctgtttgagtcacttggcctccagccaggccaggaccagaaattcctttttacctctcaaaaacctgccttctacactgggccatctcatcctaattctagaactttccaaacaagaagagattatgtgttcaggctggtgtctgggttattgctcctttcccccaccccagttgtcctattcattctcaggatgaccacatgaaagctgcttcagtggaccaagacagatacagagttcctgaatttaaatctttctttcttctttctttctttctttctttctttctttctttctttctttctttctttcttctttctttctttctctttctttctttctttctttctttctttctttcttctttctctctttctctctttcttttctctttttctcttctttctttctttctttctttctttctttttctttctttctttctttcttcctttcctttcctttcttccttttttaaaataaattttattttatttattttatttttttaaagattttatccatttattcatgagagacacagagagagagagagagagagggagagacagagagagagatgctgagacagaggcagagggagaagcaggctccacacagggagcccaatgcaggactccatcccgggactccaggatcatgccctgggccaagagcaggtgctaaaccactgagccagggatccctaaaataaattttattttatttatttatttatttttttttttaaatttatgatagtcatacagagagagagagagagagaggcagagacataggcagagggagaagcaggctccatgcaccgggagcccgacgtgggacttgatcccgggtctccaggatcgcgccctgggccaaaggcaggtgccaaactgctgcgccacccagggatccctaaaataaattttaaacttaaattcagtttagttaacatatgctgtattattagtttcagagatagaatttacatgattcatcaattgtgtataacacccagcactcattacagtacctgctctccataatgcccatcacccagttatcctttccccccaccaacctctgctttagcaactcgtagtttgtttcccagagttaagagacgcttatggtttgtctccctctctgatttcatcttatttcatttttccttccattcacctgtgtttatgttttgtttcttaaattccacatatgagtgaaatcatatgatatttgtctttctctgatggacttatttcacttagcataatactctctagttcatccacataattgcaaatggcaagatttcattctttttgatggctaagtaatattccatcgtatatatgtaccacattttcattatccattcgtctgttatggtcatctgggctctttaaatagtttggctgttgtggacattgctgctataaatattggggtgcatgtaccccttggaatcattatgtctgtattctttggataaatacctagtagtgcaattgctgggtagtagggtagttctagttctacctttcttaactggatttttgttttatgagtttgataagtttctttagctcttggatactaaccctttgtctgatatgtcatttgcaaatatcttctcccatttctgtaggttgccttttagttttgttgattgttttctttgctgtgcaaaagctt

SEQ ID NO: 1607 - DNA, 544 bp, Canis familiaris
cgatgacagtgcccagggctctgatgtgtctctgacagctcctagagttgtgaggaccagctgccctgtggggactgagcgaatscaagatgtgttcacatctcaacgtgatgacatcracaaccctggctttgtctctgcaaacagtgtcaggatgtgcctgtgtccctaggagcataatgtgaggaggtggggagattggcccaccctgcccaccatgacctgtccctaatctgatgtgcgctctcttctctgatgtgctttcctgtccagcagagggagggctggaccatctccatccctgtctttgtttcatgttgggctgagtgtagtgccttacttttctattcaaaatgagaatccagggtagccctggttgctctgtggtttagcgccaccttgagcccagggcctgatcctggggacccggatggagtcccatatctggctccctgcatggaacctgcttctccctctgcctgtctctcatgaataaataaataaaatcttwaaaaaaaaamaaaaaaaaaaaaaaaaaaaaaaa

SEQ ID NO: 1608 - DNA, 654 bp, Canis familiaris
gatcccatatcaagccaggggccaaggtgctytactcggcgctgcctcaggcaaccactgtstcccacgtstctgacatcgyasgmscggatggtctagtctatgcagttgagttctcccaccgctctggccgtgacctcattaacttggccaagaagaggaccaacattattcctgttattgaagatgctcggcacccacacaaataccgcatgctcatagcaatggtggacgtgatctttgccgacgtggcccagccagaccagacccggattgtagccctgaatgcccacacsttccttcgtaacggaggacactttgtgatttccattaaggccaactgcattgactccacagcctctgctgaggctgtgtttgcctctgaggtgaagaagatgcagcaggagaacatgaagccccaagagcmattgaccttagagccctacgaaagagaccacgctgtagtggtgggtgtgtwcaggccacctcccaaggtgaagaattgaagcccggcgccatctggattaccagagatttgtgttgctactgttacacgtgtttttctattaaaagactcatccaggggcacctgggtggctctgtcacttaaaaaaaaaaaaaaaaaaaaaaaaaaaaaaaaaaaaaaaaaaaaaa

SEQ ID NO: 1609 - DNA, 419 bp, Canis familiaris
gcacgagcaaaaaaaaaaaaaatgtasaaagctggaatgcaggtctggatggattggaactgtgctactgactccttccctccagtgctaaaacacagatgtagtgaggaagaactaatgtagattggcagtcacccacacatctctggtattaccttaaagtcttgtttcaagcatacagtccctaagtgttgggtgttttaaatacacctaagttatattctatttttttaaagttccattagatgggatactaaaatgaccatcctaagtgactgcctgtctctaccactaagaactgctaggtctctctgccattgtaaagaccaacctgaatttacagatgacatctatctacatgtatatcttaccctctaaaacatgtttctcttaaggacccttaagtataacaatagcta

SEQ ID NO: 1610 - DNA, 706 bp, Canis familiaris
tacccgtccggattcccggttcggcccccgcgttccgctcactgcmcgaggtccccgccagccgagcgtccccccgcgccccgcgccaaggtttcaacagacctcaccaagatgccgtctcaaatggaacatgccatggaaaccatgatgttcacgtttcacaagtttkctggggataaaggatacttgacacaaggaagacctgagagtactcatggaaaaggaattcccaggatttttggaaaatchawaagaccctctggcygtggacmaaataatgaaggacctcgaccagtgccgagatggcmaagtgggcttccagagcttcttttcactaattgctgggctcaccattgcatgcmatgactattttgtaatacacatgaagcagaagggcaagaaataggcaccattgagcaacactccgcccggagtgaggtgtcccmaagggtctcaaggaatctgtcccacagcttccccctgtataaaggattccatgagcagatcaggaccctcagaaaatgtacaaataaaatccmacccccatttgagaagcagagaaagaaaagtcagtaaaagaaagccagataagcttttgatttttatattgcttattgcatcctcttaccctcaataaacmaattccttttttagttcctcamwwraaaaaaaaaaaaaaaaaaaaaaaaaaaaaaaaaaaaaaaaa

SEQ ID NO: 1611 - DNA, 629 bp, Canis familiaris
aaatcatcagatgctcataggattctgatggggaagaggaagcagaaaaggagaggcctctacagaacacaaagccgaaaataaagtttaaggaaaaaagtaaaataaagaaactgatccagaaacacagaaagaaaaaaatgtccaagagcaaattcatcaggtccaaatggaaggaaatccaaagctcacgagatcgaacccatatggagagtggcaagaaattaaacaacaagttgagtctcatgaggaggtagatttggaacttccaagcactgaaaatgaatatgtatcaacttcagaacctgatattggtgggcaacccaaagtggtatttaaagaaaaaacagttacttctcttggagtcatcgcagatggagtagccccagtctttaaaaagagaagaattgaaaatgggaagtctcgaaatttaaggcaacgaggtgatgatcagtaattgtaaaaagagctttttgtacctgctttgtggacagcttggasatyayacatcttraarctcctctgtgtttaaatgctaaatatttagatttattctaaatgtattttatgtgaatctaaaataaatcttttttcatgtgaaamwwaaaaaaaaaaaamwmrwrmaaagg

SEQ ID NO: 1612 - DNA, 1148 bp, Canis familiaris
gatatgcggagcctgcaatatggtcggggaaatggaaacgaaggagaagccgaagcccaccccagattacctgatgcagctgatgaacgacaagaagctcatgagcagcctgcccaactystgcsgratckwcraccacctcgagcggctgctggacgaagaaattagcagagtacggaaagacatgtacaatgacacattaaatggcagtacagagaaaaggagtgcagaattgcctgatgctgtgggacctattgttcagttacaagagaaactttatgtgcctgtaaaagaatatccagattttaattttgttggaagaatccttggacctagaggacttactgctaaacaacttgaagcagaaacgggatgtaaaataatggtccgaggcaaaggctcgatgagggataaaaagaaggaggagcagaatagaggcaagcctaattgggagcatctcaatgaagacttacatgtactgatcactgtggaagatgctcaaaacagagcggagatcaaactgaaaagagccgttgaggaagtgaagaaattactggtacctgcagcagagggagaagacagcctgaagaagatgcagctgatggagcttgcaattctgaatggcacctacagagatgccaacattaaatcaccagcccttgccttttctcttgcagcaacagcccaggctgctccaaggattatcactgggcctgcgcctgttctcccaccagctgccctgcgtactcctacgccagctggccctaccataatgcctttgatcagacaaatacagaccgctgtcatgccaaacggaactcctcacccgactgctgcaatagttcctccggggcccgaagctggtttgatctacacaccctatgagtacccctacacgttggcaccagcgacatccatccttgagtatcctattgaacctagtggtgtattaggtgcggtggctactaaagttcgaaggcacgatatgcgtgtccatccttaccaaaggattgtgaccgcagaccgagccgccaccggcaactaacctatgaccttctgacctctgaactcttcacccaatgatgacctgaccatgcctgcctgctgatcagttaactggtaatcgcctttgcttgcctgtcgtcagt

SEQ ID NO: 1613 - DNA, 425 bp, Canis familiaris
ccagggtgtggcacaagagcaagggcccagtgcaaggcagcaaaggcccagcagccaagagttagggcctcggggccttgggaaccctggaaggccaaatggctgaatttccctgggaagtggaccaggaaggctggatcctggagcctcggaatggagtcccacatcgggctccctgcatggagcctgcttctccttctgcctgtgtctctgcttctctccctctctctctctctctctctctctctctctcatgaagcaataaagaaaatctttaaaaataaataaatgtgaggaactgagttatagatattgaacatcttagctgaagtgtcttggctaataaaaccaaccttaaggctagccctagagtcagtcctatcaacctgcctccctagcctctctgtgtatatgtgataacattt

SEQ ID NO: 1614 - DNA, 930 bp, Canis familiaris
atgctgcgggccccgggctccgacgcgcccccgaccctgagcgtccggatcgccgcggcggcgggggcggcctgcctggcggacatgatcaccttcccgctggacaccgccaaagtgcggctgcagatccaaggggaaggccagggccagccccccagggcccccaggtaccgcggcgtcctgggcacggtggccaccctggcaagaaccgaggggctgcagaagctgtacagcgggctgcccgcgggcctccagaggcaggtgggcttcgcgtccctccggatcggcctgtacgacagcgtccgggagtggctcagcccgggccagggagcagcagctagtttaggaagcaggatctccgctggtgtaatgacgggaggagcagcagtgttcatagggcaacccactgaggtcgtgaaggtgagacttcaagcacaragccatctgcayggccgcaaacctcggtacaccggcacttacaatgcctacagaatcatagccaccacggagggcctgacgggcctttggaaagggactactcccaacctgatgagaaatgtcatcatcaattgtacggagctagtcacgtatgacctaatgaaggaggcccttgtgaaaaaccatctactagcagacgacctaccytgccacttcctatcagctcttgttgctggattttgcacaaccgttctctcctctccggtggatgtggtaaaaaccagatttgttaattctgtaccagaacagtacacaagtgtgcccaactgtgcaatgacaatgctcaccaaggaaggaccattggcttttttcaaaggatttgtaccttccttcttgagactcggatcctggaacgtcattatgtttgtgtgctttgaacagctgaagcgagaactgatgaagtcagggcggaccgtggactgtgccacataa

SEQ ID NO: 1615 - DNA, 767 bp, Canis familiaris
  misc_feature (217)..(217): n comprises a, c, g, or t, or includes no nucleotide
ccgcatggaccgtcccctcgagggcgccgactacaccagactcgagccgccatcaccgccagatcwmccyggagctytacgcgtctkacgtckactkgtccvkgtctdrdkactttgatcgcgatgatgtksctktgaagaacttkscmmvawakkktctccmccvatctcatgaggagagggaacatrctgagawactgatgaagctgcagaacsnhcgaggtggtcgaatcttccttcaggataktwaghracchgaccgtgacgattgggagaatgggctgaatgcmatggagtgtgcmttacmcttggaawagagcgtgwatcagtcactactggractgcwcmaactggccmctgatwhdartgacccccmcttgtgtgacttcattgagactcattayctgwacgagmaggtgaaayccatcmaagaattgggtgaccatgtaaccmacctgcgcmagatgggggctcccgaatctggcatggcagagtatctctttgacaagcacacvctgggaaacagtgatavtgagagctaagccttaggctgtcttcccatagccgcmgggtgacwtccctggtcaccgagscagtgcatgcatgttggggttacctttaccttttstataagttgtaccgaaacatctacttctttcgtttgtatcattccttcmaataaagtaatttggtammmmrhmaaaaaamaaaaaaaaaaaaaaaaaaaaaaaaaaaaaaaaaaaaaaaaaaaaaaaarraaaaaaaaa

SEQ ID NO: 1616 - DNA, 559 bp, Canis familiaris
ggagatggtgacatgcctgagatactgatgaagcttgcagtactctactgaggtggtcgaatcgtgccttcaggatattaaggaaaccagaccgttgacgattggggagaatgggctgaatgcaatggagtgtgcattacacttggaaaagagcgtgaatcagtcactacgtggaactgcacaaactggccactgatwaaaatgacccccagcttgtgtgacttcattgagactcattayctgaacgagcaggtgaaatccatcaaagaattgggtgaccatgtaaccaacctgcgcaagatgggggctcccgaatctggcatggcagagtatctcttgtgacaagcacatccctgggaaacagtgatagtgagagctaagccttaggctgtcttcccatagccgcagggtgacttccctggtcaccgaggcagtgcatgcatgttggggttacctttaccttttctataagttgtaccgaaacatctacttctttcgtttgtatcattccgttcaaataaagtaatttggtacccmaaaaaaataaaaaaaaaaaaaa

SEQ ID NO: 1617 - DNA, 649 bp, Canis familiaris
  misc_feature (534)..(534): n comprises a, c, g, or t, or includes no nucleotide
  misc_feature (624)..(624): n comprises a, c, g, or t, or includes no nucleotide
cgcgtccggtcgccgcggcttcctgcttcaacagtgcttggacggaacccggcgctcgtccccccttcccgggcccgccgctcagagccagccctcggccacctccacgcagcgctctcggaccgccccgaggcctccgccgccgccgccccagcgccgcgcagccgccgccgccgccgcctcctcagcctccgccatgacgaccgcgtccccctcgcaggtgcgccagaactaccaccaggactccgaggccgccatcaaccgccagatcaacctggagctctacgcgtcttacgtctacttgtccatgtcttattactttgatcgcgatgatgtggctttgaagaactttgccaaatattttctccaccaatctcatgaggagagggaacatgctgagaaactgatgaagctgcagaaccaacgaggtggtcgaatctttcttcaggatattaagaaacmagaccgtgacgattgggagaatgggctgratgcaatggagtgtgcattacacttgggaaaagagcgtgaatnagtcaytactggaactgcacaaactggscacttgataaaaatgaccccmcttgtgkgactyattgagaaytattactgacgagcaggtgnaatcatcaaaaaatggtgacattac

SEQ ID NO: 1618 - DNA, 768 bp, Canis familiaris
  misc_feature (102)..(102): n comprises a, c, g, or t, or includes no nucleotide
  misc_feature (166)..(166): n comprises a, c, g, or t, or includes no nucleotide
  misc_feature (256)..(256): n comprises a, c, g, or t, or includes no nucleotide
  misc_feature (362)..(362): n comprises a, c, g, or t, or includes no nucleotide
  misc_feature (697)..(697): n comprises a, c, g, or t, or includes no nucleotide
ccgcgtcccctctcggtgcsccmgaactwccaccaggwctccgagccsccwtcaccgccagatcmacctggagctctacgcgtctwacgtctactkgtccangtcktrktacyktgatcscgatgatgtggsyktgargwmhttkgcmvaawrtkttckccvccvnwctcatgargagrggrdacatkctgrgdwrctgatgaakctkcagaacmhhsgaggtgktcgaatcttccttcaggatattwagdwmccngwccktgacgattgggagaatgggctgaawkchmtggagtgtgcattacmyttggmwaagrgcgtgaatcmgtcactactggractgcachwwctggccmctgatnwrwatgamccccmcttgtgtgacytcattgagactcattayctgdacgagcaggtgaaatccatcmaagaattgggtgaccatgtaacchacctgcgcaagatgggggctccsgaatytggcatggcagagtatctctttgacaagcacavsctgggaaacagtgatartgagagctaagccttaggctgtcttcccatagccgcagggtgacttyvctggtcaccgaggcagtgcatgcatgttggggttacctttaccttttctataagttgtaccgawacatctacttctttcgtttgtatcattccttcmaataaagtaatttggtammmnavwavwwwrawrarraaaaaraaaaaaaaaaaraaaaaaaaaaaaaaaaaaaaaaaaaaaaaaaaaaaaaa

SEQ ID NO: 1619 - DNA, 749 bp, Canis familiaris
gccgctcccacctgcaggggccgccgaactcccccggactcgaggccgccatctccgtccagatcaaacctggagcttttacgcktctwagtctactgtccatgtcttattacttgatcgcrawgatgtggctttgaagaactttgccvmatattttctycascmatctcatgaggagagggracatgctgagaaactgatgaagctgcagaaccaacgaggtggtcgaatcttccttcaggatattaagaaaccagaccgtgacgattgggagaatgggctgaatgcmatggagtgtgcatwacactkggaaaagagcgtgaatcagtcactactggaactgcacaaactggccactgataaaaatgacccccacttgtgtgacttcattgagactcattayctgaacgagcaggtgaaatccatcaaagaattgggtgaccatgtaaccaacctgcgcaagatgggggctcccgaatctggcatggcagagtatctctttgacaagcacamccykgggaaacagtgatartgaragctaagccttaggctgtyttcccatagccgcagggtgactyccctggtcaccgaggcagtgcatgcatgttggggttacctttaccttttctataagttgtaccgaaacatctacttctttcgtttgtatcattccttcaaataaagtaatttggtammmmaaaaaaaaaaaaaaaaaaaaarraaaaaaaaaaamaaaaaaaaaaaaaaaa

SEQ ID NO: 1620 - DNA, 696 bp, Canis familiaris
gggctttacgcgtctacgtctactggtcccatgtctattactttggatctcgatgatgtgsctttgaagaacgttgccraataktttctccagccvatctcatgaggagagggaacatgctgagraactgatgaagctgcagracchacgaggtkgtcgaatcttccttcaggatattwagdrwwccagaccgtgacgattgggagaatgggctgwatgcaatggagtgtgcattacacttggawaagagcgtgaatcagtcactactggractgcacmcaactggccmctgatwwaaatgacccccacttgtgtgacttcattgagactcattayctgracgagcaggtgaaatccatcvaagaattgggtgaccatgtaaccvmacctgcgcaagatgggggctcccgaatctggcatggcagagtatctctttgacaagcacaccctgggaaacagtgatartgagagctaagccttaggctgtcttcccatagccgcagggtgacttcmctggtcaccgaggcagtgcatgcatgttggggttacctttaccttttctataagttgtaccgaaacatctacttctttcgtttgtatcattccttcaaataaagtaatttggtaccccaaaamaaaaaaaaaaaaaaaaaaaaaaaaaaaaaaaaaaaaaaaaaaaaaaaaaaaaaaaaaagg

SEQ ID NO: 1621 - DNA, 653 bp, Canis familiaris
actgtccacgtgtatactgtgatcccgatgattggctttgaagaactttgccccatatttgtctcccaccacatctcatgaggagacgggaacactgctgagaaactgatgaagctgcagaaccatcgaggtggtcgaatcttccttcaggatattaarraaccmgaccgtgacgattgggagaatgggctgaatgcmatggagtgtgcattacacttggaaaagagcgtgaatcagtcactactggaactgcacmaastggccactgataaaatgacccccactkgtgtgacttcattgagactcattayctgaacgagcaggtgaaatccatcaaagaatkgggtgaccatgtaaccaacctgcgcaagatgggggctcccgaatctkkywtggcagagtatctcttkgacaagcacaccckgggaaacagtgatartgagagctaasccttaggctgtcttcccatagccgcagggtgacttccctggtcaccgaggcagtgcatgcatgttggggttacctttaccttttctataagttgtaccgaaacatctacttctttcgtttgtatcattccttcaaataaagtaatttggtacccmaaaaaaaaaaaaaaaaaaaaaaaaaaaaaaaaaaaaaaaaaaaaaaaa

SEQ ID NO: 1622 - DNA, 642 bp, Canis familiaris
tactttgatcgcgatgatgttggctttgaatgaatcttttgcccgagatttttggtccaccaatcgtcatgaggagatggaacatgctgatgaactgatgaagcttgcagaacctacgatggtgtcgaatcttccttcaggatattaagataccagaccgtgacgattgggagaatgggctgaatgtcaatggagtgtgcattacacttggaaaagagcgtgaatcagtcactactggaactgcacaaactggccactgatawwwatgacccccacttgtgtgacttcattgagactcattacctgaacgagcaggtgaaatccatcaaagaattgggtgaccatgtaaccaacctgcgcaagatgggggctcccgaatctggcatggcagagtatctctttgacaagcacaccctgggaaacagtgatartgagagctaagccttaggctgtcttcccatagccgcagggtgacttyccctggtcaccgaggcagtgcatgcatgttggggttacctttaccttttctataagttgtaccgaaacatctacttctttcgtttgtatcattccttcaaataaagtaatttggtaccccaaaawawaaaaamaaaaaaaaaaaaaraaaaaaaaaaaaaaaaa

SEQ ID NO: 1623 - DNA, 623 bp, Canis familiaris
ttgaagaactttgcccaatatgtgtctccacccatgctcatgaggaagaggggaacatgctggagaaactggatgaagctgcagaaccaycgaggtggtcgwatcttccttcaggatattaagraaccacgaccgtgacgattgggagaatgggctgaatgcacatggagtgtgcattacacttggaaaagagcgtgaatcagtcactactggaactgcacaaactggccactgataaaatatgacccccacttgtgtgacttcattgagactcattacctgaacgagcaggtgaaatccatcaaagaattgggtgaccatgtaaccaacctgcgcaagatgggggctcccgaatctggcatggcagagtatctctttgacaagcacaccctgggaaacagtgatartgagagctaagccttaggctgtcttcccatagccgcagggtgacttcccctggtcaccgaggcagtgcatgcatgttggggttacctttaccttttctataagttgtaccgaaacatctacttctttcgtttgtatcattccttcmaataaagtaatttggtaccccaaaaaaaaaaaaaaaaaaaaaaaaaaaaaaaaaaaaaaaaaaaaaaaaa

SEQ ID NO: 1624 - DNA, 644 bp, Canis familiaris
tgaatcgcggatgaatgtggctttgaagaacctgtgtccaaatattgttctccacccagtctcatgatggagagggaacatgctgagawatctgatgaagctgcagaaccwacgaggtggtcgaatcttccttcaggatattaagaaaccmgaccgtgacgattgggagaatgggctgaatgcacatggagtgtgcattacacttggaaaagagcgtgaatcagtcactactggaactgcacaaactggccactgatwaaaatgacccccacttgtgtgacttcattgagactcattayctgaacgagcaggtgaaatccatcaaagaattgggtgaccatgtaaccaacctgcgcaagatgggggctcccgaatctggcatggcagagtatctctttgacaagcacaccctgggaaacagtgatartgagagctaagccttaggctgtcttcccatagccgcagggtgacttccctggtcaccgaggcagtgcatgcatgttggggttacctttaccttttctataagttgtaccgaaacatctacttctttcgtttgtatcattccttcaaataaagtaatttggtaccccaaaaaaaaaaaaaaaaaaaaaaaaaaaaaaaaaaaaaaaaaaaaaaaaaaa

SEQ ID NO: 1625 - DNA, 648 bp, Canis familiaris
agtttacgctctacgtctactgtccatgtctatactttgatscgatgatgtggcttttgaagamytttgccgaatatkttctccmccatctcatgaggagagggdacatgctgagawactgatgaakctgcagaaccamcgaggtggtcgaatcttccttcaggatattaagwaaccaskwccgtgacgattgggagaatgggctgaatgcaatggagtgtgcattacacttggaaaagagcgtgaatcagtcactactggaactgcacaaactggccactgataaaaatgacccccacttgtgtgacttcattgagactcattayctgaacgagcaggtgaaatccatcaaagaattgggtgaccatgtaaccaacctgcgcaagatgggggctcccgaatctggcatggcagagtatctctttgacaagcacaccctgggaaacagtgatartgagagctaagccttaggctgtcttcccatagccgcagggtgacttccctggtcaccgaggcagtgcatgcatgttggggttacctttaccttttctataagttgtaccgaaacatctacttctttcgtttgtatcattccttcaaataaagtaatttggtacccmaaaaaaaaaaaaaaaaaaaaaaaaaaaa

SEQ ID NO: 1626 - DNA, 2649 bp, Canis familiaris
cccgggaagcgctcccacgccccgctggccccttccctgagctgggggaagggacccgtccggaagggagacccctcctcccttcccctcccgccccactcgcgccgcggggatggctccgtggcctcacgggaacggctctgtggcctcgtggccggctgcccccaccccgacgcccgatgccgccaacacgagtgggctgccaggggcgccctgggcggtggccttggcgggggcgctgttggcgctggaggtgctggccaccgtgggaggcaacctgctggtcatcgtggccatcgctcggacgccaagactgcagaccatgaccaacgtgttcgtgacgtcgctggccaccgcggacctggtggtggggctcctggtagtgccgccgggggccaccttggcgctgacgggccgctggcctctgggcgccaccggttgcgagctgtggacctcagtggacgtgctgtgtgtgacagccagcatcgaaaccctgtgcgccctggcggtggaccgctacctggccgtgaccaacccgctgcgctacggcgccctggtcaccaaacggcgcgcccgggcggcagtggtcctggtgtgggtcgtgtccgccgcggtgtcgttcgcgcccatcatgagcaagtggtggcgcgtgggagccgacgccgaggcgcagcgctgccactccaacccgcactgctgcgccttcgcctccaacataccctacgcgctgctctcctcctccgtctccttctaccttccgcttctggtgatgctcttcgtctacgcgcgcgttttcctcgtggctacgcgccaactgcgcctgctgcgccgggagctgggccgcttcccgcccgcggagtctccgccggccgcgtctcgctcccggtcccccggcccggcccggcggtgcgcttcgcccgccgcggtgccctccgaccgcctgcggcccgcgcgcctcctgcctctgcgggagcaccgggccctgcgcaccctgggcctcatcgtgggcaccttcactctctgctggttgcccttcttcgtggccaacgtgatgcgcgctctcggggggccctctctggttcccagcccggccctcctggcccttaactggctgggctacgccaactctgccttcaacccgctcatctactgccgcagccccgacttccgcagcgctttccgccgcctactgtgccgctgccggcgggaggagcaccgcgccgccgcctccccgccgggcgacccctcggccgcccctgcggccctgaccagccccgcggagtccagccggtgccmagcgctcgacgggtrgstractgaggcgaggaggccggcggttcagggtcagaaggcattcggagtctctttgggccatttctcagagtttggggttcggtaggataaggtggggttggagacgtctctgcggcgaaagaaggggggacctggagtagggaaccaacatggaagcccggacccttccgtctcccgcggccgagcacctgccccaggacggaagcaaagagggcagcagattgttgttcaccccaggacctagtgcggtccggggaatgcggctgtatcctgagccggctcggtcagctccgcattttctagctgagttctttggcctcccagatctcttgccaccccttgggccggctttgacttgcagggaagacgagaggccttctcagactcaaggcctgagctctggtttctttgaaaggtgtgatagctacggagtgatggtgagaatccactcgaggtctgaaggataagcgggagttggggagggggtgaggactgtgagtgtcaattcttctcctgggtaggagcaggccccgttggaggtggggggtgggtattttgtggctgggtggagcccggatgcttctgcgagattgtggacaaatgcttcccagcgtccctgacctttgctccttccctctactggccctgtctccaccctgtgcccctcaccccaagatatgttatctccatttttcagggcttcctggggaatctcttaggtcctgaacgacaagaaacaactctgtcaatccagaacttttggaaagcctctcctggcctctgtttagaatgggccctgtggaacttcccagctggaaatctctgacctccagaaactgatgacttggccttggggtggggaggcggaggttgggaggggcaacccttaccaagtgagttttcaccatcctcttgtctctctcttcctgagaagagttttctaaaccccacccctgaattttaccactacctcagcagctgaagtacccagcagcctgctctcagctgccctcggagtccccattagctttggtggcccacctgtcaccttgctcacttctgtgctgcgtgcttagggcaaagaggtctctcctccttctattctttctgctgcctgtggacctgatggaccactgagtgtccttcaggctcggtgggcaaggctgggagcagaaagctataaaaggtccgggtttggggttctgtccctgactccatcactacagattcctaagcaccagccttcccccctttggatacaggacagctctgatctacctcacagcagtgtcaggaggacttctccagggtttgaggagggtggagggtgaattc

SEQ ID NO: 1627 - DNA, 642 bp, Canis familiaris
gccatcttctgcacaattgttttaggcacttttgtggtacagataataattgtgcagtttggtggaaaacctttcagttgttcagaactttcaatagaacagtggctatggtcaatattcctaggaatggggacattactctggggccagcttatttcaacaattccaactagccgtttaaaattcctaaaagaagctggccatggaacacaaaaggaagaaatcccagcggaggagctcgcagaggatgtggaagagattgaccatgctgaaagggaactgcggcgtggccagatcttrtggtttagaggtctgaacagaatccaaactcagattcgagtggtgaatgcatttcgtagttctttatatgaagggttagaaaaaccggaatcaagaagttcgattcacaactttatgacacatcctgagtttaggatagargattcagagcctcatatccccctaattgatgacactgatgcygaagatgatgctcctacaaaacgtaactccagtcctccaccctctcccaacaaaaataacaatgctgttgacagcgggattcaccttacaatagaaatgaacaagtctgctacctcttcatccccaggaagcccactacatagtttggaaacatcactc

SEQ ID NO: 1628 - DNA, 624 bp, Canis familiaris
ggtccacttcatcaaccccgaaacggtgcccaaagccaatgctgtggcccccactcagctcaacgccaatctctgtcctctacttcgacgacagctccaacgtcatcctgaagaatacagaaacatggtcgtccgagcctgtggctgccactagcacctcctggaggtcaggccctcagggaggccgcgttgttcccggatccttgggaacccccaccacccagcacagtgaccaccttttggagacctgccccgcccccgtccccaatcttaatggtgtaggaggattaaggaatttgagaggcaaatgccttttgatcaggttttcatcggcctcctgtggacaagatcctacatgctgctgcaggcaaaacctaaaggaaaaaaaaatatataaagaaaaattgcccggccacgatcattggttgtgaagtctcagccgtgcactgactcgttcccaggggtaattaggagcacccttcagccaggccacccagcagcgggaggaagggggcacggcgaggggtgggcacatttgtgtctgtgcacaaggaaaattgacacggaagttcctgtaataaatgtcacaataaaacgaatgaatgaaaaaaaaaaaaaaaaaaa

SEQ ID NO: 1629 - DNA, 2281 bp, Canis familiaris
ggatccctgtgttgagagaggcatttagaagataaaataactgagtggtccgcccaagtctgctcgggagaaagggtttgggatgatcaacatgggaagagcaagattctggaggtcggctgaggctgaagctctcacaagcaaggctctctgagctcctcggtcagctgctctgtaaaatggggtggtaatgatatcgccttcacgagatggtcgtgagggtcaaatgtgacaatgcacaggcatgctgtctcaaatgatgagctctatatgaatattaaaagaagaaagctggggcggcgcctagggtggctggagagagcatcttttgggggtgctgtacctggagttgcactgctggggacgagacccaagccctcaagggatcttccaatcttgtgatcctctggtggtgactgggctggggaagcccttgtggccgggtcctgcagcgggttcaaggagcagggctggggggacacctccagctttggtcttctgccccagccacctgggtgtgcccccatgtcaaggaaatgggggggcagagtggggctgggttcctctggaagtgagtgtcagcaccagctgcctcaggacaaagtggtcggatggtggtaaagtgtcagggggatggtgacagaggccaaggtggaatctgggactgaactgtgcccagaaaccccagaatccatggctgttctgggctccctttccccaaacacacattctctctggtggacagaggggagccgtgctgggaagagaaatgggagggtgaggaaaggtagcacagctcttgcagcacacccagcctgacatgcccccccatcttttgggggccgggttgggtccttctcacctgggcagacaaccctatggtgatatcccaccagagcctggactcaggctcctccttgctgccagctccccctggaaatgaggatacattgggtgatgtctcaagctgcgctccccatgtgctcagccttcagggctagtgacagtggggagggggcaaggagggagggaaggcctgggggacacgaccccaagaagagcgggaacaggacaagagggaggaggctctctacataatccatcagcacagagcggccagtggccgatgaataaatgtatagagagaagaggtgggggcggagggagagagggagagagggaagggaccagggtataaagagggcccgcaagaaccgattccaggatcccagcagccagctccccaaagcgctcagggtcctgtggacggctcaccccggctgcgatggctgcaagtaagtccccctgggctcggtggtggaccgaggggcgaggtggaggggggcctgcagatggctgggggtgccacccccgggctctggggctggctgaggtgtgagcatagacasstacgcccggacgtgtggcccagtgctagaggttctgggtccctgcggggttggggcagggctggcaggaaccaggcctcttgcccgccgtccgtgcccctmygkstgyaggcccycggamctctgtgctcctggccttcgccttgctctgcctgccctggcctcaggaggtgggcgccttcccggccatgcccttgtccagcctgtttgccaacgccgtgctccgggcccagcacctgcaccaactggctgccgacacctacaaagagtttgagcgggcgtacatccccgagggacagaggtactccatccagaacgcgcaggccgccttctgcttctcggagaccatcccggcccccacgggcaaggacgaggcccagcagcgatccgacgtggagctgctccgcttctccctgctgctcatccagtcgtggctcgggcccgtgcagtttctcagcagggtcttcaccaacagcctggtgttcggcacctcagaccgagtctacgagaagctcaaggacctggaggaaggcatccaagccctgatgcgggagctggaagatggcagtccccgggccgggcagatcctgaagcagacctacgacaagtttgacacgaacctgcgcagtgacgatgcgctgcttaagaactacgggctgctctcctgcttcaagaaagacctgcataaggccgagacgtacctgcgggtcatgaagtgtcgccgcttcgtggaaagcagctgtgccttctagttgctgggcatctctgtcaccccctccccagagcctccccaaccctggggagtgccgctccagggtccactgtgctttcctaataaagttaagttgcatcataaaaaaaaaaaaaaaaaa

SEQ ID NO: 1630 - DNA, 672 bp, Canis familiaris
atgaactttctgctctcytgggtgcattggagccttgccttgctgctctacctccaccatgccaagtggtcccaggctgcgcctatggcaggaggagagcacaaaccccacgaagtggtgaagttcatggacgtctaccagcgcagctactgccgtcccattgagaccctggtggacatcttccaggagtaccctgacgagatcgagtacatcttcaagccatcctgcgtgcccctgatgcggtgtgggggctgctgtaatgatgagggcctagagtgcgtgcccactgaggagttcaacatcaccatgcagattatgcggatcaaacctcatcaaggccagcacataggggagatgagtttcctgcagcatagcaaatgtgaatgcagaccaaagaaagatagagcaaggcaagaaaaaaaatcarttcgaggaaaggggaaggggcaaaaamgaaagcgcaagaaatcccggtataarycctggagcgttccctgtgggccttgctcagagcggagaaagcatttgtttgtacaagatccgcagacgtgtaaatgttcctgcaaaaacacagactcgcgttgcaaggcgaggcagcttgagttaaacgaacgtacttgcagatgtgacaagccsaggcggtgagccgggctggaagaaggaggctccctc

SEQ ID NO: 1631 - DNA, 1743 bp, Canis familiaris
agacaccatggccgccttgggcatcacagtggccctgctggtgtggatggccaccttaatgcttatctctatctggaagcagatctacagccgctggaaactgccccctggcccttttccactgcccatcattgggaatattctgcaggtggatatcaagaatgttcccaaatctctcgccaagctggcagagcagtacgggccagtgttcaccttgtacctgggctcccagcgcacagtggtcctgcatggctacaaggcggtgaaggaagttctgcttgaccacaagaatgacctttctggcagaggagaagtcttcgcattccagtcgcacaaggacagagggatcacgttcaacaatgggcccggctggaaggacacgcggcgactctccctgagcaccctccgggactacggcatggggaagcgcggcaacgaggagcggatccagagggagatccccttcctgctggaggcgctcaggggcacccggggccagcccttcgaccccacctttctcctgggcttcgcccccttcaacgtcatcgctgacatcctcttccacaagcactttgactactcggatcagactgggctgcggatacagaagctgttcaacgagaacttccacctgctcagcaccggctggctccagctttataacattttcccaagctatctgcactacctgcccggaagccatagaaaagtcttaagaaatgtggctgaactaaaggattacagcttagaaagggtgaaggagcaccaggagtcgctggaccccacctgctcccgggacttcactgactgcttgctccaggagctgcagaaggagagatacggtacggagccttggtataccttggacaacattgccgtgaccgtggctgacctgttctttgcgggcacggagaccaccagcaccaccctgagatacgggctcctgattctcatgaaatacccagaggtcgaagagaaacttcatgaagaaatcgacagggtgatcggcccaagccgagtccctgccatcaaggacaggctggagatgccctacatggatgccgtggtgcacgagattcagcgattcatcgacctgctgccctccaacctgccccatgtagcaaaccaggacacgatgttcagaggatatgtcatccccaagggcacagtggtaattcccacactggactccgtcttgtttgacaaacaagaattccctgatccagagaagttcaagccagagcactttctgaatgaaaacggaaaattcaaatatagtgactacttcaaggcattctccgcaggaaagcgggtgtgtgttggagaaggcctggctcgcatggagctcttcctgttcttgtccgccattttgcagcactttaacctgaagtctctcgtcgaccccaaggatattgacctcagtccctgcacaatcgggtttgccaagatccccccccatyacaaactctgtgtcgttccccgctcgggctgaagacccccgggccccaggctctttggtgcaaacctggagtcttcctgcttccgcatatccctttaatgcctccaggaagaccctccctgcacagtctggtggaggcactcagggtttcacagggaataaattggtcctgagatgctgcttttcagagtcacactcatcagatgaaatttgacagcaacgtccaaaaaagattgtgcaaaactaattaaacaaattgaaacaaamaaaaaaaaaaaaaaaaa

SEQ ID NO: 1632 - DNA, 651 bp, Canis familiaris
gcggcctgctcccggctcctggtccagtacaaggccgccttccggcaggtccaaggcgcggagatcagctccatcgacgagttctgccgcaagtttcgtctggattgcccactggccatggagaggatcaaggaggatcggcccatcaccatcaaggacgacaagggcaacctcaaccgctgcatcgccgatgtggtctcgctcttcatcacggtgatggacaaactgcgcctggagatccgtgccatggatgagatccagcctgacctgcgggagctgatggagaccatgcaccgcatgagccacctgcctcctgacttcgagggtcgccagacggtcagccagtggctgcagaccctgagcggcatgtcagcctctgacgagctcgacgactcgcaggtgcgccagatgctctttgacctggagtcggcctacaacgctttcaatcgcttcctgcacgcctgaggctgtgcgctgggccctgggccccgggggcagggagggccmccggctctgcctgtgactcctgcgggtgtgtcagccctggagcccccgccctcgccctcctcgcaataaaggtgctgtctgacctccwwaaaaaaaaaaaaaaaaaaaaaaaaaaaaaaaaaaaaaaaaaaaaaaaaaaaaaaa

SEQ ID NO: 1633 - DNA, 504 bp, Canis familiaris
cagccggaggcggctccgcgagtcgaacgccccgaagccggtgatgaacctcaagcccgccggggtccacatcatgcacggagcgagcgtcgactagaacgtagtccaaggtcttgtcgttgtcccgaaccacgcatttcggcccctccagatggctctggcactcaaccctcctcctgagctccgggacatttagcggatggcggactggatgtggaaccgcgtcctccggtattaggacaaatatctccagcaccggtggaacaaccacatgaaacagatggttatggactagcaggccagggtcgtcctccgacatggggccgcgtcgcaatggaaaaactttccgcctggtcctcgggctcgtgcgtaggacaaatggtaggcatcaaattcttctcagcatcacccttgatgtttataataaaggcgtctgctcccagttaacctttgraaaraaaaaaaaaaaaaaaaaaaaaaaaaaaaaaaaaaaaaaaaaaaaaa

SEQ ID NO: 1634 - DNA, 504 bp, Canis familiaris
gtcggcctccgccgaggcgctcagcttgcggggcttcggccactacttggagttcgggcggccccaggtgtagtacgtgcctcgctcgcagctgatcttgcatcaggttccagaacagcaacagggcttggtgcgtaaagccggggaggtctaccgagaccgtgagttgggaggaggactcgaggccctgtaaatcgcctaccgcctgacctacaccttggcgcaggaggccataatcctgtttatagaggtcgtggccaccttgttggtgtactttgtctaccaatacctgatcgtccggtcccagcaggaggctgtaccccggcgcagcgttacctttttgaaaggcggaccaggagcccgagcacgcatcctgtttaccatccgtagtttaagaagagtcgtagtgggaactacaaatattatttccgcagacgagggtcaattggaaacytttytttttttttttttttttttttttttttttttttttttttttttttt

SEQ ID NO: 1635 - DNA, 699 bp, Canis familiaris
ccccccttgragaagaagctcttcgcctgggacaacttcdacatggtcacctatgacatcaggctctccwaagatgtgaagagccccacatgtcaggaaaggcwacaggagctggkkgtkacggctcctgagggcagagccarccggcctgtgcccgtgcagcttttctcggctttttaagctttcattakkaatccggaagaakgtgcgtgktcaccggktctgaccgtgtggaaacascagtkgggatttagmcagtgtcacmatcmakggtcttttcttkggtcagcttttraagggcggtttaaccmwawwmcagtgcaagtttcgtggtgatttggggcagaagctgtcatgcatagtagtctcttcatggraaccmchaagcttttgataaamgscccttactggctaaagggggcatatttggaggagagttgggscagaacagcttactccacacggcacccagggtcgtcccctgcctgtgcctggttaccacaagccataattagaggagggggagcagctcttgtggccagcgctgaacacctgcatagtgggcttctaaggcttcacgtagcatccmgtggggcatcacataccctttgccctgtgaaataaagcmatsttacctachammmaaaaaaaaawaaaaaaaaaaaaaaaaaaaaaaaaaaaaaaaaaaaaaaaaaaaaa

SEQ ID NO: 1636 - DNA, 686 bp, Canis familiaris
cagttttttgttcccccgctgggtgaaccattcacttgttcaaaatgatcgggctcgawaacgacagggctcktccggaagccaggaccttgaaccgattgcttcggatgccacattagwagccagagctccctgtcccgctgaactcgtggraccacctayggagtcggatggctccccggatgatggtccggaacgtttggattctggggctcgcagcaccgtagtcccccaagaacatgccgaacggggagagtctgggatcgaacctcagtcctgcgtctccttgtctcgtcctcgctgtgatgggtcgggggacaccgagtccgattctgtgccggggtctcgggracaacgtagtcatcatccgtcctattcagcagtcgtatagttgccggaccccgtcgagtcggagkgtccccaagtttcggaaccgtagtyttcatcgcatgtgtaacaggtagacgtatgtgaggggtcatgtgtccaaacacagtctcttgaggaactgtgggtatgaccaattgagtcaggatgttctaaacagggagaggacactgtggctcgacaccagrgaccgtggacgtctccggaggagatactyttatagaacaaaaataaaactcaattaaacgttmwwaaaaaaamaaaaaaamaaaaamaaaaaaaamamaaaaaaaaaaaaa

SEQ ID NO: 1637 - DNA, 686 bp, Canis familiaris
gtcaaaaaacaagggggcgacccacttggtaagtgaacaagttttactagcccgagctwttgctgtcccgagmaggccttcggtcctggaacttggctaacgaagcctacggtgtaatcwtcggtctcgagggacagggcgacttgagcaccytggtggatrcctcagcctaccgaggggcctactaccaggccttgcaaacctaagaccccgagcgtcgtggcatcagggggttcttgtacggcttgcccctctcagaccctagcttggagtcaggacgcagaggaacagagcaggagcgacactacccagccccctgtggctcaggctaagacacggccccagagcccytgttgcatcagtagtaggcaggataagtcgtcagcatatcaacggcctggggcagctcagcctcmcaggggttcaaagccttggcatcaraagtagcgtacacattgtccatctgcatacactccccagtacacaggtttgtgtcagagaactccttgacacccatactggttaactcagtcctacaagatttgtccctctcctgtgacaccgagctgtggtcyctggcacctgcagaggcctcctctatgaraatatcttgtttttattttgagttaatttgcaakwwtttttttktttttttktttttkttttttttktkttttttttttttt

SEQ ID NO: 1638 - DNA, 644 bp, Canis familiaris
cccagaggcttttgttgcacagaaggtcccccgtggtgtcctagtttacgcctgcgtgtcacccggactgctgtgatcggtttcagtactttgtgagggcagtattaaccggttgccagaagtcagacctaacccgtgcacggagccggtgttctcacaggcccgccggttgggctggctatagggctcaaggattgtgttttggatcagccttagcacgttagccagtgttggattcgaggtagtggtggtagtgttaacatcgctggcagcactgttgtatccgagttacattgttgtaagtccgcctctagatactatgccagatccagtttgagttgggattagagaacttgttcttgcggtaacactaggttctctacctcttgcagttggctgtcttggcacgcttgttgcaacaggcagtcctggcagtggcccgctgtacagttgtccttggtggcccgcttgcgccgagttgttcggcacctggccttgttggtggtttactacttgtcacagaccttggtggttgtgtccctgtttattttcacccacacacaagacagatctatgaggccactgctagttactgtactgaataacttattttctttccaaatacagccctttttttttttttt

SEQ ID NO: 1639 - DNA, 644 bp, Canis familiaris
gggtctccgaaaacaacgtgtcttccagggggcaccacaggatcaaatgcggacgcacagtgggcctgacgacactagccaaagtcatgaaacactcccgtcataattggccaacggtcttcagtctggattgggcacgtgcctcggccacaagagtgtccgggcggccaacccgaccgatatcccgagttcctaacacaaaacctagtcggaatcgtgcaatcggtcacaacctaagctccatcaccaccatcacaattgtagcgaccgtcgtgacaacataggctcaatgtaacaacattcaggcggagatctatgatacggtctaggtcaaactcaaccctaatctcttgaacaagaacgccattgtgatccaagagatggagaacgtcaaccgacagaaccgtgcgaacaacgttgtccgtcaggaccgtcaccgggcgacatgtcaacaggaaccaccgggcgaacgcggctcaacaagccgtggaccggaacaaccaccaaatgatgaacagtgtctggaaccaccaacacagggacaaataaaagtgggtgtgtgttctgtctagatactccggtgacgatcaatgacatgacttattgaataaaagaaaggtttatgtcgggaaaaaaaaaaaaaa

SEQ ID NO: 1640 - DNA, 616 bp, Canis familiaris
acgccttaagcctttcacccgactgctgtagtcgttttcagtacattgtagggcagtattaccggttgccagagtcagacctaacccgtgcacggagccggtattttctcacaggcccgccggttgggctggctatagggctaaggattgtgttttggatcagcctttagcacgttagccagtgttggattcgaggtagtggtggtagtgttaacatcgctggcagcactgttgtatccgagttacattgttgtaagtccgcctctagatactatgccagatccagtttgagttgggattcgagaacttgttcttgcggtaacactaggttctctacctcttgcagttggctgtcttggcacgcttgttgcaacaggcagtcctggcagtggcccgctgtacattgtccttggtggcccgcttgcgccgagttgtgcggcacctggccttgttggtggtttactacttgtcacagaccttggtggttgtgtccttgtttattttcacccacacacaagacagatctatgaggccactgctagttactgtactgaataacttattttctttccaaatacagcctttttttttttttttttttttttttttttttttt

SEQ ID NO: 1641 - DNA, 616 bp, Canis familiaris
tgcggaattcggaaagtgggctgacgacatcagcaaaagtcatgtaacatcccgtcataatggccaacggtctcagtctggattgggcacgtgcctcggccataaaagagtgtccgggcggccaacccgaccgatatcccgattcctaacacaaaacctagtcggaaatcgtgcaatcggtcacaacctaagctccatcaccaccatcacaattgtagcgaccgtcgtgacaacataggctcaatgtaacaacattcaggcggagatctatgatacggtctaggtcaaactcaaccctaagctcttgaacaagaacgccattgtgatccaagagatggagaacgtcaaccgacagaaccgtgcgaacaacgttgtccgtcaggaccgtcaccgggcgacatgtaacaggaaccaccgggcgaacgcggctcaacacgccgtggaccggaacaaccaccaaatgatgaacagtgtctggaaccaccaacacaggaacaaataaaagtgggtgtgtgttctgtctagatactccggtgacgatcaatgacatgacttattgaataaaagaaaggtttatgtcggaaaaaaaaaaaaaaaaaaaaaaaaaaaaaaaaaa

SEQ ID NO: 1642 - DNA, 412 bp, Canis familiaris
tgtttcctcttgctccgtcttgtacctatgtgctgttcctgtgcttctttttctggtcctcggttgttgttctcacctgcctgtctcctggccacctctgtcccaatttctcttgtatgagtttccttgggagctctgagacttctttcttctctgcccctactccactgcctacccacaccccctgcctccgaaggtgctgagctccacatcccacacccctttctgcagctgttcataccctgggcctcccgaggggtctcattgccaaagcatgcaagcccgccctgcttgtgccttagctggtgtgtacgtgtgtgttggggggaggggatggatagctagggatgggctccatttctcctggtggaggggggtgtacattacatgtccccttaagattaaaaacaaa

SEQ ID NO: 1643 - DNA, 665 bp, Canis familiaris
ctcgtccattctgagagacgtgagattcgttcgaactttcgtcacgtcaaccaaaacatacatgctgcttgtccaaacaacgtccaacatcctgggasacttgttcaaatgtccccatcgtcggattcttcatatccttggtccgaaaggtatctctcttcacacgttgtgtcagtatggtggtgtcccggcttttcgtcttgctcagatcacagacagccttcgtctccctctgatgaaacgactccagaacaaccgacgtccacgtccgaaactgaggaactgtcgggacaaacgtgacaaccgtaaatcmatattatgggtwwwaggtcggaggggactkttaatgactcctccaacaagcctktgacmagtctttctctgaattccggatttaactttaatactaaaacagtccttaatcataagaatcgatgctaaaaggttgacaaccaaaccacaatcttttctccaggatttctttttttttttttttttttctcgctctctccgacttttaacttattactttttaaaatgactagtttttaatccmaagaagttcaggraaaatgtctgagacaattttcacagggattaaaagraaactttaatcacaaaaaaaaaaaaaaaaaaaaaawaaaaaaaaaaaaaaaaaaaaaaaa

SEQ ID NO: 1644 - DNA, 665 bp, Canis familiaris
gagcaggtaagactctctgcactctaagcaagcttgaaagcagtgcagttggttttgtatgtacgacgaacaggtttgttgcaggttgtaggaccctstgaacaagtttacaggggtagcagcctaagaagtataggaaccaggctttccatagagagaagtgtgcaacacagtcataccaccacagggccgaaaagcagaacgagtctagtgtctgtcggaagcagagggagactactttgctgaggtcttgttggctgcaggtgcaggctttgactccttgacagccctgtttgcactgttggcatttagktataatacccawwwtccagcctcccctgamaattactgaggaggttgttcggamactgktcagaaagagacttaaggcctaaattgaaattatgattttgtcaggaattagtattcttagctacgattttccaactgttggtttggtgttagaaaagaggtcctaaagaaaaaaaaaaaaaaaaaaagagcgagagaggctgaaaattgaataatgaaaaattttactgatcaaaaattaggkttcttcaagtccyttttacagactctgttaaaagtgtccctaattttcytttgaaattagtgttttttttttttttttttttttwtttttttttttttttttttttttt

SEQ ID NO: 1645 - DNA, 434 bp, Canis familiaris
atggaacggactccaggacaaccggcgtccacgtccggaactgagggactgtcggggacaacgtggcaaccgtataatcatattatgggttataggtcggaggggggactgttaatggactcctccaacaagcctgtgacaagtctttctctggattccgggtttaactttagatactgaaacagtccttaatcataaggatcgagtgctaaaaggttgacaaccaaagccacaatcttttctccagggtttcttttttttttttttgttctcgctctctccgagcttttaacttattactttttaaaatgactagtttttaatccaaagragttcagggaaaatgtctgagacaattttcacaggggattaaaggaaactttaatcacaaaaaaaaaaaaaaaaaaaaaaaaaaaaaataaaaaaaaataaaa

SEQ ID NO: 1646 - DNA, 434 bp, Canis familiaris
taccttgcctgaggtcctgttggccgcaggtgcaggccttgactccctgacagcccctgttgcaccgttggcatattagtataatacccaatatccagcctcccccctgacaattacctgaggaggttgttcggacactgttcagaaagagacctaaggcccaaattgaaatctatgactttgtcaggaattagtattcctagctcacgattttccaactgttggtttcggtgttagaaaagaggtcccaaagaaaaaaaaaaaaaacaagagcgagagaggctcgaaaattgaataatgaaaaattttactgatcaaaaattaggtttcytcaagtcccttttacagactctgttaaaagtgtcccctaatttcctttgaaattagtgttttttttttttttttttttttttttttttatttttttttatttt

SEQ ID NO: 1647 - DNA, 698 bp, Canis familiaris
ggcatcttcctgttgtggatwaagacagtcccacagtscagcctaactatgggacagctttatgagaaggaaaaagatgaagatggattcttgtatgtggcctacaktggagagracacttttggcttctgagggccagygctgggctaggtgcaccgttcctgcttgtgtatcttgtaaatagycggccattttcagtttccagacctcttcacatagacctattagtgcatttgtaactggatttatttcttaawatattggaaggttttgtttccttagattagtaaattatcatacagagttttattttcagttttccttttgtgcactgtcctcatggctgtcctctccaggggacatgttcctctggggatcatatttaatgaagatatttccatattaaagtgaggtaggtggggtattaacgtgaaagggagggagatgatgcatttcttctggattatgtttgaagtgttaaagatggctaagtattaaaagcaccmaaattaaatccttagcmatcagaacacttgcttcactagattttgccmactgccmatcatgttggactgagctaatctgttcctctttctgaaactattaaggtaaataattaacmataaaacttcctcttataaaggcmaaaaaaaaaaaaaaaaaaaaaaaaaaaaaaaaaaaaaaaaaaaaaaaaaaaa

SEQ ID NO: 1648 - DNA, 737 bp, Canis familiaris
  misc_feature (257)..(257): n comprises a, c, g, or t, or includes no nucleotide
ggcggagacaggttggacaagatctgacagtgaggaatcagtaccagagctgaggwacagaktccacacragcmaccacacracmarcccakytggcagcmgcarctgaaatcgakgragaaccagtcagtaaagcmwwhcagagccggagkgaaaagaaggcacgaaaggctatgtccmaactgggtcttcgacaggttacaggggktacaagagtcactatccggraatctaagratatcctgtttgtcatcacnawaccagakgtctacaagagcccagcttcagatacctacatagtttttggggaascmmagattgaggacttatctcagcaagcacmactagcagctgctgagaaattcmaagttcaaggtgaagctgtctcmaacattcmagdwaacacacagactccmactgtacmagaggagagtgaagaagaagaggttgatgaaacgggtgtagaggttaaggacatagaattggtcatgtcacaagcmaatgtgtcmagagcmamgscagttcgagccctgaagwacmacmgtaatgatattgtaaatgctattatggrattaacmatgtaaccgtatgaaaacgaggactttttttggtgtttcaaaagaataactgcagcttggtttgaaatttgtactgtttctatcattaataaagttatggcttcttgttggawrammwmhmaaawawaawawaaaaraaaaaaaaaaaaaaaarrarra

SEQ ID NO: 1649 - DNA, 701 bp, Canis familiaris
tgaatcagtaccagagcgtgaggacaggaagtccacaacaagcgaaccacacgacaagcccaakctggcagcagcagctgaraatcgatgragaaccagtcagtwaagctaaacagagccggagtgwaaagaaggcacgaaaggctatgtccamaactgggtcttcgacaggttacaggggttacaagagtcactatccggaaatctaagaatatcctgtttgtcatcacmaaaccagatgtctacaagagcccagcttcagatacctacatagtttttggggaagccaagattgaggacttatctcagcaagcacaactagcagctgctgagaaattcaaagttcaaggtgaagctgtctcaaacattcaagaaaacacacagactccaactgtacaagaggagagtgaagaagaagaggttgatgaaacgggtgtagaggttaaggacatagaattggtcatgtcacaagcmaatgtgtcaagagcaaaggcagttcgagccctgaagaacaacagtaatgatattgtaaatgctattatggaattaacaatgtaaccgtatgaaaacgaggactttttttggtgtttcaaaagaataactgcagcttggtttgaaatttgtactgtttctatcacttaataaagttatggcttcttgttggatgaaaaaaaaaaaaaaaaaaaaaaaaaaaaaaaaaa

SEQ ID NO: 1650 - DNA, 649 bp, Canis familiaris
ggcaacccacacaacaagctcagtgtggcaccmagcagcctgawatcgatgaagaaccagtcagtaaaagccawacagagccggagtgaaaagaaggcacgaaaggctatgtccaaaactgggtcttcgacaggttacaggggttacaagagtcactatccggaaatctaagaatatcctgtttgtcatcacaaaaccagatgtctacaagagcccagcttcagatacctacatagtttttggggaagccaagattgaggacttatctcagcaagcacaactagcagctgctgagaaattcaaagttcaaggtgaagctgtctcaaacattcaagraaacacacagactccaactgtacaagaggagagtgaagaagaagaggttgatgaaacgggtgtagaggttaaggacatagaattggtcatgtcacaagcaaatgtgtcaagagcaaaggcagttcgagccctgaagaacaacagtaatgatattgtaaatgctattatggaattaacaatgtaaccgtatgaaaacgaggactttttttggtgtttcaaaagaataactgcagcttggtttgaaatttgtactgtttctatcattaataaagttatggcttcttgttggatgaaaaaaaaaaaaaaaaaaaaa

SEQ ID NO: 1651 - DNA, 1603 bp, Canis familiaris
cgggaggctctccaagggagcgtcccaccagagaagagaaggaatgagcaagttgtgaatttgggaccgttgctgttgcacctgaacctctagcgagatgcctggcaagagctaggctcaccgggccacacggatcctgtcagcacgcctattacttgggaagctccttggagaaagcaagatggctgtcaatggcactgccctgttgttggccaatgtcacctacatcacagtggagattctcatcgggctctgcgccatcgtgggcaatgtgttggtcatctgggtggtcaagctgaaccccagcctacagaccaccaccttctatttcattgtctccctggcccttgctgacattgccgttggggtgctggtcatgcctttggccattgtcatcagcctgggcatcacaatccaattttataactgccttttcatgacctgcctgctgttgatcttcactcatgcttccatcatgtccctgctagccattgctgtggaccggtacctgcgggtcaagctcacagtcagatacaggagggtcaccacacaaagaagaatatggttggccctggggctttgctggctggtgtccttcctggtgggactgacccccatgtttggctggaacatgaaactgacctcagagcaccagagaaatgtcaccttcctctcgtgccagttcagttctgtcatgaggatggactacatggtctacttcagcttcttcacttggatcttaatccccctggttgtcatgtgtgccatctatcttgacatattctatgtcatccggaacaaactcaatcagaacttttcaagctccaaagagacaggtgcattttatggacgggagttcaagacggccaagtccctgtttctggttctcttcctgtttgctttttcctggctgcctttatctatcatcaactgtatcacgtactttcatggtgaggtgccacagatcatactgtatttgggcattctgctctcccatgctaactctatgatgaaccctattgtctatgcttataaaataaagaagttcaaggaaacctatcttttgatcttcaagacctatatgatctgccagtcctctgattctttggactcaagcactgagtagacttctgagtagttgtccttgaaagatgattcttcacccccattaacctccagattcaacatcagtaaacacttgaggacctatttgcctgagccaagggctttcacatccttaatttcttctactgaggtggggagcatttgactggttgcctccaattgtatctcccctaacacccttcctgtaatccaattattttcttgtccttcttctctgattcactgttctggatgtctgacttgaggaaaatgtcctgctgttactactgtttgtgttcctccttcccaagcaagaggagaagttatggaatccgaaggaggccttgttgactcagagatgaaaagtcccagtcctgcgggacatgagtgtggtggcgactctgttccactccattgcagaatcacaccaagaaacctaccccagcagatgtcagggagatggtaggaacagtgtcacaaagggagacttaaactgctg

SEQ ID NO: 1652 - DNA, 738 bp, Canis familiaris
cttttttttttttttttttttttttttttttttttttttttttttttttwwkyyyywwwtcagtgtagtttttattgcattcttaaggtatcacaaataagtctgaaaaatcatctggmatctkgctgtttctgtdgctggacaactcagagcttattcatcagcctgctgaactgytccttkttcagaaacatagataccatccarraattttctgatatcctkgtytwtaacagttgttgctwgckggatcaaagcagctgagtttgaaacaagttcaatgtcatttccttcaagaattaactcatcttttkgggcttgagataccgwacaagcaacacckggcctcatccgaaccctgcgaatgtatttttcacctaagaratttcggatttcaacaagagaaccattctcctgaataacaacgttgatggggaagtgagcatacaccgrmctcatctkgtamcggaagcccmgkgtcacgcccttgatcatgttctgaacgtgactacagatcgtgcgaacggtagccagttctyttctatttccccaccattkgtcaactcggagcctcttcttctycttyccgagamgactgarkyctacgkbgatgtgawygaagtcccttcgcaggktycctctggggcccttmacgrtcmcrgkgcgkycctyymggbkgatgtcgamhtwttctggaakgtcgacmgtctgattgctgagaatggtcttcaattcttc

SEQ ID NO: 1653 - DNA, 738 bp, Canis familiaris
gaagaattgaagaccattctcagcaatcagackgtcgacmttccagaawadktcgacatcmvcckrraggrmcgcmcygkgaycgtkaagggccccagaggramcctgcgaagggacttcrwtcacatcvmcgtagrmytcagtcktctcggraagragaagaagaggctccgagttgacmaatggtggggaaatagaaragaactggctaccgttcgcacgatctgtagtcacgttcagaacatgatcaagggcgtgacmckgggcttccgktacmagatgagkycggtgtatgctcacttccccatcaacgttgttattcaggagaatggttctcttgttgaaatccgaaatytcttaggtgaaaaatacattcgcagggttcggatgaggccmggtgttgcttgtwcggtatctcaagcccmaaaagatgagttaattcttgaaggaaatgacattgaacttgtttcaaactcagctgctttgatccmgcwagcaacaactgttawaracmaggatatcagaaaattyytggatggtatctatgtttctgaamaaggarcagttcagcaggctgatgaataagctctgagttgtccagchacagaaacagcmagatkccagatgatttttcagacttatttgtgataccttaagaatgcaataaaaactacactgawwwrrrrmwwaaaaaaaaaaaaaaaaaaaaaaaaaaaaaaaaaaaaaaaaaaaaaaaag

SEQ ID NO: 1654 - DNA, 743 bp, Canis familiaris
tcccgaaaatctactgcgaggagtgagaccattctacacaatcaagcggtcgacattgcagaaaagtcgacagccaccckgaarggacgcackgkgatcgtgrarggccccagaggaavccbgcgaagggacbtcratcacatcaacgtagaactcagtcttctcggaaagaagaagaagaggctccgagttgacmaatggtggggaaatagwaaagaactggctaccgttcgcacgatctgtagtcacgttcagaacatgatcaagggcgtgacactgggcttccgttacaagatgaggtcggtgtatgctcacttccccatcaacgttgttattcaggagaatggttctcttgttgaaatccgaaatttcttaggtgaaaaatacattcgcagggttcggatgaggccaggtgttgcttgttcggtatctcaagcccmaaaagatgagttaattcttgaaggaaatgacattgaacttgtttcaaactcagctgctttgatccagcaagcaacaactgttaaaaacmaggatatcagaaaatttttggatggtatctatgtttctgaaaaaggracagttcagcaggctgatgaataagctctgagttgtccagcaacagaaacagcaagatgccagatgatttttcagacttatttgtgataccttaagaatgcaataaaaactacactgawwwrrrraaaaaaaaaaaaaarraaaraaaaaaaaaaaaaaaaaaaaaa

SEQ ID NO: 1655 - DNA, 658 bp, Canis familiaris
acctgaagggacggccctgtgattgtgaagggcctccagaggtaccctgtcgaagggacgtcaatcacatcgacgtagaactcagtcttctcggtaagaagaagaagaggctccgagttgacaaatggtggggaaatagaaagaactggctaccgttcgcacgatctgtagtcacgttcagaacatgatcaagggcgtgacactgggcttccgttacaagatgaggtcggtgtatgctcacttccccatcaacgttgttattcaggagaatggttctcttgttgaaatccgaaatttcttaggtgaaaaatacattcgcagggttcggatgaggccaggtgttgcttgttcggtatctcaagccccaaaagatgagttaattcttgaaggaaatgacattgaacttgtttcaaactcagctgctttgatccagcaagcaacaactgttaaaaacmaggatatcagaaaatttttggatggtatctatgtttctgaaaaaggaacagttcagcaggctgatgaataagctctgagttgtccagcaacagaaacagcaagatgccagatgatttttcagacttatttgtgataccttaagaatgcaataaaaactacactgawwwrrrraaaaaaaaaaaaaaaaaaaaaaaaaaaaaaa

SEQ ID NO: 1656 - DNA, 660 bp, Canis familiaris
aatcgcaggaagctcgacatcagccctgaaggacgccctgtgatcggtgaaggccccagaggaacctgcgaaggacttcaatcacatcaacgtagaactcagtctttctcggaaagaagaagaagaggctccgagttgacaaatggtggggaaatagaaaagaactggctaccgttcgcacgatctgtagtcacgttcagaacatgatcaagggcgtgacactgggcttccgttacaagatgaggtcggtgtatgctcacttccccatcaacgttgttattcaggagaatggttctcttgttgaaatccgaaatttcttaggtgaaaaatacattcgcagggttcggatgaggccaggtgttgcttgttcggtatctcaagcccmaaaagatgagttaattcktgaaggaaatgacattgaacttgtttcaaactcagctgctttgatccagcaagcaacmactgttaaaaacaaggatatcagaaaatttttggatggtatctatgtttctgaaaaaggaacagttcagcaggctgatgaataagctctgagttgtccagcaacagaaacagcaagatgccagatgatttttcagacttatttgtgataccttaagaatgcaataaaaactacactgawwwrrraaaaaaaaaaaaaaa

SEQ ID NO: 1657 - DNA, 768 bp, Canis familiaris
  misc_feature (600)..(601): n comprises a, c, g, or t, or includes no nucleotide
aagaccattctcagcaatcagacttgtcgacattccagaaaagtcgacatcaccctgaaggggacgcactgtgatcgtgaagggccccagagggaaccctgcgaagggacttcaatcacatcaacgtagaactcagtcttctcggaaagaagaagaagaggctccgagttgacaaatggtggggaaatagaaaagaactggctaccgttcgcacgatctgtagtcacgttcagaacatgatcaagggcgtgacactgggcttccgttacaagatgaggtcggtgtatgctcacttccccatcaacgttgttattacaggagaatggttctcttgttgaaatcacgcaaatttctttcaggatggaagaaataacatctcgtcaggagtgtcggcatgaaggagccagcgaggttgtcgttgttgtcggcgatactctagcgccccaaagagtgatagagtaatatctcgagagagggaatagagcacatgtgaaatctgttgttctacaaaaatctcacagctcgtgctcttgagtatcccgaggcacagagccaaaccaactcgtgtttaaaaacaccaagggataatccagaaaattnntttggatggtatctatgtttctgaaaaaggaacagttcagcaggctgatgaataagctctgagttgtccagcaacagaaacagcaagatgccagatgatttttcagacttatttgtgataccttaagaatgcaataaaaactacactgaaaaaaaaaaaaaaaaaaa

SEQ ID NO: 1658 - DNA, 748 bp, Canis familiaris
tcagtaatttcgccttctgatcttaggcttaataacaggtcgccgcgagtcagagagcccggtgaaaataagagggagcagatctgctctgaagagtcagcttcgcgtccctcaccggacctcagctggcaggccggcctkatccacgtgagatcccgcgccacctacatcccagcgcgatcggtccctgcctgccaccttcccccraccccttctctgccagagcgttcgtctcttacaagcctktccttcttcagtcgccgacatgcagctctttgtccgcgcccaggagctacacaccctcgaggtgaccggccaggagacggtcgcccmaatcaaggctcatgtagcctcgctggagggcatcgscccggaagatcaagtscctgctcctggcaggctcgcctctagaggatgaggctaccctaggtcagtgtggagtggaggctctgaccaccctggaggtagccggccgcatgcttggaggtaaagtccatggttccctggcccgtgctgggaaagtaagagggcagactcccaaggtggccmaacaggagaaaaagaagaagaagacaggccgagccmagcgacgaatgcagtacaaccgacgctttgtcaatgttgtgcccacctttggcaagaagaagggccccaatgccaactcttaagtccgttgtaatcctggctctccccmataaagccacttggttcagtcmaaaaaaaaaaaaaaaaawaaaaaaaaaaaaaa

SEQ ID NO: 1659 - DNA, 670 bp, Canis familiaris
cgatatggcccagagacatggggtttgcgacgtcgamcttggggaggaacacctggracawwcggcsgsggagtaagacctggtcagggacgtcctggtcctcaggccggtgtcggttggcggccacaaagtrgtcaggttgggaggtgtcagggggaggttgtggtgagacggtgtyktccgcgagacacgtctggagttgtacagatctggtcygacccccagagaccgagtktccgagacagggacgtggaggtcatcctcacacgtggatgasgggtccggggaggcggagccgtggtgtgacacaacgtattcggaacaggtgaactggttgacaaggacaagaccctccggatgaccrtccggagggttggataatggtggtttggtgtcgtggggacaggttcggatttccaaagaaagatgacatggttcggggaggggttcsttggacaaaccctgttcacgggataggggaactgtcagagggtggtggggtgggcggcggtcggaccagagtgtacgaccagagtcctcgtttcggcgatagggtagtctcgtcgagttgtttgggratttttgataaatataaatctatctatctatctctaaaaaaaaaaaaaaaaaaaaaaaaaaaaaaaaaaaaaaaaaaaaaaaaaaaaaaaaa

SEQ ID NO: 1660 - DNA, 670 bp, Canis familiaris
gctataccgggtctctgtaccccaaacgctgcagctkgaacccctccttgtggaccytgtwwgccgscscctcattctggaccagtccctgcaggaccaggagtccggccacagccaaccgccggtgtttcaycagtccaaccctccacagtccccctccaacaccactctgccacarmaggcgctctgtgcagacctcaacatgtctagaccagrctgggggtctctggctcamaggctctgtccctgcacctccagtaggagtgtgcacctactscccaggcccctccgcctcggcaccacactgtgttgcataagccttgtccacttgaccaactgttcctgttctgggaggcctactggyaggcctcccaacctattaccaccaaaccacagcacccctgtccaagcctaaaggtttctttctactgtaccaagcccctccccaagsaacctgtttgggacaagtgccctatccccttgacagtctcccaccaccccacccgccgccagcctggtctcacatgctggtctcaggagcaaagccgctatcccatcagagcagctcaacaaacccytaaaaactatttatatttagatagatagatagagattttttttttttttttttttttttttttttttttttttttttttttttttttttttt

SEQ ID NO: 1661 - DNA, 680 bp, Canis familiaris
ggggctggttctggagccgactccagacaaccactggkyctacattscacatcgagtgacagacaagctgacccctatttcatgaccggattttctgctgccgctcaggctcagcagctgacacccagscsgtagccgatgcggtcacttatcagcttggtttccacagcattgagctaaatgagcctccactggtacacacagcagccagcctctttaaggagatgtgttaccgataccgggaggacctgatggcaggaatcatcattgcgggctgggacccccaagagggagggcaggtgtactcggtgcccatggggggtatgatggtaaggcagtcctttgccattgggggctctgggagctcctacatatatggctatgtcgatgctacctaccgggaaggcatgaccaaggaggagtgtctgcagttcactgccmatgcgctcgctttggccatggaacgggacggctccagcggaggggtgatccgcctggcggccattgcagaatcaggggtagagcggcaggtacttttgggagaccagattcccaaattcaccatcgccactttgccacctccctgattcctggaatcctaggctacagtaagcgataccccatagtgacgtaaaattcaataaacagtttgtctaaaaraaaaaaaaaaaaaaaaaaaa

SEQ ID NO: 1662 - DNA, 672 bp, Canis familiaris
tgggtctacatgccaatcgagtgacagacaagctgacccctattcatgaccggattttctgctgccgctcaggctcagcagctgacacccaggccgtagccgatgcggtcacttatcagcttggtttccacagcactgagctctatgagccttccactgggtacacacacgcacacccacgccctctttttaagagagagtagtgtgtttcacgcatatccacgcggagaggagcaccgtagtagtgcgacaggatatctatcattcgcggtctggagacccccaagagggaggccaggtgtactcggtgcccatggggggtatgatggtaagccagtcctttgccattgggggctctgggagctcctacatatatggctatgtcgatgctacctaccgggaaggcatgaccaaggaggagtgtctgcagttcactgccaatgcgctcgctttggccatggaacgggacggctccagcggaggggtgatccgcctggcggccattgcagaatcaggggtagagcggcaggtacttttgggagaccagattcccaaattcaccatcgccactttgccacctccctgattcctggaatcctaggctacagtaagcgataccccatagtgacgtaaaattcaataaacagtttgtctaaaagaaaaaaaaaaaaa

SEQ ID NO: 1663 - DNA, 719 bp, Canis familiaris
acatttgtggagacccgttcatcggggatgagtccccgaggtatctacgagaccccagcaggracgatccttaccacgctcatttagacatcgagcsttcaccatggaccgcgaagtgcgcaaatcamacagggcctgggcttaaawktcgctgagctggtgtacacvggtttctggcacagccccgagtgtgaatttgtccgccactgcatcgccaagtcccaggagcgtgtggaagggaaagtgcaagtgtccgtcttcaagggccaggtgtacatcctcagccgggagtccccactgtccctctacmatgaggagctggtgagcatgaacgtgcaaggtgattatgagcctatcgatgccactggtttcatcaatatcaactccctcaggctgaaggaatatcaccgcctccagagcaaggtcactgccaaatagacccgctgacaatgaggagctgggcctcctcctttgcccatcttccgagcacaggcgctwattgttgtgataatttgtaattgtgacttgttctccccgggctggcagcctggtgggggtgccaggccccagctttgttccctgctccccagtagcctgcccaagtggtcatcagtagcctgcccaagtggtcatcagaggagagggtggggttggcgtcggtggggagatgcmaaatgacaattaaaaaaaaagatacattaraaaaaaaaaaaaaaaaa

SEQ ID NO: 1664 - DNA, 713 bp, Canis familiaris
ggagcacctgctacgcactcactcccagcccccagtaacaacacaaccatgcgcatgcagagaaaakgtgsmarcagcatwsccactcctgatktacctccwybttbtctattatctgattcastgtatactgcatcctatagctttaggagcagktgaggaacggcyctggaggaccaaggtgatctggcccvatagcavtgcatgagkctkctgctcttagcccvrgctgcvaacttagratctcttgggagactatgatgctggttcccaggccccattccvatagctatggaatctggatctatggggctgaagcctgagcagtggcatgtttgaagagctatctggtaacattgctgtgctgccatggatggagaaccmctgagctacttctgagcggtcagtgtgatagcgatttcctgggagagcccctgtttatgcctgttgtcttgggtcccacgcagtgttcatatttgcactgcatttgtcatttgttaaccmgattgtatcattaatagttgtgttacmataagccaggacmgggtttagttgagctccactttttatttccagcttctgccaaggattcatctattaggatatgaagtctgtgtgtgatgggggmgtgttcmaaataatcattaataaagatgacttacttaammaawhmmaaaaaaaaaaaaaaaaaaaaaaaaaaaaaaaaaaaaaaa

SEQ ID NO: 1665 - DNA, 673 bp, Canis familiaris
cacctgctacgcactcactccagcccacagttccacccaaccatgcgcatcagagaaaatgtggcacagcataccactcctgatttacctcctcttctctattatctgattcactgtatactgcatcctatagctttaggascagttgaggaacggccctggaggaccaaggtgatctggcccaatagcagtgcatgaggctgctgctctttagcccaagctgcaaacttagaatctcttgggagactatgatgctggttcccaggccccattccaatagctatggaatctggatctatggggctgaagcctgagcagtggcatgtttgaagagctatctggtaacattgctgtgctgcccatggatggagaaccacctgagctacttctgagcggtcagtgtgatagcgatttcctgggagagcccctgtttatgcctgttgtcttgggtcccacgcagtgttcatatttgcactgcatttgtcatttgttaaccagattgtatcattaatagttgtgttacaataagccaggacagggtttagttgagctccactttttatttccagcttctgccaaggattcatctattaggatatgaagtctgtgtgtgatgggggagtgttcaaaataatcattaataaagatgacttacttaaccaaaaaaaaaaaa

SEQ ID NO: 1666 - DNA, 900 bp, Canis familiaris
gatgatgaatatcccacagttttatgcaaatactatatttgaagaattctctcctggcagagaaagacacttgcttgggcaaaaaccagaatgaaatttatagtatttgctttcaccattgggctaactttgctgctaggagtccaagccatgcctgccagtcgcctctcttgctacagaaagacactaaaagatcgcaactgtcacaaccttccagagggagtagctgacctgacgaagatggatgtaaacatccaggatcacttctgggatgggaagggatgtgagatgatctgttactgtaacttccgtgaattgctctgctgcccmaaagatatcttctttggaccmaagatctcttttgtgattccttgcaacaatcactgagaatcttcatgtattccagagaacatcgtctctcatttcccacgaattgcactatatcgacataactaaatttcaattttctatccagtgcmataaagcgcagattctataaattctttcctaagatattaaacttgtgttaaataagtagtaataaaagttaattgaatttaaawrttctctgtggacattgttggcactggctaaaatgtttgatggaaaattttcatctatgctgtattcagtaggctcagtaaaaggatttttgattggtgattagccataatctttcctcgaaggttgagaacttttgttcttacttgacagttattgaccatatatacttaacagaaagaaccagttacaaattgaggttcttagaagagaatctagaaattttctagtaatggggtaaaaggatgggacacttggcctgcttagttggtacacttaatctcaggtcctgagttccagccccatgttgggcatagagtttacataacaaaaaaaaaa

SEQ ID NO: 1667 - DNA, 629 bp, Canis familiaris
tttgtaaggacctccgtttaagcacctccttgtttctccttttgcccaactcacccagtgaattggagcattttaagaaaattcctctgccaagaagacccaaaggacggagaagaacggggcaaaacccaatgaaatttatagtatttgctttcaccattgggctaactttgctgctaggagtccaagccatgcctgccagtcgcctctcttgctacagaaagacactaaaagatcgcaactgtcacaaccttccagagggagtagctgacctgacgaagatggatgtaaacatccaggatcacttctgggatgggaagggatgtgagatgatctgttactgtaacttccgtgaattgctctgctgccccaaagatatcttctttggacccaagatctcttttgtgattccttgcaacaatcactgagaatcttcatgtattccagagaacatcgtctctcatttcccaccgaattgcactatatcgacataactaaatttcaattttctatccagtgcaataaagcgcagattctataaattctttcctaagatattaaacttgtgttaaataagtagtaataaaagttaattgaatttaaaaaaaaaaaaaaaaaaaaaaaaaaaa

SEQ ID NO: 1668 - DNA, 702 bp, Canis familiaris
cggttgtcagcytwgctaaggtwtmyccckkaccctgrgtcctccwrmcagsctgtccractgtktatkgsytacmggtcctgtgtktgtsccscykggkkyytctgadtagactcmagccctgtgvsggarggcawttscctcgcccccctbstggccavcmrgratcatatgctactgtttcagactctasacaccccaaccggtgtgctgggcaagctcacraccccatgktcmatcaragttggcytaatgttgcaragaaaacdaramccsyrggataagacaagcctggtaggaatkgatctcttggtcgcaataatgtactcagtgttgwttttgycyttcccgcaacacaggatagttctacatgaaagtgtgcttgchtttcygatggcaagataatgagcaaattaggtgatcaggattctraraacaaacaagtatggktacagcratataaatgcctggcaacataaactatcccacmccctcatcyttcaaaccgagctgaatccaaactaaaaatttgcytaaactcagcatttatatttaagataaagaggggaactatgaatatattagcagttgggktcctcacaaacgaagtttggagtattttgaatttatttgtcagacaccycykattktttttttttttttttttttttttttttttttttttttttttttttttttttt

SEQ ID NO: 1669 - DNA, 702 bp, Canis familiaris
gccaacagtcgrawcgattccawakrgggmmtgggacycaggaggwykgtcsgacaggytgacamatamcsratgkccaggacacamacasggsgrmccmmrragacthatctgagktcgggacacbscctyccgtwaasggagcggggggavsaccggtbgkycytagtatacgatgacaaagtctgagatstgtggggttggccacacgacccgttcgagtgytggggtacmagktagtytcaaccgrattacaacgtytcttttghtytkggsrycctattctgttcggaccatccttamctagagaaccagcgttattacatgagtcacaacwaaaacrgraagggcgttgtgtcctatcaagatgtactttcacacgaacgdaaagrctaccgttctattactcgtttaatccactagtcctaagaytyttgtttgttcataccmatgtcgytatatttacggaccgttgtatttgatagggtgkgggagtagraagtttggctcgacttaggtttgatttttaaacgratttgagtcgtaaatataaattctatttctccccttgatacttatataatcgtcaacccmaggagtgtttgcttcaaacctcataaaacttaaataaacagtctgtggrgrmtaamaaaaaaaaaaaaaaaaaaaaaaaaaaaaaaaaaaaaaaaaaaaaaaaaaaaa

SEQ ID NO: 1670 - DNA, 678 bp, Canis familiaris
  misc_feature (281)..(281): n comprises a, c, g, or t, or includes no nucleotide
ccacacggtagtcagcttagctaaggttatcccttacccctgagtcctcctaccagcctgtccgactgtgtatgggctacaggtcctgtgtgtgtgcccctgggtcctctgaatagactcaagccctgtgcgaagggcatttgcctctgcccctcctcctggccacccagaatcatatgctactgtttcagactctacacaccccaaccggtgtgctgggcaagctcacaaccccatgttccatcaaagttggcttaatgttgcaaagaaaactaaacccncaggataagacaagcctggtaggaatggatctcttggtcgcaataatgtactcagtgttgtttttgcctttcccgcaacacaggatagttctacatgaaagtgtgctctgcctttctcgagtggcacagatatatgagcgacaatatatggtgtagttacggagatcctaaaaacaaacaggtatgggttaccrgcattataaattgcctggcaacataaactatcccacaccctcatctttcaaaccgagctgaatccaaactaaaaatttgcttaaactcagcatttatatttaagataaagaggggaactatgaatatattagcagttgggttcctcacaaacgaagtttggagtattttgaatttatttgtcagacacctctgattttttttt

SEQ ID NO: 1671 - DNA, 678 bp, Canis familiaris
  misc_feature (281)..(281): n comprises a, c, g, or t, or includes no nucleotide
ggtgtgccatcagtcgaatcgattccaatagggaatggggactcaggaggatggtcggacaggctgacacatacccgatgtccaggacacacacacggggacccaggagacttatctgagttcgggacacgcttcccgtaaacggagacggggaggaggaccggtgggtcttagtatacgatgacaaagtctgagatgtgtggggttggccacacgacccgttcgagtgttggggtacaaggtagtttcaaccgaattacaacgtttcttttgatttgggngtcctattctgttcggaccatccttacctagagaaccagcgttattacatgagtcacaacaaaaacggaaagggcgttgtgtcctatcaagatgtactttcacacgagacggaaagagctcaccgtgtctatatactcgctgttatataccacatcaatgcctctaggatttttgtttgtccatacccaatggycgtaatatttaacggaccgttgtatttgatagggtgtgggagtagaaagtttggctcgacttaggtttgatttttaaacgaatttgagtcgtaaatataaattctatttctccccttgatacttatataatcgtcaacccaaggagtgtttgcttcaaacctcataaaacttaaataaacagtctgtggagactaaaaaaaaa

SEQ ID NO: 1672 - DNA, 675 bp, Canis familiaris
ctcctgaccagcctgtgaccgactgtgtatgggcctaaaaggtccctagtgtagtgtgysccctggggtcctctgaatagactcaagsccytgtgcggagggcatttgcctcgccccccttctggccacccagaaatcatatgctacttgtttcagactctacacaccccaaccggtgtgctgggcaagctcacaaccccatgwtccatcaaagttggcttaatgttgcaaagaaaactaaacccccaggataagacaagcctggtaggaatggatctcttggtcgcaataatgtactcagtgttgtrtwttgccyyttcccgcaacacaggatagttctacatgaaagtgtgcttgcytttckgatggcaagataatgagcaaattaggtgatcaggattctaaagaacaaacaagtatggttacagcaatataaatgcctggcaacataaactatcccacaccctcatctttcaaaccgagctgratccaaactaaaaatttgcttaaactcagcatttatatttaagataaagaggggaactatgaatatattagcagttgggktcctcacaaacgaagtttggagtattttgaatttatttgtcagacacctctgattkttttttttttttttttttatgttttttttttttttttttttttttttttttt

SEQ ID NO: 1673 - DNA, 675 bp, Canis familiaris
gaggactggtcggacactggctgacacatacccggattttccagggatcacatcacacrsgggaccccaggagacttatctgagttcsggracacgcctcccgtaaacggagcggggggaagaccggtgggtctttagtatacgatgaacaaagtctgagatgtgtggggttggccacacgacccgttcgagtgttggggtacwaggtagtttcaaccgaattacaacgtttcttttgatttgggggtcctattctgttcggaccatccttacctagagaaccagcgttattacatgagtcacaacayawaacggrraagggcgttgtgtcctatcaagatgtactttcacacgaacgraaagmctaccgttctattactcgtttaatccactagtcctaagatttcttgtttgttcataccaatgtcgttatatttacggaccgttgtatttgatagggtgtgggagtagaaagtttggctcgacytaggtttgatttttaaacgaatttgagtcgtaaatataaattctatttctccccttgatacttatataatcgtcaacccmaggagtgtttgcttcaaacctcataaaacttaaataaacagtctgtggagactaamaaaaaaaaaaaaaaaaaatacaaaaaaaaaaaaaaaaaaaaaaaaaaaaaaa

SEQ ID NO: 1674 - DNA, 653 bp, Canis familiaris
acagtcccgccgctatgactggtgaggccctaggccttcagcctctcctgtacaggctgagagkctgaagaatcatcscctgwawtracatktttccttkkccwactcccactcccagtttaatattraattwacaggcaagctggcccccacctctccctgggggtctcagggaggacctttcattgccccgtttacctactktkctccttctttratcccctaccacgatgactccmtttctcctgtgtctgctaacttgatttttcattckgctgctccatctttgaatctccttacctgccccattctacccttgccatgcattggagggkctttgggggtgagctctgggtttaggggcttactccatccttcacccaccctggatctttgcccacctccacctcagatcccctgctgcagggtccatagccctcatctagggctgtgtggagggagaggactggctccccacccttcctccctacccaccccctgcacatcacagaaatcttccccacacccttctctgcctttattttttgattcgtgcmacttgtaactaggtgtttatggaataaaggagaatggaaaaaagamaaaaaaaaaaaaaaaaaaaaaaaaaaaaaaaaaaaaaaaaaaaaaaaaaa

SEQ ID NO: 1675 - DNA, 722 bp, Canis familiaris
ttactggtcccagcttgtagttctttaagacacctaacaggackgtgtagagsctttttcagcattactgtwttgtctcctgccagatgtggcaagatcaccattagaaatggraattacatttaaagccattagacttctaggtgatgcaagcatctaagagagaggttaatcacactatagaggcmttgtggtatcatttttccyttttctaattgtttaaatcgaattttataccmatgttaaaaattaattggatgttagcttgaagtggttaaagattgtttggagagttgttataatggttttgctgtaaaaagtgttgcggaaatgttgctgaaaagcatggtgctggtaacagttcaacmatccgtggctgctcattcttgcctacttttactctccctytaaagcaggttagcmttgaaggtggtatggaaaagcctgcatgcgtgttcagttctttgtttyttctccttccctttccccttgggcccccccttccctccttcgctcgctcaacctcttttgttcagtatgtgtaacttgaagctaatttgtactactggatatctgactggagccacagatacagaatctgtattgttcttactgaaacacagcatggaattaacattaaacttaaataaaacmaacctaaattwaaaawrmmmaawaaaaaaaaaaaaaaaaaaaaaaaaaaaaaaaaaaaataaaaaaaa

SEQ ID NO: 1676 - DNA, 651 bp, Canis familiaris
gggatgccaatgatgtaccccatccagttgtgaaatattctcctcgttatctcctattgctggagaaaggagatagaaagttatgtggcagataaagaattccatgcacctttaatcattgatgagaatggagtccatgagctggtgaagaatggtatatgaaccagaaatcaagttcaccacagtaagaatggcttttatttttgatagacccaactgtgaacctcaggacctctcctggaatactcacatttgaatatgcacagggtttcaccttgcttgttgaactcttacaactactccctattcccccagatccagatgactgagcttcagaaagcatttttatgattctcaaactcattgaagttcttatttatattttttaattgtatgtttgtttttttttcccaagccaggaaaacattggccatccaggaaatttcccacagcttgggtatagtcagggtgtttaacatcactgtacttggagctggaaatgtttgttttcamagttgtacatagtaataatatgttcttgtatgtgtcwaaaggtttctatggtactaaaagtttgttttattttatcagaaattaaatttttttaagaaaataattggaccagtaaaataaaaaaaaaaaaaaaaaaaa

SEQ ID NO: 1677 - DNA, 607 bp, Canis familiaris
cgactacttctctacaccctcaacaggcaccagctctttgggtacgtgcagcattacggcctggacggagcctgtgatgacatcacccgtgtgctgaagcacgtggcggtgaggctggggaagacccacaaggtgaaggtgctcacaggcacaggagacgtcaatgtcatccagcccaactaccccgcggcagcccgcgacttcctccggaccttccgccacgggctgctgggcccagtgatgctggatagggacgtcctgcggagctcgtcccgcgcagacccctgaactggtcccgctggcgggggcctcgtgcccgcctggcccttggcacccgagatgtgggacgtcccagagcttcacagccaaggactgggcgctgggatcccaggagctctgcgtggtcgttgtagagtccacgcggggccccacccaggagggggccgggccagctgccgcccacagggcctgcgcccagggcggctgacctcagggctgtccctgcctcgcacacgccagggatcccttcaggagacgctgacgctttcttaggaggtcaaagtacaatctgtaatctaaaaaaaaaaaaaaaaaaaaaaaaaaaaaa

SEQ ID NO: 1678 - DNA, 632 bp, Canis familiaris
gcaagcgtaaaggcttgaaggaaggcatccctgccctggacaacttcctggacaaattgtaggcagccctcscctgcagcccaccaccccaggtgggactcagcacagcccctgcacccggctgacgatcgaccwmwgcwwcaagccctcgcattctccatgacacctcgagactgtccagtgacgctccacctgacaggttctggggcccamwtagtgccatcactcrmygtgaacacttgatgccgtttctttcratatktakttcmraatttcagaggcaacawatgccctagcagcagggacttatttgkccggtggkkgtgggggaggcgggatgggacactcaacattttttttttcmatttcagaaactyraatgtcmaaaaaacgcattaagaggtttatttgggtaaatggcccgtagtggatttccccccagaaagggggaaggaacgagcgggtagacctttctttttggacagaagctagaaggcaggaaactttgtgcggtgtcaccgtgagcacctccagctgtattagtgccmttggaataataaatttgatatggtggtgamaaaaaaaaaaaaaawaaaaaaaaaaaaaaaaaaaaaaaaaaaaaaaaaaaaaaa

SEQ ID NO: 1679 - DNA, 588 bp, Canis familiaris
gacgcacaatgggcgtaggcgttacggtgggaggtctatataaccacgagctcgtttagtgaaccgtcagatcgcctggagacgccatccacgctgttttgacctccactagaagaccccgggagccgatccagcctccggactctagcctaggccgcgggacggataaccaatttcacacaggaaacagctatgacccttaggcctatttaggtgaccactatagaaccagtttgtaccaaaaaagcaggctggtaccggtccggaattcccgggatgaacgagcgggtagacccttcttttttttttccctttcagaaactcaaatgtccaaawaacgcattaagaggtttatttgggtaaatggcccgtagtggatttcccccccagaaagggggaatggaacgagcgggtagacctttctttttggacagaagctagaaggcaggaaactttgtgcggtgtccccgtgagcacctccagctgtattagtgcccttggaataataaatttgatatggtggtgaccaaaaaaaaaaaaaaaaaaaaaaaaaaaaaaaaaaaaaaaaaaaaaaaaaaaaaaaaaaaa

SEQ ID NO: 1680 - DNA, 595 bp, Canis familiaris
tggctcatcccctctgtgccctggagcaaagccagtcccccgacctggactccattgttagtcttgggaaggagagtttttgctcagagctgggggcgggggacggatttatgactgggcctctggcctctgggctctggcccccggcttccccacatgcacttcccctgcctcggsccttcctcctctgtgcctcagccttacatccaggcagtaggtctgggctctttccctccctaggccgctgagagaggtgcctttcttsagaaaacctttgggatttggatttccccgggaagatggaggctggaacacccactcttgggtctaatctttccccttgacccmaaacttcccacmaaaatgtctcmaaaaatccttcctgagacttcagccttccgtcccacccactacctgccagttctccmagactgaggtggggcgagtaacggggcatattggagggggcatttttgggtgggagaggtctggagtcsgcagagagccaccttcacatcctgctctgtgcmaagaggaataaamccgatttctttttccmaaaaaaaaaaaaaaaaaaaaaaaaaaaaaaaaaaaa

SEQ ID NO: 1681 - DNA, 627 bp, Canis familiaris
cacattcacctttgtctactatcaagacacttgaagaggctgtgggcaatatcgykgaaattcctgggaatgcatccttgtgagaggtcagacaaagtgccagataacaagaacacccacacattgcttctggctggtgtgttccggggaggtcatgatatcttggtgcgctccagactgctgcttttggacacagtaacacatgcaggtgacagccagaagttcagaggagctgccagtagacatcatcttggcatctgtgggctaaggggccagactgcatggaccctgctcctacccttttcccctcaacactacgcagaagtcatgccttcatcctgaattccmatggaaactccttcccaagcctctgcattcaaaaacaactaggaatcactggggaaaaaaaaaaattttttttccctgcaggactgctaggggataactttttttttcctttttttaaataggggatgattttagcttgtcctagaacctgttgcccttcttgtcagggtaggacatcgcaaatgaataaaatgctcgcacctcctcttgaatttatccccaagaaaaccatyttatccatataaataaatcagcatgtatttattgaaaaaaaaaaaa

SEQ ID NO: 1682 - DNA, 589 bp, Canis familiaris
atttgaatatgggcctgcccacatttcttcgttccgtaatggcttaaaataatttcccacggaagattcctttaaacctcttttttcccctgggaaggaagttcgggttacctgaccccacgtccaatttaatttggaaagccaccttttcaagtggaatccacttggagagacttccccgttttccataagtctgtcctggcgtcacttatcagacccaccacccggaagtctgattgactggaggccatcccacgcacgaggacctcagggaccgcttccaaaattaaccaaggcgaaaaccaggaaccaaggttccaggcccataggaccttttctagaggaaatgaacacttctgtcctctctgtgaagaaagattatcttctgcaagtcaaccagagagaactcctttcctccaccmactttgagcmaggcactatagttactccagtgcttgaatgtgtactttctctatatgagctggatcttttccccggaaactttcctgtagctgctccagatcttcactaaagtagtaacttgaaaaaaaaaaaaaaaaaaaaaaaaaaaaaaaaaaaaaaaaaaaaa

SEQ ID NO: 1683 - DNA, 681 bp, Canis familiaris
ggtggtgtgccacttcgttaaatagaccgcctcgtaactacatgtattcaatctgctcctagacctaacctctggatgcgtaccaagcagctgcccctcctggctggatgttggatgaaggcgtgcccgactttttgtctgttaggatagaaaatttctcacacgaggatgatctactactattactcacggtagagagaggtacggctgctacatcgacactacatcatatttatttagggacggctactctcaagtgtactcatgtgagacattcccagttctcaatatagtctgccctgggtgtacaaatcacagagccacacccgcggaagtcggtagatagatcgtggacgcatatcccacccagagacactctagggacgcttcaaaatacaaggcgaaaccaggaccaagatcaagaccaatagaactttctagagaaatgaacaccttctgtcctctctgtgaagaaagattatcttctgcaagtcaaccagagagaactcctttcctccaccaactttgagcaaggcactatagttactccagtgcttgaatgtgtactttctctatatgagctggatcttttccacggaaactttcctgtagctgctccagatcttcactaaagtagtaacttgaawmawraaaaaaaaaaaaaaaaaaaaaaaaaaaaaa

SEQ ID NO: 1684 - DNA, 676 bp, Canis familiaris
actgccaccgaccgscccgrccggggrcgggcgccggcggcaaaggagtcacatgtawtccacsggccgtacgctcgccccccgaggcggcgtcgtccctaacgwtcgacagcccatacktcaaacgtagratgacgccgagcmatcctaggagtcctcggragtcggggttactgggaacgtaaccggtgtgggtgccagtgtttcggcatcctctaccttggttgrctgctggcgcgcwttaatccctcacccgtcccggggtggatgagtcgtttttattcytatctggtcacaaacgtggcccagattaaggttagtgacctcaaatttaccaaattcgtggtacctaaggtgggcttgacaggagcctgctgccgcggattaacctgcaccttatgcgatataatttgaagcagctgaatttttgcacgatgaaggtacaagggtgcgggcgggcggaccgccgcgtggcgtgcctccgcccgaccccgccccaagccacacggcgcccccacgtagcacaatgcagtgagacccgcggggcccgttgcgaaatcaaagttttttaatgtgagaactttgctggcccgtgccgccaggtatccgctgcatggttattaggttatggtccgcggaacataaaagaaggaaaacggttcagtggcctagtaat

SEQ ID NO: 1685 - DNA, 652 bp, Canis familiaris
taccggtccggaattcccgggatctgtgcaagaagtctgtctgtccagaagttgggtcagctccgagtgacatgtccatacttaatcattgtgtccaaccttcagacccacaccttgtggatttacatggcatgtttagagtcgtgatctcatgctgacacacactgcccctcccatcacttgtgcaccacagatctgctaatcagtcacctttgtctctgccatacagatggggtcaggccaggccttccctgtttgtttaggtcaggacgccatggctactgcgatatcagtggtctcacaagcatgacagccaggtctgaggatgcctggtggcagagccagcaggcaggctggccggccagggtttgcctggttctcctctggcagacagaagggatttggctacacgagtgcatgttcttgggctcaaactttcttagcctctgaaatggggggcttgtcagtctcagaacaacctcttttcagcccatcatggcgtattcagtgtgtgccttttggcttcatctgtacacgtcccctttcccctcaattcttttaacaccataacagtgaggaaaagtcatctgggtcaagtaaatgtcaataaactgcctcacatgctgaaaaaaaaaaaaaaaaaaaaaaaaaa

SEQ ID NO: 1686 - DNA, 719 bp, Canis familiaris
  misc_feature (112)..(112): n comprises a, c, g, or t, or includes no nucleotide
  misc_feature (166)..(166): n comprises a, c, g, or t, or includes no nucleotide
tgccactggtgcctcgcccgccaagttcaaaggccagcatatccgggacacwgatgcctttcgchrcygcdagttccccwccmdgwggtcchagwwwsccgbccgccactdnacaggtcctgacccagctggtcctggtgaccggcctctgccttccgccggagdnactdctgaccktcccacctstkacccccrcctkctcstcwcagcctctgctggsgcmcagwkctgtccmcktctagacatgtcctgkcmggggkacwyaggcmctytggcrcagacccagytccmcstgatgktgagagctccwtcaysyctggcccchscdycwcggctcctskcagagaagctrtkgschagayctcragtccttyagwacchgwhcmgggtgkccatcaggwkggccacccttccataatcctcctktcctctgctccccagaccttgccattyggaaacmaacatcagatcyttgccccmccccttgcttccmgmaagggtcttgagcccataccccmagtctgacaccctcctcccctcccgccrcctgccaggacactctagcaggacactggtgctttgccgcataccctactgtgctgcacttctttcccmmtttttcataaatatmaatgtatgtawrwawrwrwaahrwwwmmwmwmwhvdvammwaaaaaaaaaaardaaawraaraaaaaaaaaaaaaaaaaaaaaaaaaa

SEQ ID NO: 1687 - DNA, 632 bp, Canis familiaris
gcctgctagttcccctccagaggttccagaaagccgccgcctctgtacaggtcctgacccagctggtcctggtgaccggcctgctgccttccgccggagataactwctgaccttcccacctctgacccccaccttctcctgcacagcctctgtctggcgcacagagctgtccacttctagacatgtcctggcaggggggacacaggcactctggcacagacccagctccacctgatggtgagagctccatcacccctggccccaccgccacggctcctctcagagaagctattgccaagacctcaagtccttcagaaccagaacagggtggccatcaggatggccacccttccataatcctcctttcctctgctccccagaccttgccatttggaaacaaacatcagatccttgccccaccccttgcttccagaaagggtcttgagcccataccccaagtctgacaccctcctcccctcccgccgcctgccaggacactctagcaggacactggtgctttgccgcataccctactgtgctgcacttctttcccaatttttcataaatataaatgtatgtatgtatgtgtaaaaaaaaaaaaaaaaaaaaaaaaaaaaaaaaaaaaaaaaaaa

SEQ ID NO: 1688 - DNA, 402 bp, Canis familiaris
ctggcacagacccagcgtccgctctggattgttgagtttgctccagtcatctccctgggccccaccggcctcggctcctgctccgtgttgtctattgccagatcctcaagtccttcagaccagamcakktgkccatcaggatgccacccttccataatcctcctttcctctgctccccagaccttgccatttggaaacaaacatcagatccttgccccaccccttgcttccagaaagggtcttgagcccataccccaagtctgacaccctcctcccctcccgccgcctgccaggacactctagcaggacactggtgctttgccgcataccctactstgctgcacttctttcccaatttttcataaatataaatgtatgtawrwawgtgtaaaaaaaaaaggg

SEQ ID NO: 1689 - DNA, 691 bp, Canis familiaris
cccggccaagttcatggccagcatatccggacacaggatgccgttcgcagctgcagtcccctmcsagaggtccyagraagccggccgccmctkacagtcytgacccagctgktcctggtgaccgkcctstgccttccgccggagractactgacsttcccacstytgacccccaccttytcytcwcagcctctgctggcgcacagagctgtccacytctagacatgtcctgkmhgggggacacaggcaytytggcacagaccyagctccacctgatgktgagagctccrtcaycyctggccccaccrccrcggctcctstcagagaagctrttkcchagacctcmwgtccttcagraccmgwmcmggkkggccatcaggmtgsccacccttccataatcctcctttcctctgctccccagaccttgccmyttggaaacmwacatcagatccttgccccascccttgcttccagaaagggtcttgagcccataccccmagtctgacaccctcctcccctcccgccrcctgccaggacmctctagcaggacactggtgctttgccgcataccctactgtgctgcacttctttcccmatttttcataaatataaatgtatgtawrwawrwrwwawawwwaaaaaaaaaamaaaaaaaawaaaaaaaaaaaaaaaaaaaaaaaaaaaaaaaaaaa

SEQ ID NO: 1690 - DNA, 671 bp, Canis familiaris
acacagatgccttccgcagctgcatgtttccccactctagagttccaagatatccgccgccatcttatatcaggtcctgacccagctggtcctggtgaccggcctctggccttccgccggagwwwctactgaccttcccaccttctgacccccmccktctcctcacagcctctgctggcgcacagagctgtccayttctagacatgtcctgbdswgggkgacacaggcactctggcacagacccagctccacctgatggtgagagctccatcaccyctggccccaccgccacggctcctctcagagaagctattgccaagacctcaagtccttcagwaccagawcagggtggccatcaggatggccacccttccataatcctcctttcctctgctccccagaccttgccatttggaaacaaacatcagatccttgccccaccccttgcttccagaaagggtcttgagcccataccccaagtctgacaccctcctcccctcccgccgcctgccaggacactctagcaggacactggtgctttgccgcataccctactgtgctgcacttctttcccmatttttcataaatataaatgtatgtatgtatgtgtaawawwwaaaaaaaaaaaaaaaaaaaaaaaaaaaaaaaaaaaaaaaaaaaaaaaaaaaaaa

SEQ ID NO: 1691 - DNA, 683 bp, Canis familiaris
cgggacacagatgcctttcgcagctgcaagttccccaccagaggtccaagaagccgccgccactaacaggtcctgacccagctggtcctggtgaccggcctctgccttccgccggagagactactgaccttcccacctctgacccccgacctgtctcctcacagcctctgactggcggcacagagctgtgccactgtctagacatgtcctggctagggggacacacggcactctggcacagaacccagctctcacctgagtggtgaaagctcccatcaaccccatggccccaacggcccacggctcctttccagagaaagccttttggcccaagaacccttccaaggtcccttccaggaaccaggaaccagggtggccatmaggatggccacccttccataatcctcctttcctctgctccccagmccttgccatttggraacaaacatcagatccttgccccaccccttgcttccagaaagggtcttgagcccataccccaagtctgacaccctcctcccctcccgccgcctgccaggacactctagcaggacactggtgctttgccgcataccctactgtgctgcacttctttcccmatttttcataaatataaatgtatgtawrwawrwrwaawaaaaaaaaaaaaaaaaaaaaaaaaaaaaaaaaaaaaaaaaaaaaaa

SEQ ID NO: 1692 - DNA, 604 bp, Canis familiaris
ccgtgtagccgcttgccgctgactggtcctgacccagctggtcctggtgaccggcctctgccttccggccggagttactggctgaccttcccacctctgacctcccaccttcgtcgctcacagcctctgctggckcacagagctgtccgacttctagacatgtcytgtgcaggkgkacacaggcactctggcacagacccagctccacctgatggtgagagctccatcacccctggccccaccgccacggctcctctcagagaagctatkkccaagacctcaagtccttcagaaccagacmrggtggccatcaggatggccacccttccataatcctcctttcctctgctccccagaccttgccatttggaaacaaacatcagatccttgccccaccccttgcttccagaaagggtcttgagcccataccccaagtctgacaccctcctcccctcccgccgcctgccaggacactctagcaggacactggtgctttgccgcataccctactgtgctgcacttctttcccaatttttcataaatataaatgtatgtatgtatgtgtaawawwwaaaaaaaaaaaaaaaaaaaaaaaaaaaaaaaa

SEQ ID NO: 1693 - DNA, 1154 bp, Canis familiaris
cccacctagagttccaggatagtctgccgtccttttatcatgttcctgacccagctggtcctggtggagccggcctctgcctttccgccggtgttatcttctgaccgtttgcccactctctgacccccaccttctctctcacagcctctgtggcgcacagagctgtccacttctagacatgtcctggcagggggacacaggcactctggcacagacccagctccacctgatggtgagagctccatcaccctggccccaccgccacggctccttctcagagaagctattgccaagacctcaagtccttcagaaccagaacagggtggccatcaggatggccacccttccataatcctcctttcctctgctccccagaccttgccatttggaaacacaacactcacgatccttgccccaccccttgcttccagaaagggtcttgagcccataccccaagtctgacaccctcctcccctcccgccgcctgccaggacactctagcaggacactggtgctttgccgcataccctactgtgctgcacttcttttccccacatttgttcataaatataaatgtatgtatgtatgtgtaawawwwamwctctgtgtcacctatttctatggctcgccaagctgctaatggggggaggggcagactgcattttctcacatctgctttctggaacgagggccagccgagacggtcttctgtggagatctccagcctgagctcatcgcacacccaccagtctgttctcaccccggcctggcctgccccctgcccacggccccagcccggcttccttccactcaccaccagatccttcatgtttagcttgtcaatgatggttcggatcagctctgggggtgcaggggacccagcaatcacacctgaatcagagagaggactgacacagctcccagcttcccaggcccagcggatccccattcacctatagctccttctagggaagaacattttcctctcaccctgaccctggccttgttgctatagctggcagctagccttgggctagtgcccagggacactgaggatctgcctccctcccacccacttctctatggatcttactgccccctaaataaaagattgggcacaaaaaaaaaaaaaaaaaaaaaaaaaaaaaaaaaaa

SEQ ID NO: 1694 - DNA, 626 bp, Canis familiaris
caagttccccccgagaggtccaagtaatcgtccgccactagacaggtccttgacccagctggtcctggtgaccggcctctgccttccgtccggaggtatctactgaccttcccaacctctgaccccctaccttctcctcacgagcctctgtctggcgcacagagctgtccacttykgagacatgtcctgkcagggggacacaggcactstggcacaracccagctccacctgatggtgagagctccatcacccctggccccaccgccacggctcctctcagagaagctattgccaagacctcaagtccttcagaaccagaacagggtggccatcaggatggccacccttccataatcctcctttcctctgctccccagaccttgccatttggaaacaaacatcagatccttgccccaccccttgcttccagaaagggtcttgagcccataccccaagtctgacaccctcctcccctcccgccgcctgccaggacactctagcaggacactggtgctttgccgcataccctactgtgctgcacttctttcccatttttcataaatataaatgtatgtatgtatgtgtaaaaaaaaaaaaaaaaaaaaaaaaaaaaaaaaaaaaaaaa

SEQ ID NO: 1695 - DNA, 596 bp, Canis familiaris
tgccgtcctgccacttgacaggtcctgatcccagctggtctctggtgaccggcctctgccttcctgccggagtatctwctgaccttcccacctctgacccccacyttctcctcacagcctctgctggcgcatcagagtctgtccacttctagacatgtctctggtcacgggggacacaggcactctggcacagacccagcttccacctgatggtgtagagctccatcacgccctggccccaccrccacggctcctctcagagaagctrttgccayagacctcaagtccttcagaaccagracgagggtgggccatgcagggagtggccacccttccataatcctcctttcctctgctccccagaccttgccatttggaaacaaacatcagatccttgccccaccccttgcttccagaaagggtcttgagcccataccccaagtctgacaccctcctcccctcccgccgcctgccaggacactctagcaggacactggtgctttgccgcataccctactgtgctgcacttctttcccmatttttcataaatataaatgtatgtawrwawrwrwaaaaaaaaaaaaaaaaaaaaaaaa

SEQ ID NO: 1696 - DNA, 509 bp, Canis familiaris
ttgccgccggaggaagctgcgtgaccttcgccacctctgaccccgcaccgtctcctcgacagcctcgtgcttggcgcacagagctgtccacttctagacatgtcctgtgcagggggatcacaggcactctggcacagacccagctccacctgatggtgagagctccatcacccctggccccaccgccacggctcctctcagagaagctattgccaagacctcaagtccttcagaaccagaacagggtggccatcaggatggccacccgttccataatcctcctttcctctgctccccagaccttgccatttggaaacaaacatcagatccttgccccaccccttgcttccagaaagggtcttgagcccataccccaagtctgacaccctcctcccctcccgccgcctgccaggacactctagcaggacactggtgctttccgcataccctactgtgctgcacttctttcccatttttcataaatataaatgtatgtatgtatgtgtaaa

SEQ ID NO: 1697 - DNA, 1041 bp, Canis familiaris
gaaactgggatgatgtttgcattttgcagtgttggctcccagcagccatagcatcaaagtgtaaaatatttatgcaacactggaccccggcagaggatatttttcatagggaatgaaacgtaaccammagaatgaaaatgataaaaatattcccacactttgggagtggtgcccttggaggcaagctcccattttggacatttaaagcacctacagggtggcattcctttctttcacaacataaactatagataattaaggcagtaaaaaaaatttgaactgccttctaggcactgagagcaaaatctttactcatttacctgcaaaccagaatgattctggcctagagtaaggtgcaggtgttaaaataaccattatcctagaggattgcataacagagaaaatgattcgtagacaaaaatgatctcacttcatctktgctgtctcataattgtcaaaaatcagrattatgttaagtcctagtttctataatcagtttttgaatcmaaggatggaaggccatccacvaaatatcttaggtcagagatgacagaratatccmctcagagtggaaaaaaaggrattctgttcattgttatttaagtaaggtgaaattattgtctagatcgttcaatatcatcacctagcagataaatttagcattctgcaatgttcctggcttgcactgggcatttaatgtaaaaaaaaaaaaaagagttattatatatatacatatattgtgtatgacmaacttagaaatttcagttagaggggttaacatctgatacatctaatgcacacctggttttgtaaggtactaaatacttaatatgtagaaaaccctttgcgtggtcctcaggcttacgtgttcattgaatagttttgtatgatagatccaacatggtcttcaaaatatgcatgtactttatattttctatatttgtaactttgcatgcacttgtataaaaaaaagtataaatgttcaaaatcttgaattaaacaggagctaagtgaamrwrwwmaaaaaaaaaaaaaaaaaaa

SEQ ID NO: 1698 - DNA, 345 bp, Canis familiaris
tccgtcacgggccggcagcgtcggggggctcgcgcccctcgcttggcggtgtcggccgcggccggccgggggggaggatcggcgtcggggcgkcggcggcggcggcggcctttggcctcgctcccccgcgccccgcctcgcccgtccccccccaccctctgtccaggtacctagcgcgtcccggcgcggaggtttaaagaccctttgggggtcgcccgtccgcctcgggtcggggcggtcgggcccgyggggagggtcagtcccctcctccrgactccgccgcctcggtccccgccrccccgtggggtgtgcggggggggggtcgccacgccacgtggccggccc

SEQ ID NO: 1699 - DNA, 346 bp, Canis familiaris
ggccagtgcagcgtacggggggctcgcagccaccatcgcattggcaggtgtcaggccgcggccggccggggggaggatcggcgtcggggcggcggcggcggcaggcctttggcctcgctcaccccgcgccccagcctcgcccagtccccacacccaccactctgtccaggtacactagcgcgtcaccaggcgcggaggtttaaagaccctttgggggtcgcccgtccgcctcgggtcggggcggtcgggcccgcggggagggtcagtcccctcctccrgactccgccgcctcggtccccgccaccccgtggggtgtgcgggggggggggtcgccacgccacgtgcc

SEQ ID NO: 1700 - DNA, 335 bp, Canis familiaris
cgtcacggcccggcagcgtcggtggggtctcgcgcccctcgcttggcggtgtcggcccggccggccgggggggaggatcggcgtcgggcgcggcggcctttggcctcgctcccccgcgccccgcctcgcccgtcccccccccaccctctgtccaggtacctagcgcgtcccggcgcggaggtttaaagaccctttgggggtcgcccgtccgcctcgggtcggggcggtcgggcccgcggggagggtcagtcccctcactccaggactccgccgcctcaggtccccagccaccccgtggggtgtgcgggggggggggtcgccacgccacgtgcccg

SEQ ID NO: 1701 - DNA, 678 bp, Canis familiaris
caatgarwatrgacaatggatrgaagtctatkraagtgagaatggagaacyctcgtggggataactatcgagcctatgaagatgagtacagctactataaagggcacagctatkacagctatgatggtcaagattactactaccaccaccagtgaaggctcagcctgggatgaattcatccattctggcatttcatgtggctaccattttcaaagttcaactcaggaaggtgcmatataaymaatgtgcatattataatgtggaatggtgctactattccmaagtaatttctgtaattgcttctgttgcttttccctggtatgttattgaaagcttattgtaaatcagggcatttaaactaatctaagattgagttcmattaagtgttttgagtttgtagtkctataaatagtatttttaatatgtttgtactattattatctgctaaaactactcttcatgcmagtgcttctacgarttaacmttaatgacactatatacmaaatatgtgtagttctttaatcatactacctaacmctgtatattatgtttaatcaccatcatcatctatttttatgtgatctttatgtatctatggattttatcacaaataaaatgcamaccttcaaaaawrwwawaawaaaraaaaaaaarawwaaaaaaaaaaaaaaaaaaaaa

SEQ ID NO: 1702 - DNA, 685 bp, Canis familiaris
acaatgratatgaagtctatgaaagtgagaatggagaacctcgtggggataactatcgagcctatgaagatgagtacagctactataaagggcacagctawgacagctatgatggtcmagattactactaccaccaccagtgaaggctcagcctgggatgaattcatccmttctggcatttcatgtggctaccattttcmaagttcaactyaggaaggtgcmatataacmaatgtgcatattataatgtggaatggtgctactattcccaagtaatttctgtaattgcttctgttgcttttccctggtawgttattgaaagcttattgtaaatcagggcatttaaactaatctaagattgagttcmattaagtgttttgagtttgtagttctataaatagtatttttaatatgtttgtactattattatctgctaaaactactcttcatgcaagtgcttytacgaattaacmttaatgacactatatacmaaatatgtgtagttctttaatcatactacctaacmctgtatattatgtttaatcaccatcatcatctatttttatgtgatctttatgtatctatggattttatcacaaataaaatgcmaaccttcaaaaatgttawaataaagaaaaaaaagattcagaawdraaaaaaaaaaaaaaaaaaaaaaaaaaaaaaaa

SEQ ID NO: 1703 - DNA, 677 bp, Canis familiaris
aaggcatgaaacgtgtcctgaagacttttggccccattcaagacttttccagggccaccactgaaaaagttaamcaggccatgtgtgtgaakgttcctgatgacccagagcacttaggcgccagaaggcagtggagggacgagtgtctcctgagactggccaagttgaagaggcagatgcagtccccagtaaagcttcctgctgagctcccatccttcgttattgggagtcctcgttgggagaatcacacagcacttaattgaacctggaggccaggtggtcttcatgcagattcaatggtggggcccacagcggtggggctgagaggtcctctgatcactccctggccttgggtgtcacagctgcactggaatctgagggctgttggctccctgcmacttgggcacagcaagagaacmaatcgtctgaagattttcaccttttatttttagagattccatacagcggcattttatagccmatgattgtggtttcaagtttattttaatctgtagcmaagttktgtaatgattttctaatctctttctgagtactctgtggccctgcattatgaggcacctaccttcattttgctaatgcttattctgaataaaagtctttccttgcawaaaaaaaaaaaaaaaaaaaaaaaaaaaaaaaaaaaaaaaaaaaaaaaa

SEQ ID NO: 1704 - DNA, 671 bp, Canis familiaris
aaaattaaagtaatgcttgatgcaggatctgaactttttcagtttatatgtatattatgtttatttgtaaggatatagtgcaaagggaacattttgcgttttaaagtgaattacagctgtgctgtgaagagagttctttattgacctgtaggatcctacaactttgatttaaagtgtaagaaaatgttggatatttgaggcccattgttaatatatttctattgcagtatccttaaaaagcaaaccaataccaaaccaaacctaaataaaaccccaccatttctgtgatgggtttcctttgtgaaaatcttcgtgtgatggaagcactgtgttcagtccttaatcccctaccaggtgtagcatcatagtacttgggggaaagggtgtgtgcatatgggtccttccccagaagagcagggtggctgatttggctactgcttctacagcttgagtttgtccacttaatgttctacactacascagtgatgttgtgcagttccagctttgccagaagtttgtttccataagcgctctgtaggtttggttataatgaagattcaccttgggaaaacagtgtgacttcagcctatgtaattaccttgttatgagtatgtaaaagtaaaatgcatgtgaatttattatatttgcactataaaggtatttgattaaaa

SEQ ID NO: 1705 - DNA, 755 bp, Canis familiaris
catacccaagggatgtgctggagtgtggcccttctcctccggaccaaccggccaaaatggttttctggggtcgcggagataaaaactattcaagctatggdataccytggstgtatgcaagtacaccgkacaggacgagagccattcagagtkggtgtcttgtgtccgattttcacctwatagcagcaatcccatcattgtctcctgtggttgggacaagttggtcaaggtatggdacctggcmaactgcaagctgaagassmatcacatcggccacackggctacttgaacamcgtgaccgtctctccggatggatctctctgtgcttctggagggaaggatggccaagccatgctgtgggatctcaatgaaggcaagcacctttatacacttgatggtggagacatcatcaatgccctatgcttcagtcctaaccgatactggctatgtgctgccacgggccccagcatcmagatctgggacttggaaggcaagatcattgtagatgaactaaagcaagaagttatcagtaccagcagcaaggcagagccaccccagtgtacctctctggcctggtctgctgatggccagactctgtttgctggctacaccgacaacctggtgcgtgtgtggcaggtgaccatcggcacccgctagaaatgatggcagaactttaggaataaaacmttggttttcwgaaaaaaaaaraaaaaaaaaaaaaaaawaaaaaaaraaaaaaaaaaaawaaaaaaaa

SEQ ID NO: 1706 - DNA, 723 bp, Canis familiaris
ttgccttctcctccgacmaccggcaaattgttyykggtcgcgagataaaactatcvagctatggwwtamcctgggtkwatgcmmagtacmcsgtacaggrcgagagccattcagagtgggtgtcttgtgtccgaktttcacstaatagcagcaatcccatcattgtctcctgtggttgggacaagttggtcaaggtatggaacctggcmaactgcaagctgaagaccmatcacatcggccacacgggctacttgaacmccgtgaccgtctctccggatggatctctctgtgcttctggagggaaggatggccmagccatgctgtgggatctcmatgaaggcaagcacctttatacacttgatggtggagacatcatcaatgccctatgcttcagtcctaaccgatactggctatgtgctgccacgggccccagcatcaagatctgggacttggaaggcaagatcattgtagatgaactaaagcaagaagttatcagtaccagcagcaaggcagagccaccccagtgtacctctctggcctggtctgctgatggccagactctgtttgctggctacaccgacaacctggtgcgtgtgtggcaggtgaccatcggcacccgctagaaatgatggcagaactttaggaataaaacmttggttttctgraaaaaaaaaawaawaawaaawmaraaaaaaaaawaaaaaaaaaaaaaaaaaaaaaaaa

SEQ ID NO: 1707 - DNA, 670 bp, Canis familiaris
caattgtttctggtcgcgagattaactattcaagctatggatacckykgggtgtatgccaagtacacccgtacaggacgagagccattcagagtgggtgtcttgtgtccgakgtgttcacctaatagcagcaatcccatcaktgkkctcctgtggttggggacaagttggtcaaggtatggaacctggcawactgcaagctgaagaccaatcacatcggccacacgggctacttgaacmccgtgaccgtctctccggatggatctctctgtgcttctggagggaaggatggccaagccatgctgtgggatctcaatgaaggcaagcacctttatacacttgatggtggagacatcatcaatgccctatgcttcagtcctaaccgatactggctatgtgctgccacgggccccagcatcaagatctgggacttggaaggcaagatcattgtagatgaactaaagcaagaagttatcagtaccagcagcaaggcagagccaccccagtgtacctctctggcctggtctgctgatggccagactctgtttgctggctacaccgacaacctggtgcgtgtgtggcaggtgaccatcggcacccgctagaaatgatggcagaactttaggaataaaacattggttttctgaaaaaaaaaaaaaaaaaaaaaaaaa

SEQ ID NO: 1708 - DNA, 586 bp, Canis familiaris
acgagagccattcagagtgggtgttctttgtttggtttctcggagttttgcaccgtaatagcagcaatcccatcattgtctcctgtggttgggacwagttggtcaaggtatggaacctggcmwactgcaagctgaagaccaatcacatcggccacacgggctacttgaacmtccgtgaccgtctctccggatggatctctctgtgcttctggagggaaggatggccaagccatgctgtgggatctcatatgaaggcaagcacctttatacacttgatggtggagacatcatcaatgccctagtgcttcagtcctataccgatatctggctatgtgctgccacgggccccagcatcaagatctgggacttggaaggcaagatcacttgtagatgaactaaagcaagaagttatcagtaccagcagcaaggcagagccaccccagtgtacctctctggcctggtctgctgatggccagactctgtttgctggctacaccgacaacctggtgcgtgtgtggcaggtgaccatcggcacccgctagaaatgatggcagaactttaggaataaaacattggttttctgaaa

SEQ ID NO: 1709 - DNA, 564 bp, Canis familiaris
gtgaccaatcactcagtagatccagctgcagaaaggcgatgaaagtaaccaaggaatgatctccttgaaagtaattccccaccagcagaatcgtcttcctgcgctacagatgttcatgagagcacacgtttgactatgatcccagaaaggaccacctgatcccttgcaaggaggcgggactgaagtttgttactggggacatcatcaagatcatccacaaggatgacagtaactggtggcaggggcgggtggaaggctcttccaaggaatccgcaggattgatcccgtctcctgagctgcaggagtggcgggtggcgagcgccgcgcagtccgcgccgagcgaggccccgagctgcagcccgttcgggaagaagaagaagtacaaggacaagtacctggccaagcacagctccatctttgaccacgctggacgtggtgtcctacgaggaagtggtccggctccctgcgttcaagcggaagaccctggtgctgatcggggccagtggcgtgggccgcagccacattaagaacgccctgctcacccagaacccggacaagttcgcg

SEQ ID NO: 1710 - DNA, 834 bp, Canis familiaris
  misc_feature (188)..(188): n comprises a, c, g, or t, or includes no nucleotide
ggggaatgtgggttttgtattcaccaaggaggacctcactgagatcagggacatgctgctggccaataaggtycctgctgctgcccgtgctggtgccawagctccatgtgaagtcackgkgscmgcvcagracmcagktytkgsscscgarragmsctckbtyttysmrkcytwagscmwbacmhytnrgatctywwgggsmaccmbkgrawtcktgagtgatgykcavykgwtwawgabsggrgachmwktkggadccmdssaagccacmvkgstcwacawgskgracawskcsssskbbtccyktggsctgatyatccagcaggtgttygatrrtggcagcwtbtacrmcmctgaagtgcktgacatcacagaggraactytgcattctcgcttyytggagggtgtccgcaacgttgccagcgtatgtctgcagatrggttacccgactgttgcatcagtgcyccattctatcatcvatggawacmagcgggtyctggctttgtckgtggraactgattacacckttccacttgctgdaaaggtcaaggcyttcttggctgatccwtctgcatttgtggctgctgctcctgtggctgctgccmccactgctgcacctgctgctgccgcmgccccagcsmaggttgaagcmmmggaagagtcggaggaatcggacgaggatatgggatttggtctctttgactaatcacchwaaagcaacchmttcagccmastytatttgtgmaacmaggaaataaaggcttacttytcwwharvvhmhmaawaaarraaaaarraaaadrrdraaaaaaaarrrraaaaaaaaaaarrrmr

SEQ ID NO: 1711 - DNA, 773 bp, Canis familiaris
cggacattgctggccataaggtcctttgtgccgtgctggtgcctagctccatggaagtcacggggtcagcgcagacacagtctgggcccgagaaggcctctgtcttccaggctttaggcagttccgtctaagatctctagggcaccatgaatcctgagtgatggtgcactgattaagaccggagacaaagtgggagccacgaagccacactgcgtcaacatgctgacatctccccsttctcctktgggctgatcatccagcaggtgtttgataatggcagcatctacaaccctgaagtgcttgacatcacagaggaaactctgcattctcgcttcctggagggtktccgcaacgttgccagcgtatgtctgcagataggttacccgactgttgcatcagtgccccattctatcatcaatggatacaagcgggtcctggctttgtctgtggaaackgattacacctttccacttgctgaaaaggtcaaggccttcttggctgatccatctgcatttgtggctgctgctcctgtggctgctgccaccactgctgcacctgctgctgccgcagccccagccaaggttgaagcmaaggaagagtcggaggaatcggacgaggatatgggatttggtctctttgactaatcaccmaaaagcaaccmattcagccmagtttatttgtgaaacmaggaaataaaggcttacttctcttaaaarwmmaaaaaaaraaaaaaamaaaaaaaaaaawaawaaaaaaaaaaaaaaaaaaaaaaa

SEQ ID NO: 1712 - DNA, 684 bp, Canis familiaris
tgtgccagcccagacacagttctgggccccgagagacctctttcttccagctttagcataccactaagatttctaggscaccattgaatcttgagtgatgtcagctgattaagaccggagacmaagtgggagccagcgaagccacactgctcaacatgctgaacatctcccccttctcctttggctgatcatccagcaggtgtttgataatggcagcatctacaaccctgaagtgcttgacatcacagaggaaactctgcattctcgcttcytggagggtgtccgcaacgttgccagcgtatgtctgcagataggttacccgactgttgcatcagtgccccattctatcatcaatggatacaagcgggtcctggctttgtctgtggaaactgattacacctttccacttgctgaaaaggtcaaggccttyttggctgayccatckgcatttgtggctgctgctcctgtggctgctgccaccactgctgcacctgctgctgccgcagccccagccarggttgaagcmaaggaagagtcggaggaatcggacgaggatatgggatttggtctctttgactaatcaccmaaaagcaaccyattcagccaagtttatttgtgaaacaaggaaataaaggcttacttctcttaaaaaaaaaaaaaaamaaaaaaaaaaaaaaaaaaaaa

SEQ ID NO: 1713 - DNA, 728 bp, Canis familiaris
acacaggttctgggggcccgagaaagactctttccttccaggcttttaggcattaaccactaaggatctctaagggcaacacaattgaaatcttgagtgatggtgcagctgattaagaccggagacaaagtgggagcacagcgaagccacacctgctcaacaatgctgaacatctcgccccttgctcctttgggctgattcaataccaaccagggtgttttggataaatgggcaagcaatcttacgaaccctgaagttgcttgaacaatcaacaggagggaaacttctgcattttcgcttccctggagggtgtccgcaaacgttgccaagggtaatgtctgcagaataaggttacccgactgttggccatcagtggccccattcgaatcatcgaatgggataacaagccggggtccttggctttgtcctggggaaactggataacaccttkccacttgctgaaaargktcaagsccttcttkgctgatccatckgcatttgtggctgctgctcctgtggctgctgccaccactgctgcacctgctgctgccgcagccccagccaaggttgaagcaaaggaagagtcggaggaatcggacgaggatatgggatttggtctctttgactaatcaccmaaaagcaaccaattcagccaagtttatttgtgaaacaaggaaataaaggcttacttctctktaaaaaaaraaaaaaaaaaaaaaaaaaaaaaa

SEQ ID NO: 1714 - DNA, 704 bp, Canis familiaris
gaagtcctgttgccagccccggacaccagggtctcgggccccgcggtagacctcttttcgttccaggcytttaggcaktaccacgtaagatctctaggggcaccattgaaatcttgagtgatgtgcaytsrkyamgascggagacmaagtgggagccagtcgwwagccacactgctcaacatgctgaacatctcccccytctcctttgggctgatcatccagcaggtgtttgataatggcagcatctacaaccctgaagtgcttgacatcacagaggaaactctgcattctcgcttcctggagggtgtccgcaacgttgccagcgtatgtctgcagataggttacccsactgttgcatcagtgccccattctatcatcaatggatacaagcgggtcctggctttgtctgtggaaactgakttacacctttccacttgctgaaaaggtcaaggccttcttggctgatccatctgcatttgtggctgctgctcctgtggctgctgccaccatctgctgcacctgctgctgccgcagccccagccaaggttgmagcaaaggaagagtcggaggaatcggacgaggatatgggatttggtctctttgactaatcacccmaaaagccamccamttcagccaagtttatttgtgaaacaaggaaataaaggcttacttctcttaaaarwmaaaaaaaaaaaaaaaaaaaa

SEQ ID NO: 1715 - DNA, 688 bp, Canis familiaris
gttgggccccgagaagacctcttcttccaggcttaggcattaccactagatctctaggggcaccactgaaatctgaggtgaatggcagcctgataagaccgggaagaccaagtgggagccaagcgaagccaacactggcttcaaaaaggcggaacatgctcccccgtgtcccttgggccggaatcatccagcaaggtgttkgataaatgggcaagmatctacaacccttgaagtgcttgacaatcacagaggaaaactctgcattctcgcttcctggagggtgtccgcaacgttgccagcgtaatgtctgcagataggttacccgactgttgcatccagtgccgccattctatcagtcaatggatacaagcgggttcctggctttgttctgtggaaactgattacacctttccacttgctgaaaaggtcaaggccttcttggctgatccatctgcatttgtggctgctgctcctgtggctgctgccaccactgctgcacctgctgctgccgcagccccagccaaggttgaagcaaaggaagagtcggaggaatcggacgaggatatgggatttggtctctttgactaatcaccaaaaagcaaccaattcagccaagtttatttgtgaaacaaggaaataaaggcttacttctcttaaaaaaaaaaaaaaaaaaaaaaaaaaaaaaaaa

SEQ ID NO: 1716 - DNA, 617 bp, Canis familiaris
tgctcaacatgcgtgaacatctcccccttctcctttggctgatcatccagcaggtgtttgataatggcgagcatctacaaaccctggaagtgcttgacatcacagtaggcaacttctgcattctcgctttcctggtagggtgtccgcacacgcttagcctagcgctatcggtcatgctagatcaagataaagccctgacctgttgcgattccaagtcccgcccactctcatatctatccaatcggatgagcatagcagagctgcgcgtggcctgtcgtttgttctggatggcaagcatgacacacaccctcaaccacttgctgaagagatgctacaacggctcttcgttggcatgatccatccgcatttgtggctgctgctcctgtggctgtctgccaccactgctgcacctgctgctgccgcagccccagcccaaggttgaacgcaaaggaagagtcggaggaatcggaccgaggatatgggatttggtctctttgactaatcacccaaaaagcaaccmattcagccaagtttatttgtgaaacaaggaaataaaggcttacttctcttaaaaaaaaaaaaaaaaaaaaaaaaaaaaaaaaaaaaaaaaaaaaaaa

SEQ ID NO: 1717 - DNA, 731 bp, Canis familiaris
cttcagagcacctgccaccccaagaggtctgcgcttcccaagagatgtgccaggggctgctggaggartcggacggggaggaaagaagccaggcgagggcccgggacacagtgccggaggctggaggaaagcagactgaaggagcagagacatcgcccacacctgtgcgcctggccgccatggagaagaagacagagcagcagaggcggcgggagaaggccgcccagaagatgcgggtacagcaggcccaggagcgggctgcccggctccggcaccaggagctcttccggctacgcgggatcaaggcccaggtggcacgkcgkctggcggagctggcacggcggcgggagcagcggcgagtgcagcggctggcggagscagacagaccccgcaggctggggcggctcaagtatcaggcccctgaygtggacgtgcagytcagctcggagctggctgactcgctcaggactctgaagcccgaaggcaacattctccgtgaccgtttcaagagcttccagaagaggaacatgattgagcctcgggagagagccaagttcaagcgcaagtacaaagtgaagctggtggaaaagcgggcgttccgcgagatccagttatagccatcactgaatgctggagcccccaccctacaataaaacaccacctgatcgacaaaaaaaaaaaaaaaaaaaaaaaaaaaaaaaaaaaaaaaaaaaaaaaaaaaaaaaaaaaaa

SEQ ID NO: 1718 - DNA, 680 bp, Canis familiaris
gcctccacccaggagtctgcgtttccaagagatgtggccagggctgctkgaggatcksacggggaggaagagccagcgagggcccggacacagtgccggaggctggaggaaagcagactgaaggagcagagacatcgcccacacctgtgcgcctgccgccrtggagaagaagacagarcagcagaggcgssgggagawrgccgcccagwagatgcgggtacagcaggcccaggagcgggctgcccggctccggcaccaggagctcttccggctacgcgggatcaaggcccaggtggcacggcggctggcggagctggcacggcggcgggagcagcggcgagtgcrgcggctggcggaggcagacagaccccgcaggctggggcggctcaagtatcaggcccctgaygtggacgtgcagctcagctcggagctggctgactcgctcaggactctgaagcccgaaggcaacattctccgtgaccgtttcaagagcttccagaagaggaacatgattgagcctcgggagagagccaagttcaagcgcaagtacaaagtgaagctggtggaaaagcgggcgttccgcgagatccagttatagccatcactgaatgctggagcccccaccctacaataaaacaccactgatcgacmaaaaaaaaaaaaaaaaaaaaaaaaaaaaa

SEQ ID NO: 1719 - DNA, 611 bp, Canis familiaris
agaagcttgcatatcacaactggacccagatcaggcctcgataacaccccaggaatcatattcagcttggtgaagtcgccaggtgcacggaagtgcgccagctttccccagaaagccagaaaccccagttggcagaagcacagacagaggagctccgtcagaagacccaggaggaaggggacgagagggctgagkcggagcaggaggcctacctgcgtgaggattgagcgctggakccgttgcccacatctgccgggtcagcctgaggagagcaggggtggccaccatccggcccaagggcagcagggccttctctgcaccagaggcggtggcacatcctgccctggcccatgaaggccttagtgagctgtgagtgcctggcctctcacccctgtggacctggctctttgccctggggcactgcaccctgtttaacatttgaccccactcagcagctctccgctcagccatctttttacctcccacccagagcatctcggcagcctagccagagagaagggtccttgtttgtcacgcccacaagttcggtagctgtttaacttctgtttccaatcttactcacattttcaaataaaaaaaaaaaaaaaaaa

SEQ ID NO: 1720 - DNA, 518 bp, Canis familiaris
ttcgggccaagcacactcaggagaactgtgagacatggggtgtaaacggtgagacaggtaccttggtagacatgaaagaactgggcatctgggaaccactggctgtaaagctgcagacatacaagacagcagtagagacggcagttctcctgctgcggattgatgacattgtctcaggccacaaaaagaagggtgacgaccagagccggcaaggcgggactcctgacgctggccaggagtgagtgaagggcaaggtgacctcaacgcacagagccggcagaggcttcctcttccctgagccagactgccagggacactgtggacgtctctgtttggaagggatcaggttgaggggcagccctggcctcttcctgtggtagctcagtttgcaaaaggcactgacatataattcttctctattgtaagctttccatttaatgtagtttgcttccgttgattaaatctaagtcatttgaaaaaaaaaaaaaaaaaaaaaaaaaaaaaaaaaaaaaaaaaaa

SEQ ID NO: 1721 - DNA, 169 bp, Canis familiaris
ggagcgatcgcagccgccgcccggatgcccggcctcggggcccccggcgcccgccctcccgcagcccgccgcggcggctagaagagcagcgggagcagcagcagcaagatggaggcgagcgccgtgcgggcgccgccgctgctcctgcgccccggcccgtagggcaggt

SEQ ID NO: 1722 - DNA, 584 bp, Canis familiaris
aaaggactgcagaggaaccagaaaacctgaaacaatgtttgaccaagaccaaacagtgggcagaggcaaaccaggtacttgtctacaacagattaacgaaaatcgaacgaacttatacaaaaacctccttgtgttgggaaactccaacggaaccttgatgaattatctcaacaattcgttggccatcagtcaggaacaccgtattgaacatgtgtccgactccaccaactgtgtttaacaaaatactttaaagactttcttaaaattttggctgttgtttgatttgtctaagacttcatatgtccgtctggtttttataatcgacactcacaagtttgggtaggctctgtcataaatcttctggaccttggattcggaacaatctcttctggaaaatcggtctttactttttaaacatccaagtggagggtttcgttccttttaactatctatccaatcttatcataccagatactactactcctcctgacagaaatccaaatcctccccacagaaaaatatagatctcaaataaagtgactattttaataaactaaaaaaaaaaaaaaaaaaaaaaaaaaaaa

SEQ ID NO: 1723 - DNA, 584 bp, Canis familiaris
tttcctgacgtctccttggtcttttggactttgttacaaactggttctggtttgtcacccgtctccgtttggtccatgaacagatgttgtctaattgcttttagcttgcttgaatatgtttttggaggaacacaaccctttgaggttgccttggaactacttaatagagttgttaagcaaccggtagtcagtccttgtggcataacttgtacacaggctgaggtggttgacacaaattgttttatgaaatttctgaaagaattttaaaaccgacaacaaactaaacagattctgaagtatacaggcagaccaaaaatattagctgtgagtgttcaaacccatccgagacagtatttagaagacctggaacctaagccttgttagagaagaccttttagccagaaatgaaaaatttgtaggttcacctcccaaagcaaggaaaattgatagataggttagaatagtatggtctatgatgatgaggaggactgtctttaggtttaggaggggtgtctttttatatctagagtttatttcactgataaaattatttgattttttttttttttttttttttttttttt

SEQ ID NO: 1724 - DNA, 705 bp, Canis familiaris
ctccctggatctttgagtctggtgtcacatgagactccaagagttggagttcttcccagcctctggaaggtgctgaaggaagctgcttacttctgggaagattgcttcgtgcagcactgctcaagaagctgaagaagaagggaccmgacttcaactgggaatgtgaatggggttgacctggctaggactgaggagtcgaaaggaggtstggaggatgatagtagtgtctgtattttccggactttaatttctgtgtgagaccmaaggagayaaagatgtattttgttcmaaatttaaattttatgtggcgtactatctgatgtaaccygtctggtcagtttatttggacaacccmagctcagttttatttgatatggaacctagaatagacmagatcttggtttttgtacmagttgatgtgatattctgatcatttcaggggattcacmatggaagagatatttgcmaaggctcttgaggggctggctgggaaaagaaaggaggactgtctgcattggaccctaaactggacagggactaggtatttttgaggttgataggtcgtcctgctataagttcatttgagtagcagacctgacmaagcmtttgaggtcmaaaccctaccatgtgtaattwaaaaarawararaaraaaaaaaaaaagaccctgtttataaaagtattcctttgcgttgaaaaaaaaaaa

SEQ ID NO: 1725 - DNA, 686 bp, Canis familiaris
tccaggattggagtcttccactctggaggtctgaaggaacctgcttactttctggaagattgcttcgtgccagcaacttgctcaagaagcctgaagaatgaagggaccacgactttcaactgggaaatgtgaatggggttgacctggctaggactgaggagtcgaaaggaggtgtggaggatgatagtagtgtctgtattttccggactttaatttctgtgtgagacccaaggagaaaagatgtattttgttccaaatttaaattttatgtggcgtactatctgatgtaacctgtctggtcagtttatttggacaaccccactcagttttatttgatatggaacctagaatagaccagatcttggtttttgtacacagttgatgtgatattctgatcactttcacggggattcaccatggaagagatatttgccaaggctcttgaggggctggctgggaaaagaaaggaggactgtctgcacttggaccctaaactggacmmgggactaggtatttttgaggttgataggtcgtcctggctataagttcactttgagtagcagacctgaccaagcatttgaggtcaaaaccctaccatgtgtaattaaacaaaaaaaaaaagaaaaaaaaaaagaccatgttaataaaagtattcatttgcttgaaaagrmcaacaaaaaaaaaaa

SEQ ID NO: 1726 - DNA, 226 bp, Canis familiaris
gcacagccykccttcccaggccccggtggtctccaaaggtggaataaaggagttccgcaccccctgggcgcccgcccccgccccccgcccagggtgtttgcctccctccctggtggggatgagtgacttgacctgtgacctcaaaacaataaacacgattccctctcmmcmaaaaaaaaaaaaaaaaaaaaaaaaaaaaaaaaaaaaaaaaaaaaaaaaaaaaaaa

SEQ ID NO: 1727 - DNA, 582 bp, Canis familiaris
catttgactaggtgtgagccacgtctcactcgtagtggcggacgggggagggtcctttgacctcaggggtcctatggatcctagacttccaaagacggaggccacacacacgtctgggcggttgcagccgtgtatgacccggatgttgcacaacacacgcctgggggaggtcactgaatcggtcaactcggggttacgacgggaaggcaatgttggtggagtcaccacacgggtgacactcgtgtctaccacggatacaggcccaacccattaacccatactcggtaccaattagatcatcccatttgagtgtgaacacttctctgtctatctccggagatccgaccgggacccggacaccaaacaaatcattcgtcttcaacccaataaatcgatgccaccgttaaccacccgaccagacatctctatcccaaaggtgaaggggtatctattctaaataccgtaaagattcttagttggaatctgtcgtaaagttccgttttggagaataaacgtctatttggtctttgtccaaaaaaaaaaaaaaaaaaaaaaaaaaaaaaaaaaaaaaaaaaaaaaaaa

SEQ ID NO: 1728 - DNA, 582 bp, Canis familiaris
gtaaactgatccacactcggtgcagagtgagcatcaccgcctgccccctcccaggaaactggagtccccaggatacctaggatctgaaggtttctgcctccggtgtgtgtgcagacccgccaacgtcggcacatactgggcctacaacgtgttgtgtgcggaccccctccagtgacttagccagttgagccccaatgctgcccttccgttacaaccacctcagtggtgtgcccactgtgagcacagatggtgcctatgtccgggttgggtaattgggtatgagccatggttaatctagtagggtaaactcacacttgtgaagagacagatagaggcctctaggctggccctgggcctgtggtttgtttagtaagcagaagttgggttatttagctacggtggcaattggtgggctggtctgtagagatagggtttccacttccccatagataagatttatggcatttctaagaatcaaccttagacagcatttcaaggcaaaacctcttatttgcagataaaccagaaacaggttttttttttttttttttttttttttttttttttttttttttttttttt

SEQ ID NO: 1729 - DNA, 628 bp, Canis familiaris
gacagtgcccagattcagaatttttgtaaaaatggagcatgtgtattatgtggccatgtcttcactctaacttggttatgagactaaaccattcctcactgctctaacatgctgaagaactcatctgagggggagggagatggatgctcagttgtcacatcaaaggaagcagcattattctagcatccagattttttttttttaagccttccactgttagagatttgaggttacatgatatactttatgctcataactgatgtggctggagaattggtattgaatttatagcatcagcagaacagaaaatgtgatgtattttatgcatgtcaataaaggaatgacctgttcttgttctacagagaatggaaattggaagtcaaacaccctttgtattccaaaatagggtctcaaacattttgtaattctcatttaaattgttaggaggcttggagctattagttaatctatcttccmatacactgtttaatatagcmctgaataaatgatgcmaagttgtcaatggatgagtgatcmactaatagctctgctagtaattgatttatttttcttcaataaagttgcataaacccmaaaaaaaaaaaaaaaaaaaaaaaaaaaaaaaaaa

SEQ ID NO: 1730 - DNA, 609 bp, Canis familiaris
gtaattatgaaaagacttttaaatgcccttctgcagttggaaggtttttctttatatactattcccaccatggggagcgaaaaacgttaaaatcacaagggatttccccatttaagcagactttgccttttttcaaaggtggagcgtgaataccagaaggatccagtattcagttacttaaatgaagtcttttggtcagaaattacctttttgacgcaagcctactgaatgctgtgtatatatttatatataaatatatatatatatggagtgaaaccttgtgaactctttaattagagttttcttgtatagtggcagagatgtgtatttctgcatacaaagtgtaatgatgtacttattcatgctaaactttttataaaagtttagttgtaaacttaacccttttatacaaaataaatcgtgtgtttattgaatggtgattgcctgctttatttcagaggaccagtgctttgatttttattctgctatgttataactgaacccaaataaatacaagttcaaatttatgtagactgtataagattataataaacatgtctgaagtcaaaaaaaaaaaaaaaaaaaaaaaaaaaaaaaaaaaaaaaaaaa

SEQ ID NO: 1731 - DNA, 618 bp, Canis familiaris
cgacacaagtttgctcgtgtcactagtccacacaacccattgcctttagaaaccttggtcgtttgagaccattatgggcccatttatctcggaccctccccagttgagcgctgagaatccgagtccgccgaactggatgtagccccacaactttcatcagcacaagttgatggtcaacgagagacccggtccgatgttctggatccggaagcgtccagggaagagaaagccttgggactttttgatgtcgaggcggaacagtcactccttccagccgaacgatctcctgtttccgaacctgaaccacccgatcaagatgctccaacggatccacgcgttgccctggaccaatccgaacaggacgaacaacatgaggatgcggcagtctccagacatgtcatcaatgttaagtggtcttttatgtcaagttggacaggcttggtttacgtgaccacacgcggggtggagggggaggtcgttcaaatacgggactgtggcgagtgtgagtcgacttgtcgcccgtggctccttggtttggggacctatacgtccattcgacacttgactttatcatcatcaaataaaatgtaaaggagaaaaaaaaaaaaaaaaaaaaaa

SEQ ID NO: 1732 - DNA, 618 bp, Canis familiaris
gctgtgttcaaacgagcacagtgatcaggtgtgttgggtaacggaaatctttggaaccagcaaactctggtaatacccgggtaaatagagcctgggaggggtcaactcgcgactcttaggctcaggcggcttgacctacatcggggtgttgaaagtagtcgtgttcaactaccagttgctctctgggccaggctacaagacctaggccttcgcaggtcccttctctttcggaaccctgaaaaactacagctccgccttgtcagtgaggaaggtcggcttgctagaggacaaaggcttggacttggtgggctagttctacgaggttgcctaggtgcgcaacgggacctggttaggcttgtcctgcttgttgtactcctacgccgtcagaggtctgtacagtagttacaattcaccagaaaatacagttcaacctgtccgaaccaaatgcactggtgtgcgccccacctccccctccagcaagtttatgccctgacaccgctcacactcagctgaacagcgggcaccgaggaaccaaacccctggatatgcaggtaagctgtgaactgaaatagtagtagtttattttacatttcctctttttttttttttttttttttt

SEQ ID NO: 1733 - DNA, 763 bp, Canis familiaris
gaaaagttgccagagatgcttcgaaaggcaaggaggaagctwatctatgaaaaggctaarsmwdwmccammrggdatacagbmagatgwacmraactgagattcscatggcgaggatggcgrgwawwkccgscwabktbwacgkgcctgcagaamccvagktggcaydbgtcatcaggatcagaggtatcaatggtgkgagyccmaaggttcgaaaggtgttbcagcttctkcgccttcgccagatcttcmrtggcacctttgktaagctcwacmwggcttcagttaacatgctaaggattgtggwaccgtatatagcatgggggtaccchracctgaagtcagtgaatgaattgatytacmagcgtggttatggcmagatchacmagaagcgaattgccctgayagatwacacattgattgctcggtctcttggtawatatggcatcatctgcatggaggatctgattcacgagatctataccgttggdaaacgtttcwaagaagccmacwactttttatggcccttcraattatcttctccacgtggcggratgaagrwwaagaccmcccmttttgtagaaggtggagatgctggcmmcmgggaagaccagatcmataggcttattagaaggatgaactaaggtatctaccatgattatttttgtaatctggtcagttaataaatgactactttcmaatggdamamamaaaaammhmaaavaaaarmamaaaaraaaaaaaaaaaaaaaaaaaaaagaaaa

SEQ ID NO: 1734 - DNA, 678 bp, Canis familiaris
cagaatgtaccagaactgaagattccatggcgaggatggccgaggaaaagccgggcaacgttctacggggcctgcaggaaccccaagttggcaatttgtcattcaggatcagaggtatcaatggtgtgagccccaaggttcgaaagggtgttgcagcttctttcgccttccgccacagatccttccaatggcaaccctttggtaaagctcaaacaaggcttccargtwaacaatgcttaagggatttgtggaaaccgtatatagcawtgggggtaccccaaaacctgaagtcagtgaatgaattgatctacaagcgtggttatggcaagatcaacaagaagcgaattgccctgacagataacacattgattgctcggtctcttggtaaatatggcatcatctgcatggaggatctgattcacgagatctataccgttggaaaacgtttcaaagaagccaacaactttttatggcccttcaaattatcttctccacgtggcggaatgaagaaaaagaccacccattttgtagaaggtggagatgctggcaacagggaagaccagagttcaaaatagggcttattaagaaggatgaactaaggtatctaccatgattatttttgtaatctggtcagttaataaatgactactttcaaatggaaaaaaaaaaaaaaaaaaa

SEQ ID NO: 1735 - DNA, 676 bp, Canis familiaris
gattgccctggcagatgacacgtgatgtctcggtctctggtaaataaggcatcatcttgcatggaggatctgaattcacgagatctattaccgttggaaacgtttcaaagaaagccacaactttttatggcccttcagaaktatcttctccacgtggcggaatgaagaaaaagaccacccacttttgtagaaggtggagatgctggcaaacagggaagaccagatcaaataggcttattagaaggatgaactaaggtatctaccatgattatttttgtaatctggtcagttaataaatgactactttcaaatggaaatgtgttgttgtcttggtgacttttttccagcctgactctgctgtcccttgacaggcaaaccttggtgtgataaaattaagccaagtcatcagcatttgcgttcaaacttaggatctagtttgtatcttggtgggaaaatattccttgggtttattaaagactctttacagagcataaatcttaatttttcacttttgaattgtgccattgagttagcccaaatggtctgttcgaaggaagcctatttcataggcctttgtgcgtgatttatgggtaaggtaataaaaattcagtttacgaataaaaatactgttgctgaaaaaaaaaaaaaaaaaaaaaaaaaaaaaaaaaaaaaaaaa

SEQ ID NO: 1736 - DNA, 398 bp, Canis familiaris
gtacccaaacctgaagtcagtgaatgaattgatctacaagcgtggttatggcaagatcaacaagaagcgaattgccctgacagataacacattgattgctcggtctcttggtaaatatggcatacatctgcatggaggatctgattcaccgagatctataccgcttgggaaacgtttccaagaagcccacaactttttaatggccccttccaaataatttttttyccacgtggcgggaatgaagaaaaagaccacccattttgtagaaggtggagatgctggcaacagggaagaccagatcaataggcttattagaaggatgaactaaggtayctaccatgattatttttgtaatctggtcaaagktwwtaatatgacaatgacttactttcaaatgg

SEQ ID NO: 1737 - DNA, 740 bp, Canis familiaris
tgctaagtwagtycatwaattcggtatcagaaattcagcacttwaaarmawataagcctgtttctgcsgwktaacaggaaaccttgtaggamccattcagagggtatcctatcttkgtagaactcvratackkgratattcamatgtraaagacmcggtaggccycvagatccttcygatgstgcgttacccvagggcttaccagcccyktcgtcmagatctgttygagracacmggtgcctaggacttgtyagagycctgacgaggagccmmaaggtgatgtcaccmttgatctgggaggcaggktgcttcagccmcgraccttttcacgcttttctgtgactgtagaaaagctctccatgtgcctgtcacmacttggaaatcggtgtctgacctatcttctttatttaataygagtgtgattwacctgactccctgtcgagtcttacggaacmggattttgtgggtttacagaccmttgccctayggacctcgagtctcccatcctcgtgaaaycatagctactgccgagggtttccgaatctggctaggaaggaaaagatgtaatttatttatgctctgtactgtatttttatattgctgcttwaaactttgaagctgtgcctcacttactaaagcatgaactgttttaccttatttacgatgcmataaaatcacatcmmmarawwaaaaaaaaaaaaaaaaaaaaaaaaaaaaaaaaaaaaaaaaaaaaaaaaaaa

SEQ ID NO: 1738 - DNA, 620 bp, Canis familiaris
aggaaccatttcagagggtatcctatctttgtagaactctatacctgaatattcagaatggtaaagacacggttaggcccccaagatccttctgatgctgcgttacccgagggcttaccagccccttcgtcaagatctgttcgagwacacaggtgcctaggacttgtcagagccctgacgaggagccacaaaggtgatgtcaccatttgatctgggagscagggtgcttcagccacgaaccttttcacgcttttctgtgactgtagaaaagctctccatgtgcctgtcacaacttggaaatcggtgtctgacctatcttctttatttgaatacgagtgtgattaacctgactccctgtcgagtcttacggaacaggattttgtgggtttacagaccattgccctatggacctcgagtctcccatcctcgtgaaatcatagctactgccgagggtttccgaatctggctaggaaggaaaagatgtaatttatttatgctctgtactgtatttttatattgctgcttaaaactttgaagctgtgcctcacttactaaagcatgaactgttttaccttatttacgatgcaataaaatcacatcmacagaaaaaaaaaaaaaaa

SEQ ID NO: 1739 - DNA, 612 bp, Canis familiaris
caccaggcagtcacttctcatcctacaccccgaagtgaaggtggaatggctcaccgagaagcatgcacgcccgagacttcaccgtgtctgccatgcccgcgatgacatggaccagaaggagcgagatgttatcatgagggagttccgctcgggctctagcagagtactgattacccctgacttgctggccagaggcatcgatgtgcagcaggtgtctctagtcatcaactatgaccttcctaccatcagggaaaactatatccacagaatcggccgtggtggacgatttggccggaagggtgtggctattaacatggtgacagaagaagacaagaggactcttcgagacatcgagactttctacaacacctccattgaggaaatgcccctcaatgttgctgacctcatctgaggggtggtcctgctacctagcctgaccctggcctcagtctggggggggcagaagagcaggaggggggagggaagggagccacagggatggacatcttgtcatttttttccttttttttttctttgaataaatgtcactttttgaggccaaaraarrramrwraaaaaaaaaaaaaaaaaaaaaaaaaaaaaaaaaaaaaa

SEQ ID NO: 1740 - DNA, 669 bp, Canis familiaris
agtagagtcgtgttccctgctgctcttgaaggccgccggagcaagtgcagtccttggtgctgtaggtatgtaccactgccctggaggaggccgtgtagcagaacagttgtggtttggactctgcgtgtaacaaaaccgagctagagctccctgcccaggagggtccggggccgcgatgtagcaggtcgactgtggttgggcttaggggcagcagttgcctgctgctaactctcctctgagcaacacaacccgtggcagccgaccccggggcactaggtgcgcgaggagccaaagagccgcccggggcactcagccactggtctcggtgaccgttaaggtacaccaacgaggggagtgggctcaacagactctggagtagtttgcctacagtgtatctacggttttgcagcagatctcaacgctataggcagcacagggataaacatgttaccctgggtgcccctgtgcaagataccagggtcctaggtctccgacagtatagcaacacatgtactaacctgtttgtaacagctggtcagagaagtaagtatggacagaaatgtaaaaaccttttcgaattatagcccacgaatttggggctgggattgttaccttgtagataattattttcgtaggtactcattttttttttttttttttttttttttt

SEQ ID NO: 1741 - DNA, 669 bp, Canis familiaris
tcatctcagcacaagggacgacgagaacttccggcggcctcgttcacgtcaggaaccacgacatccatacatggtgacgggacctcctccggcacatcgtcttgtcaacaccaaacctgagacgcacattgttttggctcgatctcgagggacgggtcctcccaggccccggcgctacatcgtccagctgacaccaacccgaatccccgtcgtcaacggacgacgattgagaggagactcgttgtgttgggcaccgtcggctggggccccgtgatccacgcgctcctcggtttctcggcgggccccgtgagtcggtgaccagagccactggcaattccatgtggttgctcccctcacccgagttgtctgagacctcatcaaacggatgtcacatagatgccaaaacgtcgtctagagttgcgatatccgtcgtgtccctatttgtacaatgggacccacggggacacgttctatggtcccaggatccagaggctgtcatatcgttgtgtacatgattggacaaacattgtcgaccagtctcttcattcatacctgtctttacatttttggaaaagcttaatatcgggtgcttaaaccccgaccctaacaatggaacatctattaataaaagcatccatgagtaaaaaaaaaaaaaaaaaaaaaaaaaaa

SEQ ID NO: 1742 - DNA, 655 bp, Canis familiaris
ctggataggcgatccacaacgkgcattgggcktctttctttggggaatatttgaatcgtgtctcaatgctcataacggatcagratacagattttgatagcmaagcgactttagtcgtgagctcttgtgaggaaaggcattggctttatcctctttagagttagactgttggggttgggtgtaaaagatggggtctgtaaaatctttctttcktagaaatttatttcctagttctgtagaaatggttgtattagatgttctctatcatttaataatatacttgtggactaaaagatataagtgctgtataaaatcagcccaattatgytaaactagcatacctgcctttattgtgtttgtcattagcctgaatagaaaggcctttaaaattgatttttttttttttagaaagcatttgaatgcattttgtttggtattgtatttattcaataaagtatttaattagtgctaagtgtgaactggaccctgttgctaagccccagcaagcaatcatatcttagatagggttaaactcccagtaaaattgccatattgcacatgtcttaatgaagtttgaatgttaaataaattgtatattcactttaaaaaaaaaaaaaawaaaaaaaaaaaaaaaaaaaaaaaaaaaaaaaaaaaa

SEQ ID NO: 1743 - DNA, 619 bp, Canis familiaris
caggctggtaccggtccggaattcccgggatggaaccgccatcttccagtaattcgcccaaatgaccaacacaaagggaaagaggagaggtacccgctatatgttctctaggccttttagaaaacatggagttgttcctttggccaccatacatgcgaatctataagaaaggtgatattgtggacatcaagggaatgggcactgttcmaaaaggaatgccccacaaatgttaccatggcmaaactggaagggtctacaatgttactcagcatgctgttggcattgttgtaaacaaacaagttaagggcaagattcttgccaagagaattaatgtccgcattgagcatattaaacactcaaagagccgagatagcttcctgaagcgtgtgaaggaaaatgatcagaaaaagaaggaagccmaagagaaaggtacttgggtccaactgaagcgccagcctgccccacccagagaagcacactttgtgagaaccaatggaaaggagcctgaactgctggaacccattccctatgaattcatggcatgataactgtaaaaaaaataaaagacctcacgattgtaaaaaaaaaaaaaaaaaaaaaaaaaaaaaaaaaaaaaaaa

SEQ ID NO: 1744 - DNA, 732 bp, Canis familiaris
  misc_feature (371)..(371): n comprises a, c, g, or t, or includes no nucleotide
agtgtaaagctaggaccctgacctcaaggaaattcccacagaagtctctctccbktctcttttgstcatktacarrarmcagggtccakkkcscbbbracgtykktycscrwgcccmmctctagctgcmcatcbkkcccagctactgctggtttctccaaggctcctgttgaaagtcmatatattattgtggctgtaagcwmyctggtgctaaagcctggataagcccccwcttykgcacchractcgcactttgcvatctctgyccctcggacrargccctcaggggagcacagctcctggggtcccttgaggscagggggcatttctgctcctgcvaaatctaaactgttttgtttcagcagchdhacndacaccatcatcccattgccccatctagatgcagtctgcttccrcgttgctccctgcggctgtaagccagaggggattcaggggaagttcactttacagcraatcccctgctcccctctgcccagtgctgwcggaagcccctcctccataagcmagttcattctttcagtgccmttggcatctacatagacmggtgtgagagtagatgtgtaggttactctacatgtatctgttctttcttcaaaaccatgttaactttgtgaaacgacttttacactccmmcacgctttacagcagragaaataaaggaatatgamaaatawmmwrmwwraaaaaaaaaaaaaaaaaaaaaaaaaaaaaa

SEQ ID NO: 1745 - DNA, 688 bp, Canis familiaris
ccggtgtctcttttgctcatttaccagaaaaccaggggtccagtttcccccttaaacgtctgttccccagtgccccagctctagctggcccatccgttcccagctactgctggtttctccaaggctcctgtttgaaagtcaatatattattgtggctgtaagcaacctggtgctaaagcctggataagcccccacttctgcaccaaactcgcactttgcaatctctgcccctcggacgaggccctcaggggagcacagctcctggggtcccttgagggcagggggcatttctgctcctgcaaaatctaaactgttttgtttcagcagcaaaacaaacaccatcatcccattgccccatctagatgcagtctgcttccgcgttgctccctgcggctgtaagccagaggggattcaggggaagttcactttacagcaaatcccctgctccccctctgcccagtgctgwcggaagcccctcctccataagcaagttcattctttcagtgccattggcatctacatagacaggtgtgagagtagatgtgtaggttactctacatgtatctgttctttcttcaaaaccatgttaactttgtgaaacgacttttacactccacacgctttacagcagaagaaataaaggaatatgaaaaatawmmtgcttgaaaaaaaaaaaaaaaaaaaaaaa

SEQ ID NO: 1746 - DNA, 747 bp, Canis familiaris
  misc_feature (181)..(181): n comprises a, c, g, or t, or includes no nucleotide
gtcctctctccgttcttcttttgctccagtgttacaggaaaacagggtgccagtggtcccgcttgacgggtttccctttttttgccccccccccccccaaatggcyyyccccmhscccmactcttagctgcccatccttcccagctactgctggtttctccaaggctcctgttgaaagtcnatatattattgtggctgtaagcaacctggtgctaaagcctggataagcccccacttytgcaccmawctcgcactttgcaatctctgcccctcggacrargccctcaggggagcacagctcctggggtcccttgagggcagggggcatttctgctcctgcmaaatytaaactgttttgtttcascagcmawachdacaccatcatcccmttgccccatctagatgcagtctgcttccrcgttgctccctgcggctgtaagccagaggggattcaggggaagttcactttacagcmaatcccctgctcccctctgcccmgtgctgacggaagcccctcctccataagcaagttcattctttcagtgccattggcatctacatagacaggtgtgagagtagatgtgtaggttactctacatgtatctgttctttcttcaaaaccatgttaactttgtgaaacgacttttacactccamcacgctttacagcagaagaaataaaggaatatgaaaaatawmmwrmwwraaaaaaaamaaaaaaaaaaaaaaaaaaaaaaaaaaaaaaaaa

SEQ ID NO: 1747 - DNA, 665 bp, Canis familiaris
  misc_feature (313)..(313): n comprises a, c, g, or t, or includes no nucleotide
ttctcgttgctcagtttacagaaacagggtccwttsccctracgtctttccccatgccccacttagctgcccatcsttcccagctactgctggtttctccaaggctcctgttgaaagtcaatataktattgtgsctgtaagcaacctggtgctaaagcstggataagcccccacttytgcaccvrwctcgcactttgcmatctctgcccctcggacvargccctcaggggagcmcagctcctggggtccctkgaggscagggggcmtttctgctcctgcvaaatctaaactgttttgtttcagcagchwacbnacmccatcatcccmttgccccatctagatgcagtctgcttccrcgttgctccctgcggctgtaagccagaggggattcaggggaagttcactttacagcmaatcccctgctcccctctgcccagtgctgacggaagcccctcctccataagcaagttcattctttcagtgccattggcatctacatagacaggkgtgagagtagatgtgtaggttactctacatgtatctgttctttcttcaaaaccatgttaactttgtgaaacgacttttacactccmacacgctttacmscagaagaaataaaggaatatgaaaaataaaaaaaaaaaaaaaaaaaaaaaaaaaaaaaa

SEQ ID NO: 1748 - DNA, 703 bp, Canis familiaris
ctactgcagaaattcccacagaagtctctctccttctcgtgtgctcatgttacaggaaaamcggggtccaatktccccttaacgtctttccccattgccccactctagctgcccatccttcccagctactgctggtttctccaaggctcctgttgaaagtcaatatattattgtggctgtaagcaacstggtgctaaagcctggataagcccccacttctgcaccaaactcgcackttgcaatctctgcccctcggacrargccctcaggggagcacagctcctggggtcccttgagggcagggggcatttctgctcctgcaaaatctaaactgttttgtttcagcagcmaaacmwacaccatcatcccaktgccccatctagatgcagtctgcttccgcgttgctccctgcggctgtaagccagaggggattcaggggaagttcactttacagcaaatcccctgctcccctctgcccagtgctgacggaagcccctcctccataagcaagttcattctttcagtgccattggcatctacatagacaggtgtgagagtagatgtgtaggttactctacatgtatctgttctttcttcaaaaccatgttaactttgtgaaacgacttttacactccaacacgctttacagcagaagaaataaaggaatatgaaaaataaaaaaaaaaaaaaaraaaaaaaaaaa

SEQ ID NO: 1749 - DNA, 713 bp, Canis familiaris
gtcaagaattcccacagaagtctctctcctgtctctttgctcatttacagaaaacaggttccatttcgccttaacgttttttccccagtgctccccctctagctgcccatccttcccagctactgctggtttctccaaggctcctgttgaaagtcaatatattattgtggctgtaagcaacctggtgctaaagcctggataagcccccacttytgcaccaaactcgcactttgcaatctctgyccctcggacgaggccctcaggggagcacagctcctggggtcccttgagggcagggggcatttctgctcctgcwaaatctaaactgttttgtttcagcagcwaaacmwacaccatcatcccattgccccatctagatgcagtctgcttccrcgttgctccctgcggctgtaagccagaggggattcaggggaagttcactttacagcaaatcccctgctcccctctgcccagtgctgacggaascccctcctccataagcaagttcattctttcagtgccattggcatctacatagacaggtgtgagagtagatgtgtaggttactctacatgtatctgttctttcttcaaaaccatgttaactttgtgaaacgacttttacactccaacacgctttacagcagaagaaataaaggaatatgaaaaataaaaaaaaaaaaaaaaaaaaaaaaaaaaaaaaaaaaaaaaaaa

SEQ ID NO: 1750 - DNA, 663 bp, Canis familiaris
ccttctctttgctcattacagaaaaacggtcccagttcccgtaacgtcttttccccatgcccactctagctgcccatccttcccagctactgctggtttctccaaggctcctgttgaaagtcaatatattattgtggctgtaagcaacctggtgctaaagcctggataagcccccacttstgcaccaaactcgcactttgcaatctctgyccctcggacrargccctcaggggagcacagctcctggggtcccttgagggcagggggcawttctgctcctgcaaaatctaaactgttttgtttcagcagcwaaacaaacaccatcatcccattgccccatctagatgcagtctgcttccgcgttgctccctgcggctgtaagccagaggggattcaggggaagttcactttacagcaaatcccctgctcccctctgcccagtgctgacggaagcccctcctccataagcaagttcattctttcagtgccattggcatcgtagcatagacaggtgtgagagtagatgtgtaggttactctacatgtatctgttctttcttcaaaaccatgttaactttgtgaaacgacttttacactccaacacgctttacagcagaagaaataaaggaatatgaaaaawaaaaaaaaaaaaaaaaaaaaaaaa

SEQ ID NO: 1751 - DNA, 690 bp, Canis familiaris
acagaagtctctccgggtctctktgctcatttacagaaacagggtccagttyccykracgttkttccccatgctccccctctagctgcccatccttcccaagctactgctggtttctccaaggctcctgttgaaagtcaatatattattgtggctgtaagcaacctggtgctaaagcctggataagcccccacttctgcaccaractcgcacttkgcaatctctgyccctcggacgaggccctcaggggagcacagctcctggggtcccttgagggcagggggcatttctgctcctgcaaaatctaaactgttttgtttcagcagcmaacmwacaccatcatcccattgccccatctagatgcagtctgcttccgcgttgctccctgcggctgtaagccagaggggattcaggggaagttcactttacagcaaatcccctgctcccctctgcccagtgctgacggaagcccctcctccataagcaagttcattctttcagtgccattggcatctacatagacaggtgtgagagtagatgtgtaggttactctacatgtatctgttctttcttcaaaaccatgttaactttgtgaaacgacttttacactccaacacgctttacagcagaagaaataaaggaatatgaaaaatatcctgcttgaamwwraaaaaaaaaaaaaaaaaaaaaa

SEQ ID NO: 1752 - DNA, 683 bp, Canis familiaris
agaagtcttctctcccgttctctgttgctcattttaccagaagaccagggtcccatttcccgtaacgtctttccccatgccccactctagctgcccatccttcccagctactgctggtttctccaaggctcctgttgaaagtcatatattattgtggctgtaagcaacctggtgctaaagcctggataagcccccacttctgcaccaaactcgcactttgcaatctctgcccctcggacgaggccctcaggggagcacagctcctggggtcccttgagggcagggggcatttctgctcctgcaaaatctaaactgttttgtttcagcagcaaaacaaacaccatcatcccattgccccatctagatgcagtctgcttccrcgttgctccctgcggctgtaagccagaggggattcaggggaagttcactttacagcaaatcccctgctcccctctgcccagtgctgacggaagcccctcctccataagcaagttcattctttcagtgccattggcatctacatagacaggtgtgagagtagatgtgtaggttactctacatgtatctgttctttcttcaaaaccatgttaactttgtgaaacgacttttacactccacacgctttacagcagaagaaataaaggaatatgaaaaataaaaaaaaaaaaaaaaaaaaaaaaaaa

SEQ ID NO: 1753 - DNA, 695 bp, Canis familiaris
tctcttttgctcaattacagaaaaccaggtccatgtccccgtgaacggttttcgcgcatgctcccctctagctgcccaatccttcccagctactgctggtttctcccagggctcctgttgaaagtcmatatattatttgtgsctgtaagcaacctgggtgctaaagcctggataagccccccacttcttgcaccaaactcgcactttgcaatctctgyccctcggacgaggccctcaggggagcacagctcctggggtcccttgagggcacgggggcatttctgctcctgcmaaatctaaactgttttgtttcagcagcmaaacmaacaccatcatcccattgccccatctagatgcagtctgcttccgcgttgctccctgcggctgtaagccagaggggattcaggggaagttcactttacagcaaatcccctgctcccctctgcccagtgctgacggaagcccctcctccataagcaagttcattctttcagtgccattggcatctacatagacaggtgtgagagtagatgtgtaggttactctacatgtatctgttctttcttcaaaaccatgttaactttgtgaaacgacttttacactccaacacgctttacagcagaagaaataaaggaatatgaaaaataaaaaaaaaaaaaaaaaaaaaaaaaaaaaaaaaaaaaaaaaaaaaaaaa

SEQ ID NO: 1754 - DNA, 208 bp, Canis familiaris
gatgagagattttagggtacctgggtggctcagtggtttagcgtctgccttcagctcagggcatgatcccagggtcctgggatcaagtccctgcatcaggctccccacaggaagcctgcttctccctctgcctttgtttctgcttctgtctcatgaataaataaaaatctttaaaaaaaaaaaaaaaaaaaaaaaaaaaaaaaaaaaa

SEQ ID NO: 1755 - DNA, 285 bp, Canis familiaris
tcttccgttgtctggggcgtcgggttccctcccaggatccctcttccagtgtccactcaccaggtctgccaycctgagcaggtgtccatctccggcagggctgggttgggggmgtgccgcccccgcccctcccccctcccccacacccccgggaccgtgcaggcaccagagttccgtgcacctatttatatttttgaaaactgaagattatgataattataataataaagacattggaagagawmwaaaaaaaaaaaaaaaaaaaaaaaaaaaaaaaaaagggcg

SEQ ID NO: 1756 - DNA, 669 bp, Canis familiaris
agttccaccttgatctaatcctgggctaatgaaggacctgttctgkcatggaggaaaktgtgccctggcagmvagwstgtggtctcaggcagbcaggsttkggaagkgtctgattccagacgtccacactccaggacagagtcgkggkksbgkggtaaggaatccatgaaggtakcttggkctgggggaggaaccgcatttgggtaacttgctggcaccvwaagtgggwagaagtgcccmaggtaggaagtgactggccaggtaggaagccccagccccatgcctgatgttagatctcctgtgggatcgccacccactgatatttctgatagtcctactatggtcttccmaagctgcgttctcacttccactccaactccttcaaatagcatcttgtttctggaatccttccataagtagaggcctaaatctttytccaacctgaggtcctaaccmtggctgctttttccygtcttggaagtcacctcaatcccctcctttaggacatgcctcctccactggccttgaaaggagttcctctttccctgcccagaaccaaacacctcattcctgtgtgcagcagmgcaataaagagcagaccttcammwmmrwhamaaaaaaaaaaaaaaaaaaaaaaaaaaaaaaaaaaaaaaaaaaaaaaaaaaaaaa

SEQ ID NO: 1757 - DNA, 653 bp, Canis familiaris
ggtacagaggttccacctggatcgtcagtcctggcttatggaggacctgttcctgcattgaggaaattgtgccctgtcagaaagatgtgtctcagcagccagggttgggaaggtctgattccagacgtccacactccaggacagagtcgkgkgytggyggggtaaggaatccatgaaggtagcttggkctgggggaggaaccgcatttgggtaacttgctggcaccaaaagtgggaagaagtgcccaaggtaggaagtgactggccaggtaggaagccccagccccatgcctgatgttagatctcctgtgggatcgccacccactgatatttctgatagtcctactatggtcttccmaagctgcgttctcacttccactccaactccttcaaatagcatcttgtttctggaatccttccataagtagaggcctaaatctttttccaacctgaggtcctaaccctggctgctttttcctgtcttggaagtcacctcaatcccctcctttaggacatgcctcctccactggccttgaaaggagttcctctttcmctgcccagaaccaaacacctcattcctgtgtgcagcagagcaatmaagagcagaccttcacctcmvwwawwwwaaaaaaaaaaaaaaaaawaawaaaaaaa

SEQ ID NO: 1758 - DNA, 597 bp, Canis familiaris
ctcgttcttggcatggaggcaagtgttgccctgtcagaaagagtgtggtctcagcagcacgttttgggaagggtctgattccagacgtccacactccaggacagagtcggggtgggggttaaggaatccactgaaggtagcttgggctgggggaggaaccgcatttgggtaacttgctggcaccaaaagtgggaagaagtgcccaaaggtaggaagtgactggccaggtaggaagccccagccccatgcctgatgttagatctcctgtgggatcgccacccactgatatttctgatagtcctactatggtcttccaaagctgcgttctcacttccactccactccttcaaatagcatcttgtttctggaatccttccataagtagagscctaaatctttttccaacctgaggtcctaaccctggctgctttttcctgtcttggaagtcacctcaatcccctcctttaggacatgcctcctccactggccttgaaaggagttcctctttccctgcccagaaccaaacacctcattcctgtgtgcagcagagcaataaagagcagaccttcammwmmrwtaaaaaaaaaaaaaaaaaaa

SEQ ID NO: 1759 - DNA, 596 bp, Canis familiaris
gttctgacatggaggaaagtgtgtcactggcagaaatgattgtggtctcaggcagccaggtttggtaaggctctgattccagacgtccacactccagtacagatgtcgtgttctgggggttaaaggaatccatgaagttagcttggctgtggggaggaaccgcatttgggtaacttgctggcaccaaaagtgggaagaagtgcccaaggtaggaagtgactggccaggtaggaagccccagccccatgcctgatgttagatctcctgtgggatcgccacccactgatatttctgatagtcctactatggtcttccaaagtctgcgttctcacttccacgtccaactccttcaaatagcatcttgtttctggaatccttccataagtagaggcctaaatctttttccaacctgaggtcctaacctggctgctttttcctgtcttggaagtcacctcaatcccctcctttaggacatgcctcctccactggcccttgaaaggagttcctctttccactgcccagaaccaaacacctcattcctgtgtgcagcagagcaataaagagcagacctttcacctccgttattttaaaaaaaa

SEQ ID NO: 1760 - DNA, 529 bp, Canis familiaris
tccagtacgtctcaacaattctaggtcaagagttcgtgtgggttgtgggggttaaggtagtcctatgaagggtagcttgggtctatgaggtakgaaccgcatttgggtaacttgctggctaccmaaagtgggaagaagtgcccaaggtaggaagtgactggccaggtaggaagccccagccccatgcctgatgttagatctcctgtgggatcgccacccactgatagtttctgatagtcctactatggtcttccacaagcgtgcgttctcacttccactccaactccgttcaaatagcatcttgtttcgtggaatccttccatagagtagaggcctaaatctttttccaacctgaggtcctaacsctggctgctttttcctgtcttggaagtcacctcaatcccctcctttaggacatgcctcctcacactggccttgaaaggagttcctctttcccctgcccagaaccaaacacctcattcctgtgtgcagcagagcrataaagagcagaccttcaaaaaaaaaaaaa

SEQ ID NO: 1761 - DNA, 547 bp, Canis familiaris
cagtcatggttttgggaaagggtctgatttccagacgtccacacctcaggacagagtcgggtgtgtgggggtaaggaatccatgaaggtagtctctggtctgggggaggaaccgcatttgggtaacttgctggcaccaaaagtgggaagaagtgcccaaggtaggaagtgactggccaggtaggaagccccagccccatgcctgatgttagatctcctgtgggatcgcacacccactgatatttctgatagtcctactatggtcttccwaagctgcgttctcacttccactccaactccttcaaatagcatcttgtttctggaatccttccataagtagaggcctaaatctttttccaacctgaggtcctaayccctggctgctttttcctgtcttggaagtcacctcaatcccctcctttaggacatgcctcctccactggccttgaaaggagttcctctttccctgcccagaaccaaacacctcattcctgtgtgcagcagagcaataaagagcagacctttcaaaawaaawaaaaawaaaaata

SEQ ID NO: 1762 - DNA, 637 bp, Canis familiaris
cgaggaaagttgtgtccctgtcatgaaagagtgttggtcttcaggcatggcagggctgggaaagggtctgattccagacgtccacactccaggacagagtcggggttggggggtaaggaatccatgaaggtagcttggctgtggggaggaaccgcatttgggtaacttgctggcaccaaaagtgggaagaagtgcccaaggtaggaagtgactggccaggtaggaagccccagccccatgcctgatgttagatctcctgtgggatcgccacccactgatatttctgatagtcctactatggtcttccmaagctgcgttctcacttccactccaactccttcaaatagcatcttgtttctggaatccttccataagtagaggcctaaatctttttccmacctgaggtcctaaccctggctgctttttcctgtcttggaagtcacctcaatcccctcctttaggacatgcctcctccacctggccttgaaaggagttcctctttccctgcccagaaccmaacacctcattcctgtgtgcagcagagccaataaagagcagaccttcacctccgttattttawaaaaaaaaaaaaaaaaaaaaaaaaaaaaaaaaaagaaaaaaaaaaaaaaaaaaaaaa

SEQ ID NO: 1763 - DNA, 600 bp, Canis familiaris
agaaatgccgcccagtggctggctggaagtggggtcggctctgcaggcaccctcctgcagcactccgtttctgaccgaggtgaccgacgtctatgagatggaggggggactgttgaacttgctcaatgactttcactcaggccggctgcaggcctttgggaaggaatgctcctcttgagcagctggagcacgatgcgggagatgacaggagaagcatggcccgcgtgcacattcagcgctcgtgacagctgtgtgtgggaggagagagagagagaggagagaagaggaagaggccggggccacgggagggcctgcctgagggaacagaagaagacgatggctgaccgcaacctggaccagctgcttagcaatctggaagatcttagtaattctatccagaagctgcacctggcggagaacgccgagcctgaggagcagtccgccgcgtagcgtcggccccaagtcggacctctcactccgtttaaactgtgactttttactgattcgatcgggtgtttcgcggccccccaggtgctatgggggaggggggcactggatggaattaaaccagacagacagacagacaaaaaaaaaaaaaaa

SEQ ID NO: 1764 - DNA, 626 bp, Canis familiaris
tggctgctgtcttccgtggccggatgtccatgaaggaggtagatgagcagatgctcatacgtgccttatccatgtatatgtagctatctttgtggaatggatcccccacaatgtcaagaccgctgtctgcgatatcccgccccgtggcctcaagatggcagtcaccktcattggaaatagcacagccatccaggagcttttcaagcgcatctcagagcagttcacagccatgttccggcgcaaagccttcctccactggtacacaggtgaaggcatggacgagatggagttcaccgaagctgagagcaacatgaacgaccttgtctctgagtatcagcagtaccaggatgccmccgcagaagaagaagaggatttcggtgaggaggctgaagaggaggcttaaggcagagtaccatcaccttaggcttctccattccctcttcctcagctgcccctatcctctccctcagaatttgcattctctgcctcttatttttttttcccttttttyttgggggggggggtcctagaacagtgcctggcacgtaataggcgctcaataaatacttgttgtttgttraaaaaaaaaaaaaaaaaaaaaaaaaaaaaaaaaaaaaaaaaaaaaa

SEQ ID NO: 1765 - DNA, 733 bp, Canis familiaris
  misc_feature (341)..(341): n comprises a, c, g, or t, or includes no nucleotide
acatctacagatccgggaagatcssgacsggytgtgcctggagstrswggsgdagatggtcasyrgracagagggwhacmwtgacgactcsctcattgktggrawygcyyccgcggaagscccggaggscgaaggtaccgraagcacmgtratcaccggtgkkrawaddgtcakgaaccatcactkkcaggrwaccagcktcachwwagragcstacmwgaagtacatchaagattacatgraatcmatcaaaggcmadcttgaagdacagagkccagaaagagtwaagccctttatgacaggggctgcagaacvaatcaagcacatccttgctratttcnaaaactaccagttctttattggtgaaaacatgaatccagatggcatggttgcactcctggactaccgtgaggacggtgtgaccccttatatgattttckttaaggatggtttagaaatggaaaaatgttracgaacttggctgttaactttggatgtatcacctgttgtcctaactggctgctgctcttcatccacacaacaccaggacttagacmaatgggactgatgtcatcttgagctctttattttgaccttgatttatttggagcggaggcattgtttttaagaaaaaaacatgtcatgtaggttstctaaaaatmaaatgcatttaaactcmwwwraaaaaaaaaaaaaaaaaaaaaaaaaaaraaaaaaaaaaaaaaaaaaaaaa

SEQ ID NO: 1766 - DNA, 997 bp, Canis familiaris
ctgtgcctggaggtggaggggaagatggtcagtaggaacagagggtaacattgacgaytcgctcattggtggaaatgcctccgcggaaggcccggagggcgaaggtaccgwaagcacagtaatcaccggtgttgatattgtcatgaaccatcacttgcaggaaaccagcttcacmwaagaagcctacmagaagtacatcvaagattacatgaaatcmatcaaagscmaacttgaagwacagaggccagaaagagtaaagccctttatgacagggkctgcagaacmaatcaagcacatccttgctaatttcraaaactaccagttctttattggtgaaaacawgaatccagatggcatggttgcactcctggactaccgtgaggacggtgtgacccctkatatgatkttctttaaggatggtttagraatggrraaatgttracgarcttggctgttaactttggatgtatcacctgttgtcctaactggctgctgctcttcatccacacracaccaggacttagacmaatgggactgatgtcatcttgagctctttattttgaccttgatttatttggrrcggaggcattgtttttaagrraaaaacatgtcatgtaggttgtctaaaaatraaatgcatttaaactcmwwwrararaatgcctcttagtttaacacakttttaaatccmttctgtgtagtgtcctgaagaagctagagcctggttgtagactactgctagaaagcataagactgcctgcagataacttctacagtgaaagctacttctgggactggaatataaaaaacmagaaccmaaagtcttaattctgagttcaagtaaagggaaagaccatgctcatagctgggccaacatttgaagtggattccttacacatttcatcacctacmaacggaagtagttaactctggaagagattgccmmaagaataaaaagagactaataacmgttggmarmmaaaaaaaawmaaaaaaaa

SEQ ID NO: 1767 - DNA, 718 bp, Canis familiaris
atggtcactagagacagagggtaacactgacgactcgctcactatggtgggaaaagcctccccggaaggcccggagaggcgaaggtaaccgcgaagcacacgtgatcaccggtgttgataaatgtcacagagaaccactcacactgcacgggaacccgcgttctacccaagagagccttaccaggaggaccatccaaggataccaggaaatccaatccaaaggccaaacctggaaggaaccaggaggcccagaaaggattaaagccccttaaggaccagggggcctgccaggaccaaatccaagcacccatcccttgcctaaatttccaaaaattacccagtttctttatttggtgaaaacatgaatccagatggcatggttgcactcctggactaccgtgaggacggtgtgaccccttatatgattttctttaaggatggtttagaaatggraaaatgttaacgaacttggctgttaactttggatgtatcacctgttgtcctaactggctgctgctcttcatccacacaacaccaggacttagacaaatgggactgatgtcatcttgagctctttattttgaccttgatttatttggagcggaggcattgtttttaagaaaaaaacatgtcatgtaggttgtctaaaaataaaatgcatttaaactcmaaaaaaaaaaaaaaaaaaaaaaaaaaaaaaaaaaaaaaaaaaaaaaaa

SEQ ID NO: 1768 - DNA, 639 bp, Canis familiaris
tgtcagtagacagaggtaacattgwcgactcgctcattgtggaawtgcctccgcggagcccgagggcgaagtaccgaaagcacagtaatcaccggtgttgatattgtcatgaaccatcacttgcaggaaaccagcttcaccataagaagcctacatagaagtacatcaagattacatgaaatcaatcaargccaacttgaagaacagaggccagaaagagtaaagccctttatgacaggggtctgcagaacaaatcaaagcacatccttgctaatttcgaaaactaccagttctttattggtgaaaacatgaatccagatggcatggttgcactcctggactacccgtgaggacggtgtgaccccttatatgattttctttaaggatggtttagaaatggaaaaatgttaacgaacttggctgttaactttggatgtatcaccctgttgtcctaactggctgctgctcttcatccacacaacaccaggacttagacmaatgggactgatgtcatcttgagctctttattttgaaccttgatttatttggagccggaggcacttgtttttaagaaaaaaacatgtcatgtaggttgtctaaaaataaaatgcatttaaactcmaaaaaaaaaaaaaaaaa

SEQ ID NO: 1769 - DNA, 806 bp, Canis familiaris
accccgtcgagagagcccagaactcgcatcgacagacaccagcccaggaggacgtcacccgcttgtcaagtggccgcgmacatccgkyscagcgccaagggccatccsgtataacgtctyaaggtgcctccbgccadkaaccagkkcacscrggcbbtggrccgccmdacrgstacacaactgcttaagctggcccacaagtacaraccagagaccmagcmagagaagaarcagaggctgttggcccgggccgagaagaaagctgccggcmaaggggatgtccccactaagagbcsgcctgtccttcgagctggggttaacacdgtcaccaccttggtggraaacmagaaggctcagctggtagtgatagctcacgacgtggatcccmttgagctggttgtcttcctgcctgmcctgtgtcgtaagatgggggttccytactgcattatcaaggggaaggccaggctggggcgtctggtccacmggaagacctgcaccactgtcgccttcacacaggttaactcggaagacaagggagctctggctaagctggtagaagccatccggaccaaktacmatgacagatacgatgagatccgccgccactggggaggcaatgtcctgggtccgaagtcagtggctcgcatcgccmagctggaaaaagcmhmggctaaagaactggccaccmmgctgggctaagtggacgctgttgaattttctgtacataaaagtaataaaaggttctctttcmrwrarawaaaaraaraaaaaaaraaaaaaaaaaaaaaaaaaaaaaaaaaaaaaaa

SEQ ID NO: 1770 - DNA, 775 bp, Canis familiaris
tggctcgacaggacacagcccagaggacctcacccgctttgtymartggccgcgctacatccggctgcagcgccagagggccaycckgwataaacktctcaaggtgcctccgccaktdaccagttcachcargcstkggaccgccaaacrgckacacmactgcwtaagctggcsmacaagtacagaccagagaccaagcaagagaagwascagaggctgtkgssccgggccgagaagaaagctgccggcaaaggggatgtccccactaagaggccgcctgtccttcgagctggggttaacactgtcaccaccttggtggaaaacmwgaaggctcagctggtagtgatagctcacgacgtggatcccmttgagctggttgtcttcctgcctgcyykgtgtygtaagatgggggttccttactgcattatcaaggggaaggccaggctggggcgtctggtccacaggaagacctgcaccactgtcgccttcacacaggttaactcggaagacaagggagctctggctaagctggtagaagccatccggaccmattacmatgacagatacgatgagatccgccgccactggggaggcmatgtcctgggtccgaagtcagtggctcgcatcgccmagctggaaaaagcmmaggctaaagaactggccaccmagctgggctaagtggacgctgtygaattttctgtacataaaagtaataaaaggttctctttcmrwraaaaaaaaaaaaaaaaaaaaaaaaaaaaaaaaaaaaaaaaaa

SEQ ID NO: 1771 - DNA, 772 bp, Canis familiaris
  misc_feature (712)..(712): n comprises a, c, g, or t, or includes no nucleotide
gcccaagaggacctaaccgctttgtcaagtgccgcgctacatccgctgcagcgccagaggccatccygkataaacgtcttcaaggtgcctcctgccattaaccmgttcacccaggcmwkggaccgccaaacrgctacacractgcttaagctggcccacaagtacagaccarrgwccmagcwagagaagwagcagagkcygytggcccgggccgagwagwaagctgccggcaaaggggatgtccccabwaagagscsgcctgtccttcgagctggggktaacackgtcaccaccttggtggaaaacaagaaggctcagctggtagtgatagctcacgmcktggatcccattgagctggttgtcttcctgcctgccctgtktcgtaagatgggggttccttactgcattatcaaggggaaggccaggctggggcgtctggtccacaggaagacctgcaccactgtcgccttcacacaggttaactcggaagacaagggagctctggctaagctggtagaagccatccggaccmattacratgacagatacgatgagatccgccgccactggggaggcaatgtcctgggtccgaagtcagtggytcgcatcgccmagctggaaaaagcmaaggctaaagaactggccmccmagctgggctaagtggacgctgttgaattttctgtacatamaagtaataaaagkttctcyktsnrwraraaaaaaaaawaaaaaaaaaaaaaaaaaaaaaaaaaaaaaaaaaaaaaaaaaaaaa

SEQ ID NO: 1772 - DNA, 752 bp, Canis familiaris
ccgtgaagccaatgcatgcgatccaccagagctacgcttgtcatgcgcgtaatcgtcaggcagagcatcgtataactttcaaggtgctccgccataccagttcaccaggcttggaccgccaacagtacacaactgcttaagctggcccacaagtacagaccagagaccaagcacagagaagaagcagaggctgttggcccgggccgagaagaaagctgccggcaaaggggatgtccccactaagaggccgcctgtccttcgagctggggttaacactgtcaccaccttggtggaaaacmagaaggctcagctggtagtgatagctcacgacgtggatcccmttgagctggttgtcttcctgcctgccctgtgtcgtaagatgggggttccttactgcaktatcaaggggaaggccagkctggggcgtctggtccmcaggaagacctgcaccactgtcgccttcacacaggttaactcggaagacacagggagctctggctaagctggtagaagccatccggaccmattaccatgacagatacgatgagatccgccgccamctggggaggcmatgtcctgggtccgaagtcagtggctcgcatcgcccagctggraaaagccaaggctaaagaactggccacccagctgggctaagtggacgctgttgaattttctgtacataaaagtaataaaaggttctctttcmrwraaaawaaaaaaaaaaaaaaaaaaaaaaaaaaaaaaaaaaaaaa

SEQ ID NO: 1773 - DNA, 754 bp, Canis familiaris
tcgaagggccagacttcgcacgacagacatcagcccagggggacctcacccctttgtcagtgccgcgtacatccgctcagcgccagaggccaatccgaataaacgtctcaaggtgcctccgccattaaccagttcaccaggccttggaccgccmwacrgctacacaactgcttaagctggcccacaagtacagaccagagaccaagcaagagaagaarcagaggctgttgsccsggccgagaagaaagctgccgkcaaaggggatgtccccactaagagccgcctgtccttcgagctggggttaacactgtcaccaccttggtggaaaacaagaaggctcagctggtagtgatagctcacgacgtggatcccattgagctggttgtcttcctgcctgccctgtgtcgtaagatgggggttccttactgcattatcaaggggaaggccaggctggggcgtctggtccacaggaagacctgcaccactgtcgccttcacacaggttaactcggaagacaagggagctctggctaagctggtagaagccatccggaccmattacaatgacagatacgatgagatccgccgccactggggaggcaatgtcctgggtccgaagtcagtggctcgcatcgccaagctggaaaaagcmaaggctaaagaactggccaccaagctgggctaagtggacgctgttgaattttctgtacataaaagtaataaaaggttctctktcaaaaaaaaaaaaaaaaaaa

SEQ ID NO: 1774 - DNA, 663 bp, Canis familiaris
  misc_feature (68)..(68): n comprises a, c, g, or t, or includes no nucleotide
  misc_feature (137)..(138): n comprises a, c, g, or t, or includes no nucleotide
  misc_feature (192)..(192): n comprises a, c, g, or t, or includes no nucleotide
cacaactgcttaagctggcccacaagtacagaccagagaccaagcaagagatagaaagcagaggctgntggcccgggccgagaagaaagctgccggcaacaggggatgtccccacctaatgaggccgcctgtccttnncgagctgtgggttaacactgtgcacacacccttggtgggaaaactacagaaggnctcaagctggtaagtgatatgctcaccgaacgtggatcccacttgaggctggttgtcttcctgcgctggccccgtgtctgtaagaattggggttcctcctactgcacataatcacaaggggaaaaggccacaggcttggggcgcgttctggtccacaccaaggaaagaaccctgcaacccactgtcgcccttcaacacaaggtttacctcggaagacaagggagctctggctaagctggtagaagccatccggacccattacaatgacagatacgatgagatccgccgccactggggaggcaatgtcctgggtccgaagtcagtggctcgcatcgccaagctggaaaaagcaaaggctaaagaactggccaccaagctgggctaagtggacgctgttgaattttctgtacataaaagtaataaaaggttctctttcaaaaaaaaaaaaaaaaaaaaaaaaaaaaaaaaaaa

SEQ ID NO: 1775 - DNA, 945 bp, Canis familiaris
gcagcggtctcaggccaagccccctgccagcatggccagcgagttcaagaagaagctcttctggagggcggtggtggccgagttcctggccatgatcctcttcgtcttcatcagcatcggttctgccctgggcttcaactacccggtgaggaacaaccagacagcaggtgcggcccaggataacgtgaaggtgtcactggccttcgggctgagcattgccaccctggcccagagcgtgggccacattagtggcgcccacctcaacccagctgtcacgctggggctgctgctcagttgccagatcagcatcctcagggctgtcatgtacatcatcgcccagtgcgtgggggccatcgtsgccaccgccatcctctcrggcatcacctcctcccttccggacaactccctcggccgaaacgagctggcccctggtgtgaactccggtcagggcttgggcatcgagatcattggcaccctgcagctggtgctgtgcgtgctggccaccacggacaggaggcggcgtgacctcgggggctcgggccccctggccatcggcctctctgtggccttgggacacctgctggcgatcgactacacaggctgcggtatcaaccccgcccggtccttcggctcctcggtgatcacacataacttcaaggaccactggattttctgggtcgggccgttcatcgggggagccctggcggtgctcatctacgacttcatcctggccccccgcagcagcgacctcacggaccgcgtgaaggtgtggaccagcggccaggtggaggagtatgagctggacgscgacgacatcaactccmgggtggagatgaagcccaagtagagaggccttggcccgggcacccacgcgggggtgggcaggggcgggcggagggcgggaggggtgcaatcacgtcctagacactctgacaagctgaccaa

SEQ ID NO: 1776 - DNA, 665 bp, Canis familiaris
ctagtaagagtccgaggactaagtggagttggtgtaacatttggcaaccaggatgttytraaccttgggtctccgaattccagatctcctgcacagrcagccagagaccaccgcactgcgacttcgtggtgatcgactactagggcatagtggtagtggtgcgagcctgtaatcagaaggaggttgggacataagcagtgtttaggttggtacgtcaaggattttttgacttgcgcagggtctagttgcaccgactacaaggtcagttattttgagtaacatgcctctgagtaacctccctgtgactgttgacaggctggttcgccttcccccggcttgctcgcttcatttaccagtttagctgtttgttctcctgaggtcaaccatcattgtcaagcgaagcaggtactgctttggttttaagctcataagctcgcctataacataaaaaatcctctttttactagaggaatcagtataatcaacataaaacacagaaaacagaaacacacacacacacacamaaagaggacagtgagctgtaccaatttatatagataacagaaactcattaccagggttttcagaacaaagcttattattattatttaatttctagaagtwtyytkkttttttttttttttttttttttttttttttttttt

SEQ ID NO: 1777 - DNA, 665 bp, Canis familiaris
gatcattctcaggctcctgattcacctcaaccacattgtaaaccgttggtcctacaarayttggaacccagaggcttaaggtctagaggacgtgtcygtcggtctctggtggcgtgacgctgaagcaccactagctgatgatcccgtatcaccatcaccacgctcggacattagtcttcctccaaccctgtattcgtcacaaatccaaccatgcagttcctaaaaaactgaacgcgtcccagatcaacgtggctgatgttccagtcaataaaactcattgtacggagactcattggagggacactgacaactgtccgaccaagcggaagggggccgaacgagcgaagtaaatggtcaaatcgacaaacaagaggactccagttggtagtaacagttcgcttcgtccatgacgaaaccaaaattcgagtattcgagcggatattgtattttttaggagaaaaatgatctccttagtcatattagttgtattttgtgtcttttgtctttgtgtgtgtgtgtgtgtktttctcctgtcactcgacatggttaaatatatctattgtctttgagtaatggtcccaaaagtcttgtttcgaataataataataaattaaagatcttcawarrammaaaaaaaaaaaaaaaaaaaaaaaaaaaaaaaaaaa

SEQ ID NO: 1778 - DNA, 653 bp, Canis familiaris
ggtgcaccgtgcgtggaccacmctgtcctcaasgctggtggtactrgagcctgacytcaggaggcctgtctgcctcccccccacccccccaccggtggcagtctggaataaagcccccatgtcacctttggtcccgtcacccactgcagagtctggaggcctgaccctcgcagtcagctcttcccccttccgccccgagaccagaccagccgtaggcagcatgagaatgtgagggggcgccctgtgcccagggctgctgcaggaggcctggttctcgtgtgctagtgaggcagcagggagcccggccacccactcaggctggctcttctgggcccagaaggcccagggtctttgccagtcaaggacgttctgtttttgatagaacttttccagtgatctgtatacgatggaggtctgagggagaggacgtcttcccgcacccggagagagcactgggtctgggcggccactccctgtcccagggggatccagcccccgaggctgagcggtgaagcccatctctgcactcagtgcgggaccctttgtcctttcctgcaaataaagtgttgtaccagctgctagggtggcagcggcttggaaacmmammaaaaaaaaaaaaaaaaaaaaaaaaaaaaaaaaaaaaaaaaaaaaaa

SEQ ID NO: 1779 - DNA, 719 bp, Canis familiaris
gacatcgccgtggacggcgagcctttgggccscgtctctttcgagctgtttgcagacaaagtyccamagacagcagagwactttcgtgctctgagtactggagagaagggattcggkwacraaggttccbsctttcacaggattatcccgggatttatgtgccaggktggggacttcacgcgtcacaatggcactgsmggcaagtccawytacggggagaagtttgatgacgagaacttcatcctgaagcacacagggcctggcatcttgtccatggccaacgctggacccaacacaaacggttcccagtttttcatctgcaccgccaagactgagtggttggacggcaagcatgtggtctttggcaaggtcaaggagggcatgaacatcgtggaagccatggagcgcttcgggtccaggaatggcaagaccagcaagaagatcaccatcgccgactgtggacagatctgatgaatcttaactcctgktttatctgaacttccagaccgttcctttagctcaggagagcgcccctccacccccacctgcttgaaatagcccagtctccgcactctcactgcagttctgcgggctccgtggttcctttccccaggtatagctggattgcagagttcagtttatgatgatgaaataaaatctaaaccacmaaaraaaaaaaaaaaaaaaaaaaaaaaraaaaaaaaaaaaaaaaaaaaaaa

SEQ ID NO: 1780 - DNA, 785 bp, Canis familiaris
tgacgaagacacagttttcgctctggtgaatgcatgttctgtaargcmaatgggragaasccttysragkkkrmscrkaychcsgaggrggacttcmackkggrkgagcamaccacggtcmaggtgcccawgatgabcsgcctggsmatgttcgacatccagcwctgygsmmcgctstccagckgggtkctgctcatggagtacgtgggcwacrccaccgcbktstkcatcstgcccracgaggkmmwaatgcagcacstkgagagcaagctgaccmaggagktcctggccmagttcctggraaagagatacgmcaggtctgccmgtttgcgcttgcccmaactgtccatctctggaacctacgatctgaaaagcgtcctgagcmaaatgggcatcaccmmggtcttcagckccgaggctgacctctctgggatcactgaggaagggcccytgatgctgtccaaggggctgcacaaggccgtgctgaccatcgacgagaaagggactgaagctgcgggagccacctttctggaagccatccccatgtccatgccgcccagtgtcgacttcaacaagcctttcctcatcatcatcgtcgacagagacaccmagagtcccctyttcatgggaaaggtggtgaaccscacccmaaagtaactgccttgtgggtcaggtcccttccagataccattaaagagtgacccmcccmhrrhhawahmawaaaaaaaaaaawaarmaaaaaaaraaaaaaaaaaaaaaaaaaaaaaaaaaaaaaaaaaaaaaaa

SEQ ID NO: 1781 - DNA, 432 bp, Canis familiaris
ccgggctgcaggaattcggcacgaggtttttcatctgcaccgccaagactgagtggttggacggcaagcatgtggtctttggcaaggtcaaggagggcatgaacatcgtggaagccatggagcgcttcgggtccaggaatggcaagaccagcaagaagatcaccatcgccgactgtggacagatctgatgaatcttaactcctgttttatctgaacttccagaccgttcctttagctcaggagagcgcccctccacccccacctgcttgaaatagcccagtctccgcactctcactgcagttctgcgggctccgtggttcctttccccaggtatagctggattgcagagttcagtttatgatgatgaaataaaatctaaaccacaaaaaaaaaaaaaaaaaaaaaaaaaactcgagggggggcccggtaccc

SEQ ID NO: 1782 - DNA, 752 bp, Canis familiaris
atttcttaaaggcaaagggagaacccttcgaggtggacataccccggagggggacttccacgkgratgagcacamccacsgtycaaggtgcccatgakgaccgsctgggcawgttcgamatccagcmbtgkgccacgctctccarctggktkctgctcatggagtacgtgggcdacgccmccgcmttsttcatcctgcccgacgagggcmmwatgcagcacctggagagcarkctgaccwaggagstcctggccaagttcctggmwaagagatacgccaggtctgccmgtttgcgcttgcccmarctgtccatctctggracctacgatctgraaagcgtcctgagcmaaatgggcatcaccaaggtyttcagcgccgaggctgacctytctgggatcactgaggaagggcccttgatgcygtccaaggggctgcacaaggccgtgctgaccatcgacgagaaagggactgaagctgcgggagccacctttctggaagccatccccatgtccatgccgcccmgtgtcgacttcaacaagcctttcctcatcatcatcgtcgacagagacaccmagagtcccctcttcatgggaaaggtggtgaaccccacccmaaagtaactgccttgtgggtcaggtcccttccagataccattaaagagtgacccmccccmvrraaaaaaaaaaaaaaaaaaaaaaaaaaaaaaaaaaaaaaawaaaaaaaaaaaaaaaaaaaaaaaaaaaaaaaaaaaa

SEQ ID NO: 1783 - DNA, 701 bp, Canis familiaris
gaggtgggcctccccggaggggggacttccacgtggatgagcaccccsgtcmaggtgcccatgatgaccgcctgggcatgttcgacatccagcactgkgccacgctytccarctkggtsstgctcatggagtacgtggscaacgccaccgccktsttcatcctgcccgacgaggschaaatgcagcacctggagagcaagctgaccmaggaggtcctggccmagttyctggaaaagagatacgccaggtctgccmgtttgcgcttgcccmaactgtccatctctggaacctacgatctgaaaagcgtcctgagchaaatgggcatcaccmaggtcttcagcgccgaggctgacctctctgggatcactgaggaagggcccttgatgctgtccmaggggctgcacaaggccgtgctgaccatcgacgagaaagggactgaagctgcgggagccacctttctggaagccatccccatgtccatgccgcccagtgtcgacttcaacaagcctttcctcatcatcatcgtcgacagagacaccmagagtcccctcttcatgggaaaggtggtgaaccccacccmmaagtaactgccttgtgggtcaggtcccttccagatmccmattaaagagtgacccmccccmrraawaaaaaaaaaaaaaaaaaaaaaaamaaaaaaaaaaaaaaaaaaaaaaaaaaaaaag

SEQ ID NO: 1784 - DNA, 780 bp, Canis familiaris
gtctcgctctggtgaaatacatttctttaaaggccaatgtgagaagccttcgaagttggagcataccacggaggaggacttccacgtggatgagcaaccaccacggtcaagkkgcccatgatgaccgcctggsatgttcgacatccagcactgtgccacgctctccagctgggtgctgctcatggartacgtgggcwacgccaccgcctkcktcatcstgcccgacgagggcmaratgcagcacctggagagcaagctgaccaaggaggtcctggccmagttcctggaaaagagatacgccaggtctgccmgtttgcgcttgcccmaactgtccatctctggaacctacgatytgaraagcgtcctgagcvaaatgggcatcaccaaggtcttcagcgccgaggctgacctctctgggatcactgaggaagggcccttgatgctgtccaaggggctrcacaaggccgtgctgaccatcgacgagaaagggactgaagctgcgggagccacctttctggaagccatccccatgtccatgccgcccagtgtcgacttcaacaagcctttcctcatcatcatcgtcgacagagacaccmagagtcccctcttcatgggaaaggtggtgaaccccacccmaaagtaactgccttgtgggtcaggtcccttccagataccattaaagagtgacccaccccmrraaaaaaaaaaaaaaaaaaaaaaaaaaaaaaaaaaaaaaaaaaaaaaaaaaaaaaaaaaaaaaaaaaaaaaaaaaaaaaaaaa

SEQ ID NO: 1785 - DNA, 753 bp, Canis familiaris
ggtgataacaagttctgtaaaggcaatgggagaacccctcgagtggagcataccmcsgaggaggacttycacgtggatgagcacacccggtcaaggtgcccwkgatgagccgcctgggcatgttcgacatccagcactgtgccacgctctccagctgkgtgctgctcatggagtacgtgggcaacgccaccgcsttsttcatcctgcccgacgagggcaaaatgcagcacctggagagcaagctgaccaaggaggtcctggccaagttcctggaaaagagatacgccaggtctgccmgtttgcgcttgcccmaactgtccatctctggaacctacgatctgaaaagcgtcctgagcmaaatgggcatcaccmaggtcttcagcgccgaggctgacctctctgggatcactgaggaagggcccttgatgctgtccmaggggctgcacaaggccgtgctgaccatcgacgagaaagggactgaagctgcgggagccacctttctggaagccatccccmtgtccatgccgcccagtgtcgacttcaacaagcctttcctcatcatcatcgtcgacagagacaccmagagtcccctcttcatgggaaaggtggtgaaccccacccmaaagtaactgccttgtgggtcaggtcccttccagataccmytaaagagtgamcymccccvrraaaaaaaaaaaaaaaaaaaaaaaaaaaaaaaaaaaaaaaaaaaaaaaaaaaaaaaaaaaaaaaaaaaaa

SEQ ID NO: 1786 - DNA, 722 bp, Canis familiaris
ttggagaacgttttcgaggtggagcatatcccggaggaggcttccacgtggatgagcacacmcggtcargtgcccatgatgaccsscctgggcatgktcgacatccagcactgtgccacgctctccagctgggtgctgctcatggagtacgtgggcaacgccmaccgccttcttcatcctgcccgacgagggcaaaatgcagcacctggagagcaagctgaccaaggaggtcctggccaagttcctggaaaagagatacgccaggtctgccagtttgcgcttgcccmmaactgtccatctctggaacctacgatctgaaaagcgtcctgagccaaatgggcatcaccaaggtcttcagcgccgaggctgacctctctgggatcactgaggaagggcccttgatgctgtccaaggggctgcacaaggccgtgctgaccatcgacgagaaagggactgaagctgcgggagccacctttctggaagccatccccatgtccatgccgcccagtgtcgacttcaacaagcctttcctcatcatcatcgtcgacagagacaccmagagtcccctcttcatgggaaaggtggtgaaccccacccaaaagtaactgccttgtgggtcaggtcccttccagataccattaaagagtgacccaccccmrraaaaaaaaaaaaaaaaaaaaaaaaaaaaaaaaaaaaaaaaaaaaaaaaaaaaaaaaaaaaaa

SEQ ID NO: 1787 - DNA, 687 bp, Canis familiaris
gaggtggacacataccaccgagggaggacttccacgtgggatggagcacaccccggtcaaaggtgccacatgatgagccgccttgggcatgttcgacatccaagcacttgtgccacgctctccagctgggttgctgctcatggagtacgtgggcaacgccaccgccttcttcatcckgcccgacgagggcaaaatgcagcacctggagagcaagctgaccaaggaggtcctgckccaagttcctggataargagatacgccaggtctgccaagtgttgcgcttgcccaaacttgtccatctstggaacctacgatctgwaaagcgtccgtgagcmaaatgggcatcaaccaaggtcttcagcgccgaggctgacctctctgggatcactgaggaagggcccttgatgctgtccaaggggctgcacaaggccgtgctgaccatcgacgagaaagggactgaagctgcgggagccacctttctggaagccatccccatgtccatgccgcccagtgtcgacttcaacaagcctttcctcatcatcatcgtcgacagagacaccaagagtcccctcttcatgggaaaggtggtgaaccccacccaaaagtaactgccttgtgggtcaggtcccttccagataccattaaagagtgacccaccccaggaaaaaaaaaaaaaaaaaaaaaaaa

SEQ ID NO: 1788 - DNA, 750 bp, Canis familiaris
acgacacagttttcgctcggtgaatacatgttgcgtaaaggcaatgggaaagctcttcgaggggagcaataccacggaggaggacttccacgtggatgagcacaccacggtcaaggtgcccatgatgagccgcctgggcatgttcgacatccagcactgtgccacgctctccagctgggtgctgctcatggagtacgtgggcaacgccaccgccttcttcatcctgcccgacgagggcaaaatgcagcacctggagagcaagctgaccaaggaggtcctggccacagttcctggwaaagagatacgccaggtctgccagtttgcgcttgcccmaactgtccatctctggaacctacgatctgaaaagcgtcctgagcmaaatgggcatcaccaaggtcttcagcgccgaggctgacctctctgggatcactgaggaagggcccttgatgctgtccaaggggctgcacaaggccgtgctgaccatcgacgagaaagggactgaagctgcgggagccacctttctggaagccatccccatgtccatgccgcccagtgtcgacttcaacaagcctttcctcatcatcatcgtcgacagagacaccaagagtcccctcttcatgggaaaggtggtgaaccccacccaaaagtaactgccttgtgggtcaggtcccttccagataccattaaagagtgacccaccccaggctccagtgtgaaaaaaaaaaaaaaaaaaaaaaaaaaaaaaaaaaa

SEQ ID NO: 1789 - DNA, 444 bp, Canis familiaris
gcctgtggtgtctccgcagcccctgcgtgcgccatgtaatgctggcagccctgtgcttgctgctgtcacgtctgctcgctctcggatcgagggtccctgctctgtccatgggtcttccggtgcggttggcctgacagtcctctggtgtctgggctctggtgcggatcatccctcccgggtggggtgggggacacggggctgcactcccttctcctcgttcccaccccttggcaacagggaagggctttgcctgaccggaggaaacacccagctttatgtaaatattcggccactgtcaggtgtggggtgcgcccacagccccgggctgtcctgaatgtattataaaggctccgggggaagatgcacagatccgtggttctagtagactgcttcccaagacagaataaatgtttttcttgttmawaaaaaaaaaaaaaaaaaaaa

SEQ ID NO: 1790 - DNA, 675 bp, Canis familiaris
atagatgtatctttttatgccatgtatagatcacttcsttcccccgatcaatttttggtttatttttgatkkttataaattcttcckttggactccctcttctgtctacctttggggatagatttttctgtttgtttcttctgttttgtgttaagcatcattttctgacttacatgttggtaagggaaggaaaagtgtaagggaaagagagagtgaaagactttgatgtatgcaatcaaccgtgatgctcaagcccattatactatcttgttattatatttgctggtgcacaattcttgcatagaaaagaaccaaaggtatgttttgttggcaggcagtttggagattgtggttttaaccaacacattgaatgtataatgatcatttgagaggacacagttaaaagacctgatgctcccacttgtaactgtttggtactatggcgctccttccttgtgtacatttctcttaaaagtgatattatatctgtttgtatgagaaacccagtaaccmagaaaaatgactgcatgttcctaactatgacacagtaaggaaaatgcacaatgtttttacttttcaaagtttcattcaaagtagttaagatgaaattcatatgaaaacatttttatcacmaaataaagattacatgtcaaaaaaaaaaaaaaaaaaaaaagg

SEQ ID NO: 1791 - DNA, 678 bp, Canis familiaris
accctgtagtcaggagtgagtcttatcttgtcctatgtctaaaagagtgtttttgccttgttactgttttttgttctataaattcatcttgtttaaaattcttaatctataagacccgttatctttgactttcttttgtcttctctttttaaagacaaaatcaaaccactagaacgtggttttcgtgatcttgaaacttcgtagggactctagcgactaattacagcaacaacaaagattgactacaagattttattcggtacttcagaagattcgttcaatcgtcctccttgtatgggtttcagagtagagaattttgtaatatctcttaatcgtatctcagaaaatcgggtcattggtactcggaaaccttgaagttaatctatataggtcaaaagggatcgatttctcgtgttttttttatcctcgttcaactaaaagacgggatggtgtcgaactggatgtatcttcttggttaccgattgtatgtttcgtgaaattcttcaaccatcctcatttctttgatcctttttctattttcactgtaatcgagcttgtaagatcatacaccgaatcgattattctctacggagccttttgtccacaacttcatattttaccaattctatttgacatgttaaataaaatttctttgtaaatttgaaacgaaaaaaaaaa

SEQ ID NO: 1792 - DNA, 678 bp, Canis familiaris
tgggacatcagtcctcactcagaatagaacaggatacagattttctcacaaaaacggaacaatgacaaaaaacaagatatttaagtagaacaaattttaagaattagatattctgggcaatagaaactgaaagaaaacagaagagaaaaatttctgttttagtttggtgatcttgcaccaaaagcactagaactttgaagcatccctgagatcgctgattaatgtcgttgttgtttctaactgatgttctaaaataagccatgaagtcttctaagcaagttagcaggaggaacatacccaaagtctcatctcttaaaacattatagagaattagcatagagtcttttagcccagtaaccatgagcctttggaacttcaattagatatatccagttttccctagctaaagagcacaaaaaaaataggagcaagttgattttctgccctaccacagcttgacctacatagaagaaccaatggctaacatacaaagcactttaagaagttggtaggagtaaagaaactaggaaaaagataaaagtgacattagctcgaacattctagtatgtggcttagctaataagagatgcctcggaaaacaggtgttgaagtataaaatggttaagataaactgtacaatttattttaaagaaacatttaaactttgctttttttttt

SEQ ID NO: 1793 - DNA, 709 bp, Canis familiaris
gaccccatcctgtctagtcttgaagccctcatttagacagaggtcaarcaataggcgccctggcagtgtccgcctgaaascaagcagtcacgtgatgtttcggtccagcccagagccccwagatcacagacggctatgtctggccagaagctcctcggttctccctcttcagagttccccaccctaagagaatgtcacctgracagcccacggtgaagctgagaggccaggatggggtaagacagcaccagcagctgtgctgctacagggagtcattggtagtcaaagraagatccctggtgtctccaacggaccmggtgggcagagcttagagtggccaccttccctatagtgaggtgtgataggacatctgacttgccaccaaggtctttttgaccagacatatcctagctaattgatgtccmaacaccagaatgtgaggccmatcttctgagttaaacttttgacaagggracaaacttaaaactgatgtatccgtcatgtagctagctgtagagcttgcaacttaatagcaacagctgcccmatgccatgtgaagtaacagactggtttttggtttatttcttccttcagttttaatgttatgtaatgtatttaaacccttatttaaataaaacttgttttcagaaamammwraaaaaaaaaaaaaaaaaaaaaaaaaaaaaaaaaaaaaaaaaaaaaaaaaaaa

SEQ ID NO: 1794 - DNA, 703 bp, Canis familiaris
tgtcactcgttcatgcataacttgaaagagccatgctktctaktcttgaagtcctcattaaacagaggtymagcaataggcgcctggcagtgtcccgcckgraaccaagcagtcacgtgatgtttcggtccagcccagagccccaagatcacagacggctatgtctggccagaagctcctcggttctccctcttcagagttccccaccctaagagaatgtcacctgaacagcccacggtgaagctgagaggccaggatggggtaagacagcaccagcagctgtgctgctacagggagtcattggtagtcaaagaaagatcyctggtgtctccaacggaccmggtgggcagagcttagagtggccaccttccctatagtgaggtgtgataggacatctgacttgccaccaaggtctttttgaccagacatatcctagctaattgatgtccmaacaccagaatgtgaggccmatcttctgagttaaacttttgacmagggaacaaacttaaaactgatgtatccgtcatgtagctagctgtagagcttgcaacttaatagcamcagctgcccaatgccatgtgaagtaacagactggtttttggtttatttcttccttcagttttaatgttatgtaatgtatttaaacccttatttaaatmaaacttgttttcagaaammaaaaaaaaaaaaaaaaaaaaaaaaa

SEQ ID NO: 1795 - DNA, 730 bp, Canis familiaris
gatgtgcttccgtttggctacggcatycccgagcctgcctgaagacgtcctccgatgtccsctggcattcctcccsytctctccagccgggcctyccmrracatcacgtawcwcygcaagwatagcmtcgcgtacatggatcacgccmgtgggratgtwaagaaagycctgaggctgatggggtcaaatgaaggtgaattcaaggctgaaggaaacagcmdattcacatacacmgtcctggaggatggktgcactaracacmctggggaatggggcmaaacmgtcttcgratwccgdacacgcaaggctgtgagactacctattatagatattgcaccctatgatgttggtggtcctgatcmagaatttggtgtggacgttggcccygtttgctttttataaaccmaactctatctgraaccccmgcmaaaaatttcacactccatatgtgttcctctcgttctrascttgtcaaccmgtacmagtgaccmactcmattccmgttatttatttccmaaagttttggraaaaagtataatttggcmaaaaaaaagataccyttttttttttttttttgctgttacacmmaatacagttcaaatgctttttgttctatttttttaccmmtttcwatttcmaaatgtctcmatggtgctataataaataaacttcamcactcwwammawaaaaaaaaaaaaaaaarrmrrmmaaaaaaaaaaaaaaaaaaaaa

SEQ ID NO: 1796 - DNA, 694 bp, Canis familiaris
  misc_feature (28)..(28): n comprises a, c, g, or t, or includes no nucleotide
acctgccttgtagacgtcctcgaatgtnccacctggcattcctccgccttcttctccagccgggcctcccaggacatcacgkatcmctgcagaatagcatcgcgtacatggatcacgccagtgggaawtgtwaagaawgccytgaggctgatggggtcmaatgaaggtgaattcaaggctgaaggwaacagcmaattcacatacacmgtcctggaggatggttgcactraacachctggggaatggggcmawacmgtcttcgwataccgacacgcaaggctgtgagactacctattatagatattgcaccctatgatgttggtggtcctgatcmagaatttggtgtggacgttggccctgtttgctttttataaaccyaactctatctgaaaccccmgcdaawatttcacactccatatgtgttcctctcgttctaaccttgtcaaccmgtacaagtgaccmactcmattccmgttatttatttccmaaagttttggaaaaaagtataatttggcmaaaaaaaagataccytttttttttttttttgctgttacaccmaatacmgttcaaatgctttttgttctatttttttaccmatttcmatttcmaaatgtctcmatggtgctataataaataaacttcmacmctcttamaawaaaaaaaaaaaaamaaaaaaaaaaaaaaaaaaaaaaaa

SEQ ID NO: 1797 - DNA, 406 bp, Canis familiaris
  misc_feature (152)..(152): n comprises a, c, g, or t, or includes no nucleotide
atagatattgccaccctaatgatgtttggtggtcctggaatcaaagaattttggtgttggacgtgtggcccctgtttgcttttttatagaacccgaactcttatcctgaaaaaccccaagccaaaaaaaatgtttcacaactccataatgtngttcctctcgttctaaccttgtccaacccagtacaagtgacccaactccaattcccagttatttatttcccaaaagttttggaaaaaagtataatttggccaaaaaaaaagatacctttttttttttttttttgctgttacaccaaatacagttcaaatgctttttgttctatttttttaccaatttcaatttcaaaatgtctcaatggtgctataataaataaacttcaacactcttacaataaaaaaaaaaa

SEQ ID NO: 1798 - DNA, 773 bp, Canis familiaris
ggcacgarctactcacagtaacctcaactcctgccacaatgtacaaratrcaactcttgtcttgcatcgcactgacrcttgtacttgtsgcaawywgtgcrcctattacytcmagctctacaaaggaaacagagcaacagatggagcrattactgctggatttacagttgcttttgaatggagttaataattatgagaacccccaactctccaggatgctcacatttaagttttacacgcccaasaaggccacagaatttacacaccttcaatgtctagcagaagaactcaaaaacctggaggaagtgctaggtttacctcaaagcaaaaacgttcacttgacagacaccaaggaattaatcagcaatatgaatgtaacacttctgaaactaaagggatctgaaacaagttacaactgtgaatatgatgacgagacagcaaccattacagaatttctgaacaaatggattaccttttgtcaaagcatctwctcaacamtgacwwgataattaagtgcctatttaaaatgtatcaggctatttatttaaatatttaaaatttatatttattttttgatgtacgttttgctaccttttgtaattattattcttatacttcatatgataaatatggatcttttaagattctttttgtaagccctaggggctctaaaaactcacttatttatcccaaaatatttattttttatattgaactattaaacatgatgtctatgtagatcagttaataaaattatttaataaagttgatga

SEQ ID NO: 1799 - DNA, 259 bp, Canis familiaris
aaagtgcgcctccccgcccccccgtcccctcccctccccgggtgaatccccggcggccctcgcggcgcaggcggcgatcctggcggccgtcgggggccggcagcttcctggaaagttacttctcgttggagccggcgataggcagagagtgttctgtgaaatccgctgagcggagatcgactacgttccgggaatgagagggctgtgccattcccctcactagccctgccttgacagcgtaacaggaaaaaaaaaaaaa

SEQ ID NO: 1800 - DNA, 639 bp, Canis familiaris
cacagggacactgagttctggtgggcgsctggacgkgcccaascagagctcacagcgtgkcctgwccgcccgagagcgcttccmgaacctggacmagaaggcgagctcagagggcagcgtggcttctggctccggcctggactcmctgcataagwacagcgtgagccagatctcggtgctcagcgggggcaaggctgagtgctcacagttctgcaccmcaggaatggatggtggcatgagcatctgggatgtgaagagcttggaatcrgccttgaaggacctcaagatcmwatgacccmtgaggaatatgttgccctcatccccmctgctggggaagggggtcmagaaggctaagggtcgctttgctgaatgtttttagggtagtagtctgggtccccctggagactgctccagccagaggggaggrcmaagtggggaggggagggaagcttttcttacctattgaaggaacataggtctttttgtcagagaaatgttttcatttattgttaaaaacmaaaatgttcccmmagcmctgtgctggtcatgaactgcttcaaaaacmtggaggtaataaaaaagcmmtcttaraamwrrwmwaaaaaaaaaaaaaaaaaaaaaaaaaaaaaaaaaaaaaaa

SEQ ID NO: 1801 - DNA, 673 bp, Canis familiaris
ttccaattgcaagggacttagccaagctaggataggcttgatttttggccaattattgagtttttcatgggccaccgaggctggagtcgaatatataatgtgaactggttttctagaagattcaccataaccagctctggaacagtgacttcccagttgtgatctcaacatagtgcttctgaaggacacttgttgatcttcgacgcttggaacgtgctgttggaatacctggcacgttgtcagtacacagtagacttcactatggtggtggtagttgatttgagtttactagctgtgataacccmaatggggtggaaacttgaatcttctcccccagcacatcttccctccatcctgatgtagaggyttktgggttttattgggcagctgggaatctgctgctttaaatagtgcagcttgtgcttccacactttgagcatacttaacccagaaggcmaaaatatcttttggttctaggaagctgcccacacaggataacccggggtttaggtgatggaatagaatctgtaaggagaaaagcmaaagctggagctgatgaaggtatcctgtgcccttgatggatgagacmaaaataaagtttttgaagttgagactaaaraaaaaaaaaaaaaaaaaaaaaaaaaaaaaaaaaaaaaaaaaaaaaaaaaaaaaa

SEQ ID NO: 1802 - DNA, 377 bp, Canis familiaris
tttttccttttttttgcagctgacagcttgtgcgcgttcctggaggaccggtggtgtttgaggatcctgggctgtctggaacccaarscacgggacttcctggctggaggggtataaccccctcggccctccgacgtggaatttgggttattgcccaggcactgccagtgggaggtgaggtgaggagctcagcctcttcattgtctaaatgaggcctgaacgtgtgaagtgcgatttctgcttttcgtgtaccccccccaaccctccccaccccggtttaccgaagctgcctttgtgtttgtgtcaataaaaagccmaaccctgrdaaaaaaaaraaraaraaaaaaaaaaaaaaaaaaaaaaaaaaaaaaaaaaaa

SEQ ID NO: 1803 - DNA, 350 bp, Canis familiaris
tttccgggtgttcgcttctttagttgacagcagtacgcctgggckccttcmggaggccgcgggtgttgaggacctgggctgctggaaccmaagcagggacttcctggctggaggggtataaccccctcggccctccgacgtggaatttgggttattgcccaggcactgccacrtgggaggtgaggtgaggagctcagcctcttcattgtctaaatgaggcctgaacgtgtgaagtgcgatttctgcttttcgtgtaccccccccaccctccccaccccggtttaccgaagctgcctttgtgtttgtgtcaataaaaagccmamccytgrraaaaaaaaaaaaaaaaaaaa

SEQ ID NO: 1804 - DNA, 673 bp, Canis familiaris
cttcccgtctcagaatctaaacgtggtcaccttcgagtagagagtcccgcccgcctgcccaacgcggkcagcgccacccgcagatgacacacgctctccgccacccrmcyrdwaccacracgtgaatttgcamcaggggaggaaaaaagaacsaaacttccaaggccctgctttttttcttaaaagtactttaaaaaggaaaatttgtttgtattttttaktkacatttkatatttttgtacatattgttaggggtcagccatttttaatgatctcggatgaccmaaccagccttcggagcgttctctgtcctacttctgactttacttgtggtgtgaccatgttcattataatctcmaaggagaaaaaaaaccttgtaaaaaaagcmaaaacaacaacmamaaaacmatcttattccgagcattccagtaactttttygtgtatgtacttagctgtactataagtagttggtttgtatgagatggttaaaaaggccmmagataaaaggtttctttttttccttttttgtctatgaagttgctgtttattktttttggcctgtttgatgtatgtgtgaaacmatgttgtccaacaataaaccggaattttattttgctgagttgttctaammaaaaaaaaaaraaaaaaaaaaaaaaaaaaaaaaaaaaaaaa

SEQ ID NO: 1805 - DNA, 633 bp, Canis familiaris
  misc_feature (34)..(34): n comprises a, c, g, or t, or includes no nucleotide
aagcaggctggtaaccgtccggattcccgggatnaacgcgggcagcgccacccgcagatgacacacgctctccgccacccaaccaaaccacracgtgaatttgcaacaggggaggwaaaaagaaccaaacttccaaggccctgctttttttcttaaaagtactttaaaaaggaaaatttgtttgtattttttatttacattttatatttttgtacatattgttaggggtcagccatttttaatgatctcggatgaccmaaccagccttcggagcgttctctgtcctacttctgactttacttgtggtgtgaccatgttcattataatctcaaaggagaaaaaaaaccttgtaaaaaaagcmaaaacwacmacmaaaaaacmatcttattccgagcattccagtaactttttttgtgtatgtacttagctgtactataagtagttggtttgtatgagatggttaaaaaggccmaagataaaaggtttctttttttccttttttgtctatgaagttgctgtttattttttttggcctgtttgatgtatgtgtgaaacaatgttgtccaacaataaaccggaattttattttgctgagttgttctaaaaaaaaaaaaaaaaaaaaaaaaaaaaaaa

SEQ ID NO: 1806 - DNA, 668 bp, Canis familiaris
  misc_feature (115)..(115): n comprises a, c, g, or t, or includes no nucleotide
  misc_feature (150)..(150): n comprises a, c, g, or t, or includes no nucleotide
tccctctcagaatctaaacgtggtcaccttcgagtagagagtcccgcccgcctgcccaacgcggcagcgccacccgcagatgacacacgctctccgccacccaaccttaccacancgtgaatttgcaacagggggaggaaaaaagaaccnaacttccaaggccctgctttttttcttaaaagtactttaaaaaggaaaatttgtttgtatttttgatgttacattttatatttttgtacatattgttaggggtcagccatttttaatgatctcggatgaccaaccagccttcggagcgttctctgtcctacttctgactttacttgtggtgtgaccctgttcaattataatctccaaggagaaaaaaacccttgttaaaaaagccaaamcaccaccaaaccatcttattccgagcattccagtaactttttttgtgtatgtacttagctgtactataagtagttggtttgtatgagatggttaaaaaggcccaagataaaaggtttctttttttccttttttgtctatgaagttgctgtttattttttttggcctgtttgatgtatgtgtgaaaccatgttgtccaaccaataaaccggrattttattttgctgagttgttctaaccaaaaaaaaaaaaaaaaaaaaaaaaaaaaaaaaaaaaaaaaa

SEQ ID NO: 1807 - DNA, 630 bp, Canis familiaris
ttcacccacctggcttggatcaacactcccaggaagkaaggarggttggscccctgracatcccctggtggctgatgtaaccagaagtttatctgaagattatggtgtgctgaaggaagatgaaggcattgcctacaggggcctctttatcatcgatggcaagggtgtccttcgccagatcactgtcaatgatttgcctgtggggcgctccgtggatgaagttctgcggctggttcaggccttccagtacacggatgagcacggggaagtatgccctgctggctggaagccaggcagtgacacaatcaagcctaacgtggacgacagcaaggaatacttctccmaacacaactagactgcagacatgcggaaagcttgggctgttggcccccacctacacccctacgtggataccccatgctgacccaggaaaggccggacctgcccctttaaactccatgaccctggagggcttgtccaaggccttctcattctcccagctgggagctggtgaatggtgagcccctccctggagcccatctagctgggcccaggccmaaaggtgaccaataaagtactaggacagamarraaaaaaaaaaaaaaaaaaaaaaaaaaaaaaaaaaaaaag

SEQ ID NO: 1808 - DNA, 328 bp, Canis familiaris
tcaggcctgcggagcgtggggaggggggcttcgcccgctgtctgggtttacccttagcttggcgctgcatctgtgggaactcctgggcaggcgtttagcctcctcaagaagcagccctaaaaaaaaacctaatcaaaccgatcaaggctgctttgaccagaaagccaacagggtctttggcatggggtggggtggggcctygttatattttatttcccgtgttgaaataagcctcccttaaaccttagctccagtcctgagagccttgagagaacttgaaatcccttctctaataaagtctaaatctgtgagaaaaaaatattaaata

SEQ ID NO: 1809 - DNA, 619 bp, Canis familiaris
atgaggcatcaggcctatggtcagcactttaatgggtggtccctgggaggaccatgggggtgatgttcacaccctctaacagttgaaataatgcgtatttatgacacctgaacgtatttggagttgaccctggatcactgaagacctgtttttagccctaaccgggtgatggactctcaaagcgacttgcagcaagtaggaggggcaatcggctcgcatccaagatgccctaagcacggtgttcagtatgcagaggatgttgctgtctggaaaggtgtcagctgacaatactgtgggccgcttcttgatgagtctggttaaccaagtacccaagatagttcccgatgacgtttgagaccatgctcaacagcaacatcaatgacctgctgatggtgacctacctggccaatctcacgcagtcacagattgccctcaatgagaaacttgtaaacctgtgaatgggtcccacgcagtactcctgccagtcttgggccaccctaggactcagaatggagtgaagtagaatggtttacttgtggtttgagtcacactgagtcagtcaactgcttgtgactctaaataaatctagcctaccttttgtaaaaaaaaaaaaaaaaaa

SEQ ID NO: 1810 - DNA, 733 bp, Canis familiaris
agttagttgttgttaccagatgctgcgaaaatattgtaagtagcttggaccgtcargtatactcsatsccagcaggaaaataggtagactactgctaagtctgtcagggggtgttaaaccgacattacatagtctccttgggacgcaaagcagaactacggtaatctccagtggtgrccttgatattgaagaryyttgagtgtttgtacaaagagggktchtttkgttacccactccaggagtcactagtagcacgctcctaccgcataccagtaccccactacttggagttagtatcctaactgtaagtaaaggtgtcaggtttgtaatcggtaaaytacytgaaagtatmaggattacagagataggagtcaggtggagccytccagggttgttaaggagagtacyccytccgtgtgtgtctcmsmagsaacamragtagatgaactcgagtttgtagccytaggcttctgcaaagcctccsgtcacaccttctaaaaagaataaggcyttggcttcyttcctaggtaaacacaaccccgaggtttgggataccgccactcctaagcagtggtttgtgtcytgtgtcaggctgccyttctgtgcygagggattttaggasccagggagtcgagtaaggttgacaaatatcaattaatttgtaacatctgcycgcattwttwttwttwtwwtttwtwtytttytktttttttttttttattttttttttttt

SEQ ID NO: 1811 - DNA, 733 bp, Canis familiaris
tcaatcaacaacaatggtctacgacgcttttataacattcatcgaacctggcagtycatatgagstasggtcgtccttttatccatctgatgacgattcagacagtcccccacaatttggctgtaatgtatcagaggaaccctgcgtttcgtcttgatgccattagaggtcaccacyggaactataacttctyrraactcacaaacatgtttctcccmagdaaamcaatgggtgaggtcctcagtgatcatcgtgcgaggatggcgtatggtcatggggtgatgaacctcaatcataggattgacattcatttccacagtccaaacattagccatttratgractttcataktcctaatgtctctatcctcagtccacctcggraggtcccaacaattcctctcatgrggraggcacacacagagksktcsttgtkytcatctacttgagctcaaacatcggratccgaagacgtttcggaggscagtgtggaagatttttcttattccgraaccgaagraaggatccatttgtgttggggctccaaaccctatggcggtgaggattcgtcaccaaacacagracacagtccgacggraagacacgrctccctaaaatcctsggtccctcagctcattccaactgtttatagttaattaaacattgtagacgrgcgtaawaawaawaawawwaaawawaraaaramaaaaaaaaaaaaataaaaaaaaaaaaa

SEQ ID NO: 1812 - DNA, 594 bp, Canis familiaris
ccctcaagttmaggcctaatgcaggaaagagtgcccaaaaagaagtcagagtaaaacmaatatggagatacttgggatgagtgaaaaattgcatcattggacctactgaaggagtttcaatatccagcttcatctaggtggtcatgaatatctgcatgctttgagctcagcagcagtcttcataaacacatttaaaactagaacctgggttcttgtgrtttggcttattaaaatgatgtttaaaaacagactttaatgtgaatattgtgtggatgtattcaccttgaggaactataggaatgatggtattataccatgatcacatacagtttgtgaaatcatttttaagttacagggtaaggatgcttttatgaaactgtaaagagattgtaatactctagatcagcatatattgaagatacagatctgcatgttgaatgggggggtggggggagcaagtgtaattttaagtgttaagcttcacatccaaaaactattaaaaagcctttctccagtgtttgctgtattcacttattaatgtttatgataaataaaatataaaggaacatgccaaaaaaaaaaaaaaaaaaaaaa

SEQ ID NO: 1813 - DNA, 732 bp, Canis familiaris
gctgttccaaaacagggataattttgtgccctwarccaccggggagaaarrattkgctacamargacagcaaattccatcgtgtgatcaaggacttcatgatccagggtggagactktacccgaggagatggcactggaggaaagagcatctatggtgaacgcttccctgatgagaacttcaagctgaaacactatgggcctggctgggtgagcatggccaatgcaggcaaagacaccwacggctcccagttctttatcacgacggttawgactgcctggctagatggcaagcacgtggtgttcggcaaagttttggaaggcatggagktagtacggaaggtggagagcacawaaacagacagccgggacaagcccctgaaggatgtgacgatcgcagactgtggcaagattgaggtggagaagcccttcgccatcgccaaggagtagagccccagggaccgctttccctttgagccaccatctgcgagtccctgtcgccttcccatgggtgaggacggcccgccacagggcaccgtgctgcggggccctggtgctggcatctgacggagcggacccctcccctcacattccataggccagcggcctggttttgtaacaaactcaaactcctaccaatgctgaccmattaaaaaaaaaaaacggwrrrwwwwwwrwaraaaaaaaaaaaaaaaaaaaaaaaaaaaaaraaaaaaarmaaaaaaaaaaaaaaa

SEQ ID NO: 1814 - DNA, 677 bp, Canis familiaris
ccatttggggagctctaagacagatctcttcttacgaccgccaaaatatgccttcaagaagagttgattggtgggtgcctcttcctcccaccagctgctwctgccgctgccagaaaagatgcctaccaccgccagcacagaaggagtagtgcagagcaccacctgagtgcctgttagtacgctggcccctctccractttcttctcctcttacccagacacgtgataggracagawaaagaatcttcacagaccactctggcagaccatagcagtgaaaaattaatagattgggtcatgatttttcttgaattcmaaaaacaagctttgttttccaaattgccatgttctctctacattgagagcttctgaaacaggaataatatcatctcagtctgctgtttgaggaattgactgtgaagctaccacagtgagaaacctgttcttggcagcagctctgatggcagctgtccttgatgagacatctgcagtgtggtggagagctcccggaacaatcgatgtgggcattgaatcttgtaacacttagcaggtggtgcctgttcatgttatttttcttctaagaacttggaaaccctttctgttgctgttttattaataaagcaggtgtttcttttctggtamwmrraaaaaaaaawawaawaaaaaaaaaaaaaaaaa

SEQ ID NO: 1815 - DNA, 501 bp, Canis familiaris
tgtagattatgtcacagtctgagcatgtgtacctatcatggtaccttgtctgagctgttctctttgtttgtactgttcacatcgtccttctctcactttcccttctgagtggtggccttatatgaaagcgtcaagctcactgcggtgtgcgtttgatgatcgtttgtgctgcggcttaagtgggcccttttgaccacactggcttctcctttggcatgtttaattgtgatgtttaacggacatccttgcagtttaagatgacacttttaaaataaaactctcctaatgatgacttgagccctgccactcgatgggagaatcagcagaacctgtaggatcttatttggaattgacattctctattgtaattttgttcctgtttatttttaaattttctttttgtttcactggaaaggaaagatgctcagttttaaacgttaaaagtgtacaagttgctttgttacwataaaactaaatgtgtacammaarraaaaaaaaaaa

SEQ ID NO: 1816 - DNA, 759 bp, Canis familiaris
cagctatggccattaggcctatttaggggacacaaaggaacaagtttgwaccaaaaagacagsstggtaccgtccggrwttccmkggabctctctcccskvygskrctgcacwagccmgtgagaccvacccmcaggrccdcggagagaccmtkaagagcctgctccttctctscattctgkctgccttgkccgtgrcagskttgtgctacgaatctcatgaaagtatggratcctatgraakkaatcccttcaktaacmggagaaatgcchddacakkdwdatctccgcaacagagatggagagstwaagcccmggagaggatcagagraaccaccwagcccgcctatgagctcaaccgggaagcctgtgatgacttcaagctttgcgwacgctacgccmtggtttatggatacmatgctgcctacmatcgctatttccggcatcgccgaggaggcmaatgagattgaaaaaagyctctttccttccagagcctggtgcctggttttgtattcctttacagtagcatcatcgaactacatawacacatacmaattgcktatttcttaaawgttcttgtctggckgttgccctccttcctgccccccagatcmataagcagtgraartgcmmtgtggtgaaaggtcmaaagagaattaagawgtgtgattattattacataataaactcttggatggawamwwwmhaaaaaaardmaaaaamaaaaaamaaaaamaaaaaaaaaaaaaaaaaaaaaaaaa

SEQ ID NO: 1817 - DNA, 721 bp, Canis familiaris
ccatagccatttagggacactaaaggacagtttgacaaaaaagcaggctggtaccggtccggattccgggatggagccctcctcccctcgctactgcacaagcccagtgagaccaacccacaggaccmyggagagaccatgaagagcctgctccttctctccattctggctgccttggccgtggcagctttgtgctacgaatctcatgaaagtatggaatcctatgaaattaatcccttcattaacaggagaaatgccmatacatttatatctccgcaacagagatggagagctaaagcccaggagaggatcagagaaaccaccaagcccgcctatgagctcaaccgggaagcctgtgatgacttcaagctttgcgaacgctacgccatggtttatggatacmatgctgcctaccaatcgctatttccggcatcgccgaggaggcmaatgagattgaaaaaagtctctttccttccagagcctggtgcctggttttgtattcctttacagtagcatcatcgaactacataaacacatacaaattgcttatttcttaaatgttcttgtctggctgttgccctccttcctgccccccagatcmataagcagtgaaartgcmatgtggtgaaaggtcmaaagagaattaagatgtgtgattattattacataataaactcttggatggatamwwwmaaaaaaaaaaaaaaaaaaaaaaaaaaaa

SEQ ID NO: 1818 - DNA, 680 bp, Canis familiaris
tgaccgtcagtcgcctggagacgccattcaacctgttttgacctccatagaagacmtccggrmccgatccagcctccggactctagcytagkccgcggggacggataacaatttcacacaggaaacagctatgaccattaggcctatttaggtgacactatagaacaagtttgtacaaaaaagcaggctggtaccggtccggaattcccgggataattaatcccttcattaacaggagaaatgccaatacatttatatctccgcaacagagatggagagctaaagcccaggagaggatcagagaaaccaccaagcccgcctatgagctcaaccgggaagcctgtgatgacttcaagctttgcgaacgctacgccatggtttatggatacaatgctgcctacaatcgctatttccggcatcgccgaggaggcaaatgagattgaaaaaagtctctttccttccagagcctggtgcctggttttgtattcctttacagtagcatcatcgaactacataaacacatacaaattgcttatttcttaaatgttcttgtctggctgttgccctccttcctgccccccagatcaataagcagtgaaagtgcaatgtggtgaaaggtcaaaagagaattaagatgtgtgattattattacataataaactcttggatggataaaaaaa

SEQ ID NO: 1819 - DNA, 693 bp, Canis familiaris
cacaaggttgtacaaaaaacaggctggtaccgtccggaattcccgggatgcaacaagccagtgagaccacccmcrggaycacggagagaccatgaagagcctgctccttctctccattctggctgccttggccgtggcagctttgttgctacgaatctcatgraagtatggaatcctatgraattaatcccttcaktaacacggagaaatgcccatacakkkawatctccgcmacagagatggagagctaaagcccaggagaggatcagagaaaccmccmagcccgcctatgagctcaaccgggaagcctgtgatgacttcaagctttgcgaacgctacgccatggtttatggatacaatgctgcctacmatcgctatttccggcatcgccgaggaggcmaatgagattgaaaaaagtctctttccttccagagcctggtgcctggttttgtattcctttacagtagcatcatcgaactacataaacacatacaaattgcttatttcttaaatgttcttgtctggctgttgccctccttcctgccccccagatcaataagcagtgaaaatgcaatgtggtgaaaggtcaaaagagaattaagatgtgtgattattattacataataaacttcttggatggatamwwwmmaaaaaaaaaaaaaaaaaaaaaaaaaaaaaaaaaaaaaaaaaaaa

SEQ ID NO: 1820 - DNA, 702 bp, Canis familiaris
agctagaccataggctattagggacactatagacaagttgtacaaaagcaggctggtaccggttccggattccgggatctgctactgcacaagccagtgagaccmacccacagaccacggagagaccmtgaagagcctgctccttctctccmttctggctgccttggccgtggcagctttgtgctacgaatctcatgaaagtatggaatcctatgaaattaatcccttcattaacaggagaaatgccmatacatttatatctccgcaacagagatggagagctaaagcccaggagaggatcagagaaaccmccaagcccgcctatgagctcaaccgggaagcctgtgatgacttcaagctttgcgaacgctacgccmtggtttatggatacmatgctgcctacmatcgctatttccggcatcgccgaggaggcmaatgagattgaaaaaagtctctttccttccagagcctggtgcctggttttgtattcctttacmgtagcatcatcgaactacataaacacatacmaattgcttatttcttaaatgttcttgtctggctgttgccctccttcctgccccccagatcaataagcagtgaaaatgcmatgtggtgaaaggtcaaaagagaattaagatgtgtgattattattacataataaactcttggatggatamwwwmmaaaaaaaaaaaaaaaaaaaa

SEQ ID NO: 1821 - DNA, 699 bp, Canis familiaris
attaaggacacatagacaagttgacaaaaagcagctggtacggtccggattcccgggatcagcctacagagcctctctcccctcgctgctgcacaagccagtgagaccaacccacaggaccacggagagaccatgaagagcctgctccttctctccattctggctgccttggccgtggcagctttgtgctacgaatctcatgaaagtatggaatcctatgaaattaatcccttcattaacaggagaaatgccmatacatttatatctccgcaacagagatggagatgctaaagcccaggagaggatcagagaaaccaccaagcccgcctatgagctcaaccgggaagcctgtgatgacttcaagctttgcgaacgctacgccatggtttatggatacacatgctgcctacaatcgctatttccggcatcgccgaggaggcacaatgagacttgaaaaaagtctctttccttccagagcctggtgcctggttttgtattcctttacagtagcatcatcgaactacatacaacacatacaaattgcttatttcttaaatgttcttgtctggctgttgccctccttcctgccccccagatcaataagcagtgaaagtgcaatgtggtgaaaggtccaaagagaattaagatgtgtgattattattacataataaactcttggatggatactttcaaaaaaaa

SEQ ID NO: 1822 - DNA, 725 bp, Canis familiaris
gtgtgaaatacaagagattaaaggagttctgttaaaaagagattgttataaaaaaagggcggctccctctgctgctgcacaagccagtgagaccaacccacaggaccacggagagaccatgaagagcctgctccttctctccattctggctgccttggccgtggcagctttgtgctacgaatctcatgaaagtatggaatcctatgaaattaatcccttcattmacaggagaaatgccaatacactttatatctccgctaacagagatggagagctaaagcccaggagaggatcagagaaaccaccaagcccgcctatgagctcaaccgggaagcctgtgatgacttcaagctttgcgmacgctacgccatggtttatggatacaatgtctgcctacaatcgctatttccggcatcgcccgaggaggcaaatgagattgagaaaaagtctcgtttccttccagagcctggtcgccatggttttgtattcctttacagtagcatcagtcgaactacataaacacatacaaattgcattagtttctttagaatgttcattgtctaggctgttgccctccttcgctgccccccagatcaatacagtcagtgaaartgcaatgtggtgaaaggtcaaaagagaattaagatgtgtgattattattacattaataaactcttggatggatacttwmarawmaacatctaaacacaaaaacaaaaaaaaaa

SEQ ID NO: 1823 - DNA, 624 bp, Canis familiaris
tgagagcctgctccttcgtctccattctggctgccttggccgtggcacgctttgtgctacgaatctcatgaaagtatggratcctatgraattaatcccytcaktwacacggagaaatgcccatacmtttatatctccgccacmgagatggagagcttaagcccacggagaggatcmtgagraaccccccagcccgcctatgagctcaaccgggragcctgtgatgacttcaagctttgcgaacgctacgccactggtttatggataccatgctgcctaccatcgctatttccggcattcgccgaggaggccaatgagattgagaaaaagtctctttccttccacgagcctggtgcctggttttgtattcctcttacaacgtagcatcatcgagactacataaacacatacacaattgcttatttyttaaatgttcttgtctggctgttgccctccttcctgccccccacgatcacataagcacgtgggaaatgcaacatgtggtgaaaggtccaaagagaattaagatgtgtgattattattaccataataaactcttggatggataaaaaaaaaaaaaaaaaaaaaaaaaaaaaaaaaaaaaaaaaaaaaaaaaaaaaaaaa

SEQ ID NO: 1824 - DNA, 756 bp, Canis familiaris
ttactagccggcgaacattcacacagacagctagtcattagctattaggacactatagacaagttgtacaaaaagcaggcctgtaccgtccgaattcccggatctgcacaagccagtgagaccmacccacaggrcchcssagagaccatgargagcctgctccttctstccawkctggctgcbhkggccgtgkcagctttgtgctwcgaatytcatkraagtatggaatcctatgrraktdatcccktcaktaacaggagaaatgccvakacakkkadatctccgcaacagagatggagagctaaagcscaggagaggatcagagaaaccmccaagcccgcctatgagctcwaccgggaagcctgtgatgacttcaagctttgcgaacgctacgccatggtttatggatacmatgctgcctacmatcgctatttccggcatcgccgaggaggcaaatgagatkgaaaaaagtctctttccttccagagcctggtgcctggttttgtattcctttacagtagcatcatcgaactacatawacacatacmaattgcttatttcttaaatgttcttgtctggctgttgccctccttcctgccccccagatcaataagcagtgaaartgcaatgtggtgaaaggtcmaaagagaattaagatgtgtgattattattacataataaactcttggatggatamwwwmmaaaaaawaaaaaaaaaaaaaaaraaaaaaaaarraaaaaaaaaaaaaaaaaaaa

SEQ ID NO: 1825 - DNA, 740 bp, Canis familiaris
ctatttagggacactatagaacaagttgstacaaaaagcagsctggtaccggtccggrattcccgggatctcccstctgywsckgcacwavccmgtgagaccwacccacaggwsymyggagagaccwtgwagagcmtgctccbtctckccattctggctgchttkkccktggcagctttgtgctwcgwatctcatgramgtatggratcctatgraaktaatcccttcattrwcaggrgdratgccvrtacabttatatctccgchacagagatggagagctwwagyccaggagaggatcagagwdmcyhcchagcccgcctatgagctcaaccgggaagcctgtgatgacttcaagckttgcgaacgstacgccmtggkttatggawacmatgctgcctacmatcgctatttccggcatcsycgaggaggcmaatgagattgaaaaaagtctctktccttccagagcctggtgcctggttttgtattcctktacagtagcatcatcgdactacataaacacatachaattgcttatttcttaaatgttcttgtctggctgttgccctccytcctgccccccagatcmataagcagtgaaartgcmawgtggtgaaaggtcmaaagagaattaagatgtgtgattattattacataataaactyttggatggatamwwwhmaawawaaaaaaaaaaamaaaaaaaaaaaaaaaaaaaaaaaaaaaaaaaaaaaaaaaaaa

SEQ ID NO: 1826 - DNA, 720 bp, Canis familiaris
ggacacaagacaaggtgacaagaagcaggcgtaccggtccggawtycccggatctctcccctcgctrctgcacaagccwgtgagaccaacccacaggacchcggagagaccmtgwagagcctgctccttctytccadtstggctgccttggccgtggcagctttgtgctacgaatctcatgaaagtatggaatcctatgaaaktaatcccttcattwacaggagaaatgccmatacakttatatctccgcmwcagagatggagagctaaagcccaggagaggatcagagwaacchccaagcccgcctatgagctcaaccgggaagcctgtgatgacttcaagctttgcgaacgytacgccatggtttatggatacmatgctgcctacmmatcgctatttccggcatcgccgaggaggcmaatgagattgaaaaaagtctctttccttccmgagcctggtgcctggttttgtattcctttacmgtrgcatcatcgaactacataaacacatacmaattgcttatttcttaaatgttcttgtctggctgttgccctccttcctgccccccmgatcmataagcmgtgaaartgcmatgtggtgaaaggtcmaaagagaattaagatgtgtgattattattacataataaactcttggatggawamwwwmmaaaaaaawaaaaaaaaaaaaaaaaaaaaaaaaaaaaaaaaaaaaaaaaaaaaa

SEQ ID NO: 1827 - DNA, 737 bp, Canis familiaris
acagctatgaccataggcctatttaggtgacactatagaacaagttggtacaaraaaagcagkctggtaccggktccggaattycccgggattgctrcygmacaagccagtgagrmcmacccacaggaccacggagagaccatgaagagcctgctccttctckccaytctggctgccttggccgtgkcagctytgtgctacgaatctcatgaaagtatggaatcctatgaaattaatcccttcattaacaggagaaatgccwatacatttatatctccgcaacagagatggagagctaaagcccaggagaggatcagagaaaccaccaagcccgcctatgagctcaaccgggaagcctgtgatgacttcaagctttgcgaacgctacgccatggtttatggatacaatgctgcctacaatcgctatttccggcatcgccgaggaggcaaatgagattgaaaaaagtctctttccttccagagcctggtgcctggttttgtattcctttacagtagcatcatcgaactacataaacacatacaaattgcttatttcttaaatgttcttgtctggctgttgccctccttcctgccccccagatcaataagcagtgaaartgcaatgtggtgaaaggtcaaaagagaattaagatgtgtgattattattacataataaactcttggatggatamdwwmmaaaaaaaaaaaaaaaaaaaaaaaaaaaaaaaaaaaaaaaaa

SEQ ID NO: 1828 - DNA, 786 bp, Canis familiaris
ccggtcgttccctccgttttacttgcccgggcggttccattacccggaccgcttgccctggcttttaggggcactatggacagagttgttcagaaaagcagctggtaccggtccggaattcccgggtctgcacagcccgttgtggaccaccccccagggccctggagagaccmgwagagccctgctccttctctccattctggctgcctkgccgtggcagctttgtgctacgaatctcatgraagtatggaatcctatgaadtdaatcccktcaktwacasgagaaatgcsmatacakttatatctccgcawcagagatggagagctwaagcccaggagaggatcagagwaaccmccwagcccgcctatgagctcaaccgggragcctgtgatgacttcaagctttgcgaacgctacgccatggtttatggatacmatgctgcctacmatcgctatttccggcatckccgaggaggcmaatgagattgraaaaagtctctttccttccagagcctggtgcctggttttgtattcctttacagtagcatcatcgaactacatawacacatacmaattgcttatttyttaaatgttcttgtctggctgttgccctccttcctgccccccagatcaataagcagtgaaartgcaatgtggtgaaaggtcmaaagagaattaagatgtgtgattattattacataataaactcttggatggatamwwwmmamaaaaaaaaaaaaaaaaaaaaaaaaaaaaaaaaaaaaaaaaaaaaaaaaaaaaaaaaaa

SEQ ID NO: 1829 - DNA, 714 bp, Canis familiaris
ggacagtagacatagccattagtgacactatagacagtttgacaaaaagcggctggtaccggtcygtmtmcygsmwcaagccagtgagacchacccacaggaccacggagagaccatgaagagcctgctccttctctccattctggctgccttggccgtggcagctttgtgctacgaatctcatgaaagtatggaatcctatgaaattaatcccttcattaacaggagaaatgccmatacatttatatctccgcaacagagatggagagctwaagcccaggagaggatcagagaaaccaccaagcccgcctatgagctcaaccgggaagcctgtgatgacttcaagctttgcgaacgctacgccatggtttatggatacaatgctgcctacmatcgctatttccggcatcgccgaggaggcaaatgagattgaaaaaagtctctttccttccagagcctggtgcctggttttgtattcctttacagtagcatcatcgaactacataaacacatacaaattgcttatttcttaaatgttcttgtctggctgttgccctccttcctgccccccagatcaataagcagtgaaartgcaatgtggtgaaaggtcaaaagagaattaagatgtgtgattattattacataataaactcttggatggatamwwwmaaaaaaaaaaaaaaaaaamaaaaaaaaaaaaaaaaaaaaaaaaaa

SEQ ID NO: 1830 - DNA, 663 bp, Canis familiaris
tagaacaagttgtamaaaawgcaggcgtggtacccggtccggwattcccgggatcasggagagaccatgaagagcctgctccttctstccattctggctgccttggccgtggcagctttgtgctacgaatctcatgaaagtatggaatcctatgaaattaatcccttcattaacaggagaaatgccaatacatttatatctccgcaacagagatggagagctaaagcccaggagaggatcagagraaccaccaagcccgcctatgagctcaaccgggaagcctgtgatgacttcaagctttgcgaacgctacgccatggtttatggatacaatgctgcctacaatcgctatttccggcatcgccgaggaggcaaatgagattgaaaaaagtctctttccttccagagcctggtgcctggttttgtattcctttacagtagcatcatcgaactacataaacacatacaaattgcttatttcttaaatgttcttgtctggctgttgccctccttcctgccccccagatcaataagcagtgaaartgcaatgtggtgaaaggtcaaaagagaattaagatgtgtgattattattacataataaactcttggatggatamwwwmmaaaaaaaaaaaaaaaaaaaaaaaaaaaaaaaaaaaaaaaaaa

SEQ ID NO: 1831 - DNA, 650 bp, Canis familiaris
tgcccacccccaggccccggggagacctgtagacctgctcctttctcgccattctggctgccttggccgtggcagctttgtgctacgaatctcattgaagtatgggatcctatgraaktratcccktcattacacggagaaatgcccatacatttatatctccgcaacagagatggagagcttaagcccaccggagtaggatcagagtgaacccccacagcccgcctatgagctcaaccgggragcctgtgatgacttcaagctttgcgaacgctacgccatggtttatggataccatgctgcctaccatcgctatttccggcatcgccgaggaggccaatgagattgaaaaaagtctctttccttccacgagcctggtgcctggttttgtattcctttacaacgtagcatcatcgaactacataacacataccaattgcttatttcttaaatgtttcttgtctggctgttgccctccttcctgccccccacgatccataagcagtgaaagtgcmatgtggtgaaaggtccaaagagaattaagatgtgtgattattattacataataaactcttggatggatactttccaaaaaaaaaaaaaaaaaaaaaaaaaaaaaaaaaaaaaaaaaaaaaaaaaaaaaaaaaaaa

SEQ ID NO: 1832 - DNA, 573 bp, Canis familiaris
cccgccgtggacatgcaacggtgcggactcggggcgtgctcccgacgcgccggcagtgggacagccccctcggtactctgaaacgctcctacgacaccgcattcgtgttcctgtcttctcccagctggtcaacccaccacccagagcaagagacgatttcccattccctgaagtcagctgactcatcctattcacgtgctagtgacagggaatgccagaactgccaacggatcccaagtgacggtacgaggacttgcatgaccgggtctattccctcaccctcctgtcacttgtgtgtcccgggggggccgggctgcgtgaatgcgtgagcacccttcgctgtgaatataaactccccgttaattccatctcccacactttcatttttctcttctgttaagttacttagaactttctaagaaactccatgaagtgaggaaacactgtttataataatacgtgggaaagaggtaaaatgttcatcccaggtggaaaatcttattggacacattttaaataaaatcatgcatacctgaaaaaaaaaaaaaaaaaaaaaaaaaaaaaaaaaaaaaa

SEQ ID NO: 1833 - DNA, 586 bp, Canis familiaris
tatctggtactatgttggggttatccattgttaatataagaagagcacccagaatttaaagaaaggaaaattgaggtgwaagaccaggtctatagttaatagggccmagcatcaaagaatctcttaagggagtgtttawawaawaagattcattgcctctgcttttgtcagcctgagtccggaattgtgcccgatggcacttctgggtcatgttttcatggccgtgtctctcaccatgacagccacaggctggtgtgtccactaacccccwgcgtggtacatctcagactgtttactctaggggtcagtgtcctgctctggtttctctcaagggtagtactggaaaaaagcmatagggagagttgctttgcagttgaggcacagccatctggatgagctgcagggctgattgagcgggttgtcaaaatcctttagcctctgcctgttgaaccagtcactcttcgtctatagaaaagctgatctggagttgcggaatgttgtgttaattctgctgtttgcttatastgaataaaaataaaaacmttgtgtggataaaaaawaaaaawaaaaaaaaaaaaaaaaaaaa

SEQ ID NO: 1834 - DNA, 665 bp, Canis familiaris
cgcatctgtgcttcaatgcccagcggctgacgctttccaagtggcccagggaacatgtgatggacatctttgtccggatcctggctcgctgcgacatcatggtgctgcaggagstggtggactcttctggcagtgctatatccctcctgcttcgagaactcaatcgatttgataactccgggttctacagcttcttgagcagccccttgctagggcgcaacacatacatggagaagtacgtgtacatctaccggtcccacaagacacaggtattggattcctacgtgtacgaggacaaggatgatctctttgcccgggagccgttcgtggcccagttcacttttcccagcaaggtccttcccagcctggtgctggtcccactgcacaccactccgaaggccgtggagaaggagctgaatgccctgtacgacgtgtttctggacgtctcccagcgctggcagagcaaggacatgatcctgcttggggacttcaacgctgactgcgcctcactgaacaaaaagcgcctggctgagctggcgctgcggaccgaggcgggcttccgctgggtgatcgccgacggggaggacaccacggtgcgggccagcacccactgcgcctacgaccgcatagtgctgcacggggagcgctgccagagtctgctcagc

SEQ ID NO: 1835 - DNA, 637 bp, Canis familiaris
ccagctcctgggacctgctgcccacgctggcgtctcttgaccggggccccgctgcccaacgtcaccttggatggtgttgatctcagccccttgctgctgggcacaggcaggagcccccggcagtctctcttcttctattcggcctatccagacgaggtccacggggtctttgctgtgcgcagtgggaagtacaaagctcacttcttcacccagggctctccccacagtgacaccacaccggaccctgcctgccacgcctccagccctctgactgcccatgagcccccactgctctttgacttgtccgaggaccctggtgagaactacaacctcctgggaggaatggctgaggtcgccccagaggcactgcaggcgctgaagcaacttcagctgctcaaggcccagtttgacgccaccgtgaccttcagccccagccagatggcccgaggcgaggatcctgccctgcagatctgctgtcagcctggctgtaccccccggccatcctgctgccactgccctgagccccaggcctgagagcactggcacgggccagccaggccctcgccccacccaggcatgtacctgagaacgctaataacaccagctggtactcawaaaaaaaaaaaaaaaaaaaaaa

SEQ ID NO: 1836 - DNA, 446 bp, Canis familiaris
ctcctgcgtcctcctctcccacgttcctgcctgctccgtgtgcctcagtctcctgccggaagacatggcsttgagcccctaagggaggctatctgaggagggcgaggggggcgcctggsgtgggttctgcccacccctaccccaagccataggggatctagccagggcttgggagaggagggagctggctctgtgacgtcgtcactcccattactgctgctgctggctggctttagccctcccgtgctccctccctctttcctactgctgtcagcgctgagtaggagggaggcscagtccccaagccctagcccccaggtctgtgttacttggtttttaaaggactggttgggataaaaccgtaaagaaataaaagtttcagtggawammarrwrmmmaaaaaaaaaaaaaaaaaaaaaaaaaaaaaaaaaaaaaaaaaaaaaagg

SEQ ID NO: 1837 - DNA, 626 bp, Canis familiaris
aacatagcacagcccggtcagctcgtcccccgccaccttgcgcagcgtcaggatcacgatggtcttgaggkcckgcaggccccagscckccatgtggaagtagctgccgtgggcctctatggcctcgtggccccacttcttgcccgccgccaggaaccaggtgagggtcagcaccacccaccacagcgagctggccatgccgaagtagtagagcaacaggaagaccagggtgcagcccgtgttctccagcccctcctggatcacgtagagcgcgcccgcctcctggtcgcaggccacgctctgggcgcccgccacggcgcggatgaggaaggccagcgagtagacgttgtagcacatggacaggaagatgatggggcgctcggggtactggaagcggtggggctccagcaggaaggtgagcactgtgaaggccgtggagaagaagcacagcgccgaccacacggcmatccagacgagcgcgaagtccttgtcgcgccgcgaccagaacacctcgacgccgggcccgcagcgcggcgcgcacgagcggctcttctccacgtactggaacttctctgggttctcgcaggtgccgcccccgccgccgccgcccgggcccgaggcrggtc

SEQ ID NO: 1838 - DNA, 684 bp, Canis familiaris
aggaccccgcgcgtccctttcttcccctgcgtcccccacttggcgagtgccaggaggtgagggggtgcaactcaacacccccccttgttctgccacagaggagtagggttgggcagaccagcctctcacccccaccccctgcgagcccccaccttgctttgtccagacacgtgtatctcgcagattttctaaggaccaccgaaaccataaacctaaaattaaaccaactaacataaaaaaccatataaacacaaaaaccaaaaatacaccaaaaaatctataaaaaaaggaattaaaaactttcagagaattactatttactttattaacttacggatttattatataaatatatattcacctagcaacatatcctcgccgcctcttgctcataatgaagacatagctgatttgctgccctcctgccagccccttactgatttctctctgttgtctgtcgttgggcatgggtctctggggaccctcctgaggtggagggtgggctgctggcctggctgcctgttagttgatgggttttgctcccttcccctccccccctttttttgagtttattctgattgattattttttttctcggtttctggataaaccacccttctggggacaggataataaaacatgtaatatttttaaaaaaaaaaaaaaaaaaaaaaaaaaaaaaaa

SEQ ID NO: 1839 - DNA, 651 bp, Canis familiaris
gaagtcactggatctgaggacttatactaccctgggacgtagatacasktttgcaaagtctgtgatcamaaacacgggcgactgttaatcagtcacgaggctcccytgacaggcggctttgcatcggagatcagctctacagttcaggaagaatgcttcctgratctagaggctcctatatcaagagtatgtgggtatgacacaccgttccctcacatttttgagccattctacatcccrgacmaatggaagtgctatgatgcccttcgraaaatgatcmactattgaccgtattgaaaaactggaagattgtgactagatacggraatatttttctgaaaaaaaaaatttttttttatttcctcagacttctctcttcttgaaaatagagtttttatgaactgaaccacccttggatattggctgaaaattttaaattaattattgtattaacacatatgaattgatgatttccacttaagagtgtctcagattaactttttaaaatgtttcacttggtagtcctataaattccatttaattacatctgtaaatattgggtgtgggatagtattcaataaagccaaaatcagattggcmwmmaaaaaaaaaaaaaaaaaaaaaaaaaaaaaaaaaaaaaaaaaaaaaaaa

SEQ ID NO: 1840 - DNA, 532 bp, Canis familiaris
tcacctgggtccttcctgataacctcacagagattcagagcacattcaaagtatgacatttgcaaaccatttctctcttgtgactccttagcctggagaacaatctactgagaggggagccattttgaaattaagactttccttccaagccctgcctcctggttgtgtggtcttggcagagtgatgcgagcactccgtcttgggttggctaaccacgaagtggggatgatgacctctgcctcacaagcttactttaactagtcaaggacttagtagagcagctcggggagtgcctggcactcagcagatgcttaataaatgagagccagcattattgttacagtatttcttcaatggcaagacatatttgttcacattttaaagattctgaaatcaggatatgtcttcaaattgatgggtccattaatgtagtatttttttctctctcaaaaagctgtttttaatctgttgtacaccttacaattaaaggcatcttggaaacaarrwmawaaatctttaaaaaaaaaaaaaa

SEQ ID NO: 1841 - DNA, 909 bp, Canis familiaris
  misc_feature (14)..(14): n comprises a, c, g, or t, or includes no nucleotide
  misc_feature (366)..(366): n comprises a, c, g, or t, or includes no nucleotide
  misc_feature (369)..(369): n comprises a, c, g, or t, or includes no nucleotide
atcagaaattctgngagcaatataacctagaaactcttagtctgatgcccaatctgttccaacccagtcatagcattttgctagcccataaacctttctgagtcattgcatcccctggtgggacctgcatcctgtctgccacatcagaacatggatatctcagaaatgttctgatttaactttgttttcttcatgaccctctkcctccaccmtatkacacmcsybgattktgrarawgcysggtccagtccygwaaggrwatgatwwmhcaggawattkggtcmawwtgtagtcccmgrakkacmykactatkkstgacttgaataggtwacmcwwdrscvwmytgtatgggdaaatwaagtwgrnwwnhratatktttacttkkycsbtgctttagtatcctkatcctcctagatgraattgaggbttgatattadatawgtcmrtttccytkacatactttatgtacttawawawgtgtwwacmmgcatatattgaagtctattaggggcmatctacctttggagsttkaacmttggatttaaakaatattattttggagtcawacatcwatscvataktttrttctgtsmaatgctatttccmttaaatagttkaactagattgtatdaaataactttattgcctaacmtgarattachaagcttaggcataggggmmatgggcttttyagaagccmggrattctaagtatattctgttcttcmaatwaawgtcattttcttctttaaatattgmawawrwwwwahraammatatctttctttgcmaactcgaattacatgtgcttggaattaagttttagtttttytcmctgcamamtaataaagcctgagttctgatcramvwrradrdaaaaaaaaaaaaaraaaaaaaaaaaaaaaaaaaaa

SEQ ID NO: 1842 - DNA, 802 bp, Canis familiaris
  misc_feature (121)..(121): n comprises a, c, g, or t, or includes no nucleotide
taccgtcagcttgctacctaactcgatctgcatcctgggaccgcatcgtcgcacatcgaacaggatatctcgaatgttctgattacttgtttctcagacctctcctccaccatatacatanctgattttgaaatgcccggtccagtcctgaaagggaatgataaacaggatatttggtcatttgtagtcccagaattacattactatttctgacttgaataggtwacactwargcwaactgtatgggaaaataaagtaggaaaaratatgtttacgtttkcccbtgctsttagtatccttatcctcctagatgaaattgagggttgatattatatatgtcmgtttccttkacatactttatgtacttatatatgtgtawacaagcatatattgaagtctattaggggcmatctacctttggaggttgaacattggatttaaataatattattttggagtcatacatctatgcaatattktattctgtcmaatgctatttccattaaatagtttaactagattgtataaaataactttattgcctaacatgaaattacaagcttaggcataggggaaatgggctttttagaagccaggaattctaagtatattctgttcttcaaataaatgtcattttcttctttaaatattgaatawgttttaygaacmaatatctttctttgcmaactcgaattacatgtgcttggaattaagttttagtttttttcactgcaccaataataaagcctgagttctgatcgamrwrrawrwaaaaaaaaaaaaaaaawaataaataaaaata

SEQ ID NO: 1843 - DNA, 699 bp, Canis familiaris
tcattgcattcccctgtgggacacgcatcctgtctgccacatcagaacatggatatctcagaaatgttctgatttarctktgttttcttcatgaccctcttcctccaccatatacacacsctgattktgaaaatgcccggtccagtcctgaaagggaatgatawaacmggatatttggtcmawttgtagtcccmgrattacattactatttctgacttgaataggtwacactaaagcmaactgtatgggaaaataaagtaggraaaaaawawgtttacktttcccttgctttagtatccttatcctcctagatgaaattgagggttgatattawatawgtcagtttcctttacatactttatgtacttawatatgtgtaaacaagcatatattgaagtctattaggggcmatctacctttggaggttgaacattggatttaaataatattattttggagtcatacatctatgcmatattttattctgtcaaatgctatttccattaaatagtttaactagattgtataaaataactttattgcctaacatgaaattacmaagcttaggcataggggaaatgggctttttagaagccaggaattctaagtatattctgttyttcaaataaawgtcattttyttctttwaawawwraaaaaaaaaaaaaaaaaaraaaaaaaaaaaaaaaaaaaaaaaaaa

SEQ ID NO: 1844 - DNA, 710 bp, Canis familiaris
aagaccgtttcccccaaagacagcccggagttggaaaggcccgggtcagtccgaaagggatgataaacaggatatttggtcaattgtaagtccccagaatacagtactagtttctgaccttgaaaggtaacacttaagcaaactgtatgggaaataaagtagggaaaaaatagtggtaactgtgtcccgtgcgttagtaatcctgtatcgctgcctagagtgaaattgagggttgatataatatatgtcagtttcctgtgacatacgttatggacgttataaatgtgtaaacaagcatatattgaagtctattaggggcaatctacctttggaggttgaacattggatttaaataatattattttggagtcaaacatctatgcaatattttattctgtcaaatgctatttccmttaaatagtttaactagattgtataaaataactttattgcctaacatgaaattacmaagcttaggcataggggaaatgggctttttagaagccaggattctaagtatattctttcttcaaataaatgtcattttcttctttaaatattgaataagttttatgaacaatatctttctttgcaaactcgaattacatgtgcttgggattaagttttagtttttttcactgcaccaataataaagcctgagttctgatcgaaaaaaaaaaaaaaaaaaaaaaaaaaaaaaaaaaaaaaaa

SEQ ID NO: 1845 - DNA, 741 bp, Canis familiaris
gtggcaaatcggaacggaattccagaaggtggataaactgtttttcagacgctcgtccggcacagaaaaacccccggagtttgaaatgcgcgggtccagttctgaaaggggaatgataaaacagggatatggggccaattgtagtcccaggaatacagtaacgatttcggacttgaataggtaacactaaacgcaaactgtatggggaaaataaagtagggaaaaaaaaggtgaactgtccctgcgttagtatccctaatccctcgctagatgaaattgaggggtgaaaataaaaaatgtcagtttcctgtacaaaactgtatgtacttaaatatggtaaaacaagcatatattgaagtctattaggggcaatcaacctttggaggttgaacattggatttaaataatattattttggagtcatacatctatgcmatattttattctgtcmaatgctgatttccacttaaatagtttaactagattgtataaaataactttattgcctaacatgaaattacmaagcttaggcataggggaaatgggctttttagaagccaggaattctaagtatattctgttcttcaaataaatgtcattttcttctttaaatattgaatatgttttatgaacaatatctttctttgcaaactcgaattacatgtgcttggaattaagttttagtttttttcactgcacaaataataaagcctgagttctgatcgaaaaaaaaaaaaaaaa

SEQ ID NO: 1846 - DNA, 590 bp, Canis familiaris
tgacgttgaatagggttacacctaatggccaactgtaatggggaatatataagtatgggagaaatatgtgtacggtgttccctgctttagtatccttatcctcctagatgtaattgagggttgatattatatatgtccgtttcccttacatagctttatgtacttatatatgtgtaaaccagcatatattgaagtctattaggggccatctacccttggaggttgaaccttggatttaaataatattattttggagtcatacatctatgccatattttattctgtccaatgctatttcccttaaatagtttaactagattgtataaaataactttattgcctacactgaaattaccaagcttaggcataggggaaatgggctttttagaagcccggaattctaagtatattctgttcttccaataaatgtcattttcttctttaaatattgaatatgttttatgagaccatatctttctttgccaactcgaattacatgtgcttggaattaagttttagtttttttccctgcaccataataaagcctgagytctgatcgaaaaaaaaaaaaaaaaaaaaaaaaaaaaaaa

SEQ ID NO: 1847 - DNA, 663 bp, Canis familiaris
  misc_feature (12)..(12): n comprises a, c, g, or t, or includes no nucleotide
catatacacacnggattttgacatgcccggtccagtcctgaaagcggatgataaaacagatatttggtcatttgtagtcccacgaattacattacatttctgactttgaataggtaacacctaaagcaaactgtatgggaaaataaagtaggawamaatatgtttacttttccctgctttagtatcctgtatcctcctagatgaaattgagggttgatatttatatatgtcagtttcctttacatacttttatgtacttatatatgtgtaaacacagcatatattgaagtctattatggggcacatctacctttggagtgttgaacacttggatttaaataatattattttggagtcatacatctatgcaatattttattctgtcaaatgctatttccattaaatagtgttaactagattgtataawataactttattgcctwacatgagaattaccaagcttaggcataggggaaatgggctttttagaagccaggaattctaagtatattctgttcttcaaataaatgtcattttcttctttaaatattgaatawgttttatgaacaatatctttctttgcaaactcgaattacatgtgcttggaattaagttttagtttttttcactgcacmataataaagcctgagttctgatcgaaaa

SEQ ID NO: 1848 - DNA, 652 bp, Canis familiaris
gacacctgccctcaggctggtttaatcacagtgatgcaggagagggagtgagtagactctttaggccaagaactggacacattcagtcttctcggtgttctgccttcttctccttgctcgccctccccctgccccggtcgtcgttcttcttcttcgtcttcgtcttcttcttcttcttcttcttcttcttcgtcgtctttttcttctttcttcttcttcttcttcttcttcttcttcttcttcttcttcttcttcttcttcttcttcttcttcttctttccttttaatgtaaggattagaaagaactgatgtgggtgcctataggcttattttgaataatacaacaaacctgaatgcacttctggcatatgaaatrcccacatgtgtgtgatgtcatcatgtaatcatggcattctgccccatgcgtgtcctctatcttttctagtccagcaagtttctataactttagcaagtttgtgggatccctgggtggcgcagcggtttggcrcctgcctttggcccagggcgtgatcctggagacccgggatcgaatcccacgtcgggctcccrgtgcatggagcctgcttctccctttgcctgtgtctctgcctctctctctctctctgtgtgactatcataaaaaaaaaaaaaa

SEQ ID NO: 1849 - DNA, 607 bp, Canis familiaris
aactgaaggggtaacattctaacaagtagctgtattaagagctctgcacagttaagaggcatctttatcacaaaggcagacagcacacaactaggaagagctgaaatgctattgattttattttttccgagagttgctaattttctgcatttctcttaaggggtttagccataaatgtgccaaaaaaattatcttgctctatccaaaaatgaaggggataatatgtggtaaattatgttctgatatcctccttcagcagttaaaactgaactgacacagcmatttgagtgttttcttctgatccccgtagtggaccgatgttcccgtkttgatcatcatgttatattattctcctcttctcactttattgttagacaatgagtaatatactagctttgtgatccctgtagcaacttaaaggaaaaggccactttggtctggggtaacccagcaactcctgcagcacaggcggggtcgggggccaccctctcaggaatgaggggagctgattctctgagaaacaagaaacaatgcatttttttccatgwacggtgctgttctgaagtcttcaaattttcccctctmatagaaagcagtatacatttac

SEQ ID NO: 1850 - DNA, 938 bp, Canis familiaris
tgacacccccaccccgcagagaaggaaaggtcatgagtcaggtgcacttggcccatcgtcaggctgcagacgggatttttccaagcagggctgtgccagtcgctcctggtcctgctccttcaccctctgtctcccccgatgagaccagcagggaccctcgcacagcagagggcaggtgagatgagacccaggtgaggtgcacgtctgtctgcaccccccgggcctgctcactgcaacccgtgagaacagcagtggaggaagggggtgcagagaggcctgtgcagaggtgtgtgtgtacgcacacctacgatatgcgtgcatcacgtgttctctccccacccaagacaggaaggacccctcagtgaaaccgttgacttgccgacttgccgtgtttttgccmaaaccaagattgcgaaggacacctccacctccagcggcggggcggggggcgaggggcggcctccccggccgggtggactcgctttccttctctgtagccagaccttgaaaaaattgtgactttcactgggatctgttccgcagtggccttttgctatgtgcctcctgagaaattcgtctttttgtataaataacamagttgaaaatgtatttcctgaaataaatgtccgaaagcaaammwggaaggggggatgtgttcctcttcctggccccggaggcgcggccttccttgcagaggaagccggcaccggggtgcttgctgggtgtggccgggctgtttaatggtggcggggacgccggtttcggggaatccagaagcactcgtttctctggaaagccaagggcagagctttcctaatttattcactgaaggaggcttgggagggtttcccacggggaggcgctgccagctgcttctgttcctatattgttggaaataaagtttttcttcttaaaaaaaaaaaaaaaaaaaaaaaaaa

SEQ ID NO: 1851 - DNA, 643 bp, Canis familiaris
ctgaatttaaaaaatgcagatttggtcagggtgggagtcagacattcttgacctgcaagtaaaaacctctgaggaaaggatttttttcctttagaaatggcatccaaggggtagaatttgaatgtgacattattaaataaaaagcagagccaaggtttaactaggaaaggggtgtgtgtgtgtctgtctttttctcatcatttctccccacccccaccctcgcccataactataactgttgctgcgggctttaattttggaaagcaacttgctacttcaaccccgtggtataaagtattataaattttagttattttgcmaaatccgtctactgtattattgctaaatattttgttacttgtactaagggacmattttaagaccmtggttttgcttgtttttttatgtttttttttacatgtatcatatggttctgcacagagggtaatattggtgatttgccmaagagaagcmatacmgtatatctgcttttgccttctgtttttttgtcttacctgcagatattaagaatgtatgcattatgtaaaatgcttgattatatatatttttgagttttttaattaaagacttgtgaaaaaccacmcaaaaaaaawaaaaaaaaaaaaaaaaaaaaaaaaaaaaa

SEQ ID NO: 1852 - DNA, 787 bp, Canis familiaris
aaaacacattaaactggagacggtgctgagcggcgcctgcctctacatcgagatcccaggcggcgccctgccggagggcaagcaargacagcttcgcagttcttctcgkttcgccggaggagcagctgcacgccgcccacgtcttcatttgcttccataagaaccgcgatgacagagccgccttgctccggaccttcagctttttgggctttgagattgtgagaccggggcatccccttgtccccaagagacccgacgcttgcttcatggcctacacgtttgagagagagtcttcgggagaggaggagtagtggcagtgccgcctgcggcccttgtgctctgccgccgccggagcmctggaccgcggtccctttgcctgtcgtgctttgtgcgggtggcggaccgacggctgtgctgggggcgccgacggcaggcctgctcatctctgctgggtttgtccgcatgttgtaattgtgcmaataaacgctcactccmaattagcggtatatttcttgaagtttaatattgtgtttgtgatactgaagtatttgctttaattctaaataaaagtttatattttacttttttattgctggtttaagatgattccgattgtccctgtatttggaggaggagtttcttatttgaaggctcttggaaatcttaggtctcttaccttgaaaagataggtgttaatctacccttctagtgctctgaaaactgaataaaagtgatgacacctccmaaaaaaaaaaaaaaaaaaaaaaaamaaaaaaaaaaaaaaaaa

SEQ ID NO: 1853 - DNA, 652 bp, Canis familiaris
ggaggagcattctgcacccgcccacgtcgtcattggcttccataagaccgtsygatgacagagccgccctkkctcccggaccttcasctttttggscttgagattgtgagaccggggcatccccttgtccccaagagacccgacgcttgcttcatggcctacacgtttgagagagagtcttcggragaggaggartaktgsmagtgccgcctgcggcccttgtgctctkccgccgccggagcmctggaccgcggtccctttgcctgtcgtgctttgtkcgggtgcggaccgacggctgtgctgggggcgccgacggcaggcctgctcatctctgctgggtttgtccgcatgttgtaattgtgcmaatataacgctcactccmaattagcggtatatttcttgaagtttaatattgtgtttgtgatactgaagtatttgctktaattctaaataaaagtttatattttacttttttattgctggtttaagatgattccgattgtccctgtatttggaggaggagtttcttatttgaaggctcttggaaatcttaggtctcttaccttgaaaagataggtgttaatctacccttctagtgctctgaaaactgaataaaagtgatgacacctccmaaaaaaaaaaaaaaaaaaaa

SEQ ID NO: 1854 - DNA, 592 bp, Canis familiaris
gaagagcggttytgaccgycgctgcccttctacatycgaggatcccaggcggcgccctgcccgagggcagcaaggacagcttckcagttcttctcgagttckcggaggagcagctgcacgccgcccacgtcttcatttgcttccataagaacctgcgatgacagagtccgccttgctccggaccttcagctttttgggctttgagattgtgagaccggggcatccccttgtccccaagagacccgacgcttgcttcatggcctacacgtttgagagagagtcttcgggagaggaggagtagtggcagtgccgcctgcggcccttgtgctctgccgccgccggagccctggaccgcggtccctttgcctgtcgtgctttgtgcgggtggcggaccgacgkctgtgtctgggggcgccgacggcaggcctgctcatctctgctgggtttgtccgcatgttgtaattgtgcaaataaacgctcactccaaattagcggtatatttcttgaagtttaatattgtgtttgtgatactgaagtatttgctttaattctaaataaaagtttatattttacttttttaaaaaaaaaaaaa

SEQ ID NO: 1855 - DNA, 660 bp, Canis familiaris
tatattgtaggtcaacagtgtgtaaagtgaaaggttttaacattcacatgtgtgggagtcttgtcattaaggtgtgtgtaatttaaagtccagttgttttctcctaactagactgcacttgttttcataatagtaaratgctttgcaaattataccttgcataagtcctcattctaccacatgttaactaatcctctagctgattaatgcaagacactaatggggggattttatttataagggctctagaatataatacaagttattcacaccagcatcatctgttactaattctaaactagttagtgcagcttttctttgtgttgtggttggtctcataactaggttgagtttttctcwaccaagagggaaacaatgccgaagttcttttccttgtggagtttgtattataataacccttagagtaaacttgctgtgggggaggggcacacaactccagctttttttgaacctctgcgggttaacatggtgtcgggttaggttacatctgatacatggtcctgggaaaaatcactttatagagatggcctttccaagtggttttaaaaattatccttctattgaagtcttctaggtcaattatgtatgttgactaaatttaccaaataaacttgtttattcaamwaaaaaaaaaaaaaa

SEQ ID NO: 1856 - DNA, 592 bp, Canis familiaris
cagttggttttctcctaacttagctgcacgtggttggtcagtaaatagttaaaatgcttgtgcagatgtatagccttgcataagtcctcattgctaccagagtgtgtaactaatcctgctagctgattaatgcctacactaatggggggattttatttataagggctctagaatataatacaagttattcacaccagcatcatctgttactaattctaaactagttagtgcagcttttctttgtgttgtggttggtctcataactaggttgagtttttctctaccaagagggaaacaatgccgaagttcttttccttgtggagtttgtattataataacccttagagtaaacttgctgtgggggaggggcacacaactccagctttttttgaacctctgcgggttaacataggtgtcgggttaggttacattctgatacatggtcctgggaaaaatcactttatagagatggcctttccaagtggttttaaaaattatccttctagttgaagtcttctaggtcaattatgtatgttgactaaatttacaaataaacttgtttattcaactaaaaaaaaaaaaaaaaaaaaaa

SEQ ID NO: 1857 - DNA, 663 bp, Canis familiaris
  misc_feature (47)..(47): n comprises a, c, g, or t, or includes no nucleotide
cctgcacggttggagtgtggggcacagagacgcatgagctcttcccnttctctgtcctgaccagagagctgccaccatgtctcctgtccttggggccatcctcctcctaatccagagatgttctgatccccctttgacctccattctctgtgcccgaggatgtccgtgttctctctgggtgagcatcttagcctacttttataaccttcagtttgggagagaaacctggtcagtgaatcttcagagggattggtctgacaagggtagatgagtcctttgagaatctgggccttccttttcctatagttgctgtgtctgctcaggcattggtggtcatggcagccaggtgacaccaggtgagtttctgatcttatccatggggtgtcacactgtgcctagaggcaagcagcagagtttggaagggaagttatgaccaagtgaaaacactgataatgctctttatctgtgatagtggacctattggttatttcattcatctatacaaataaggacagataaattcgagctatacccatcattcattatgttcagaaattttaaagtgattatgaaaggctttactaatcatgattcatttttatttgtatttttctgcttattagactaatatatgctcattgaaaaaaaaaaaaaaaaaaaaaa

SEQ ID NO: 1858 - DNA, 707 bp, Canis familiaris
ccagttgtagatgatctgccctgcggctgccgtgccggtagttgtacaggatgatgtamytgtygccgccgtagaactgcccgtacgtggaggggtccaccggcactwtgctggagcyttcgattctccagatctgtttctggcctcggccgtcgtcatccatgccgtgctgcgccgccatggccgtggacgtgtgcagggtggcggcgtcgaagggcacgcgctccacgtgggcgatgtggctggacaggtagccaaggcccgggccgtccgtctggtcggggtcccgccagttcttgaagaactgcttgaacagcggggtctcgccgccctcgggaagcacggacacctgggtgtgcttggggtagtccatccgggtgatgaagtccgaggccgtgctgagggcggccctcctctcctccgtgttggcctgcctgcctttccagacgaagattttcccgtctctgccatggtccaggatgaagcagtcctctgacctcaaggccccctgggcgaaggggttctcatcagccacgagggagacggacatggttccagcgccgttggagaccttgtagagcttggccagcttgcgrttggccgcgtcctccttggctgtgtcctccgcgcccgcrggcagagccggcttggggcccagcacctggagcatcgcctcrggctcggcgccctcctccgacacgtgcacc

SEQ ID NO: 1859 - DNA, 708 bp, Canis familiaris
gagaccckgacaaaamaaagtatctggtgcyktctggatctcacagttggtcagwtctacttyttgatccggaagcgaaktcatctccgagctgaggatgcytgttkttctttgtmaacaacgtcaktccacccaccagtgccacmatgggtcagctataccaggdacaccacgragaagacttctktctakacatcgcctacagtgatgaaagcgtctacgktctgtgaagctgctgchcctgacktggggggggktcckgttctacawagacagaggtggcccccatcctcgacctactccttctttgggctcatccctcacctccctttgttgggacctgcacttcctaatgtttgaggctctcctccagcccttctcagcaggagggctcatgggggaggtggcttcttggacctstcckttctccccktcctcttcgacctttcccactctgctctagacttcttgattgtccgtctctgtcacatccggtgattgttttggtttctgttccctaactgcccaaggggctcagaaccccaacattcccttcctctcatkaccttcatttttgggggtagagggaagggactgaaattgttggggggaaggcaggaggcacatcaataaagaggaaaccaccmarmwraamwrraaaaaaaaaaaaaaaaaaraaaaaaaaaaaaaaaaaaaaaaaaaaaaaaa

SEQ ID NO: 1860 - DNA, 620 bp, Canis familiaris
  misc_feature (60)..(60): n comprises a, c, g, or t, or includes no nucleotide
tggatgtaacgttataaaaatcccaatgccggatagtaattttgtttacttttttaaccncactgaattttttgaaagactattgcaggtgtttaaaagatagaaaagtcgttttatctaatactgtaagtagttgtcaatattctggaaaatttaatagttttagagttaagataactcctctccctggttagggaagaagaaagcccttcacccctgtggaatgatgccctggctttaaggtctagctctacatcatgcttcttttgagaattatatttggtagcccatattaccagaaattgattagttgtccagtttgccaggtagatttagcacagcgctcatcactctggatagattgagatgttctttcacmacagatgaatgatctgtaacmctgtaagatactgatctttacmactgtttaatccagttttatttttgtaccagtattagtgacctaagttattttgctgtcccgtttttgtaaatcmaatgaaattataaaagaggattctgacmgtaggtattttgtacatatgtatatatgttgtccmaataaaagtaataaatgammaararwraaaaaaaaaaaaaaaaaaaaaaaaaaaaaaaaa

SEQ ID NO: 1861 - DNA, 602 bp, Canis familiaris
gccagcacaccctctgcttattctatgcccacgcctgtcaatgttctgcccccacggctagccaccactctgctatggctgcccacacgctagggccccgtctaggctgcacccacagcagcacgcaggcccgcagccaccacgccaggccggcaagggctggcgcaacacgcttgaccccagctgagcaagcgagccgtggccaaggcccatggggccggaaaaaccgcacatgcaagacgggagcakctgagccccagccactacagcgagcagcagcagcactcgccgcatgcagatcgcctacagccccttcagcctcccgcactacagcccgtcctacccgcccatcacccgctcgcagtacgactacactgaccaccagaactccggctcctactacagccacgcggcgggccagggctccagcctctactccacccttcacactacactagtgaacccgcgcgacagaggcccatgwacacccccatcgccgacacctccggggtcccctccatcccgcagacgcacagcccccagcactgggaacagcctgtctacacacagctcaccaggcccttgaggaggccttgcaccaa

SEQ ID NO: 1862 - DNA, 720 bp, Canis familiaris
cagtactgtgatgtgagatccccagcccgtaaggatggtttaccatttgccgtcatttctgggagaagcctgggaataaagtctaagatktacacgcgcacaccaaccttatatttggacttcaaawtgggaccaaggagccaagcattcccagcctattcctaaaggatggacaagcttcatttataccatatctggaaatgtgtatattgggcctgatgatgcgcaaccawaaatagaacctcatcacacagcagtgctgggggaaggtgacagtgtccaggtggagaacaaggatcctgagagaagccaccttcgtgctaattgctggggagccattaagagaaccggttgtccaacacggtccatttgtgatgaacaccmacgaagagatttctcaggctattctkgatttcagaaatgcgaaaaatgggtttgaaagagcccaaacctggaaatcaaagattggaaactagagcacaagaacagatctcatgctttttagagttttgccmgttgtggcatcgtccattcagcacmttgagtttccmaagctgactgagccggtgcttccmaagcattccacactaaagtgataacatgtgataacgtgcatttgtagcaaggcacatgagatatttcctggtgcgtgcaaataaacctaattgttgcttctttaaaaaaaaaaaaaaaaaaaaaaaaaaaaaaaaaaaaaaaaaa

SEQ ID NO: 1863 - DNA, 688 bp, Canis familiaris
tcacaacccagctgagccggcggtgcgcgagctggccggcgttgcgcgacctccccgagcgagacccgttccgcgtgcgcgcctcgscgcgctgctggacaagctgtacgccctcggcctggtgcccacgcgcggctcgctcgcgctctgcgactcggtcaccgcctcggccttctgccgccgccgcctgcccaccgtgctgctgaagctgcgcatggcgcagcacctccaggccgccgtggccttcgtggagcagggccacgtgcgcgtgggccccgacgtggtcaccgaccccgccttcctcgtcacgcgcagcatggaggacttcgtcacctgggtggactcgtcccggatccggcgccacgtgctggagtacamsgaggagcgcgacgacttcgacctggaggcctagcgccgtccctccccggggcgccgcccgccgacgccttcccgttgctcgaccccttttgattcgagtactcgctcttgttcggggttaagcggcgcacggaccctggagaattcgagctcgagtttgcacagatgcggggcgagggcgggcatgggttagtgcgctgtgcgccctcgcgcgcggagaggagccgtcccaatgccagtaaaggggccagccgctcggagcgtgmaaawaaaawaawarwaaaawaarawawaaaaaaaaaaaaaaagg

SEQ ID NO: 1864 - DNA, 571 bp, Canis familiaris
tctaatgtccagatattttttcttttttatagtgtgtaacgccgtattctggaaagtttttctaagactattgtaagaactgaaggagtcctgcatctttttttttcttatctgcttctgtttacaaaagcccacattcctctgcttcataggtgttctgcatttgaggtgtagtgtaatctttgctgttcaccacgatgtaatgttttagttccttacyatcaskggtgggsgggggaagggcgtgcmaaaactaatcacttgaaatgtttgagaacagcagcagagtgagtgaattttaatttttgttcattgttggtggtttaaaagaawaattccccccatgtaattattgtgaacactttgctttgtggtcactgtaacattttggggggggtgggaccacgggaggaaaagtaacacatagtccatatgtccctggcatctattcagagcagtgtgcagaatgtaatgctcttttgtaagaaacgttttatgatttttaaaataaatttagtgaacctaaaaaaaaaaaaaaaaaaaaaaaaaaaaaaaaaaaaaaaaaaaaaaa

SEQ ID NO: 1865 - DNA, 713 bp, Canis familiaris
ccgttcagcgacaagtcctctctgcgtgggtgtagaccattctgtgggaggatactttttgccatgractctttccscagctgattagtgtctaaggaatgatcagtgctgttaccckttccstkgactattatactgcctgaagatagcagagaaagcctgtgcttcgtttaaaaaagccmaagtagagggtgtacagtcctagggaattcttctaaagtatttgttcaaaccttataggtcaccccaagtattcttttgtcatctagcagtgcaaggtactcagatatattackataatccagaattacagcttttgaggttgtacctttatcttaagggcagtagtttgacctaaaattcttatgtaagggtcattggacaagtgtcttagacgtgaaatttgagtggccctttaacatttcttttcctccttcttggtatcccaggcttgcctccaattttaggccctttagtttgcttctgcaagcagagaacacctacctgagggggctcctttccgtcatgtacagttcaagtaaagatcaagaatcttttgtataactatgaaaatttactatgtaaatgcttgatggaatctttccctgctagtgtaacttttggaaggtgctttctccatttatytaaaactacctgtgcaattaaaaarwrmawdvmaraarraaaaaaaaaaaaaaaaaaaaaaaaaaaag

SEQ ID NO: 1866 - DNA, 721 bp, Canis familiaris
cctccagcgaccatgtcctctctgcttggtgtagaccattcttgcgaggatacttttgccacatgaactctttccccagctggattagtgtctaaggaatgatcagtgctgttaccctttcccttgactattatactgcctgaagatagcagagaaagcctgtgcttcgctttaaaaaagccmaagtagagggtgtacagtcctagggaattcttctaaagtatttgttcaaaccttataggtcaccccaagtattcttttgtcatctagcagtgcaaggtactcagatatattactatgaatccagaattacagcttttgaggttgtacctttatcttaagggcagtagtttgacctaaaattcttatgtaagggtcattggacaagtgtcttagacgtgaaatttgagtggccctttaacatttcttttcctccttcttggtatcccaggcttgcctccaattttaggccctttagtttgcttctgcaagcagagaacacctacctgagggggctcctttccgtcatgtacagttcaagtaaagatcaagaatcttttgtataactatgaaaatttactatgtaaatgcttgatggaatctttccctgctagtgtaacttttggaaggtgctttctccatttatttaaaactacctgtgcaattaaaaagtgcaatgcagwrwmaaaaaaaaaaaaaaaaaaaaaaaaaaaaaaaaaaa

SEQ ID NO: 1867 - DNA, 3372 bp, Canis familiaris
gcccttcgaattatcacccccaccgaatagcccctggcaccttcccggttcaggcgcaggctccccgcaccgccctcggcatgggggaacccgaggaggtgatgcccggttcaggtgctgtgtttacatttgggaaaactcaatttgctgaaaatattcccagcaaattttggtttagaaatgatgtacctacatttctttcatgtggagatgagcatactgctgttgttacaggaaataataaactttacatgtttggcagtaacaactggggccagttgggattaggatcaaaatcaactgttagcaagccaacgtgtgtcaaagctttaaaacctgaaaaagtgaaatttgcggcctgtggaaggaaccacaccctagtttcaacagaaggaggcaaagtatatgcagctggaggaaataatgaaggacagctgggacttggtgacactgaagagagaagcacttttcatctaattagtttttttacttcccagcgtaagattaagcagctttctgctggatctaatacttcagctgcactaactgaggatggagagcttttcatgtggggtgataattctgaagggcaaattggtttagaaaatgtaaccaatgtgtgtgtccctcaacaagtgactgttggaaaacctatctcctggatctcttgtggatattaccattcagcttttgtaacaacagagggacaactgtacacatttggagaaccggagtgtggaaagttaggtcttcccaatcagctgctggtcaaccacagaatgccccagccggtacctggaattcccgggaaggtggtccaagtagcttgtggtggagggcacacagtggttcttacagagaaagccgtgtatacctttgggctgggacagtttggtcagctgggtcttggcacttttctttttgaaacctcagtgcccaaagccattgagcatattaaggatcagaaaataagttttattgcctgtggagaaaatcacacagctctgataacagatatgggtctcatgtatacttttggagatggtcgacatggaaaattaggacttggactggagaattctaccaatcagttcattcccactctgtgctctaattttttgaggtttatagttcaattggtgtcttgtggtggatgtcacacactagtttttgccactccacgacttggtgggacagaagaaatggagttaaaagaaataaacaaatcttgcttctctgcagcaacttctctgtccctcagcaatctgagctcaggaattgtactgcatcaaactctatcagcacgtgtgcggcggagagagagggaaaaatcacctgattcttttcaaatgacacgaacactacctccaattgatgggattcctatgccacctgtttgcttttcccccagtccaattcctttctatatggctgcaagtaattggtcagggaaaatgacacctgaaaaggagggcctcacgcagccagaaccagattattttcgagataacatggccaaagggaaagaaacagataattcttcggcaacagattcagaaagccttggagaaactaccgatgtcttaaacatgacacatatgatgagcctgaattccaatgacaagtccctaaaattatcaccaattgataaacaaaagaaacaagaaacaattgagaaactgaagcagcatacagctcactttggaaatgatgatagtaaaggatgtgcaagtgaagagatgtccaaaacagtgaaagaggggaaagcatataaacaacttttggcaaaaggaatatacatgacgcaagcagctatgactatggaagcattttcagatgaggacataggtaatgactcaggccagcctgggcctcgggctgacacccacgcagagggtgtgcaaagaaagatatttagttgtgaaagtaagcatggtctctatccacctgactttaaggcgatagcaaaggaaagtgatggaggccaaagtcagaaggatccagaagcagaagaaacagtctctgagaaggaaaacgagctggcggaaatggcaggtctgcaggctaggagacaaagtgaagagaatttaagaaatattaatatgttctttgacgacttaccwwatagagacgtgaatattgaggatgaagaaagtaaagattttgttaaggacagtaggaggaacaaacaagatgtgatctttgacagtgaaagagaatctatagaggagccagacagttacttggaaggtgaaagcgaaagtcagcaaggtaccactgatggcttcgagcagcctgagtcagtagaatttagtagtggagagaaagaggatgatgatgaagtggaaactgaccaaaacttgtggtatagcagaaaatttatcgaacaaggacacaaggaagagaccgaacacatactgtccaaattcatggcaaaatatgattttaagtgtgaccacttgtcagagattccagaggagcaggaaggagcagaggattcagaaggaagtggaatagaggagcaagaggtagaggcaaatgagaatgtggaggtgcctgcaggaaaagaggagaaggaaatagagatcctgtcagatgacctgacagacagagcagaggatcatgagttttcagaagatgaagaaccagaggatatggctgaggaacttgatgaagatctggaaagcaagaagaatgttccagcagatgtggccagtgacaactcccttaaaaaggacgagacaaccaaacaagaaaaacgagctatttgtgaatacaatgaaaatccaaaaggaaacatgcattatcatgcaaagagcagttcttcagaagtcctgaatgatagtgaatcaacaccaaataaagatgtgaaaaaatcaaagaagattttcctctttaaaaggatgtcattgatgagtcagaaaagtatgcagagtaataatgagccactcccagagataaaaccaataggagatcaaatagcttttaaaggcaataagaaagatgccaaccagaaccacatggggcaaaaccatcaggatacttcacccccagatatggagagaagatcaaaatcttgtacaatactataaatatatatttatgtttccgtggtcaccaagcacattgtattttatacttgaaaaacattttgacttctgaaagaaagttcctgataacaaacttttaaagatataataatatgttttatttgatttgaatattatgaccagtcttggtatttatttatgctaatatttttgacgagcaatttcaaaataagtgtatctcaaactctccttcaagtgttgtggccttaactgttcagtgttggaataaaaaatatatttttataaaaaaaaaaaaaaaaaa

SEQ ID NO: 1868 - DNA, 445 bp, Canis familiaris
acatcttgtcatttttttccttttttttttctttgaataaatgtcactttttgaggccaaagaaggaacgtgracattttagacacccttttctttggggcaggctcttgctccaggcgccgtctcttctccccrwracwctwatccatctccgtaacctagtcaacctcccaaccccagaggctctcccccaccccagctacgtgcctcttcagaggctgccaggggccatagtgtcactcaacctcatttgctggaccaaatctggagaatcccagagttaaatggcccagaggattgtccccaggtgggggggagcaggggagaaaaagtggtagccatttttacattgttttgtatagtatttattgattcagaaaacaaacacaaaattctgaataaaatgacttggaaactgmmmaaaaaaaaaaaaaaaaaaaaaaaa

SEQ ID NO: 1869 - DNA, 657 bp, Canis familiaris
tataatcttggascctccatgattacccacttawaagatcmaagtaattatatgctgtgtgctttttwrcttgttagtgctatgaaagcaaaaaggctttctttgttggcgtgcctggtttactgggcgccaacgagtgtgtgcttatgctggaagtaggctaaaaggtctccctttcttacagcatgttaagtgtttgtacaggtttctgaaatccctttccatatraatcattttgttaggtattctgttgggggtagggtctctgtagttgcctcctcctgtcagaatctgcctgccaagatggtgttccactgagctagctcagcagaagtaggagagcagacagcttcactggtcatctgtaggctttgacgtagcacaatgtttcagagaaattactgaccagaaaagacatatcatacctctagaaagraaaagcatagtgtatttcaattcccaatgtgtaccttctatattttttccctaagtaaaaacaagactctactgatttcagttggctgttgtggttttaaagtatgagctatagactgtgtttttctgtactaatgtgtggcgcttattaaatacttttgtaccataarwaaaaaaaaaaaaaaaaaaaaaaaataaaaaaaaaaaaaaaaaaaaaaaaaa

SEQ ID NO: 1870 - DNA, 655 bp, Canis familiaris
gtggatataatcktggagcctccatgattacccacttagaagatcaaagtattatatgctgtgtgctttttagctgttagtgctatgwaagcaaaaaggctttctttgttggcgtgcctggtttactgggcgccaacgagtgtgtgcttatgctggaagtaggctaaaaggtctccckttcttacagcatgttaagtgtttgtacaggtttctgaaatccctkktccatataaatcattttgttaggtattctgttggggktagggtctctgtagttgcctcctcctgtcagaatctgcctgccaagatggtgttccactgagctagctcagcagaagtaggagagcagacagcttcactggtcatctgtaggctttgacgtagcacaatgtttcagagaaattactgaccagaaaagacatatcatacctctagaaagaaaaagcatagtgtatttcaattcccaatgtgtaccttctatattttttccctaagtaaaaacaagactctactgatttcagttggctgttgtggttttaaagtatgagctatagactgtgtttttctgtactaatgtgtggcgcttattaaatacttttgtaccataagtaaacttggaagtacattgcaagaaccatgaaaaaaaawaaaaaaa

SEQ ID NO: 1871 - DNA, 566 bp, Canis familiaris
gctagaggaccccttccggcaccccttcataggcwmtggcccggcgcccagccctggtgctcttcccggctcccgccctgcctcctgccagcccgccstgcccccacccctgcttctccctccagaccttctgctggccctttgtgagtgtctcagtctgggggtgtcccctaaaggacttacttcctggaggccagttggctctgggggccmctctgtgagtttccgtgctgtctggggaccccacgggattccatgttctgtctgattcctggcctctcctgacctctggaggtcagcttgctgcttgaggtcttcctgctgaggtggcagcagcagcccttgccccctcctctcaaggcctgtgctgggtgcaggggatgcctaggggttcccctcagctgccagtgagtcggaggacagctgagcaggcctgggcctccactgtcctgctcactgaggcaatgactgcatttggaatgtgtacccgtcccacccggtccatctgtgacgctcattaaagcctttccactcmctrrwaaaaaaaaaaaaaaaaaaaaaaaaaa

SEQ ID NO: 1872 - DNA, 739 bp, Canis familiaris
attcccgggatgccgccctttttkttttkttttttaagtagctgatgttactttttattaattatgatagagcagaatacgtgtactacatacttatgcatttggagagcaatgaaaagagaagagttacagttatttagttgttcaaaaaaagcctcagaatccttctctgtctcctgggatcaccagcacacaggggatgtcacttgagcagggccaaccttctagggcttaggaggtctacaagggaataggggagtgggagagggggctagagcaggtcttctatacatcctggcagctggacttcaccaaggaggtcttgcccagccaggggacagtatatatctggaaagagcagagcgttttcctcatcaggtgtggctggtcatgaaagggacagttgtccaagttgggctgggacttggtacatctcgttcgtccaatctccacctccaagaagtagttcatcccagacacaacctgcttgcgggcgcgcagcactcgcagggcgcggctgtggtaggcgtcgttgctcgcccggttgtactcgcgcacggcgaagtccagcgcctgctgcacgccctcctccccgacgtccgcgtccaccgcgccgcccaccgcgccgggcctgctgcctctccggccggcccsgggctcgcggatcccgggaattccggaccggtaccagcctgcttttttgtacaaacttgtctatagtgtcacctaaataggctaa

SEQ ID NO: 1873 - DNA, 739 bp, Canis familiaris
ttagcctatttaggtgacactatagacaagtttgtacaaaaaagcaggctggtaccggtccggaattcccgggatccgcgagcccsgggccggccggagaggcagcaggcccggcgcggtgggcggcgcggtggacgcggacgtcggggaggagggcgtgcagcaggcgctggacttcgccgtgcgcgagtacaaccgggcgagcaacgacgcctaccacagccgcgccctgcgagtgctgcgcgcccgcaagcaggttgtgtctgggatgaactacttcttggaggtggagattggacgaacgagatgtaccaagtcccagcccaacttggacaactgtccctttcatgaccagccacacctgatgaggaaaacgctctgctctttccagatatatactgtcccctggctgggcaagacctccttggtgaagtccagctgccaggatgtatagaagacctgctctagccccctctcccactcccctattcccttgtagacctcctaagccctagaaggttggccctgctcaagtgacatcccctgtgtgctggtgatcccaggagacagagaaggattctgaggctttttttgaacaactaaataactgtaactcttctcttttcattgctctccaaatgcataagtatgtagtacacgtattctgctctatcataattaataaaaagtaacatcagctacttaaaaaamaaaamaaaaagggcggcatcccgggaat

SEQ ID NO: 1874 - DNA, 657 bp, Canis familiaris
cccgggatgccgccctgtttgttgcttgtkttkttttttagctgatgtwactttttattaattatgatagagcagaataacgtgtactacatacttaatgcamtttggagagcaatgaraagagaagarttacagttatttagttgttcwmmrrwagcctcagaatccttctctgtctcctgggatcaccagcacacaggggatgtcacttgagcaggsccaaccttctagggcttaggaggtctacaagggaataggggastgggagagggggctagagcaggtctyctatacatcctggcagctggacttcaccaaggaggtcttgcccagccaggggacagtatatatctggaaagagcagagcgttttcctcatcaggtgtggctggtcatgaaagggacagttgtccaagttgggctgggacttggtacatctcgttcgtccaatctccacctccaagaagtagttcatcccagacacaacctgcttgcgggcgcgcagcactcgcagggcgcggctgtggtaggcgtcgtwgctcgcccggttgtactcgcgcacggcgaagtccagcgcctgctgcacgccctcctccccgacgtccgcgtccaccgcgccrsccaccgcgccgggcctgctgcctctccggccggcccc

SEQ ID NO: 1875 - DNA, 681 bp, Canis familiaris
ggatccgcgagccccgggccgcgcggagaggcagcaggcccggcgmsgtgggcggcgcggtggacgcggacgtcggggaggagggcgtgcascaggcgctggacttcgccgtgcgcgagtacaaccgggcgagcaacgacgcctaccacagccgcgccctgcgagtgctgcgcgcccgcaagcaggttgtgtctgggatgaactacttcttggagktggagattggacgwacgagatgtaccaagtcccagcccaacttggacaactgtccctttcatgaccagccacacctgatgaggaaaacgctctgctctttccagatatatactgtccsctggctgggcaagacctccttggtgaagtccagctgccaggatgtatagaagacctgctctagccccctctcccactcccctattcccttgtagacctcctaagccctagaaggttggccctgctcaagtgacatcccctgtgtgctggtgatcccaggagacagagaaggattctgaggctttttttgaacaactaaataactgtaactcttctcttttcattgctctccaaatgcataagtatgtagtacacgtattctgctctatcataattaataaaaagtaacatcagctamwwaaaaaaaaaaaaaaaaaaaaaraaaaaaaaaaaaaaaaaaaaaaaaaa

SEQ ID NO: 1876 - DNA, 659 bp, Canis familiaris
ttttttctctttcttgtttttgtcystttkttctttcttagctgatgktaactktttattaattatgatagagcacgaatacgtgtactacatacttatgcatttggagagcaatgaaaagagaagagttacagttatttagttgttcmwaaaaagcctcagaatccttctctgtctcctgggatcaccagcacacaggggatgtcacttgagcagggccaaccttctagggcttaggaggtctacaagggaataggggagtgggagagggggctagagcaggtcttctatacatcctggcagctggacttcaccaaggaggtcttgcccagccaggggacagtatatatctggaaagagcagagcgttttcctcatcaggtgtggctggtcatgaaagggacagttgtccaagttgggctgggacttggtacatctcgttcgtccaatctccacctccaagaagtagttcatcccagacacaacctgcttgcgggcgcgcagcactcgcagggcgcggctgtggtaggcgtcgttgctcgcccggttgtactcgcgcacggcgaagtccagcgcctgctgcacgccctcctccccgacgtccgcgtccaccgcgccgcccaccgcgccgggcctgctgcctctccggccggccccggg

SEQ ID NO: 1877 - DNA, 534 bp, Canis familiaris
tccgctcccctcacttccccctccccggcgcccccagagacagagccgggactggagcggggacacctggggaccccacctgccgcctcggggactgggagctgaccttgacctctcgacctcacgctaagaaagtccccagcttctcctggagacccccctccgctgaaggccccccctttccctgccaccccggaggagcctcggagggacaaagaccacggactccccagcgagggccctcagtggaccagggagcagaaggggaagccaggaccccagcggatggagaccttgaactcttgcccctgccagggggctgcggsggcatccgggcactcgggcctgcaggaccgcgcagtgaggcctgacacagcctgggctgctcccctccccgcagcgccccccttccctggcagctccgcaagcctgactcacctgacaagggttgcaagcagcccagctcctgtctcttgccccctctctcttgtcttcagggaattaaaaggattgctcaccaaggcmaaaaaaaaa

SEQ ID NO: 1878 - DNA, 532 bp, Canis familiaris
ggcaggccataccactagggctcctgtcctccacagtggtgacttcagccctgatagactaagtaatagtgggtccactcctgcaggactttatgcctgggccataactgctcagcctggatgtaaacccaggccacatttgtgtattttttcctcccaaataggtctttgtttagcctccatgtgagaagaatttgccatgtaggattctttttgattctttatttgtatatttgaracttttgcttaaaaattaacctctagttctgcawatttgagtatggggttttctgagtgttaaaggattgtgtgcgcatatttgggggattattttatgatcagcmtaatttgagtcccttaagacagaggcagtagccmagttcatggaagaattgggagttgaaatgcctagtctaaaaacgagtacctagatcatttaataattaatagaccacagccccatacmaagtaggctatggaataaatacacattttaataaaaaaaaaaaaaaaaaaaaaaaaaaaaaaaaaa

SEQ ID NO: 1879 - DNA, 384 bp, Canis familiaris
cctgaggcagttgcgcgaggtgatcggcgccgtgggccgcatcttcacctcctacgtcgaggscggcctgttgaacgaggagcagccctcgggcgtcgagagsacgtggcccgtcggcaccatccacttcttgcagcactactcgcgmgcgcgcctggtcgtcgckggctagatctacagccagggcgccttctcctagggcatctgcaaccgctgcgccaaccactccgagcagcctgtccccttgccgcccgggccrccsgaggcccccgcgacgacctgctcgtgcaagccgaggcccgaggactacggctaccccgcgggcgccgacaaccaccagggctccgagcaccagaggcagagcctggccttgttgttgccgag

SEQ ID NO: 1880 - DNA, 705 bp, Canis familiaris
  misc_feature (326)..(326): n comprises a, c, g, or t, or includes no nucleotide
ttttaataaacgcgctcagtaatccagaagagtatttatgtaaggaataagaatgccaaatcagcagtcttctggagggacagttcccacaggcaagctttcttgcatgcatcgcttcgagaccaggccagtcgtccggccagatggctatgtgctagagggcaaggagctggagttctatctgaggaaaatcaaagccccggaaaggcaagtgaatcttctgtcttcggtcatgtaataaaggtgtttattgttctgtcctgtgttcacgtatgaatgtcccattgctctgcatgctttccttgtaggtcagtcctagatgtggnctgtgcctttataaagctggggggacatttctcaccacaaagttaagtgttcagtgggagcagggatgtgacgttcagaccaagcagaggctgtgtgaaggacatagcccagcactgggtccccatattactggggttgtgactggaacctgaagccatgctgcctctaaaaacgtgactctttcargggtacctgggtggctcaattggttaagcatctgcattcgactaaggttattatcccagggtcctgggatccagtcccmaattagtctccctgcttaagtggggagtccacttgttctgtcttctcaagtgaatgaataaaatcttttaaaataarwaaaaaaaaaaaaaaaaaaaaaaaaaaaaaaaaaaa

SEQ ID NO: 1881 - DNA, 666 bp, Canis familiaris
cgtttgcgcggcccaccgtgtccgcgggggcggccccggggcgggtgcccgaggcgcggcccagcagcatggtgktggagcaccccgagttcctcaaggcggggaaggagccrggcctgcaggtgtggcgcgtggagaagttcgacctggtgcctgtgccccccaatctctatggggacttcttcacgggcgacgcctacgtcatcctgaagacggtgcagttgaggaacgggaacctgcagtatgacctccactactggctgggcaaggagtgcagccaggacgagagcsgggccgctgccatcktcacggtgcagctggacgactacctgaacggccgggcygtgcagcaccgtgaggtccagggcttcgagtcggccaccttcctgggctacttcaagtccggcctcaagtacaagaaaggaggcgtggcgtcgggattcaagcacgtggtccccaatgaagtcgtggtgcagagactcttccaggtcaaggggcggcgcgtggtccgagccaccgaggtgcccgtgtcctgggacagcttcaacaacggcgactgcttcatcctggacctgggcaacaacatctaccagtggtgcggctccaacagcaaccgataygagaagctgaaggccacgcaggtgtccaagggcatccgggacaacg

SEQ ID NO: 1882 - DNA, 660 bp, Canis familiaris
taggaaagggggagtaatcaggtgtaggatggaaaaactgttttgttgctttccccagcagcatggtgktggagcaccccgagttcctcaagcggggaaggagccrggcctgcaggtktggcgcgtggagaagttcgacctggtgcctgtgccccccratctctatggggacttcttcacgggcgacgcctacgtcatcctgaagacggtgcagttgaggaacgggaacctgcagtatgacctccactactggctgggcaaggagtgcagccaggacgagagcggggccgctgccatcttcacggtgcagctggacgactacctgaacggccgggcygtgcagcaccgtgaggtccagggcttcgagtcggccaccttcctgggctacttcaagtccggcctcaagtacaagaaaggaggcgtggcgtcgggattcaagcacgtggtccccaatgaagtcgtggtgcagagactcttccaggtcaaggggcggcgcgtggtccgagccaccgaggtgcccgtgtcctgggacagcttcaacaacggcgactgcttcatcctggacctgggcaacaacatctaccagtggtgcggctccaacagcaaccgataygagaagctgaaggccacgcaggtgtcmmagggcatccgggacaacga

SEQ ID NO: 1883 - DNA, 639 bp, Canis familiaris
atctccgcggagctctacctggcctgcgagaatggcgggtagggggaagcttaattgcggtgatcggagacgaagacaccgtgactggcttcctgctgggcggcataggggagcttaacaagaaccgccaccccaatttcctggtggtggagaaggatacaaccatcaatgagatcgaagacactttccggcagtttctaaaccgggatgacatcggcattatcctcatcaaccaatacatcgcagagatggtgcggcatgcgctcgacgcccaccagcgctccattccagccgttctagagattccgtccaaggagcacccctatgatgccaccaaggactccatcctgcgcagggccaggggcatgttcacggctcgaggacctgcgctagagccctccccatagccatgcagcctttcccyaggcttgccttcagcccgtctctgatttcccagccccctgccccttcccaacccactgagaggctaggtgaaggtgcttcccagattgctggggctttgccattaaagtcaaggctggttagggaacaggaagcctgagtatcttctctccactacatcttccctgtgctgttacacagtgtctctgttcatgttaaattaaagcaacattcccg

SEQ ID NO: 1884 - DNA, 717 bp, Canis familiaris
gagctggtcaagttctttttaagtcagaacacagattcagctctgacaktctgatttgratgatactgktcacgratcagratcctgtctattagactgkacagcttgtggcmagctawwttgcctgtaataagccmgractttttkttattgatactgtrratattgtgtgtgtgtgtgcgtgtgtgygtgtgtatatatatatatacacatatatatatatttgkacagttatctaagktaatttaaagttgtttgtgcctttttgktttwaatgctttgatatttcmaatgttagcctcaattccgrrcaccataggtaggacgtaaagsttgtctgataattcmwagcatgaaatggatattcmaatggraattctgctcagaatgacagtccatcmwmacagattgtttgctgaatatgaggtaatgatgtccttgggagtctgatttgtcagttggaaatgtggtagcctcactttaatgaacmaattgcctttgttaaaacatgagtggctctgtatagctgatcagtttttccacctggaagcatttgtttctactttgactatgactgttttttggacagtttacttgttgagaatgtgaccvaaagttacatgtttgcacctttytagttgaaaataaagtatatattttttctataaaaaaaaaaaaaaaaaaaaaaaaaaaaaaaaaaaaaaaaaaaaaaaaaaa

SEQ ID NO: 1885 - DNA, 689 bp, Canis familiaris
agctctgacattctgatttgaatgatactgttcacgaatcagaatcctgtctattagactggacagcttgtggcaagctaatttgcctgtaataagccagaacttttttttattgatactgtaaatattgtgtgtgtgtgtgcgtgtgtgtgtgtgtatatatatatatacacatatatatatatttgtacagttatctaagttaatttaaagttgtttgtgcctttttgtttttaatgctttgatatttcacaatgttagcctcaattccgaaccacccactatggtatggacgctaagcgttgtcttgagtaaattctcaagcactgtgaatggagataattctcaaatgggaaattttgtgttcaggaatagccaggtccatctcaaaaccaggatttgttttgcggaatattgagggttaatgaatgtccctggggagtctgatttgtcagttggaaatgtggtagcctcactttaatgaacaaattgcctttgttaaaacatgagtggctctgtatagctgatcagtttttccacctggaagcatttgtttctactttgactatgactgttttttggacagtttacttgttgagaatgtgaccmaaagttacatgtttgcacctttctagttgaaaataaagtatatattttttctataaaaaaaaaaaaaaaaaaaaaaaaaa

SEQ ID NO: 1886 - DNA, 695 bp, Canis familiaris
agtgarggtcttaaggatataggratcatccgcacatctcatgggcacaaccgagattggaaccagatgataggggtattctagrmwaaccmgtagcatagccaatacttgtttttatgctatgacaactatttytktttcgaccgttgttgtcacggtttyaggrgtgsacgstacggggtagtggtcaagttcccccttygtcmggtggtaggccgattattggtgttaagggattacaactcggtktagtgwagaggtgactggtggtacggtggccactatgtattagttcacgggatgatactttaatacaacctaatgcgdaagatatagttgracggttattgattagaatgtggttaccgctatattttagcgtattagaccggtggcaatagtatcacagatgttttagaatgtggcatcccctmtagccatgtaggttttttatacggagtccattkgagccattagagctaattattccgtgtagattggtgatgctctcgttggtggcagacgtatagtaggagttgagatgaaaggaggagttgccatttcaacggcgtcgatcatattcagagtttcttcatctactgtccgtattgttctatctatgtatttattcatcaccatggtaaaaaaawaraaaaraaaaaaaaaaaaaaaaaaaaaaaaaaaaaaaaaaaaaa

SEQ ID NO: 1887 - DNA, 695 bp, Canis familiaris
tcactyccagaattcctatatccytagtaggcgtgtagagtacccgtgttggctctaaccttggtctactatccccataagatcykwttggkcatcgtatcggttatgaacaaaaatacgatactgttgataaaramaaagctggcaacaacagtgccaaartccycacstgcsatgccccatcaccagttcaagggggaarcagkccaccatccggctaataaccacaattccctaatgttgagccamatcacwtctccactgaccaccatgccaccggtgatacataatcaagtgccctactatgaaattatgttggattacgchttctatatcaacytgccaataactaatcttacaccaatggcgatataaaatcgcataatctggccaccgttatcatagtgtctacaaaatcttacaccgtaggggakatcggtacatccaaaaaatatgcctcaggtaamctcggtaatctcgattaataaggcacatctaaccactacgagagcaaccaccgtctgcatatcatcctcaactctactttcctcctcaacggtaaagttgccgcagctagtataagtctcaaagaagtagatgacaggcataacaagatagatacataaataagtagtggtaccatttttttwtyttttytttttttttttttttttttttttttttttttttttttt

SEQ ID NO: 1888 - DNA, 756 bp, Canis familiaris
ccgtgtcttgcgctttatcggcgccactctctacccggggccttctgggaggggcgcacgcttcggttgagcaggatgactgcccttacagactagagtttctgatgtgcccgtgacggcgcttttgggagctgacccatcccagggcggaggggggcgttaggctgccgtcgcccaccccccgctgacctttggtgtcctcccagaccctggtcctcgcaggccgatccgcagcgctaccagggtgcttgaagatttccgccgctgttacccttggttcaagcttgattattctggaagcctacctgggsmggtgccctktcaaaggttaggtactaakcagatactgaagggctgaagtttgtaattcatcctcttggatcagtgctattgaaatgactgtacccytggaatggctcctgccactcgaacctgcagtgcagtctgtgaagagtcacgtccyttttccttggctgctatgggttttgttcatgcagaggatgcctcctatctggyyggtgttgggcagatcctaggaacttccatctaattyccctgcattaatctatgcaagcagctgtcaacttactggaggaaagaaactgcccagaaattttgagatgcttaaatacttttagaccmattagatttatttaatatgaatacttgtttttattaaaaggattccaataaaatamwwwaaaataaaaaaaaaaaaaaaaaaaaaaaaaaaaaaaaaaaaaaaaaaaaaaaaaa

SEQ ID NO: 1889 - DNA, 701 bp, Canis familiaris
actttytragcytgsccgggttgcaarkkgagaagkgaagcwccgactcatktcttccactcgctgccmcctgcccccagggcsccactytcgccamcycgkccagctgctgcttacacaggcttkgttcccacaggaggggagacagstccccacccccktcccttgctcccagcagcggaagcgcctytgaccbycagctccagtcccacgcgggggggaggagttagagggcagscagtgtgtagacggaaaggctcaaacccgcccctctgcccccctaccmaggccggccgggtktggcccaggctacgtgttgagcgtggccwacgtgagccaggagcaascggaggcctcccagtgccaagtgacgtggcgggccccacgttagccgggctccggcgccagtgcaggggcggcgctgctctggctcgactgggctcgctgcctgcgcccggcctgccctggatgcgacaccttcgctcgctcgcggagccgagctcctccctgtgcccmagcccactgcttccagagccmacaggcatcccctcccrcagccctgcacctgggcctccccgccccctcccttgctcccctcagtcccctgggatcmaacagaagcagccgtgggcaaaatacmwtttcabttamcmaawwraaaaaaaaaaaaaaaaaaaaaaaaaaaaaaaaaaaaaaaaaaa

SEQ ID NO: 1890 - DNA, 700 bp, Canis familiaris
gccggcccgattctgagctgcccggtttgcagtgagaagtgaagcaccgactcatgtctkccactcgctgcccctgccccmrggcgccactctcdscamccsgkccagctgckgctwacacagscttkgktcccacaggaggggagacagctccccacccccktcccktgctcccagcakcggaagcgcctctgaccctcagctccagtcccackcgkgggggakgagttagagggcagbcmktgtgtagacggaaaggctcaaacccgcccctctgcccccctacbcagkccggccgggtgtggcccaggctacgtgttgagcgtggccmacgtgagccaggagcamkcggaggcctcccagtgccmagtgacgtggcgggccccacgttagccgggctccggcgccagtgcaggggcggcsctgctctggctcgactgggctcgctgcctgcgcccggcctgyccytggatgcgacaccttcgctcgctygcggagccgagctcctccctgtgcccaagcccactgcttccagagccmmcaggcatcccctcccrcagccctgcacctgggcctccccgccccctcccttgctcccctcagtccmctgggatcmaacagaagcagccgtgggcaaaawacmatttcatttaacmaawwraaaaaaaaaaaaaaaaaaaaaaaaaaaaaraaaaaaaaa

SEQ ID NO: 1891 - DNA, 564 bp, Canis familiaris
ccccctgtccctcgcttccccgtctagctggtatgcgcctttgacccttccagcttcccagttcccacccgggggggaaggaatttaataagggccaggccaagttgtgttaagaccgggataagggcttctaaaccccgccccctctggcccccccttaccccaggccgcccgggttttggcccaggctacgtgttgagcgtggccaacgtgagccaggagcaagcggaggcctcccagtgccaagtgacgtggcgggccccacgttagccgggctccggcgccagtgcaggggcggcgctgctctggctcgactgggctcgctgcctgcgcccggcctgcccctggatgcgacaccttcgctcgctcgcggagccgagctcctccctgtgccacaagcccacctgcttccagagccmacaggcatcccctcccrcagccctgcacctgggcctccccgccccctcccttgctcccctcagtcccctgggatcaaacagaagcagccgtgggcaaaatacaatttcatttaacaaaaaaaaaaaaaaaaaaaaaaaaaaaaaa

SEQ ID NO: 1892 - DNA, 698 bp, Canis familiaris
taaaaaggggtttccctggttgggttgtttgaacccaaggcaaactttttgtacgtaaaagagctctgcactgccatctatgaagcctctttaggatgtttgtcttgtcatttttgttctttacatcaagaaattgtatgtacmaatatgcggagaaaatatattgcctctgcttttatcagggtgctaaaccctggtacttcgtatataaagtgtattaaaactgggatttgttaccmgttgctgtacgttgtatatagaattgtttataaattgtatgcttcagaaataatttatttttaaaaagaaattaaaattttaaatctgcaaccacgttttgcctttcctctctgaaatgtatagattccgtttgtcaccagggatcccaaacccacaatccattgtgaagtgttctctctctagaacagtccttaaatgtacagtgtattttatagatttgaagttaacattgttattttcaagagaatttatggacattgtagaaatatataagtgcatttccmaactgccttaaacattgtatttttatagacatccttwaaaaaaaaaagtcctatgttttaagtaactatggctttgtgtattttttatttgttttattaaaatgtgtacatcagtaaagagtttttaaataatgaaaaaaaaaaaaaaaaaaaaaaaaaaaaaaaaaaaaaaaa

SEQ ID NO: 1893 - DNA, 721 bp, Canis familiaris
cggcagctttagcagaggtttccggagattccgctatgaggacgcagctgggcccaggggatgtcctcaagacatctcaggagcttgccggacagtggctgagacccgatattcacacaaaggagcagattgtggagatgctggtgcaggagcagttccaggccgtcctgcykgaggagctcagagctcgggcccagaagatgtcagcctgggggtcagaatcactggctaagtccgtgccactgggttcttgctcagcctacatgtgagaaagtaggcaaatgttctctttgttgcaaagatccaaggacagtcatgggggaaaatgtgaacctcgktttttttgagcttgcctttgactagttgtaataagmatccatcaaamcccagtctggacctctctggctgaggcagctctaaktcctgggactgagctctagaaagagcttctgttaggacmatcagcctgttgcttgtttttgctctgctgaatgcctccttttttgcactttctgacatgctttaatatattgttatgtatccmaagcagtaattgcttcaactttcagaattcttgactcttgctgtggtggcatgaatggcagcttctgtaaccccaccagtaactcacttgagatgtccttgaaatattaaagtttggtcctcmaaaaaaaaaaaaaaaaaaaaaaaaaaaaaaaaaaaaaaaaaaaaaaaaaaaggg

SEQ ID NO: 1894 - DNA, 685 bp, Canis familiaris
gccggcttcatcttkggctaccaagacagctccagsyttctatgtggtcatgtggaagcagacggascagacgtactggcaggccacgccgttccgcgctgtcgccgagcctggcatccagctcaaggctgttaagtytaagacaggtcctggagagcatctccgcaactccctgtggcatactggggacaccagtgaccaggtccggctgctgtggaaggactccaggaacgtgggctggaaggacaaggtgtcctaccgctggttcctgcagcaccggccccaggtgggctacatcagagtgcgattttatgaaggctccgagttggtggctgactctggggtcaccatagacaccaccatgcgtggaggccggcttggtgtgttctgcttctcccaagaaaacatcatttggtccaacctgaagtatcgctgcaatgacaccatcccagaggacttccaagagtttcaaacgcagaatttcgatcgcctggatagctaagccaaggaagcaatccgtaactgcttttccaaacactaaagccatatattttttaacttctacaactttttttttatatacacggtggcttccttttaccaacccaactatatcagactttttatatgaacgtgacaataaagaagagataatttctaaamaaaaaaaaaaaaaaaaaaaaaa

SEQ ID NO: 1895 - DNA, 672 bp, Canis familiaris
ggcatatwaatccactcaactccctcctccmcttccttctgactcatctaktaaaacatcttccacatctcattactcctctcccctctccracactagattatggtgtggacaaccctgcccccacccttggccagtcaagcataatccctctccacccctcaaataccccagactgcacagacctcccaccccmwaccatccaggcctggtcctcaagactctggatccttcccctcattccaactggacagtctactccccccacccatcttgtgacttcttgaacctcttttctgaccctccacccttggacacctattccaggcctagcaggaccctcaacctcactgcagaaatacccactccatatccccagactctgcacagatatcctaagccccatccccaactctaaacagaaccccccacccccatgatcattctgtcttaaccctcaagtctccaaccatatatcccaggtaatccatctttcacatacctcccctcattctccaaaatccaaccaagcagccacttttgctttggttccccacaacccttcttccttcaattctctgccaccccatccccttgcccmtttccccccaataaatgtgctagagctgtgmmaaaaaaaaaaaaaaaaaaaaaaaaaaaaaaaaaaaaaaa

SEQ ID NO: 1896 - DNA, 582 bp, Canis familiaris
acaagcaggacaacaaaaaaggaaggaaggaaggatagaaaaagaaagaggaaagaaagaaaagaagaaaaaagaagaagaggagagaggaaaaggggaaagaaacattttaaaggagtcatctacccacccacttccccgtcccttctcttgcccattttggaggcggcacaggagcccctggcgcagaacagctcggctcccaggcagactgggkttkgkggggggggggcmgcgactctctctctcaggtaccagaacccggtagcttctgcgaagatggaggggaattaggcttctggttcctctgamatattggcaaaaggctccccaaggttcggcggcgggagtsgggcgggggagacggctctccccagcctgcacccaccccttcccacctcgcctcccaaatgacagcctggtgytggctctgcgtgatttggccttggcttcagccaagcagctgatgcagaggaggccccgtttgcaggactgactggcaaagtgcacgctgaagaaagaaggaagaaattttttaaagcagctctggggaggtttctcgttccwwaaaaaaaaaaaaaa

SEQ ID NO: 1897 - DNA, 721 bp, Canis familiaris
acaccctgtacgagcggtcsgggagstcytgcacgggraccagcgcaagcgccggaagtttctggagacggtggarctgcagatcavcctgwagwaytatkacmctcagrrggacmwmcgcttctcgggcaccgtcaggcttaagtccaccccccgccccaagttttctgtgtgtktttkgggggaccwgcaacactgtgatgagbmcwaggcagtggacattccccacatggacmttgaagcgctgaagdwactcdmcmwgratwwddwactagtcmdaaagctggccmagaagtatgatgcctttttggcttcagaatctctgatcaagcagattccmcgaatcctgggtccaggcctgaataaagctggcaagttcccttccttgctgacccacmatgagaacatggtggccmaagtggatgaagtgaagtccaccatcaaattccagatgaagaaggtgctatgtytggcagtggctgttggccacgtgaagatgacggacgatgagcttgtgtacaacatccacttagctgtcaatttcctggtgtccttgctcaagaagaattggcagaacgtccgggctttgtacatcaagagcaccatgggchaaccccmgcgcctttactgagaccatttaataaatcctagtgctaccgttrvaaaaaaaaaaaaaaaaraaraaaaaaaaaaaaaaaaaaaaaaaaaaaaaaaaaaaaaa

SEQ ID NO: 1898 - DNA, 639 bp, Canis familiaris
  misc_feature (334)..(334): n comprises a, c, g, or t, or includes no nucleotide
gcgcagatcagcctgaaagactaggaccctcagaaggacaaacgcttctcgggcaccgtcaggcttaagtgcaccccccgccccaagttttcttgttgtgtttttgggggaccagcaaacactgtgatgaggccaaggcagtggacattccccacattggacattgaagcgtctgaaagaaactctacaagaataaatactagtcaataagctggtccaagaaagtatgatgcctttttggcttcagaatctctgatcaagcagattccacgaatcctgggtccaggcctgaataaagctggcaagttcccttccttgctgacccacaatgagnacatggtggccaaagtggatgaagtgaagtccaccatcaaattccagatgaagaaggtgctatgtctggcagtggctgttggccacgtgaagatgacggacgatgagcttgtgtacaacatccacttagctgtcaatttcctggtgtccttgctcaagaagaattggcagaacgtccgggctttgtacatcaagagcaccatgggcaaaccccagcgcctttactgagaccatttaataaatcctagtgctaccgttaaaaaaaaaaaaaaaaaaaaaaaaaaaaaaaaaaaaaaaaaaaaaaaa

SEQ ID NO: 1899 - DNA, 642 bp, Canis familiaris
aagaacacgagaagaagctggcctggacatggctacgaatgctgcctggcatctctccttgaaaaagaaacaggggacagatgctgttcgaacattaagcaatgccgaggagtatcttgatgatgaagactcagattaattcccttctggagctttgagattaaaacttctgttgcttttgcattcccaaacctttgtctttgccagaagagtgttggtaactgtttggttttgttttgttttgtttttaaagtctatatgaatatggaagtattgcactgtgtttgaatagaccatgtaaatgggtaggttttcaccttcagtttgccmataagtgactggatactttgctgtataaagtatgtttttgttcatcagagtagaacacagaagagattatttctatttatcaagttaaaggaattttaagaatttttttctttaaaaaaatcagaatttttttgttttgttttcttaaagttctttacctcaaggattgaaatattttgaatggatttttcaagggggaaacgcttgttaaaataatgaaccmaaagacttaacagaaaatcgtcagctgttctgacaaaaataaacattttaagagactgtaaaaaaaaaaaaaaaaaaaaaaaaaaaaaa

SEQ ID NO: 1900 - DNA, 641 bp, Canis familiaris
aggagcccctgaccgcctccatgctggctgcagcaccccccccaggagcagaagcagatgctgggagaacgtttgttcccactcatccaaaccatgcattcaaacctggctgggaaaatcacaggcatgctgctggagatcgacaactctgagctgctgcacatgctggagtcccctgagtctctccgctccaaggtggatgaagctgtggcggttctacaggctcatcatgccaagaaagaagctgcccagaaggtgggcgctgttgctgctgctacctcttagacaaggaaaaaccgattcaaaagccaaataacccctcctggaattcagctcaaggtttgaagatttctagcgtgtcctatggacctcaacaccaggaaccacaaattggaaatttaataggtcattttgtatcmaaaggtcaattatgaagcacctagaatttttcaatttaaagaatatattctctgggttctgctttggcccagacagtgttaactttttttttctattgtgggttttgatttttttcccccagaaattggttttatttgatgtacccaagtcttaagtttctcaataaagaaaaaaatctccataaaaaaaaaaaaaaaaaaaaaaaaaaaaaaaaaaaaaaa

SEQ ID NO: 1901 - DNA, 719 bp, Canis familiaris
cagtgagctcgccatccggatygccagcctggragkggagaatcagagcttgcgagrtktcgtgcaggatstgcagmagscggtttccaagctggaggcccggytaagcgtgctggagaagagytcacmcacccaccggrscgcagcccctcagacccwgcacgtgtccsccatgcgccmarcggagccccctcccaggaaggcggccactgctgcagaggacgatgaggacgatgccatcgacctgtttggcagcgatgaggaggaggacaaggaggcggcgcggcttcgggaggagcggctgcgacagtatgctgagaagaaggccmagaagccagcgctggtggccaagtcctccatcctcctggacgtcaagccttgggacgatgagacmaacatggcccagctggaggcctgcgtgcgctccatccagttagacgggctgacctgggggggctccaagctggttccggtgggctatggcatccgcaagctgcagatccagtgcgtggtggaggacgacaaggtggggacagacctgctggaggaggagatcaccaagttcgaggagcacgtgcagagtgtggacattgctgctttcaacaagatctgagccccagcaccgggcctggktgtgygaggccccgcagccattaaagactgagattgtamaaaamaaaraaaaaaaaaaaaaaaaaaaaaaaaaaaaaaaaaaaaaa

SEQ ID NO: 1902 - DNA, 726 bp, Canis familiaris
cggcccagcgggatcacagtgagctcccatcccggttcgccgccctggaagtggagaatcagagcttcgaggtttcgtcaggatctgcacagccggtttccaagctggaggcccggctaagcgtgtctggagaagagctcacccacccaccgggccgcagcccctcagacccagcacgtgtcccccatgcgccaagcggagccccctcccaggaaggcggccactgctgcagaggacgatgaggacgatgccatcgacctgtttggcagcgatgaggaggaggacaaggagkcggcgcggcttcgggaggagcggctgcgacagtatgctgagaagaaggccasagaagccagcgctggtggccaagtcctccatcctcctggacgtcaagccttgggacgatgagacmaacatggcccagctggaggcctgcgtgcgctccatccagttagacgggctgacctgggsgggctccmagctggttccggtgggctatggcatccgcmagctgcagatccmgtgcgtggtggaggacgacmaggtggggacagacctgctggaggaggagatcaccmagttcgaggagcacgtgcmgagtgtggacattgctgctttcammmagatctgagccccagcaccgggcctggktgtgtgaggccccgcagccattaaagactgagattgtaaaaaaaaaaaaaaaaaaawaaaaaaawaawaaaawawaaa

SEQ ID NO: 1903 - DNA, 671 bp, Canis familiaris
acaaccgatagaatttactcagtatgaaacgatatgaacttccagccccttcctcgggtcagaaaaatgacattactgcatggcaagaatgtgtaaacmattctatggcccagttagagcatcaggcagttcgaattgagaatctggractaatgtcacagcatggatgcmatgcctggmaagtatataatgmaaatctagttcacatgattgaacatgcacagwaagagctccagaagttaaggaaacatattcmagatttaaactggcagcgaaagaacatgcagctcacagctggatctaaattaagggaaatggagtccacttgggtatccctggtcagtaagaattatgagattgaaaggactattgtgcaattagaaaatgaaatatttcaaatgaagcagcaacatggcgaggcaaacmaggaaaacatccggcaagacttctaacagacagatgaattcggtgggaagcaaggaaggcmagctgggctttcacagattaggcatctcaactgtcagggagaacagcatcttaggggaaccattatggttaaatgtgtattgtagagtgtggactgttagatttgtgcattttagccaaaataaaaactttaagcttgraaaaaaaaaaaaaaaaaaaaaaaaaaaaaaaaaaaaaaaaaaaaa

SEQ ID NO: 1904 - DNA, 662 bp, Canis familiaris
gatggacagatttykctggaaacagaaktgttcctacmaaaggtatccgccctgccattaacgtcggtttgttctgtgtcccgtgttggatctgctgcccaaaccagggccatgaagcaggtggcaggtaccatgaagctggaattggctcagtatcgtgaggttgctgcttttgcccagttcggttctgaccttgatgctgccactcagcaactcttgagtcgtggcgtgcgattgactgagttgctgaagcaaggacaatattctcccatggctattgaagaacaagtggctgttatttatgctggtgtaagaggatatcttgataaattggagcccagcwagatcacmaagtttgagcatgccttcttggctcatgttatcagccagcaccaagccctcttgggcaatataaggaccgatggaaagatctcagaacagtcagatgctaagctgaaagagattgtaacaaacttcttggctggatttgaagcttaaactcctgtggatttacatcagatgccagtttggttttgtcgtcacttattctagtaatcagttccatttgtaaaaggattactcttatgctccagatgtacagaaattaccttaaaaataaaggttccatattggwwrrwrrwwaaaaaaaaaaaaaaaaaaaa

SEQ ID NO: 1905 - DNA, 643 bp, Canis familiaris
cctgaggaccggttccaggcggaagacgtagagaagtcgttaacgttccgggagaacctagacaggacacaggaacgaacacaacaacgacaccgtctccgggcscggcacaacaaacgtcggccgaaaccccatctggggagtaacaccggcggtctggttgcacgtccccttaagagtctgaggaggttcctccaaaagaacaaccgtgacgtcctactcatacgtgagcagctccatgggattcacgtccttctgttggtcggtcgggtctctgctaacatcccccttggttagtcgattatgaaccccaaccggacygtccccgctgtcctggagaccaacaggtcgaggagtctgcggttgagagaccttaagtgccaacagaacccacgtgtccgtaacgtcctacaacggatggccaggrattagaatcagacatagcatcacatggcggcggagtccccaccgaatctggtccctggcaactgactccgtgcgatgcggracgtccaaaaacgraaccgtaaacaagtccggaggracgtcccgtaactccagcgtcttcaattttgtctagataaaactaataaaaccttgtgtttgaaaaaaaaaaaaaaaaaaaaaawawwaaaawaaaaaa

SEQ ID NO: 1906 - DNA, 643 bp, Canis familiaris
ggactcctggccaaggtccgccttctgcatctcttcagcaattgcaaggccctcttggatctgtcctgtgtccttgcttgtgttgttgctgtggcagaggcccgsgccgtgttgtttgcagccggctttggggtagacccctcattgtggccgccagaccaacgtgcaggggaattctcagactcctccaaggaggttttcttgttggcactgcaggatgagtatgcactcgtcgaggtaccctaagtgcaggaagacaaccagccagcccagagacgattgtagggggaaccaatcagctaatacttggggttggcctgrcaggggcgacaggacctctggttgtccagctcctcagacgccaactctctggaattcacggttgtcttgggtgcacaggcattgcaggatgttgcctaccggtccytaatcttagtctgtatcgtagtgtaccgccgcctcaggggtggcttagaccagggaccgttgactgaggcacgctacgccytgcaggtttttgcyttggcatttgttcaggcctccytgcagggcattgaggtcgcagaagttaaaacagatctattttgattattttggaacacaaacttttttttttttttttttttttwtwwttttwtttttt

SEQ ID NO: 1907 - DNA, 665 bp, Canis familiaris
agtggcctgccttccttgtaggagtttagagtccmacgcctaggatttatctaggcaagcagccagaagatccgaggagtcgaggaaccctttgtagacttagcagcctaagcctcctacttgtccttgcgctgctacctgaaagatgtcaggagcccctcaggcaactttgagggctaattaatcctgccaccctcagaggatcccggaggtgtccaggcctttgatctgcgtgcagagagctagcagtgcttctcctctgcctaagcagtggccagggcacgccaggtcctcttgaaagtccagtagatagccttgcgagccaaagaactcaggatagagggagtgggctaggtggttggtgtgaaaacagtggcccgagtggtctaggcagcccaggtgttggtaatagtggtggaaggagaggtaacagaagttggtgtgggagttgttgttggtgtggttatcatttatcctaaccaaactgcccagctgctagactctcactgtccaaatgcaaacttagaatgcagtctggctaatttgcaaacagtaatgtaagacaactgaaaattcagagtactagacaacacctagagatccagactcaataacctactagacactttgatttggcaaattgtttgtttttttttttttttttt

SEQ ID NO: 1908 - DNA, 665 bp, Canis familiaris
tcaccggacggaaggaacatcctcaaatctcaggktgcggatcctaaatagatccgttcgtcggtcttctaggctcctcagctccttgggaaacatctgaatcgtcggattcggaggatgaacaggaacgcgacgatggactttctacagtcctcggggagtccgttgaaactcccgattaattaggacggtgggagtctcctagggcctccacaggtccggaaactagacgcacgtctctcgatcgtcacgaagaggagacggattcgtcaccggtcccgtgcggtccaggagaactttcaggtcatctatcggaacgctcggtttcttgagtcctatctccctcacccgatccaccaaccacacttttgtcaccgggctcaccagatccgtcgggtccacaaccattatcaccaccttcctctccattgtcttcaaccacaccctcaacaacaaccacaccaatagtaaataggattggtttgacgggtcgacgatctgagagtgacaggtttacgtttgaatcttacgtcagaccgattaaacgtttgtcattacattctgttgacttttaagtctcatgatctgttgtggatctctaggtctgagttattggatgatctgtgaaactaaaccgtttaacaaacaaaaaaaaaaaaaaaaaa

SEQ ID NO: 1909 - DNA, 705 bp, Canis familiaris
tttccgcatcttcacagttcagttaaatattgttgtaccattactktcttttttcagaactagttcttaggawcagagactgagtgacgcaggcatttcggttctgggagatttatcaaagggaaaaaggggcggacggctggagcacctgtactgacmaatgaaaagaaaggcttcaaaaaggtctaaaaaaaaaatcctttaaactactgagctaaccctgcttgagtatttactgtccagttcaggagttttgttttgttttgtttacatgtgtggcatttcagaagagatttaatcagtgtgatargrgggrgaaaaatgrraaaasaraaraaawccccacctgcaacaacacattttatggtagcttttacttttttatgaaaagaatattattggccgttttaattctttcgttttggtcccatccmaagtcttgatagtaagcattattttgggggtagaaatagtgaaatctctagcctctttgtgtgtttttgttgttgttttatataatgcatgtattcactaaaataaagtttaaaaaactaatgtcttgctagacaaggtttgctgttgtgcagtgtgcctgtcactactggtctgtactctatggatttgcatttttgtattttgtacmaagtaaaaataaagtgttatgagtagtaaaaaaaaaaaaaaaaaaaaaaaaaaaaaaaaaaa

SEQ ID NO: 1910 - DNA, 609 bp, Canis familiaris
tatccacccgcctctgggtccttcccatccaaccagtcagctggcaggatttatcagtcagtcctctacaattgtgaattagtgagtcagggttttagtgggacgcgatcctggggggaagggggcaggggagattttcagactgacacctagtgtgcacagtcccckgcgtgtacgatgaactcgtttcatcatttggcwgagattcctcytgttggcagcagttcccagctacttaggtattctggggtgagagtttggcccctgtgctacccgtcttccycagggcctgaccagtggaaggaatgggggcgggtggtaggcgtgtggccgcctccctccccgaacctggttgggaccgtctycaggaccccactgtctgggtggggggcaggagacagagtgactcaggtagggccmcagggtggggtgtaggaggttcctgctctggcaggtccaggcggaagggagcggagactgctggttcctgctgcagcgaggggagggtggaacagagatgggggaataaagactctgagacgtggtttaatagtaaaaamwgtgttcgtcctaaaaaaaaaaaaaaaaaaaaaaaaaaaaaaaaaaaaa

SEQ ID NO: 1911 - DNA, 791 bp, Canis familiaris
cccatcgcgtgtggttcccgtcggattacccggtgcatactccggggccctgtgctttcccgcgctttggggcctcagtccgtgatccattgtgtattattgtcggcctcgttgcttccgttatctccggttcytagaggagttacttgagctcyacgcctcwgcgcctgtaagctgcttgacgcgtacctcctgtacatactgcgtgaccggggcgctscagttcgggttatkgcctcctcgtggggaccttcccctgtcaactckktttctctcgggcttcatctcttgtgtggggagcttcatcctarcggtttgcctcaggatacagakyywacccmcagwwcsawagcaagatttccaaggcatctccccmgagcgagcctttgctgattttctgtttgccagcaccatcctgcaccttgttgtaatgaacttcgttggctgaattattcccatttacttaactggggagtgggagactagaagaatgttcactttttgayttcccttggatgagaacttttgagatggcaacttggacatgtggattttcttcaagaaaaataagatttatacttaaatactgattctgatttcaaatgtaggtggagagcccagagaagtttccttgcttctgtgttagagcagctttgtaatgagcatttattaacatgacctctgcttcccattaagtgtaacctttttgccttsccaaattaaaaaactccatgccamwmvaaaaaaaaaaaaaaaaaaaaaaaaaaaaaaaaaaaaaaaaaaaaaaaaaa

SEQ ID NO: 1912 - DNA, 409 bp, Canis familiaris
gttggctgctgtttgtgtgtgtttgtgtgtgtgtgtgtgttgtgtgtgtgtgctgtggtgtgtgtatcacactcatatgttgtcctctgctatctttttatttagattgggggtgcagggagtctgtgggtaagggggaagagggggcgggacgggttcattgtctctgaagtgagagcttccttttgctttctgtcttgcctgagagctttgggtctggaggcctgaccaccaggccatgagctgcccgagtctgaaacctgaagatggtgggtgatacccaagccgccacagcctttttgtctctggggaactgccttcttcagggagaaggaggtggggacggtgaattggttgttagtttctgagttttacccaaataaagtagaatctaagaaraaaaaaaaat

SEQ ID NO: 1913 - DNA, 801 bp, Canis familiaris
ttcttgagatccttktktttctgcgcgtaatctgctgcttgcaaacrwdwwaccaccgctaccagcggtgrtttgttygccggatcaagagctaccaactcttkttccgaaggtaactggcttcagcagagcgcagataccrawtmctgttcttctagtgtarccgtakttaggccaccacktcaagaactctgtagcaccgcckacatacctcgctctgctaatcctgttaccagtggctgctgccagtggcgataagtcgtgtcttaccgggttggactcaagacgatagttaccggataaggcgcagcggtcgggctgaacggggggttcgtgcacacagcccagcttggagcgaacgacckacaccgwactgagatacctacagcgtgagctatgagaaagcgccacgcttcccgaagggagaaaggcggacaggtatccggtaagcggcagggtcggaacaggagagcgcacgagggagcttccagggggawacgcctggtatctttatagtccystcgggtttcgcmacytckracttgagcgtcgatttttgtgatgctcgtcaggggggcggagcctatggaaaaacgccagcaacgcggcctttttacggttcctggccttttgctggccttttgctcacatgttctttcctgcgttatcccctgattctgtggataaccgtattaccgcctttgagtgagctgataccgctcgccgcagccgaacgaccgagcgcagcgagtcagtgagcgaggaagcggaagagcgcccaatacgcaaaccgcctctccc

SEQ ID NO: 1914 - DNA, 565 bp, Canis familiaris
actacagaggtataaagaaacactacatcagtctgggttgtcctgaatcaaacctttatacttgaacttgaagactgtgtggattttagggtttttgtgtttgggtatccctagaggggctgtagctatagtgaaggaacataatcagttcccaagatgcmatttcaaagaatgacagtgaaggatagcatggagtaggtattagtgcttatttgtcaactagaatgtttaagccmttagcacccaatagctctaaagttgacgtgaccctcttgtacatgaatcttgtagcttcggcttcttttcctctgtaagaggtgacgacacatgggaccctagaatgtgaggaagtgcagacacccaggtataaggaaaaacatgtgcaggctctctgtccacgggctgcttcctatcctgcaagggcttatgaatcttgggtgtgtttattttattctcatgtttatgttttttagaaaagttgaatgatccaataaatggcttaagttttgtaaaaaaaaaaaaaaaaaaaaaaaaaaaaaaaaaaaaaaaaaaaaaaaaaaaaaaa

SEQ ID NO: 1915 - DNA, 598 bp, Canis familiaris
gtccccaggaccttgctgagtctgtgccgtgtggccgtgagaagagttcttggcaaataccggcttcatctgattccctcgctgcctctgccagaccccattaaaagtttcgtgctttatgagtagaattccggtgcagcagttgattgcagtgagaagaaggtgatctgccgtgaaagttgacgccgattcttgcccccgtgaaccacatcctgtgctgctgatggaatcccacttggctcctggtaaagcagaaaccgccttgttctcgtggactgtaattccatctcaggtgcttggggcatcggacagtcctggggtcattgtcagctgaaaagttcatacraaattccatttcgttcttcctcagtatctctgttgtggattctcacggtagcatgttaaccaagtgggccttgcggtgtgtgtgagtacgggccaaggttggaggcctgctaatggcgtccagtggggaagacgcctagcactttccagaactgtgcttctgtttatatttttacttctcaatttcattgtttgattaaaaccttctgacacctaaatgaaaagagagctttggttawaawaaaaaaaaaaa

SEQ ID NO: 1916 - DNA, 541 bp, Canis familiaris
tatatcaggagacaagggtacggttagccatgcgctgaagggttgggtcccggactcaggcacccctgaccccacacccccaccctctctggacatgtttgctgaggaagtggcagagggggagctggagaccccaacccccacacagaggggagaagcagaattgaaaggagatgatggtctggtggacgtgatgtgggaatataatgtgtggagwatcatcaggggatgtctgagctgtatgggcccttcaccagcacccagatgcagacctgggtgaacgaaggctacttcgcagatggtgtttattgccggaagctggaccctcccggtggacagttctacaactccaaacgcattgactttgacctctacacctgagtctgctgagggcccagtttggtggtcccttctttccttgactctggaggaggccccagctgtctcaggcattgaggattttgggggccacctttcagtccattttcctttcccaataaaagcctttagttgtaaaaaaaaaaaaaaaaaaaaaaaaaaa

SEQ ID NO: 1917 - DNA, 585 bp, Canis familiaris
tgtgggagccgctgaccttcccggccggggttccggggctgggtggggcagccctggccccactgcctccacccaagatgcccccgccaaccatcctgagcgccgtccctcggcagawgttcagcgacgcggggcagcggggacgatgccctggatggggacgatgacctggtgatcgacatcccggagtgacccgcccccctgtggctgagcccctgcccctcgcccgatgccagcacacacaagccccccagcttccgcagagacgtttattgacgcccagttgccatgccgcggccactgacacaatcagaaaaggcgtaaacatgcacgaatgtcccctggaaggtgggtccccactggggaggggggccctcccatctgggccccatccaggggacagttagttaaatgagtggccaggagcatctgccgcctctcagagaggcggagaccgcatagtggtccccccattcaaaagggcagctgtacagggctaggttggttggtttttaacgaagattctgtattaaaggagtggctcttwwwaaaaaaaaaaaaaaaaaaaaraaaaaaaaaaaaaaa

SEQ ID NO: 1918 - DNA, 576 bp, Canis familiaris
tgggttaaatggtagattttttaagaataaaaacttttaaataagttagattcttcatggatactactgaagtaacatctaagactcagccttgacaagatgcttgtgtaaaaccctataaactaatgtttttgtagtaatggaggggctattgtttgacccttmaagtttccaaggagcacwacatataktgcttttctgtgaatgtctccttcatgaatggagcatttcaagttaacagtggtgattctgatatttccaaggttacttctatctgaaataatttagaattcaccaccatttaaaatatcttaaaacgaatttcagggtacctgggtggctcagtcagttgggtgcctgactccttaatttttggctcaagttgtgataacaaggttgtgggattgggccccaagttgggctccatgctcagcgtggagtctgcttctttacctccttccctccctccctctctctctctcttcctctgtgcctccctctacttgtgcactctctgtaaaataaataaataaatctttaaaaaaataaaaaaaaaaaaaaaaaaaaaaaaaaaaa

SEQ ID NO: 1919 - DNA, 723 bp, Canis familiaris
tccgggataagaatactggcctgaatgttatagcytcattataratcactgaagctgatatttactcktccctktkaagttktcttaaagtacgtctgtagcgggatggtatagatttcttgtttcagtgctttgggacaggtttgatgttatgtcagtcmatcaggttaaaattgtgtcttttcggttgcatasycggcmaataatttccvdaatgachacgcaytcgtggtgtcgagggbctgggggacagtggagaaggtaaatgaaccmwaaggcatmaatcaagggttcrgatggagcmgttaatcatgttgaagttatgtttctcaccttattgtcawgtgtttagacatttgtcacatttttaaaatcccccttgttcttaaactctcgatatcttttgaccttactatgattccagagaattcaatatagaaagaaaagaagaawagaaaagawaaaagaaaagaagagaaagacmwacactgtggcagtggcatttaacmatataatatattgtawacacaataaaatagggattataatgtatgacttttggcattggcttgaagcmatataatatattgtaaacaagacacagctcttacataatgaacattttatactgtttgtataaaataaaggtgctgctttagttwwmmraraaaaaaaaaaaaaaaaaaaaaaaaaaaaaaaaawaaaaaaaaaagaaaaaaaaaa

SEQ ID NO: 1920 - DNA, 661 bp, Canis familiaris
taatccggagcgtgatattactgcttcctttaagttttctaagwacgtctgtascgggatggtatagatttctkktttcagtgctttgggacargktttgatgttatgtcagtcaatcaggttaaaattgtgtcttttcggttgcatagccggcaaataatttccmaaatgacaacgcaytcgtggtstcgaggggctgggggacagtggagaaggtaaatgaaccmaaaggcataaatcaagggttcrgatkggagcagttaatcatgttgaagttatgtttystcaccttattgtcawgtgtttagacatttgtcacakttttaaaatcccccttgttcttaaactctcgatatcttttgaccttactatgattccagagaattcaatatagaaagaaaagaagaawagaaaagaaaaaagaaaagaagagaaagacaaacactgtggcagtggcatttaacaatataatatattgtaaacacaataaaatagggattataatgtatgacttttggcattggcttgaagcaatataatatattgtaaacaagacacagctcttacataatgaacattttatactgtttgtataaaataaaggtgctgctttagttttcmraraaaaaaaaaaaaaaaaaaaaaaaaaaaaaaaaaaaaa

SEQ ID NO: 1921 - DNA, 640 bp, Canis familiaris
  misc_feature (64)..(64): n comprises a, c, g, or t, or includes no nucleotide
cacaagcgaaagagaaagcgggaaagtgggaagttccttacccaaagttcgtgctcagggaganacagaagtattaaaagtcattcgaacaggaaagagaaaaaagaaagcatggaagaggatggtcactaaagtctgctttgttggagatggctttactagaaaaccacctaaatacgaaagattcattaggccaatgggcttacgtttcaaaaaggcccatgtaacacatcctgaattgaaagccaccttttgcctgccaatactcggtgtaaaaaagaatccctcatccccactatatacaactttgggtgttattaccmaaggtactgtcattgaagtgaacgtgagtgagttgggccttgtgacacaaggaggcaaagttatttggggaaaatatgcccaggttaccaacaatcctgaaaatgatggatgcataaatgcagtcctgctggtttaacagcagtttcagacgagtaatcccttataattactgaagactacacacctgtcaggaagaccattattgttgtggttctggatgctaccaaacagccttacatatctacagtcatcaagacatttattctactataaaaaagttgaaatagamawwwawtaaaataaaaaaaaaaaaaaa

SEQ ID NO: 1922 - DNA, 649 bp, Canis familiaris
atgtttaaagatcattctgctgaagattcmattwaagttttcctttggagaactagggaagaaaccgdataccaggagctggcccataattagtgttgtgcacttaatgactttaatctagttkttcattaatagtttttaaaattctgtagcgggctgtttaaawawaawramaaacttaaattttgcatttcacgccatcmaaatggtactttcttcccmrawysaaataaatctgatcagagcctggggtggtggcggggagtctacagctgaatgcagyctatttttaaagtaaaaatattttttaaatgagtttccttcttgaaaaaaatcagtgtattggtcmaaaaatgctgttgttaaaaataactgaacmaataaagtttgctttgagatgcacaggtttcmaagtataatctcatatttaattctgtaargctctcagtcccttgttctcattttcctttttcatataagtttaattaattatgcacatttaatttatctttcttcctgttttttctaatgctaatgttatttcttataactcagtaagatacggagtaaaataatgcttttggaagaatgtttaatagaaaattaaaatagcttttcctgaaaaaaaaaaaaaaaaaaaaaaaaaaaa

SEQ ID NO: 1923 - DNA, 654 bp, Canis familiaris
gcgacccgaccagcctgccgccgccgccgccgccgcgggccctggggatctgaagaggaaggcggcccgggccccacgctcagcttcgtgggcaagcgcagaggcggaaacmaactagccctcaakkacgggwatagtagccamagaagcagaagacggaggatgaggtattamcaagtaaaggtgacgcatgggccaagtacatggcagaggtgaaaaagtacaaagcccatcagtgtggcgatgacgatrawactcggccmctggtgaaatgacccccttccccgcctgcctacggcctgggactctctgcgatgtacataactatttaatgcagcggcagcggcggcagcctttcccccccaaggacttctacacagaaggaaatcgagatgcttcccgcagccgcggacgattctccaggactcttttttaccttgagcacttgcctcctgagacttcatagaacmgtggtttactgtcccctcttctcccacctccttgctctctctggctctttctgtcttcctcccacccccacccccccacccctccttagccatcacttctgggaagtaaagaacttgacttagtgccgaaaaaaaaaaaaaaaaaaaaaaaaaaaaaaaaaaaaaaaaaaaaaaaaaaaaaaaa

SEQ ID NO: 1924 - DNA, 741 bp, Canis familiaris
  misc_feature (86)..(86): n comprises a, c, g, or t, or includes no nucleotide
ggacgcgctgtgcgagtttgacgcggtgctggcggacttcgcgtcgcccttccacgagcgccacttccactacgaggagcacctgngagcgcatgaagcggcgcagcagcgcgagcgtgagcgacagcarcggcttcagcgactcggagagtgcagattcgctctacaggaacagcttcagcttcagtgatgaaaaactgaattctccaacagactctgctccggctctgctctcccctgctgtcactcctcggaaagccaaactaggagacacgaaagagctagaagactttattgctgatcttgacagaacattagcaagtatgtgaaacaagaagttctgggtcctttcatcataagggagaagcttcagaaagctccaaggacctggtaaacatcagctacagaagttgctaccagagccgacagagatgagtgctcacctaccaccaggccattctcaggcttgtgcgtaaaaaccaacctttgagatcatctctgggcaatttagacagtgaaactgactttgtttaccagcttgccgcgtattagaacaaatgacctatgctaatattctatttctctcaaaacctagctatcccgtaatttaaagtgcttttatgaaaaatatttgtaattaattatatatggttggaaacagtaaatatgcttttcccagtataatatatttttgtatgcaaataaaatttgacctagagtctgtattctgtaaaaaaaaaa

SEQ ID NO: 1925 - DNA, 741 bp, Canis familiaris
  misc_feature (656)..(656): n comprises a, c, g, or t, or includes no nucleotide
ttttttttttacagaatacagactctaggtcaaattttatttgcatacaaaaatatattatactgggaaaagcatatttactgtttccaaccatatataattaattacaaatatttttcataaaagcactttaaattacgggatagctaggttttgagagaaatagaatattagcataggtcatttgttctaatacgcggcaagctggtaaacaaagtcagtttcactgtctaaattgcccagagatgatctcaaaggttggtttttacgcacaagcctgagaatggcctggtggtaggtgagcactcatctctgtcggctctggtagcaacttctgtagctgatgtttaccaggtccttggagctttctgaagcttctcccttatgatgaaaggacccagaacttcttgtttcacatacttgctaatgttctgtcaagatcagcaataaagtcttctagctctttcgtgtctcctagtttggctttccgaggagtgacagcaggggagagcagagccggagcagagtctgttggagaattcagtttttcatcactgaagctgaagctgttcctgtagagcgaatctgcactctccgagtcgctgaagccgytgctgtcgctcacgctcgcgctgctgcgccgcttcatgcgctcncaggtgctcctcgtagtggaagtggcgctcgtggaagggcgacgcgaagtccgccagcaccgcgtcaaactcgcacagcgcgtcc

SEQ ID NO: 1926 - DNA, 1024 bp, Canis familiaris
ctttgacgttttgttttgttttgttctaacacaagaaaaaaaaaaaagaggagttatccttcagcagcagcagaagccatggattacacagcgaagtggagaacaccacyactcaaacacccatatctcaaggtctctcagctcttggtgctagctagtctcttttacttctgttcaggcatcatccaggtgaacaagacagtgaaagaagtagcagtactgtcctgtgattacaacatttccactacagaactgatgaaagttcgaatctattggcaaaaggatgatgaagtggtgctggctgtcacatctggacaaacgaaagtgtggtccaagtatgagaatcgcacctttgctgacttcaccaataacctctccatcgtgattatggctctgcgcctgtcagacaatggcaaatacacctgtatcgttcaaaagactgaaaaaaggtcttacaaagtgaaacacatgacttcggtgatgttattggtcagagctgacttccctgtccctagtataactgaccttggaaatccatcccatgacatcaaaaggataatgtgttcaacctctggaggttttccaaagcctcacctctcctggtgggaaaatgaagaagaattgaatgctgccaacacaacagtttcccaagacccggacactgagttgtacactattagtagtgaactggatttcaatataacaagcaaccatagctttgtgtgtcttgtcaagtatggagacttaacagtatcacagatcttcaactggcaaaaatgtaagtaacattgttctgaggagtttctactgtgtaaaatctaaaaagaaaataactcagccagatacattttggaattatgtatgttaactttgatagcatttcttgtatttttagacccataaatgataatgaagtgatattgtgacttgttaaggtcactgtacaggtatggccataatgttactaattttatttcctttaataaaccttctaaaactgagacatccaaaaaaaaaaaaaaaa

SEQ ID NO: 1927 - DNA, 613 bp, Canis familiaris
tttctgtggctgaaaagacttaagtaaaactttacaagttataatcctgttaagatcatttaattttagttgagtgcagagggcttttataacaaacgtgaagaaattttggagggccgtgatttttccagtattaaacatgcatgcgttgatcttgcagtttattttctcattgtgtgtgtacatagcttttctctgcagcacgacctctgtcgatggcgccycttggggcacagctacttaccagtcactgaatgtaccttcatccttacggctgctttggggttttcattaacaaaggttctacatatgttagcatatagtttctttgcacccactatttatgtctgaatcatttgtcacaggagagtgtgtgctgatgagattctaagtttgtgtgtttttaaatttttttgagcgagggaaggaaaagctgtatgcatttcattgccgactgcaggtttctttcagattacgttcatcggtctgtgtgtatacaatatgaagaatgatctgaagtaattgtgctgtatttatgtttatccaccagtctttgattaaataaaaaggraaaccataaaaaaaaaaaaaaaaaaaaaaaaaaaaaagggcg

SEQ ID NO: 1928 - DNA, 754 bp, Canis familiaris
gcgccgggtgtccgccgccggtgggcagctccgtgcggctcaagtgccgtggccaagcgggcaacccgcggcccgacatcacgtggatgaaggaacgaccaggccttgacgggcttggargccggcgagcaccggaagaagaagtggacgsytgagcstgaagaacctgcgcccygaggacagtggcaagtacacgkgccgcgtgtccaaccgcgccggcgccatcaacgcgacctacaaggtggasgtgatccagcggacccsctccaagcccgtgctcacgggcacgcaccccgkgaacacdayggtggactttgggggcaccacgtcgttccagtgcaaggtgcgcagtgacgtgaagccggtgatccagtgkctgaagcgcgtggagtacggcgccgaggkccgctacwwctccaccatcgacgtggkcggccagaagttcgtggtgctgcccacgggcgacgtgtggtcgaggcccgacggctcctacctcaacaagctgctcatcacgcgygcgcgccaggacgacgcrggcatgtacatctgcctgggcgccaacaccatgggctacagcttccgcagcgccttcctcaccgtgctgccagaccccaagccgcccgggcckccsgtggcccccgcgtcgtccagcacgagcttgccgtggcccgtggtcatcggcatccccgcgggcgccgtcttcctcctgggcaccgtgctcctgtggctgtgccaggccaagaagaagccgtgc

SEQ ID NO: 1929 - DNA, 708 bp, Canis familiaris
aggctgtacacaggggcctgggagccagggttgggcaagatgagatgatgaagktcatcggtgtcaacccaaggrsmaaggctacaaagggktcamcagccgctggcacaccaagaagctaccccgchawacccaccggggcctgcrcaaggttgcctgtakkggagcctggcatcctgcccgagtggccttctctgtggctcgggctgggcagaraggctaccatcaccgcactgagatchwcmagaagatatacmagattkgccmgggctatctcatcaaggatggcmagctgatcmagracmacgcttccmctgattacgatttgtctgacmagagcatcaaccccctgggtggctttgtccmctacggtgaagtgaccmatgactttgtgatgctgaaagkctgtgtggtgggcmccmagaagcgagtgctgactctgcgcaagtccttgctggtgcagaccmaacggcgtgccctagagaagattgacctgaaattcattgacaccacctccmagtttggccmtggccgattccagactgtggaggagaagaaagcattcatgggaccacttaagaaagatcgaattgcmaaggaagaaggagcttaatgtcaggaccagattgtgcagctggtgggatctcaataaaaattattttccagtgaaaaaaaaaaaaaaaaaaaaraaaaaaaaaaaaaaaaaaa

SEQ ID NO: 1930 - DNA, 711 bp, Canis familiaris
agtgcctggtgaaccaggtgtttgggcaagatgagatgattgatgtcatcggkgtcaccaagggcaaaggctacaaaaggggtcaccaagccgctggcacaccaagaagctaccccgcmaaacccaccggggcctgcgcaaggttgcctgtattggagcctggcatcctgcccgagtggccttctctgtggctcgggctgggcagaaaggctaccatcaccgcactgagatcaacmagaagatatacmagattggccagggctatctcatcaaggatggcmagctgatcmagracaacgcttccmctgattacgatttgtctgacmagagcatcaaccccctgggtggctttgtccactacggtgaagtgaccmatgactttgtgatgctgaaaggctgtgtggtgggcaccmagaagcgagtgctgactctgcgcaagtccttgctggtgcagaccmaacggcgtgccctagagaagattgacctgaaattcattgacwccacctccaagtttggccmtggccgattccagactgtggaggagaagaaagcattcatgggaccacttaagaaagatcgaattgcmaaggaagaaggagcttaatgtcaggaccagattgtgcagctggtgggawctccaatarraattattttccagtgaaaaaaaaaaaaaaaaaaaaaaaaaaaaaaaaaaaaaaaaaaaaaaaaaaa

SEQ ID NO: 1931 - DNA, 690 bp, Canis familiaris
tttggccaagatgagatgatgagtcatcgggtcacmaagggcaaaggctacmaagggtcaccarccgctggcacaccaagaagctaccccgcswwacccaccggggcctgcgcaaggttgccygtattggagcctggcatcctgcccgagtggccttctctgtggctcgggctgggcagaaaggctaccatcaccgcactgagatchaccagaagatatacacagattggccagggctatctcatcaaggatggcaagctgatcaagaacaacgcttccmctgattacgatttgtctgacaagagcatcaaccccctgggtggctttgtccactacggtgaagtgaccmatgactttgtgatgctgaaaggctgtgtggtgggcaccaagaagcgagtgctgactctgcgcaagtccttgctggtgcagaccmaacggcgtgccctagagaagattgacctgaaattcattgacaccacctccmagtttggccmtggccgattccagactgtggaggagaagaaagcattcatgggaccacttaagaaagatcgaattgcmaaggaagaaggagcttaatgtcaggaccmgattgtgcagctggtgggatctccaataaaaattattttccagtgaaaaaaaaaaaaaaaaaaaaaaaaaaaaaaaaaaaaaaaaaaaaaaaaaaaaara

SEQ ID NO: 1932 - DNA, 724 bp, Canis familiaris
tatgtcttcacgctgggtacaacccagaaagcttcwmamctgacaggcttgcgattttkggggtacgggatgcactttttgcccttckkaakgktctcytycaggtcagcttcammaggcctgacmatgcagagkcggctctgcttctccagcctgcagaargcgttgtcattggtaacgcgkktgkagatgcccatcccacagktcttggaacaggcactccactctgtggtctggaccaggcagttggcccgaatcatrgttggstctgggccaaacgtgtcttccagtcggtaagcggccagggcaggsycaaccaccgtgtgatccttgggctcgtcgcacacccactcctcgcagcatttcccgggcagcttgaccctccgcgggaaggggcartcggggctgggcaagcggacgtccatgctgcacaggggcacgcagcccaccgccccgtccaggcaggtgcactggtacttgcagctgctctggaaggactctccgctccggtacacagttcctccgaagacgcagggggccccgtctttagccgtgcacacgccgatcttgcggttggccggggagccgaagtcgcaaaagaggcccttgtgcgggtcgcaggggtcgcgctccgtgcacagctcgcccagctgcttggcgcacacacggcagcagccgcagccgtccagcacgagactgacgccggccgggcacctcggcgccg

SEQ ID NO: 1933 - DNA, 592 bp, Canis familiaris
gccccctacagcccctccgtcaaggaactctctcagcctggggtctcctcttcaccttggcacagaaatcatttgggkggatggtagggaggctggggggaggggcgccgctatctttgagacagaaagacgcgggagagcgtttcatatgtaaccattcgggtgtttttgctgtttttagaattcagaactctcgttgggggtgcctgggaggtggggtgagaggagcttccatttgtcccataggttgcmcggtaggggstggttgtgyktggggcagctgctgacaagtttgcaacaaccagccctagtctgtgttgcctgggtgctcactgagaggggctgttgtctgggagcccatgcmcctgggtccctgagggtcatggcttgtctccagccagtccgttctgcccttccctgccccatccccacccttctggccagagctcgggcccattcttaaccctacccattgatcatttcaagaaacctctgtttactgtgcagcaccyaggcaaaacatgctccacaagtccaacttgtatatttggcagattaaacttgacattatcgtaaaaaaaaaaaaaaaaaa

SEQ ID NO: 1934 - DNA, 675 bp, Canis familiaris
cggatttcccgggatcgcggcggccggagtctcggcgttccgccgcctgccagcgggcgctgcgctccccgcgccccgcggcccctccccccagarccgcgtcgggcagcctgsccgcggcccgcgggcggccgcccctcccsgccgtagccccacccgcctctttaaagcgtgcggcgggaagatgagkyttcgggagccgctcctgggcggcagcgccgcgatgccgggcgcgtccctgcagcgggcctgccgcctgctcgtggccgtctgcgcgctgcatcttggcgccaccctcgtctactacttggccggccgcgacttgagccgcctgcctcagctggtcggggtccccacgccgctgcagggcggctccaacggcgccgccgccatcgagcagccctccggggagctccggccccgaggggccccgccgctgccgcctctggacgcttcctccgagctgcgctcgggtcgcgactccagcccaggcgaggactccggcccccgccccggctcggcgagcaacttgacgtcggccccggtgccggccaccacggcgccgccgctgcccgcgtgccctgaggagtccccactgctcgtcggccctatggtgatcgagtttaacatgcctgtggacctgaagcttgtggagaaacagaatccagaggtgaa

SEQ ID NO: 1935 - DNA, 580 bp, Canis familiaris
gcacaagaagctgtgtagacgccaccattccctggagactacagtccacctgctcattctcggtagcttgtctaaaagaatgagaagtaaaggatgaagagtgagtaagatgatgatactgctaacctagaaactttttagaaaaaaactatttaaaactgtcagatcctgaccagcgcccacccagccccgsttccagtgattccgtgccttgagtgtgtctgcgtgtttacacccatccctctgctggctaccccccgcaacccatgcgggcagctcccctgcccttccccgccctgccctccacagaattgggttccaagggctgttccagacaactgccaacatcaccgagggccccatcccagtggtcctgggcmctggctccattaacctaaatgtagctctttagcgctaacctaggaaccgccgctgcctgctgagggccatgcccctcatgcccttgccccaggcctgggtccttcagcgttgaacacttccttgcttttttcacatgttttatggaattgttcacctggtttgaaataataaaatgtagaaagaaaaaaaataaaaaaaa

SEQ ID NO: 1936 - DNA, 580 bp, Canis familiaris
ccctgtacgaattgagggtccgtgtcttcagtcatgctactctgcaaagttgtagtagctaaataagttcattaccccttagcaaaggaaaaacaactagcagtatggaaaaatagcaaattactatttgaatataagtttcwwtatcyttatcytacatgaagaattaacatctaagggctcagagactcatagcaagtccatacagggcctgatgcatatgaagaggggcaggttgcaatgtgtatcggtggtgtgttaacactatcactcctacttatacaaggactgtccagttcacaactgacacaactgtttttcaggtattgttgtattaatagccagaaatgtgaattacaccttaaagctatcaaagcaatgttaaagggtgtctaaaaaagtttgtatttagccyttaataaggtttaaagaatctgaggtattatatccaataagatattttaactataaatccacaacctatagaatgtgtctcagaagctctagtaacatcaatcgaattaaaagaaacttattaattttcttaggattttcaargttttttttttttttttttttt

SEQ ID NO: 1937 - DNA, 580 bp, Canis familiaris
gggacatgcttaactcccaggcacagaagtcagtacgatgagacgtttcaacatcatcgatttattcaagtaatggggaatcgtttcctttttgttgatcgtcatacctttttatcgtttaatgataaacttatattcaaagwwatagraatagratgtacttcttaattgtagattcccgagtctctgagtatcgttcaggtatgtcccggactacgtatacttctccccgtccaacgttacacatagccaccacacaattgtgatagtgaggatgaatatgttcctgacaggtcaagtgttgactgtgttgacaaaaagtccataacaacataattatcggtctttacacttaatgtggaatttcgatagtttcgttacaatttcccacagattttttcaaacataaatcggraattattccaaatttcttagactccataatataggttattctataaaattgatatttaggtgttggatatcttacacagagtcttcgagatcattgtagttagcttaattttctttgaataattaaaagaatcctaaaagttycaaaaaaaaaaaaaaaaaaaaa

SEQ ID NO: 1938 - DNA, 650 bp, Canis familiaris
tcctagagtcccaggatggagtcccacattggctccctgcgtggagcctgcttctccctctgcctgtgtctctacctctctgtctcatgaatraatagatwraatctcttaaaaaattmaaataaagagcagattcgtatccagtgttgttacataacmagacactccagaattattggtttctaacacaggactggtggagttcttctgctactttgggtcttgacatggtctttcattcctgggcctcttacattagtggagggatatataaatattcaaagatgctgasccttatctttacatggaataaggaatgtatttattccttatggggttagaagggactcctgcccttgaagtcctcggttctaactgaggctctggtaagctttatgtatggtcaaatcattcattcaccctggatttcatttacaaatcagtagcttttgggggatccctgggtggctcagcggtttagtgcctgccttcagatgggcgtgatcctggagtcccgggattgagtcccgcatcaggctccctgcatggggsctgcttctccctatgcctgtgtctctgcctctctctgtgtgtctgttgtgaataaataaaatctttaaaaaaaaaaacmaaaaaaaaaaaaaaaaaag

SEQ ID NO: 1939 - DNA, 599 bp, Canis familiaris
ggagtgggaacctgttccagttaagaaggagtggacagaatgagtgcatttgcccatgcccgttgccgtaccctgccaccccagaagtaccttgtcagtcaatgttcactaccccatccctgcccgccattcacagctggatccgcttcctcaatgccgtccccactttctgttatcaatgtatcttaaggcaccatgtctctgcaaagtgttcactagcacaagatgcttaaaacccagactttgaatcctgcccatgtgccttgctggtcccccatcaygaccagatgcttcaaaattgsttcakgttcaatacccagtcatttaatagttccttctatttgttcccatttgagcaactagagrccaggaaataggcaaactatcactaacagtccttttgccttgggttccagtagctcattcccaaccctggattcttctgtggttgctgctggctcaatgaaggtccctaatcacattccctaccagttggggttcttcttttctgggagacactgtaaagagcacaagagagtaaataaaacagttgtatgawmtgaaaaaaaaaaaaaaaaaaaaaaaaaaaaaaaaaaaaa

SEQ ID NO: 1940 - DNA, 647 bp, Canis familiaris
atgatagaattttagtactggtaaacaggctttagtattaatgtgagacaacttagaaggaatgcttagagtgggcttttaagtgtgcctaaatgaattttgcacgtaactggtattcttggttttgtcctacttaatacacatgtaattcagaacttgtatactgttaagagttagattgtcttttggaatgaccagcaactttgatgtttgcactaagattttatttggaatgcaagagaggttgaaagaggtttcagtagtacacatgtaactaatttatttgaaatgtaccctaaagagaatctaccatgtaactaatttatttgaaatgtaccctaaagaaatctaccmgtttcttcaaatgcctttgttraaactcatcagagatgattagtaaaaatgcggagtatcatacttttcttcttgcawgtcagctacataamcaagtttttgtaccatgagaaaatactaatttgtttgacattccatgttaaactactgtcatgttcagcttcattgcatgtaatgtagacctagtccatcagatcatgtgttctggagagtgttctttattcaataaagttttaatttagtataagrawaaaaaaaaaaaaaaaaaaaaaaaaaaaaaaaaaaaaaaaaaa

SEQ ID NO: 1941 - DNA, 391 bp, Canis familiaris
cttcaaggaccccaagcggctgtactgcaaaaacgggggcttcttcctgcggatccaccccgacggccgggtggacggggtccgggagaagagcgatccccacgtcaaattgcaacttcaagcagaagagagaggcgttgtgtcyatcaaaggagtatgtgcaaatcgctatcttgctatgaaggaagatggaagattactggcttctaaatgtgttactgacgagtgcttcttttttgaacgattggaatctaataactacaatacttaccggtcaaggaaatactccagttggtatgtggcactgaaacgaactgggcagtataaacttggaccaaaaacaggacctgggcagaaagctatactttttcttccaatgtctgctaagagc

SEQ ID NO: 1942 - DNA, 590 bp, Canis familiaris
ctcggcacatggagcccagagagcccctggagccacaagatgttgggagcagtccctgttagctaaaagcccatcaaggcaagagctgcaggaagcctggatcccagagaagatgggggaggggtggaggccaaaagggagtcctcggagcctgtacaggaggctggaggacaggcggaggctgaaagagaagccccaggtcccggagcagaggctggaggacaggtagaggccagggaccttggaaaggaagcagaggagcttccaggggaaacactggagtctaggaacaccccmaatgaggttgaaggtcacgttattcagctggagaatgatgagatatgaaccttgacaacagagattcgcacccctagaagtctcagtaccagaacacwagccccmaagagtagggtgggaatgttgggacgaggaccacctctttgtccgcttcctggccccmatagtaggggcaggtctttctgtgcagctcatggtagaccctaagttgagggggcagctttagggcccagacaacccaataaagaaccgaatgaactccaaaaaaaaaaaaaaaaaaaaaaaaaaaaaaa

SEQ ID NO: 1943 - DNA, 2587 bp, Canis familiaris
acgcggggttccccaggcggcggctggaggctgcgcatctggggctggagccgtacaaagcggcamcgssgcgccgtcgcccatcatcaagttccccggagatgtcgcccccaagacggacaaagagctggctgtgcaatacctgaacacctactacggctgccccaaagagagatgcaacctatttgtgctaaaggacacactgaagaaaatgcagaagttctttgggctgccccagactggggagcttgaccagagcaccatcgaaaccatgcggaagccacgctgtggcaaccctgatgtggccaactacaacttyttcccccgaaagcccaagtgggacaagaaccagatcacatacaggatcattggctacacacctgatctggaccctgagacagtggatgatgcctttgctcgtgccttccaagtctggagtgatgtaactccgctgcggttttctcgtatccacgatggagaggctgacatcatgatcaactttggccgctgggagcatggagatggatacccctttgatggcaaggacgggctcctggctcatgcctttgccccaggccctggtgttgggggagactctcactttgatgacgatgagctatggaccctgggagaaggacaagtggtccgtgtgaagtatgggaatgccgacggagagtactgcaagttccccttcctgttcaatggcagagagtacaccagctgcacagacactggccgcagtgacggcttcctctggtgctccaccacctacaactttgagaaggatggcaartacggcttctgcccccacgaagccctgttcaccatgggtggcaacgctgacggacagccctgcaagttcccgttccgcttccagggcacctcctacgacagctgtaccacggagggccgcacggacggctaccgctggtgtgggaccacggaagactatgaccgcgacaagaagtatggcttctgccccgagaccgccatgtccactattggtgggaactcggaaggcgccccctgtgtcttccccttcaccttcttgggcaacaagcatgagagctgcaccagcgcgggccgtagcgacgggaaggtgtggtgcgccaccacggccaactatgatgatgaccgcaaatggggcttctgccctgaccaagggtacagcttattcctggtcgcagcccatgagtttggccatgcaatgggactggagcattctgaggaccctggagccctgatggcacccatttacacctacaccaagaacttccgtctgtcccaagacgacatcaagggcattcaagagctctatggggcctcccctgatgctggcacgggcactggccccaccccaactctgggacctgtcactcctgagatctgcaaacaagacattgtctttgatggcatctctcagatccgtggggagatcttcttcttcaaggaccggttcatttggcggacagtgacaccacggaacaagcccatggggcccctgctggtagccacattctggcctgagctcccggaaaagattgatgctgtgtacgaggccccacaggaggagaaggctgtattctttgcagggaatgagtactgggtgtactcagccagcaccctggagcgagggtaccccaagccgctgaccagcctggggctgccccctgacgttcagcgcgtggatgctgcctttaattggagcaagaacaagaagacctacatctttgccggagacaagttctggagatacaatgaagtcaagaagaagatggatcctggcttccccaagctcatcgcagatgcctggaacgccatcccggataacctggacgccgtggtggacctgcaaggcagtggtcatagctacttcttcaagggtgcgtattacctgaagctggagaaccaaagtctgaaaagcgtgaaatttggaagcatcaaatccgactggctgggctgctgagcaggctctggctcccccaggccctgccccgccacattgccttctgcacaccgggccctgagcgccagggaaggacccggatgggcctggcagccttcagctctgtagttaaatgggcgtgctcacccctacctggtaatttaagattctggagagtggctctgccctgtgcccaaggaacggtgctgattgtacccctcccaactgccctcacccccccccagagccacccccaaagagatgccttgatattctcaatgcagccctgccttgggctgccttggtgctgtcacacacttcaggctcttaccttgccacgattttctgtggctcacagcaccctcggagccaacagacggaaactgtctcaagagggcactggtggcctgacagcccggcgtggcatggggcagtgggacaggggcgcggatgtggccgccccacacacctggcttctcactgctggctgccttaggacctctcctacattagcagtttgctttgtatgcactttgttcttttctttcgatgtttatttttccactttgtgattgaatttcttgaccgaaggactcaggttgtctgaagtcactccacggtgcatctcagcccacatagtga

SEQ ID NO: 1944 - DNA, 716 bp, Canis familiaris
ggccatccgtgcatcgggtacaatagtcccaacctgcgtgcctcyttggcttccgccatctgctgcctcttwccgwcagagtagacagskycaatgaggaggttygcaaacagagggtgtcccggaaccgygacgcvccygaggggggsytkgacscsgtcctccargcgkctgtctgcaaggagaagatcggctggcgaaaggatgcgctgcacttgctggtgttcactacggatgatgtgccccacattgcactagatggaaaactggggggcctggtgcagccacatgatggccagtgtcacctgaacgaggccaacgagtacactgtgtccaatcagatggactatccgtcccttgccttgcttggagagaaattggccgagaacawcatcaacctcatctttgcagtgacmaaaagccattatatgctctacaagaatttcacagccctgatacctgggacaacagtggagattttacacggagactccaaaaatatcatccmactgattatcaatgcatacaayagcatccggtctaaagtggagctgtctgtctgggatcagcctgaggatcttaacctcttcttcactgctacctgccaggacggtgtgtcctaccctggccagaggaagtgcgaaggcctgamaaytggggacacggcgaccttcgaggtggcggcggaggcccggggctgcccgggcggcccagcg

SEQ ID NO: 1945 - DNA, 639 bp, Canis familiaris
cctcgttccgacagagtagacagcttcatgaggaggttctcaacagaggtgtcccggaccgtgacgcgcccgagggggctttgacccgtcctccagcggctgtctkcaaggagaagatcggctggcgaaaggatgcgctgcacttgctggtgttcactacggatgatgtgccccacattscactagatggaaaactkgggggcctggtgcagccacatgatggccagtgtcacctgaacgaggccaacgagtacactgtgtccaatcagatggactatccgtcccttgccttgcttggagagaaattggccgagaacaacatcaacctcatctttgcagtgacyaaaagccattatatgctctacaagaatttcacagccctgatacctgggacaacagtggagattttacacggagactccaaaaatatcatccmactgattatcaatgcatacaatagcatccggtctaaagtggagctgtctgtctgggatcagcctgaggatcttaacctcttcttcactgctacctgccaggacggtgtgtcctaccctggccagaggaagtgcgaaggcctgaaaattggggacacggcgaccttcgaggtggcggcggaggcccgggctgcccgggcggccc

SEQ ID NO: 1946 - DNA, 603 bp, Canis familiaris
ggggcgccccgctgccgggcaccgccgccgccgccgggggcgccgcccccgccgccaacgccgccgccgccgctcctgccgccgccgccgctgtcgccaccaccgctgccgcgggaggcgccgcgatcaagaagctgcccgggcctctcatctccgatttcttcgccaagcgcaagagacccgcgcccgaggccaaggcgtcgaacgaggtgcccgcgggatgcgccgcgcctggcgccgccccggccgtgggctcggcggagcagaccccgcgcaagcggctgcgatgagcctcgcgcgcaaagagccctgagggagcccgctgggcagcggacaggacaggagcgcggggcctcggctgggaccgtccatgtagcagcaaccggcggcagctgccaccgagcagcgttcggtttcgtgtttaaaatttaaaaaaaaaaaaaactgtgcaatgtattaataacgtcttttatatctaaatgtattctgcacgaggagtacactggtcccaaggtgtaaagctttaagagtcatttatataaaatgtttaatctctgctgaaactcagtgcaaaaaaaaaaaaaaatgaaaaaaaaaaaaaaa

SEQ ID NO: 1947 - DNA, 670 bp, Canis familiaris
cactcaagccgagaaccggggctgtcgagcactgctggctcctccgggaagcaggtggcccagctcaaacagaaggtcatgacccacgtcagcaacggctgccagctgctgctcggggtcaagggaccacgccttctgamcgcccccccatacggaccattcccccagtctggacgactgggcgcacgcctcccaawggggcgagggggcmgscggtgggcaccggcccccggggcaccgcywwwccachctggactcctgcccgcccgctctgcgtccmgtccttccmcttcgacgtttacaagcccccctttcgcgtttttttgtatgttttttttttttctgctggaaacagactcgattcatattgaatataatatatttgtgtatttaacmgggaggggaggagggggcgatcgcggcggagctggccccgccgcccggtactcaagcccgcggggacactggggaagggacccccgccccctgccctcccccctctgcatcgtactgtggataagaaacacgcactcggtccctaaagagtttattttaagatgtgtttgtgtgtgtgtgtgtttgttgttccgactttttattgaatctatttaagtaaaaaaaaaaawrrtkmwwwawwaaaaaaaaaaaaaaaaaaaaaaaaaaaaaaaaa

SEQ ID NO: 1948 - DNA, 605 bp, Canis familiaris
aatggcgacagcgaaccgggcggaccggaaccgggggcgatgcgggggccggtcgctgacccgggatggccggcatgctggcgtcggggagcctcacctaggagagcaacctcgcccggccgaccccgttgacggtccaccacgtggccctccggccgattgagaacaacctccgcgccaggattccgatgtgcctccagggcgccgccgccaagaactggagccactgggtcgaccggaagctcgacgccgtgaaccaataggcgtggaacgtgatggtgttggggaccaacggttgacgggggaacaacccgcagacgtgacgtcaacaagtgaaagtccgaagagacgtcagaccaggactgatcgggatagccaatctgtagaacaaccacaaccggacactgatgagacaacaccacaacaagttgaaccgatttcggacggtggcgatccgggctcggaatcgggccgtttttccgatgacccgaaaaacccggaaccaacgtcgacaagaccatcttcaaaacaaaaaataaactcgtattccgraaaaaaaaaaaaaaaaaaaaaaaaaaaaaaaaaaaaaaaaaaaaaaaaaaaaa

SEQ ID NO: 1949 - DNA, 605 bp, Canis familiaris
ttaccgctgtcgcttggcccgcctggccttggcccccgctacgcccccggccagcgactgggccctaccggccgtacgaccgcagcccctcggagtggatcctctcgttggagcgggccggctggggcaactgccaggtggtgcaccgggaggccggctaactcttgttggaggcgcggtcctaaggctacacggaggtcccgcggcggcggttcttgacctcggtgacccagctggccttcgagctgcggcacttggttatccgcaccttgcactaccacaacccctggttgccaactgcccccttgttgggcgtctgcactgcagttgttcactttcaggcttctctgcagtctggtcctgactagccctatcggttagacatcttgttggtgttggcctgtgactactctgttgtggtgttgttcaacttggctaaagcctgccaccgctaggcccgagccttagcccggcaaaaaggctactgggctttttgggccttggttgcagctgttctggtagaagttttgttttttatttgagcataaggcyttttttttttttttttttttttttttttttttttttttttttttttttttttt

SEQ ID NO: 1950 - DNA, 676 bp, Canis familiaris
atctgtgccctgttcctccattcagtgttaaatcagctaaacagaagttgttgcttatgatgtgtgagtgaacatacgccactgcctggcctttttttcttcagagcttgttgtctttttcgctatattagactttgcagtatgcccagaagctttccttcataaaatagaaagaaaaaaacatttggcttatttttcactgtagctagtcttttataccataatcttgtaagaaaatttcttgaattctaaatattactctttctagatttttgaaatcgaaaagttttcagtaaaaagtttcttactttattttatctatattaggtagtwmaaatgtagggttatttaccataacctgttcattaatatcagaaatttacaatagcattttaagaccatagtagggttctagcataccgtgtagtacctatggagtattgtaagagctaattgtccgagatgaattgcttctcatcttgttctccagtttccacttgttggtttattgcagatttgtatcctgtgtcaaattcaaggtattattgataaaccttttcaaccagcagcaagaagttcaaaattttttctgtcactgtaacagaaaacacaatatgtatataacatttatgtagcaataaatgtgccatcttttttttaamawaaaaaaaaaaaa

SEQ ID NO: 1951 - DNA, 548 bp, Canis familiaris
gaaaagggtgctcggtctccacgcggggattagatctcgcctgggggcgtcctgtagcgccgtacgggggaagccaagtggccaggttttcgccaaacacgttaagaggctctgcaaacagtccgaagcgctggccggagctgcgacgcggaagcagccacgcgtcttcggccgcagaactttcttcacgaagcggggcaggcaggctgagcgtcagaaaccagaagggcgcggacgtgccgaccaggagccgcggcgccttagccgatgaacctttcggacggccacgtatcctgggcgttgcggggggcggccggggcctcctcctcgggcggggccagggcctccatctcgcgcaccacctgcgtgaacacctggtccaccatcagtttgctcttggccgtgacctccaggaacgggcaccgccactcgcgggccagcgcgcggccccgcgccgtcagcacctggcgctcggcgtccaggtcggccttggtgcccaccagcacgagcggcacggccttggggccccgcaggcggcccatgcgctc

SEQ ID NO: 1952 - DNA, 715 bp, Canis familiaris
gcccggtggtggccttctctgccagcccccgcacaggcttggggggttttcaatgtgaaacacattgccagttktccaaaatgctgctttgtccaggtaagaytatccatgatctgggggcccggagactcaccctgactcaaggagttggtaagaggatagtaagcagacggtaggaccagtgaggagatctggccmaagattctggtataaccgaaccaagatgtaaaacgaaaggaatacttcaggatttcctgtgttccttcacgtctaatttgcaccttctggaygcacacttctcactttgctgtcacaccctctcggggctgatgttgtggcttgatgggtgctgcccccagggaccgcatcctgacacgcatcacagcaacattcctttcttgtgccctgggccaaaacyagtgctgatgactttatcagcattcccccttctcccacacccgcacaccgactgcaaaaatgtcttaatgcaagttctgtgatttcttgataagcctaaagaaattgaaaatagccaaaatctaggactgcagatttgtgcccatttatgaccttgtgctctgaaaaactaaatcggggcaaatgtagttttaaagtagaagaggaatttgcacagtaatatatatgcaagtataggtatagactatgtcatctggcacattcgttttctcagttaaaaaaaaaaaaaaaaaaaagg

SEQ ID NO: 1953 - DNA, 564 bp, Canis familiaris
gagcggccggggcggctcccgtgtcgacgggcgcgcggcgcccccggagggggccaakgtctaacggggtttacgtgctkccgagcgccgccaamyggagacgtgaagccggtggtgtscagcacgcctctgtgtggacttcctgatgcagctggaggactatacgcctacgatcccagatgcagtgactggttactacctgaaccgtgctggctttgaggcctcggacccacgcataattcggctcatctccctagctgcccagaaattcatctcagatattgccaacgatgccctacagcactgcaaaatgaagggcacagcttctggcagctcccgaagcawgagcaaggaccgcaagtacactctaaccatggaggacttgacccctgccctcagcgaatatggcatcaatgtgaagaagccgcactacttcacctgagccacccaacctaaatgtacttgtctgtccccctgtccccacaccagcctgttttcataataaactttattgtgacaggcmaaaaaaaaaaaaaaaaaaaaaaaaaaaaaaaaaaaaaaaaa

SEQ ID NO: 1954 - DNA, 2258 bp, Canis familiaris
gtgccagagaaagagaaagaccccaagtaytggagagaccaagctcaacagaccctgaaatacgccctcaggcttcagaatctcaacaccaacgtggcaaagaatgtcatcatgttcctgggagatgggatgggtgtctccacggtgacggccactcgcatcctcaagggtcagctccaccacaaccccggggaggagaccaggctggagatggacaagttcccttacgtggccctctccaagacatacaacaccaacgctcaggtccctgacagcgcaggcactgccaccgcctacttgtgtggagtgaaggccaacgagggcacggtgggcgtgagcgccgcgacccagcgcacccaktgcaacacgactcagggaaacgaggtcacctccatcctgcgctgggccaaggacgctgggaaatctgtgggcattgtgaccaccacgagggtgaaccacgccacccccagtgccgcctacgcccactccgctgaccgggactggtactcggacaacgagatgcccccggaggccctaagccagggctgcaaggacattgcctaccagctcatgcacaacgtcaaggacatcgaggtgatcatggggggcggccggaagtacatgttccccaagaatagaacagatgtggagtatgagatggacgagaagtccasgggcrcgaggctggatggcctgaacctcatcgacatctggaagaacttcaaaccgagacacaagcactctcactacgtctggaaccgcacggaactcctggccctcgacccctacaccgtggactacctcttgggtctctttgakccgggggacatgcagtacgagctgaacaggaacaacgtgactgacccgtcactctccgagatggtggaaatagccatcaagattctgagcaagaascccagaggcttcttcttgctggtggaaggaggcaggattgaccacgggcatcacgagggcaaggccaagcaggcgctgcacgargcagtggagatggaccgggcaattgggaaggcaggcgtcatgacctccttggaagacacgctgaccgtcgtcactgcggaccactcccacgtcttcacctttggsgggtacaccccccggggcaactctatctttggtctggcccccatgrtgagtgacacggacaagaagcccttcacggccatcctgtatggcaacgggcctggctacaaggtggtgggcggtgagcgagagaacgtctccatggtggactacgctcacaacaactaccaggcgcagtccgcggtgcccctgcgccacgagacccacggtggggaggacgtagcagtcttcgccaagggtcccatggcacacctgctgcacggcgtccacgagcagaactacatcccccacgtgatggcttatgcggcctgcatcggtgccaaccaggaccactgtgcctcagccagctcggcaggtggcccttctccaggtcccctgctcctcctgctggccctgctccccgtgggcatcctattctgagggcccaggacctgggcacccaccagcctatgacagatggccagcctccctctctcagtgctgcccaccgcctgggagcccacacctcaagggccaggtaggcgggaggccttcacagcctctgcagctggcagaaagaggacccaggaaaccaaagtctgctgcccacctcactcccctctggaatcctccaccagggccagccgagttcctggcctccggcctccgctccctccctgctgcccctttggccaacagagtaggtttctctcgggcaggcagagaatacagactgcagaaattctcaaagcatcttatttttctagcaaacacatttctccagacctggaggccccagagcttccatggaacattccggatctgaccttcccactcccctcccctcctggaaccaccaggccccatcatgctaagtccctactgcaggggagaccaggttctccacaggaaggggatttgctcactcattccaaggctgccgggggctcccaagaagtgaactgggactggccatccgaccccagggcttcctgggctgggaagagcagcagcctggacagacagacatttctcagctcttaacatgcattgcccactcctctctgaaggaacactcctgtttgggacggcaaaatttttttcccctctttttggtgttggttaaaagggaacacaaaacatttaaataaaactttccaaatatttctgaggacaga

SEQ ID NO: 1955 - DNA, 641 bp, Canis familiaris
gaggtatctcgtccccggtgaagaagacagagatggacaagtcacctktkccacagcccgtcgtccgcaggactcacctcgcctctccagcttcacgcagcaccaccggcctgtcattgccgtgsmacagcgggattgcccggagccctcacccctcctcggcgctgcacttccccaccacgtccatcctgccccagwcggcctccacctacttcccgcacacggccatccgctacccgcctcacctcaacccccaggacccgctcwaagatctcgtgtcgctggcctgtgacccggccagccagcagcctggaccgcctactctacgcccggcacgtcccctgcaaaccgttcctttgtgggattaggaccaagggatccagcgggcatttatcaggcacagtcctggtatctgggaymagaaagatttcgtcccacgccctgctccttcgtcgcgggaatcccagggggtcgcccagccggcccccggcccacgttttcggtggaaagttagagcgagcaagaacaccccgccgactcccagcctggccgaaaagacaaaacagacacatacacacaggagggaaacaagcaaaaagagaaaagaaaaaaaaaaaaaaaaggcaaaaaaaaaaaaaaaa

SEQ ID NO: 1956 - DNA, 579 bp, Canis familiaris
gtcaggggcccagactgggaaccaagggatgttaataacgtattatgatcaaggatatggaaagttacaatagtgcctatggtggtgatctaaactatagtggctatggcggctatgattatactgggtataactatgggaactatggatatggacagggatatgcagactacagtggccaacagagcacttacggcaaggcgtctagagggggtggcaatcaccataaacaattaccagccatactaaaggaggacattggagaaaacaggaggagattgcttaaagttaacccatcttgcaggacgacattgaagattggtcttctgttgatctaagatgattattttgtaaaagactttctagtgtacaagacacaaccgtgtccaactgtatatagccgccaattagtttcctttgtttttactttgtcttttgctatctgtgttacgactcgatgtggatttgtgtttatacaaattttatttgtatgatttcatggttaaacctcaaataaatgcttccttatgtgawwrwwaaaaaaaaaaaaaaaaaaaaaaaaaaaaaaaaaaaaaaaaa

SEQ ID NO: 1957 - DNA, 544 bp, Canis familiaris
gaataatactgtatattkctaattkttgaactatccctactgkcaaacctgtatgaktcatagactttcctccatagtacagtattcagtgcacagaaatcttatgattggttcaagtacagtaagttcagtgatttccaactaarattctcacatctgagtcagtgtttctagttcttttggctgtatgttcttagtatcagggtttcttatgcccttcattcatctttggggtttgagagcactgtttttgggaaaaagttcagaaatatattaggaaagaatgaaaccgttaaaagttttacttgcagagatactgtaggtgctaatactggatttaaatctttcagatttagtttcttttatggatcttttattcagtaaatcccatcggtctgtgtaatattttaattgtataaaactcctttgttactttatagcctgtaataatgtgtctgtctgccttttaaacctgttgcaataactttgctgaaataactcattagtaaaacttttcttaaacraaaaaaaaaaaaaaaaaaaa

SEQ ID NO: 1958 - DNA, 737 bp, Canis familiaris
gcggactgaagactacatggaccccattgacggtataatgccctaaacgatgtccacccagattgtctccattgccgatgagaaccagaccaccacctagagcctgaggaggtcctcaagtacagcgagttcttcacaggcagcaactgatggactatgcccggaatgtgcacgaggagttcttgagcccaccccacstgccacmtgccctgcacacmtcggccccctggtgcctcctaaaagccccccttcctgtggccccgacagctgtggctccaggcttactgaagatgtgcttgaacgggcccmaatccccgaggtgcagttgtgggctggccaccctccatgcatggagtcccacaggactgtgcaggtcacttctgagaactgactgcatcaaggcgctgcagcctcaccatatctgtggggagtaacgcagttcctgccgtttccttgaagaccaagaagtgatcatagtattagaatgagctctgctgagagctcttggccggcctctggggggtgcctgccccttcccggggtgctggggaggggccgccacaatgtttagtctccgaaaacacaaacgcttgtgacgagaatctcattaatgtactttaaattacagttgcttttttctcctagcttcatttttttgttgaaaaaaaaaatcccataaaatgattttgaatgttwrwrrmaaaaaaaaaaaaaaaaaaaaaaaaaaaaaaaaaaaa

SEQ ID NO: 1959 - DNA, 670 bp, Canis familiaris
cctcaagaatcccttcgggaatgccgttctcctgctaggagaggcaggcaaacagctgaggagcggcaggttggccacggcctgagtctcacggcatcatccaccaggagctgaaccggagcggcgagctgaccgtgcaggctctggagcagtttgccactgtggtggaggccaagctgataaaacacaagaaggggattgtcaatgaacagttcgtgctgcagcgcctggcagacagtgccattgacctctacgccatggtggtagttctgtccagggcctccagatccctgagcgagggccaccctacagcccagcatgagaagatgctctgtgacagctggtgtattgaggccgcagcccgggtccgggagaccatggccgctctgcagtctgacccgcagcaacaggagctcttccggaacttcaaaagcatctctaaggccttggtagagcgaggtggcatggtcaccagcaaccccctcggcttctgagtgctccccgctggggcctggccaggcctgtgccttctctctccagcccagcctggccccgattctgccttaaagaggccctggccccggggcgctgctgctctcggaggcccacttacagcctcttaagtaaaggttctcacaagccaaaaaaaaaaaaaaaaaaaaaaaaaaaa

SEQ ID NO: 1960 - DNA, 636 bp, Canis familiaris
tttgcccagtgcttccaaaatgagacaccatcaactggggaaaytgctgkctggggcctgagccagccccacaggtccgcacctccacccccagctgctccgcagagacctcccaagttggagtcgtcacagccccccagcacgggggagcagattgggtctgtacattccggggggtcccttgggcaggctgttttaggggccagcacagtgcccagggtgaaaggccagccagcaggtaaacctgtagggtgggggtcctcagaagccgcgaaggtcccactttctggtctaaggtattcaaggcctggccctctctgagggcagcaggacctcctgggtaggccaagaaccagcatgctcacggaaggacctcccaggatgggaccatatgctagcaccccagcaggggcttctgtgggtaccaggtcccaagggcctgtcatgagctcacgtcctcaggacgcactgcagaaacgtggcagtgcagtctgagggagtgggcaggtctcggggccggggctgggactggcgctgctggggggctctcagcagtgctcctgtgggggccagaccgggcatggggcactgggagttctagggatggctggcatctggtcttgctaaggcacgcag

SEQ ID NO: 1961 - DNA, 833 bp, Canis familiaris
cgtctgctaagcagccattagcatctactcagggcagttatatagataaactgctggacagaaaaattgtaaaatttagcagcttgattttatgttagcctatgaaatatattgtcctataaaaataactttaaactatttaatatttccttctttaccttacatraaaaaagtttaaatcacaaaaggaatgagtaactatacacttgcctaaccagaaatatagacccarctttcaaaatttctattattctactttgtatatatactagaaagcccaaccggtgcctgtgaggggggggaaacaagtgaacaaagtagttctraaccttcctccatatagraaatgtggtcagtgawgtcactttccttgctggtcatcattaggcttaaatgwaatgcagaagctcccatcaaagagtttacactaaaatcttcagggctttaaatgaaagggtaaggccagtttcagaaawacaactttagacattagcagctccaatattaaataaagctctgttttcctatatttttatgactgttgagaccccgcagggaccaatatttgtattcaatttacatttcatggtttcccawtgtttcacaatgagttctaataaatgggatttagtataataatccaagwawramatagctggtatgctttcatgaatgtttttatgtagattttcctcccatgaacatgagtaaataaatctgtttcctgaawwrawwrwrrwtgcatttaaagctctgtaataattctaataaatttactctataaaaawaaaaaaaaaaaaaaaaaaaaaaaaaaaaaaaaaaaaaaaaaaaaa

SEQ ID NO: 1962 - DNA, 714 bp, Canis familiaris
gataaactgctggacaggaaaattgtaaaatttagcaagcttgatttttatgttagcctatggaaaaatattgtcctataaaatgactttaaactatttgatatgttccgtcggttaccttacatgaaaaaagtttaaatcacaaaggaatgagtaactatacacttgcctaaccmagaratatagacccmactttcmaaatttctattattctactttgtatatatactagaaagcccmmccggtgcctgtgaggggggggaaacmagtgaacmaagtagttctaamccttcctccatatagamaatgtggtcagtgatgtcactttccttgctggtcatcattaggcttaaatgaaatgcagaagctcccatcaragagtttacactaaaatcttcagggctttaaatgaaagggtaaggccmgtttcagaaaaacmactttagacattagcagctccmatattaaataaagctctgttttcctatatttttatgactgttgagaccccgcagggaccmatatttgtattcaatttacatttcatggtttcccmttgtttcacmatgagttctaataaatgggatttagtataataatccaarwawramawagctggtatgctttcatgaatgtttttatgtagattttcctcccatgaacatgagtaaataaatctgtttcctgaawwraaaaaaaaaaaaaaaaaaaaaa

SEQ ID NO: 1963 - DNA, 632 bp, Canis familiaris
taaatatgtccttcttacgttacatggaaaagtgtaaatcaccaaaggaatgagtaactatacacttgcctaacccagaaatatagaccccactttcmaaatttctattattctactttgtatatatactagaaagccccaccggtgcctgtgaggggggggaaacmagtgvacmaagtagttctaaaccttcctccatatagraaatgtggtcagtgatgtcactttccttgctggtcatcattaggcttaaatgaaatgcagaagctcccatcacaagagtttacactaaaatcttcagggctttaaatgaaagggtaaggccmgtttcagaaaaachactttagacattagcagctccmatattaaataaagctctgttttcctatatttttatgactgttgagaccccgcagggaccmatattygtattcmatttacmtttcatggtttcccmttgtttcacmatgagttctaataaatgggatttagtataataatccmagtatgacatagctggtatgctttcatgaatgtttttatgtagattttcctcccmtgaacatgagtaaataaatctgtttcctgaawwramaaaaaaaaaaaaaaaaaaaaaaaaaaaaaaaaaaaaa

SEQ ID NO: 1964 - DNA, 645 bp, Canis familiaris
tatgaaaagtactttaactatgtaatatgtccttctttaccctacatgaaaaagttttaatcacaaaagggattgagtaactatacactgtgcctaacccagrratatagacccsactgttcaaaatttctaktattctactttgtatatatactagaaagcccmaccggtgcctgtgaggggggggaaacacagtgaaccaagtagttctaaaccttcctccatatagaaaatgtggtcagtgatgtcactttccttgctggtcatcattaggcttaaatgaaatgcagaagctcccatcaaagagtttacactaaaatcttcagggctttaaatgaaagggtaaggccagtttcagaaaracaactttagacattagcagctccaatattaaataaagctctgttttcctatatttttatgactgttgagaccccgcagggaccaatatttgtattcaatttacatttcatggtttcccattgtttcacaatgagttctaataaatgggatttagtataataatccaagtatgacatagctggtatgctttcatgaatgtttttatgtagattttcctcccatgaacatgagtaaataaatctgtttcctgaawwraaraaaaaaaaaaaaaaaaaaaaaaaa

SEQ ID NO: 1965 - DNA, 569 bp, Canis familiaris
tgtcactggtcctgacagtttctgaaaccatgtgtgtgactggtgacctggtgactcgccaggtgggtgtggtcgtggctcccagggagtgagggcctgtgtagaaggaacctcgctctgtcctgccttcagctgagggcaggagctcgtttccacgacatgcagaccacacggctttggggggcgggttkcgggcagagtgccggggttcamcaggcttctgtggtgaggggcctaggctgggaagcactgctgttagtgtgtacgtgtcaagtcttgctttgtcagtacccccatttcttggccccatgctcatcttgtcttaaaagcsctgggttcagagtgacctgtttttggctggcgtgtggggtttccgagtgtgtgaccagggtctctgttgccggggatgcagtgtccacactgaccaggcctgtagagtgctcagccttacttataatacatttgtaactgaatacggtgttttcaatttgtacagaatagttagaatattctattaaagttgtgaaacatgaaaaaaaaaaaaaaaaaaaaaaaaaaaaaaaaaaaaa

SEQ ID NO: 1966 - DNA, 731 bp, Canis familiaris
  misc_feature (6)..(6): n comprises a, c, g, or t, or includes no nucleotide
ccatanatgggtctcatatgttcttgaaagaatcttttttgctggcaggatccggaccggttaacccggggtaccagtggagtccaccggtgtaggaacgcatcacgcaggtccctgttttcccatcttttactagcttgacgtgtggaactttacaacgagaactcaaattgttctctcgagtttcagccctggcctacttgggatagctataacgwtttgcctccttgatacagtttgtagactcaaagctgttgctgagagaccctaaccgacgcatcttaggaggtgaaggatggagagcgctggcctttctgaggggcaggtctctgggacggaggcccttgktgtgarcagtkaaaaatcagctctagcaawttttagcggtgtgattagcagttcaattgggaaatgtagatgtaacacaggactaagtgctctacctggagttatttgcccccttgtagcgtcgatgttccatctgggcactaggccggtaattacctatctagtgcacacccagcctctaagtgtagtaacaatcagtttttgtgctgtaagaaccatttcctgttgtggtggaagctctgttgtttttgtataccctgttgtttcagttgtttctttttcaataggcccgggtgatttaacagctatgttatttagcctttatttttattttttttttttttttttttttttttttttttttttttttttttttttttttt

SEQ ID NO: 1967 - DNA, 731 bp, Canis familiaris
  misc_feature (6)..(6): n comprises a, c, g, or t, or includes no nucleotide
ggtatntacccagagtatacaagaactttcttagaaaaaacgaccgtcctaggcctggccaattgggccccatggtcacctcaggtggccacatccttgcgtagtgcgtccagggacaaaagggtagaaaatgatcgaactgcacaccttgaaatgttgctcttgagtttaacaagagagctcaaagtcgggaccggatgaaccctatcgatattgcwaaacggaggaactatgtcaaacatctgagtttcgacaacgactctctgggattggctgcgtagaatcctccacttcctacctctcgcgaccggaaagactccccgtccagagaccctgcctccgggaacmacactygtcamtttttagtcgagatcgttwaaaatcgccacactaatcgtcaagttaaccctttacatctacattgtgtcctgattcacgagatggacctcaataaacgggggaacatcgcagctacaaggtagacccgtgatccggccattaatggatagatcacgtgtgggtcggagattcacatcattgttagtcaaaaacacgacattcttggtaaaggacaacaccaccttcgagacaacaaaaacatatgggacaacaaagtcaacaaagaaaaagttatccgggcccactaaattgtcgatacaataaatcggaaataaaaataaaaaaaaaaaaaaaaaaaaaaaaaaaaaaaaaaaaaaaaaaaaaaaaaaaaa

SEQ ID NO: 1968 - DNA, 621 bp, Canis familiaris
tctgctttcctccagtgcaccagtgcataccccgctcctccctgaggacgtcaacctgcgcgttcatcacggaatatcagaagctctgttcctgacatttcccatagggtattctgggcatgaaacaggcatagcgatatctgtggccgcagtggctctgggtgccaaggtgctggagcgtcacataactttggacaagacgtggaaggggagtgatcactcagcctcgctggagcccggagagctggctgagctggtrcggtccgtgcgcctcgtggaaagggccatgggctccccgaccaagcagttgctgccttgtgagatggcctgcaacgagaagctgggcaagtccgtggtggccaaagtgaggattccagaaggcactgttctaacattggacatgctcaccgtgaaggtgggtgagcccaaaggctaccctcctgaagacatctttggtctagtgggcaagaaggtcctggtcactgttgaagaagacgacaccatcttggaagaatcggtagaaaatcatggcaaaaaaatcaagtcttaaaataaagtgccattctctgraaaaaaaaaaaaaaaaaaaaaaaaaaaaaaaaaaaaaaaaaagaaaaaaaa

SEQ ID NO: 1969 - DNA, 596 bp, Canis familiaris
gtcaggatactagaggtggatattgagtcctcatttgacacacacacactacatagcgaactgatattcatggtgcatggtggratgcatggtggttttattagtgactgtgtctgaagccttgaacctccaacagcttcttatgtatataaccttctatgttkgcttctgataaatgggaatctgggttcactgctgcctcctggaatatctctctgcctgcccttctgggttgttttcaatgccattagccaaagttgggtttgccatctcctacacatgggaaatcttgtgctgttccttgctgtcctccatactgtttaggtgtctggggaaatcaatctcacacaattagtacmaaatgtcttcagataatgggagacmacaggagagtagataggaaacgagactgagaactttaagatttttttccaaaccaaatgtttttcacgtaggatgcaaaatgttggcacgtcataaaaatatggatgtgtaaactagttgtgctcagtttgtagtgatggaaaatgtaytttactttgatcaaataaataatgctggaatattcmawawaaaaaaaaaaaaaaaaaaaaaaa

SEQ ID NO: 1970 - DNA, 673 bp, Canis familiaris
  misc_feature (40)..(40): n comprises a, c, g, or t, or includes no nucleotide
ctctggcctgttgtccgagaggacaccagattggtgctcnggtgctgctctcgactgtcgtgctgctccatgccctcctggccgtgggctgtaagttttatttcttccagcccctgcctctggagcacctggcaccgccggcccaggccacgtctctgcctgcgaacctcttgctgccacccacgtcgaggcctaaggccacttagggcggccgagcctatgggcccaacatgaggggacacctatgcctgccctgctcctcagacgatggtctgaaggctcccctgacacctcaagatcactstgctactttccagacttttcttactaaagcwracacttttattttctatgcaaaggtgattccgagaatttatataaaggcgggaaaggggcagcaggaagctcctggtgtggcatcgccctcgggctccctgcccaaccttctgctttccccaatgggacagttgggagagcagaggggggccaccccggcctcaactgtgcctgcccttcctgggtgcctggtgagctggtcccagggcctagcctgagctccaccgcatccgagtttgaaggtgttagaaacggggggagcagaagtagaagaaaattgcctgtgctgaaacataawaaaaaaaaaaaaaaaaawaaaaaaaaaaaaaaaaaaaaa

SEQ ID NO: 1971 - DNA, 776 bp, Canis familiaris
agctgtccgtcccgattccggttccagacatgcgccgagaagaccccagaagatgcttagccgwarggctgagcgcccgacctrctgccgaacygatcccatctggcssggccgtgagtggctggagcggcsccgcgcgaccatccggmmytggagctccttcgtggaccavcggcgcttytckcgscmccgchacctggkcgakctgtgccagcgcykygtacgcaacgtggagtactaccmgagcwactatgtgttcgtgttcctgggcctcatcctgtactgcgtggtgacgtcccctatgctgctggtggctctggctgtcttctttggmgcctgttacatcctckatctccgcacattgcagtccmagtttgtgctgtttggccgagaggtgagcccagcccatcagtatgctctkgccgggggcgtctcykktcccttcttctggctggctggtgcmgggtctgctgtcttctgggttctgggagccaccctcgtggtcattggctcccatgccgccttccaccagatggaagctgtggatggggaagagctgcagatggagcctgtgtgaggacctgcgggcctctggaatcggctgcctcatccctgttcccccctgccccgcttggccccgaggccctggccmaaggcctccttcccatctcgagcycagggcgggattccagctgtggaaataaagctgttacagttgtcawwmmaaaaaaaaaaaaaaaaaaaaaaaaaaaaaaaaaaaaaaaaaraaaaaaaaa

SEQ ID NO: 1972 - DNA, 650 bp, Canis familiaris
ccatccccacagcccctctagcttcagtttctaacatctgaggaaagcctaatgggataactaactgtattagaaaaccatcatggttaatctttcaaatttcctcaaaaatttccaatttttataaatttttccaattttgtgagagaatgacccatctaaaaacaaatcattactaaactcgaaaaaaaacccaaaggtaattaagggcytggttgcatcaactcgagaggttgtaaataataagcactgaaagtgagtttatttggaaataattcyggtggcyttatattctaaatttatgtagttgaaagtgaaggttgataggaatcagtggataaaagtcaagacaaaaatttagaaaatcaaaaatttctcgtaaataaaggtattttcctcaagggtcctcctgatcagctgatggtccagggatgggtccggttgagcaaggctgggctgctgcttccaatcaccaaaatatagtagagctcccaatagctgtagctaaatttacaatcycagaggagttgggtagtaaaaatattagcagctgatgtgaaggtaatcaatgcagagaacaagacagtatctgttttatttagaaaagctaataaacctytwtktkktttttttttttttttttttttttt

SEQ ID NO: 1973 - DNA, 650 bp, Canis familiaris
ggtaggggtgtcggggagatcgaagtcaaagattgtagactcctttcggattaccctattgattgacataatcttttggtagtaccaattagaaagtttaaaggagtttttaaaggttaaaaatatttaaaaaggttaaaacactctcttactgggtagatttttgtttagtaatgatttgagcttttttttgggtttccattaattcccgraccaacgtagttgagctctccaacatttattattcgtgactttcactcaaataaacctttattaagrccaccgraatataagatttaaatacatcaactttcacttccaactatccttagtcacctattttcagttctgtttttaaatcttttagtttttaaagagcatttatttccataaaaggagttcccaggaggactagtcgactaccaggtccctacccaggccaactcgttccgacccgacgacgaaggttagtggttttatatcatctcgagggttatcgacatcgatttaaatgttagrgtctcctcaacccatcatttttataatcgtcgactacacttccattagttacgtctcttgttctgtcatagacaaaataaatcttttcgattatttggarawamammaaaaaaaaaaaaaaaaaaaaaaaa

SEQ ID NO: 1974 - DNA, 655 bp, Canis familiaris
acagctatgaccattaggcctatttaggtgacacttatagacaagtttgtacaaaagcaggctggtaccggtccgggattcccggatcgaaggcgaagaaggaagcccctgcccctcccaaagccgaagccgaagcaaaggctttgaaagctaagaagcggtgctgaaaggcgtgcacagtcacaaaaaagaagatccgcacgtcacctacattccgwcgacccaagacctgcgtctccgaaggcagcccmaakatcctcgaaagagcgcccccaggagaaacaagcttgatcactatgccatcatcaagtgtcccctkaactactgagtcagccatgaagaaaatagaagacatacaacacacttgtgttcattgtggatgtcaaggcccaataagcaccagatcaaacaggctgtgaagaagctctatgacattgatgtggccaaggtcaacaccttgatcaggcctgatggagagaagaaagcatatgttcgactggctcctgactatgatgctttggatgttgccaacaaaattgggatcatctaaactgagtccagccggctataaatctaaatataaattttttcaccataaaaaaaaaaaaaaaaaaaaaaaaaaaaaaaaaaaaaaaaaaaaaaaaaaaaaaaaaaa

SEQ ID NO: 1975 - DNA, 686 bp, Canis familiaris
ttaaaatctagtagagtctcttgattcagaattgaataaatctgtagaaagcctataagccaatttgatttttggtcctgaatcttacccagagcactctttggtttctggcttaatggtttctaaccttctgctacggttgaatttctgtgcgtaagtttataaggcatatacttacatttacaattttcattcaggatctactctaccagtaaattatagaacttttccccaggactcgccccatcstcaaagctatgtgccacatagaatttgtgctgcatctgatttagttactaaaaacctgctgcagaatttatatcgtaaaaagaccccatatccaacaccagtaaagtaaaaaggggattaaaagcaactaacccccccccttgtgttaataagtagagacttaaagtgttggcttattttacattttcctatttttagtttattttcaacttcataaaaatcttagattgaaattcttcttagccagtaaaaatctactggttgtcctatttggttaattattctaatttggaaacagtaacttacaaggtttaaagctyactgaaatacggaggttggagtcctaccccaaaatccttgtgaaaagtctggtttgttaagtatgattaaactttgcttttgaaaaaaaaaaaaaaaaaaaaaaaaaaaaaaaaggc

SEQ ID NO: 1976 - DNA, 653 bp, Canis familiaris
cagaatgctggcctgyagscaggaagccaggccaggtagagtcccagagcagagaagaatatggcccacagcmtttkggaggctcttacktacctcccccatcagtgcmagtgcctggtggctgaggcttcagacagccctctgccccmcaggtctggcctctgggggacctgggggaggartcagagggggtctgaggcagcccatggagcgagacctatatgtgggacatgcctcaacagatggctttcccchacacccagctccccgcccccaccccggcagctgtgccctgtcctgtgactgtgtatagtgccaccacagcttatggtatctcactgaggaaaaagagaactgcacmataramccaagcctctggagaatgccttcctgcctttctctgctttgctcgtccgtctgtctccaggcctgcctcccttcccttagctgtgcatctaggagatcmaaactgccmccttgaactccccctctcctctgcctttatcagcccttccctgcccctgctgcctccagggtcagcatggaggccmttgcatgctggacttttcaggactactcaaacmtggcacmtttggcccaaataaatgaatgttccatchmaaaaaaaaaaaaaaaaaaaaaaaaaaaaaaaa

SEQ ID NO: 1977 - DNA, 460 bp, Canis familiaris
agaggacaagcctcctgcatgtgcctcatccaaggttccggagctgtccagaatgctggccykgyaggcaggaagccaggccaggtagagtcccagagcagagaagaatatggcccaagcatttgggaggctcttacttacctcccccatcagtgccagtgcctggtggctgaggcttcagacagccctctgccccacaggtctggcctctgggggacctgggggaggagtcagtagggggtctgaggcagcccatggagcgagacctatatgtgggacatgcctcaacagatggctttccccaacacccagctccccgcccccaccccggcagctgtgccctgtcctgtgactgtgtatagtgccaccacagcttatggtatctcactgaggaaaaagagaactgcacaataaaaccaagcctctggaraaaaaamaaaaaaaaagtgataaaaaaaaa

SEQ ID NO: 1978 - DNA, 633 bp, Canis familiaris
cttacaggcacccgaggcaacaagcttagagcagcagcgttgcttggctggctactactgagcaggtgatggggtcatgcctgccccctttccctgggctctgagccctttgccgtaatcatccaggggctggtgaagcccctgggagcctcattggcacstcagtwatcatagtgttwctgatcasgggatktgagactgttgtctgggstggctggggggaggggaktggstggsccagccagtctttttttctgtcttcctttgctaacttgggattttgagcaggttgggatgtgcctgtgattccctgccaccctgggaaccactataccctccttgggcccagactgctgatccagggtagggtgtgtgtgtgtcagtggagggtggggtggagggggttgcagtgtgggaaagtagctctgaggttgacctcagcttctcagcatagttgtcctttggggagcttgaggaactggggtcaggccaagcagaggccttggtgctggttggggatggggcctgcagagtcttagttactgatttcattttcaataagtctaggtttgttacattggtttccccaataaaaaaagaaaattgaaaaaaaaaaaaaaaaaaaaaaaaaaa

SEQ ID NO: 1979 - DNA, 465 bp, Canis familiaris
aatcatatgtgttactgatcagggatgtgacgactgttgtctgggtgtgtcttgtgggggagtgggatgtggctgggccagccagtctttttttctgtcttcctttgctaacttgggattttgagcaggttgggatgtgcctgtgattccctgccaccctgggwaccactataccctccttgggcccagactgctgatccagggtagggtgtgtcgtgtcgtcagtggaggktggggtgcgagggggttgcagtgtgggaaagtagctctgaggttgacctcagcttctcagcatagttgtcctttggggagcttgaggaactggggtcaggccaagcagaggccttggtgctggttggggatggggcctgcagagtcttagttactgatttcattttcaataagtctaggtttgttacattggtttcccaataaaaaaagaaaattgaaaaaaaaaaaaaaaaa

SEQ ID NO: 1980 - DNA, 560 bp, Canis familiaris
caagtccctgcagcaggtgctggcccgcgtgcccttcgccttgggagggcgccccaggcctcgctgcctgcagcacgtgcgggccgtcgtccagggcctkctkcagcgcgggctkcaggtggtgtagtgctsccgggcccgcggcctccaggtggtktagcgcgtrctgtatctggtggagcgggagttgttaggtggtgctggccgtcctgtatcgccttttggccgtggccaacctggcgcgcwcacttgtgcaggaacgtgccccagcaggttgtctagctgcgcctgagggtcgggcaggaggtgttggagctggcggccgaggcctcctacccctccacattgccagaggtggttcctagtgcgccccgctagcctccagcagggctccccctccttcaccaacccgagcccccagccagcaccctccggccayctggtggccagccccagccccctgcagaccaccagtttgggcccatgcaattatttgtaactccttgcacctctgcttttttttttttttttttttttttttttttttttttttttttttt

SEQ ID NO: 1981 - DNA, 560 bp, Canis familiaris
gttcagggacgtcgtccacgaccgggcgcacgggaagcggaaccctcccgcggggtccggagcgacggacgtcgtgcacgcccggcagcaggtcccggamgamgtcgcgcccgamgtccaccacatcacgasggcccgggcgccggaggtccaccamatcgcgcaygacatagaccacctcgccctcaacaatccaccacgaccggcaggacatagcggaaaaccggcaccggttggaccgcgcgwgtgaacacgtccttgcacggggtcgtccaacagatcgacgcggactcccagcccgtcctccacaacctcgaccgccggctccggaggatggggaggtgtaacggtctccaccaaggatcacgcggggcgatcggaggtcgtcccgagggggaggaagtggttgggctcgggggtcggtcgtgggaggccggtrgaccaccggtcggggtcgggggacgtctggtggtcaaacccgggtacgttaataaacattgaggaacgtggagacgaaaaaaaaaaaaaaaaaaaaaaaaaaaaaaaaaaaaaaaaaaaaa

SEQ ID NO: 1982 - DNA, 529 bp, Canis familiaris
caccccgcacgccgggcgcgggctcccttctccccgcaagtgtccgagcggctccgaaactccggcggcgactccgccacaggaagtttattctcagctccttttctgaaaggaggaaatagaagtttctcccggcgggcagcctttcttttcgctcttttctkttttccgccctgtctgaagtcgggggccccccggacctggcaggcgcgagccgccgggctgccgtttccctctgatttccagctttgggtcgggccggccgtcccggctgggctccggctgggctccggctgcgcgcgggagcgggaggcgcgggggagggaccgggggacgcgcggacttctagagggagggaccgggtggcccgccggccccgcggcgctccgggagcagaagcgcagcgcgaggccctcgcgaggcacggtccccgggctgtcgccgcctcccgcccgcacccgcacccgcacccgcacccgccggcgccggggagacgccggggagacgccggggagccgagaccagagcc

SEQ ID NO: 1983 - DNA, 617 bp, Canis familiaris
gcccaggaccggcgcgggcagaagacctcaacagccggtgttcttatggtctgttggcgagacggttgccctgttcgtggtcagcttcagccaggtgtctgctgcctgaagagcttcttcacggagaagcgagccagcccccgggcggtgcactcctaggtctgcgtcctgccccagggccctgccgccaagctgcagcggctcccaccagggcggccctggggctccccgagggcagggaacacaggtggccccccagcagccagtgcctgcagagcccagcagcccgtgtggccccaaggagggcattcggtagggcagggcccatggtctggctgtatgaggacccccagtgcccagtcttcctgggggcggctcagggcgcttactgtgctccacagagtgtggatcgctgggcttgtgtgtgtcctgtcctccatggaggggaagggctatccatgtggctgggctccgtggagagcagaggagacctctgagtaagcagcaggggcctgtggctgggtgctgcctgaggtgagttgcgtgcctcccagaggcagcactctgcctaataaaaactaagcaggagccccaaaaaaaaaaaaaaaaaaaaaaaa

SEQ ID NO: 1984 - DNA, 597 bp, Canis familiaris
tgtattttaattgttacttgacacgttaagaggacatgtgtgtgtgtacagagccatggtgagcaactggtctgcactggcctttgcaaggggttgtgtgctcctggtagcggtccctggtgtgatgggggaggtcaaggtagttygktgtatttcatggtctcaaggggccagatgtgttcatcttgkttttgtatcttttgttttgttttttgatcagagcttcactactgacctgtcctaggcagctatcttacagacgcatgaatgtaagaggaggaaggggtgggtgttgggatcacttggggatctttgacacttgaagwaaaaatacacctgggagctgcgtttgcccatcccccaatgtgtgctgaggagttgagctgtgaggggatggggctgagtggggtgggggctggaacccctcccccccaaggagtgccatctgggtcttccatctagaactgtttacatgaagatactcgctgttcatgaatacacttgatgttcaagtattaagacctatgcaatattttttacttttctaataaaaaaaaagtgtttgttaaaaaaaaaaaaaaaaaaaaaaaaaaaaaa

SEQ ID NO: 1985 - DNA, 793 bp, Canis familiaris
ggctcacagaacctggaacaagatggggagcagagagaactgaaggaaggcacctaagtgatggtgacaggccccagctatgagaccgtggccgagtgttccctgctgcagcagctgggggcagatgctgttggcatgagcacggtgcccagaagtcatagtcgcgaggcactgtggactccgsgtktttggcttctctctcatcactwacaaagtcatcctggattatgaracccgggagagggtgaatcatgaggaagtgctagaggcggggaaacaagctgcacgaaaactggaacagtttgtctcccttctcatgaccagtatcccacctcccagcwaagccggctaaccggccktgcagckcctggcctccccctatgggatccagcgcctactacctacttgggcccttkcggggtcccgtgcctctgtccttaagtagtaggagaaaggagaggaggatccccgtctttcgccctccccgttgctgtcaccccccttyttytccgagagctagtgccaaggcctgcctcgcacacgcccgggctggtgagcctgttgagcttggcgcggtagctactgctgccctttagagacgcgctttcacattcccgggcccgtggtgccccctgcwaagcaccmgagcccgcacaagggccggtccagcccmatacctcgtgggctttaatatcactgtattccgagaataaaaagaaggatgaaatggmhaaawamaaamaraaamaaaaaaaaaaaaaaaaaaaaaaaaaaaaaaaaaaaaaaaaaaaaa

SEQ ID NO: 1986 - DNA, 799 bp, Canis familiaris
ccctcactctgcctgcactgctggcctcgcgccctggtcacacactcagctccaggacaatgggtgctctctgcacgctgtggctggggctggtcctgctgggggtgcttggagccctgcagacgtcggcccaggcccaggtgtccctgcagcccaacttccaacaggataagttcctggggcgctggttcacctcgggcctygcctycaactcgagctggttccgggagaagaagaacgtgctgtccatgtgtatgtcagtggtggccccgaccgcagacggaggcctcaacctcacctycaccttyytcaggaaagaccagtgtgagactcgaaccctgctcctacggccggcgggaaccccgggctgctacagctacacgagtccccactggggcagtacccacgacgtgtgggtggtagccaccaactacgaggagtacgcgcttctctacaccgcaggcagcaaaggcctcggccaggacttccacatggccactctctacagccgcacccagaccccaaaggccgagataaaggagaaattcagcacctttgccaagacccagggcttcacagaggatgccattgtcttcctgccacagactgataaatgcatggaggagaacaagtaggtgaccgccgccccaggacctggccgtcctgcactgctctgctctttcctctgagacccccaggaccctggccctggtgcctccctgcccccacccttgccccctcaggctttctcctggctctgagaataaactccggaagcaaatccaaaaaaaaaaaaaaa

SEQ ID NO: 1987 - DNA, 647 bp, Canis familiaris
gtgtaccagcccaccgagatggccctgatgcacaaaaggcccgtccgaaggagcttacgacgtcatcctcccacgagccaccgccaacagccaggtgatgggcagtgccaactccaccctgagggccgaagacatgtatgcggcccagagccaccaggcakccacgccaccgagagacggcaagagctcccaggtctttagadacccctacgtgtgggactgagtcggcggccagaaggaggcgggcagatttkggggagggcgctggggacgtggcctgggtgagaagcccactgctctcctacggctcccggcccctcagtggctctggaaaactgcctcagagccagaaggccmaccctggctgccagtgtctgggtgggtgtccccgggaggccccctcacccattccttagtgtttgtggagtccaggagccagtcccggctttgtactccagccagatagtgttcttcttgggtgatggccggtcagtgccmacactttctggagtcttccgagggattcctgcagcctcgagagattgctcaggcgcgtctgtcctgggtcttgctcctctgtgaggagcaagggtgcctaataaacacgtttttgctttamraaaaaaaaaaaaaaaaaaaaaaaaaaa

SEQ ID NO: 1988 - DNA, 691 bp, Canis familiaris
aagtttgttttgttggtgttgcacaagcatccgatctttcctgraggaggagtcttgttaggaggatcccgtgaggaatttcaacgcbtttagccatggataataccatcagttgtagagccacgcttgcagaagtgcctaggcttttttccaractgactgctagagtgtttgaagcgtgcatgctactcaccrgggtcctaaaagtactaccactcagggcgcctctgtggcttgtgggatgaaaaccagttgcttcagtgctgaggcaagcatcaagagtcaggtccacaggcccacttccgtgaaccacagcgatgttctctcctgtttaaagacwaagcctcaacctccttttaagtatattgctgagagttttacccctktctacactcagtagcaataaacttgttgttgttgcagcgatttccctgtctcctggttggggtgtaaaaagtctctgtgttggtgtttatcgtgtaatctgtgctgcgcttggaagtactgtttgcagaggtcacgctttaacagcctttttactttgcagaaccactgcaactgggcatccaccgcacagagaaaacacactctttaggtgaaatcccactctttaaggagaamatttaaacaatctttgttccattaatttcttcagtacctmawyttttttttttttttttttttttttttt

SEQ ID NO: 1989 - DNA, 691 bp, Canis familiaris
ttcaaacaaaacaaccacaacgtgttcgtaggctagaaaggacytcctcctcagaacaatcctcctagggcactccttaaagttgcgvaaatcggtacctattatggtagtcaacatctcggtgcgaacgtcttcacggatccgaaaaaaggtytgactgacgatctcacaaacttcgcacgtacgatgagtggycccaggattttcatgatggtgagtcccgcggagacaccgaacaccctacttttggtcaacgaagtcacgactccgttcgtagttctcagtccaggtgtccgggtgaaggcacttggtgtcgctacaagagaggacaaatttctgwttcggagttggaggaaaattcatataacgactctcaaaatggggamagatgtgagtcatcgttatttgaacaacaacaacgtcgctaaagggacagaggaccaaccccacatttttcagagacacaaccacaaatagcacattagacacgacgcgaaccttcatgacaaacgtctccagtgcgaaattgtcggaaaaatgaaacgtcttggtgacgttgacccgtaggtggcgtgtctcttttgtgtgagaaatccactttagggtgagaaattcctcttktaaatttgttagaaacaaggtaattaaagaagtcatggaktwraaaaaaaaaaaaaaaaaaaaaaaaaaa

SEQ ID NO: 1990 - DNA, 591 bp, Canis familiaris
tgcacccccactgggatgagcttgkcggtkctgctctcccccccagacccttggtcgaggctctcccctgtyccgccccagccccactytccccccttcccgcctccctgagggctcagtctggggagggagagtcccttgctgcccctgcctggaagacttggctytggctcaggtagcaaggagaggatggaattttttggttcttctcgagggaggccmtttctcgtgccagcccccmgtctggggcacctctgagatggccatgctcagtacccctcccggcccgccccccccctccagtgcccccaccggggcccccagggctggagactttctttggtaaacggtccccccttcccccgccaccccccctcccccggggatgaggagaaggtggggcacacccagaaagggcaagcgggcagccccgctttggggacatgaacgttttaataatttttgctgaattcctttacmactaaataacmcagatattgttataaataaaattgtaaaaaaagaaaaaaaaagaaagaaagaaagaaaraaaaaaaaaaaaaaaaaaaaaaaaaaaaaaaaaaaaaaaaa

SEQ ID NO: 1991 - DNA, 624 bp, Canis familiaris
acccctctgtcacccactgccagtcagggcagtccttcattctgcgttgggagtctggaagaagactctcccttcccgttcctttgctcagatgctgagggttggaaaagcaaaaagcagatgtgtggcccaagactacttcaaaaaaagatgaaaacagcttagttcctcctgctcctgtggacagcgatggggagagtgataactcagaccgtggttcctgtgcccagttgtccmgaaattccttcagccaagctattgaagcagccttcatgagaactggacacaccagctacttcagatcccctctctgaagagaaaggaggaaagaaaaggraaaaacagaaaccaaagctcctgttcagcacttcagtcgtccacaccaagtgacactactggctaccttctccatctggttttcttttttctgtgcttttgttttgctgctgtaatttttaagtatttgagtttgaacagattagctctggggggagggggtttccacagcgtgagggggaaccaaaattttaaatacagtgtattttccagcttcccgtctttacaccaaaataaagtattgacacaaraaaaaaaaaaaaaaaaaaaaaaaaaaaaaaaaaaaaa

SEQ ID NO: 1992 - DNA, 622 bp, Canis familiaris
ggagatgagacccaaggtcagcagccacctcaacgtcggtaccgccgcaacttcaattaccggacgcagacgcccagaaaccctraaccacaagatggcmaagagacmaaagcagccgatccaccagctgagaattcgtccgctcccgaggctgagcagggcggggctgagtaaatgccggcttaccatctctaccatcatccggtttagtcatccmacatgaagaaatgaagatgaaattccagcmataagaaatgaacmaaagattggagctgaagaccttaagtgcttgctttttgcccattgaccagataaatagaactatctgcattatctatgcagcatggggtttttattatttttacctaaagacgtctctttttggtaatgataaacgtgttttttaaaaaaaaaaaaaaaagcctggtttttctcaatacacctttaaaggtttttaaattgtttcatatctggtcaagttgagatttttaagaacctcatttttaatttgtaataaaagtttacaacttgattttttcmaaaaagtcaacaaacggcaagcacccgttaataaaggtcttaaataatwrwaaaaaaaaaaaaaaaaaaaaaaaaaaaaaaa

SEQ ID NO: 1993 - DNA, 625 bp, Canis familiaris
tttcttctacccccgtgatkttcacactttgtgtgtcccaacttgaaatcatcgcctttggtgatagaattgaagaattcraatcgataracmctgaagtggtagcatgctctgttgattcacagtttacccatttggcctggattaatacccctcgacgacaaggaggacttgggccmataaagattccacttctttcggatctgacccatcaaatctcaaaggactatggcgtatatctggaggactcaggccatactcttagaggtcttttcattattgatgacaaaggaatcctaagacagattactctgaatgacctcccagttggtagatcagtggatgaaacmctgcgtttggttcaagcattccagtatactgaccgacatggagaagtctgccctgctggttggaaacctggtagcgaaactataatcccagatccagctggaaaactgaagtattttgacaaactcaactgaaaaatacttcatcagctgaaaagtacttcgtcaggttgcaatgcttgaaggttcttagtaaagttcaccgttttagaacttagtaaagttcaccgtttcagaaccmwaaaaaaaaaaaaaaaaaaaaaaaaaaaaaaaaaaaa

SEQ ID NO: 1994 - DNA, 699 bp, Canis familiaris
caggtttggagaccataactggttgccgctctttcttcggtactgtcctaaccggcgttggcaaagatgaatgtgttcatctctcaccgtggaggccttgggtcctgtctgcgtcatcgcccgtacctgcagcggggactttgttcctctgtggttcagtgcccgagacagaacctctttgggccgggccactgaggcgctgccgccaaccaacrtgtgcggggacctggactccagaccggccttgttggctggacacccccacttgttccacctctgtctgccaggraacccgagttctttatagtctcctctgtgccaggaatccattctcatttccaggttatttgaaatgagtcttaaaaagcmatagaagaaagtgagtaaaacacgttagctgtcgttccgagccggaactggacagacgtaggaaattcccgtatgatgtatgaaaatttcaccgtgcagggaaattacttccctctgagatctcctcttttcctataaaaattattcaaaattgtactgttactgtcaaattactcaaaatattgttactatgaaattattcaaaattgtaccgttactatcaaattattcgacatatcatgccaataaactgcatcaatttgtagacgattaaagtgttctccaacammaaaaaaaaaaaaaaaaaaaaaaaaaaaaaaaaaaaaaaaa

SEQ ID NO: 1995 - DNA, 631 bp, Canis familiaris
ccgtgcggagctctccactcacatggatgaaccccttactggagccttggcaaaacaacgcttgtggctttgggatacttgccttgacggtgggtgtctcagtcacacgtctagatgagaaatcggtgacacgaacctatgaaatggtgctatgtattwaccattccttattatcactaatcatctaaactactcactggaaattcaattaacgattttacgacgtaaagtagaatggagacctgaataattctgtgtaatataaatggtttataactgcttttgtacctagctaggctgcagttattaccaataataaatgaataataaacacagccttcattgctcctacattcttcttacggtcggagcatgaggacaagcctctggaccccccgggacagcgcattcccagggctcagctgggtctagactgttctctgcctccmaggactgtctggcmatgacttgtattggccaccaactgtagatgtatatacggtgcccttctgatgctaagactccagaccttttttttttttttttcggctttgctttttctgattttataccmactgtgtggactaagatgcattaaaataaacatcagagtaactcacwraaaaaaaaa

SEQ ID NO: 1996 - DNA, 711 bp, Canis familiaris
atgtggtgatgtggaaagcmagtcacacakyctacykgggacmccvamccccactcggsytcagggatactctggcctktccgtgaaagtcgtgaactctaccaccgggccargcgagcacctgcggaatgccctgtggcacacaggrracacccytggccaggtgcgcactctgtggcatgaccctcgacacataggctggaaagatttcactgcctacagatggcgtctcagccaccggcccmagacgggtttcattcgcgtggtgatgtatgaagggaagaaaatcatggctgattcaggacccatctatgacmaaacttatgctggtggtaggctagggttgttcgtcttctctcaagmaatggtgttcttctctgacctgaaatacgaatgcagagattcctaatcaaactgttgatcmaaagactgatcctaaccaatgctggtgttgcaccttctggaaccacgggcttaagaaaacccccaggatcactcctccctgccttttctctgcttgcatatcattgtggacacctagaataygggacttgcctcgagaccatgccattttccaaatcagactcggcaggtagcctctgaacgcgaagagaatcttccmagagcatgaacagttmmcmtggtgtgcttttcmamarvmmaaaaaaaaaaaaaaaaaaaaaaaaaaaaaaaaaaaaaaaaaaaaaaaaa

SEQ ID NO: 1997 - DNA, 470 bp, Canis familiaris
cctaagcatctgaagacatttgaccggaggaatggtcggaacaccgacctggtagagacccgggagctgcagaacctgatgctctgtgcacttcagaccatttatggagcagaggcccggaaggagtcacgtggcgctcacgccagggaagattacaaggtgcggattgacgagtatgattactctaagcccatccagggacagcagaagaacgccgtttgaggagcactggagaaagcacaccctttcctacgtcgatatcaagactgggaaggtctcattggaatatagacctgtgatcgacagaactttaaatgaggctgactgtgccacgrtccctccagccattcgctcctactgatgagaccagagttgaccagcttttgtaattatgtataatagctcatgcgtgtgttcatatcctaattacctttttaaaatcctgtactcaagtgaataaggagtgtcat

SEQ ID NO: 1998 - DNA, 3219 bp, Canis familiaris
cttgcaggtcgacactagtggatccamagaagyycaggyrsgaasaaaacacctcctgactctgtcttgcccccagctatagaccttccctgggcaggccagctttaggctctcctgggaagtagccagcgggattccaktcatgggtgaggtgacagcagagcaggtggagaagttcctggactcgaatattatctttgccaaacagtactacaacctccgctaccgggccaaggtcatytcagacatgctgggggccaaggaggcagcggtggacttcagcaactaccactcgctgagcagtgtggaggagagtgaaatcatctttgacctcctgcgagacttccaggagaatttgcaggccgagagatgcatcttcaatgtcatgaagaagctgtgcttcctccttcaggcagatcgcatgagcctgttcatgtacagggtccgaaatggcatcgcagagctagccacccggctcttcaatgtccacaaggatgctgtccttgaggaatgcctggtggcgcccgactcagagattgtgttccccctggacatgggtgtggtgggtcacgttgcccactctaaaaagatcgccaacgtcgtcaacacagaagaggatgagcatttctgtgactttgtggacaccctcactgagtaccagaccaagaacatcytggcttcccccataatgaatgggaaggacgtagtggcagtaatcatggctgtgaataaagtggacgagccccacttcaccaagagagatgaagagattcttctcaagtacctcaattttgcaaacctaatcatgaaggtataccacctgagttacctacacaattgcgagactcggcgtggccagatactgctgtggtctgggagcaaagtctttgaagagcttacggacatcgagaggcagttccacaaggccctgtacacagtccgggccttcctcaactgtgacagatattctgtgggactcttagacatgaccaagcagaaggaattttttgatgtgtggccagtcctgatgggggaggctccaccctattctggtcccaggactccggatggaagggaaatcaacttttacaaggtcattgactatatcctacacggcaaagaagacatcaaagtaatcccgaatccacctcctgatcattgggctttagtaagtggtctgcccacttatgttgcccagaatggcctgatttgcaacatcatgaatgcacctgcagaggacttttttgcattccagaaagagcctctggatgagtctggatggatgattaagaatgtcctttctwtgccaattgtgaacaagaaggaggaaattgttggggtggccacgttttacaatcgcaaagatggaaaaccctttgatgaaatggatgagaccctcatggagtctttggctcaattcctgggctggtccgtcttaaatcctgatacttacgagtcaatgaacagacttgaaaacaggaaggatattttccaggacatggtaaaataccacgtgaagtgtgacaatgaagagatccagaaaatcctgaaaaccagagaggtgtatgggaaggagccgtgggagtgcgaggaagaggaactcgctgagatcctgcaaggagagctgccagatgcagagaaatatgaaatcaataaattccacttcagcgacttgcccctgaccgaactggagctggtgaaatgtgggatacagatgtactatgagctcaaagtggtggataaatttcacattcctcaggaggccctggtgcgcttcatgtactcgctgagcaagggctaccgcaggatcacctaccacaactggcggcacggcttcaacgtggggcagaccatgttctccttgctggtgaccggaaagctgaagcgatacttcacagacctagaggccttggccatggtcaccgctgccttctgccatgacattgaccacagaggcaccaacaatctytaccagatgaagtcccagaacccactggccaagctccatgggtcctccatcttggaaagacaccacttggagttcggcaaaacgttgctgcgagatgagagcctgaatatctttcaaaacctcaatcgcaggcagcacgagcacgccatccacatgatggacatagcaatcattgccacagacctcgccctgtatttcaagaagaggacaatgttccaaaagatcgtggatcagtctaaaacatatgaaactcagcaggagtggacacagtacatgatgctggagcagacacggaaggaaattgttatggccatgatgatgaccgcctgtgatctctcagccatcaccaagccctgggaggtgcagagtaaggtagctctactggttgctgccgaattctgggaacaaggtgacctggagcgcacagtgctgcagcagaatcccattcccatgatggacaggaacaaggcagatgaactccccaagcttcaagtcggcttcattgactttgtttgcacctttgtctacaaggaattctcccgtttccacgaggagatcactcccatgctggatgggatcaccaacaaccgcaaggagtggaaggcgctcgccgatgagtacgacaccaagatgaaggccctggaggaggagaagcagaagcagcagacagccaagcaaggggcggcaggagatcagccggggggcaaccccagcccggccgggggcgcacctgcatccaagtcctgctgcatccagtaacgctgcctggcatcagctgcaccgaatggtaccacccttcctggaaagagaccacccaagccagcagaaaaccaaaaccctgcttgtgaagtaaaatagtaatcggatttgaaagctgggagagaatttagcttactttcatctagtggtttttgaacattttttcagttttgaatactttttactgagctaaaaccaacattctagctttaatagacatcaattaaacatttaattaaggccaarwtcatctgcttgcttagaatcattttcactcttatacttccattttatgatttcttataacaattgtctagcatcctcaaaagtagagaattgttcagtgaatccctcctcctcatcacccagattccaatatcagggttttgccccatttgcttcatccattcttttacatttctttcgcatttttttcttagctgaagtgaagtattttctttattaaattgatggtcttttttcttttttta

SEQ ID NO: 1999 - DNA, 723 bp, Canis familiaris
gtgacctgcacaccaagatacagatcatcaactggccttggagtgatttcttccgraccctcatagcagccatcctctacgckgatcacctccatcgttgtccttgttgaaggaggaaaccactccaaaatcatcgcgggggtactgggcctaatcgctacaagcctctttggctatgatgctgtatatcaccttccccttgcggcagcaaagacatacagcagcccctactgatcctgcagatggcccggtgtaggtgaactcccttcatttctctctgaaacctgcaaataacacttcccatcgaaaggactcctccctgcccttataacactcccagccaactcccagccccttactgaagtacaagtgcctttattgggagaatctgtcttcctgtcctgccagtcctccctcctgggtgtggccatctttatgggtgtgcctatgtccccctaccttctgcagtacccmacaggagacactgttctgcctggactatgcgcccacttaagccacaaaataaggggaggakggagcctcagatttcagactctaggccccaggctgtgacctgcaccaaataaactcctcagtgtgggggggatgsttctgtggagggataaataaacagattgttaaaacawrwrawaawrmaawaaawtaatcttttgatcmaaaaaaaaaaaaaaaaaaaaaaaaaaaaaaaaaaaaaaaaaaggg

SEQ ID NO: 2000 - DNA, 631 bp, Canis familiaris
attatgttgggaagcagggtaacccacagatgttccctgtaggtcatggcacttctgaaagcacatagagtcgagtcatgcgcatccacaacacatgcccacacacaaacatagacattgttgcacagattgtatgggaggttcagcaatgcattactcctctgttttctttttaatgtacacttaaaatacagtattatcactttataaaagcatacagttaaaccgtaataaatggaccaataagccactctatcagtattttgtatatccgtgcatatgcagacatatagagttaagcctttgtatttcaatattattcaaaaatattcaagatctctttgagtagcttctgctatgatattcttatgaagtaaagaggcaacttcctatccactgtatggagagaattcagttgaaggagtgagagtaatgagagacattttccattcattagatcttgctttcttttgttcattattgtactgtgctgtaccacatttatttcaatattcattttgtattaaaaaattttaaagtgctatttttttttgtttgtatttgaaaaactctgtgaataaattctctttgatcaataaacgagccatgaagtgttaaaaaaaaaaaaaaa

SEQ ID NO: 2001 - DNA, 652 bp, Canis familiaris
cttaggaacccccacctcattctccaagcctggtcggctgcctgcacagcccagaggcgccgttggcctggtctagcaacagaatttttgccaatcaccttgacactagttgaaccatcctaactggaacggcgcctcctttccactcatgttcccccaactttgtcgctttacactagagacatgtacatgtatgttttagatgctccmaaatggaacatgccmaatgagtgcctttgcctttctgaggctggggagsyggtgggccttggagtcctccctccagccgtccggggttgcctgtggctcctcaggccagcagagkggcttccagccgagggccagtccacaagcactttttcatgatgtcctcaagtcccattacgtggcacctgaaggagtaagaattgagggtgtgatctcagtggtgcttccagggggccgggggtgagcaggaggacgcagtgattgtaggcaacgaagtgtttctcttgatctaattaaatgcagtggtatggtttgctgcgtttattcctattttccattaaattaactttatttctagagcatattttgatttaccatcaagagccaataaagcattaartctcmwwwaaaaaaaaaaaaaaaaaaaaaaaaaaaaaaaaaaaaa

SEQ ID NO: 2002 - DNA, 617 bp, Canis familiaris
caggcgtttaccctaattatactaagcactttwaaratattttagtttgcatgtatcarggttcaattcagcttagaggtacaaaaaccctctagtaaatattatctatttgcmgttatagctgaaatttattaagccatcytatttktttataaaagccagccyaaaactgttaacaaaaaagttggaaacagaagtagaattcagtgcataagctgtataaaattaaacccatttcgattttaaaggtgatttatatatatatataacaagtctakatagagagagagagagagatatatatatatatatatatatctctatatatagacttcytaactgatttgcaaaagaaattaaaactgttggttactttattttcytgatacctacaacagatgaacgatgggagaatggaccaaattcgatttgactttcaactttaacctacatgcacagagaattacccagaataatcaggatttgcaactaaagttatagatttaactgaaatggcatagattttaaaaagcattagactactaacagtttttttatttaaatctttatctaacttttwwtyytwwkwtttttttttttttttttttttttttttt

SEQ ID NO: 2003 - DNA, 617 bp, Canis familiaris
gtccgcaaatgggattaatatgattcgtgaaawttytataaaatcaaacgtacatagtyccaagttaagtcgaatctccatgtttttgggagatcatttataatagataaacgkcaatatcgactttaaataattcggtagrataaamaaatattttcggtcggrttttgacaattgttttttcaacctttgtcttcatcttaagtcacgtattcgacatattttaatttgggtaaagctaaaatttccactaaatatatatatatattgttcagatmtatctctctctctctctctatatatatatatatatatatagagatatatatctgaagrattgactaaacgttttctttaattttgacaaccaatgaaataaaagractatggatgttgtctacttgctaccctcttacctggtttaagctaaactgaaagttgaaattggatgtacgtgtctcttaatgggtcttattagtcctaaacgttgatttcaatatctaaattgactttaccgtatctaaaatttttcgtaatctgatgattgtcaaaaaaataaatttagaaatagattgaaaawwarrawwmwaaaaaaaaaaaaaaaaaaaaaaaaaaaa

SEQ ID NO: 2004 - DNA, 704 bp, Canis familiaris
gatgacactttggtcgtggaggacttcagtggttcgaggtgcttcgtggcaatctgagtgttgtgaatatggtgcamtgkggatggctatamsggatttggtaatgacggaagcaactttggagkggcggaagctataacgattttggcaattacwacratcaatcctcaaattttggacccatgaaaggaggaaattttggaggcagaagctctggcccctatggtggtggaggccaatactttgccaarccacgaaaccaaggtggctatggcggttccagcagcagcagcagctatggcagtggcagaaggttttaattactgccaggaaacmaagcttagcaggagaggagagccagagaagtgacagggaagctacaggttacaacagatttgtgaactcagccaagcacagtggtggcagggcctakctgctacmaagaagacatgttttagacmatactcatgtgtatgggcmaaaaactcgaggactgtatttgtgactaattgtataacaggttattttagtttctgttctgtggaaagtgtaaagcattccaacmaagggttttaatgtagatttttttttttgcacccatgctgttgattgctaaatgtaatagtctgatcatgacgctgaataaatgtgtctttttttwwaaaaaaaaawaaaawaaaaaaaaaaaaaaaaaaaaaaaaaaa

SEQ ID NO: 2005 - DNA, 1005 bp, Canis familiaris
gcttcggtgscagtcgaggtgttggtggatatggtgacagtggggatggctataacggatttggtaatgacggaagcaactttggagktggcggaagctataacgattttggcaattacaacaatcratcctcaaattttggacccatgaaaggaggaaattttggaggcagaagctctggcccctatggtgktggaggccaatactttgccaaaccacgaaaccaaggtggctatggcggttccagcagcagcagcagctatggcagtggcagaaggttttaattactgccaggaaacaaagcttagcaggagaggagagccagagaagtgacagggaagctacaggttacaacagatttgtgaactcagccaagcacagtggtggcagggcctagctgctacaaagaagacatgttttagacaatactcatgtgtatgggcaaaaaactcgaggactgtatttgtgactaattgtataacaggttattttagtttctgttctgtggaaagtgtaaagcattccmacmaagggttttaatgtagatttttttttttgcacccatgctgttgattgctaaatgtaatagtctgatcatgacgctgaataaatgtgtctttttttaaawrwrmtgtgtaaagttagtctactctgaagccatcttggtaaactaccccaacagtgtgaagttagaattccttcagggtgatgccaggttccactcgaaatttatttgcaacctgcttgggcacagaagccattgtctccacaaaccttggtgtggttgaactgacagttaatgtgttgtgacctggagttcaccgttaaaagggtcacccaagcaaagtcctggagtttatttggttattatgattgttggcacatcctatgcaatatatctaaattgaattatggtatcagataaaattatagatgggattaaagcttgtgtatcgtccattawmawrwrwaatccaataaacgatttaatattctcttgaaaaa

SEQ ID NO: 2006 - DNA, 757 bp, Canis familiaris
  misc_feature (59)..(60): n comprises a, c, g, or t, or includes no nucleotide
  misc_feature (152)..(152): n comprises a, c, g, or t, or includes no nucleotide
gttttaaatacctgccgagaacccaaaagtttaaccaggcatagggagtaccccagagnnaattgaacaaggaactaccggtacaccagattgtggaactcagccaaggcacagggtggccagggcctagctgctacaaagaagacatgttntagagcaatactcatgtgtatgggcmaaaaactcgaggactgtatttgtgactaattgtataacaggttattttagtttctgttctgtggaaagtgtaaagcattccmacamargggttttaatgtagatttttttttttgcacccatgctgttgattgctaaatgtaatagtctgatcatgacgctgaataaatgtgtctttttttaaatgtgctgtgtaaagttagtctactctgaagccatcttggtaaactaccccaacagtgtgaagttagaattccttcagggtgatgccaggttccactcgaaatttatttgcaacctgcttgggcacagaagccattgtctccacaaaccttggtgtggttgaactgacagttaatgtgttgtgacctggagttcaccgttaaaagggtcacccaagcaaagtcctggagtttatttggttattatgattgttggcacatcctatgcaatatatctaaattgaattatggtatcagataaaattatagatgggattaaagcttgtgtatcgtccattatcrtgtgtaatcaataaacgatttaatattctcwwraaaaaaaaaaaaaaaaaaaaaaa

SEQ ID NO: 2007 - DNA, 654 bp, Canis familiaris
tgtcgagtggcttcggtgtcatcgagctgtgtggatatggtgctatgggatggctataacggatttgtaatgacggaagctactttgagtgctggaagctataacgattttggcaattacaacaatcatcctcaaattttggacccatgaaaggaggaaattttggaggcagaagctctggcccctatggtggtggaggccaatactttgccmtaaccacgawamccwaggtggctatggcggttccagcagcagcagcagctatggcagtggcagaaggttttaattactgccaggagaacwaagcttagcaggagaggagatgccagagaagtgacagggaagtctacaggttacatacagatttgtgaactcagccaagcacagtggtggcagggcctagctgctacaaagaagacatgttttagacmatactcatgtgtatgggcmaaaaactcgaggactgtatttgtgactaacttgtataacaggttattttagtttctgttctgtggaaagtgtaaagcattccaaccaagggttttaatgtagatttttttttttgcacccatgctgttgattgctaaatgtaatagtctgatcatgacgctgaataaatgtgtctttttttaaaaaaaaaaaaaaaaaaataaa

SEQ ID NO: 2008 - DNA, 691 bp, Canis familiaris
tgatgccagcggcaccctgaccccagagaggcagcgctcccctacktcccccgccggtacsgggcccatgscascctccgctacaaccccsgagagcgccagctytacgcctgggatgacggctaccagatkgtctataagctggagatgcgaaggaaagaggaagaagtctgaggacccagctctgggtttcggatctctgtcacctccgcacatttytacccccatcacgtttcctgctcctcgttgtccagatgtggcaggccgccgctcccgccgcatctgcagccagtgaaagccacyttctcaagtcccctcgtttcctgtgggactttagatcttgagagctcctttcccagcggaaagagggaaaacctcactcccctcctgccccagggcagggcctttcaggccagtcggaggtctckcagatccacagctctggcccttacmggtgggcaaccccagcaaaggggcagcagaatattccctgcctcagtgttagtagggggcggggagagcgagttccggaggagggaaccctcacctctggctgcccctgaagtgcccggagaacctgggcttcctgcgcatcattttgtmttgccgccttttgcattaaaaggraaatccmctgmhvaaaaaaaaaaaaaaaaaaaaaaaaaaaaaaaaaaaaaamaaaaaaaaaaaa

SEQ ID NO: 2009 - DNA, 628 bp, Canis familiaris
ccttgacagctaacaccccacccaagcccggtcaatatacaccaccagagtctgcacaacgaccttcaacatccaggatggacctgactttcaagaccgagttgtcaacagcgaaacaccagtggttgtggacttccatgcacagtggtgtggcccgtgcaagatcctggggcccaggttagagaaggtggtggccaagcagcatgggaaagtggtgatggccaaggtggatattgatgaccacacagacctcgccctggaatatgaggtgtccgctgtgcccactgtgctggccatcaagaatggggacgtggtggacaaattcgtgggtatcaaggacgaggaccagctggaggccttcctgaagaagctgattggctgacaagcaggtctgtaataaagaactttatgtgatcccttctacctcctgctctgaagaacagaccctgggccccacgctaaattaccctgtagccaccaccccccagagccacgtcccttccttcttcccaggtgccagggcagagaacacacgggcagggggaggggggtgtccccagacccctgtccctgggaagcctcactgtgaacaacctggaccaataaagctagggtttgcactgaaaaa

SEQ ID NO: 2010 - DNA, 711 bp, Canis familiaris
tgggcaagcagcgcctgagggctcaagtgtggagcccgggggcccgttcagcccaacccttgggccyggggacgggggggcagggggctttgggsgcscccagctagcmtttcactcctctatctccccgcttctgaggcrgctccaggtgtgagcacggtgctggcctcccccccacaccccccagyttggccgctgcagggccactgggcccgggtttcgcagctgcrsagccccaccccatcgactaaatcaggatctgcagagwwaagcccggagaatgaggcatctccacgcgcaccttcgctgagaagcgtcccggaaaggccggccagaggctgcragarccgcggccttcagagcacacacgtgcgcacacgtrcgcagccgacgcacgggccctcgggccactgggaggycaccaacattcgtgcgccmaaacctgaggctggaggcaggatgtacattctccccgtgtctcacctgcagaggaaagctgcgaacccgtgtcccgccgagggcacgtcccccacccaggctgygctggccctgcaggtgccctgcccctccctccccttcaccagcctgcagcttctcttattccgacccagtgcctgacacacagatgcctgtgtggtgctttccagaataaaggttgtgtattcgamaaaaaaaaaaaaaaaaaaaaaaaaaaaaaaaaaaaaaaaaaaa

SEQ ID NO: 2011 - DNA, 679 bp, Canis familiaris
gcacttcagtccaccctttggccgggatctgggtcaggggccttgggcgcccaagctagcctttcactcctctatctscccgcttcttgagccggctccaggtgtgagacacgkkctggcctcccccccacacacccccagcttggccgctgcagggccactgggcccggktttcgcagctgcrsagccccaccccatcgactaratcaggatcygcagagaaaagcccggagaatgaggcatctccacgcgcaccktcgctgagaagcgtcccggaaaggccggccagaggctgcragarccgcggccttcagagcacacacgtgcgcacacgtgcgcagccgacgcacgggccctcgggccactgggaggccaccaacawtcgtgcgscyaaawcctgaggctggaggcaggatgtacattctccccgkgtctcacctgcagaggaaagctgcgaacccgtgtcccgccgagggcacgtcccccacmyaggctgygctggccctgcaggtgccctgcccctccctccccttcaccagcctgcagcttctcttattccgacccagtgcctgacacacagatgcctgtgtggtgctttccagaataaaggttgtgtattcgarmwmwaaaaaaaaaaaaaaaaaaaaaaaaaaaaaaawaaaaaaaaaaaaaaaaaaaa

SEQ ID NO: 2012 - DNA, 636 bp, Canis familiaris
taagaggctcttggacagacccacaagaagctggcggagtcctaaaggccccgctgccccgcccccccaccgttccacgaagtctcacactgggtgctcggcagctgggtcagaagccctggccctgggctcacctgaagtcctatcactgccgcctcccccctcccctccaccgccawccatscagkkactgctggatttcagggacctggaggatttggggcatctccttcctgtgccaaggggcagtttggattttcacggcagcgccccagaactgcacaggtcacttcagtcctcactggcctggacagtggggagaagtctggtgaggcctctgtgacgtctggcatgcagcggggcctgggccgcctcatgcttcctgttcccctctgacmacggggcggcctttgtgtctgcaagaggggtggctctagcmagctccagcttctaagggccccccacgttcgttcgctcgctggtgtctgcccaggccaggactgagcccctcctctgcggctgaacagctggcacacaggctgccacawgcatttctttattattattattttttaacctggacatgcattaaagggtctattagctttwaaaaaaaaaaaaaaaaaaaaaaaaaaa

SEQ ID NO: 2013 - DNA, 696 bp, Canis familiaris
cttgraagagaaatctgagtctgttkttgttcttagtattccatgggttggttttcaaaattgatggatggggggttccaamcsytggttctgcccagctttggtgttttwactcccctatttctagtgacgttagttttcctgcattccagtcttcaatgctaaagataaggattgtacttgacacatgagtatatccagacwaatagttgaggcccttaagttgcttgagtacatgttccttattatgtagcatatactctgctgcatgtcttagattgtaggtaagggaaaggcctactgcaactaggaagaccttgtgtaattcggaacactctgtaagagcccctcacacccaggcggtccgggcgtctgtaaagtagatgcgtatttggggtattattccgaccgattgccactcctgtcccgagatgatttctttgtttcttgccaccatggraacctctgaaaatcataagggctttgaaaacaagtgttgggttgctcagtcagagggattaagaatagcatttccagcaatagtttgtgtgtattttgataaacttagtatattttctgtaaagtataatgactttacaaagggactattttaaataacgawatcaatcgataaattcacgtagattttaggaatggaaataaatggtttatatctttaaaaaaaaaaaaaaaaaa

SEQ ID NO: 2014 - DNA, 688 bp, Canis familiaris
agacacgcggctatgagcacgtgggacatccaagaacgttctccttcaagttggagtgatgggatggccttctgtgccctggtgcataacttcttccctgaggccttcgactatgggcagctcagcccacagaaccggcgtcagaacttcgaggtggccttctcatctgctgagacccatgcggactgcccgcagctcctggacacagaggacatggtgcggcttcgagagcctgactggaagtgcgtgtacacgtacatscaggaattctaccgctgtctggtccaagaaggggctggkwaaaaccamaaagtcctracccctgctcaggagccccacggatgctggtggactgcgtgcccctggtggagktggaggacatgatgatcatgggcaagaagcccgaccccaagtgcgtcttcacctatgtgcagtcgctctacaaccacctgcggcgccacgagctgcgcctgcgcgggaagaatgtgtagcctccctgcggcgcacaggcccgcactgcggcaagctgcacccaccatccaggcaccatcccctccctgtgcgcctgcccactgctgccctgtctgtcgcracaccctcccctgcatacacacgctgcgttttgataaattattggttttcaamraaaaaaaaaaaaaaaaaaaaaaaaaaaaaaaaaaaaaaaaaa

SEQ ID NO: 2015 - DNA, 486 bp, Canis familiaris
gctgattgcttgggctccaggccccggggcaggctcactctccactgccttctcttctgttagcttctaggggccttctgggtgtggcctggggaggagcggttttcaccctggaaagctgaccttggacctgacaccccaggcacctgctcctccccgtgccccagtccctgactcagggtgttctggggaggtgtggccaggccctccctagtttccagtctaaacaggagttgacgttctctgcccccccccgggctctcacactccccagcctckgcctcccccaaagtcgccttcacagtccctctaggaggcaagctggggcagagccaccattacgaagccagactttgtgtggcacagacagtrgtkggtttgcactgcctttggagctagagggagaaacaggtgtgtccacctgccttcctccagacttycagagaagtcttcaatgcaataaaagcagagattcttgcaaaaaaa

SEQ ID NO: 2016 - DNA, 628 bp, Canis familiaris
ctgtgcacacttytaaccagcgctgatcttgcaaagcactattttgagcacgcagttggagtacaggaagcagctccctgcatctgcagtgagctctccacttggtagctgggagactgttcggagagtgaccttgcatcttggacataaaatcatggtgtgtcctcaggagaatgtgcaatacctttgttattataatgcagattagggctccactgtgatcacaacacttcgttaatgaagatgataaaatggcgtagtgaccagctggggcacctgcagcatctttgactgtgtctccttcagagtcatgtgcttctggcacaggaaagtgtggaagaaccttgagtctatgtctacgccggggcctgggagaacttgttcattccctagaacaggttgttgaatgtctgtggaacagggagcagggatcatggatgacacccacaggaagccactacctgatgacacttggaagtgattgtctttaacatcacaggcatgacactttgaacgatatagagatgcacgcagttgaacttagaagtagcagtattggctttatgtaataaaggaagcatttttaacttaaaaaaaaaaaaaaaaaaaaaaaaaaaaaaaaaaaaaa

SEQ ID NO: 2017 - DNA, 654 bp, Canis familiaris
  misc_feature (11)..(11): n comprises a, c, g, or t, or includes no nucleotide
cctttgcaagnctaattattcaggtggtttgaatttaaaaggtgggaagtgttagcaaatgtaagttttgactgatccmaactkgcaggaatacmaactccccyttagtttmcttactgtcactaatagacctgacttctaacctacaagaggatgggggagagcagttcggctttgccaagagaagagtaaaggagcccgtaacttctacatttgcaaagtgtttctccttggtggagacattagccagtgtttagtttcaggccaagttatacaaatagagtattgatttgtatgcattctggagccttgctacatcatggtttgctatggcgtgggactcaggctagcctggggctatttgaacctcattcaaagttgaatagttactggaatctttgacattgccttgtgatgaggtacttccattgagaagacaccttgaagatggagaacagtgaggtctctgtgtgcatatgcataatatatatgcaggacaaatgtgtgcaccaatcaaacctgaaattttatgtgactgtcaaatgaatattacttgggttaagatttttcatttctgatttggatagmaaattgctattaatcttgtattaaaatagtttttaaaaatcwaaaaaaaaaaaaaaaaaaaaaaaa

SEQ ID NO: 2018 - DNA, 709 bp, Canis familiaris
aaaactgagccattccctgagttgtgattcttttattgcttctcttgcaaggctaattatcaggtggttttgatttaaaggtggaagtgtttagcacattgtaagtgtttgactgatccacaaacttgcaggaatacaactcccctttatttacttactgtcactaatagacctgacttctaacctacacagaggatgggggagascagttcggctttgccaaagagaagagtaaaggagcccgtaacttctacatttgccmaagtgtttctaccttggtggagacatttagccmgtgtttagtttcaggccmagttataccaatagagtattgatttgtatgcattctggagccttgctacatcatggtttgctatggcgtgggactcaggctagcctggggctatttgaacctcattcmaagttgaatagttactggaatctttgaccattgccttgtgatgaggtacttccattgagaagacacccttgaagatggagaaccmgtgaggtctctgtgtgcatatgcataatatatatgcaggacmaatgtgtgcaccaatcaaacctgaaattttatgtgactgtcaaatgaatattacttgggttaagatttttcatttctgatttggatagaaaattgctattaatcttgtattaaaatagtttttaaaaatctaaaaaaaaaaaaaaaaaaaaaaaaaaaaaa

SEQ ID NO: 2019 - DNA, 699 bp, Canis familiaris
ttctccctcctggcccagtcacgggcccaggagtccacccccaaggtcaagaaggctgtaaatgccaagaaagatgctgtgatycccacagatgtttgaggagctcaagagccaggtggacagcctggcccaggaggtggctctgctgaaggagcagcaggccctgcagacagtctgcctgaagggcaccaaggtgcacaggaaatgcttcctggccttcacgcagcccmagaccttccacgaggcgagcgaggactgcatctcgcgcgggggcaaccctgggcaccccgcagtcgggctccgagaacgacgcgctccacgactacctgcgccagagcgcgggcgccgaggccgagacgtggctgggcctcaacgacatggcggccgagggcgcctgggtggacatgaccggcggccacatcgcgctacaagaactgggagacggagatcacggcgcagcccgacggcggcaaggccgagaactgcgccgcccctggccggcgccgccaacggcaagtggttcgacaagcgctgccgagacaggctgccctacatctgccagttcgccatcgtgtagcgtcgcccccgccccgccccgccccaacccgccccaacccgctcctcgtgcaaataaagctggtgccgctgggccccgaaaaaaaaaaaaaaaaaaaaaaaaaaaaaaaaaaaaaaaaaaaa

SEQ ID NO: 2020 - DNA, 627 bp, Canis familiaris
atccccccagatgttttgaggagctcaagagccaggtggacagcctgtcacagagtgctctctgaaggatcacaggccctgcagacagtctgcctgaagggcaccaaggtgcacaggaaatgcttcctggccttcacgcagcccaagaccttccacgaggcgagcgaggactgcatctcgcgcgggggcaacyctgggcaccccgcagtcgggctccgagaacgacgcgctccacgactacctgcgccagagcgcgggcgccgaggccgagacgtggctgggcctcaacgacatggcggccgagggcgcctgggtggacatgaccggcggccacatcgcctacaagaactgggagacggagatcacggcgcagcccgacggcggcaaggccgagaactgcgccgccctggccggcgccgccaacggcaagtggttcgacaagcgctgccgagacaggctgccctacatctgccagttctgccatcgtgtagcgtcgcccccgccccgccccgccccaacccgccccaacccgctcctcgtgcaaataaagctggtgccgctggrmmmmraaaaaaaaaaaaaaaaaaaaaaaaaaaaaaaaaaaaaaaaaaaaaaagaaaaaaaaaa

SEQ ID NO: 2021 - DNA, 689 bp, Canis familiaris
gcacctaccgctcctctgcctcttctccctcctgacccaggtcacggcccaggagtccacccccaaggtcaagaaggctgwaatgcccacagaragatgctgtgatccccaagatgtttgaggagctcaagagccaggtggacagcctggcccaggaggtggctctgctgaaggagcagcaggccctgcagacagtctgcctgaagggcaccaaggtgcacaggaaatgcttcctggccttcacgcagcccaagaccttccacgaggcgagcgaggactgcatctcgcgcgggggcacmctgggcaccccgcagtcgggctccgagaacgacgcgctccacgactacctgcgccagagcgcgggcgccgaggccgagacgtggctgggcctcaacgacatggcggccgagggcgcctgggtggacatgaccggcggccacatcgcctacaagaactgggagacggagatcacggcgcagcccgacggcggcaaggccgagaactgcgccgccctggccggcgccgccaacggcaagtggttcgacaagcgctgccgcgacaggctgccctacatctgccagttcgccatcgtgtagcgtcgctcccgccccgccccaacccgctcctcgtgcaaataaagctggtgccgctggraaaaaaaaaaaaaaaaaaaaaaaaaaaaaaaaaaa

SEQ ID NO: 2022 - DNA, 622 bp, Canis familiaris
cacagcccaagctgaggggccttttgtgcggagcaagacactccacatggacacgggagggagtgcgtgagtcttagtccacagttcggaacgaagaggaccaggccagcccgagcggtggcgtgkytgtggtgtgttcccctccccacaggtgcacgtgtggacgtcctgacaccagacctcaggccaggactgtgtttggktcggggtcgctgcaggggtacttagttggggtgaggtcccactggagcagaggggccccagagtgatgacgggcatccktataaagggacacgtggatgcagacaggccggaggaagccccgcagagacaggggtgatgccccccccgggggtcagggtcgaggccgccccaggaaggcacccagcagaggcgaggggagtggaacgaggggcaggggcctgctgtgcccgggggctgcaccacacctggcaggcctgtccctgggatgggcggggaggcggcgttggtgacagcaggaagaggagcagcacccaggcctggagggaggaagggctgtgggctgcctcggcctccgggtgacctgtcaggacgcaggatgtggctggagttgagagactgaggcccaagtgagaagtgt

SEQ ID NO: 2023 - DNA, 662 bp, Canis familiaris
ttttatactgacaatgggaaactgtccccagaaagtgatgggtgaaaggagagctgaagggagcaggtgctgcggtgttttcagtttgctctaacaggaggaatagagatgcagaatacaccctgtctccccccgaggatgggaaggctttttgtttgagtcagacaaataaagtgacatggtcgaaacgtttgtcacggaggtgggctacagacagcmatcaggtgtcccaggaacttcgtcttctcactgttgcaccagccttaggcttaggcacaggtgtacaaagttctaacaggaggaagtgttcgctgacgttagggcacctccgtacmaagccagtcgttgggttattttgcctttaagtacactcgtaaaaggccctgtgtgtgtttgagtaaaactactagggccagctgccacctggtaagtgtagtgcaggggtgggtggacccacactgtctcacttctaaatccccctttgttttgctgcccaaatctaaataaatacttttactgataattgcttttactaagagatcatctttacttatagaaatgtattttgaaaacttactttacacgacgattttgtattcactgaaactaaccttttatcaataaagcactattgtttggctattaaaaaaaaaaaaaaaaaa

SEQ ID NO: 2024 - DNA, 607 bp, Canis familiaris
cactscctkggraccmctcacctgccacccctcackacctgctcarggccacagcmrggccttagcacctgacactacatgacaggtracaccararagtccctttggctggggctgtgggggtgagagtctgcccccaccccaggacccaggcaggcccagtcagcagagagctgggctctctcccagcctggagtaggaggagggggctggctgaaggctcttcagggggcacctcagccctcctgaagcctcagcatctccccagcacatctaagcatctgggcggctttgggagttccacgccgtcagcccggcagtctgatggaccgcctcggggccctgggctgccagtgcttatggcagagctgagacgatgtttrtttattcctctgtcccmaacccacccgtcatgctgcccgcaccccagcacaggggaagtttttgtytgarcagcattctcagtgacctcgatgttgcctttagaagggtgggttcgcctcttgcatatgggctttttcagaatcatttatgagcagaaaaaaaaacattgaaataaaactttgctaatactaaaaaaaaaaaaaaaaaaaaaaaaaaaaaaaaa

SEQ ID NO: 2025 - DNA, 482 bp, Canis familiaris
gcgtcagcatctcycaggttaaccacaagcctctgcgaacagcttgagccctcaacctttgccgatgccttgcttcatggttgccagaatggtccccatactgcatgcacaactggcttctctgagcacacccttgacaatggggttccacccctcatctccttgccaaatagcttgtgccttgccttggagaggaggggttgctcttcttccsagccccacactgctaagactacccagtcccccacgggtttcatgccagccttctgattatcctactcaccccgcaccctgcaatttaactttctaactggactgtatacatttatggtctagaattttcctgaccaaaactgagggatcgcctggaggttctcaactttatcaaatgagttgctgttacaaagtactgatactgattaataattaacttaataaagcagaactgattcaaagttaaaaaaaaaaaaaaaaaaaaaaaa

SEQ ID NO: 2026 - DNA, 748 bp, Canis familiaris
catgcatggctcagcactgctctgttgctgcctggtcctcctggccggggtgggagccagccgacaccagagcaccctacttgaggacgactgcacccacttcccagccagcctgccccacatgctccgagagctccgagctgccttcgggagggtgaagayyttctttcaaatgaaggacaagctggacaacatactgctgaccgggtccctgctggaggactttaagagttacctgggttgccaagccctgtcggagatgatccagttttacttggaggaggtgatgccccgggctgagaaccacgacccagacatcaagaaccacgtgaactccctgggagagaagctcaagaccctcaggctgagactgaggctgcgacgctgtcaccgatttctkccctgtgagaataagagcaaggcggtggagcaggtgaagagcgcatttagtaagctccaggagaaaggtgtctacaaagccatgagtgagtttgacatcttcatcaactacatagaaacctacatgacaatgaggatgaaaatctgaaacgtgctggagaacaaaacacccaggatggcaactcttctcgactctaggacatgaattggagatctgcaaaataccatcccgagatgtaggagagccgaccaactgcttggagaaccccgtcatacctctctcttagaatatttattactctgatacctcaactcccatttgtatttatttactgagcttctctgtgaa

SEQ ID NO: 2027 - DNA, 660 bp, Canis familiaris
  misc_feature (57)..(57): n comprises a, c, g, or t, or includes no nucleotide
gccttcgaggacctaaaccagcaggcagcacttgcggtttccaggggcagcccgtcnagaaagcgatcatggctccagctgcagtgtcctagcgtctgtccgtgggcgtcctgggtgcccacacacaagggcatcatccggcagtgggggcctgtgggaggggctcgcggggcagcctccagggtcacctctgtagccactgcacgcaccgactaaggtctgtgkcagktctgkctgggggctcccgacccgagggkcgggtgctttacacatgctgaagttctgtaccmagctgaactgtgcttgtcaaaggctattttctatatttattgttgggaaaagtcactttaaagacttgtgctatttggaagcaaagctattttttttgtcagtggaatgcggttttttactatgacatcataaggaacaacacagattccgtggtctcctttttgatgaaaggacagactgagatttgaaggaaacttgcacagatctgtgaaacatagaccttcgctttatttttataagtatcaactgccatcatgttttgtaatttggggtcttgagtttcaccattgtcggtgaagaaaattttcaataaatatgcattacctgtatgaagctgaaaaaaaaaaaaaaaaaaaaaaaaaaaaaaaa

SEQ ID NO: 2028 - DNA, 631 bp, Canis familiaris
cccagcctgtgcaggtgcggaaggcagcgagccagacggcttcctgggaggccctggcgggaaggccgcgtaccgcacgtccccgaggctgaaggacaagaagatggacgcccaccctccrcgcctcttcgcctgctccaacaagatcggacgcttcgtgatcgaggaggttccagrcgagctcatgcaggaggacctggccaccgatgacgtcatgctcctggacacctgggaccaggtcttcgtctgggtgggaaaggactcccaggaggaggagaagaccgaggcgctgagctctgccaagcgttacatcgagacggaccccgcaaaccgcgaccggcgcacccccatcaccgtcgtgaagcagggcttcgagccgccctccttcgtgggctggttccttggctgggaygacagctactggtctgtggaccccttggagagggccgtggccgaactggcggcctgaggggccccgtcggggacctgcgcgcgaaacgtcgggctcctcaccacattgtcccaagtacctgtgcttttggaaaattgaagtcaataaaagcttttgatgcgtgaaaaaaaaaaaaaaaaaaaaaaaaaaaaaaaaaaaaaaaaaaaaaaaaaaaaaaaa

SEQ ID NO: 2029 - DNA, 767 bp, Canis familiaris
ctgatcagaaacatagcgctaccttgggggaccgggatggtgaggctcgcctgttgcccccggctagttgctctccctgtacgcgctgcacgtgaagcggcgcgcgcccggaccggrwttwccgtgcgctctgcgacgtgggcaccgccatcagctgttcgcgcgttttctcctccaggtgggsccggggctttggactggtggaacaggtgctcggycaggacagcatcctcaatcratccmatagcatattcggttgcatcttctacactttacagctgttattaggttgcctccgggcccgctgggcatctatcctgctggtgctgagttyccctggtgtctcttatcggttctgtctacctggcctggatcctattcttcgtactctatgatttctgcatcgtttgcatcaccacctatgccatcaatgtgggcctggttgtgctcagcttccggaaggtccaggagccgcagggcaaggtcaaggggcactgagccctcacccaagccaggctgacctcatgccctgccaagggggccatgtctgggtccttagaagagtctgcaacctaacaccaccatactcccacacaagacaatggaccaaatgtgccacactctttcctccaccctagtgcctctggctytgtccccaagggctggtttccaaagttcctgccatcgcccaaggagggaaggttctgagcaataaaatttcttaaataaaaaaaaaaaaaaaaaraaaaaaaaaaarrrmaaaaaaa

SEQ ID NO: 2030 - DNA, 592 bp, Canis familiaris
caggtgggtccggtgctcttggacctgtgtggaacaggtgcttcgccatggacagcatcttcgtatcaatcccatagcaaattcggttgcattttctacactttacagcgtgttattaggtgcctcccggcccgcttggcatctatcctgctggtgctgagttccctggtgtctcttatcggttctgtctacctggcctggatcctattcttcgtactctatgatttctgcatcgtttgcatcaccacctatgccatcaatgtgggcctggttgtgctcagcttccggaaggttcaggagccgcagggcaaggtcaaggggcactgagccctcacccaagccaggctgacctcatgccctgccaagggggccatgtctgggtccttagaagagtctgcaacctaacaccaccatastcccacagcaagacaatggaccaaatgtgccacactctttcctccaccgctagtgcctctggctttgtccccaagggctggtttccaaagttcctgccatcgcccaaggagggaaggttctgagcaataaaatttcttaaataaawwraaaaaaaaaaaaaaaaaaaaaaaaaaaa

SEQ ID NO: 2031 - DNA, 654 bp, Canis familiaris
aaaatggatccatgttagagccgcccattaatcttgatcattccattctttgtccatgcctgttctgttttgctttctcattcgtatatccgtccaaccccatagacactgccacatacaccacgaaagacaaacatcccccatgaccttagccccattccattcactcmcaggtgggaattcaggcaaatgtccacagaggtcacagacaacatacatatgattctgttatatccagtatattaccccttcatgtcctaaggaagacctttctcttagagattttcattttagtgtatctttaaaaaatcttgtgttaagttgcctccatcttttttctgggtaagaacaacccaggagatggcccttttatgtctatgatgctgttcacagcttttgataggcttagaacaatcttgggaacagggttgctgtatgctgaaggtcagacagtagctcttagccttgcctatcttatgtagttacgctgtgcattttttttattggtgtaccatgtttgatttgtccctgataacctttggagtttttctgagaaatggagcagtaatgcagcatcaacttattaaaatacgttttaagcccttttaaaaaaaaaaaaaaaaaaaaaaaaaaaaaaaaaaaaaaaaaaaaaag

SEQ ID NO: 2032 - DNA, 734 bp, Canis familiaris
  misc_feature (129)..(129): n comprises a, c, g, or t, or includes no nucleotide
tgaacagctttttgtakcagagatcaccmatgcawgctttgagccadccaamcagatggtgaaatgtgacsctcgccwtggtarawacatggcytkctgcctgktgtacmgtggtgrcgtggktcccmnagatgtcaakgctgccmttgccrccatcaagaccaagcgcagcatccaktttgtagactggtgcsccackggcttyraagtgggcattaattaccagcctcccactgtggtacccggtggagacctggccmaagtacagcgagctgtgtgcatgctgagcwacaccacagccattgctgaggcctgggctcgcctggaccacaagtttgacctgatgtatgccaagcgtgcctttgttcactggtatktgkgtgagggcatggaggaaggagagttttctgaggcccgtgaggacatggctgcmctggagaaggattatgaggaggttggtgtggattctgttgaaggagagggtgaagaagaaggagaggaatactaaataccattcctttcagccctgcagcatgtcacactcagacctttagctttcaatgttagctgacaggcattaaagctttctgattagattgtcttcagttttaactgtgatcatgtcttctccatgtgtacctgtcacttattccatcatgtctchmagtaaaggctttaagaaaraamrwwraaaaaaaaaaaaaaaaaaaaaarraaaaawaaaaaaaaaaaaa

SEQ ID NO: 2033 - DNA, 676 bp, Canis familiaris
tacatggcttctgccctgttgtaccgtgggtgacgtggttccccaagattgtcatgctgcccatttgccaccatctagaccaagctgcagcatcccagtttgttagactggtgcccccacctggcttcaaaagtgggcattaatttaccagcctcccactktggtacccggtggagacctggcchaagtacagcgagctgtgtgcatgctgagcwacaccacagccattgctgaggcctgggctcgcctggaccacaagtttgacctgatgtatgccacagcgtgcctttgttcactggtatgtgggtgagggcatggaggaaggagagttttytgaggcccgtgaggacatggctgyccctggagaaggattatgaggaggttggtgtggattctgttgaaggagagggtgaagaagaaggagaggaatawctaaataccattcctttcagcccctgcagcatgtcacacctcagacctttagctttcaatgttagctgamcaggcattaaagctttctgattagattgtcttcagttttaactgtgatcatgtcttctccatgtgtacctgtcacttattccatcatgtctcmaagtaaaggctttaagaaaraaaaaaaaaaaaaaaaaaaaaaaaaaaaaaaaaaaaaaaaaaaaaaaaaaaaaaaaaaaaa

SEQ ID NO: 2034 - DNA, 704 bp, Canis familiaris
aatgtcattatctggggaaaccattcctcaactcagtatccagattgtcagccatgccaaggtgraaactgcaaggaaaggaarkttggtgtttatgatgctctgaaagatgaaagctggctcaagggagagttcatcacaaccgtgcagcagcgtggcgctgctgtcatcaaggctcgaaagctgtccagcgcgatgtctgctgcaaaagccatctgtgaccatgtcagagacatctggtttggaaccccagagggagaatttgtgtccatgggcattatctccgatggcaacccctacggtgttcctgatgatctgctgtactcattccctgttacmatcmagaatwaaacctggaagattgttgaaggtctcactattaatgatttctcccgtgagaagatggatctaactgcmaaggaactggcggaagaaaaagaaactgcctttgagtttctttcttctgcctgactagcccatcattttgatgttactaaaggctccmaagctgaagaatctaaatgtcgtctttgactctagtaccmaatgacmatattgctgtacttaaattccttgtgaaaaacgtttgaaagattatgtgcttcttggtataaatttgtgacagtttatcatgctgttagtgctgcattctaaataaaatatatattcaaatgaaaaaaaaaaaaaaaaaaataaaaaaacaa

SEQ ID NO: 2035 - DNA, 359 bp, Canis familiaris
gaatggcaccagtgtgtgtacagaaacgggaactggtatgtgggtgtgggctgaagcaggggctgggcatccgtcgccccagggccggggctgggctggtcctgtgctggccgggcagggtgatggggccgagctgggatcctagcagccctcggggaactgcaggcacttctccacctgtctgcttctccgctggaccctgacccatgcccagctcctgagagcggttaattttggacttgctaacttcttgaaggtttccttgatgggcagccctgagctccgtgtgggtgtaggtgtctttgcttctggagggcgctgtcatatggtagctccaatccatgcccctgtaaggtgct

SEQ ID NO: 2036 - DNA, 621 bp, Canis familiaris
tgtgagttggagaatcttggcagatttagtagccmgacatgtggaacgatgggcagccactaattccctattgtccttcatatcactcatgttgagacctyagctccagactccgatactwaaaggtaatatggactccgtggtgcaagtakccagtgctagcacagacaggatgacagagratgctgacaaggttccaacagccaaggctacctgctatttgcaaggctgatttatgatcmaaattatctatcgatatgccttgggtatgattcttagagaaaachaaaacmaagtggaaaaagctagaatggrattctctgatctacataaccacatttctaagcccttgagttggttctgggcaccagggatccatgagggtgggtggtcacctccttacgtgcatcatacctaatttcattaagtaattaataattccagcatttgccaagccttccaatactcaattttaaaatgaaatgcattttgctatactattaaactggcttaatgtagtatatccttattaactagaatgtaatcaaagcttcaaataaagttaatgtgattgtgtttgcawmwrmaaaaaaaaaaaaaaaaaaaaaaaaaaaaaaaaaa

SEQ ID NO: 2037 - DNA, 614 bp, Canis familiaris
  misc_feature (112)..(112): n comprises a, c, g, or t, or includes no nucleotide
gcccggggagccgtccaaggtgttcgcggcttcctggtgctgccgcgcccgacggccagttcgccttcctcatccccacgcggggccttcgcccacagcggcccggtcatcncccgtctacatccacgcggcggcggcgcctccgtgggccccggcgccggctcgccctccagcggcccctcgctcacggcggactccatgtggcggccctggaggaacctgaaggcccgggcaccctcccctgccctgccctgccccgccccgccccggggacactcaacaggaacttggacactgggagaccagaggactgtaatgatcaagtggttactttgtttcttttttttaattcctaamaagttactttttttttgtagagagctgtattaagtgactgaccatgcactatatttgtatatattttatatgttcatattggattgcgcctttgtacttactaacacaacaaacctcagatgacatttcgttttttacacgagatttcttttctttatgtgatgccawagatgtttgaaaatgctcttaaaatatcttccctttgggaagtttatttgagaaaatataataaaagaaaaaagagtgwaaaaaaaaaa

SEQ ID NO: 2038 - DNA, 1407 bp, Canis familiaris
gagtcctgagaggtcactggagcataattatcgctgcctgggaccagacaccacaccatcccagcctctgctgtcagaggacacacagcaaacaccagtgaccaccccccccacagccgccccgcttaagcacctacaatatcctaagcaatttactatattgtctttaacagtgaaaagtaggtataggtattgttttgttccttttacagataggaaaactgaggctcagagccttgcccagtggatgtggacggtcaaacagaggaggggttcaaatgtaggtctgtctgacggtaaacttgtatcctttctagataggctccttgaggtttgctctgggcactttctctaggaaaatcccaaggcacagggtggttggtagttgtgaaggtccagagccttgccttgaaaccacagagggcaggtacttggtggaaaagtccagctggtgattcaccctcctcccgagccctcgttggtgaggccaactcccctcctgagtttctcagttcccagcctggggggttggtggctcccatcctactgctctggggagagaggctgcaccctgccccatacatcctcctcttccctccaaaggagccagactggaggggcagaccagaggggcacggtgagaagggggaaggcgggagggacaaacggagagggatgaagtcacatgtgagtctgagctggtttggagggtctggaggggtcgtctggggacagcactcaccgggagggctggcagcagcgggggcgcacgagggggtgggcacagcaggagggcgatgggggtgggggactagggacagaggacttggcttcctggggttggatgttgtaatcctagtgcacaaacttttggcttcagtccctcctgttgcttttggtatttctctgtcccttcacttcccaatacactagtgtgcgtgagcacacacacacacacacacacacacacacacacacacacacggctgctctctgggagtcccaggacaacgacttggatgggattctgaactgggaggaggaacaggagaaggagcaaaggtggagaccagttcctctctctggtccggtctgtgtgggcttcctgtaagcggcttcccgggacgtggggggcacctgaggcatggagctgagctgagcacaggagcccagctggggactgaggtgagcaggaagcagagggtgggctgtgtctttgtggtcctttagaggggcctctgaggggctgcaggggtgagtccagggaggtcacttcacagaattgtgtgtgtctgggtacagaagaccagggtgggaagaaagtctaggacgaggggtatcaccccaccccaccaagcctcccacagcttctcagttgctcaggacgaggctgggaagtcagagtgg

SEQ ID NO: 2039 - DNA, 551 bp, Canis familiaris
caagagcaggatgaggctattctattctagtttgagtgatttttcttggcactgggttgattcatgtctgcacagggagttaggttatgtattaagaattacatacacacccaaagaggtawattgcyaaatgatttagatcagaagcmaatgaagtttggayccaatgctgttgataaatctaaattgktaagagagatcttatattgtattgtcacaattctttattagakttttctcaagtactggctctttcctgctctggacacagaattgagcagcttgtccaatgactgggaaaggaggacctgcaaccatytgatttggtctctgttaatgagcgtctctccctctaaaccccttttaggagctgggagaggcagagtaagccccagagcccmaacctcagtggttattaagatgttcgaatcttgtgctgaaaattctctggtgatgttaatcaataaagagtaatttctagtgaaataaataawaaggactttgtggaaaaawaaaaaaaaaaaaaaaaaaaaaaaaaaaaaaaaaaaaaa

SEQ ID NO: 2040 - DNA, 694 bp, Canis familiaris
cactaagtgttttgagctttccttgtttgctwagacctgccatccttcctgaaattgggcactttaattcatctktgaactggttgtacccatagttgctaacttagtgcttttcttatagraccccttcttaacgagcaatatgcctccttgtattataaaatctttctgataatgcattagaaatttttttttgtagattagtaaagtgcattcctgtttccttgttactttattcaaagctaataagcactctccttagttttctagtaactaggtgtaaaaatcatgtgttgcagctttacagtttttgaaatattttagatattcctaaactatgaactttcttaacatcactgtcttgccagatcaccaatactgtcccctgactaacgctggccctcctctgcctcaccccccggacacacrcttcccgttgccctgcctgaccatgttcccttgggtctgtgacattctgtaagcccgtgctygtgctaacgaagttctgtacgacttacccactggcaagaatacmaggttggacctctcaaccaataaaatagaacaacattttttaaattgacagttacagaatcgtggagtgtttttacattgatcttttgctaatgcaattagcagtatgttttgcatgtatgacttaataaatccttgaatcataaaaaaaaaaaaaaaa

SEQ ID NO: 2041 - DNA, 663 bp, Canis familiaris
actatagacaagttgtacaaaaagcaggctgtaccgtccggaattcccgggatcccatagttgctaacttagtgcttttcttatagaacccgttcttaacgagcmatatgcctccttgtattataaaatctttctgataatgcattagaaatttttttttgtagattagtaaagtgccattcctgtttccttgttactttattcacaagctaataagcactctccttagttttctagtaactaggtgtaaaaatcatgtgttgcagctttacagtttttgaaatattttagatattcctaaactatgaactttcttaacatcactgtcttgccagatcaccaatactgtcccctgactaacgctggccctcctctgcctcaccccccggacacacacttcccgttgccctgcctgaccatgttcccttgggtctgtgacattctgtaagcccgtgcttgtgctaacgaagttctgtacgacttacccactggcaagaatacaaggttggacctctcaaccaataaaatagaacaacattttttaaattgacagttacagaatcgtggagtgtttttacattgatcttttgctaatgcaattagcagtatgttttgcatgtatgacttaataaatccttgaatcataaaaaaaaaaaaaaaaaa

SEQ ID NO: 2042 - DNA, 2263 bp, Canis familiaris
gcgtctgggacaagagccagaaagaaaccagaacgaaggcaccttgtgtaaacatgacttccaagctggctgttgctctcttggcagcttttgtcctttctgcagctctctgtgaaggtaagcagacttttctggtttacagagttttcctgtgtctgaatgtgatcctcagatagcaagattacccttaatgctttaataacaaatatcctttttattcaagtaaaggaaataatatttgcagtcacttaacattaaattgaagctttgtttagattttatctctacaacacttagaaaagtataaagtttaattaatatagacatcttgttcctattttccgtgctctataggatgtttacatataaatgcattaatataaatctatagagtgtatctttttaaaaagatatatttatttatttttagagagtgagagaaaggggggggggtagagacgggagagagagagagtgagagagagagagaatttcaagcacactcccagctgagtgtggagcccaatgtggggcccaatctaaccaccctgagatcatgacctgagcctaaatcaggtgtgagatgcttaaccaactgagcgccctagagtatatcttattagggccacaattacccatattatttattaatattgagcagataactcaggtaattttactacatgtactgttttattgacgaacttcagacatctatcatttcctgtttggtttaaagacaacaccccaacaaattgtaaatcttcttggaatccctcccatgaaagaaatcacagttagaaatgtttatagcatagagttcttacatttttcttttttctgctaagcattaaagattttgctaagatctgagacatctttgtgcaatttctattgctattaattctttccaaaggcaatttttctgttactgaattttaggttatatcctataaatagcattgtggtatcatagaagattacacaatatcaagtagaaaaaaaagtaccataaggatgtcaactccaagtcttatgcaggaagtcaatcaatgttgtcattaatgacagcatttttttttttaaactgaatttaggggctaggagaatatccagccttctccttcaagaattagtttactaaagatgtgatgtttaccaaacatacagttaccaaattatcaacttggaattaaggagagaaagtaagtgaccagcagagtcatgtttgtgatgaaattaatcctagtttttattattttttcacagctgcagttctgtcaagagtcagttcagaacttcgatgccagtgtataaaaacacactccacacctttccatcccaaatatattaaagaactgagagtgattgacagtggcccacattgtgaaaactcagaaatcatgtaagtactttcaaaagatattttacttcggcaaatccataattgaggaaggtggaaatatccaacaaaattctaggtgtaggaatacaatagtgggcagaacagaaaggaaagattctttgtctctatgacatttaaatatggtaccttccattcattatagttaaaaatgtcttggacccacattttatggttatactacaggaactacaacttgaagggcaaagggatgtctgaaacctgctaaatactgatttagtcatatctcttttatttcagtgtaaagcttttcaatggaaatgaggtgtgcctggaccccaaggaaaaatgggtacaaaaggttgtgcagatatttctaaagaagtaagtttttttttttttaactttagattcttcatttaccctgagacatatagtctaaatgttagcctataaatttcctcttgctgctggaagtctactcttttggaaatttgcctctttaattaaaaaacaaaaaaatagtagcaatagtgagtttgttgtactcataactggggaagaccgatacatgtcagtttgtccagtgaagtctgggcttatgcctgtgccctgtatcagtgatatggttccctttcattctcagaagtgttctggtttagatgataatttatctttctactcataattgaaaattagagtatttctaacacatgaatatctgagattatttatytccatagtatatatattttcaagaatgatactttcctccttattagacatttaattaaaatttgttttattttatttattttcagggctgagaaacaagatccgtgaaacaacaaacacattatctgtggtatccaagaattc

SEQ ID NO: 2043 - DNA, 695 bp, Canis familiaris
tgaccttcgtctccmractagacattccgaaacagagcatccagcgcaacatgtctgccatgggagcgcttccgtaacatggacaagaggscmacaaccgaagaccgcaacacagccttggagacgctgcaccmaaacagcatcactcaagtgtctawttatgaggtggacaagcaagactgtcgcaaatttkgcactactggcatcgatggagccatgacmatttgggatttcaagaccttagagtcttccatccagggccttcggataatgtgaagctgagtgagcctcccagatccagcatgacmaactgacagactgacmaactgacmaatgtgctgacacagccccaccgtgtgcatggtggtgaggagagccasccgcaaggaaacactgaagacacatttggcgccmatatcgtttgtgtgtttttttgtttgaatataagtggtgacagtgttggttttttaaaagcagcagtgatttgggggtttttttgtttgtttgtttttttgtttttgctatttcattccattcttgaccmaagcttctctttaagtagtttattatggaaaattgtcacactaacttaaaggaaagggtgggaaatatgtaaattgtctgctaaaccmattaaataaaaatactgaatgtgrmaaaaaaaaaaaaaaaraaaaaaaaaawaaaaaaaaaaa

SEQ ID NO: 2044 - DNA, 896 bp, Canis familiaris
gcagcgacagtgcgagctttccccacaccaccccgtccatgtgccctcacctgaccttgagggaccacctctagaggccttataccattcaaggacagtatgccattccacagccagatttgaccaagctgcacccagttggcaaatgcaacagtctcattttcccatgacgcatggcaacaccggattcagtgcaggtttggatgcatctgctcagactacttctcrkgractcaccattccaaacgatttgatttggckgcataatcgggcgtcaaggcgccaaatcaatgagatccgtcagatgtctggggcgcagatcaaaattgcgaacccagtggaaggatctactgataggcaggttaccatcactggatctgctgccagcattagcctggctcaatatctaatcaatgtcaggctttcctcggagacgggtggcatggggagcagctagaacaatgcagattcatccataatccctttctgctgttcaccaccacccatgatccatctgtgtagtttctgaacagtcagcgattccaggttttaaatagtttgtaaattttcagtttctacacactttatcatccactcgtgattttttaattaaagcgttttaattcctwwmwmwrwwmagctgttaatgctgagatccatatttagttttataagcttctcccccctttttttttggctcatgaatttttctgtttgtcatggaaatgtaagagtggaatattaatacatttcagtttagttctgtaatgtcaggaatttttcaaaaaaattaaaagatggactggarmwwtttctttgtgaatagaaactggatgccacagtgawwmawrwrrgttttaaaaaaaaaaaaaaaaaaaaaaaaaaaaaaaaaaaaa

SEQ ID NO: 2045 - DNA, 675 bp, Canis familiaris
gctatttggggtttgatgcatctgctcagactaccttctgcatggactcaccattccaaacgatktwgattggctgcataatcgggcgtcaaggcgccaaawtcratgagatccgtcagatgtctggggcgcagatcmaaattgcgaacccagtggaaggatctactgataggcaggttaccatcactggatctgctgccagcattagcctggctcaatatctaatcaatgtcaggctttcctcggagacgggtggcatggggagcagctagwacmatgcagattcatccataatccctttctgctgttcaccaccacccatgatccatctgtgtagtttctgaacagtcagcgattccaggttttaaatagtttgtaaattttcagtttctacacactttatcatccactcgtgattttttaattaaagcgttttaattcctttctctgttcagctgttaatgctgagatccatatttagttttataagcttctccccccyttttttttggctcatgaatttttctgtttgtcatggaaatgtaagagtggaatattaatacatttcagtttagttctgtaatgtcaggaatttttcaaaaaaattaaaagatggactggagctttttctttgtgaatagaaamwrraaaaaaaaaaaaaaaaaaaaaaaaaaa

SEQ ID NO: 2046 - DNA, 688 bp, Canis familiaris
ttgaatgcaagctctccagaggtgaaaggctattggcaggtttggatgcatctgctcagactacttctcatgaactcaccattccaaacgattttgattggctgcataatcgggcgtcaaggcgcccaaatcaatgagatccgtcagatgtcttggggcgcagatcaaaattgcgaacccacgtggaaggatctactgataggcaggttaccatcactggatctgctgccagcattagcctggctcaatatctaatcaatgtcaggctttcctcggagacgggtggcatggggagcagctagaacmatgcagattcatccataatccctttctgctgttcaccaccacccatgatccatctgtgtagtttctgaacagtcagcgattccaggttttaaatagtttgtaaattttcagtttctacacactttatcatccactcgtgattttttaattaaagcgttttaattcctttctctgttcagctgttaatgctgagagtccatatttagttttataagcttctcccccctttttttktggctcatgaatttttctgtttgtcatggaaatgtaagagtggaatattaatacatttcagtttagttctgtaatgtcaggaatttttccaaaaaattaaaagatggactggaaaaaaaaaaaaaaaaaaaaaaaaaaawaaaaaaaa

SEQ ID NO: 2047 - DNA, 736 bp, Canis familiaris
ttgatagattatatattcttccatctatcaactggcattccactatattaattttgcccaaagatgagtttttatttgtttgaaatctgagacactatgttcaaaattggtctatcttttgttcaaagttcttcccacctaatgtggaaatccttccttggacatcacacyacatgtaaggctggtaaggatgactcacacaagcttatggttttcattacccaaatttttagattctgaatgtagatggagtctcgtttaagagtcaccmaaggtgcctgcccccctttcctgctaagaagagtccctttgagactgtcccmagagtgtcagagaactcagtgggcaggggttctggtctgcttgccatctaggtstgggatgtgagggacattaatgattatgttgaatctaggctctactcctctgaggaatggaacacaaggtagtcacctatcacttaaatttacaattccaaaagattactacaaccatgtccatgctcagattcaaatggtttttcatatcactttcgggtagtaaaatgatttacatttttttcttaattggcagcaccmattgccattccttacactctttgatttgtttttgttttgttttgtttttactgagctcttgcatgatttatcttgtgttaccatcctaaataaacattttattaaatgtaraaaaaaaaaaaaaaaaaaaaaaaaaaaaaaaaaamaaaaaaaaaaaa

SEQ ID NO: 2048 - DNA, 668 bp, Canis familiaris
aagcacgccargctggacttccytrtacgattctggccmacggcstgattttcatcatcgtcgtggtcaacatcttcatcactgcctttggtgtccagaagccggtgatggacgtggccccccggcagtaggggctcagatgcccccagatggaacccggccacagccacccagatcctggagccgcctcgccctgakgcccacccccctgtgggagttggtcctggaaactgcaggaacccagkcgggccccgccgggccgtatcccaggacaggctgcccgtggtgaggccacccaggccaacacggagcctgctccccttgagattggctcaggacacacaactggggcagggtcgtggccaccacggacacacagcagcccaaggatggtgaggcgcccagtcggccttggtctcaggatgtttccagagggacaaggagaccccccaccctctgccagtgcaaggaccgtctgggcctcggggccccacsctggtgccccaggacacaggcctgccagcmccctggccacgggccctgaacacacctgccaccagcagtgagggggcagcgcccccaccctcctcaggggcccgagcccccgcatatctaagccaccaacaaccaataaagctgacgcacctcctgmmwaaaaaaaaaaaaaa

SEQ ID NO: 2049 - DNA, 524 bp, Canis familiaris
accagctcttcgatctgattgaaagcatgctagaatatgaacctgctaagcggttgaccttgggtgaagcccttcagcatcctttcttcgcccgccttcgggctgagccacccaacaccaagttgtgggactccagtcgggatatcagtcggtgacgatcagaccctgggcccccctgcatctcctccagcagtgggtgtccagtccaggacactggtgcttttttatacaagagaacagagccggagcctgccccttcccccggctccttgtatacctgtgaatatgtgaaatagtgtacatacagaagagcttgtacctgttgcgccctccccggctttgtacagagctgttccgtcctgcacatttcccaccctcccctgccccttcacagtggagttggaacacggggcaggagaagagaaccaggtgacacctatcccgtgttttataaggaattttgtacagtctttgtgaaataaaaatgacgtgcttcatcggaaaaaaaaaaaaaaaaaaaaaaa

SEQ ID NO: 2050 - DNA, 593 bp, Canis familiaris
tgctgttgtgaagctgattccctgacaagatgcaatgaacagatgtaatgtcttacacagctctggacaacttcccaaggccatgagctgtttggtaatcacacctcattaagagacagactgttccttcyctccttgggtcattgtgcttatgatgaggcagctctgaattaaccccaagaagggcgaccaatggctttaagaaatctgarcttggaccatctgaragcaaaaagggagcttgaaatattgcccagtgccccttgtcaccccctccccaacttcacaggtaaagcaagtaaggcataagacagtgtaggacaggttccaggccccagagacrgtcatcagccactcaggctctgatcccccgggtgctacttgctctggctgggtcccccactcytcctgggctgcgtgcaggccaggccaggtcccggagccaggaaatcattttgtcattggagaagttgatgaacaggagtgaaatccaaaccagctgtttcctccttggggtcaggcctctttctggctgccccaccaggagtttcccattaaatacttaaatgcaaaaaaaaaaaaaaaaaaaaaaa

SEQ ID NO: 2051 - DNA, 642 bp, Canis familiaris
accccctggcccacccgggacccgtttggtccccgtgagacctaggtcggtgggaggttggagggagatcgagggggagtcccacacgtccgcctcgtcggtgggggggacagggttcctgcaccgtgtgggktctgggcggggacggggagtktgggrggtgggcggtgkgtcacccgtgactgtccccacccacactgggttcgtcggggtcggtccaacagttccgtgtccgtgacctacgaaccacaccatccaattttttccttgttgtgcacccaccggatttgtgctcggacgggggactgtccccgaggtgtcacatccggatcgtgactaggggtgggaccgggacgggggggggtggactcgggggaggccccgggggacccgtccacagtttgtttcctaaagcctggggggttgggggcggagggggggtgggggccccatcaccacaacctccccgagagggacaaacccgaacgcccgacggggcgtttccccagatcaagcttttaataatttttcgtcaattggtttagaagtaaataagagacatattcttataaataaaattctaaaaaaacaaaaaaaaacaaacaaacaaacaaamaaaaaaaaaaaaaaaaaaaaaaaaaa

SEQ ID NO: 2052 - DNA, 642 bp, Canis familiaris
tgggggaccgggtgggccctgggcaaaccaggggcactctggatccagccaccctccaacctccctctagctccccctcagggtgtgcaggcggagcagccaccccccctgtcccaaggacgtggcacacccmagacccgcccctgcccctcamacccyccacccgccacmcagtgggcactgacaggggtgggtgtgacccaagcagccccagccaggttgtcaaggcacaggcactggatgcttggtgtggtaggttaaaaaaggaacaacacgtgggtggcctaaacacgagcctgccccctgacaggggctccacagtgtaggcctagcactgatccccaccctggccctgcccccccccacctgagccccctccggggccccctgggcaggtgtcaaacaaaggatttcggaccccccaacccccgcctcccccccacccccggggtagtggtgttggaggggctctccctgtttgggcttgcgggctgccccgcaaaggggtctagttcgaaaattattaaaaagcagttaaccaaatcttcatttattctctgtataagaatatttattttaagatttttttgtttttttttgtttgtttgtttgtttktttttttttttttttttttttttttt

SEQ ID NO: 2053 - DNA, 669 bp, Canis familiaris
acctagaactatgccaatgsctkctgctgggaagttgctttatggaacacagccgacgtgggaaaggccccagcagcytcagctccttcctctcttcttwaagagcamvcagggcttattcttgttttyctkyttttcaaaagtgtggcctttgggctctgccatgtacatcgacgtgtgatgtggcatgtgggaagaagtccaggggaactcttggaaccaacattaggcatkttaccttttgagtaacgttttgtagaactgttcatcattgtatttgaagcgctcagagccagatgcctgggactctttgttaaggtcctytccatctctctctctcagactttccttacagctctcattgcctctgcattgattctataaacagtctttgtctcctttccacctttggcacggggggtgggagscaktcctggctgagacacttacgccccggcaaggtggccatcagagaatgtcgttgctaacctaccagtttcttgtcctttgggggaggtcaaggccgggcctccacttggcttgaagcgtcattttcaraattttctttctgtcacttggrgtatctttgcctctcatatttccctaataaactcctcaactttaaaaaaaaaaaaaaaaaaaaaaaaaaaaaaaaaaaaaaaaaaaaaa

SEQ ID NO: 2054 - DNA, 690 bp, Canis familiaris
ggcagcttggcggtgaccaagaatgatgggcactaccgtggagaccccaactggtttatgaagaaagcccaggagcataagagggaattcacggagagccagctgcaggagggaaagcacgtcattggcctacagatgggcagcaacaggggggcctcccaggctggcatgacgggctgcggacgaccccggcagatcatcagttagagggakggggccaggcccccgccctgcccctccccagctctgtcggcctgcagccatcctgcctcgcctgcctcacccacacctgtgtgttccttcagccccggccaagcttcgaggctccgtcactgagcmaaggtgaccgcacttgggcagctctccccccacccctcagcctcagcccmacttcttgccccmaagcaccgctcctcctcccagcccccttaccgtctcccggtctttccccatctgggccaggcagcggggccatgggctgggggggcctgggcaggggcmagtccactatcctccttggcagcagatgcccttgaaggaaacccagcccmacctccccccattttttttgctggaatattttgggggttgaaattcmtaaaaagaaacmcaatatatacagccatcttttctcaraaaaaaaaaaaaaaaaaaaaaaaaaaaaaaaaaaaaaaaaaaaaaaaaaaaaaa

SEQ ID NO: 2055 - DNA, 701 bp, Canis familiaris
ctgcgagcactgcctggtagccaatcacgccaagtgcatcgtcgcagtcctatytgcagtggcttcaagatagcgatacgacccgawtkgccgccctgtgcagcacamccctggccaaccsgggagaccacccgcctcgtctkktacgatctcttccackgggcctgcctcratgwacgtgccgcccagctaccccgtwacacagctcctgctggctaccagtgccccatctgcagtggccccatcktccccccaaccaacctggctggccctgttgcttccacactgagagagaagctggccatggtcaactgggcccgggcaggactgggccttcctctgatcgatgaagtggtgagcccggaacctgagcccctcaacacctctgacttctctgactggtctagctttaatgccaatggtagccctgaacaggaggaggtagccagcgcctctgctgccccatccttctacagccaagccccccggccccctgcttccccgagccggcccgagcagcacacagtgatccacatgggcaatcctgagcccttgactcatgcctcggcccccaggaaggtgtatgacacgcgggacgatgaccgttcaccaggcctgcatggggactgtgatgaagacaagtaccgtcgccggcctgccctggggtggctggcccagctgctcaggagccgggctgggtc

SEQ ID NO: 2056 - DNA, 697 bp, Canis familiaris
tgaatggacaagaacttgaagcccatcaagcsmaksmagttcckgggggatgaagagaccgtgcgkwaagccatggaarctgtggctgcccagggcaaggccmmaaaagtaaaggcgagcaggcagattgctttcctgaggataccttccctgcccatcccatttctctgcacttcttccctgcacatgtcacactgaccgcatctgtaggcatcttaagtttkagctgcagatggggaccagtggctcctaattttgtttagccattttgtttcttgcacccactcccttcatatattctagtcaaatggcacttctggggcatgggtcctcagtccaagctgagagaagactcgtatccaagagtagagaattagtaactctggggtttytgttactgctttattactaaggacctgcttgagtaggggatggggagaagccctgctaggtgtgaccmatgagaagcaagagagcttatgygtattcccaggagctagtcctgtactattctgtagtcaggtgagggcagtgtgtggcgggctctagtcattccagtggaagatgaatgtaacctgcacggtgattaaagcagttatttcccctctgaccccmaagagctggctccagaagattgggatcatctgaatgttttatgtgttgcatttacttttacaaaaaaaaaaaaaaaaaaaaa

SEQ ID NO: 2057 - DNA, 538 bp, Canis familiaris
aggccacctccaccaccaccatgcccaccacctcgcccacctccacgtcgcaccgaggccaccgctgacacctgggaatggcagccaccgcctgtcctaccatcaccaggatgtggacccccatgctcccatgcagaggggcgcctctctgtggtaaacgccggggactgtgcsctggtcctgcttggcttctgcggaccaygccmcagggtaccacgaggagagaactgaggggattcgggggggtgccctgtgcacactggagggtcacggggtgagagtgggggtggtccttcggggacggacactgccttgggcctgtaacgcccaggggacccccggtgcacgtcgatgcacagaagatgggctgtgctctctgaagtgctgtctcctgactgacgcaggcccctggccagggggctacctagaaggggccagcagtgccctcgaatttggagaaggcagtatgaggctgcagggtcagttcacctgtgccttgatgcaagaaaataaaaaccactaagaarmaaaaaaaaaa

SEQ ID NO: 2058 - DNA, 267 bp, Canis familiaris
gatttcgtgtwccagtgtaaggccgagtgctatttcaccaacgggacggagcgggtgcggtttctggctaaatacatctataaccgggaggagttcgtgcgcttcgacagcgacgtgggggagtwccgggcggtcacggagctcgggcggccckmsgctgagtmctggaacgggcagaaggaghtcttggagcaggagcgggcaacggtggacacggtgtgcagacacaactacggggtggaagagctctacacgttgcagcggcga

SEQ ID NO: 2059 - DNA, 1104 bp, Canis familiaris
gccctcgagcccaccaggaacgaaagagagctccatctgccctccaggaccccagctatgaactccctctccacaagcgccttctccctggggctgctcctggtgatggctactgctttccctaccccgggacccctggsaggagattccaaggatgatgccacttsaaatagtctaccactcacctctgcaaacaaagtggaagaactgattaagtacatcctcggcaaaatctctgcrctgagaaaggagatgtgtgacaagtttaacaagtgtgaagacagcaaagaggcactggcagaaaataacctacatcttcccaaactggagggaaaagatggatgcttccaatctgggttcaatcaggagacctgcttgacaagaatcactaccggtcttgtggagtttcagctacacctgaatatcctccagaacaactatgagggtgataaggaaaatgtcaagtctgtgcacatgagtaccaagatcctggtccagatgctaaagagcaaggtaaagaatcaggatgaagtgaccactcctgacccaaccacagacgccagcctgcaggctatcttgcagtcgcaggatgagtgsstgaagcacacaacaattcacctcatcctgcrgagtctggaggatttcctgcagttcagtctgagggctgttcggataatgtagcctgggcatctaagattgctgtagttcatgggcattcctttctccagtcagaaacctgtgcagtgggcacaaaacttatgttgttctctgtgaggaactaaaagtatgagcgttaggacactattttaattatttttaatttattgatatttaaatatgtgatatggagttaatttatataagtaatagatatttatattttttatgaagtgccacttgaaatattttatgtattcattttgaaaaagttaacgtaaaatgctatgcggcttgaatatcctcgatgtttcggagccaggtcatttcttggaatgtgtaggtttacctcaaatacatggctaacttatgcatatttttaaaagaaatatttatactgtgtttatataatgtttaaattgtttttataccaataaacaccttttt

SEQ ID NO: 2060 - DNA, 644 bp, Canis familiaris
agagaacaggggaaaatttatgacagaggttactctaagtctgcttaagagagattttggggccaaaactcagaatggtgtttacagtgctgcaaattacmccmatgkgagctttggaagtaattttgtgtctgctggtatacagaccagttttaggactggtaatccracagggacttaccagaatggttacgatagcactcagcmatatggaagtaatgttcccmatatgcacmatggtatgaaccmacaggcatatgcatatcctgctactgcagctgcgcctatgattggttatccaawgccaacaggatattctcrataagactttagaagtatatgtaaatgtctgtttttcataattgctctttatattgtgtgttatcagacaagatagttatttaagaaacatgggaaatgcagaaatgactgcagtgcagcagtaattatggtgcactttttcgctatttaagttggatatttctctacattcctgaaacaatttttaggttttttttgtactagaaaatgcaggcagtgttttcacaaaagtaaatgtacagtgatttgaaatacaataaatgaaggcaacgcatggccttccaataaaaaatatttgaagactgaaaaaaaaaaaaaaaaaa

SEQ ID NO: 2061 - DNA, 697 bp, Canis familiaris
acttccaggtgcacatcgcgacaatcgacatcaagacctrgacaataatcaaagtacgcgtagtagaggcaaagttgttcaaagcctttatraaacacctccttacactagtggtgtgggttctasmagtgtttcagtagttgcagctgttcchycgtggaggacgttacaaccaactggtatrattgtttcctgtccgagtcgtaagggtgttagggcagttagcytaggtgagagctaatctcaaggttttgtgcgagttactgactcatcaggttcagctcyttcaggcctcagtawttttagtccccctcaagagagtcaactaagtgtcactaatmcagttcgtgctggagtttacctactttgttaagggagtcctagattccttccagcgcttgtagggggcacccgttacaggctaggctgtgatacacaaagtcttgctctyccagggtttctgagtatkagtgtgcattgccaatggcagacaaccctatgccgctgggagtcaacccaggactccgtggctgagctagctagaaggggaatccaaatccaaaacatattgaagatccgtttctacatcaacaaacgaaagatactaaccaactttatttgattaaaggatcccyttttttttttttttttttttttttttttktttttttttttttttttttttttttttttttkk

SEQ ID NO: 2062 - DNA, 697 bp, Canis familiaris
tgaaggtccacgtgtagcgctgttagctgtagttctggayctgttattagtttcatgcgcatcatctccgtttcaacaagtttcggaaataytttgtggaggaatgtgatcaccacacccaagatsktcacaaagtcatcaacgtcgacaaggdrgcacctcctgcaatgttggttgaccataytaacaaaggacaggctcagcattcccacaatcccgtcaatcgratccactctcgattagagttccaaaacacgctcaatgactgagtagtccaagtcgagraagtccggagtcatwaaaatcagggggagttctctcagttgattcacagtgattakgtcaagcacgacctcaaatggatgaaacaattccctcaggatctaaggaaggtcgcgaacatcccccgtgggcaatgtccgatccgacactatgtgtttcagaacgagarggtcccaaagactcatamtcacacgtaacggttaccgtctgttgggatacggcgaccctcagttgggtcctgaggcaccgactcgatcgatcttccccttaggtttaggttttgtataacttctaggcaaagatgtagttgtttgctttctatgattggttgaaataaactaatttcctagggraaaaaaaaaaaaaaaaaaaaaaaaaaaamaaaaaaaaaaaaaaaaaaaaaaaaaaaaaaamm

SEQ ID NO: 2063 - DNA, 721 bp, Canis familiaris
cagtggacactgattcttctgccgacctgcagcgacacctccagttccacacctcccagttctgtcccttcttccgatcccctycagggactaccytcttcaagtctatkttgggccctccccsgggtcatctgwacttagggaagtcctctccctcccgagaagggtctcctgcctgccttcctacatggtttggcctcagctgcccagktggtggccactctggcatcccgcatccccwcwgctgctggaatcctgcctgctgcccagcgtcgatgggcttatgaggcctgagtggtccctcgagagctttccttgccttttgtgggaccaccgatacctcaaggacmatgtcttccccgtgacagggtgtgagggkctgcagaatcgtcagcatagccacttagcgctgatacttggaacccagactctccgtgacccctggcttccagctgcctcagcctctgccccgatgcctggctccttgcccctgccctacacatccccagaagggtcctggagccaaccctgccccaggatcaggttccagcctctcagtctcagaagagggggggagcascccccatttctggccttttctcacgtggctccaagttctgctctgtactccagttccacccmaatacactttctggaacmawmaaaaaaaaaaaaaaaaaaaaaaaaaaaaaaaaaaaaaaaaaaaaaaaaaaaaaaaaaa

SEQ ID NO: 2064 - DNA, 708 bp, Canis familiaris
tgctggctcgagctggcacctgaacmctcaggcttccacagcyycccagtctggtccsttccttccgatcccctscaggggactaccttstcaagtctagttgggccctccccgggtcatctgaacttagggaagtcctctccctcccgagaagggtctcctgcctgccttcctacatggtttggcctcagctgcccaggtggtggccactctggcatcccgcatccccacagctgctggaatcctgcctgctgcccagcgtcgatgggcttatgaggcctgagtggtccctcgagagctttccttgccttttgtgggaccaccgatacctcaaggacaatgtcttccccgtgacagggtgtgaggggctgcagaatcgtcagcatagccacttagcgctgatacttggaacccagactctccgtgacccctggcttccagctgcctcagcctctgccccgatgcctggctccttgcscctgccctacacatccccagaagggtcctggagccaaccctgccccaggatcaggttccagcctctcagtctcagaagagggggggagcaccccccatttctggccttttctcacgtggctccaagttctgctctgtactccagttccacccaaatacactttctggracaatcaaaaaaaaaaaaaaaaaaaaaaaaaaaaaaaaataaaataaaaaaaaaaaaaaaaa

SEQ ID NO: 2065 - DNA, 692 bp, Canis familiaris
cctatcggtgatgttatgatcatgactttggtgatcagaatcagaatttggattgaagttgtccygttgtttcctggctaagattaggacaagacatatgaaatcaacagataaataccttggtgccaccaacccattttatgccacatgcaagttttgaataaggatggtatagaaagcaacttgctacgtatatatgttccgattaaaaatactggtgctcgtgagagggccagaatctttatatgaaaaaactttcgaaaatcataaaaatacaagatagtgtggctgagatggaaacaggccttattcttgatttccaattttcatctctccttttcctatttggatttctttggtgctgtagaaaaaaaagaagagaaaaatatatattcataaaagatatggtgctcattcccatccatcaaggatgtgctaaaacmatgtgtttaataaattgtaattattttatgtacagttctatactgtwatctatgtgtccatttccaaaacttgcacgtgtctctgaattccatctgactctaattttatgacaattgcagaactatgatggcaataaatatatgtattatgaaaaaaaataaagttgtaatttctgatggctctaattccctttctttgattaataataaaatgcctttgtatawawwrawaaaaaaaaaaaaaaaaaa

SEQ ID NO: 2066 - DNA, 497 bp, Canis familiaris
ccaggctgcagcgccccgcgccccccagcctcccgctgccgccgcacctccagggccaggaggagccgggggcgcaggcgggggaccccacctccgctgtccgcaggagccccgggtcttcccggagagcgtgctgcgatcccgacaggagccagaggggaccgtgtggggacagcgccgtggggggcggcccggggccgggggctgcggtggacgaggcagcgaggcacacggagccgcgcctgtcacaggacccggaacactggagccccagtgggcccaagtgcgtgcgtagccacrtcacgggggacgcccggtgctgccccgacacccgtcacagctgcgaccaagggacgtgcggttccgaggacccacagacgccacamggcgaggccagcgcgcccccagcgccgacacactcggaacttgcgggtgaaagtttgttaataaaaacactttaataaatacagtgtcacgttcaaaaaaaaaaaaaaaaa

SEQ ID NO: 2067 - DNA, 638 bp, Canis familiaris
  misc_feature (12)..(12): n comprises a, c, g, or t, or includes no nucleotide
actcccagcagncaagcagagcacatgcacgacaggacacccccgattgcgccctcagtcagcccagtcttctttcccctccctccccctggcccttctcctgatgtgcagctggcagctctggctcagagagtcaaggaggttttaccccatgtgccactgggcgtcatccagagagacctggccagaactggctgtgtagactkgaccatcactaatctgcttgagggakctgtagccttcakgcctgaagatatcactgaagggacccagtcccttcccacagcctccgcccccaagttccccagctctggcccggtgacccctcagcccacagccctcacatttgccaagtcctcttgggcccggcaggagagcctacaggagcgaaagcaggcactctatgaatatgcaagaaggagattcagagagagacaggcccaggaggctgactgagcacaggatggcacccagagccgcaggacggaggctgggggcagccctcaccccacttacamctggctggaagggtgggtggtaaaaagggagggatggggctccccccamaatcacattaaattcagggttttcactcaaaaaaaaaaaaaaaaaaaaaaaaaaaaaaaaaaaaaaaaaaa

SEQ ID NO: 2068 - DNA, 612 bp, Canis familiaris
atatttcctgaatttctacttgggacaattagattagtattttgtcagttcaatacctaagagtaaacgaaagtctatcccaaaataaactaccraraaaatatctttagttttgggttcgtttactatggttatggtggtacatcaaattcacccttcatattatatatctgactttggtttagatagtkttatctagttatatatctctaaagaacgatatattcaactgtattaccccgaatgtaggtttccaccttcaagattccatttaaataatattattttccactgatagatgtatcgaatattttattgtctgaaatcgtatttggattaaatactttaagtacattctataaaataagtttattcggtaagatcaaattagraacgttaccgataccccaaatcccgtttttacaacggaccaattgtaactatattgtcttgttgaaataaatctgattttgttgtttaaatattcaatawcttttatcaagaatatgtttgtttcgaaagtgcaattagatctcgttccaattaacttttactttttttgagtcgagaataataaacggtcacttgtcatgcarmwmmawmwaaaaaaaa

SEQ ID NO: 2069 - DNA, 612 bp, Canis familiaris
tataaaggacttaaagatgaaccctgttaatctaatcataaaacagtcaagttatggattctcatttgctttcagatagggttttatttgatggytyttttatagaaatcaaaacccaagcaaatgataccaataccaccatgtagtttaagtgggaagtataatatatagactgaaaccaaatctatcamaatagatcaatatatagagatttcttgctatataagttgacataatggggcttacatccaaaggtggaagttctaaggtaaatttattataataaaaggtgactatctacatagcttataaaataacagactttagcataaacctaatttatgaaattcatgtaagatattttattcaaataagccattctagtttaatcyttgcaatggctatggggtttagggcaaaaatgttgcctggttaacattgatataacagaacaactttatttagactaaaacaacaaatttataagttatwgaaaatagttcttatacaaacaaagctttcacgttaatctagagcaaggttaattgaaaatgaaaaaaactcagctcttattatttgccagtgaacagtacgtykwkktwkwtttttttt

SEQ ID NO: 2070 - DNA, 681 bp, Canis familiaris
agaaccagtttgtacaaaaagcaggctggtaccggtccggaattcccgtgrycgcattctgccaaggscgaccactggactacccgctgcccctacaaggacacgctggggcccatgcagaaggagctggctgagcagctgggcctgtccaccggcgagaaggagaagctgcccggagagctggagcccgtgcaggctgcccagaacaagacggggaagtatgtgccaccgagcctgcgggatggggccagccgccgtggcgagtccatgcagcccaaccgcagagccgacgacaatgccactatccgtgtcaccaacctgtcagaggacactcgtgagactgacttacaggaactcttccgaccctttggctccatctctcgcatctacttggcaaaggacaagaccactggccagtccaagggttttgccttcatcagcttccaccgccgtgaggatgccgcacgagccattgctggggtgtctggcyttggatacgaccacctcatcctcaacgttgagtgggccaagccatcaaccaactaagccagttgccatgtttgctgctgctgtctggccccggccccaggaccccatggccttaggaggtagctcccgaaagcagggggctcttggcmataaaaaggctcctgttgtcaaaaaaaaaaaaaaaaaaaaaaa

SEQ ID NO: 2071 - DNA, 684 bp, Canis familiaris
ccgatgaacaagctcaaggccaggaaaatcgtgtcctgccgcatctgcaagggcgaccacctggactacccgctgcccctacaaggacacgctggggcccatgcagaaggagctggctgagcagctgggcctgtccaccggcgagaaggagaagctgcccggagagctggagcccgtgcaggctgcccagracmagacggggaagtatgtgccaccgagcctgcgggatggggccagccgccgtggcgagtccatgcagcccmaccgcagagccgacgacaatgccactatccgtgtcaccaacctgtcagaggacactcgtgagactgacttacaggaactcttccgaccctttggctccatctctcgcatctacttggcaaaggacaagaccayctggccagtccaagggttttgccttcatcagcttccaccgccgtgaggatgccgcacgagccattgctggggtgtctggctttggatacgaccacctcatcctcaacgttgagtgggccaagccatcaaccaactaagccagttgccatgtttgctgctgctgtctggccccggccccaggaccccatggccttaggaggtagctcccgaaagcagggggctcttggcaataaaaaggctcctgttgtcmaaaaaaaaaaaaaaaaaaaaaaaaaaaaaaaaaaaaaa

SEQ ID NO: 2072 - DNA, 763 bp, Canis familiaris
  misc_feature (28)..(28): n comprises a, c, g, or t, or includes no nucleotide
ccgsmkctrsvmgcagscccstagktwnccsccatggcgcccmvccggrawggcmwgatcbycmagccccactkccavmagraskgscarcggcgcgtgvccacgwggktcracmagccggcgcggraratccgcaracgcaargcccgmmagrscwargcccsccgcatcgccccrcggcmtgcgtcagggcccatccggccgatcgtccgstgccccmyggtgaggtaccacacgwaggtkcggkccgrcaggggcttcagcctggaggagctccgggtgbscggcattcacwagaaggtggcbyggacyattggcatctcggtggacccgcggcggcggracaagtccacggagtccctgcaggccaacgkgcagcggctcaaggrataccgctccaagctcatccksttccccaggaagccttcagcccccmagaagggcgacagctcagctgaagaaytcmaackggcaacacagctgacaggmccagtcawgcccatacggrawgtytacmagaaggagaaggccagagtcatcacagaagaggagaagaacttcaaggcatttgccagcctccrcatggcccgtgccaatgcccggctytttggcatcagggcmaaaagggccmaggaagctgcagaacmggatgttgaaaagaaaaaataaagtgctattgrcmamwhmhraaaaaaaaaraaaaaaaaaaaarrraaaaaaaaaaaaaaaaaarraaaaaaaaaaaaaaaaaaaaaaaaaaaaa

SEQ ID NO: 2073 - DNA, 588 bp, Canis familiaris
ttgcagaaagaaatcccagtaaaggaaaaatgggctcagaattttcaagaccaattcaagcactctctggttttctcctctaaattcaatggaaccatatggggggaatatcagtgaagatttttagagcttttggaagccctttggtctctgaattgtaattagcaatraacccakataagataaccccagatgtcatgatgcttgccttgttacttggaggactaaatgtgggtgtcactagtatcctttgtatgttcttgatatctgcagagaattttgaatctatggaatttattttttcagtcttacttgacaaattcctgtcctataagtagcaggatactgtaggcagagaaacttaaggcacttttgccacttggtaatgaaagggagggtggaagaattagaaacagtacctgcacccctaaacccatgccaaaccaaaaccagaaactcctcctatctaatatgtccagtggtcatggtggaagactttgtactgccactaaaattgccaaattattttaataaaactggatttgaatacaaaaaaaaaaaaaaaaaaaaaaaaaaaaaaaaaaaaaa

SEQ ID NO: 2074 - DNA, 630 bp, Canis familiaris
tggcggtttcctgccacgccgggcctgcctggccgcgccagcgccgctccgccgaggccgcgcgtctgccgccacgggcccgggattcagtgacatttgatgacgtggcacagtacctcacaaaggagtggctgagactggacaagtgagaggaggatgttggcatattgcaggagtgcaacctctgggagttcctgtkttgaatcctcmctggtgtgaggacacctgctgccggcaaccgcccatcccttaatgcagattgggcgaagcattctgggcgcggcgtcttkcggtgctggtgtccgagcggagcgcgcggctgagccctgagccggtggtggacgatgggcgaggacgctcagccgcaggagatggcgtccacgagctccccgcgggccggcgagcccggccctgaggtcagagccaaccgggaccctgaggggcgggcgggcggcctgcaggagctgcccatggagcaccacttcgcgtgtaaggagtgtggggacgccttccggctgaaggtcctcctcgtccagcaccagaggattcacagcgaggccaagggctgggagtgtgcggactgtgggcgcgtgttccggggggcgtccgagttcaacgagcaccggaaga

SEQ ID NO: 2075 - DNA, 590 bp, Canis familiaris
ttaacaaggaccagctggaggagttcaaggaggcctttgagctgtttgatcgagtaggggacggcaagatcctgtatggtcagtgtggggatgtgatgagggctctgggccagaaccccaccwacgccgaggtgctcaggatcctggggaaccccaagagtgatgagctgaagtcccggcgtktggacttcgagactttcctgcccatgctccaagcagtctccaagaaccgggaccaagggacatacgaggactacctggaggggcttcgagtgtttgacaaagaggggaacggcaaagtcatgggcgcggagctcagacacgtgctcaccaccctgggagagaggatgactgaggaggaggtggagaccgtcctggccggacatgaggacagcaacggctgcatcaactatgaagccttcctgaagcacatcctcagcgtctgagctcctacaggcgcggtggggctggactcggcgcccctccccggcgatggaagcacgttcctgccactaggaggtcccctgttgtttcaaaataaagagacggctcctcmmwaaaaaaaaawwaawaraaaaaaaaaaaaaaaa

SEQ ID NO: 2076 - DNA, 528 bp, Canis familiaris
gcctaactcgccctggtctggctgcccctgcacctgcgcgacggccagcacgacctggtggctagcagccaacggccgggggcggcccggtgggcttggtcgtcttgttggtccccgtcgaggrcggcggcggcggcgcctgcttgggcaccgggggcgccacgagccgttgggggtcccgcggggcaggcgctcggccggtactgcagcggcggtgggtaattagaggtcgagttcctgctccctgtaggggggcccgggggcttggcccatggcacggtcagcggcggcaccacgggcacctgcaccggcaccggcccctgcgcgcccgccaccaccacggagcagggcaccgggcaggaggcccccgagacgcccatcttgccgggcctgtctgagaacccacagccccccgcgggctagtccatcccgggctgccaggccggggccatcgcgggcatcccgccgctgaaccagccgctcggcgaggcacacgtcccctccttgcccggctgccaggagggggcg

SEQ ID NO: 2077 - DNA, 706 bp, Canis familiaris
agccggagtcagtccccatggagattatctttgataacagacttcttctggggaatrgcagagttcgtggttttgttttttaaaactctgcttcagcaagatgtgwaaaagagwagaggctatggaawctcctctgattccagatatgatgatggaagagggccaccasgawaccctcccagaagaatgggtcgaattaatcatctacgtggccctagtcctcctccmatggctggtggatgaggaaggtaaatgtctgctctaagtagcagacaactggacatgcacattcataacagaaggaaaccatcaagaagtagagtgcagaccatactggacaagtaattgaatgtgtatgcccmaacaaggattgctctgtgccttcacagacggatgaggttgtgctaggaattccctccccagggatctggcatgactgacatgcagttctataaatgcacatgtttgtctcattatcttttttgtatagtttatgaaagtattaatatagttttaataagtaaatatttttaggttacmaaacttgacttcacatctttgtataattaaactccmaatttgaagaaaaataaaagattgtgtattcagtacmawwarwrwmamcyttttaacttctgaaatactattcattgttaatttgttctcataaataaatcmccttgtatttawaaaaaaaaaaaaaaaa

SEQ ID NO: 2078 - DNA, 663 bp, Canis familiaris
gtttacattcgaacgggcaagtgttggacaccggagtcagtccccatggagatatcttgataacagacttcttctgggkatagcagagttckkgkttttgttttttaaaactctgcttcagcaagatgtgaaaaagagaagaggctatggaaactcctctgattccagatatgatgatggaagagggccaccaggaaaccctcccagaagaatgggtcgaattaatcatctacgtggccctagtcctcctccaatggctggtggatgaggaaggtaaatgtctgctctaagtagcagacaactggacatgcacattcataacagaaggaaaccatcaagaagtagagtgcagaccatactggacaagtaattgaatgtgtatgcccaaacaaggattgctctgtgccttcacagacggatgaggttgtgctaggaattccctccccagggatctggcatgactgacatgcagttctataaatgcacatgtttgtctcattatcttttttgtatagtttatgaaagtattaatatagttttaataagtaaatatttttaggttacwaaacttgacttcacatctttgtataattaaactccaaatttgaagaaaaataaaagattgtgtattcagtaaaaaaaaaaaaaaaaaaaaaaaaaaaa

SEQ ID NO: 2079 - DNA, 618 bp, Canis familiaris
taaaatcagtttttaaagttttggcccacagctaatgttccacacctgaatttcctggggctctgctagctgcatcgctggaaattaaatgttggagtcctagctttgctcccatktwacacattggtgctcccttggattgaatttaaagtgttgaatctttgctatttcatttgtggtaaaggctccagcattgttctatttctatgcaaatttcttgaagcagaattgtttgcgtgtctctctgccctagggcaagaagaggtttctttcctatgaaactgaggcatcagctggtttctggctttgtcccgttaacatgatcattaactttgttagtaagtttatgacctgggtttgcaaattgtacttgtttgttgcatccatgttcacctgcagtgattcctagtttggttgtaagaatattaaccctgggcagaaattagcatataagtttttttttttttcaaactactcccaggttttaaaacttgtaataaaatggaaactggtttttctatgcctttttgaactcttgtaattgagttttgatcacattttatattaaagtggctaacacatgrmwaaaaaaaaaaaaaaaaaaaaaaaaaaaaaaaa

SEQ ID NO: 2080 - DNA, 631 bp, Canis familiaris
ctttccagtacccttcgcctgccgctgctcaggacatggtggacagggtcaaggagctagggcacagcactcagcagttccgccgggtcctgggccagctggctgctgcctgagggcagatgaccagagggatgkgggtcaggggagtakggcagcgagggtcccagctgcccagggcacctgccctgagaggkttkccgtktctgcaggtcatggggacaggcaccccagctctgcctgggcctggtgccccagactgtgcagggatttgtacatatttatgatggggcaggatatgggacggtgtctcctcagaggagtctcaagcagagctgggcccgcaggaaccgaggctgaggagtgggctggtggtcttccctgagtacgctgggggctaggcctgggcacagaggccccttgacccacatggcctcagatgaccccttgagctgagtctggcgccacaggagtgccatgtccccagccccctgcagcgcaagcgccactataccaggagaaaaactctaaaacactatttttcattattgattttccaatcatttgactaatagtctacatttaaataaaaatttaaaaatgaaataaaaaaaaaaaaaaaaaaaaaaaaaaa

SEQ ID NO: 2081 - DNA, 666 bp, Canis familiaris
catggtttgttaaactggactttggctagttcaaaatttgaagtaattttcacccattttctttaaattttgttaacactaattcaagtcattttattcaaagtctccgaaaagatgattttaatcatctgtttatatgcatgggggtctgatctcagatacastawatgtggagtgtaggaactmaaatgaagcctgctgtgtgaaactactttcacttagggttcactggtttttgtaccmatatgttttttatacacttcagtgcaagtcttgtcagktaaccttactttctgagtaagctaagtaacccmaattacakttctttaaacctgkgttactactatggcactttgataaaatggtcagtaaccmacttctttactgacmaaaggttccatgtaccatgtgctggagcatctattttaaatgtggctatctgtgaatggtaatgttttccttcatgtaagtgcctgttcagagtttcaaaatttaaaaatgccmaatattttcatggtcacttgcatgtagtaatctaggaaatattcgaaattttgaaaaccmattgtatttaaccagcctcwaattgtgcaaccatgatgtataataaagaatttgaaatgaaaaaaaaaaaaaaaaaaaaaaaaaaaaaaaaaaaaaaaaaaa

SEQ ID NO: 2082 - DNA, 680 bp, Canis familiaris
tgtacagttagtaattgaccccacaaggaaccaatatctgcagggaaagtgaatcttggagcctttaggacatacccaaagggctacvaaccccctgatgaaggaccttctgagtaccagactatcccactaaatawaatagaagactttggtgtacattgcmaacvatattatgccttagaagtctcatatttcaratcctcattggatcgcaaattgcttgagcttttgtggaataaatactgggtgaatacactgagttcctctagtttgcttactaatgcagactataccmctggtcaggtctttgatttgtctgaaaaattagaacagtcagaagcccagctgggacgaggaagtttcatgttgggtttagaaacacatgacagaaagtctgaagacmaacttgccmaagctacaagagacagctgtaaaactaccatagaagctatccatggattgatgtctcaggttattaaggataaactgtttaatcaaattaacgtctcttaaacaatcactaagtagtacttttgactcaaagccagtataagaaaaaatacttaagtaacactttaaaaccagttaccmaaactgattagaagtataaggtgctctgaagtgtcctgaatattaacatcgtgtaataaaactctttaaaatgaaaaaaaaaaaaaaaa

SEQ ID NO: 2083 - DNA, 648 bp, Canis familiaris
tttattttgggcaggacaggttaccttgggttcacccaagaagagttcttggaacttgtaaagattccaatggacatagtcacgctgggaccagaggaccaagttaacgtgaagccagcagaatggacctcaggaaagacagggggccgkcaggtgcgtttccccacgtcagcagggccctcgggtcagcgttgctggtagtcctggaccctcgttgtccagcttgtggggctgattttccaggaagagtgtaatttccatagtgcctttgcttscctgcttcgagttcttgggggctgctaacagtcgaaatcaggctcttggacattcagttaatctttagacttgaaaacgcatgtgtataaggtcttcagtgtttacagatgtcacggtcaggttttcattgtgttcatcagcacctgctgagtktagctaatgaagaggaaatttggggaaaaaccratagatcagcttctgtagggatcttttatatgatttgttctttaaatgtgccgggttttcagtgacctaccaaatggatggaagggaatgtggatcatgactgtgacacagggcacttctctgcctaaaccgggtggcagtgggtgtgaaataaaggcgtgttcagttttgcaaawawwaawaata

SEQ ID NO: 2084 - DNA, 526 bp, Canis familiaris
cacgcccaggacaggcagccccagctccagcgcgtcggcctgctcgccaggaggcatgctgccttcggccgggggcggcccggagggcaaggacgacaagaaggaccccgacgtgggcggcggcggcggcgccagcaagggctccgggggcgcctcggccgaagggggacccgcggggctggcgcacggccggatcagctgcggcggagggattaatgtggacgtgaaccagcacccagatggggggcccgggggcaaggccctaggctcggactgcggcggctcctcgggctccagctccggctccggccccagcgcgcccgcctcctcctcggtgctgggctccgggctggtggcccccgtgtcgccctacaagccgggccagacagtgttccctctgccccccgcgggcatgacctacccgggcagcctggccggggcctacgcgggctacccgccgcagttcctgccgcacggcgtggctctcgaccccaccaagcccggcagcctggtgggggcgcagctg

SEQ ID NO: 2085 - DNA, 713 bp, Canis familiaris
tgcggggaagctccggactatgataaaagcccaatgggctgggatgtgaaattcaagctcgaccttggactgttcgtaacctgcccyacctcatggatggtaagracaagatcacccagagtaatgctatccctgcgctacatcgctcgcaagcacaaatatgtgtggtgagactgaagaagaaagaattcgagtggacatcatggrgraacccaataatggatttccgcatacagctggtacaactgtgctacagtcsstgaccttgaaaaactgaagcctcggtactkggaacagctacctggacaactgaaacagttctcctkgttcctggggaaattctcctggtttgcaggagaaaagctcacctttgtggatttcctcacttatgatgtcttggatcagaaccgtatgtttgagcccaagtgcctggatgaatttccaaatctgaaggctttcatgtgccgttttgaggctttggagaagatagctaactacatgcagtctgaccgcttcctgaagatgcccatcaacaacaagatggccctgtggggcaataagagaatatgctgagcaggaggtggacttgatctgcttgttttattccatcctgtgcctagggagcctgtactctctcttctctgctcttttcaataaatagcgtttaggctaaaaaaaaaaaaaaaaaaaaaaaaaaaaaaraaaaaaaaaaa

SEQ ID NO: 2086 - DNA, 611 bp, Canis familiaris
agattcatccaggacaggatatgctcttatattaaggatttgttaattctctgttttaaaaaaaawaaatcagaatatttaaaaaaaagacatctctgtatcatgtggtttctagccttttctgckgtggcgctgactttcctcaggaagcccmtgacgagcactccctcccttggctcacttggatgaagagtgtgccttcagaacaacctcacacctgcatttcagcagtgcctccccggtcttcatccctgagcttctgttgttggctgttttccagacctatggagtctcttgctgttcttcytgtaaggactgaccactttgagcctcggtttctgtatggggattaaatgagataacaagtggagggcacagctatgcactcgccagaatgggatatggaactaatttgtccctcatcttctgaatggactgacatcttggatgtgggtgccgctccctgtctgattcactgtatgaatctatggggccgtgtgtgcctggggagggcaagggtcaattaaagttatgggatattttctatawmwaaaaaaaaaaaaaaaaaaaaaaaaaaaaaaaaaaaaaaaaaaaaaaaaaaaaaaaaaaaa

SEQ ID NO: 2087 - DNA, 639 bp, Canis familiaris
ctccgtcctcctgccttaaaatactgctttcaaagtcatcatcccagcccagggcatcctagagtaggggaaggagtttcagaccccaaratttggaagacacagagatcatcctgtccagcttcctggtgtgacagaacaggagacagaggcccaagaggaggaaggacttcatttggcaggttggggcaaaaccaggactgcagccctgtcttcagcatacctcactgcctctcccagggacagactcatgtcttaagggtgcatatggctccctaaccagtaatcacctctgggggccmacaggtgggagaagcattcctgtctgagtctatgccttaggatgacaaataccttgtctatactttggccccaattcaaagatacagggcctttcctggcycctggccccctccctgttctgggagcccaggtaggaggctggccttgggaagagctgcagaggcatcacctctttctgctgcttccccccaccaccccagagggtctgagggctgtgcaacttgcccaactgcctctgccctcctgggggtctcagcccactgctgacacttctgcaatccagagaaacactaaataaagcaatatgtgtttgccaaaaaaaaaaaraaaagaaaa

SEQ ID NO: 2088 - DNA, 628 bp, Canis familiaris
tctgtgtccagacggttccagaagccgtcctccrttgcyttgtaagcggactggcccactgtggcctctgcccccggcggtcagggcatcagggagtgggctccgcctccaccgccggggaagcccaatccccgattcccgatgagcyggtacgacaggtgtctccccgtgctacacgtgcgtgacacagagcgagaggaagctgcgaacggggcttggaccgcggtgagccccacccccacgcgggtgcggggacgctttgccccaggcagggtcccagtcccagggaggccgtgagacctgctcaccgcggggtcgtgctccgggtcctgcccgcccgcccagcggcccggagccgtgctcctccagtgttagcccgcagccttgggaagtcaccgcgtcgggggccccgggtctcctcggcgtgcaggacctcacgtctccacagctgccttagtagtgcgcgtttttacttttcttacattgtaaagaatatacccagtatgtaaatgaatgttctataagccctttgtatagtcattttctctgcttttcagatatcgtctctattcaaagtataataaaataataaaggtggtaaawwmwmmrwrrcaaaaaaaaaaaaaaa

SEQ ID NO: 2089 - DNA, 617 bp, Canis familiaris
cccgcggcccttcttmatkgtaaggcccccgccgctatctctctgatcgtgaccgggggtggcttattgttgatccgtgccaagtggcatgtcgagggggttcaacaccaggggcacggtgagaagatctcgcytttcctggtaatacgtagaagacatattagctaccttcttagttcaggaccgctccttgtcccaggagttgttcagatacgagcactaagtctgctctccgatccgtctgaggatcgtgaccctcatcgctcagccccagggtcgcttgttgggggccttgcagtcgccagtggtggttgtgtaaaatttattttttcgtactttgttttacctgttgttgatagtagtttggtttttgttagccttttactgctgacaacaggtggtgctgaaccttctgggcttgcaacaagctagctacgcaacgtgtcctggcctgagcggccgggctgtaggcatagagcatgtgggcttggtgcaggtgaacatacagtggttttactttgcccggtttggctttatttacaacagacaacggactagattatttggagaaataagaacwkwyywkwkttttttttttttttttttttttttttttt

SEQ ID NO: 2090 - DNA, 617 bp, Canis familiaris
gggcgccgggaagaaktamcattccgggggcggcgatagagagactagcactggcccccaccgaataacaactaggcacggttcaccgtacagctcccccaagttgtggtccccgtgccactcttctagagcgraaaggaccattatgcatcttctgtataatcgatggaagaatcaagtcctggcgaggaacagggtcctcaacaagtctatgctcgtgattcagacgagaggctaggcagactcctagcactgggagtagcgagtcggggtcccagcgaacaacccccggaacgtcagcggtcaccaccaacacattttaaataaaaaagcatgaaacaaaatggacaacaactatcatcaaaccaaaaacaatcggaaaatgacgactgttgtccaccacgacttggaagacccgaacgttgttcgatcgatgcgttgcacaggaccggactcgccggcccgacatccgtatctcgtacacccgaaccacgtccacttgtatgtcaccaaaatgaaacgggccaaaccgaaataaatgttgtctgttgcctgatctaataaacctctttattcttgwmwrrwmwmaaaaaaaaaaaaaaaaaaaaaaaaaaaaa

SEQ ID NO: 2091 - DNA, 755 bp, Canis familiaris
  misc_feature (382)..(382): n comprises a, c, g, or t, or includes no nucleotide
ggagacctgaaagcccccggcctccaggtgctcawcgactacytrcggkacmagagctacatcgargggtacgtgccgtcacaascggatgtgsmastgtttgmmmagtctccggccmmscgcctgccgactkgwatcatgccckgcgttggtacmatcacatcaaktcttacgagaaggwawagsccagccttccaggagtgaagaaagctttgggcmagtatggccctgctaatgtggaagacaccacaggaagtggagctacagatagtaaagacgatgatgatatkgatctcttcggatctgatgacgaggaggaaagtgaagaagcvaagaggctaagagaggaacgccttgcacagtatgagtcaaagaaagcchnwwwacctgcacttgttgccmagtcttccatattactagatgtgaaaccttgggacgatgagacagatatggcmaaattagaggagtgcgtccgaagcattcaggcagatggcttgktctggggctcttctaaactagttccagtgggatatggaattaaaaaacttcawatacmgtgtgtagtggaagatgataaagttggaacagatatgctggaggagcggatcactgcttttgaggactatgtgcagtccatggacgtggctgcttttaataagatctaaaattacatcgtagatcmttgtcsttaaataaaagcttaaaagacmaamwaaaaaaraaaaaaaaaaaaaaaraaaaaaaaaaaaaaaaaa

SEQ ID NO: 2092 - DNA, 749 bp, Canis familiaris
cctaagccccggccttcaggtgttcaaggataccttacggacaagagctacatgaagggtaacgtgccgtcacaaccggatttgccagttgtttgaarcagtctccggcccccgcctgccgacttgtatcmatgccctgcgtggtacmatcacatcaagtcttacgagaaggaaaaggccagccttccaggagtgaagaaagctttgggcaagtatggccctgctaatgtggaagacwccacaggaagtggagctacagatagtmaagacgatgatgatattgatctcttcggatctgatgacgaggaggaaagtgaagaagcgaagaggctaagagaggaacgccttgcacagtatgagtcaaagraagccmaarvacctgcacttgttgccaagtcttccatattactagatgkgaaaccttgggacgatgagacagatatggcmaaattagaggagtgcgtccgaagcattcaggcagatggcttggtctggggctcttctaaactagttccagtgggatatggaattamaaaacttcaaatacagtgtgtagtggaagatgataaagttggaacagatatgctggaggagcggatcactgcttttgaggactatgtgcagtccatggacgtggctgcttttaataagatcwwaaattacatcgtagatcattgtccttaaataaaagcttaaaagacmaaaaaaaaaaaaaaaaaaaaaaaaaaaaaaaaaaaaaaaaaaaaaaa

SEQ ID NO: 2093 - DNA, 693 bp, Canis familiaris
ggaggcatgaccatcgtctacaagagcagcattgatctcttcckgtatgtggtgggctcctccaacgagaatgakctgatgctcatgtccgttctcacctgtctgtttgagtccctgagccacgtgttaaggaagaatgtggagaagcgctgkttgctggagaacatggacggagccttcttggtgctggacgagattgtggatggcggcgtgattctggagagtgatgctcagcaagtgatccagaaagtgaattttagggccgatgacakcagcctgactgwwcmgagtgtggcccaggttcttcagtctgcmaaggaacmrattaaatggtcgttactgaaatgaaggctgtgcattcagggctccctgcccccagagcatttccccgatcctggcmaaatctcmaagatccagggaacaggagagacccatctgtatccctaggccctcccagaactgactcctgaggtctctggccagggactctgagatgcmaagatttggcttcagtactgactcaccccttctcactgccctggcctgtccctccagccacgagaaccmgctgagctgccttaactcagaccttaggcattcctcgccccmgagccctaataaacctgctttgtctcctgmmmmaaaaaaaaaaaaaaaaaaaaaaaaaaaaaaaaaaaaaaaaaaaaaaaaaaa

SEQ ID NO: 2094 - DNA, 619 bp, Canis familiaris
tgaggcactctgagcgggtttggacccctttgggatggttgycgggtggccattgctgcccrctgagcctgtgcagggtgcttgggaggaaggccctgtttccctgggactgctgagaatggccratgcmcckgaccctttgactctggccaccctgtcctcccctcaccaccctcaggccctcgawacacacacagttctggatgtgtactctgctgtgaagtggctggaagggagcagaggccaactaggggctggtaggggaggttgtctccactaggtaggmgatttttagaaactccccwacctcttccmaaggaaactttggcagcaaggggagatgatgcccttccccttcctgagagtgaggaaaggaagtgaaactgcccccgggaccaactttcccatctgggttagaatttgacctctctcttcttcctctctccactacgtgaggcagggggccctgagcccctcagctgcctgcacaaccccacctttggctgctggtgactctcaatctgccmratgcgctgcagcccattttctcccamttacagcaagactgtcagcctcawwaaaaaaaaaaaaaaaaaaaaaaaaaaaaaaaaaaaaaaaa

SEQ ID NO: 2095 - DNA, 617 bp, Canis familiaris
cctagtttctgcttctctgctgctcccgtctgccacccccaccctggggacccagtgtacatkgtgcctkagaggcagctctggagtcctcccagccagcctctgagkggkgkckttsggccagcccccacccccacccccccgcccccgttctactacacctggctgaggctcctctgcctgccccacccccaccccacccctgccctcagccccggggtgactagtcctgccaggtaccagctatgcttgctttttctgtatcttatttagacmagagatgggaatgaggtgggagaggggggaagagaggttctttcaggctgcctcacctggaagctggaagcctgggctctgctcagtcactggaggtcaaggtcaagtgggtgtagggtagaatggagagggagggtagtagacacgggtgggagccggctgtggaagaggaaggtgagaagaggtagagggtgtgtgtccgtggttttggcaaacactaaagtccctggcctccccatttcccatctgcattccctttctccccccagatcaatacactagttatttctaaaaaaaaaaaaaaaaaaaaaaaaaaaaaaaaaaaaaaaaaaaaaaaaaaa

SEQ ID NO: 2096 - DNA, 647 bp, Canis familiaris
acgcgggggcgccccgggcggagcccgtgcagctgccctgctgctaggaggaggtgctcccgtgaaccacttggsggggttggtgccgggccagctggagagggcgcgaggtgttgaacgtccaggagccagagccccccttacacataggggtcaacaactcgggcgtcgccatcgactaccagttgtcggagctgaagtggttcgggttccagctgatagtccacctcatcaggcagggcttggtgagctgcctggtcgtgtgcggggccgcagcctacaacwcggagctgcaggtcgtcatccagttcggccgggcmgagctgctccgagtggacctgggcaacgtgacggcctccaaccagggcatcaacttgaccggccacttgatcttgtttggtggcgaggcgacgggtaacttgctcgaggaccccytagttgacgaggagctgtgtcacaacctggacttggggcggcgcgaggaccgtgcctccgtggagcccgagaccagggtctgcaacttcttcggcgtcagcaactaccaggtccagggcttcttctacatcctgaggagcggcaccttctgcttccgtatmgtgttgcagttggcctcgctggagacctkgggctaccgggtcttcgtgcgc

SEQ ID NO: 2097 - DNA, 1302 bp, Canis familiaris
cggcacgagctattagaaaagaaagatcagctgagtcctttggacctgatcaacttcatccaggagctactgacttcaactacttcggcctaactctctgaaacgatgaattatacaagctatatcttagcttttcagctttgcgtgattttgtgttctyytggctgtwactgycaggccatgttttttaaagaaatagaaaacctaaaggaatattttmakgcaagtaatccagatgtatcggacggtgrgtctcttttcgtagatattttgaagaaatggagagaggagagtgacaaaacaatcattcagagccaaattgtctctttctacttgaaactgtttgacaactttaaagataaccagatcattcaaaggagcatggataccatcaaggaagacatgcttggcaagttcttamakwcakscaccagtaagagggaggacttccttaagctgattcaaattcctgtgaacgatctgcaggtccagcgcaaggcgataaatgaactcatcaaagtgatgaatgatctctcaccaagatmmaacctaaggaagcggaaaaggagtcagaatctgtttcgaggccgcagagcatcgaaataatggtcatcctgccwgcamtatttgaatttttaaatctaaatctatttattaatatttaatattttacattatttatatgaagaatatatttttagactcatcaatcaaagtatttataatagcaacttttatgtaatgaaaatgactattaatatatgtattatttataattcctgtatcctgtggctatttcattcaaccccttctcgccactcccccccacccgaacctcttccttttttttttttcctgaccgactaggcaagactgtgatttcaaggcttaatctcagggaccaagtaggcagccaacttaagtaagatcctgtgggttgtgcatttatttcacttgatacaatgagcacttataagtgaaatgatgcattccagttgctgcctacttgggaacatgtctgcatgatgagccactgctctagaggcatgtcagacgccacttgaatgtgtcaggtgatatgacttgtgtcctgattaacacatagcatttcttctcatgcctggtgcttcagaataccactgacaactatgactgtacccaatggaaaacaattaatttgtttagttcatcaatatttaatatatatgaataaagtataatttcataatgaaaaaaaaaaaaaaaaaaaaaaaaaaaaaaaaaaaaaaaaaaaaaaaaaaaaaaaaaaaaaaaaaaaaaaaa

SEQ ID NO: 2098 - DNA, 652 bp, Canis familiaris
catacaactttaagaagaatcaggcccataccttggaggacttccagcgagttctcaatgtgaatctcttaggcaccttcaatgtgatccgcctggtagctggtgagatgggccagaatgaaycagaccagggagkccaacgtggggtcatcatcaacactgccagcgtggctgcctttgagggccaggttggacaagctgcatactctgcttccaaagggggcatagtgggcatgaccctgcccattgctcgggatctggctcctgtgggcatccgagtgatgaccattgctccaggcctatttggcaccccgctgctgaccagcctcccagaaaaagtgcgcaacttcttggccagccaagtgcccttccccaaccgactgggtgatcccgctgagtatgctcatctggtacaagccatcatcgagaatccattcatcaacggagaggtcatccggctggatggggccatccgcatgcagccttgaaggcaaggggcagagaaaacatgtgcccttcttttcttgcttcccttggagtactgtactacagcttgggaggaagtccagtagccatcttgtaactgctcaacactctgtgcctaataaagtctctctttctcacagggraaaaaaaaaaaaaaaaaaaaaaa

SEQ ID NO: 2099 - DNA, 631 bp, Canis familiaris
  misc_feature (103)..(103): n comprises a, c, g, or t, or includes no nucleotide
tgagctgtgggcttgggaccctcaaacattccttccctccacctgtatctcctctttcccctctccccaatgaaggttttaggaggtaggaaaatgtgaccanaatgggggtgctatttggctttcattscctgcctttgaagaactaatgttacctaaracttgttcccctcccttctaactggtraatatataaatacgtcaggttaaagggaaaaggttttcagggctcttctcttctcccttgccccataacctacctccaccctgccccagtagccagccagggcagcttctctgcctggggtgcaggtgggggggatttctgagtactgagagtcctcatctaccctcttcgtcctcggtcctcggccgcagtggggactctgtccagtgccaggggaggaacaacatggttaatttttttctaaccttrccacttgagggaagtgagggttgggggaagggcaggctttatgggagactgtccctccttcactccatgttctgggtgaggcaggagctaaggggtggggtgtgggaagcrtctgactttatttcctttcttctgaaataaaaggaaaagcatttctggaaaaaaaaaaaaaaaaaaaaaaaaaaaaaaaaaaaa

SEQ ID NO: 2100 - DNA, 633 bp, Canis familiaris
tctcccctgcaagcatgttttccacaagtcctgcgtggatccctggcttagtgaacattgtacctgtccmatgtgcmaacttaatattttgaaggccctgggaattgtgccmaatttgccatgtactgataacgtagcatttgacatggwaaggctcaccagaacccmagcagttaaccgaagatcagccctaggtgacctcgccagtgaaaactcccttggccttgagccgcttcgaacttcgggaatctcgcctcttgcgcaggatggggagctcactcccagaacgggagagatcaacattgcagtaacmaaagaatggtttattattgccagttttggcctcctcagtgctctcacactctgctacatgatcatcagagccacagctagcttgaatgctaatgaggtagagtggttttgaagaagaaaaaactgctttctgactgattgccttcaaggaaaaaagaacctatttttgtgcatcatttaccmatcatgccatacaagcgtttatttttagtacattttattttttcataaaattgctaatgcccaagctttgtattaaaataaataaataataaaataagaaaaaaaaaaaaaawaaaaaaaaaaaaaaaaaaaaaaaaa

SEQ ID NO: 2101 - DNA, 717 bp, Canis familiaris
tgcccggtctgttagcccacgcctgcctggcagcctcgcctacgccttgcgcgcctcacagagcccggatccatcaaaggccatgagcaggaggccaggacagagcctgcgggcatcctgkgggttgggggggactagattccagcggggtggacacgcaccccatccctcagaccaggaagccagctttccagacccttccatccgggaccctggagtcctgaggaaaaggamattctaagattcgggggaagcgaagggagggcaytgggatgaaaaggtgaggccaacagacggcaagggtcactggagagtcccagctccaaagaggtggctttcctcccagagcacgactcacaaggtaccmaagcaaatgtctccgtaatctgtgctgtcctccagtggccacctctttggggcaggtggactgaggtctctgccggtycctgagcccaccttcctccmctggacttgctgggtgactgctggtgggtgacccaccccgaggtggccgtctgaagcggccccactacttcctccctgcgtccctcccatctgagtatttaagcacccctcccccttctcttcctggccttacccccacccaccctgagatccaccccagcctttctgtaaataaactccccccccgccccgacttgggtacaaactaamaaaaaaaaaaaaaaaaaaamaaaaaaaaaaaaaaaaaaaaaa

SEQ ID NO: 2102 - DNA, 699 bp, Canis familiaris
gttaaagaaattaagrccaakkgccatgatgtgaccgtggtcaytgagktgaaggagattyyaaaggcttbcbtggkwdmcadtscmrggrmcwccgktwaccygtacaccagctytgbctgccygtgtcctccgctyagsgtcwwcgaggagtacgtcatcatggsytatgaggatgaggagcgtgccmgattactkttgstggaagggtctattgctgagwwatggaaggatcgacttgktmwhaaagtcmagcgctgggacatgaagctccgtcatcttggactgaatdraagtgattctagccmchgtgattccacccagagtcagaagtctggcaggwacgcchacccccggcaagcacgcmackwaatcctgaaatgcagaaagdacaccmgtggacttcctactaagacttgcgttgctggatcagcmaaggvaaattgcactattgcacgccmyattctattttytaccmcmraaatcaystggttactgatattacttctattttctctgttttctgtttctctctctctctctctytttgtggtctgagtgcagatccttaaatatatgtattctgtttcactaatcctgggraaactgttytttrcmataataatrataaattawmcatgttgawammmvrwaaaaaraaaaraaaaaraaaaaaaaaawaaaaaamawaaaaaaaaa

SEQ ID NO: 2103 - DNA, 537 bp, Canis familiaris
aagggacaccgttaacctgtacaccagctctggctgcctgtgtcctccgctcagcktcwacgaggagtacgtcatcatgggctatgaggatkaggagcgtgccagattactgttggtggaagggtctattgctgagawatggaaggatcgacttggtwawawaagtcaagcgctgggacatgaagctccgtcatcttggactgaatawaagtgattctagccmcagtgattccacccagagtcagaagtctggcaggaacgccaacccccggcaagcacgcwactaaatcctgaaatgcagaaagaacaccagtggacttcctactaagacttgcgttgctggatcagcmaaggaaaattgcactattgcacgccatattctattttttaccmcmaaaatcatgtggttactgatattacttctattttctctgttttctgtttctctctctctctctctytttgtggtctgagtgcagatccttaaatatatgtattctgtttcactaaaaaaaaaaaaaaaaaaaaaaaaaaaaa

SEQ ID NO: 2104 - DNA, 639 bp, Canis familiaris
ggcttgccctgggtaaacarttcccaggracacccgtttraccctgtacaccaagctctgggctgcctgtggtacctccgctcagcgtcaacgaggagtacgtcatcatgggctatgaggatgaggagcgtgccacgattactkttggtggaaggkyctattgctgagaaatggaaggatcgacttggtaaaaaagtcaagcgctgggacatgaagctccgtcatcttggactgaataaaagtgattctagccacagtgattccacccagagtcagaagtctggcaggaacgccaacccccggcaagcacgcaactaaatcctgaaatgcagaaagwacaccagtggacttcctactaagacttgcgtttgctggatcagcacaaggaaaattgcactatttgcacgccatattctattttttaccaccaaaatcatgtggttactgatattacttctattttctctgttttctgtttctctctctctctctctttttgtggtctgagtgcagatccttaaatatatgtattctgtttcactaatcctgggaaaactgttctttgcaataataataataaattaaacatgttgatammarrwaaaaaaaaaaaaaaaaaaaaaaaaaaaaaaaaaaaag

SEQ ID NO: 2105 - DNA, 721 bp, Canis familiaris
cctttctctggaggcttcttgagaacttaaatgaatatgctttttgaattaacgttctcggaagtgtacagcttcctgtgcttctcagtggcmggctkgaattcaccctctggracacygttcckttcctktctttgtgtggtttcatttaatctgtgctggttagaaacagcatctcagaccttaacccatcmaatgacmaagaaggcaactggactttttaagtaatactgacaagtggtttctgttttctaaaggaccaaataaggaggatgtcttgtttttaattaggctcttttccctgctgagctgaaaattgtggtgacatcccggttgaccacaactgcctaatctaaaagctcmaagaaagaagtaaagtgttatgctaattttattgcagtatgatagaatttttatcttgttatgtcctttcttcgataactctgacaggaaactaactgctatgtctcagagctgcacataggaaagtatggaaaaatgaaaactattattctttattctgatacctgaaaacttttaagtggaaaagattactatatgttgatcttgccttctttggraaaaatattaagtagcccmaacactttataattktgtagaaaaaatatgcatctattttttcttgacctggttttatacagtaataaaagttattttggaagctaaaaaaaaaaaaaaaaaaaaaaaaaaaaaaaaaaaa

SEQ ID NO: 2106 - DNA, 632 bp, Canis familiaris
tcaccatgagcacaccgcctgctcatcctctgggagscagtttgtgggagtgctcggctggtcagcgaggtgaagatgtccaccgagagagatctgctgcatttgggaggagagctggcccgggcctcaagagccatccaggaagcggacctgggggctgagtgcaggcctgcggctggctgagagccgggctgaggcagccctggagaagcaggcactgctgcagacccagctggaggagcagctgcgggacaaggtgctccaggagaaggacctcgcccagctgaaggtgcagagcaacctggacaaggccaatctcagtgccagagtgacagagctggccctgaccgtggagcgccttcagaaccagaatctggagaaggatcaggtcaacaaggtccttactgagaagcttgaggccctggaatccctgcggctccaggagcaggcggccgtggagacagaggacggagaggggctgcagcagaccctgagagacctggcacaggccgtcctgtcggacgtggacagcggcgtccagctaagcggctccgagcgcacggccgacgcttcggacggcagcctgcgggggctctcgggcccccggacgccctccccgccgcgccgcgcct

SEQ ID NO: 2107 - DNA, 763 bp, Canis familiaris
tatttctatgctgaaagaggatttttaacgaagggaaaacaacagcaataacacttcaaatctttggagcagctaactcacacacataatatcctgctttttcgtacagaactagccccgtgtaaaaacggtccccctgtaaataccgttccttgacactgttgtatcacacgcgtgtacggtggttcctttttcagaaacttttcttaacctggtaatttgtctcgttttctgggttgtttttaactgaggaagaacagctcacctkccggagggwcggaccccccgccagcccctacggcgcccccgggccctgtcctcccamccctgcccgcccaactgcgtccaccaggctcaagaggccgttttgttcttgctttaagtcaggagtcacaagcgacattttttttcagttaaggraaaaaacacagctctacctttatatccgccaggagcgtctgcaccgctgttccctcctttgctgctgctaatgacaacatgatgacttactctactatcgraaactatttttatgtaattaatgtatgctttyttgtttataaatgcctgatttaaaaagaaaaaagaaaaarmwwrrmawatttattatcttcgctgtgtaacccgttagtcctttggcgcccctcccccagacagatgaccttgtacaataaaggactttgagagtaaaaaaaaaaaaaaaaaaaaaaaaaaaaaaaaaaaaaaaaaaaaaaaaaaaaaaaaaaaaaaaaaaaaaaaaaaa

SEQ ID NO: 2108 - DNA, 865 bp, Canis familiaris
taatttagtagaagttagacgtataccacgctaacctgtatcaaaccaggggatcaattactagcatgtcatactgataacatctaatgatctggtagtaaattttgtttggctattataaatatcgaagtataaataattttaacactagatacaacacatgtagtattttaacagaaattacgtgtcaccagttattcagttaaaatactttatatttraaaagaatgvataatgtttaktaaartgactacataaggggtttatcccmaatgaatattgtggccttatattcacacagttataggraacactacatttaagtgggtgcaggttgtctttactaaagacaacactgaactctgctgttcctggttacgcagcggaatccgaggagcagatacagaccccactgtacggttcggacacttagcagccgtcctgggcagtccgtctcctgtcccgggcgcctgctgaggatcctaactcatcactctggattgctgaatttagtctactctttgtgtttggtttttgtgtgctcttagaatyagcttcattctaagcaaacctgtgtctacttcaaaagactggaaatagaaaaaaataaatctttgccmaatccttcararawgactgtagtcacatggcttaaatgaaatgtcaaaaagctttttgattaaaccaggcatccgccccgttgtcaccgttacctttctgccagcatgacctcttaaaggctgcctcttgggcgtactgtgtatcctgttgtgtatttgttcatttccacactcaattcagttgtgttaaaataaataacattttaagtttttaaaaaaaaaaaaaaaaaaaaaaaaaaaaaaaa

SEQ ID NO: 2109 - DNA, 682 bp, Canis familiaris
  misc_feature (153)..(153): n comprises a, c, g, or t, or includes no nucleotide
  misc_feature (196)..(197): n comprises a, c, g, or t, or includes no nucleotide
  misc_feature (213)..(214): n comprises a, c, g, or t, or includes no nucleotide
  misc_feature (216)..(216): n comprises a, c, g, or t, or includes no nucleotide
  misc_feature (228)..(228): n comprises a, c, g, or t, or includes no nucleotide
  misc_feature (230)..(230): n comprises a, c, g, or t, or includes no nucleotide
  misc_feature (241)..(241): n comprises a, c, g, or t, or includes no nucleotide
accagttattcagttaaaatactttatatttgaaaagaatgaataatgtgtattaaaatgactacataaggggttatcccaaatgaatatttggcctatattcacacagttataggaaacactacatttaagtgggtgccaggttgtctttanctaaaggacaaccacctggaacttcttgctgttttcctggttnnaacgccagcgggaatnncncgaggagcacgnantaccagacccncactgtacggttcggacacttagcagccgtcctgggcagtccgtctcctgtcccgggcgcctgctgaggatcctaactcatcactctggattgctgaatttagtctactctttgtgtttggtttttgtgtgctcttagaatcagcttcattctaagcaaacctgtgtctacttcaaaagactggaaatagaaaaaaataaatctttgccmaatccttcararatgactgtagtcacatggcttaaatgaaatgtcaaaaagctttttgattaaaccaggcatccgccccgttgtcaccgttacctttctgccagcatgacctcttaaaggctgcctcttgggcgtactgtgtatcctgttgtgtatttgttcatttccacactcaattcagttgtgttaaaataaataacattttaagttttaaaaaaaaaaaaaaaaaaa

SEQ ID NO: 2110 - DNA, 679 bp, Canis familiaris
acaccgcgtkttcygcctcgtcaagaamgctgktgtkttgttttgaccatttagttttgttggttccaactgggcccaccgtttccccaaatttcctgccctccctggagactggaggtctaggggaaagggcccaggatgtggcaacagagcccgataggactctgggcagcgggacaggatcctgstaaagtagcaggaagcccccagagctctgtccctcaaggatgaaacaggaacaggtaggcctgggcttctgagtcagcagaaaggggcccccgtggggtctaaagtgaggaaggtccagaccacttcactagcttcacagcagaggctgagcatgtgggggtctcagaagagggtcccctcctttgaggcaggactggaagcagccccggtctgaggaggtcagccaggcccctccaaaggtctgataactccactccacccataagccttattgctctgtttacagtgacctgccccaggcccctcccctagggggactggggtgtctggggtccaccctctgggtcmatggttatttgatttgattttatttttttctctgtaaacttctaacctggcttttccccatgtcaattcctgtgatttatgcccaataaagtttgccattattttcaaaaaaaaaaaaaaaaaaaaaaaaaaaaaaaaaaaa

SEQ ID NO: 2111 - DNA, 647 bp, Canis familiaris
acttggccaggggcccggcagtgtgctgggcctttgcctttgagctggracacacctgtatgtgaacmacttccagttccgcagcactgagccctgctcctccccttgggagcagcttggggcctgccagcagctagagcctggggaagagacyctggtgaccaggggccacggggtagcccggcctggkcggcacamctgggystkcggcagtgcttgtcaccagctggctgcctcggcttctcttaccgtgtctttgtcctaaggtctcagcmattacagaactctctcccctccttcctttccccctgccacctctgcttctgaaataagaaccatttgtgtgacaccmatacttaacttaagaaagacatgcattatgtggttgtaatcaaacctgatgctttcagatgacctacttacatcttcaatgtggmaaagattaagracmaaacmaaatcatctaaacttctgggccatccagttgacttttaaaacataagaatggaattccmaacacttaacacattcagctatatgacagaaagtaaatctatggatatggtattttgtgaatgatcttytaaataaaagaaaaccttacgtaawawwwaaaaaaaaaaaaaaaaaaaaaaaaaaaaaaaaaa

SEQ ID NO: 2112 - DNA, 595 bp, Canis familiaris
cagccagaattcactctgccttggacatgggctcccagataccwcgatgctgagcccagacaccccgcawtctgtgggacctgctaaatagtcctgtcckgccctcagagtcctgggattaagcctgcctcagtgttcawatttatagccmaawgctttctcayctgtgagatggaatcaaactagggggggttcagcccagccctgtggaatgggggccctctctccctgactytaccatcacctcagccctctytccagctctattccaatcctctcccmactcccctcaactataaaatgaggtgctgcagcccctgggacaggcacccccatgatgsccckggccccagtgagagggatcrggaaatagcttgtgggcagactctggtcaggcatcatggggctgaacttttgtttttccttttgtagattttcaaaggtggggagggcaggggraaaatgagcctttgttgctgtcaaaccmagaacttatttgtacmatttttttttcaataaaacttttccagtgraaaaaaaaaaaaaaaaaaaaaaaaaaaaaaaaaaaaaaaaaaaaaaaaaaaaaaaaaaaaaa

SEQ ID NO: 2113 - DNA, 707 bp, Canis familiaris
aggtcctcaccatagcagccgcaactcaccaggktccaactcaktcctgtacctgctgccaaccgtgtgccwyggcaacagggaggcaatcagtaccctggggcagtcctcctgccacactctgtggctacaatcgaattccagccagtcctaagcacagagattctctgtcacaccacagcgcatcgaggtctaagcctacccaagcttcttcttgggtgcactcactgagggacagtagaggaggtagcatgcccgggttgaccagcgctagcgaggctcctaaacccgagtgctccctagggttgactagccagtacacatcaacatctgtgtaccagttgtgtaagttttggttgttctggcagcagcagttttggcagattcattggtggttaaactgggagttaggtcggcacctgcaccagtgaactcagcatcactgccagttgaagctgtcaggacagttggcgagctggagcccacagagccataactgctgaacccatcagttgtcaggtgcgcactgcctgccycagttgtaaggacagctgcaccctcagcactggcctcagttagggatggttcttcctcagtgaggacaattgcagcacaacctctgttggttctgttaggtttattggaagtcggttttatttctgaaacattttkwywwkwytttttttttttttttttttttttttttt

SEQ ID NO: 2114 - DNA, 707 bp, Canis familiaris
tccaggagtggtatcgtcggcgttgagtggtccmaggttgagtmaggacatggacgacggttggcacacggwrccgttgtccctccgttagtcatgggaccccgtcaggaggacggtgtgagacaccgatgttagcttaaggtcggtcaggattcgtgtctctaagagacagtgtggtgtcgcgtagctccagattcggatgggttcgaagaagaacccacgtgagtgactccctgtcatctcctccatcgtacgggcccaactggtcgcgatcgctccgaggatttgggctcacgagggatcccaactgatcggtcatgtgtagttgtagacacatggtcaacacattcaaaaccaacaagaccgtcgtcgtcaaaaccgtctaagtaaccaccaatttgaccctcaatccagccgtggacgtggtcacttgagtcgtagtgacggtcaacttcgacagtcctgtcaaccgctcgacctcgggtgtctcggtattgacgacttgggtagtcaacagtccacgcgtgacggacggrgtcaacattcctgtcgacgtgggagtcgtgaccggagtcaatccctaccaagaaggagtcactcctgttaacgtcgtgttggagacaaccaagacaatccaaataaccttcagccaaaataaagactttgtaaaamwrwwmwraaaaaaaaaaaaaaaaaaaaaaaaaaaa

SEQ ID NO: 2115 - DNA, 677 bp, Canis familiaris
tgcgctgaatgtgatccaggatttccggaaagtctatgtgagatacaggattttggaaggaaaccatctaggatctgtcaacgctctgctttcctagattttctaatctttattaccagaaagcaatgtgcctggagcatattttccaaaatctcatggctatgtataaactatcttctgttagccttgttgcaaaagttagctgagagtattctaaaagacatggtcttgggaagtgtattatctgcagataatgtaccgcatcttccagtttacttcttatagaactaagcggaagagataaaagaactgccccttaaagtcattcatactaggagtcaaattcaagaaaaagatagagttggggaagggggataagctatcgatgctggtcctggctacacccttcattgattgattaaataaatcattttgctgtatcgactggtgtcagacttggtggtagtaggcccagccacacagtgatgaatgggacaggctgcagaggccaagagcactagattgttccctgatcgaaggagcgccactgactagaagagttatggcccctacgggctagcctacagtgaggtctgtccattaagggcaaaaaaagaaaaaaaaatagcttgttttctcaaaagatttattttatttattttttagagagacaaaaa

SEQ ID NO: 2116 - DNA, 688 bp, Canis familiaris
gataagctgggttttctgscgtgcttytkgggcccttgctgggaactgcctggcccggaggagccaggatctacactgtggagcttgcagggctctggtggatgaactagagtgggaaattgcccaggtggatcccaagaagaccattcagatgggctctttccgaatcratccagatggcagccagtcagtggtggaggtgccttatgstcgctcagaggcccacctcacagagctgctagaggaggtatgtgaccggatgaaggagtatggggaacagattgacccctccacgcaccgcaagaactacgtacgtgtagtgggccggaatggagaatccagtgaactggacctacagggcatccgaattgattcagacatcagtggcactctcaagtttgcgtgtgagagcattgtggaggaatatgaggacgaactcattgaattcttttcccgagaggctgacaatgttaaagacaaactttgtagtaagcgaacagatctatgtgaccatgccctgcacatatcgcatgatgagctatgaaccactggagcggcccagactggcaggcttgatggatcacccccaggaggggaagagggtggcaatgccttttatattatgtttttactgaaatgaactgaraaattgtgaaammmaaaaaaaaaaaaaaaaaaaaaaaaaaaa

SEQ ID NO: 2117 - DNA, 653 bp, Canis familiaris
ttgtcttacattagtttatttattcatgagagcgagagagagagagggagagagaggcagagaggcagagtcagaggcaggctccatacagggagcccaatgtgggactcgatcccggatcscaggrtcacgscctgagccgaaggcagatgcccatccgctgagccacmgcaggtgtcaagaaatggtgtttaaagtgaaaacagaagcaagctaacctttagtatagagtcaagggccggatgatataaatagaaccccttcccctgtctggagtgtcttccctgggaggaggcaccaggagaggactgcctggcctttcgtatttatcacccgcccccctatctatgtaaaaatattgacaatatattgaaatacatcaatgttttgaaaaggtacaacttccagcaaccaaatccaactgttgatttggttccaaggaagtcctgctgtacagactttattgaaccttgctctttgcttcacacgttactcggaaacacacagaagcggctgtcacggtcgctgtaatgcctgcgtgatgctccatggtgttttatggcagtttattaaactgttccccagatgttcaacawwaaaaaaaaaaaaaaaaaaaaaaaaaaaaaaaaaaaaaaaaaagaaaaaaaaaaaaa

SEQ ID NO: 2118 - DNA, 602 bp, Canis familiaris
aactgtaggataacaactgtcatatgttggtgcaacctgaagttaactcctgaggtcytttagtggtcttctggagttctcgcaaaaaacatagaaatctatccttgactgtaccgaatagttattgattaaatgagaatttatgtcaacctgcaaatagcaggttatttatgctagagtgctscagaaagaagrccaggggsaggtggggattggagggcgcattgccmaaaaaaattgtaaaaactggatccccacatttggctccgttggcaattgatggtcttcctaggtgccaaccagaggcttgtgtgtcttctttgcgcataatctcattggacttatttttaggagactgccaccattcccctgcaacagaatgtttagtggtcaaggggtacccagggaggctctgcggaaaggcgccagccaaaggccctgggcgagtaccaggtgtcccgggtacgttaccctcgacgggcacccggagctaggtgccagcaacacccacagccatagacacagccacacacacacacacacacacatagagtcatactatttatttatttttaaaatttttttttttttttttttttttt

SEQ ID NO: 2119 - DNA, 602 bp, Canis familiaris
ttgacatcctattgttgacagtatacaaccacgttggacttcaattgaggactccagraaatcaccagaagacctcaagagcgttttttgtatctttagataggaactgacatggcttatcaataactaatttactcttaaatacagttggacgtttatcgtccaataaatacgatctcacgasgtctttcttcyggtccccstccacccctaacctcccgcgtaacggktttttttaacatttttgacctaggggtgtaaaccgaggcaaccgttaactaccagaaggatccacggttggtctccgaacacacagaagaaacgcgtattagagtaacctgaataaaaatcctctgacggtggtaaggggacgttgtcttacaaatcaccagttccccatgggtccctccgagacgcctttccgcggtcggtttccgggacccgctcatggtccacagggcccatgcaatgggagctgcccgtgggcctcgatccacggtcgttgtgggtgtcggtatctgtgtcggtgtgtgtgtgtgtgtgtgtgtatctcagtatgataaataaataaaaattttaaaaaaaaaaaaaaaaaaaaaaaa

SEQ ID NO: 2120 - DNA, 582 bp, Canis familiaris
atggctgctaacctaatagaagacaattgcatcaaccttgtgaaaatgaaatttgttaacaatacactgtactttaaagcggaaagtgatgaaggcctggaatcagattactttggcaagcttgaacctaaactctcaatcatacgaaatttgaacgaccaagtcctcttcgttaacgagggaaatcaacctgtatttgaggatatgcccgattctgactgtacagataatgcaccccataccatatttatcatctatatgtataaagatagcctcactagaggtctggcagtaactatctctgtgaagtataagacaatgtctactctctcctgtaagaacaaaactatttcctttcagaaaatgagtcctccggatagtatcaatgatgaaggaaatgacatcatattctttcagagaagtgttccaggccatgatgataagatacaatttgagtcttcattgtacaaaggacactttctagcttgtaaaaaagagaacgatcttttcaaactcattttgaaagacaaggatgaaaatggggataaatccataatgttcactgttcaaaacaagagctag

SEQ ID NO: 2121 - DNA, 534 bp, Canis familiaris
taactggccacgtgtgtctgggcgtgcacgacaggcgckccgagggactctacctcttcgagaacggccacgcgcgtgtccttcttcgcctggcaccgcgcgccccgtccggagcccggcgccgggcccagccccgcgccgcacccgctcagccccmaccagcccaacggcggcacgctggagaactgcgtggcgcaggcctcggacgacggctcctggtgggaccmcgactgcgaacgccgcctctackacgtctgcgagtaccccttctagcggggccggtcctcgcgtctccagtccagcccaccactcgccctctggctgggctgttcatcctggagaatgcccttccctccctctctccctgcccacggatggaagtgtgtacccccccttggctggacgatcccggggggctttctgcggagccgagagcccttacactcctgtgtctttctyggcatcaggctaagttccgcgctaataaagccttctggaatctgaaaaaaaaaaaaaaaaaaaaaaaaaaaaaaa

SEQ ID NO: 2122 - DNA, 661 bp, Canis familiaris
acagtgaatgtctggcccacacccccggccttggtacctcgatcttcattggagccttcactaggtgaacagaagtgtcctcagagttggccccagaggcctggagagtctaggtcttctccctgaccttgcctcatgttttcataaagcaaagtcgcttgtccatcacaaccagacttgaggccggcctttgagcggctgggcctgagggctgagtcagtcckycgtcagcctctggattcacaagggaccattggaggagcaggccccagtccctgctgctcctggttcccgaatctagcagggccctttgctttttgaagtmcaggacttggcattgacctagtgggtgcacccagaggttctcccatccaccwaaaggctcagatgcccagagatgctcttttccagaacagatgggtcccatgcctgtgtgtggcagcaggggcagcagggtggggtcggggggccgcctcagctgccgcttatttcccaccttccccagacttctactggggtgggatttggagtgatgggaaggtttttaagggccagggatggatcttttctaaatgttattacttgtaaataaagtctatttttctcccttaaaaaaaaaaaaaaaaaaaaaaaaaraaaaaaaaaaaaaaaaaaaaaaaaa

SEQ ID NO: 2123 - DNA, 697 bp, Canis familiaris
cgatgtctgcgttcactgtcatcctctccaaagcttayccgccgtgggwattsccatyccmykkgataagatctkgtatracaagsamcagcattakgacccmrraactggaatcttcacctgccagatcscaggracatactakktctcctaccacgtgcatgtgaaaagcacccacgtttgggtgggcctctataagaacggcacccctgtgatgtacacctacgacgwatacaccmagggctacctggatcaggcttcggggagcgccgtgctcgagctcacggagaacgaccaggtgtggctccagctgcccamcacgggatygaacgggctgtactcctcccagtacgtccactcctctttctcagggttcctggtggcaccaatgtgagcgtattcccaaccgagctcacgtaaatctgcttgacgaggcattccccmattccgctgcgccccacaaaatgcatatggacgtaggccmaaaagtgacccgttttaactttccaaatacagatgtgagcyttcagaccaacccattctcctgctggaaaagcgggcagcaatggtaaagaatatgtgaagaccctcttgaatttctagtcagtggtcccaagactataaagttttctgtgaactccttcagtatttaaacatttcaacstcraagtcctagtagggtaaaaraaaaaaaaaa

SEQ ID NO: 2124 - DNA, 754 bp, Canis familiaris
ccaggatgaccggaggccgatgtcggggtgcaacgtcatcctggtcaagcttacccgcccgtgggtagtcccatcgcatggtggatgaagatctgtgtataacaagcaacagcattatgacccarractggawtcttcacctgccagatccccaggkacattactatttctccttwccacgtgcatgtgaaaagcacccacgtttgggtggscctctataagaacggcacccctgtgatgtacacctacgacgaatacaccaagggctacctggatcaggcttcggggagcgccgtgctcgagctcacggagwacgaccaggtgtggctccagctgcccaacacgggatygaacgggctgtactcctcccagtacgtccactcctctttctcagggttcctggtggcaccaatgtgagcgtattcccammccgagctcacgtaaatctgcttgacgaggcattccccmattccgctgcgccccacaaaatgcatatggacgtaggccmaaaagtgacccgttttaactttccaaatacagatgtgagctttcagaccaacccattctcctgctggaaaagcgggcagcaatggtaaagaatatgtgaagaccctcttgaatttctagtcagtggtcccaagactataaagttttctgtgaactccttcagtatttaaacatttcaacctcaaagtcctagtagggtaaaaaaaaaaaaaaaaaaaaaaaaaaaaaaaaaaaaaaaaaaaaaaaa

SEQ ID NO: 2125 - DNA, 620 bp, Canis familiaris
tttaaatattcaatagatactacttaaaaccattagacttttaggtdaaatgtaagaacttggtctgtttctktctcakatracvtkgattttcgtacgtatattaatcatggaggactgtagaaaaagtttaagcgatctygccgttttagacttaaatgcmatatttcacatgctatttacmatrcagagattttttttgagtaattctagcctttraaaatgracgaagtccttctaatgttaattggtgaygctgccgcatagtgagtgccmctgagaaggtcaacagctgcagcttggagttgtgggcaccatayaccgcmagactttgatacttcagtgtgaattgccacttgtcttgtgctgackagctacacgagcatgatcttgttartgcmttttttggatgggaaggaaacgtaaatgtttaggaagaggctttatgataaggatggaaagcgacttcttgcttgtacatacgggggctatactgctatattatttagcctgttaacmctgtttaaaagtttaaggattttctcttggttgtagattggtctagaattgcattctgaatgaataaaagttaaaaaaaaaaaaaaaaaaaaaaaaaaaaa

SEQ ID NO: 2126 - DNA, 665 bp, Canis familiaris
aggctggccattggcccatccgcacagacacactagsgtatcaacggtgccgagsgtcgcacactagaacctcctacccgcgtctgtssgggaggggtmawyctgcgagtggcgsggtctatgccatcgcaatgtttcgaggtaatgatcttctgcggractgggcgttgtcctagtttctctgtgaagtcaacaacatcaacaactgttgtccacaaattctgtagtctccagacctcttgcacaaatgtgggttcgccctcaacaagttgccgatgtccgtcgcgtatcattgagcgrctccgagggagaagatctaggcccaataggcccatgtcaggaggcgaccgcggctgagggactcgtaggcacagatccctcgggcagaggctcgggcccgggagtgtatggacatgatcaacctccaccacattcgacggacgaactcggcggccggacgcctgaacgacttggagcagtggracatgaacttgggagtcggggatgccctgttcgctgctgacgagaacggagcgttgaggaggaacaccgggaagaggttgttttacatcgacacgctcggcctcgggaactgtcgtgaaataaagtggtgccctaaaaggrammrmrwramaaaaaaaaaaaaaaaaaaaaaaaaaaaaaaa

SEQ ID NO: 2127 - DNA, 665 bp, Canis familiaris
tccgaccggtaaccgggtaggcgtgtctgtgtgatcscatagttgccacggctcscagcgtgtgatcttggaggatgggcgcagacassccctccccaktwrgacgctcaccgcsccagatacggtagcgttacaaagctccattactagaagacgccytgacccgcaacaggatcaaagagacacttcagttgttgtagttgttgacaacaggtgtttaagacatcagaggtctggagaacgtgtttacacccaagcgggagttgttcaacggctacaggcagcgcatagtaactcgcygaggctccctcttctagatccgggttatccgggtacagtcctccgctggcgccgactccctgagcatccgtgtctagggagcccgtctccgagcccgggccctcacatacctgtactagttggaggtggtgtaagctgcctgcttgagccgccggcctgcggacttgctgaacctcgtcaccytgtacttgaaccctcagcccctacgggacaagcgacgactgctcttgcctcgcaactcctccttgtggcccttctccaacaaaatgtagctgtgcgagccggagcccttgacagcactttatttcaccacgggattttccytkkykywytkttttttttttttttttttttttttttttttt

SEQ ID NO: 2128 - DNA, 545 bp, Canis familiaris
gatttggaagtattcatttatttagtcaatttaagtttycttcattactgactgggagtatttatatagcaaaagagggaagtagagatttgctatattaaatccaatgaatgtggaggaaggggtagatattatatgctaccatatttttatgtaaaaatcattgtaaggtttgaggtagccactacctctggccatgcacctgggtagagtgtatatgtgtcaatggaactatttggtttccagaaaatwacatacctactctgagtttgtccacatagaaataaagtaggtaaaggaagaaactaaacaccactggaaagcctcatttctagtacctgttatttccccaaatcagtgcaaactaagaataaactgttcttgtgaaatttatgagtactgaggaaattacattttgaagggaataggcacctcccmcaggtgggctcacagtctattgagcaagaagcgccatgaagcaaaatgacttgaaaaacacatttattcaattttcaaataatgggattaggtttcaaaaaaaaaaa

SEQ ID NO: 2129 - DNA, 646 bp, Canis familiaris
gaatgggagaagccccttctcaagcctgggtcataatagaagtacatagggagaaacccgcaaggaccctgagctcagggtttttggaactgctcactcagtcagtccttacttagtttggaagtcagcagtggtggtcacaaagcccatacacktkkaccatctaggccctcacgttggcctatgaactttctacccatgttcttagttactggttcactggtgccctcagcccatgacagatgagaatgaatgatatcaaaaggaagggaggaacttctgagagtttgaatgccccagagagcctggcttagtgctgggcattcttttgaagaggtttcacagaacaatgaggttagtactttcagtttctattttacagaggttagaatagactgttaagggacagccagaaaggacaagagaagtgacagcctgaggttgagaagggccagagaatcataaaagcagacatagatgctggccacctctttgtaacatgatggttcttatcacaaccctggatcacaaaagattagtttggtttataatgtttaattgtttataatgttcaaagagagtgggaaggagggtaaataaaaattttggtgcctaaaaaaaaaaaaaaaaaaaaaaaaaaaaaaaa

SEQ ID NO: 2130 - DNA, 672 bp, Canis familiaris
tgagtttctgccatggatgtcacacgtgckgcttccctacawyccatgggaaccagtccggcccagagctggggcccccacggctgcggcaggtgcggctgcaggaagctctgtgcccagaccctcccggcgccgcggtgcatgcgtgctcagccggccaggacgccttcagcaccggggactacagcattggctggggtagtgctgcccagaactgctccgagacgtgggcctactctgcgccagacctactgggcatctggtcctggggctactgcgctgtgtacgacagcgggggctatgtgcaggagctagggctgagcctggaggagagccgcgcgcagctgggcttcctgcagctgcataactggatcgacaacaggagccgcgccgtgttcgtggagctcacgcgctacagcccagccgtggggctgcacgccgccgtcacgctgcgcctcgagttccccgctsccgggcackcggtgaccgctgtcagcgtgcgtcccttcccgctgcagcgcctgagcaccggcctctccctgccgctgctcacctcggtgagcctgctgctcttcgcgctgtacttctccgtggccgaggtgcgcacctggcgcagggmagggtgtagacgtgcggcgcagcccggggcgtgggcgcggtggctgctggtgg

SEQ ID NO: 2131 - DNA, 634 bp, Canis familiaris
caaggccatagtggtaaccaggagaagattgacttggaaacggcctttgcgggagactcaggaggaagcaggcatagcagcaggccagctgaccatcattgaggggttcagaagggagctcaattatgtggccaggaacaagcctraaatagtcatctactggctggctgaggtgaaggactacgatgtggagatcagcctctcccaagagcaccaagcctaccgctggctggggctagatgaggcctgccagttggctcagttcaaggaaatgaaggcagtgctccaagaaggacaccagtttctctgctccacagcatcctgagctgaccagaggagagtcatttacttcagtaggatccttgagggccttctgagatgaatacygtcagctccagggaaggttgtgttggtttttcgctcatcatggcaaagagcagataggatagtaaaatcagctgagaattctaagaggaaaggaagrtctcatcagagtgaaaaggaagacaaatgagttttaaaaaagagaaaagtctaggcrtggtaagtgcgtccttgtactttataaataaacttcaggcagcttgtctgtccatctaaaaaaaaaaaaaaaaaaaaaaaaaaaaaaaaaaaa

SEQ ID NO: 2132 - DNA, 681 bp, Canis familiaris
  misc_feature (235)..(235): n comprises a, c, g, or t, or includes no nucleotide
gagtgtacaccccacctggtgtctacctgcatgdatacmgcagacgtgtgcccacaggttgtgtgcacaccgttgtgctatggagagtactagggwatacctcscckktstctccagttctctgktccratgatraccaktcacttttagctgagcccvaaaccagctctagatccvacagttctgctctgacctagacctcwaccttgaggccagcacctcccattatctccvnatwccaccwctgaagtgcccagaygtttctgggtctaccacactgcccmatctttctctccactgtgcaactgctctccttcctgaagggccctcccaagccccctacccaccccttagtgctcccagaaagcagccaaggaagatgtgagagcaaaggccatgttccccgtgtcaggaatggcatctccatgaaggaggggcccgaagccctcatgggcggacctcscctgagcctgtctgaagggccggcccttagtgcattcaggctgaggcccctggacagggatgctacccctgyttctctggaggatgtgccctctcccctcaccstggtccctggcattagactcccccccgcccccmatccccmtctgcccagtaaaggcctttgtgcagcmmmmraaaaaaaaaaaaaaawaaaaaaaaaaaaaawaaaaaaaaaaa

SEQ ID NO: 2133 - DNA, 739 bp, Canis familiaris
agcctaggtgttgctgtgaccgcgtgggcatggagtgtacaacccacctgtgttctaacccggcaatgaatacagccagaacgtggtgcccacccgggtgtggtgccccagccggttgtggttatgggagaagtactaggggaatacctccctttctctccagtcctctggtcccatgatgtgaccattcacttttaggctgagcccataaccagctctagatccaacagttctgctctgacctagacctcaaccttkgaggcccagcacctccccagtkatcgtcccmatacccaccatctgaagtgcccagacgtttctgggtctaccacactgcccaatctttctctccactgtgcaactgctctccttcctgaagggccctcccaagccccctacccaccccttagtgctcccagaaagcagccaaggaagatgtgagagcaaaggccatgttccccgtgtcaggaatggcatctccatgaaggaggggcccgaagccctcatgggcggacctcccctgagcctgtctgaagggccggcccttagtgcattcaggctgaggccccctggaccagggatgctacccctgcttctctggaggatgtgccctctcccctcacccctggtccmctggccattagactccccacccgcccccaatccccatctgcccagtaaaggcctttgtgcagcmaaaaaaaaaaaaaaaaaaaaaaaaaaaaaaaaaaaaaaaaaa

SEQ ID NO: 2134 - DNA, 642 bp, Canis familiaris
ctccccccctcgtgccagggagggtgcgttcttaagcccatgtgcacatcccctgaccatcgcccataacctctggggatccccaccctcagagggagctacaagtgcctttctctgyagaccaaggcctgaagcttgcccccccagggtggggaaggagcagtacctctgcctgtgagtggggtcacaggaccttggggttcctgatgcctgcgsatcagctggaggggcggacccactctaggatgctcctagacccccagatgttcccatgcagtctaaggaggacttggctgggtrgggtaggtgaagggagtacaggacacctgcatgtgaggartcccaggtgtccgcagatccctgggaaagccagtaagcccggtcctgcmctgggrgtcctgggcctcttgtcctgaagtctctgctgcccgagcctytgcttggacttccccacctctctcccccaaggccacacatttacttgtccaccagtcctctctccttcccagaagcacgggggtttgtgggttttattcactgctgttatcaccaatgcctagaactgctcgtgccacaccataggcgctcaataaaygtttgtggaatggaaaaaaaaaaaaaaaaaaaaaaaaaaaaaaaaaa

SEQ ID NO: 2135 - DNA, 613 bp, Canis familiaris
tgcctgacaggttactggcagcaggaggctcggctgtgatgggktgctgaagcctgtaggaaccgattccgcgtgagctgcagccmgactgtgcagacttgggtctgtgtgtccccagcaccacagtggcccggtgctgccaggaaggattaagctcacatggccctcaacagcagcccacacccccattcagttgtgatgtgtttccagaatcagggggaatttccgtatttattattgcccgtgccttgcctttcccctttcatccttatctcsttgtgcttagaggagacccccmgccmggaaccmgcctccmgaagctaagaccgaacctgaacctccctcggcttccccttggcttccaggggaaagttcactgmaaaactaccttctggccccttgtttatgcagagataacmacttagcgggacacggggtggggggatcttttttgtaccmaagctgcttctgaagcagaaagcagcaggkctctcagtgtttcatgctgccttattkatattaaaggaagaattaaattcttgcmmaggagwaaaaaaaaaaaaaaaaaaaaaaaaaaaaaaaaaaaaaaaaaaaaaaaaaaaaaaaaaaaaaa

SEQ ID NO: 2136 - DNA, 650 bp, Canis familiaris
accgctttctacagtttggtgaggagaaactagcagacctttctcttcgtatccagcaaattgaaacaactctcaatattttagatgcaaagttgtcatccattscaggcctagatgatgtcacattkgaagtatctcctgtaagcgtcactggtatcacaaatgaatcacattctgaaactacttcagagaaatcacagcagaacagtttacaagactctggaccacagagaagtgaagtaacaccagaaaatatcttaactgtagccaaggacccaagatatgcgagatatctcaaaatggttcaagtgggtgttccagtgatggcaataagaaacmaaatgatatcagaaggactagacccagatcttcttgagaggccagattgctcccagtgcctgatggtgaaggtgaaaaaaaatacagaagaaagttcagacagtgaatcttcttttagtgactaagcttaattttgataacagtaacatatacatgtgtaggtatacatatacattctataagaaagagaacctgaacttgaactcttaatcataaaacatcaaatggccatatatccaccaccaaacttcttctatgttaaaaataaataaagcatttataacctgrcaaaaaaaaaaaaaaaaaaaaaa

SEQ ID NO: 2137 - DNA, 720 bp, Canis familiaris
gaaaggacaccatgagcactgaaagcatgatccgggacgtggagctggccgaggagccgctccccaagaaggcggggggccccccgggctccagaaggtgcttctgcctcagcctcttctccttcctcctcgtcgcaggggccaccacactcttctgcctgctgcactttggagtgatcggccccccagagggaagagctcccaaatkgcctccaactaatcagccctcttgyccagacagtcaaatcatcttctcgaaccccaagtgacaagccagtagctcatgttgtagcaaaccccgaagctgaggggcagctccagtggctgagccgacgtgccaatgmcctcctggccaaygrcgtggagctgacagacaaccagctgatagtgccgtcagatgggttgtacctcakmtactcccaggtcctcttcaagggccaagggtgcccttccacccatgtgctcctcacccacaccatcagccgcttcgccgtctcctaccagacaaaggtcaacctactctctgccatcaagagcccttgccaaagggagaccccagaggggaccgaggccaagccctggtacgagcccatctacctgggaggggtcttccaactggagaagggtgatcgactcagcgctgagatcaatctgcctaactatctggactttgccgagtcygggcaggtstactttggratcattgccctgtragaattc

SEQ ID NO: 2138 - DNA, 676 bp, Canis familiaris
ttctggttggcacggagggcctgcacagcctgacaaacgggcgactactccatgcgttgtgsaccctgcgggctggggacgagsccgtgttcgccmcagtatgactccttccgagtagactcagctgcggagtactaccgccttcatctggacggctaccacggcacagcaggggactccatgagctaccatagtggcagtgtcttttccgcccgtgatcgcgaycccmacaacctgctcatctcctgcgcggtgtcataccgcggggcctggtggtacaggaactgccactacgccaacctcaacgggctctacggaagtacagtggaccaccagggggtgagctggtactactggaagggcttcgagttctctgtgcccttcacggaaatgaagctcagaccaagaagctaccggcccccagcagcccagggaggctgaccacagctcacatctccggcgccccagtatgactgccgagcactgaggggtcgcgctgagagaagagccaggggccaccctcactatccagccaccggaggagggagccttctccatctgcgatctcacagcaccatgtttacaggggggagggacggggtttgtacgggagaaataaaaggagaaactgaagcamaaaaaaaaaaaaaaaaaaaaaaaaaaaaaaaaaaaaaaa

SEQ ID NO: 2139 - DNA, 655 bp, Canis familiaris
gccaacggaagccctgcacagcctgacaaaagcgggcgactactccatgcgtgtggacctgcgggctgggacgagcccgtgttcgcacagtatgactccttccgagtagactcagctgcggagtactaccgccttcatctggacggctaccacggcacagcaggsgactccatgagctaccatagtggcagtgtcttttccgcccgtgwtcgcgatcccawcwaccttgctcatctcctgcgtcggtgtcataccgtcggggcctggtgggtacaggaatctgccatctacgccaacctcwacgggctctatcggaagtacagtggaccaccagggggtgagctggtactactggaagggcttcgagttctctgtgcccttcacggaaatgaagctcagaccaagaagctaccggcccccagcagcccagggaggctgaccacagctcacatctccggcgccccagtatgactgccgagcactgaggggtcgcgctgagagaagagccaggggccaccctcactatccagccaccggaggagggagccttctccatctgcgatctcacagcaccatgtttacaggggggagggacggggtttgtacgggagaaataaaaggagaaactgaarmayamaaawawatatacaattta

SEQ ID NO: 2140 - DNA, 626 bp, Canis familiaris
agcaggctggtaccgtccggaattcccgggatatcaggctcctggaagaagagtcctcttctcccctcctccaaggcttgtggccgagcctgcgckcggcgccaccatgcggcagaagscggtktcgctcttcctgtgctacctgcttactctttcgcctgcggacggggtggacgcagggcaaarraaawaagacaaggaakatggctcggaaggcggaggctccggggttcctgagagcgctgacctacacggccgtcggaggagggctcctggccgccgtgctgcccgcgctgggcttcatgagcaccggcatcgccgccaactcggtggccgcctcgttgatgagctggtccgcggtggcgaacgcgggcggggtgcccgccggggggctggtggccacgctgcagagcctcgggactggtggtggcagtgccctcatgggcaagattggtgcctttctgggctacgtcgtccacaaacaattggaaaacagcgaggaggatgaggagtagccagtgcctaccaggaacccaatccctcttcctgtcatagcccagagctttctctgtcacactcagcagtgacctgcgtgaaaacacagaataaaattctatcagaaaaaa

SEQ ID NO: 2141 - DNA, 607 bp, Canis familiaris
gcccgaggcgcccgagccgaggaggatgaagaggaggcgctgccgcactccgaggcggtggacgtgttccaggaggggctcgccatggtggtgcaggacccgctgctctgcgacctcccgatccaggttactttggaagaagtcaattcccagatagcactagaatatggccaagcgatgacagtccgcgtgtgcaagatggatggagagataatgcctgtggttgtggtgcagaacgccacagtcctggacctgaagaaggccattcagagatacgtgcagctcaggcaggagcgtgaagggggcattcagcacatcagctggtcctatgtgtggaggacctactacctgacctctgcaggagagaagctcacagaggacaggaagaagcttcgagattacggtatccggaagccgggatgaggtgtccttcatcaaaaagctgaggcagaaatgaacctccagaaagacaattaggtgctggtggcctgcacccagctggaacagagctaagccctaggtccaaacatcctaatcacatggcagatggacctggccctgtatacaaaataaatcgtttgcttcttarwwwraaaaaaaaaaaaaa

SEQ ID NO: 2142 - DNA, 630 bp, Canis familiaris
acagctacattaagtagcagaactggggattagaattcaggtttcccatctcccaaatttctgatcaggattgttaaaatgagtctacggaagcaaacccccagtgacttcttaaagcmratcatcggacgaccmgttktggtaaaattgaattctggagtggattatcgagggktcctggcttgcctggatggctacatgaatatagccttggagcagacggaagaatatgtaaatggacagctgaagaataagtatggtgatgcatttatccgtggaaacaatgtattgtatataagtacacagaagagaaggatgtgaagatgccaagaggacaatccttttcacacttggatatattttttgtatgagggtttttgttttgttttgttttgttttttggttcttttgtgatttgttctatttcataatagttggcaatttttcactgacatgcgagtgagcgaagggcacaaaattgtggatgtagtgtaaagagctcctccatatttaagttccaggcatcttcttttccctctgtgtcagtgtgcagaacacaaatgaataaaaaaagaaaatcccaaaaaaaaaaaaaaaaaaaaaaaaaaaaaaaaaaaataaaaaaaaaaa

SEQ ID NO: 2143 - DNA, 810 bp, Canis familiaris
aggctgacatacatgtttggttaaacccatgagattcattccgttgaaaatccagacgggaaatgaccaggggattaaattctggccatgatggtttgaccttcagagggttgctctgtgtggtctgttttgacagaaacccatctagagcactcctgccgtctttccacggggccctttcgtggctctccttcatattcttcctgaaatgtgggggcgcctgtgccccaccccaagaagcaggaaccccatggtatgaagccagacctccctggcaggcctcagggaacagaatgatcagacctttgaatgattctcatttttaagcgaaatactattttatgaaaggtttacattgtcaaaaatgatgagtatagaatatcaaatcctgtgctgctaccctaccaagatcattttagtggagtcaatttgcagtacactccaagtggcaaagtcctccaagctgctttagaagtaacaatgaagaacagagacatttttaatataaagcctgtttgtcttttgttgttgttgttattgtttgtattgttcaaaggcagagtattctaaaaaatgtgtawawatataaaaaaaaaaaaaaarggtcatgggggctaacttccggctggttttcttttgctgtggggtattgttacctggttttaatgataaatgtgcctggccgcctgaccccaaaactgtacagtatggtggctccactcgctctaagagtagttgatgttgcatttttcttgttcttaaaaacatgttagaagcaatgaacatatataaaaacctcaaaaaaaaaaa

SEQ ID NO: 2144 - DNA, 669 bp, Canis familiaris
cgtatcacatttgggaaccaaagtctaaactgagctagcagcccccgcaccctcccttgtccccatgtccgcttctcgctctggacagacggacacgggccctgttcagccccccacgctcttgtcccgggctccatggactgccccagtcaacgagactgccggaaacccagttgggccggatgggtgggcgaaagggtscggtctggggcgagcggacgctccgaggaactggactatctgtctcgcacagcgtcgccgcagcggtgggaaggaaaggcaggtgtaaatgatgtattggtttaccacgggtatatttttgataccttcaatgaattaattcagatgttttacgcaaggaaggactttacccagtattattgctgctgtgctttcgatctctgcttatcgttcaagagacgtgtgcaggccaccaggcagtgagcccatcggccacaggcctgggggggcggggctgcggctcgtgagcaccctgcgccctccctccttcccttccttgggcagaataaacttgatgggtattctgtgaccgccacctgcgcacggcggtggcgttctgtcatttacacacattgttctcattaaaaagcgaattatactcmaaaaaaaaaaaaaaaaaaaaaaaaaaaaaaaaaaaaaaaaaaaaaa

SEQ ID NO: 2145 - DNA, 3240 bp, Canis familiaris
ccctggtggctgacagtcatcctgaaagtgagcgcatcagcatgcggcagtccaaagtggacaagctgtacgccggcctgaaggaccttgctgaggagcggagaggcaagctggacgagaggcacaggctcttccagctcaaccgggaggtggatgacctggagcagtggatcgccgagagggaggtggtcgcagggtcgcacgagctgggacaggactacgagcacgtcacgatgttacaagaacgattccgggaatttgcccgagacacagggaacattgggcaagagcgcgtggacacggtcaatcacatggcagatgaactcatcaactctggacattcagatgccgccaccattgctgagtggaaggatgggctcaacgaagcctgggctgacctcctagagctcattgacacaagaacacagattctcgctgcctcctatgaactgcacaagttttaccacgatgccaaggagatctttgggcgcatacgggacaaacacaagaaactgcccgaggagcttgggagagatcagaacacagtggagaccttgcagagaatgcacactacatttgagcatgacatccaggctctgggcactcaggtgaggcagctacaggaggacgcagcccgtctccaggcagcctatgcgggtgacaaggctgatgacatccagaagcgggagaacgaggtcctggaagcctggaaagccctgctggatgcctgtgagggccgcagggtgcggctggtggacacgggggacaagttccgcttcttcagcatggtgcgagacctcatgctgtggatggaggatgtcatccggcagatcgaagcccaggagaagccaagggatgtatcatctgttgaactattgaatgaataatcaccaaggcatcaaagctgagatcgatkctcgtaatgacagtttcacaacctgcattgaacttgggaaatccctgctggcgagaaagcactatgcgtctgaggagatcaaggaaaasttactgcagttgacggaaaagagaaaagaaatgattgacaagtgggaagaccgatgggaatggttaagactgattttggaggtccaccagttctcacgggacgccagtgtggctgaggcctggctgctcgggcaggagccatacctatccagccgagaaataggccagagtgtggacgaggtggagaagctcatcaagcgccacgaggcttttgaaaaatctgcagccacctgggacgagaggttctccgccctggagaggctgacaacgttggasttattggaastgcgcagacagcaagaggaararragaggaagaggcggccgccctctcccgagccgagcacgaaagcttctgaggatactgagtcccagcagcagtgggatacttcaaaaggagagcaagtttcccagaacggtttgccggctgaacagggatctccacggatggcagaaacggtggacacaggtgaaatggtcaacggcgccgcggaacagagaacaagctcaaaggagtccagccccatcccctccccgacctcggaccgcaaagccaagactgccctcccagcccagagtgctgccaccttgccggccagaacccaggagaccccttcggcccagatggaaggcttcctgaatcggaagcacgagtgggaggctcacaacaagaaagcctcaagcaggtcctggcacaatgtttattgtgtcataaataaccaagaaatgggtttctacaaagatgcaaagacggctgcctctggaatcccctaccacagcgaggtccctgtgagtttgaaagaagccatctgtgaagtggcccttgattacaagaagaagaaacacgtgttcaagctgagattaaatgatggcaatgagtacctcttccaagccaaagatgatgaggaaatgaacacatggatccaggccatctcctccgccatctcctctgataaacacgaggtgtccgccagcacccagagcacgccagcatccagccgggcacagaccttgcccaccagcgtcgtcaccatcaccagcgagtctagccccggcaagcgggagaaggacaaagagaaagacaaggagaagcggttcagcatttttggcaaaaagaagtgaactcctttcctttacctcctgcccttctcttaccttttcagtgaaactccagcatgcaagctcagaaccaacacattactctctgtgcctaatgttcttcaatgtggttgatttttttttttttaatttatagagcattttttggggggtgggtgggggaaatacacctaaacactttatctccaagttacaaaagtttgaggtgcagagggaagaccagattttttttaatgaaattatatagattagatctcaatatttaaactgttcctcaattttgtgaggctgcgttggaaataacccgcctctagtgctgttggtatgcaaggcagcggtgcttaaacaatatttcctgtgctcaccagagacaaaaatgtaccaatttcctgacaccattctcttccatttatttccagtggttaccttgagtcttgactattagaagtgcccacgacgggtctaaccttgattaaacagatcgtgtattatgatctcgctgcagcgacagtgcagctccatgttcaatctacagaccaaaccgtttgtatctggcatcacttactaacacatgccctgcggctttttctgcgtcacctgcaaggacagttgagaatgtcggtataccggtataagagaaggaatagaaaattgatactgttttaaataatctgtaatttcagtttttttttttttttttgctgaaatacattatattgtatgtttgagataattctagtacaaagtataataaaactagatgtataataaaccctttaaatcattggtaagtgtacaagtggaactgaagcatttactggacaaagtcatgttactctaatggttacttgctcgtgcgttgccacactgtgttataatttgcttcattaccttgctctttgatacatagtgtgcatttctttgtcactgtaacgattgtaatgacaaaattttcatcttactgcacaatcaaaatggcattgataggaatgaactccagaggccgggcctgagccgagaggtggtcgctccggcctggcgctcagtcgtctgacctgtacctctcaacttttgccctgttaaatatatgctatgtcattaaatgcttttaaatct

SEQ ID NO: 2146 - DNA, 721 bp, Canis familiaris
aaatttggcttagggtgttcccaacgtgaaggtgctatccycggtggtggtcwacctcgrggtagtgctctccycgsacttggagccctagtagtsccgccagggctagaacgtctacctgctcagagcctcgcacacctgcagggagcagcactaggtgatcgagggcttcgcctccgccracaactaccagcccgtcgtgggcytttagctgctccaggtgtgcttgcagtccttggtggaccaggccttgaaccaggttttgtgtatcgcctggacagcctgaaagcgcaagcccyttcagacctacacaggttccatcgtacagttttgcgaccagtgcytttagggctactccytggacaactgcgccgtggcagtccacacagggtacycagtggttgggcccaagtagcagaccytggggcagctcttggccgagcagtcctacgtcgtgtttgggtcagttgcagcgggtgcctccaaacaggttgcctacccctagacctagccgccctgagacgtcaacttcttgccaaaccactactactacgacgtctgtgtctccttgtgaccccacaactagggtttggaggagttcccctcccttttgattcagccaagagggactggacccaacctgtatcctaatttgtgagtccctccccykktkytttttttyttttttttttttttttttttttttttttttttttttttt

SEQ ID NO: 2147 - DNA, 721 bp, Canis familiaris
tttaaaccgaatcccacaagggttgcacttccacgataggrgccaccaccagwtggagcyccatcacgagaggrgcstgaacctcgggatcatcasggcggtcccgatcttgcagatggacgagtctcggagcgtgtggacgtccctcgtcgtgatccactagctcccgaagcggaggcggytgttgatggtcgggcagcacccgraaatcgacgaggtccacacgaacgtcaggaaccacctggtccggaacttggtccaaaacacatagcggacctgtcggactttcgcgttcgggraagtctggatgtgtccaaggtagcatgtcaaaacgctggtcacgraaatcccgatgaggracctgttgacgcggcaccgtcaggtgtgtcccatgrgtcaccaacccgggttcatcgtctggraccccgtcgagaaccggctcgtcaggatgcagcacaaacccagtcaacgtcgcccacggaggtttgtccaacggatggggatctggatcggcgggactctgcagttgaagaacggtttggtgatgatgatgctgcagacacagaggaacactggggtgttgatcccaaacctcctcaaggggagggaaaactaagtcggttctccctgacctgggttggacataggattaaacactcagggaggggrmmamraaaaaaaraaaaaaaaaaaaaaaaaaaaaaaaaaaaaaaaaaaaaaa

SEQ ID NO: 2148 - DNA, 607 bp, Canis familiaris
aggcgtcagcgcttctggtctggtaaatatatatgatgtgttgtttttgttttttaactatgtggaggggacagtggattcccacagcaaaacaggtcccttcaggccctaggaatgccctccccacctcatcccgtcctttgcctgccctcccctctgccccctacgaggtcccttcaaggcctcccacatcaaggccaaagccctacgtgccttgtccaggagctgcccgggcctgcgtgggccccacagtgggcccagcagagggcgacacagctgcccgacaggaaagaggaccccgcccctcccttcttcccttcttcccccacttggcgattgccaggaggtgagggggtgcaactcaacacccccccttttctgccacagaggagtagggttgggcagaccagcctctcacccccaccccctgcgagcccccaccttgctttgtccagacacgtgtatctcgcagattttctaaggaccacaaaacaaaaacaaaaaaaaacaaacaaacaaaaaaaccataaaacaacaaaaacaaaaaatacacaaaaaaawmwataaaaaaaggaattaaaaactttcagagaaaaaaaaaaaaaaa

SEQ ID NO: 2149 - DNA, 572 bp, Canis familiaris
gcccgacactggcccccgatccccacccagaaccccgttctgagcattagctcgaagagcaaggcgccagggggccagggccagtggacactcttggctctcggcacccccgttcccccacgcacagccagcaccggtacacgccttcgacctcccgtgtgtgcgcgactccagctcctgcctgtagatttatgctgggagaagacccctctcccccctccccttccttttgcacgcagcgcgctctccggccctccctccctgtgctcccctctgtcttgtctcctgtctggtcaggaacctgtttgcmagtgaagcmatatctccgtgttttgtatatacmaccgctcttgtagccyttggtttttttgttattgtagagaaacacagattctttatacactttgtaagattgacgccmaaccccagctctcgatctcttattctccctgtggcccctgcactgttgccccgatgcctcatttcttccgcccgttactaaaatgtataatccgacttcctgtacagaaaaaaaaaaaaaaaaaaaaaaaaaaaaaaaaaaaaaaaaaaaa

SEQ ID NO: 2150 - DNA, 634 bp, Canis familiaris
tggracaacggagggcagctggagaastgatggagcctgctaatctttkgctgaagagaaggatgaggatcttctgtttgaatwatctttcctgctctggttctktcataagcyctwacatggcaccattgtaattcacggtgtgtaggtttggtatgtgtggctatttattttttggcctaagaatttcactggtaaaatttccttggatattggttatgggactacatttgcaaactcataattcagcaagcatttatctcatgagatttgtagagcctgcccaggaacctgtagaatttattctgcagaagcagtaccctactccatttatwtctgttaaagtgctctgcttcccaagcatattaggaaattcccgttaggaagccacagtggcctcaggccagctgtcactgtagcactggttgttcctaccctgctccagcaccttggcactgtcmtcagattgctgcagctgccctgtgtaaccctggtgcttctctcaagctttatgaaaccctatttttccttgcatgacaggtctctgtcctgtctgtcatgggagttctgcchattttaatgtgattatggtataaacagtraaatgakttwaaaaawraaaaaaaaaaaaaaa

SEQ ID NO: 2151 - DNA, 657 bp, Canis familiaris
gggatcacagtttcttctaataataagatggattgtctttttggcttkaatacaytaatacagctctcagggcatgtcttttgcatagcctaaaatcagaaaggatgaaggattgtatgtgaattatacccaacctgggaaawacattttataagaataacattctaatttgaagatttgaaatatatgataaakttatttttatttccagaatagtcagaggaaaggtcttgggagaactaggatttgctacagtaggaaaaatagcmataccacgtgccmaagtgatatggttaaatcatgtctgtgatataaagaataaaatttcagtggtttctttttgctagaatcagagataacacctgcatttataaatgttaaagtacttggtggtattctaagtatgacatctttaamaccaggacagagctactgagagccacaacctcctttttaaatctaattttgatgtgtgttgtattactaatctattcagttttatggtttttagaacccatctttacaaaaataaaataccctatggatattaaatagttataaatttagtatcctccatggttctgaagcatacattatactctgaaatataatagaaatgcttgctaaaaaaaaaaaaaaaaaaaaaaaaaaaaaaaa

SEQ ID NO: 2152 - DNA, 667 bp, Canis familiaris
actcaggaggaaattacagagaccattatgacaactgagatgaggccatgtgcacctaaatacacaaggaataaaacttctgatccaggatcatccttcccaaatggctgtatttataaagatttttggagctgcactgacacatctgttctagtacatcaagttctattttttaactgagctccmgaggtagtttgttacagagaccttttagagaaagctccmtgtgatttcccaaattttctcccmtttaaatactaatcctgggacmttgcagatgctgggtattttccmgtttttcmgtttgggctctcaggattactgattgtggcmaaaaagtgtttagactgctttawaaactgtgcmtttagggacatttaaaagcctatctgcmatgtttatcaagattaggaagcmatttccmaatgcaaatacmagaaatcattgatatgattagaggtggggttttttttttattattattcaaggttaccmccctgagtatacagcagtttattaaaaatatttgtgaatgtattttttagtactggaagaaaaaatattctgttgtctcatttagcmttttaggatgttcttcmcggagctgattaaaaagttgaaacatgaaaaamwraaaaaaaaaaaaawaaaaaaaaaaaaaaaaaaa

SEQ ID NO: 2153 - DNA, 638 bp, Canis familiaris
gccatggcacctgcttcggctactggctggtgtctcgtccttcatttacttcctcgcctacctgtgcacgcccagatcaccatgctccaagatgctggccwctgtctgggstacggcctctttgggcwctgcattgtcctgttcatcacctatratatccmcctccatgccctcttctacctcttctggttsytgktgggtgggctttcaaccctccgcatggtggcagtgctggtgtccaggactgtgggccccactcagcggctgcttctctgtggcaccctggctgccctgcacatgctcttcctgctgtatctgcmttttgcctaccmcaaggtggtggaggggatcctggacacgttggagggccccmayatcccgcccatgcagagggtccccagagacatccctgctgcactccctgctgctaggctctctgctactgtactcaacgccmcagccmaggctgtcgcggtgaccctgcmatcacactgacccmcctgagccccttggctggcccccatccccccattctgcggagcagaggaagattaaagaacagtactgatgaaaaaaaaaaaaaaaaaaaaaaaaaaaaaaaaaaawaaaaaaaaaaaaaaaaaaaaaaaaaaaaaaaa

SEQ ID NO: 2154 - DNA, 608 bp, Canis familiaris
ccaggactgtgggccctcacctcagcggctgctttctctgtggcaccctggctgccctgcacatgctcttcctgctgkatctgcattttgcmtaccacaaggtgtggaggggatcyttggacacgttggagggccccaaatatcccgcgccatgcagagggtccccagagacatccgctgctgcactccctgctgctaggctctctgcgtactgtactcaacgccacagccaaggctgtcgcggtgaccctgcaatcacactgacccacstgagccccttggctggcccccatccccccatctgcggagcagaggaagattaaagaacagtactgatgacgtgtgtctctttgatggggtctgcagctgcctcagagctgtagccacttaagccaactccttgacgcctgtgggccttctgaagggcacaaggccaggaaggcctggccgggactgcagggctctgcagccagtgcagaaagtggctcagctcctctgaggccctctctccacctactccttccttcctctttatctctccccttgtcttgctaaatatagacttggtaattaaaatactgattgaagtttgraamwrmaaaaaaaaa

SEQ ID NO: 2155 - DNA, 778 bp, Canis familiaris
aagcggaaagtcaaccatcctggatgggagaaatggtctccaagcagacctgggcaatgtctggctagcccmaamrggagggatkbctgtkgsttcgsytgkktatwaawtgatktgtgctgarbcmatagttcawagtgaaagctytgbctggagatgcttkytggktctgtgaagccykggccagkcagccaawtctggcctgtgctgaggatgwavccctctgsbttcacatctctgagctgcaccctcattrctgragatgccttttgctktatagctttgctggagascmattcattcttcccatgtctgaaaggtaatgttgcctggggcctaagcgtcctgctcctttgggcaccattggaatggagccatctgggaggtcagggacggggactgcctgaggagagctagccctagcctggcccctgcccagatgccattccatcactgatatttaagtgaaggggaggatccctrgactatgttcttggctccagactchmwaatccacmaaagccmaaccagctcatttcmacmaaggagcgctgatgtgaggggcaaggctgcctctgctccaggctcttcagaaagcatctgcatgtgaacaccatcatgcctctataaaggatccctattacaggracagcaygagtgstggctaacctgaccmataaagttatyttatgattgchhhwrmaaaaaaaaaaaaaaaraaaaaaaaaaaaaaaaaaaaaaaaaaaaaaaaaaaaaaaaaaaaaaaaaaaaaaaaaaa

SEQ ID NO: 2156 - DNA, 750 bp, Canis familiaris
agcagaaggtctacatcctgakggagaaatggtctccarcagcctgggcatgtctggctagcccaaaggaggatctgtkgtttcgsctgttattaaktgakttgtgctgaggccatagttmatagtkraagctctkgctggagatgcttkykggktctgtgaarcctgggccaggcagccmaatbtgkcctgtsctgaggatgdaaccctctgctttcacatctctgagctgcaccctcaktdctgwrgaygccytktgckttatagctttgctggagagcmattcattcttcccatgtctgaaaggtaatktkkcctggggcctaagcgtcctgctcctttggkcwccawtggaatggagccatctgggagstcagggwcggggactgcctgaggagagctagccctagcctggccmctgcccagatgccattccatcactgatatttaagtgaaggggaggatccctagactatgttcttggctccagactchawaatccmcmwamgcchaaccagctcatttcracmaaggagcgctgatgtgaggggcmaggctgcctctgctccaggctcttcagaaagcatctgcatgtgaacaccatcatgcctctataaaggatccctattacaggaacagcatgagtggtggctaacctgacccaataaagttattttatgattgcmwmhrmmawaamarahmaaaaaaaaamaaaaaaaaaaaaaaaaaaaaaaaaaaaaaaaaaaaaaa

SEQ ID NO: 2157 - DNA, 717 bp, Canis familiaris
ggtcagcgccagccgcttcagccaccagcacagtccgccatctgctgttggctcacctgctgcaccccgacagccaggtctcatggcccagatggcaaccacygcagctggcgtggctgtaggctctgctgtagggcacacgattgggcatgccattactgggggctttkgtggaggaagtaacactgagccttcaaggcccgacatcacttaccaggagcctcagggaacccagccagcataccagcagcagtttggcccatgccactacgagatgaaacagttcctggagtgtgcccagaaccagggtgacctaaagctttgtgaaggtttcagcgaggtgctgaaacagtgcagatttgcaaatggattagcctaatcaagaagttcaaattggaagatatggraaatcatctctcatgaccaagwtaatttagcataaaaatgtaattaatagagaagatataaagtgtaaaaccaccagttaaacctctccttcatcattaaatacagctttcttcagaattgttaatgaatgagggtatttttagtatagaagtttattgagatggtttgagttgggggctgggcagatgtttgtgtgcctccttaaatcaccttttgygacgttatcatttatgaattaattagaataaagtgattttctcccywaaaaamaaaaaaaaaaaaaaaaaaaaaaaaaaaaaaaaaaaaaaa

SEQ ID NO: 2158 - DNA, 719 bp, Canis familiaris
cgaagcttggagctccagagactgagacatcatcagtatcgtccgttgatgttccgtaggaccagacgtggacgttbkwagctcctwawctccaaagacatccacgacagatagtccgaccgcaatgggttgacccggctacgtcaagggccgattgacgtgaaccgyctcaactggtggagaccggggscccacgacgtcgccaatcgagtgtccgagagaccccagagacgatgagacctcgccgtcgtctccaaccagggggcgaagctcccttccaaccagaacagatggtaggcgtccttggtcgacgatgccggggaactcccgtagatgacactcgccttgtagcaccctggtcacgtcctccggcagacgaagctcctggtccagagaaggatcgcccctccggcggtccccctgttttcgttgtgggaacacaagatgatgtcccggratgtckcgtaggcctcgaatcagaggataggacaccagtagcacagtgacaccgttgtcgaccggtacccatccccctccccagggattcgtccaacatccgaggatgctccgtagggtgagtcgaagaaagacccacgttccgagggccgtggaacacctacgtcgggtacaccccgtgacaaaccagaaaataaactctctctcctccaaaaaaaaaaaaaaaaaaaaaaaaaaaaaaaaaaaaaaaaaaaaaaaaaaaa

SEQ ID NO: 2159 - DNA, 719 bp, Canis familiaris
gcttcgaacctcgaggtctctgactctgtagtagtcatagcaggcaactacaaggcatcctggtctgcacctgcaavmwtcgaggawtwgaggtttctgtaggtgctgtctatcaggctggcgttacccaactgggccgatgcagttcccggctaactgcacttggcrgagttgaccacctctggccccsgggtgctgcagcggttagctcacaggctctctggggtctctgctactctggagcggcagcagaggttggtcccccgcttcgagggaaggttggtcttgtctaccatccgcaggaaccagctgctacggccccttgagggcatctactgtgagcggaacatcgtgggaccagtgcaggaggccgtctgcttcgaggaccaggtctcttcctagcggggaggccgccagggggacaaaagcaacacccttgtgttctactacagggccytacagmgcatccggagcttagtctcctatcctgtggtcatcgtgtcactgtggcaacagctggccatgggtagggggaggggtccctaagcaggttgtaggctcctacgaggcatcccactcagcttctttctgggtgcaaggctcccggcaccttgtggatgcagcccatgtggggcactgtttggtcttttatttgagagagaggaggtttttttttttttttttttttttttttttttttttttttttttttttttttt

SEQ ID NO: 2160 - DNA, 710 bp, Canis familiaris
caagggactgagacatcatcagtatcgtccgtttgatgtttcccgtatggaccagaccgtggacgttgtagctccttatctccaaaagacattccacgtacagatagtccgaccgcaatgggttgacccggctatcgtcaagggccgattgacgttgaacctgtctcaactggtggagaccggggcccacgatsgtcgccaatcgagtggtccgagagaccccagagacgatgagacctcgccgtcgtctctcaaccagggggcgaagctcccttccaaccagagacagatggtaggcgtccttggctcgacgatgccggggaactcccgtagatgacactcgccttgtagcaccctggtcacgtcctccggcagacgaagctcctggtccagagaaggatcgcccctccggcggtccccctgttttcgttgtgggaacacaagatgatgtcccggaatgtcgcgtaggcctcgaatcagaggataggacaccagtagcacagtgacaccgttgtcgaccggtacccatccccctccccagggattcgtccaacatccgaggatgctccgtagggtgagtcgaagaaagacccacgttccgagggccgtggaacacctacgtcgggtacaccccgtgacaaaccagaaaataaactctctctcctccaaaaaaaaaaaaaaaaaaaaaaaaaaaaaaaaaaaaaaaamma

SEQ ID NO: 2161 - DNA, 710 bp, Canis familiaris
gttccctgactctgtagtagtcatagcaggcaaactacaaagggcatacctggtctggcacctgcaacatcgaggaatagaggttttctgtaaggtgcatgtctatcaggctggcgttacccaactgggccgatagcagttcccggctaactgcaacttggacagagttgaccacctctggccccgggtgctascagcggttagctcaccaggctctctggggtctctgctactctggagcggcagcagagagttggtcccccgcttcgagggaaggttggtctctgtctaccatccgcaggaaccgagctgctacggccccttgagggcatctactgtgagcggaacatcgtgggaccagtgcaggaggccgtctgcttcgaggaccaggtctcttcctagcggggaggccgccagggggacaaaagcaacacccttgtgttctactacagggccttacagcgcatccggagcttagtctcctatcctgtggtcatcgtgtcactgtggcaacagctggccatgggtagggggaggggtccctaagcaggttgtaggctcctacgaggcatcccactcagcttctttctgggtgcaaggctcccggcaccttgtggatgcagcccatgtggggcactgtttggtcttttatttgagagagaggaggttttttttttttttttttttttttttttttttttttttttkkt

SEQ ID NO: 2162 - DNA, 708 bp, Canis familiaris
tcggtcccgctacggtgaaggacctggtggtccagaggctgggctttcgacacgcgtgtgaccgtgctggscmacgtgcaraggggaggrmccccttcggcrtttgaccgcatcctgagcagcaagatgggcatggaggccgtcatggcgctgctggaggccacagcggacacgcaggcctgcgtggtcagcctctcggggaaccagtccgtgcggctgcccctcatggagtgtgtgcaggtgaccaaggaggtgcagaaggccatggacgagaagcggttcgacgaggccatccagctccgcggcaggagctttgagaacaactggaacatttacaagctgcttgcacaccagaaggtctccaaggagaagaccaacttctcmytggccatcctgaacgtgggggccccggcggctggcatgaacgcggccgtgcgctcggcggtgcggtcgggcatctcccagggccacacggtgtacgtcgtacacgacggcttcgagggtctggccaagggtcaggtacaagaggtgagttggcacgacgtggccggctggctgggccgtggcggctccatgctggggacgaagaggacgctgcccaggagctacatggagaagatmgtggacaacattcgcacctacaacatccacgccctgctggtcatcgggggctttgaggcctacgagggggtgctgcagctggtggag

SEQ ID NO: 2163 - DNA, 624 bp, Canis familiaris
gtgttgggttggagggacctgggatggkagkgttggcttcccccagcgaggctgggagtgccgaggagtaaccgtcccctctgatctctggccagagattggatgscykgtgcctcctccccacctgctcaaggccagcctgcactcacacgtcacccagacataaaggaaaagacacattttttaggaaatgtttttaataaaagaaaattacaaaaaraaattttaaagaaccccatccctttgtgtcctcccccccctcattccccactgctgcctccatttctgaggtgccctaggaggcttccctccatttggggtctgaggacttttctttttgtagctggggctttggtgttccttgttgtgtcatttcccactcacctscccacctggtctcctgggtgttgtcaccagacctgaacccgcgagaggacagggaaccaagtgcccttcccgccggcctctcgtggcctctctgcctccctgtctcctgtctcccctctcccttgggctctgatgaaaaattgctgactgtaggtttgggagtttagttcttagaaccgtagacgatttcagttctaggaaaataaaacccgttgattactaraaaaaaaaaaaaaa

SEQ ID NO: 2164 - DNA, 645 bp, Canis familiaris
ctaaagtgaggaaggaatagagccaacgtgaggtaggtgtctgagccatgaagtataaatacccccagatgtcgtttttattcaggaaataggggagattcaagtcatataaattcckaktctraaaacttcacacctgackttscaggatgcacattttcctatgtagaccmgtctcctctcagtttcttcagttaagtccaaactatgtgttcctctttccccagtatatttttgcttgttagtgtatttcttgagctgttttcatatttctttcctttctgtgaaatggtgtttttttaaaaacttgggaccmsccaagttgtaaagatgtatgtttttacctgacagttataccaccaggtagactgtccmgttgagttgagaagagtgaattgatagcttgtatttgtttttaaaattaaattaatcctggataagagttgcttttttttttttttttaggagttagtccttgaccactagtttggtaccatctctattttgggtgacctgtttcaccagcaggcctgttactctccatgactaactgtgtaagtgcttataatggcaataaattgcttttctacgtaammmmmaaaaaaaaaaaaaaaaaaaaaaaaaaaaaaaaaaaaaaaaaaaaaa

SEQ ID NO: 2165 - DNA, 3812 bp, Canis familiaris
cccgaacacccgggcacagtcggcgaagttgtgttctctaacaccaaagacatctggctttccgggggtgattccgagacattgaagtgcaaagaagagactctcctagagaaataaaatatgactaaaagtaatgaagaagagcccaggacagggggcaggatggagaggttccagcgaggagttcgtaagcgcacactcttggccaagaggaaggtgcagaacatcacaaaggaggatgttaaaagttacctatttcggaatgctttcgtgctgctcactgtcactgcagtcattgtgggtacaatccttggatttaccctgcgaccatacagaatgagctaccgggaggtcaagtacttctcttttcctggggaactcctgatgaggatgttacagatgctggtgttaccacttatcatctccagtcttgtcacagggatggcggccctagatagtaaggcatcagggaagatgggaatgcgagcggtagtctattacatgactacgaccatcattgccgtggtgattggcataatcattgtcatcatcatccatcccgggaagggcacaaaggaaaacatgcacagagaaggcaaaattgtacaagtgacagctgcagacgccttcctggacttgatcaggaatatgttccctccaaatctggtggaagcttgctttaaacagtttaaaaccaactatgagaagagaagctttaaagtgcccatccagtccaatgagacgctcatggctgccgtgataaacaatgtgtcggaagccatggagactcttacaaggatcacggaggagttgatcccagttccagggtctgtgaatggggtcaatgccctgggactagttgtcttctccatgtgctttggacttgtgattggaaacatgaaagagcaagggcaagccttgagagaattctttgattctcttaatgaagccatcatgagattggtagcagtgataatgtggtacgcccctctgggcatcctcttcctgattgcagggaaaattgttgagatggaagacatgggagtgattggggggcagcttgccatgtacacagtgacagtcattgtcggcctgctcattcacgcggtcatcgtcctgcccctcctctacttcttggtaacacggaaaaacccttgggtttttatcggagggttgctgcaagcactcatcacagctctcggaacctcctccagttctgctaccctacccatcacattcaagtgcttggaagagaacaatggcgtggacaaacgtgtcaccagattcgtgctcccagtgggtgccaccattaacatggatgggaccgcactctatgaggctttggctgccattttcatcgctcaagttaacaattttgaactgaactttggacagattattacgatcagcatcacagccacagctgccagtattggagcagctgggattcctcaggctggcctggtcaccatggtcattgtgctgacgtctgtgggcctacccaccgatgacatcacgctcattatcgccgtggactggttcctggaccgcctccgcaccaccaccaacgtgctgggagactccctcggagccggcatcgtggagcacttgtcccgacacgaactgaagaaccgggacatcgagatgggtaattccgtgatcgaagagaatgaaatgaagaaaccctatcagctgattgcccaggaaagcgagactgagaaacccactgacagtgaaaccaagatgtagactagcaccagaacggttttctggagcagcaggtgttcgcaaaccactgtaaaatgtttccagctgttacaactcattctctccgggaagccccttacctcccttttcctgtactctgataggattgggaagtaatcgtccaaaaccaaggggggattttgcgagtcagatcagatcttgcgagtttacgtggcacacagaactgcaaatgtgattttttttttttaataagctgaagagtcaaacgaatagtaggcttaaagcatgcttttaaatcaactttcaaaatttaaaaatccttcagaatgcaattcagttttagtatcaaaacaacttgataaactacaatcagttatcaatggaagagtagaagggtttttttcccccgtctctcttctgatttgtgtcctgatacaaatactagcaggccactatgaatacacacctagcacagctgtgaggagccacataaagtgaaatttccaagtggccagaggcaacttaatctcatttctaggcctcagtgttctcatctgtaaaatgggtgagttccctggatgcctttatggtctcttctagcccaaacatcctgtgacaccatagaagagcctgccttctattcccccttggaacatcctgtagcaagtatcattcatgggactttcaaaaaggatacttactgggaatgaacttttctaagtaggggagggatggctgtatggtttaccaggtcctgtgtccaatgtcagttatgcgagtcaccaagctggaggccattcaaggagtggaattattcatgaaactctgctgagttcttcccaatgaggggaaagtattcccttctttcctgcccttcccaaacggaagggactgctctgggaaggattctcccaccactcctcaactgaccatagacttttagaaagtaaaatgtaagactagcaactagcaagggtgctcatagtcttactacagaacactaaagagccaggtaggaaagagtggagcatggttgacattatggagaggatttttaaaacaccacgcttatagatcatctttaaggacgaatttaaaatagagaggttcattttgtttaacctgaaatactttttgtcttcagttcaaaatcatcccccaaggaagtctgcttatcaaaatacaaggtcacttctcatatctattttgaagaagtcaaatgaatgagctctctctccctctctctctcaatagaggtccaggagctgggtgggtggtctcttatttgaaaaggtttttgactataatcaaaagttcttaggatgagagaaacaagatatttctttgtgttggaattccacttcccaaatcattgaaagcctttagctggaattgggttcagttttattttgtttgtgtccctgagagaaatggtagaagatgaatcagtatagagacgctgtcaatgtggttccaagagaaaaccagcaggggcattagtttcaggcgaggcagctcccaggtttagaggagattaatttttttaccccctaaggagtattcactcaaagacatggactgggagctgtcagtaccagctgtgcttgagtttctgaccgaaaatggtgaagaatggacttaattatgctaacagattgaaaatctagacatacactctccaatacacaattagagacgttttctatatagatcatgagcgttacatgtgtacaaaaaaaagttaacgttaggctgtggtgaagtaaccgtttaatgccgaggctctatttgggaaatacattacaaaagttaatatccgtggctgtcatctcatgacaccagtagagcaaaaattaatcacgtcaaattaattctgttatacagtgtgatcttttttttttatactaaccatttcttatggaaagcaagtcctcttgggacgatcctctctycagcccatcacaggctctgtatacgcatgcacccagtgtggactgagaagcattactttgtagatgtattttcaataaagaaaagaaattagttttacaytaaaaaaaaaaaaaaaaaaaaaaaaaaaaaaa

SEQ ID NO: 2166 - DNA, 763 bp, Canis familiaris
  misc_feature (16)..(16): n comprises a, c, g, or t, or includes no nucleotide
ctggttcggcatagtncaatgccataaaggaggtctcatatgctctcgaaagatccttttgctggcagatccgaccggttaacccggkryaccccacagcakcagctcttgcctgagtgtcytccctctkgkcctcggtgtgtcctagttgtgccagcaccaacacacctaacaggcagccaaggccgaggctgcaaagagcatcgttacactagtttgataggttaccatagkttaattacccaactrawtctggtgtttagccbtatctaaatatacaccgcywctgtgtaggtgtgcawttgcccyggtgtggtactgtgkttccyccytgcccgccatagtgcacttccgggttgccagagtagtcaacttgcaaagcgttcgcatcgccyaggaaataggtatcytagcagccatcytacgcataaaccggctacgccgtggtggcyttagtgtaagttttttgacacaaaccaacctgtgccaggagccaggaaaagataaccaaatctgatgctactacgttcatctatttctctatcyttaagcaataaacaatttagaacaagacaggcagaagcccaccaaccagcccccctgtacytattgctgagtttkagcytagaggagtttggacytttgtgttaattgtagagagtaataataatctattatttcacaaggtaggtwtywwwyyttttttttttytttttttttttttttttttttttttttttttttttttttttttttttttttt

SEQ ID NO: 2167 - DNA, 763 bp, Canis familiaris
  misc_feature (16)..(16): n comprises a, c, g, or t, or includes no nucleotide
gaccaagccgtatcangttacggtatttcctccagagtatacgagagctttctaggaaaacgaccgtctaggctggccaattgggccmyrtggggtgtcgtmgtcgagaacggactcacagragggagamcmggagccacacaggatcaacacggtcgtggttgtgtggattgtccgtcggttccggctccgacgtttctcgtagcaatgtgatcaaactatccaatggtatcmaattaatgggttgaytwagaccacaaatcggvatagatttatatgtggcgrwgacacatccacacgtwaacgggrccacaccatgacacmaaggrggracgggcggtatcacgtgaaggcccaacggtctcatcagttgaacgtttcgcaagcgtagcggrtcctttatccatagratcgtcggtagratgcgtatttggccgatgcggcaccaccgraatcacattcaaaaaactgtgtttggttggacacggtcctcggtccttttctattggtttagactacgatgatgcaagtagataaagagatagraattcgttatttgttaaatcttgttctgtccgtcttcgggtggttggtcggggggacatgrataacgactcaaamtcgratctcctcaaacctgraaacacaattaacatctctcattattattagataataaagtgttccatccawarwwwrraaaaaaaaaaraaaaaaaaaaaaaaaaaaaaaaaaaaaaaaaaaaaaaaaaaaaaaaaaaaaa

SEQ ID NO: 2168 - DNA, 721 bp, Canis familiaris
  misc_feature (7)..(7): n comprises a, c, g, or t, or includes no nucleotide
cagaaanaaacgaccgtcctaggcctggcccacttgggccccatgtgtgggggtgycgtmgtcgagaacggactccacaggarsggagaccaaggagccacacmggatcaacacggtcgtggttgtgtggattgtccgtcgrttccggctccgacgtttctcgtagcaatgtgatcaaactatccmatggtatcaaayyaatgggytgattmagaccacaaatcggratagatttatatgtggcgwagacacatccacacgtwaacgggaccacaccatgacacawaggaggaacgggcggtatcacgtgaaggcccaacggtctcatcagttgaacgtttcgcaagcgtagcggatcctttatccatagaatcgtcggtagaatgcgtatttggccgatgcggcaccaccgaaatcacattcmaaaaactgtgtttggttggacacggtcctcggtccttttctattggtttagactacgatgatgcaagtagataaagagatagaaattcgttatttgttaaatcttgttctgtccgtcttcgggtggttggtcggggggacatgaataacgactcaaamtcgaatctcctcaaacctgaaaacacaattaacatctctcattattattagataataaagtkttccatccatarwwwraaaaaaaaaaaaaaaaamaaaaaaaaaaaaaaaaaaaaaaaaaaaaaaaaaaaaaaaaaaa

SEQ ID NO: 2169 - DNA, 721 bp, Canis familiaris
  misc_feature (7)..(7): n comprises a, c, g, or t, or includes no nucleotide
gtctttntttgctggcaggatccggaccgggtgaacccggggtacacacccccacrgcakcagctcttgcctgaggtgtcctyscctctggttcctcggtgtgkcctagttgtgccagcaccaacacacctaacaggcagcyaaggccgaggctgcaaagagcatcgttacactagtttgataggktaccatagtttrrttacccractaaktctggtgtttagccytatctaaatatacaccgcwtctgtgtaggtgtgcawttgccctggtgtggtactgtgtwtcctccttgcccgccatagtgcacttccgggttgccagagtagtcaacttgcaaagcgttcgcatcgcctaggaaataggtatcttagcagccatcttacgcataaaccggctacgccgtggtggctttagtgtaagktttttgacacaaaccaacctgtgccaggagccaggaaaagataaccaaatctgatgctactacgttcatctatttctctatctttaagcaataaacaatttagaacaagacaggcagaagcccaccaaccagcccccctgtacttattgctgagtttkagcttagaggagtttggacttttgtgttaattgtagagagtaataataatctattatttcamaaggtaggtatywwwytttttttttttttttttkttttttttttttttttttttttttttttttttttttttttttt

SEQ ID NO: 2170 - DNA, 658 bp, Canis familiaris
ccattgggcccatcgagaacggactcacaggtagggagaccaggagccacacaggatcaacacggtcgtggttgtgtggattgtccgtcggttccggctccgacgtttctcgtagcaatgtgatcaaactatccaatggtatcaaattaatggggttgattatagrccacaaatcggratagatttatatgtggcgragacacatccacacgtwaacgggrccacaccatgrcacaaaggrggracgggcggtatcacgtgaaggcccaacggtctcatcagttgaacgtttcgcaagcgtagcggrtcctttatccatagratcgtcggtagkatgcgtatttggccgatgcgggcaccaccgraatcacattcaaaaaactgtgtttggttggagcacggtcctcggtccttttctattggtttagagctacgatgatgcaagtagataaagagatagraattcgttatttgttaaatcttgttctgtccgtcttcgggtggttggtcggggggacatgrataacgrctcaaaatcgratctcctcaaacctgraaacacaattaacatctctcattattattagataataaagtgttccatccatagtttgraaaaaaaaaaaaaaaaaaaaaaaaaaaaaaaaaaaaaaaaaaa

SEQ ID NO: 2171 - DNA, 658 bp, Canis familiaris
ggtaacccgggtagctcttgcctgagtgtccatccctctggtcctcggtgtgtcctagttgtgccagcaccaacacacctaacaggcagccaaggccgaggctgcaaagagcatcgttacactagtttgataggttaccatagtttaattaccccaactaatatcyggtgtttagccytatctaaatatacaccgcytctgtgtaggtgtgcawttgcccyggtgtggtacygtgtttccyccytgcccgccatagtgcacttccgggttgccagagtagtcaacttgcaaagcgttcgcatcgccyaggaaataggtatcytagcagccatcmtacgcataaaccggctacgcccgtggtggcyttagtgtaagttttttgacacaaaccaacctcgtgccaggagccaggaaaagataaccaaatctcgatgctactacgttcatctatttctctatcyttaagcaataaacaatttagaacaagacaggcagaagcccaccaaccagcccccctgtacytattgcygagttttagcytagaggagtttggacytttgtgttaattgtagagagtaataataatctattatttcacaaggtaggtatcaaacyttttttttttttttttttttttttttttttttttttttttttt

SEQ ID NO: 2172 - DNA, 657 bp, Canis familiaris
cgtcctaggcctggcccattgggcccatgtcgtagtcgagaaacggactcacaggaaaggcgagaaccaggagccacacaggatcaacacggtcgtggttgtgtggattgtccgtcggttccggctccgacgtttctcgtagcaatgtgatcaaactatccaatggtatcmaacttaatgggttgattcaagaccacaaatcggaatagatcttatattgtggcgaagacacatccacacgtaaacgggacccacaccatgacacaaaggaggaacgggcggtatccacgtgaaggcccaacggtctcatcagttgaacgtttcgcaagcgtagcggatcctttatccatagaatcgtcggtagaatgcgtatttggccgatgcggcaccaccgaaatcacattcaaaaaactgtgtttggttggacacggtcctcggtccttttctattggtttagactacgatgatgcaagtagataaagagatagaaattcgttatttgttaaatcttgttctgtccgtcttcgggtggttggtcggggggacatgaataacgactcaaaatcgaatctcctcaaacctgaaaacacaattaacatctctcattattattagataataaagtgttccatccataaaaaaaaaaaaaaaaaaaaa

SEQ ID NO: 2173 - DNA, 657 bp, Canis familiaris
gcaggatccggaccgggtaacccgggtacagcatcagctctttgcctgagtgtcctttccgctcttggtcctcggtgtgtcctagttgtgccagcaccaacacacctaacaggcagccaaggccgaggctgcaaagagcatcgttacactagtttgataggttaccatagkttgaattacccaactaagttctggtgtttagccttatctagaatataacaccgcttctgtgtaggtgtgcatttgccctgggtgtggtactgtgtttcctccttgcccgccataggtgcacttccgggttgccagagtagtcaacttgcaaagcgttcgcatcgcctaggaaataggtatcttagcagccatcttacgcataaaccggctacgccgtggtggctttagtgtaagttttttgacacaaaccaacctgtgccaggagccaggaaaagataaccaaatctgatgctactacgttcatctatttctctatctttaagcaataaacaatttagaacaagacaggcagaagcccaccaaccagcccccctgtacttattgctgagttttagcttagaggagtttggacttttgtgttaattgtagagagtaataataatctattatttcacaaggtaggtattttttttttttttttttttt

SEQ ID NO: 2174 - DNA, 748 bp, Canis familiaris
atgaccccggtccaatgccatcactggccacccagaagaccgtggacgscmcctctgggaaratktggcgtgackhcgmrgssytgcccagracatcatvcctgcktccacyggcgctgccmagkctgkkggcwaggtcatyyckgagctgwacgggragctcactggcatgvchktccgtgtccccaccccsratgkatcakttktggatytgacctgccgcytggwgawrgctkccvvwtatgacgacatcwagaaggtagtgaagcaggcatcggagggacccctcraaggcatcctgggctacactgaggaccagktggyctcckgtgacttcracagkgacacccactsttccaccttcgacgccggggctggcattgccctcaatgaccactttgtcaagctcatttcctggtatgacmatgaatttggctacagcaaccgggtggtggacctcatggtccacatggcctccaaggagtaagagcctcctggaccaccagccccagcaagrhcaagaggaagagagaggccctcagctsctggggadtccctgccccmamtkawtcccccaacacactgagagaatctcctgacctccwatttacatcctagaccccaaggaaggggaagggcttggggagccctaccttgtcatgtaccatcaataaagtatactgtaccyarmrharwhaawaaaaaaaarrraaaaraaaarrraaaaaaaaaaaaaaaaaaaaaaaaa

SEQ ID NO: 2175 - DNA, 611 bp, Canis familiaris
tgtggccaaggtcatccctgagtctgacggggatgctcacttgtcattggccttccgtgtccccacccccaatgtatcattgtggatctgacctgccgtcctggagaaakctgcccaatatgacgacatcaagaaggtagtgaagcaggcatcggagggacccctcaaaggcatcctgggctacmctgaggaccaggtggtctcctgtgacttcwkacagtgacacccactsttccaccttcgacgccggggctggcattgccctchatgaccacctttgtcaagctcatttcctggtatgacmatgaatttggctacagcaaccgggtggtggacctcatggtccacatggcctccaaggagtaagagcctcctggaccaccagccccagcaagaacmagaggaagagagaggccctcagctgctggggagtccctgccccmacttaatcccccaacacactgagagaatctcctgacctccaatttacatcctagaccccmaggaaggggaagggcttggggagccctaccttgtcatgtaccatcaataaagtatactgtacccmrcgaamaaaaaaaaaaaaaawawaaaawaaaaaaaaaaaaaag

SEQ ID NO: 2176 - DNA, 649 bp, Canis familiaris
  misc_feature (270)..(270): n comprises a, c, g, or t, or includes no nucleotide
aagatttggcgttaccgcctgaggggctgccccagaacagtcatcctgcgttgccactggcgcttcccacaggctgtggcaaggtcatccctgagctgaacgggaagctcactggcatgccttccgtgtccccacccccaatgtatcattgttggattctgacctgccgcctggagaaaagctgcccaatatgacgacatcaagaaggtagtgaacaggcatcggagggacccctcaaaggcatcctgggctacactgaggaccagtgtnctcctgtgacttcaccagtgacacccactcttccaccttcgacgccggggctggcattgccctcaatgaccactttgtcaagctcatttcctggtatgacaatgaatttggctacagcaaccgggtggtggacctcatggtccacatggcctccaaggagtaagagcctcctggaccaccagccccagcaagaacaagaggaagagagaggccctcagctgctggggagtccctgccccaacktaatcccccaacacactgagagaatctcctgacctccaatttacatcctagaccccmaggaaggggaagggcttggggagccctacccttgtcatgtaccatcaataaagtatactgtacccagcgaaaaaaaaaa

SEQ ID NO: 2177 - DNA, 630 bp, Canis familiaris
gcgttccaactgggcgctgcccaggctgttgggcaaggkycatccctgagctgtacggggaagcttcactgggcatggccttccgtgtccccacccccgatgtatcagttgtggatctgacctgccgcctggagaaagctgcccaatatgacgacatcaagaaggtagtgaagcaggcatcggagggacccctcaaaggcatcstgggctacactgaggaccaggtggtctcctgtgacttcaacagtgacacccactcttccaccttcgacgccggggctggcattgccctcaatgaccactttgtcaagctcatttcctggtatgaccatgaatttggctacagcaaccgggtggtggacctcatggtccacatggcctccaaggagtaagagcctcctggaccaccagccccagcaagaacaagaggaagagagaggccctcagctgctggggagtccctgccccaacttaatccccccacacactgagagaatctcctgacctcccaatttacatcctagacccccaggaaggggaagggcttggggagccctaccttgtcatgtaccatccaataaagtatactgtaccccgcgaaaaaaaaaaaaaaaaaaaaaaaaaaaaaaa

SEQ ID NO: 2178 - DNA, 620 bp, Canis familiaris
ttctgatgatgaggtccagacactactgaatatttatttccgccatcagactctgggacaaacgggtacttacgcgttkgtggggtccaaccagagcctgaccgaaatctgcactaagctgatggagctgaacatggagatccgggacatgattcgcagggcccagagttaccgggtcctcacagcttttcttccagactccagtgtttctggcactagtctctgacaggagcctcccagcccccgtgggttccmaactgggggtgctgtcatgctggggtgacgtcattctgtgtcttttcagccttcagaaggcttggtcagactgttctccctcttgttacctgtaggttttctaaacaggatgacagaacttccaacgtgtagcaatactctaaaaaccaaggtagcatagaacattctgggacagactccatccgttatgctgtgtggcacaaaggtgttaccattttactgagcagatgcaactcactactgaagaaagtgacttccattgcataccaaagccgactacactgaattaccttcctttctagaaacaattttagattggcaaaagtgcaatgttttcttcacaaaaaaaaaaaaaaaaaaaaaaa

SEQ ID NO: 2179 - DNA, 608 bp, Canis familiaris
atagcgggtaatgccacgggttgcacgactacgtgaaagcatgtgatatcaactaagcgtacgaattattgtggtatgactggtggtaatawagccctgatttagagtayggagcgtaattattagggaacaagatatatcattaatgtttggccggtcaggggtacggatcatatcattgatgtgtagggtacgacaaagtaatgcacgggggttgcagttaagtcaaccacaatggcaagtactgtgtccatttaagctacactatcgacgacctggtttkcgggtattgtttgtacgacactagcgaaatattattataatmaagatggtgagaagaattgtmttgttgccgcgattggagaagggattgataggacaagtgtagtgtattaagttgagtatmaaaagggtgttattaaggatgtcgttggtatcaattgcacgatgatagggtgcattggcgtagcatgamttaatagagttattatcaaaaaattttgtagggttaagtttacgggtatcgatatcagatcttcggttagggattatgaggcgaactatgggaggggaaagataaaaaaaaaaaaaaaaaaaaaaaaaaaaaa

SEQ ID NO: 2180 - DNA, 608 bp, Canis familiaris
tatcgcccattacggtgcccaacgtgctgatgcactttcgtacactatagttgattcgcatgcttaataacaccatactgaccaccattatwtcgggactaaatctcatrcctcgcattaataatcccttgttctatatagtaattacaaaccggccagtccccatgcctagtatagtaactacacatcccatgctgtttcattacgtgcccccaacgtcaattcagttggtgttaccgttcatgacacaggtaaattcgatgtgatagctgctggaccaaamgcccataacaaacatgctgtgatcgctttataataatattakttctaccactcttcttaacakaacaacggcgctaacctcttccctaactatcctgttcacatcacataattcaactcatakttttcccacaataattcctacagcaaccatagttaacgtgctactatcccacgtaaccgcatcgtactkaattatctcaataatagttttttaaaacatcccaattcaaatgcccatagctatagtctagaagccaatccctaatactccgcttgataccctcccctttctatttttttttttttttttttttttttttttt

SEQ ID NO: 2181 - DNA, 637 bp, Canis familiaris
gaatatgctttagtcgtgggagccggtgagctcccccagatggttgggagttgatcgagccacactggatgaattagatcgaagatgagagaagctgwrcatgaacctcatgagggaagaggaaagtggaatctctgtggcctatcktcaggatccaccaccagkawacccgctatagtttttgacctcttttataagcggaaagccataagcagagaactatatgaatactgtattaaagaaggtctatgctgatwaaaacctgatcgcaaawtggwaaaagcaggggtatgagaatttatgctgcctgcgctgcattcagacacgggacacccarttttgggacgaactgcatttgccgggtccccmaaagcaagctggaagtgggccggatcatcgagtgcacgcactgcgtgctgtccggggctgctctggctgaggtccttatggccctgacccctcttcaccctgractttggactttcttggggtttctgccccstggtgccaccctctttcctaggagcagcttttcctgcagagcagtgctcctggcctgagttggagcatggtctccgtatgtaaaagcyttggtgtttatcagtgatttgtagaaataaaactttaaactttcaaa

SEQ ID NO: 2182 - DNA, 675 bp, Canis familiaris
aatggktcgtgagctctttgaaatggccaggacccaaaagcctgtcttatcttctttgatgaaattgatgctattggaggggctcgttttgatgatggtgctggaggagacmatgaagtacagaggacgatgctggaactgatcratcagctggatggttttgatcctcgaggtaacattaaagtgctgatggccactaacagacctgatactttggatcctgcactgatgaggccagggagattggacmggaagattgaatttagcttacctgatctagaggktcggactcacatttttmagattcatgctcgttcmatgagtgttgaaagagatatcagatttgaattgttagcmcgactgtgtccmaatagcmcyggtgctgagattagaagcgtctgcacagaagctggtatgtttgccatcagagcmcggcgaaaaattgctactgagaaggatttcttggaggctgtaaataaggtcattaagtcttatgccmaattcagcgctactccccgctatatgacatacractgagccctgaaggctttcatgaaaacacttttcattggaatcctaacttaattaaatagacttgttaataaccattacacacacmaaaataaagtgtttcmaaactgrraaaaaaaaaaaaaaaaaarraaaaaaaagggc

SEQ ID NO: 2183 - DNA, 3491 bp, Canis familiaris
cccgccatgggcaagccggcgaggaagggatgcgactgcaggcgcttcctgaggaacaactggctgctgctgtccaccgtggccgccgtggtgctagggattgccataggagtcttggttcgagaatacagcaagctgtctagtctggagaaattctactttgcttttcccggtgaaatcctaatgaggatgctgaaactcatcattttgccattaattatatccagcatgattacaggtgttgctgcactggattccagtgtatccgggaaaattggtctacgtgctgtcatatattatttctgtaccactgtcattgctgtagttctaggcatcgtgctggtggtgagcatcaagcctggtgtgtcccagaaagtggatgaaattgacaggacaggcagcagccccgaagtcagtacagtggatgccatgttagatctgatcaggaatatgttccctgagaatcttgtacaagcctgttttcagcagtataaaaccaagcgtgaagaagtaagttctcccagtgagccagggatgaacatgacggaagcatctgtcaccgctatcatgactactgccatttccaagaacaaaacaaaggaatacaaagtcgtaggcatgtattcagatggcataaatgtcctgggcctgattgtcttttgcctcgtctttggacttgtcattggaaaaatgggagaaaaaggacaggttctggtggatttcttcaatgctctaagtgatgcaaccatgaaaattgttcagatcattatgtgttacatgccacttggcattttgttcctgattgctgggaagatcatagaagttgaagactgggaaatattccgcaagctaggcctttacatggctaccgtcctgagtggcctcgcgatccactccattatcattctcccactgatctacttcatagttgtacggaagaaccctttccgattcgccatgggaatggctcaggctctcttgacggctctcatgatctcttccagttcagccacactgcctgtcactttccgctgtgcagaagaaaagaaccaagtggacaagaggatcactaggtttgtgctgcccgtgggagctactatcaacatggacgggactgcactctatgaggctgtggcagctgtgttcattgcgcagttggatggcctggacttgggcattgggcagatcatcaccatcagtgtcacggccacggctgccagcatcggagctgctggtgtgccacaggctggcctggtgaccatggtgatcgtgctgagtgctgtgggtctgccgccggaggatgtcacgctcatcatcgctgttgactggctcctggaccggttcaggaccatggtgaacgtcctcggtgatgcgtttgggacaggcattgtggagaagctctctaagaaggagctggagcagatggatgtttcatctgaagtcaatatcgtgaacccgtttgccttggaatccacaatactggataatgaagactcagataccaagaagtcctatgtcaatggaggcttcgcagtagacaaatctgacactatctcgttcacccagacctctcagttctagagtccctggcttcataggaccaggaatgatgaaggacagctccataagagtcatctcttagcaaattcaaacattaaataagsarargaaaaacattaatggccaactgtacattggatttgatatagaaacttccagattattttctatatttggattcacagatttcactctcggggttctgggctttgggggtggggtaacatgaaagaaatacatgaaaaagaaagctggattgtctgcaatttaaaaattctaaagtttggaagtaaatagagtcataattgttggattaggacatggatatggaagaaaaattgctttctcatacacagtccagtgttttgagtttttaaaaaaatactcwgwttacaaatttttactcgctttctattggcatggatttcctttgacttctcacatttttatagattataatgcmtataaacaccctcccccccattaatgtgccmaattgtccatttttaactyatctccagccaatttcaaagaaacaactttgaaagaaaacagaccagcacaattctgcaatcagagttttaagatgggtgtggggttttgtgggaaggttcttttttcaatgtactgtattgggacactggtaactcctaccccagtgttcagtatagagctagatatatatatatgtatatatttattattttcatataagttgccagacagagatcagaattgactgtcaatgtgaaataaagagctttccttgtactgaataataactatgatctcaatccagatctgctttggggcttatccaaactcctctctcaggagcacaagaatgaaatatcatgttgtctgattgttccacgtctgtgtgtcagcctcaaagcagatatgcattatggagatactccaaggtggcatcaccatttatctacaacccccagattctgctgctatgagggaatccatatcagctctatatacgattgtatacaaaggtgtcactcatacaaggctggatgtgtttttatccaattggaaggcttcattcttccaagatcaactagacccacttaaaaatgacaggactttgcccttttgtacccattagggcctaaacaacagtggcaagctaccagctaagttgtattttaatatggatctgatggactgaacaagtcacattggccagtgtcttcttgcaaaggaagtcccacaacatgagatcttggttatgagtggttcagggaaattcttccattgtatgaaactcatctcctcctcaagggaggatggttccaactagtagtctagtaatctcagccctggtcattacaatccatttcccttcttatgctaatttatggaaatagtttattaaaatctgtgcttcagcactcatcttaaaaataacatttaacataaaaacttgtatttacacggagatccaaaatagtcacgtttctgcagtatagccaatttaaacctgtgcttttttatatttaagaaaaccagaaactgtgccaaagatggtggaaaagtaaacaaatgttcaatgttgactacctgtaccctgaaagctataagggaatgatcctagattgtcgagtacacatcataaacgtggaccagtgattcaatgtgagtcttcaaagggaaatattgatgttgtgcagtggaaataaatctaaatatcgatgcagttgaatccataatttgtcatgggctgaaaggtcctacccccttggcagtttgctcagatctaaggcacgggagttggcagagctgttcgtgaactgcaggtcatccttattttggagtgagtttgtaacgagcctcttaacacactgtgctgttaactcattaaagagaacgatgttccatttcagtctcaataaatacttctgcccttcctccttccc

SEQ ID NO: 2184 - DNA, 709 bp, Canis familiaris
cagagaattcagcttcctggcgtcatcaggcttgagctctactgggtccacagacctgtgaccaggtgtcactaggagatatgcctcatgctgtgcctccatgagggctagggaacaattctgttattgtattaacttgactcagtwactcacttgagawctaacccrtktktackttckgtctagaatgatgtacatgtaggagagtgagctataatgctccccaagtgccttgttttctctgatataatatatttataaggacctattccmgtggattcttgggtgtgtttgccacatcgattttagggagtgggcgtatatgtagtagggatacagtctggaaatgggtccctttcccctcagggtgggagaggagaggtgggggttagagacctgtgagggtggggttaaatcaaacccccgaggtgactctttcctcttcgccctactcctcttaggcttagaaggacgtccagtttttttaaagccctgtggctccaagcctggtctcatttgtttccctggctggctcacgtgtggaccacgttagcaccccmtggcctgaggattccacgtaacgattttatgttatacgtgcaaatatgtaaawgccaacattttaaataatttgataaatctttgtagctgctcagccmaaaaaaaaaaaaaaaaaaaaaaaaaaaaaaaaaaaaaaaaaaaaaaaaaa

SEQ ID NO: 2185 - DNA, 683 bp, Canis familiaris
agatttatggagaaatttcctcttccccccccacagaagctgggaggaaaaagaattgtggtctctgcccatagactttggttcaaaagccatcaaggagcagaggatcaagcaggcagaggaccaagcaggcagagcgatgcccaaaccttccagcaggtggtcccaccgcctctttggtgctggcaatatggctgaccctggatggctttgggtctctggtcacttgtgtcttcaggctgacctttctaaagcatctatttagccatcctgcgtccagcctgaagcttatgttattagaagaaaaaagatgacaaatctcacttatctgcacatttttcactgtcctgtagcatttagagaaggaagtctacttgatgggagtatattttttaactcagctggtagaatttgactaattgaccgttcttttattgtgacttgagctgaagaggttgaccaccctcctgcgtggcacatgtgcacataccttccatggtgagatgattcttccttgtgctaatgagcagacagagctggtcatccttggcccctcgtgaggcatatcagagtacggagatgcatctggagggaggaaggggaagcaaacttaccagaacatgcaaaatggaataaaatcattttggctagaaagaaaaaaaaaaaaaaaaaaaaaaaaaaaa

SEQ ID NO: 2186 - DNA, 710 bp, Canis familiaris
  misc_feature (2)..(2): n comprises a, c, g, or t, or includes no nucleotide
cncaattccttccgcgctcttcttcgggaacgcatttcatcgtggtcccccaatcccccatctggctgtaytggcgaatatggcacatgratctcattcagtcgccgtgctctacagtgtgatgaccctcgtaagcacttacctggtggctttcgcatacmmwacgtgaaatttgttctcaaacachaagtagcacagaagagggaggatgctgtttccmaagaagtgactcgaaaactctctgaagctgatmacagaaagatgtctcgaaaggamamagatgmaagaattttgtggaagaagaatgaagttgctgattatgaagctacmacattttccatcttctataacwacaccctattcctggtcttggtcattgttgcctccttctttatattgaagaacttcaacccaacggtgaactatattttgtccataagtgcttcatcaggcctcatcgcccttctgtctactggctccmagtagactgtaccggctttggcccctggctttgtatctatgggtggcctgtggtatatggaaaagtaacagggtggtcagaatgagagacacasmagatgtttttatagtctgcagttggagggtttgaaaaacccaacmaaatgtaattcagtatttgtttattggctctttttttgacagattgttgaaattaaatgaattgaaaggaaaaaaaaaaaaaaaaaaaa

SEQ ID NO: 2187 - DNA, 748 bp, Canis familiaris
gttgattcactggagaacttgggtctcattagatcccatttagaacattgtgctgaaacatygccaccatctaagcccatgtggtagcccaggggaaaggaaaccaagctacctcatagcagtagaggtacatatcgagaaggtagggttytctattctasagcagttttagagagggaaatccaggctcttgaagtccmaatccasgratcttcctgctctcagcttcaggggagatgtksacmgtattgtctatttttagtcttcttccmagctctgtcctgagctgtttcttttgaggggtctgtgccmctttgttgagtsggatccttccctcctacataaactgcttcacgtgttcgatttcttccttttcccaggggaaagagggactggccttgatccctaaagtctggaaaggccccctcccactccccactttttcttaachaaactccagctctactgtgtacatatagaaaagtgtgtattgccacctaaatcatttgagtcattcttccagaggggacaaggagaccctccaccttttggcracwcctcagctcttccttctgctattccctttccccacacacccttgatttttgtcctgtcctacatttcaaatttctactttgtgttgaacttgctttttttcatattgaaaagataccmttgcccchaaagcccaaaaataaaaaaactgaaaaaaaaaaaaaaaaaaaaaaaaaaaaaaaaaaaaaaaaaa

SEQ ID NO: 2188 - DNA, 2927 bp, Canis familiaris
gtctgcgcaggcagcgtggaccggccctttgaagcggggatagagtaacactgacccgggcagcagcagttctcctcagccctctcgtgggaatgagctgccaaccctttacttcggctgacacctttctacccctgaattctgaggcttctgcagccctgcctctgatcatgcaccccggcgcggccgagtgcctcccaggctccaaccacgccaccaacgtggtgtccacagcaacaggacttcattattctgttccttcctgtcattatggaaaccagccatctacctatggagttatggcaggtggcctgaccccgtgtctctacaagttcccggagcacggcctgggccccggcttccccgccgcgcaccagccactcctcgcggagggccccgcggtcgccgacttcaagcaggagctcaggcggaggagcaaactggctgaggagcccgtagacacggagtctccagaaatccgagagctcgagaagttcgccaacgaattcaaagtgaggagaatcaagctaggatacacccaaaccaacgtgggggaagccctggcagctgtgcatggctctgaattcagtcaaacgactatctgccgatttgaaaacctgcagctcagctttaaaaatgcatgcaaactaaaagcaatcttatctaaatggctggaggaagctgagcaagtgggagctttatacaatgaaaaagtgggagcaaatgaaagaaaaaggaagcgaagaacaactataagtattgctgctaaggatgctctggagagacactttggagaacagaataaaccttcctctcaagagatcatgcgaatggctgaagaactgaatcttgaaaaagaagtagtaagagtttggttttgcaatcgaaggcagagagaaaaacgggtgaaaacaagtctgaatcagagtttatttactatttctaaggagcatcttgaatgcagataaaatttactgttgtatggcagtgagtttttctatttttcatccctttctcttctccaacaaaaaaacccccagaaaggagttatttggctggcttcaaaaatcatttttatatcagtaacttttgcagaggcttttctactttttttttcttaaagaatacaatttaaatattgacaaactattttcattaaagtaattcttttcagaagccaaacggtacatttttaagccaaagataccaacaggattaaaacagtgattccctctcaatctctcttcctcttgctctatctacagacacacacacatatacacagtgtgcacatggatcttctagtttaagatttcttttccaaaggctgtttattagctttttaacatttcattgataatgccaaataaagaatatcactgtagaagatacaatcagaaaactgatttaaccgacatcctgcttgccatcagctataatagtttgttggaactaaatagtttgcacttaagagcaagatgtgcctttgaattacattagtgcatttaggaataaatcttagaggcgacatttttatcttttattcttcccacagatttagcttttttgatgtttattgacagacaatatgcattatggattcttgaaccctaaactaccacagtgcaggaatgattatctggcctgtttgctgtttcatgttgtttatgcctgggaaagtgtttgctcctggtgggcatgcagtcttagttaaatgaacaaaggactgtgctgttaacaattgctacttactacttgaagggtgcctaacttagtaagtctcacaacccagaaaatcatccgggatcctatcaaaaaggacgatcactttggtttaattggttagattatgatttattgttgatgaaaaagtttgaccatgagtatttaaacttggagaattatatccagggaacatatttatttaactaataaggcatttctttgaaatttgcaagtagaagcaaactataacgtggtatcaatctaagagaacttttttttgcatttaaaatacataaatttgctggcactgtgtttgtaacttattttacataacagaagtgaaaacaattagaccaaatttcattactgatttagaatgcttactaaataaattatactgtcctgttttagctttctgtgagattaataaagaccaagaattatacaggtcataatctctatagatcataggtgtttatgcatgcataatcaccattaattggatggctagaaactttgatatattaatataaagagatcgtttgcagtagcttaatcacctatgcttaagtacacatctagcacccaggagaggttgaacaaaatatacaaagacttttattatccaagagtaaattccaaattattcagccatgtagatatataaattccttctctgtaattaattcacctgcttactacatacactaattgggaagtgatccttcagtttgcaaaagggagggataggatgtgtagttgtacagatatacatttatttacatacgcaaaatgcacatatggtatctgaaagttgcaaagagaaacaaagtataatgcacaataaatatttgaatagtgacttttttccactttaaatatgaatctgctaggaacatttagtctttctacaacaaaaataagcatgtacatatgctaatatcatcatcacatagacacgatcatcatcctatcattcattccataaggtcattccagtttagatacaactaacattaggaagttatttttctccctaaaaggaattattttgaatccttaattttgaaatatgaaatctttagttatttacaacttaattgtaaatgcactggtatttactattaacttatttgtattgagttttttgagactatttattctagctacatttattttagtagatatagattgaagttttt

SEQ ID NO: 2189 - DNA, 639 bp, Canis familiaris
aagatgcaacatttgtcgagccctaagattcaccagcttggtaacttcattagcaaaataaaccattggtttctgtccaattgtgactgtaattttaaagcccaaatatgtgttccaatcatgtatgagatctmaaaaaaattttgtagttacgtaaaagtaaatataaatggaaattatcactgagcagtttgtttatactatatatagtaccaatagtatttctgactggactgtggatacgttgaaatgtttttcaatcacgatccatcctccaagtattcctgttcattcatgtctgcctcaaatttgctggtaaatacataaaatagttacttgctaatcatttcaacccactatcctttcttgcctcccttcttgtgttagggtggatattatacattcatattctagccatattttgatatgtctatagtaaacatcccacctgagactaccttgggaatgtgtaagaattgactgttacgctctagtagagactgtgttttgtgttttgttcaaaagctgagtccaacatgaatgattctgaatcattccaacattatacagtgtattctcagccatgacatgtgatcagtgcaataaaaagtgaaccgaarwwaaaaaaaaaaaaaaaaa

SEQ ID NO: 2190 - DNA, 630 bp, Canis familiaris
ctgagggaatgggaggatctgtctacttttcctatcctgattcaagtggaatgcctgtatggcagctcctaggatttgtcacaaatggggaaaccaagtgccatcttcaaaatttcaggtcttaaatctggagaaggaagccmacatccttttggagccatgaatattgtccgaactccatctgttgctcagattggaatttcagtggaattattggacagtttggctcaacagactccagtaggcaatgctgctgtatcctcagttgactcattcactcagttcacacaaaagatgttggacaacttctacaattttgcttcatcatttgctgtgtctcaggcccagatgacaccaagtccatctgaaatgttcattccagcaaatgtggttctgaaatggtatgaaaactttcaaagacgactagcacagaaccctctcttttggaaaacataatttgaataaaataatttttgatggawwmmraaawwwrwcatgttttgaagagaaatgcctccatttaaaagtacgaagtcaaaaggatcatgaagcctaagtttaagaactacttattgactgaaacttaatgaaactctttataaaaaattaaaaacatggaaaatgaaaaaa

SEQ ID NO: 2191 - DNA, 673 bp, Canis familiaris
ctctagtcccgcttcggtccccccgccgacggatccccccatgtttgctgcttgttgcagggagctggtgcaacaactgcacagcaagtgcagaggataaattgttttgactgccctgattatgaaaatatcaaccatgttgtgktttttatgctgggaacatcccatttcctgagggaatgggaggatctgtctacttttcctatcctgattcaagtggaatgcctgtatggcagctcctaggatttgtcacaaatgggaaaccmagtgccatcttcaaaatttcaggtcttaaatctggagaaggaagccmacatccttttggagccactgaatattgtccgaactccatctgttgctcagattggaatttcagtggaattattggacacgtttggctcaacagactccagtaggcmatgctgctgtatcctcagttgactcattcactcagttcacacmaaagatgttggacaacttctacmattttgcttcatcatttgctgtgtctcaggcccagatgacaccmagtccatctgaaatgttcattccagcaaatgtggttctgaaatggtatgaaaactttcaaagacgactagcacagaaccctctcttttggaaaacataatttgaataaaataatttttgatggaaaaaaaaaaaaaaaaaaaaa

SEQ ID NO: 2192 - DNA, 712 bp, Canis familiaris
acacatgattatggtccggaggaccagagacaatcttgktcctcaaaacccggccaccatggcccaattcagtcgtctccttgacaacacctttccttykggtcacccgrhtytacacgtgtatcggcaaaacctccggagaacacctgtatctcgtattcgsgaccgacactgagtcgcttagwmagtgstaccaccggttcgtctcgcyacccggtcgtatcctctcgtcgccttgatgatccacactccccggaaaccgtctcacytgctcctctgtcccaaagtggcaccagacacccgtaaatggatcaactttctccatccgttcatcattgagactccacagggtcttaagtagtagcttcagaggcgtctcgcggatctcgtcgtgacagaccctctcgtcccgatgaaactgaacatgatcgttgrgtcccagggtactcctaacattccgggtaacaacggggtcggacatgatctcacgattctccaagggaaccatcacatagtcgggaggagggggatgtgccaagacaaccctcccaacggacacggcggtcgtatcggcgacggactagggagacgataaataccctgtggttccgacttccatgtccaccgtccattttagtgtctcaacaggtttaataaaatatttcactaaaararmwmmravaaaaaaaaaaaaaaaaaaaaaaaaaaaaaa

SEQ ID NO: 2193 - DNA, 712 bp, Canis familiaris
tgtgtactaataccaggcctcctggtctctgttagaacmaggagttttgggccggtggtaccgggttaagtcagcagaggaactgttgtggaaaggaarmccagtgggcydaratgtgcacatagccgttttggaggcctcttgtggacatagagcataagcsctggctgtgactcagcgaatcwktcacsatggtggccaagcagagcgrtgggccagcataggagagcagcggaactactaggtgtgaggggcctttggcagagtgracgaggagacagggtttcaccgtggtctgtgggcatttacctagttgaaagaggtaggcaagtagtaactctgaggtgtcccagaattcatcatcgaagtctccgcagagcgcctagagcagcactgtctgggagagcagggctactttgacttgtactagcaacycagggtcccatgaggattgtaaggcccattgttgccccagcctgtactagagtgctaagaggttcccttggtagtgtatcagccctcctccccctacacggttctgttgggagggttgcctgtgccgccagcatagccgctgcctgatccctctgctatttatgggacaccaaggctgaaggtacaggtggcaggtaaaatcacagagttgtccaaattattttataaagtgattttytykwkkytbtttttttttttttttttttttttttttttt

SEQ ID NO: 2194 - DNA, 628 bp, Canis familiaris
ctgaagggcttcccctcttcctaaccgtagcatgaacccccagtgtccctcagcctgtcttgttccctgttcaacccactgaggggcttcccacccctatktgtaccmacaaggtgtacatattcttcatagatagtagacaatctcccacggcccggtcacttgtaggagaggtcatgagtttctaggacccttctcctcccccttatttattctcatctccatcttcaccccttgctgtttatagtgcttttgtgtagcmaatgctccctccccgggcttaagggggtccctgcagcagctacacagctggaggttccctgagtttggggggtgtggaagtactatttaaccgtcctgcttggctggtgtccttgtcttttggtgatgttgtgctaataataagcagtacattggggtttatctctgtggcccgagaaccmaggggcctccacagcagctggtccgggggtgatcactggttttctggcacgttccagccaggagtgcctggcaggagcctgggtttctcggtggtttccttcctaataaaataaagacaggttgamamrmaaaaaaaaaaaaaaaaaaaaaaaaaaaaaaaaaaaaaaaaaaaaaaaaaaaaaaa

SEQ ID NO: 2195 - DNA, 558 bp, Canis familiaris
atatttacactcttgaatgtgcatcagagttgaaatgcagtcccgaggctttgatattgatgaggacattgtcaccaaagtggccgagcgagatgacatttgttccccaatagaagagagagttttctctgacaaaggctgcaaaaccgtgttcaccaagttagattactactacgatgactgacacggcactggagttgcttcaagttgggacactctgctctwttcccatrtctcccccagctccatacactggaagaggactaaagtgaatgcttcctgtgggacaggacaggcattgccccaggcagtgttcatccagcagagccttgccagtgtcctaccctacagatcgtggacttcgaaagagcccccagagcgttcagaggaggaagcagctcccaatccactcrgcccagggctcatgattttttaaaaatcatgttttaatcttaagtgtttctgtttcaaggaaggacgtctaagttttattgaaaatgtggtaactttatttaaaatggtttttaacatkakragaaacttttcaggctctaaaaa

SEQ ID NO: 2196 - DNA, 936 bp, Canis familiaris
atggttggactaaagccttcagaggtaccccctaccacrgstgtgaarttcctgggggcaggcacagcagcctgttttgctgatctcctcacctttccactggacacagccaaggttcgcctgcagatccagggggagaaccaggcgacacaggcagcccggagaatccaataccgcggtgtgctgggcaccatcctgaccatggtgcgcaccgagggcccccgcagcccctacaacgggctggtcgccggcctgcagcgccagatgagctttgcctccatccgcattggcctctatgactctgtcaagcagttctacacccccaaaggatcagaccactccagcatcactacgcggattttggcaggctgcaccacaggagccatggcagtatcatgtgcccagcccacagatgtggtgaaggtccgatttcaggccagcatacaccttggggcggggagcaacaggaagtacagtgggacaatggatgcctacaggaccatcgccagggaagaaggggtcaggggcctatggaaaggaacattgcccaacatcacaaggaatgccatcgtcaactgtgctgagatggtgacctatgacatcatcaaggagaagctgctagactatcatctgctcactgacaatttcccctgccacttgatttctgcctttggagccggtttctgtgccacagtggtggcctccccagtggatgtggtgaagacccggtacatgaactcgcccccaggccaatactgcagccccctggactgtatgctgaagatggtgacccaagagggccccacagccttctataagggatttacaccatcctttttgcgtttgggaacctggaatgtggtgatgtttgtgacctatgagcagctgaaacgggccttgatgaaagtccagatgctacgggaatctccattctga

SEQ ID NO: 2197 - DNA, 715 bp, Canis familiaris
gttgccagctgctgaacagtatgcctggagcgcttgaaggtcatgtgtgagacgcctctgcagtaacctctccgtggagaatgctgcagagattctcatccctggctgacctccacagcgccgatcagttgaaaactcaggcggtggatttcatcaactatcatgcttcggatgtcttggagacctccgggtggaagtcaatggtggtgtcacatccccacttggtggctgaagcataccgctctctggcttcagcacagtgcccttttctgggacccccacgcaagcgcctgaagcaatcctaagatcctgcctgtcgtaagactccgtttattttcctgaagcagcagccactgttgctgccactgaccaccaggtagacagcgcaatctgtggagcttttactctgttgtgggggcaaaagactgtatcgtggcccccagacttttaaaacagcactaaataaacttgggggaagtggggggagggaagggcccgggacctggggctgctcaacctaatgaaaaccctgttgctgcgtcactgtgttccctttggcctggccaagtttgatactgtggggattcagtttaggcgccggccctgaggacatcccagcggtggtacttcggagaaacctgtctgcatctgactgagcagagcaaatcgtcaggtgcctggagcaaaaaggaaaaaaaaaaaaaaaaaaaaaaaa

SEQ ID NO: 2198 - DNA, 684 bp, Canis familiaris
cagttactcgcgccccaagktccctgtcacctgkkgtgcccaactatgataatgkgcaccccmaytaccacaaggagcccttcctgcagcagctgaaggtgttttctgatgaagttgcagcagcaggcccagctbtccaccatccgtagcttcctcaagctgtacactaccatgcctgtggccmagctggccggcttcctggacctcacagagcaggagttcaggatccagctccttgtcttcaagcataagatgaagracctagtgtggaccmgtggcatctctgcccttgacggtgratttcagtcggcatccgaagttgacttctacattgataaggacatgatccacmktgcagacaccmaggtcgccaggcgctatggggatttcttcatccggcagattcacvaatttgaggagctcaatcgaactctgaagaagatgggacagagaccctgaggacattcacactcttgttaggaactcattttagggtctttgtaggtggggcctatttttgtctccmtgaagcctttgcctagatcagccatcagcmattcagctgagttgaagtttatttggattaaggactatttggattttaaataagtctcmgtaaaagatcttctttggarmmmaraaaaaaaaaaaaaaaaaaaaaaaaaaaaaaaaaaaaaaaaaaaa

SEQ ID NO: 2199 - DNA, 930 bp, Canis familiaris
atggttggkttcaaggcyacrgatgtrccccctactgccactgtgaagttcctgggggctggcacagctgcctgcattgcagatctcatcacctttcctctggacaccgctaaagtccggctgcagatccaaggagaaaggcaggggccagtgcgggctgcggccagcgcccagtaccgaggcgtgctakgcaccatcctgaccatggtgcgcactgagggcccccgtagcctctacagtgggctggtcgccggcctgcagcgccagatgagctttgcctctgtccgcatcggcctctacgactctgtcaagcaattctacaccaagggttctgagcatgctggcatcgggagccgcctcctggcaggcagcaccacaggtgccttggctgtggctgtagcccagcccacagatgtagtaaaggtccggttccaggctcaggcccgggctggaagtggccggagataccaaagcactgttgatgcctacaagaccatcgcccgagaggaagggttccgaggactctggaaagggacctctcccaatgttgctcgtaatgccattgtcaactgtgctgagctggtgacctaygatctcatcaaggacgccctcctgaaggccaacctcatgacagatgacctcccttgccacttcacttctgccttcggggcaggcttctgcaccaccgtcatcgcctcccccgtcgatgtcgtcaagacgagatatatgaactctgccctaggccagtacagcagcgctggccactgtgccctcaccatgctccagaaggagggtccccgagccttctacaaagggttcatgccttcctttctccgtttgggttcctggaacgtggtgatgtttgtcacctatgagcagctcaaacgggccctcatggctgcctgcacttcccgggaggctcccttttaa

SEQ ID NO: 2200 - DNA, 639 bp, Canis familiaris
atttcaatgtgtgacgagatggagcgctcttacaatgatgctctctgcgtggtgaagagagttcttggagtccmaatccgtggtcccaggtgggggtgtctgtagaagcagccctttccatataccttgagaactatgcaaccagcatggggtctcgggaacagcttgctattgcggaatttgcmagatctctccttgttattcctaatacactggcagttaacgctgctcaagactccacagatctggtggcmaagttaagagctttccataatgaggctcaagytaacccagaacgchaaaatctaaaatggattggtcttgatttgatcaatggtaaacctcgagacaacaagcaagcaggggtgtttgaaccaaccatagtgaaagtgaagagtttgaagtttgcamcagaagctgcmattaccattcttcgaattgatgatctcatcaaattacacccagagagcmaagatgacmaacatggaggttatgaagatgccgttcactcgggagcccttgatgactgatgtgctttcttttatttataacaatgttggatgcaattctcttgttcctctagtattacacacttaaaaataacaagctgtcaaaaaaaaaaaaaaaaaaaaaaaaaaa

SEQ ID NO: 2201 - DNA, 578 bp, Canis familiaris
cgattgtcattcgctgccagcaattagcgccagtgtagaatgtcacgattataggggttttcttacctccccraactgtttagaccgtctcccattaaggagaattgcctggttttgtgaaggagggcttatcagatgccagattgaaatctcaggcagtgttttctgcgtgscaaagtgctgcgtcctggaagatggggaaaggagcgcagggttcttcctctataaatcaacagtttacccagcagtttagaaaacacctttagcccacgtccaccccttccgttcatcccacgcttaccttaatccctgctggctagtttgagggagcctctttgcaagtttggagttgtgagcagatgtatcatttccttttcttcggctcttccgttgcccagacttccccctccagctcccccatagggataagaaactcctgtgccaactgggggagccagagggcccaacaccagagctcttgtatcttaaaacatcgtctgccttttgcttatactttataaaatgtcagttcaaataataaattttttaaatctgaaaaaaaaaaaaaaaaaaaaaaa

SEQ ID NO: 2202 - DNA, 807 bp, Canis familiaris
cggctagccctaggccaatgagggacacataggaccagggtggaccagaaaagcaggcgtggaccggtcgggatccgggatcgaagaatggtgtgagacargagcccaagggagaaagacagaactragacccarggagrwraacwaagaaaagccamagagacaagaccagagtagcctgaacagaggccaagaagggascstgaggcctgtgctgcaggaatgaccctaaggatgctctggrctgkacaggcgaagggggtcctgggaagctgggggatgatctgcttggtgatctctctgctcctccagcagccaggagtccacagcaagtgctacttccaagctcaagccccctgccactatgaagggaaatattttagcctgggtgagtcttggctccgcaaggactgcttccattgtacctgtctgcawcccgttggtgtgggctgctgtgacacatcccagcatcccatcgacttccctgcagggtgtgaggtgcgtcaggaggcaggaacctgccagttctccctggtgcaaaaatctgatcctcggctaccctgcaaagggggagggcccgacccagaatggggctcagctaacacccctgctcctggggctccggctccccactccagctaaactcaactgatcaccctcctgctaactgcccactgctgctgccacttccagggraaccactagcagctgccaatttattctgaataaataaattaatgccamarmdrraaaaaaaaaaaaaaaaaaaaaaaaaaaaaaaaaaaaaaaaaaaaaaaaaaaaaaaaa

SEQ ID NO: 2203 - DNA, 678 bp, Canis familiaris
gccracttagaccccaaggagrwacyaagtaagccwagagacagaccagagtagcctgaacagagccacagaaggaccgtgaggcctgtgctgcaggaatgaccctaaggatgctctgggctggacaggcgaaggggggtcctgggaagctgggggatgatctgcttggtgatctctctgctcctccagcagccaggagtccacagcaagtgctacttccaagctcaagccccctgccactatgaagggaaatattttagcctgggtgagtcttggctccgcaaggactgcttccaktgtacctgtctgcatcccgttggtgtgggctgctgtgacacatcccagcatcccatcgacttccctgcagggtgtgaggtgcgtcaggaggcaggaacctgccagttctccctggtgcmaaaatctgatcctcggctaccctgcaaagggggagggcccgacccagaatggggctcagctaacacccctgctcctggggctccggctccccactccagctaaactcaactgatcaccctcctgctaactgcccactgctgctgccacttccagggraaccactagcagctgccmatttattctgaataaataaattaatgccmcagctgaaaaaaaaaaaaaaaaaaaaaaaaaaaaaaaaaaraaaaaaaaaaaaaaaaa

SEQ ID NO: 2204 - DNA, 685 bp, Canis familiaris
tcagttctctggggttcaccccccsgcaccggtkgtccacccaccracatctkgggtccacccacytgctcctggtgtccaccctccggccccakgkgtgcacccawcagctccgggagtccatcctcctccatctgctggggttcatccccaggccccgggggtgcacccaccggctcctgctgttcatccgcaagccccgggggtkcacccaccagctcctgcagtccacccccaggcccctggagtccaccctccagctcctggggtccacccaccagccccagggatccacccccagcctcctggggtccaccccccacctcctggggtccacccktcagctcctggggtccaccctccagctcctggggtccacccccagcctcctggagttcacccctcmratcctggggtgcaccccccvactcccmtgcccccmatgctgaggcccccmctgccctccgaaggccctgggaacattccaccccctcccccagccmactgaaaagcagccccttctccaggcmagatgggtgtcgtgtgttctggtgttttccttccgagctaagcctggtgctctcgtactgggctgtaccgtgtccccmgcgctcattaaacacctcccctcgtraaaaaaaaaaaaaaaaaaaaaaaaaaaagaaaaaaaaaaaaaaaaaaaaaa

SEQ ID NO: 2205 - DNA, 645 bp, Canis familiaris
ataatagttttgagcgggatcattttggcctcagtgtccttgaccaccccatacctgggaagcatatactatattttaaaagactattttgccagaaacattattgtaataaactttcagtattagtgatgtcacckgtcaccataggtcatatagtccattcttaaagtacttagtatttggttttgttgttcttktgtatgtgttctcttctccccagagttcagtccctaaagttcatactgtccctccatgcagtgcccctagcccagagcccttgacttcgattcctccatgactccatcccgcctgaccttggggagtcttatgtgcattgctgtgaattatattagatgctatcttggtgatatgccctatactggctaaattcaaatcctggaattgtggggcaatctagctgccttaaggacmataaacacatccacacgggaggctggggataaaggttagacttttgtattcagggttttttttgtgtgtgtgtatctttggggtttaaaaaaattgttttcttggagaggtttatgctcaacccatgttctatttcagtgcccaataaaatttaggaagacttctcwrwraaaaaaaaaaaaaaaaaaaaaaaaaaaaaaaaaaaaaaaaaaa

SEQ ID NO: 2206 - DNA, 689 bp, Canis familiaris
ggggaaaaaccgggcagaacagaaaacgaagtccagacgggcccagcctcgagattcgtccgagagcaccgggtctggggggcccgcacccctccggccsccgctgctgggcctgaacgycacggcctggtcaccgtctgacacgtcccagtccagctgccccacgacgcccttccctgcctcgktgccagcgtaccccctgcccgtgttcccagccccaggaatcctgcccacacccggggcggtggcggcggcacccgtggccccccacgccagcttcgcggtgccccccctgcccgtggacgcccggcacgagtttggcctccagccctcgccrttcgccgtccccctggccccggtcatggcactggtgttacccaactatcccctccccgccgtgccccccggcactgccaccaggccttcttccccggccagcctgactttctgtcgcacgtgatccctgcctcgcagcctgagctcgccggtcggacgtcaccccccaaacagccgtgcgcctgtccaccaggcagagcgcgggcccgcggcatctcgcgcggccaccccggcctccccggcgccggcctcggggcccacgggcagggcgtcccctccgctcttccagtcccgaggcagctcccmcmstgcagctcaacctgctgcagctggaggaggccccctgagggcag

SEQ ID NO: 2207 - DNA, 687 bp, Canis familiaris
tgtaaaaaccggaaagaacagaaactgaagtycaacggccaaagcstcgagattcgtccgagagcaccgggtctggggggcccgcaaccccctccggcccccggctgctgggcctgaacgccacggcctggtcaaccgtctgacacgtcccagtccagctgccccacgacgccgttccctgcctcggtgccagcgtaccccctgcccgtgttccccagccccaggaatcctgcccacacccggggcggtggcggcggcacccgtggccccccacgccagcttcgcggtgccccmcctgcccgtggacgcccggcacgagtttggcctccagccctcgccgttcgccgtcccactggccccggtcatggcactggtgttacccaactatcccctccccgccgtgccccccggcctgccccaggccttcttccccggccagcctgactttctgtcgcacgtgatccctgcctcgcagcctgagctcgccggtcggacgtcaccccccaaacagccgtgcgcctgtccccaggcagagcgcgggcccgcggcatctcgcgcggccaccccaggcctccccggcgccggcctcggggcccacgggcagggcgtcccctccgctcttccagtcccgaggcagctcccaccctgcagctcaacctgctgcagctggaggaggcacctgagggc

SEQ ID NO: 2208 - DNA, 656 bp, Canis familiaris
ccagatgggtcctaactgtgggataccatacaaagatggtcactttatcaggttatarctttrgattttgtctcggatggccccytgtaccaaccgttaggagcgaatcccttgggcaatcctgccccaacgacttgtacagaaagtggtctctggagccatggtcaagaatgtgcccagtcgtggtgccytttggagtagactcctaagtacagggtggctgggagcaactgcctcgttccaaaactcgcaaaacagagtcagatgttttgcacacctwgagccagactcttcaaggtttacggagacagtccatacaacaaataaattwtagtgagagtaattccagtcacccagacgtgacaatcggttctggtaaaagagggaaatctgtcctaagcccatcggkkccacgtgacaccctaccacgagtytactatgcatcagccgtgggaaaccgttacaggcatggttggttttgtagattaaataaatagcacagatcagataaaaatataagcagcaattttcaaagttgcagagccactcaatcatttgctagttcagaaaatccaataaatcgtagccttattttactctacttctgttttttttttttttttttttttttttttttttttttttttttttttttt

SEQ ID NO: 2209 - DNA, 656 bp, Canis familiaris
ggtctacccaggattgacaccctatggtatgtttctaccagtgaaatagtccaatatygaaayctaaaacagagcctaccggggracatggttggcaatcctcgcttagggaacccgttaggacggggttgctgaacatgtctttcaccagagacctcggtaccagttcttacacgggtcagcaccacggraaacctcatctgaggattcatgtcccaccgaccctcgttgacggagcaaggttttgagcgttttgtctcagtctacaaaacgtgtggawctcggtctgagaagttccaaatgcctctgtcaggtatgttgtttatttaawatcactctcattaaggtcagtgggtctgcactgttagccaagaccattttctccctttagacaggattcgggtagccmmggtgcactgtgggatggtgctcaratgatacgtagtcggcaccctttggcaatgtccgtaccaaccaaaacatctaatttatttatcgtgtctagtctatttttatattcgtcgttaaaagtttcaacgtctcggtgagttagtaaacgatcaagtcttttaggttatttagcatcggaataaaatgagatgaagacaaaaaaaaaaaaaaaaaaaaaaaaaaaaaaaaaaaaaaaaaaaaaaaaa

SEQ ID NO: 2210 - DNA, 563 bp, Canis familiaris
stccagcttctagcacctttggaaatggtgccgccctctagcgctgcagcacttatcaaccctgtggggcgtggggtcggctgccaagaccgcctgtgaacccctaaaccctccgggcaagcaaggagacgaggaccggggctcttgctgggaaggagatccaggtggagttggcaaagctgtggtcccaaagggttccccaacatccttcagttgtggctcccctgccctccaaagctagggttctcattcctttcccccctcctctcactcccccttcctctctctctccacttagccactgacccctgaacttctgagcgatagcagcctgagccccaggtctccaccagactgaccccgaagaggggcgggataaggaaatcagctcccccctcctcaatgctctgccctccctctggttgctcttgtgtgatcaactttgggtcagagtttactgtgggggctggaggaggccccgtatcctcccagcctccaggctctgacagaaataaactccgaccccaacsaraaaaaaaaaaaaaaaaaaaaaaaaaaaaaaa

SEQ ID NO: 2211 - DNA, 689 bp, Canis familiaris
gccttgattaagccagaatattatgttattcctaatatctgaagggtcatctgataattcakgagtgactttataagaaggtccattctgtatactggcatcctgtttgtgatactgttacatctctgagagtgttgccagtgtacacaattcgaatccttcatattgaaggtgactcatttttctgccacactttttcgacatgatgttggaagtgaggactgacactgattctcaattcaagaatccagtatgttgcacataraagcaatctatttcttgcctatatttgtgttaagtctttctaccaatttctttaagtaaaaatatttttttaaatggatatgaattgtttggatgtattgtaatataattgttttggggtgtgtatatatccattctataagatcataagaataggagtccttgaatgtttgcttctatcactgtgcacatccattgagaggtgttcagagaatgcagttgaatttaacatgtgtgatctgccatgctggaaaagtactattggaataactctgctatgacagtatttgaggtttggctagcaccacaatttttctactgtaaatgtttcactctcctatagctgtcctttgtgaacttctcactttaaagaataaaagtgtttgatacaaaaaaaaaaaaaaaaaaaaaaaaaaaaaaaaaaa

SEQ ID NO: 2212 - DNA, 673 bp, Canis familiaris
tgacattgakttgacattcckgtcacatatcctgctactgctccagaaattgcggttcctgaactggatggaaaaacagcmaagatgtacaggggtggcmaaatatgcctgactgaccactttaagcctttgtgggccaggaacgtgcccaagtttgggctagctcatcttatggctctggggctgggtccatggctggcagtggaaatccccgatctgattcagaagggcgtgattcagcataaagagaaatgcaaccmatgaaggatcaagccactgaggcaggacagagggacctttgataggctacgttcctgctttctttgcatcactcttactcatccrgttgcttcccccmamccccttcacccataattgttactaagtagctgcatcaggcattgctggggggaaaataacagcattgctactgaatttccmaggctacacagggaggggaaaagactggggctttgggaaaccmaaagacmatctgtatcccttctccaggtggggcgatgtgagattccggaaggatgggggagggggtgcctgccgaaagtgggtgcatagcttttttggtttttggagataactcatcaataaaagctgctttcctctggtgaaaaaaaaaaaaaaaaaaaaaaaaaaaaaaaaaaaaaaaaaaaaaaaa

SEQ ID NO: 2213 - DNA, 576 bp, Canis familiaris
gtagcctgggaagtggggtagagctaggaattgggatagaatccccttccttcacagatttgcccagtctgtcttgtgcaaggggccagagaatggtgaatggaggccckcgtagaatgggaagaggctcgtgggktcaggtcccaccccctgctcatctcccctgtcaaccccagccctccccctgcagctgggctgggagtattgctctcctgctttgtaaatagggcacaatcccctttcacaaggccgccatcgcatccaggcctgtgctaggaagctcctgctgggttctgccttcatgtttctcaacactactttgctgatacmaaggcagcatcttctgagtgagaaatcacgtgactgctcagaatgtgtctccctcagcaaatgctcgtccgtttaatggtgatgccttacgtgcaggatctggttactgtgcagtggtcaacacccagaaattaggcaggccagtgtctcgtatcatgccgtttaaaagttcctgatcaaatttgacctttcctccctcaaataaatgtattggtggtgaaaaaaaaaaaaaaaaaaaaaaaaaaa

SEQ ID NO: 2214 - DNA, 621 bp, Canis familiaris
gggcacagctttctgagactgatgtgaatttgagcagtaacaggggaagmsggatctkgagaaaagtccttcgaagagttttgtacaggccaggagttgcctcctgaattatggttaatacgggagtgaagattttcaaagcatcagattgaatgaaatgaaaagttgtcagattctgtattttttaccaatcttcaataatgtaaagattacttttaaaatatttaagttaaaagtacttgaatagtattttgccgaaaagcaagatatgcattaatcaccaattgtatactgtcccaaatgaagcattaccgtgacccctagggcggccaggagccttgagggctgttgacagaactccccaggctctggccccgtctgctcctctcgcaccggggcttcgtagtccctgcgggccacgcccggtcgcagagtgggagccactgcttgcagccttccacctgggcccgcggcgctgtcccgtccccgtctccccagcatgcacgtcacggcgggtgtgcgccgcgggagggtccgaagcagagtctgctcacagcccggaattaaagctatttaacaaaaaaaaaaaaaaaaaaaaaaaaaaaaaaaaaaaaaaaaaaa

SEQ ID NO: 2215 - DNA, 710 bp, Canis familiaris
ttgagaaagcagcccggaactcttccgggttgggccacacaggccaggacatctccagtccaggagccgcgcgcccctccgcggaacgggaccacgttgtactcgtackkgtccgcytccacgcgcgcgaascggaagtgctggcggtcaccggggcctcctggcactcgcgcarkctgcgccacgggtacaccgggcccttggcctcggcgggctcgccgggcctgggcttggcgaggttgatgcggaagccgttgcgcttgagcgcggggtcgtcgtggtcggtgcgccggtaggccaggcgctccaggtagggctgcgccacgcccacggtggccgcgcgcggccggggccgggagggcgcgggctccagctcctccccgcccagcgaggcggtgaccagggcggtgtaggcgtcgggccgggcctcgtcgcagaaggcgggcaggcaggcgccgttgggtccggtgaccgcgctgtcgaarcggccccaggctcgggggttggccgagaagccgggcgcgggctccaggttgaccagcgtgaccaccacgccctccacctgctcgttgggggtgaacttgtcgttggcgtaggcgcgcaccttcacaaagcagcggcggcgctcgggcacgtccaggttgaacagacgccgctcccggatctccacgttgcccmcyaggaagacgcgctcctmcctgcgggcgcgg

SEQ ID NO: 2216 - DNA, 694 bp, Canis familiaris
tgccccatctkggtgaacacgtaccacacggccctacatggggtcatcattggaaagktcgtcaaagtagaggacccmcctgccatcaggtgggcaccatccaktcagctcagtacatttcttcccgtaggtcagttgacttcttttacccvdacmcmaagattttacgctgagcagatgctctgtcmcggttgtgcttgtgcmggtctgttatccttgcmactcgtatgaaaaagtaaactatcctttggaaaagcacagcgcatttctctctccgcygcagtaacgtggggggtggtatcttaaacagcgaggcctcccgaacccmgtcgggctggtcccccccccmaggtccmatttggatatctgctggttgagagaaggggccttaggagggctttgtgagcttccmgagccttctgtttcgtcactcagatwcctgaactggagtcggggacmaagtccgttttgtcttttgtgtcyttgcttttctcctctcactgtgaaccgtagcgtccgccccmagtcatacmctggacccsccgcctgctgggacaggactgtgggtttcttggtcacatctgtgttggtgtttaatgcagtgtggacgtgttttaaaataaaacakatgattgcgtgtaaaaaaaaaaaaaaaaaaaaaaaaaaaaaaaaaaaaaaaaaaaaaaaaaaaaaa

SEQ ID NO: 2217 - DNA, 637 bp, Canis familiaris
agaggacccgcccacaaccgccaatcaggtgggcaccatccaattcagctcagtacatttcttcccgtaggtcarsttgacttcttttacccswacaccaagattttacgctgagcagatgctctgtcacggttgtgcttgtgcaggtctgttatccttgcaactcgtatgawaaagtraactatcctttggaraagcacagcgcatttctctctccgcygcagtaacgtggggggtggtatcttaaacagcgaggcctcccgaacccagtcgggctggtcccccccccaaggtccmatttggatatctgctggttgagagaaggggccttaggagggctttgtgagcttccagagccttctgtttcgtcactcagatwcctgaactggagtcggggacaaagtccgttttgtcttttgtgtcyttgcttttctcctctcactgtgaaccgtagcgtccgccccaagtcatacactggacccgccgcctgctgggacaggactgtgggtttcttggtcacatctgtgttggtgtttaatgcagtgtggacgtgttttaaaataaaacakatgattgcgtgtaaaaaaaaaaaaaaaawaawaraawwaaaaaaaaaaaaraaaaaaaaaaaaaaaaa

SEQ ID NO: 2218 - DNA, 694 bp, Canis familiaris
aaatggaggatgaagataacaattgatgtgttmcagcagcagacaggaggtgtytactaaaargsracctgctactttactccagaactctgttcctccagaccmagaagacattctcrratagaaagccgtaattkggttccaccacatcctgactactacagtatagttttctckadtcttkcakkktccccktccccmktcckktattgtacataaagtaactgtgtatgtgcacaagcatattgcatwtttttkttttaactaaatggccmmtggtatgttttgatcgacatcmaatggagatgggatgggggaaaatactgcttctgtgaaaataccccctctctccmttagtggcatgctcmgtcagctcttatctttatattccmgtaagttattttgctctcactgtttaacmaamaaaaaagracmacatwaaaatccttgcataccttgttcgattggagaattttaatgtttttcatttatcattgtaaaaccmaggacmattttataacttttttgtacgtagctgttacatgtagggcmatctgtctttaagtagggataaattactctaaaagamatgaatcctagatagttttcccttcmagtcaagcgtcttgttgtttaaataaacttcttgtttaaaawraaaaaaaaaaaaaaaaaaaaaaaaaaaaaaaaaaaa

SEQ ID NO: 2219 - DNA, 712 bp, Canis familiaris
agctcgctcccacgcagattgatttacarggccagaaagctagctgaacagatrtktycagggaattattcykttkttccgcaatagttggattwatctacgggtacgtggccgaacagtttgggtggactgtctatatagttatggccggatttgctttttcgtgtttgttgacacttcctccatggcccatttatcgccggcatcccctcaagtggttacctgtccaagactcaggttcagaagacaagaaaccgggagaaagaaaaattaagaggcatgctaaaaataactaattagggtttccatgatttagctttactattgcacctgcttccgttttgtgtgagatgagctcaattgttttcatatccvaaacatgagcttaaacccatcgctgctctttcagcacagctgtgtgtagattttgttctctttatagttcacttctaactcagctggtttttgatttataaatactttagaccatctcttcataatcttcgtctgaaatgagaacagaaaacacaagtatgcmaagcttctttcaggtctacaaaaagtgacmaatgcctcataaatgatagtacaatttaactgtcamagttttataattcattacgagtggttaagttgttttaatgttttcaattaaaactcaatgcaarwmwaaaaaaaaaaaaaaaaaaaaaaaaaaaaaaaaaaaaaaaaa

SEQ ID NO: 2220 - DNA, 606 bp, Canis familiaris
catcaattctaatctcacctggtacccttcagatagttatggaggagactcttttgtggtactgtttcatcttttttgttccctcaatttttctcttataagkttatctgatattgtgawgtgttcatgaaatattattccrgktattatactttgctgtagtagagactattcatcatggatatttctgctgcccatgaactaaattgtttgccaaaaattaggtacttagtttattcttactgatcagctctactcttttggacccaagcaacatgagagccaatactgttcacacctgttaggatggagttgcmactgtcatacatttggaatgttatgatcccmagcagtctttatataatttgaattacacttgtatgttaggtttttgataaamtttggcccatttttacagaagaaattatttctctgatcatttggtcctatctatttaggaatatgtaaaactggatttttttttttttaaggtaatatgtgacccaagttaattttcttcctaaggcctaaataaagaaaaagcagtttccccataaaaaaaaaaaaaaaaaaaaaaaaaaaaaaaaaaaaaaaaaaaaaaaaaaa

SEQ ID NO: 2221 - DNA, 647 bp, Canis familiaris
agcagttgcccttatggattcccctggcctagccagctccctatttataacactagtggtgtaagcctaggcttcagactctgctagcgccgctctgatccccccgcagaatcagggtactccaaccatactggcggcctgtgagtggtggtggctacctacttccacttagcctacttcttgagcccccagcagttgcctagggcccagtccaacaccataggccgtgcccatctggcaacagcccagttggccaggggaggtttgttggtgttccagttggcagccctggttgtgatatacttgcgtgcccaggccttctgccacgccagacttggtttgatctccccttgaggactggccggggcagctgcctgcgtgacccacaactacacattcctcgccatcattgcggtggagaacattggcagcccccacttctcacctgccccctcccacaccctcactcacaagttgtgtgggccactccaggggcacctggcagcacaaaccctactcaaaggccaccctagagtctaaggagagaggagaagacagatatagcattcaccgaagcacaaacctgccctcagccttatttcttcataaatwgggggtkkttttttttttttttttttttttttttt

SEQ ID NO: 2222 - DNA, 647 bp, Canis familiaris
tcgtcaacgggaatacctaaggggaccggatcggtcgagggataaatattgtgatcaccacattcggatccgaagtctgagacgatcgcggcgagactaggggggcgtcttagtcccatgaggttggtatgaccgccggacactcaccaccaccgatggatgaaggtgaatcggatgaagaactcgggggtcgtcaacggatcccgggtcaggttgtggtatccggcacgggtagaccgttgtcgggtcaaccggtcccctccaaacaaccacaaggtcaaccgtcgggaccaacactatatgaacgcacgggtccggaagacggtgcggtctgaaccaaactagaggggaactcctgaccggccccgtcgacggacgcactgggtgttgatgtgtaaggagcggtagtaacgccacctcttgtaaccgtcgggggtgaagagtggacgggggagggtgtgggagtgagtgttcaacacacccggtgaggtccccgtggaccgtcgtgtttgggatgagtttccggtgggatctcagattcctctctcctcttctgtctatatcgtaagtggcttcgtgtttggacgggagtcggaataaagaagtatttawcccccammaaaaaaaaaaaaaaaaaaaaaaaaaaa

SEQ ID NO: 2223 - DNA, 530 bp, Canis familiaris
cgtggtgtgtgtatacgtggcttgtggatgaaggtcaatggcaatttaatctaatgattctatgcttgggctgaaggacatggcaccagtatccctgatcacccggattccccctgctttctgaagatgctgcagggaaatctaaaggagaccttatttgcctggcctgaccaaaaatcccatgagatgatccagaagtctgaaagaaccttgagagaaaacccgtgtgcctacatcaacgattcccttggcttacatcgagtagagaacattagccatacagaacctgccgtgagccttcacttgtacagcccaccttttgatacatgccatgcctttgatcaaagwacaggacataaaaacmaagtcaccatgacattccatagcmaatttggaatcaggactccatktacagcttcaggatcmctggagaaccactaaggagcatcagatcctttaaggttttagcttaaggtctgctaaaaaaaaaaaaaaaaaacaaaaaaaaaaaaaaaaataaaaaaaaaaaa

SEQ ID NO: 2224 - DNA, 884 bp, Canis familiaris
  misc_feature (561)..(561): n comprises a, c, g, or t, or includes no nucleotide
cctacgagagcgacccgccgagtggccgcgtacgccaagttcgaccagtacagggtatactcgaaatcttgtggatgaaggaaatggaaaatttaatctgaatgattctatgttggggtgaaggacatggcagcagtatccatgatcacacggattcccactgctttctgaagatgctgcagggaaatctaaaggagacattatttgcctggcctgactaaaaatccaatgagatgatcaagaagtctgaaagaaccttgagagaaaaccagtgtgcctacatcaacgattccattggcttacatcgagtagagaacattagccatacagaacctgccgtgagccttcacttgtacagcccacctgtttgatacatgccatgcctttgatcaaagaacaggacataawaacaaagtcaccatgacattccatagcaaatttggaatcaggactccatttacagcttcaggatcactggagaacaactaaggagcatcagatcctttaaggttttagcttaaggtctgctaaaaaaaaraawwaaagaaaaaaagttttgcnctggacaggaacagcctctaccatctgctctccagtaatagttatgaagccaatatttagatctcttgcaaggcagatgctaattgtaaagcattgagcaagcaatagtgccccaagctattgcagaagaaaaatcccagtaaaggaaaaatgggctcagaattttcaagaccaattcaagcactctcctggttttctcctctaaattcaatggaaccatatgggggaatatcagtgaagatttttagagcttttggaagccctttggtctctgaattgtaattagcaataaaccaaaataagaaaccccaaaaaaaaaaaaa

SEQ ID NO: 2225 - DNA, 731 bp, Canis familiaris
gagaccagaggggaatccagtcattggtgataccgggggctttccacgtcctcatttggtgstggtgcttttcccttggctttttcaccacccgtcttcaacacccatgagccattccgtcggggtacargtgtggatctgggacagggtcacccggcctccagctggcaggactccctcttcctgtttctcgccatcttcttctttttctggctgctcagtatttgagctttgtctccttcctgcccacctccagccagaggagraycagtattgggggtccttgctgacccttccttactcctggcccctccctcccaacccctccgtttctactggctaaggccaamcctggccactttgtaggagggtgtggggaggaggtgtgacatctgtgcagaggatgggagaaacttctgccctgaactcgctgcgtagcatcctaactcccagctctgggacaggaggacagacggaagaggatgtctgtttcttccctctcctgatcttttgctttcccccacatttgttgatttgatgttgaaagatgggcaaggctcccactgactctcccctactttacccctgttgacttaatttttctctccccagtgtctaatatgggttctgattcttaagtccttccttcccttcactacctcctttattataaattcaataaacaaggtgagatgtamwrawrrraaaaaaaaaaaaaaaaaaaaaaaaaa

SEQ ID NO: 2226 - DNA, 3898 bp, Canis familiaris
gcggggacgcggcggagcagggcccgtgtctcggcgggggccggcagacaggtgtgcgggcggccgggcggcccgagctcaggcggctccaggcccggcccgcggtcaggagccgggagccgagcggggaccccgcgcccgcaacctagtcccggccccgcccgtgctctgcttggccgcggggtgcggggatcacggccgggccgggccacccgaagcctgtgttgggccgggccgggccggggtgggtgggggcccgcccggcccgcccatgggctcaggatgccggtgcggaggggccatgtcgcgccgcagaacaccttcctggacaccatcatccgcaagtttgagggccagagccgcaagttcatcatcgccaacgctcgggtggagaactgcgccgtcatctactgcaacgacggcttctgcgagctgtgcggctactcgcgggccgaggtgatgcagcggccctgcacctgcgacttcctgcacgggccgcgcacgcagcgccgtgcggccgcgcagatcgcgcaggccctgctgggcgcggaggagcgcaaagtggagatcgccttctaccggaaggatgggagctgcttcctgtgcctggtggatgtggtgcccgtgaagaacgaagatggagctgtcatcatgttcatcctcaactttgaggtggtgatggaaaaggacatggtggggtccccgacccatgacaccaatcaccgtggtccccccaccagctggttggccccaggccgagccaagaccttccgcctgaagctgcctgcgctgctggccttgaccacccgggagtcctcagcgcggccaggaggtgtaggcagtgcgggcgccccgggggccgtggtggtggatgtggacctgtcacctgcggtgcccagccgcgaatcgctggccctggatgaggtgacggccatggacaatcacgtggcagggctggggccgatggaggagcagcgtgcgctggtgggctccagctccccacctgccggtgcacctgagccactcccgtcaccccgagcacacagcctcaaccctgatgcctcaggctccagctgcagcctggcccggacgcgctcccgggagagctgcgccagcgtgcgccgggcctcctcagctgatgacatcgaggccatgcgtgcagggctgcccccgccacctcgccacgccagcaccggggccatgcaccccctgcgcggcggcctgcttaactccacgtcagattccgaccttgtgcgctatcgtaccattagcaagattccccaaatcaccctcaactttgtggacctcaagggggaccctttcctggcttcacccaccagtgaccgggagatcatagcacccaagataaaggagcggacccacaatgtcactgagaaggtcacccaggtcctgtccctgggagctgatgtgctgccagagtataagctgcaggcaccacgcatccaccgctggaccatcctccactacagccccttcaaggcrgtgtgggactggctcatcctgctgctggtcatctacacagctgtcttcacaccctactcggccgccttcctgctgaaggagacagaggagggccccccggccmccgactgtggctatgcytgccagcccctggctgtggtggacttcatcgtggacatcatgttcattgtggacatcctcatcaacttccgcaccacctatgtcaatgccaacgaggaggtggtcagccatcctggccgcattgctgtccactacttcaagggctggttcctcattgatatggtggctgccatccccttcgacttgctcatctttggctctggctctgaggagctgatcgggctgctgaagacagcgcggctgctgcggctggtacgcgtggcaaggaagctggaccgctactcagagtatggggcggctgtgctcttcctgctcatgtgcaccttcgcgctcattgcacactggctsgcctgyatctggtatgccattggcaacatggagcagccgcacatggactcccgcatcggttggctgcacaacctgggggatcagatcggcaagccctacaacagtagtggcctgggtggcccctccatcaaggacaagtatgtcacggccctctacttcaccttcagcagcctcaccagtgtgggctttggcaatgtctcccccaacaccaactcggaaaagatcttctccatctgtgtcatgctcatcggctccctcatgtacgccagcatcttcggcaacgtgtcagccatcatccagaggctgtactcgggcactgcccgctaccacacgcagatgcttcgggtgcgggagttcatccgcttccaccaaatccccaaccccttgcgccagcgcctggaggagtatttccagcacgcctggtcctacaccaatggcatcgayatgaacgcggtgctgaaaggctttcccgagtgcctacaggcggacatctgtctgcacctgaaccgctcgctgctacagcactgcaagcctttccgaggggccaccaaggggtgcctgagggccctggccatgaagttcaagacaacacatgcaccgccaggggacacgctggtgcatgctggggacctgctcaccgccctctacttcatctcccggggctccatcgagatcctgcggggggacgtcgtcgtggccatcctggggaagaatgacatctttggagagcctttgaacctgtatgctcggcctggcaagtccaacggggacgtgcgggccctcacctactgtgacctacacaagatccaccgggacgacctgctggaggtgctggacatgtaccctgagttctctgaccacttctggtccagcctggagatcaccttcaaccttcgggataccaacatgatccctggatctcccggcagcgcggagctggagggcggcttcaacagacagcgcaagcgcaagctgtccttccgcaggcgcaccgacagggacccggaacagccaggggaggtgtcggccttggggccgggccgggcgggggcagggccgagtggccgaggccggccaggggggccgtggggggagagcccatccagtggcccctccagcccggagagcagtgaggatgagggcccaggccgcagctccagccccctccgcctggtgcccttctccagccccaggccccccggagagccaccgggtggggagcccctgacggaggatggtgagaagagcagcgacacctgtaacccgctgtcaggcgccttctctggagtgtccaacatcttcagcttctggggggacagtcggggccaccagtaccaggagctgcctcgctgccctgcccccacccctagcctcctgaacatccccctctccagcccatgccggcggccccggggcgacgtggagggcaggctggatgctctccagaggcaactcaacaggctggagacccggctgagtgcagacatggccactgtcctgcagctgctgcagaggcagatgacgctgatcccacctgcctacagtgctgtgaccaccccggggcctgggcccacctccacctcctctctgctgcctgtcagccccatccccaccctcaccctggactcgctttctcaggtttcccagttcatggcgttcgaggagctccccccgggggccccagagctcccccaagacggcccccctcgacgcctctccctaccgggccagctgggggccctcacctcccagcctctgcacagacatggctcagacccaggcagttagtggggctgcctggtgtggacatgtggctcacccagggttcagcgcactgcctgggcccctcccctcagaggccctgcccgggaggccctggccgagacaggggagaggaccaaggaccgtgaaggcatagcccctcccc

SEQ ID NO: 2227 - DNA, 627 bp, Canis familiaris
cccagcagagcaaccacccagtctccatcccgggacagcccctccagkgattgcccctgcagaatggctkgagtgaggacgaggctctgcaacgagcmctggaactgtcactggcagaaaccmaaccccaggtcccaagttctcaggaggaagaggacttagcattagcacaggcgctgtcagccagtgaggcagagtaccggcagcagcaggcccaaagccgcagcttgaagccgtccaactgcagcctgtgctagggccctgggcttggggagggaggctcaactgaggaggactgtggcccccacacctctagggtacactgggagaggaggctgggagcagccaggagtgaagacgagcaggccacctccagggagcagcaggagcagcagcttgtggagcggagcctacagatggccctgctggcctctccagctgcataggagagagcagttacaaccgttggtggttgggccctgggagagtgctggccaggccccacgcagggcagccccctgcatcgtgtcatccccctttacgctggggctgcccccatctctaggggcaagggggtcctggaaggaataaaggatcttggcagtcaamaaraaaaaaaaaaaaaaa

SEQ ID NO: 2228 - DNA, 669 bp, Canis familiaris
tgagatcttctgtgttcaacatcaatgaccgtgscagaaagccctkgatgttctagggtgcgtacacttccctccgctgaagaagaattaggacaccktcatcagcttccagtgacacggcaggctcatgcaaatctgttaggacagtygtgcggagaatggcatgctcgtgaggatgcacatctcatcatcagtagtgatgttcagaggtgcagcatgttgtccaagccaggttcacacacatcagtccccatcgaggggtatgctggcatcacacctggatggtgtgccatcacatatcaccagatttaggggaagggctggggtggaagtatcagtcatccatcatgggtctttgtcacttggaagctcagaaacactgctggcagtctgggcggtgggcccctgagccttygtcccytgtgttaaggactccatccctccccggacactatccctccattagctcctacttccctccattgcccacgaggtttcaagcttcattctcaagatccaatggggagcatggtctctggctctttttgcatttaacttctttttcctgyttttcatcgatggtaacctttgagtctgtgaagtggtaaaataaaaaaaaaawggttgagacccctgaaaaaaaaaaaaaaaaaaaaaaaaaaaaaaaaa

SEQ ID NO: 2229 - DNA, 561 bp, Canis familiaris
ttggaagcagattgttctcactgcgatattgggacactacaggtatctgtccccaggccagcagggacctctgaagccttcttcatggcctggctctttgttttgttttgttttttttccatcctgtggtttttctaatggatattcaggacttttgtaatctcatagctatttgagctccactttccraattttaagaactttaattgaaagtttaaattgaaggtgctgtttgtagacacataacagcccmatgraagcccagccatcatgacaaacccttgagtgttgtcttgagaaaatgatgctggtcatcacagcttcagcatctcctggtttttgatgttcggctcccccggctgatctcagagtttcctggcttttcctcctccccctctcacccctttgctgtcctgtgtagtgatttggtgagagaaattattgctgcctacccccccacccccacctgcccgcactacgtatgagtttcaagttttattattgcaataaaagtgctttatgctggcttttcwmaaaaaaaaaaaaaaaaaaaaaaaaaaa

SEQ ID NO: 2230 - DNA, 664 bp, Canis familiaris
gtagatgcctgagaagagccmccmcctccttacataccktgcctgaagaawttctgcctttgtcrataaaccctataccagctttkttgtcttgktkattttacagaatgctgcagtacagggctcttcaaacttgtttgatataaaatacagtktcctttgtttaagcatttatttttaaacactracaagctttttggacatctattcaaagtcaggaagtcaggtttggggttttttgttttttgttttgtttttttgtttttttttgtttttgtttttttggtaagtctattacattttaatagtttctggagacaatctaggttaagcaagagcmaagtgccmttgtttgcctttaagggggggagggggtattctctacacattttcttttttaactttgcactttctttatataatagtttgcattttggttatttgctacccctggatactttcaggaagaatgaattaaatattcagggtgagtgagttaggtataagatctgaagttttcagctgtgaaaacaggaaaaatatataacattttaacttgactgtggaaaatgacggttgcatgtttctaatttgtatgtttccatctttgtgataagatgctttaataaatctcttaaatatwaaaaaaaaaaaaaaaaaaaaa

SEQ ID NO: 2231 - DNA, 682 bp, Canis familiaris
tgtcggtctggtgtgtgccctaccacctactgtggcacataagaaggcttcttattctgcagagtacgagcagtccaaacagggcagcaaggtcctaacatgctctaggctgaggtctgggagaggagccttgtaggtgtgccaggagttraaggggagtggtggcaaccagaggtcaaggcaaggtaagtaaagtggcaaaattttgggcccagggaggttgctcaaggtcagttgcggctgcagaaacacagctactaggcccattgaggggccattgagcaactacagctgwtcgctgggacacggggtgggaggtccgaggaagtttcctgccccttgtagcgattctctccacagtggagtatcagacccaagggacagggatcttactaaggttaagccaggtgcttgaagatttatcaagactcggttgcaacagtgcaactactgcaaagatacctgcagctacctggccagtgrcggaggcctcaagtctcctggtgcctcaatgagccccaaaggtacaagtgctgtgttgcttggcaagggggtggtgggggaagggtgcagtatcagtgagccagctgctacatcacagacaactcataactgttcaagattcattttataaatttgtttcagtaaaatttagctttaatttgggctttagaacactttt

SEQ ID NO: 2232 - DNA, 1885 bp, Canis familiaris
gtcgactttggcacaatgaagtgggtaacttttatttccctcttctttctctttagctctgcttattccaggggcttggttcgaygagawrcatayaagagtgagattgctcatcggtacaatgatttgggagaagaacatttcagaggcctggtgctggttgccttttctcagtatctccagcagtgtccatttgaggatcatgtgaaactagccaaggaagtgactgagtttgcaaaagcctgtgctgctgaagagtcaggggccaactgtgacaaatcccttcacaccctgttcggggacaagctgtgcacggtggcctccctccgggacaagtacggggacatggccgactgctgcgagaagcaggagcccgacaggaacgagtgcttcctggcgcacaaggacgacaacccgggcttccccccgctggtggcccccgagcccgacssgctgtgcgccgccttccaggacaacgagcagctgttcctggggaagtacctgtacgaaattgccagaagacatccgtacttctacgccccagaactcctgtactatgctcaacagtataaaggagtctttgcggagtgctgccaggccgcagacaaggccgcctgcctgggmcccaagaytgaggctttgagggaaaaagtactgctttcatctgccaaggagagattcaagtgtgccagcctccaaaaattcggagatagagcctttaaagcctggtcagtagctcgcctgagccagcgatttcccaaagctgactttgcagagatctccaaggtggtgacagatcttaccaaagtccacaaggaatgctgccatggtgacctgctggagtgtgcagatgacagggcggatcttgccaagtatatgtgtgaaaatcaagattcaatctccactaaactgaaggaatgctgtgataagcctgtgttggaaaaatcccagtgtcttgctgaggtggaaagagatgagttacctggtgacctgccctcattagctgctgattttgttgaagataaggaggtttgcaaaaactatcaggaggcaaaggatgygttcctgggcacgtttttgtatgaatackcaagaaggcatccagagtactctgtctcattgcttttgagactcgccaaggaatatgaagcyacactagagaaatgctgtgccaccgatgatcctcctacatgctatgccaaagtgcttgatgaatttaaacctcttgtggatgagcctcagaatttagtcaaaacaaactgtgaactttttgaaaaacttggagagtatggcttccaaaatgcgctcttagttcgttacaccaagaaagcaccccaagtgtcaactccaactctcgtggaggtctcaagaaaactaggaaaagtgggcaccaaatgttgtaagaaacctgaatcagagagaatgtcctgtgctgawgactttctgtccgtggtcctgaaccggttgtgtgtgttgcacgagaagaccccagtgagcgagagagttaccaaatgctgctcagagtccttggtgaacagacgaccatgcttttctggtctggaagtcgatgagacctatgttcccaaagagtttaatgctgaaacattcactttccatgcagatttatgcacacttcctgaggctgagaaacaagtcaagaaacaaactgcacttgttgaactgctgaaacacaagcccaaggcaacagatgaacaactgaaaactgttatgggagattttggagcctttgtagagaagtgctgcgcagctgaaaataaagagggctgcttttctgaagagggtccaaaactcgttgctgctgctcaagctgccttagtctgaaagaacacaataacaaacatctcagcctaccctgagagtcgac

SEQ ID NO: 2233 - DNA, 657 bp, Canis familiaris
ccatgcccgcctcgggctctgggcaggcgagcctgcrgccctgctacagcacaacagccagccccgcccaagtggarttgcctccatgccctgggaagaggttccagctggagcttgaggagatgctggtccctaggaagatgtctatcagccccctggagagctggctgagcgcccactacctcctacccagactagaggccagggccccagggaccctggctccatcccaactctatgagtgtccgcctagccaggtgggccagggggctgagaaggggatggaggaggtctgggatgctccccagatgcagtgcmaaaatgtgctgaagattcgccggcgaaagatgaaccatcacaagtaccgtaagctagtcaagaggacccggttcctgcggcggaaggtccgagaaggacgcctaagacggaagcagatcaagttcgagagagacctgaggcgtatctggctgaaggcaggcctgaaggaagcccctgcaggttggcagacccccaagatctacctgaaaggcaaatgaatctagtgctcctctcccctgacctattactgctggcaacccactgtaataaatgttctggaactcmwmwrwmaaaaaaaaaaaaaaaaaaaaaaaaaaaaaaaaaaaaaaaaaaaaaggg

SEQ ID NO: 2234 - DNA, 582 bp, Canis familiaris
catgcacatttcggcagttctgttcccctcaccctcctccctgctggggttttgtggtagcaattttgtctacccatccatggtatggtcttgcctgagacactaactaaacccsactccgttcattttacagaaggggaagctgaggctcagagggcatttttgaatagtgttcattcactattttgagactcggtgtggactttttgagcaccttattttaagtcattcgttctagggaaatcaaaccctttttacaaaggagagaagccaaatatgttgaagtgaagaagcccttgggatttctgaattttgctgtgtatttggcatacaccatagaacaggccctttattattgctgggacataaccagacctggataccttaaggcctcacagccttaaggggataaaatattaaattattaaaggaattgaaaattgtggattcttttttcaattgtcacctgttttcaagacttaaatgctataaacttctgtgggaatgatactgtatctatattcattgatggcatttaccaaaaataaaaagatggtctccagggaaaaaaaaaaaaaaaaa

SEQ ID NO: 2235 - DNA, 654 bp, Canis familiaris
tgcctgtgccccaggacctgcatccccccctccacykgcctccascccctccctctgsccccgggggccccctctcgccatctgaggtctccccsrrratccctcccssctgaggcycccmaycacgtwcgcagacacckcmgcctgcatccggarggcagccccccgccctycgagacactcatcctgagctytgaggaccccmggacctagtgatgtgacccatctgcccgcccagacacccctccctgcccgccccaccccgaggtcccttcttascctgacacccctctcgttattccaggagycctgraatcccmctttgccctaaggattckgtycctgccaccccttagaytccttcgaggggtcctgagacccctcgtgagkttacctagccccccgtgcccccgacagacccaccactctcatacacggtgccagcacccgctgcctgcagtcaggcgcccctgcccggtgtcctcagytgcccctcgcccgcggccccccccmmcagagctgctccttggggggggggtgctgtttgagagtctttgtgttgcacmttaaaactcaacmatttarammwrmmaaaaaaaaaaaaaaaaaaaaaaaaaaaaaaaaaaaaaaaaaaaaaaaaaaaaaaaaaaaaaa

SEQ ID NO: 2236 - DNA, 755 bp, Canis familiaris
aagtttcgcgctcaccactcatgctcagacccttgtcctctgcagcacgtcattacctactggtcaaggagactgccaccagaagatcgatgacctcttctcggggaactgtacctcattgcattcasccatcgtgtgccygtgatcatgatcttcgagatgatcctgagcamtggtgctctgctgcggcatccggmacagctccgtgtactgakcggccccggctgcacctkctkcggggaggtgccsctgggaaccctgcagggcccctagagtgwccggacattctgaggaggggccgtcagcgcctgtgtatataacttctctggtattactctgctacacttattagcctttttacttctgaggttttctgtcctgaagtcccccgttaccttttggggctgaagtcacctagagacggcgtgtgagtggsccttggggaccgtgaggcmggggccgctctgcttctgcagctgcttgggggctccgcctgcttagtcaggcctctcccrggggccccggggcccacccacctgcccacgggctgcacggctcatgccttttaaccctcgttcctgtcgccacttgtcccgagccgrgtctgccagcagccttcaccttcagtgcacctgtcctctctaactcgtcaccttcagctgtaattacatcttcaaagtcattcaataaagaaggaaaaaccgggcatgctaaaaaaaaaaaaaaaaaaaaaaaaaaaaaaaaaaaaaaaaaaa

SEQ ID NO: 2237 - DNA, 615 bp, Canis familiaris
gattttcaaatatgtaaacggtgaacctccactttgtataaattttwragtgtcagactatccatgtgtacacktgctttgtttttcawtacctgtagcttcaggcagatttgcaacagcaaattaatgtgtaaaattggattattaccacgaaaactgttcagtcgtagctgtctaatcagatcttctctcgggaggatttgatgcgagttactgacgagcctcagcaaacccaaagacgctaacagtattttgagaagttgctgcagattcctttggccgctgtatttgttcatttcttgcaatttgaaggtacgagttaggggtttaagggaaaaaaaaatcagtttctgttcttaaaaatgcatttaagttgtaaacgtctttttaagcctttgaagtgcctatgattctatgtaactcgtcgcagactggtgttcatgagaatatatatcggtttaaaaaaaaaaagttggtattttataagcacagacaattctaatggtaacttttgtagtcttacgaatagacataaattgtaatttgggaacataaaaactactgaataaatcacgtggcctaatgttgaaaamrwmaaaaaaaaaaaaaaaaaaa

SEQ ID NO: 2238 - DNA, 770 bp, Canis familiaris
tcctcctctctacctgcttgtgagagagawgagtcagagaggcaaggtacttgctcatggccacttcgttccytcccacgtgttggaccmagacccctcccrccacctggctccgcccagagggctagggaktggkagccaagccmagcrggcactcaagcgagagstgagctttcctgcattggttttgtctgcttccagtaacctgtaagcctgagttctgatggcaaggggcctygtcctcagggccmaagcagtagcgaggggaggccagtgcttcmrggcctcggctgacgggcctcggctgaaggcaacctctgctccagatagatggtgccagtggcttattaattccgatactaatttgctttgctgaccaaatacctggtaccagagggtggggaggcagaggcagggagcagtgtcgtggccctggggcccagccccaaatggggggcattgtacatagctatgaagaaaacacmaagtgtataaatctgagtatatatttacatgtctttttaaaagggtcgttaccagagatttaccccttgggtaagatgctcctggtggctgggaggcatcagttgctatatattaaaaacmmagaaaaaaraaaaaaaaaaggaaaatgtttttaaaaaggtcatatattttttgctacttttgctgttttatttttttaaattatgttctaaacctattttcagtttaggtccctcaataaaaattgctgctgcttcatttttaaaaaaaaaaaaaaaaaaaaa

SEQ ID NO: 2239 - DNA, 652 bp, Canis familiaris
gtttcttttatgatattaagaagcaccttcagttttgcmaatgcccgtgaatctgagcaacctggcgttttcctgttgggtctgaaaacctggctgktggaggctctggattcagctagagaagccttaggaagggcagcttccgcacccggccacccttcacatctgtcctcagctccggactgcgggcgtcccttccccgctcccccatttccaagcttaatttaggaaaccctgagccacgtacccggctttgcagccgaatttattaggtgtacgtgatgcattttgccttggaacctgagttactcattttaaacmatgatctctgtttttttggtggtgaccmgtgaggaccaggraacaaccccacatcctggctaaaaatctcttctcrgcttagaggagtaacagtgctttctgcttcttgggtttycctgtttccagataccmaacagtcttcacccctctgccttgtggyttcatagcccmatagggtgggattaaattgcttaagagggaggaagcataaggggctgacggggagcgtcggtgcaagatccctttccacgtggcctctctctgcaatgctgtacgtaataaagtgtgcacttttactcmaaaaaaaaaaaawaaaaaaaaaaaaaaaaaa

SEQ ID NO: 2240 - DNA, 537 bp, Canis familiaris
ataaagggtgctgacggtgagagcaggccagctgagacccagcagcagcgtgctcacagacccagacagaaccgacccaccatgcggtccctgatggtccttgccctgctggctgtggccgcactctgcctctgcctggctggtccagcagatgcaaagcccagcagtgctgaatcccgcagaggtggtgcagccttcgtgtccaagcgggagggcagcgaggtggtgaggaggctccggcgctacctggactctgggctgggcgcyccrgtsccstayccggayccmctggagcccaagagggaagtatgcgagctcaaccccaactgtgacgagctggctgaccacatyggcttccaggargcttaccagcgcttctatggcccggtctagagcggccagccccactctccaccccctcacccccccttctcccagaacccctcccttcccctcaccctgacctccctgccctgcaagtgtggggtccttgtcatcacagctgctccagaataaactccagaagaggaaaaaaaa

SEQ ID NO: 2241 - DNA, 684 bp, Canis familiaris
aacgacgtctaggcctggccattgggccatcgacctggtctcgtgcatcggcacggatgtggtccggcggtcgccggattctccggaaagacctcgttgtccggccaaccttctactgctcgcgtctcaaccgatgaagatttgtccgmatttgtagacaaagaacttcaactaggtccggttggtggcgaacgccatcaagaggaagggatgggctccggggtatgagttggcccgagggacggctatgttttccgccagacttacaccgatcgtcggggagaacaggaacgcaccggaccgtcgagtccaggcggtgaacytctttcatcccatgggaggagggtatcagaacaaaaacgcaatcctccttggacgtcgggtgaacctcctagcggtcaacggtagagcaaactttcgttaggtccccgcggtccgtgagcaacttccgtccaactaggaccgactaagacggagggtccaccacaacaccaaccaaaaccggwacatggattatgccaacaacaaagacgttatcaccgtagccaaagaccggcaaaacaatctccacaacaaaattcagaaatagagacacctggtgaacagggatccagtggtcctgtcacgggaataaaattcagttattgatgraaaaaaaaaaaaaaaaaaaaaaaaaaaaaaaaa

SEQ ID NO: 2242 - DNA, 684 bp, Canis familiaris
ttgctgcagatccggaccggtaacccggtagctggaccagagcacgtagccgtgcctacaccaggccgccagcggcctaagaggcctttctggagcaacaggccggttggaagatgacgagcgcagagttggctacttctaaacaggcktaaacatctgtttcttgaagttgatccaggccaaccaccgcttgcggtagttctccttccctacccgaggccccatactcaaccgggctccctgccgatacaaaaggcggtctgaatgtggctagcagcccctcttgtccttgcgtggcctggcagctcaggtccgccacttgragaaagtagggtaccctcctcccatagtcttgtttttgcgttaggaggaacctgcagcccacttggaggatcgccagttgccatctcgtttgaaagcaatccaggggcgccaggcactcgttgaaggcaggttgatcctggctgattctgcctcccaggtggtgttgtggttggttttggccwtgtacctaatacggttgttgtttctgcaatagtggcatcggtttctggccgttttgttagaggtgttgttttaagtctttatctctgtggaccacttgtccctaggtcaccaggacagtgcccttattttaagtcaataactacyttttttttttttttttttttttttttttttttt

SEQ ID NO: 2243 - DNA, 668 bp, Canis familiaris
cgkttcagracscgtaagatgtagaatwagtactgttctgggcaaaggaagtaggtcccagctcactggagtggtgtctgscgtagccaaacttgagctwgctgcagtcagtcaactaccacttgaacccactctgagcacgcctgttgatagaccggcttgccaggctgttggcagtatacttakyytttagggctgcatcttgtagggccttgttgtaagttgcctgtgtttggwttgccytgtagtctgtcaaagtacgaatctttgactagttggcyttgttttagtggttctgttattacttgcaagttgaatggttgcatcyttttgctgcacaccagtttgcaacaccattttttgctccagcagcattgggagcggcggctgctccagcagctttggaacctgcctttttggaggcagcagcgggcytgttggcacctgccctgttggaaccagccccgtttgcagctggcctgtttgctgctccacctttggcactgttgggactgtttgcacctgccctgtttgctccagcaccgttggctacaggcttgttggctattttttctattgtggcagaatatttattgattatttggaacaaaaagtctyywwkkywtkwkytttttttttttttttttttttttttttttttttttttt

SEQ ID NO: 2244 - DNA, 668 bp, Canis familiaris
gcmaagtcytgsgcattctacatcttawtcatgacaagacccgtttccttcatccagggtcgagtgacctcaccacagacsgcatcggtttgaactcgawcgacgtcagtcagttgatggtgaacttgggtgagactcgtgcggacaactatctggccgaacggtccgacaaccgtcatatgaatmrraaatcccgacgtagaacatcccggaacaacattcaacggacacaaaccwaacggracatcagacagtttcatgcttagaaactgatcaaccgraacaaaatcaccaagacaataatgaacgttcaacttaccaacgtagraaaacgacgtgtggtcaaacgttgtggtaaaaaacgaggtcgtcgtaaccctcgccgccgacgaggtcgtcgaaaccttggacggaaaaacctccgtcgtcgcccgracaaccgtggacgggacaaccttggtcggggcaaacgtcgaccggacaaacgacgaggtggaaaccgtgacaaccctgacaaacgtggacgggacaaacgaggtcgtggcaaccgatgtccgaacaaccgataaaaaagataacaccgtcttataaataactaataaaccttgtttttcagarrwwmmrwamwmraaaaaaaaaaaaaaaaaaaaaaaaaaaaaaaaaaaaaa

SEQ ID NO: 2245 - DNA, 3577 bp, Canis familiaris
atggaggtacagttagggctagggagggtctacccccggccgccgtccaagacctatcgaggagctttccagaacctgttccagagtgtgcgcgaagtgatccagaacccgggccccaggcaccctgaggccgtgagcgcagcacctcccggtgcccatttgcagcagcagcagcagcagcagcagcagcaggagaccagtcctcggcagcagcagcagcaacagcagggtgacgatggctctccccaagcgcagagcagaggccccacaggctacctggctctggatgaggaacagcagccttcccaacagcggtcagcctccaagggccatccggagagtgcctgcgttccagagcctggagtgrcttcggccaccggcaaggggctgcagcagcagcagccagcaccaccggacgagaatgactcagctgccccatccacattgtcactgctgggccccactttcccgggcttaagtagctgttccaccgatcttaaagacatcctgagcgaggctggaaccatgcaactccttcagcagcagcrgcagcagcagcagcagcagcagcaacagcaacagcagcagcagcagcagcaacagcaggaggtagtatcagaaggtagcagcagcgggagagcaagggaggccgccggtgcttccacctcctccaaggacagttacctaggtggcagttcgaccatctcggacagcgccaaggagttgtgtaaggcagtgtcggtgtccatgggtttgggtgtggaggcattggaacatctgagccctggggaacagcttcggggggattgtatgtacgccccgctcctgggaggtccacccgccgtacgtccttgcgctccgctggccgaatgcaaaggttctctgctggatgacggcccgggcaagggcaccgaagaaactgctgaatattcccctttcaaggcaggttatgcgaaagggttggatggggacagcctgggctgttcgagcagcagtgaagcagggggctccggaacacttgagatgccatccaccctgtctctttacaagtctggagcactagatgaagcggcagcttatcaaagtcgagactactacaactttcctctctccctaggcgggccgcctccccatccaccacctccccatcctcacacccgcatcaagctggaaaaccctctggactatggcagcgcctgggcggctgcagcggcacaatgccgctacggggatctggcgagcctgcacggagcgggtgcagcaggacccagctcgggctcaccttcggccaccacctcctcttcctggcacactctcttcacagcagaagaaggccagctgtatgggccctgcggcgggagtggaggcggcagtgcaggcgacgggggatctgtagccccctatggctacactcggccacctcagggattggcgggtcaggaaggtgacttccctccacctgatgtgtggtatccgggcggtgtggtgagcagagtgccctttccaagtcctagttgtgtcaaaagcgagatgggctcttggatggagagctactccggaccctatggggacatgcgtttggagactgccagggaccatgttctacccattgactattactttccacctcagaagacctgtctgatctgcggtgatgaagcttctggctgtcactatggagctctcacttgtggaagctgcaaagtcttctttaaaagagccgctgaagggaaacagaagtacctgtgtgccagcagaaatgattgtaccatcgataaattccgaaggaaaaattgtccatcttgtcgcctccggaaatgctatgaagcagggatgactctgggagcccggaagctaaagaaactggggaatctgaaactgcaagaggaaggagaggcttccaatgtcaccagccccactgaggagccaacccagaagctgacggtgtcacacattgaaggctatgagtgtcagcccatctttctgaatgtccttgaagccatcgagccaggcgtggtgtgtgctggacatgacaacaaccagcccgactcctttgcagccttgctctctagccttaatgaattgggtgaaaggcagcttgtacatgtggtcaagtgggccaaggccttgccgggcttccgcaacctgcacgtggatgaccagatggcagtcattcagtactcctggatggggctcatggtgtttgccatgggctggcgatccttcaccaatgtcaactccaggatgctctacttcgcccctgacctggttttcaatgagtaccgcatgcacaagtcccggatgtacagccagtgtgtccgaatgaggcacctctctcaagaatttggatggctccaaatcaccccgcaggaatttttgtgcatgaaggcgctgctgctattcagcattattccagtggatgggctgaaaaatcaaaaattctttgatgaacttcgaatgaactacatcaaggaacttgatcgtatcattgcttgcaagagaaaaaatcccacatcctgctcaaggcgcttctaccagctcaccaagctcctggactctgtgcaacctattgctcgagagctgcatcagttcacttttgacctgctaatcaagtcccacatggtgagcgtggactttccagaaatgatggcagaaatcatctccgtgcaagtgcccaagattctttctgggaaagtcaagcccatctatttccacacgcagtgaagctttagaagcccctgtcttctcaccaccaccaccaccacccccgccccctactttttaaaaccttggtgtttgtttcatctgcttttagaacgtgcgatatttccagtacctacttttttgctgaatccaaagatatataaatataaatatatatattttataaagatcaaaatgatataaaggagatacgtttcttcctttaaaaaaaaacaaatagaaattcattgttaatgttcgtattatgatgccacttttctaaatcgtgcatcttgtatatgtgctgccgaagtgagcactaaatcgtgcatcttgatggaaaggtgtaaatatcaatcaccaggactgcttagttaattggtatttaatatctaggtgaattgggggtatggggtgggggtatgacaggacatacttggcttgccctcctcgaaatgactgccagttttccatatgcctgtccagttccaggaattttgttcacaagtgtgggggcgtcataggagtaaagcctgtaggacagatgaaaccccctgcttcagaggagcaagagctccaaggccaactgtttaacaagcaaggtgtttttttttctttctttctttctctttccaatgtgtggaattttgatgatggaaatgtcattctgagagcaatatttaaaattctcaggaattgacttatagtattgagaatgaattcagttgcaatcaagtttacattaaatgttgcttttaaaaaatctcagtcatacttcacactgcaaagaatccagatcacatgggataacttatgagatggttgagtggtaagctctgactgctttgctgatcattttgtaaataaaggtttc

SEQ ID NO: 2246 - DNA, 553 bp, Canis familiaris
ctgttcsttcatttgtgscaggtgccattttcttccccagaaggccactgtccgggcccytcaccagtctgccccsccagtggccagagcctggttgaagtccccccagtgcctccttgtgcatagacctttctctgcccacccckgttgctaccccgccccagcctcgtacacccagcggggctgtgcaagaacccgcacctccagccccgacagtagtatagagcccccccctttcggctggtgtagagtagccwatagtgtagtgcggtgtgctttcccgtggtggcgggtgggtggagggctccgtgccaactgcccttgaatccgccagcggcggccgtgctgtgttttgtgctgtgtccacgcgctgcggcgcccccctcccctgtactgacgcctagaagtgcttctctttgcatagtcacgtagctgccccacccactccccttcctgtgtttcacgcaagttttatactctaatatttatatggctttttttctttgaaaaaaattaaaacgtttcttctgaaaaaaaaaaaaaaaaaaaataa

SEQ ID NO: 2247 - DNA, 628 bp, Canis familiaris
tggtaccggttccggaattcccgggatccagccgctctgctcctgtctctcctttggatgccggcgctgttgcctgtggcctcccgcctgcttttgctaccccgagctctgctgtccatggcttcaggaagccccccgtcccagccttcgccggcttcaagctccggctatgttcccggctctgtctctgcagcctttgtcacctgccccaacgagaaggtcgccaaggagatcgccagggctgtggtggagaagcggctggcagcctgcgttaacctcatccctcagattacatccatctatgagtggaaaggaaagattgaggaagacaatgaggtgctgatgatgattaaaacccaaagttccttggttccagctttgacagatttcattcgttctgtgcacccttatgaagtggctgaagtgattgcattgcctgtggagcaggggaactccccatacctgcattgggtgcgccaggttacagagtcagtttcagactccagcacagccctaccgtgatgaaccctgtctctgccatgttcctctcatatacttcaatgcccttgacttccaggtgatgactgggcccctaataaatcctgtctgtagttcaaaaaaaaaaaaa

SEQ ID NO: 2248 - DNA, 614 bp, Canis familiaris
tcaccagctgtgatgctgattcttggccrtcgktaatccmgttggrwttcccggggcctctcttgtgccagatctggaatcccctagggctccccctagaatctaccaccaccaatctaccaccccacctcccaccctgccgagagacagacggcccttccttacaggccaacaggctttgagtcctgcctttgtcaccacccccaccccaccccaagaagaggggaagccccagagggcctgggatagtttctggtacctcctcccagcctctagacccmctgtgagtttgctttcttctttagcaagatattttggcttctaggcaaggacaggtctccagtgagccctgtgccccaggcgttttcagagcccaaggacgtggtctgaggggcctaggtgcttctcagccaaaggcaaggaacctggccgtgggccatcctaggatggccacctcggggccactggctgatcctcctcataagttagatttgcgcttgcgtgtttagctttgcacatttcaaataaacacatggttgcagctawaawaaaaaaaaaaaaaaaaaaaaaaaaaaaaaaaaaaaaaaagttaaaaaaaaataaaaaaaaaaaaa

SEQ ID NO: 2249 - DNA, 714 bp, Canis familiaris
cttacagctgaccgtgaacgctgctcattcgaggggactatcgatggcgttggagcctggggttgcatgactccatgtccatcagtttggagacctcaccgggraactgcaacagctgcggggaccactttaagmcctgatggagcatctcacggggggcccttaaggactctgaccggcaccgtggggacctggggaatgtccatgctggcactgatggccgagccatcttcaggatagaggatgagcagctgaaggtatgggatgtgattggccgaagcctggtcatcgatgaaggagaagatgatctgggcctgggtggccatcccttatccaaggtcacaggaaactcaggagagaggttggcctgtggcatcatcgcacgctctgctggccttttccagaaccctaagcagatctgctcctgtgatggccttaccatctgggaggagcgaggccggcccattgctggtgagggacgaaaggagccagccaagccccctgcccacctctgaacatggcctcagcttcgggtttgttctcccagctgtgcactgtctacttccagagagaggggagggaggccctgcttgcccagtcctaggaggacttgggtacagggtgtgaaggttgctgtgatgttcccttgcaaattaaagttttattttcctacagaaaaaaaaaaaaaaaaaaaaaaaaaaaaaaaaaaaaaaa

SEQ ID NO: 2250 - DNA, 614 bp, Canis familiaris
tatggactagaagtggacccgtaatcatgcattgaatttttttgttgttttagtataggttakttatgtagaattaattttggcmgtrtatcctcmgtcacagataagatcatagatgatgagatcatagaatgtgcmattaccccaatttagtgttacmtttgtgatggttttcacttaatagatttttattaatatgatgaataaattatttagttgaccmgtcagtgcactaaatagttgctgttttgggtttcacttgctttgatgtttgagtataatctaacmtttccktaaagttttatttcgcatgactttaacmaatgtttttaaccmatttaaaaaaggcmggatgttattgacatatattgaactgttaacmttttagtatttatagtgctttcatttgcmatattgtataattagtaattatttcagaggcmatattttgttctctttccggtgagtagatgcagcctattattgtagtacattctttacmctgtttgtgaagttaatactagagtattaagtgtacmaatagatttagaaaachataaaaaaattgcatgttaaaaaaaaaaaaaaaaaaaaaaaaaaaaaaaaaaaaaaaa

SEQ ID NO: 2251 - DNA, 726 bp, Canis familiaris
cttaagaaatattttactttttgaaaatactttycagccaaagttttcatgactgtcactcacttctkgtcttccactktaaactggttaaaactctcaagtgtcagctctgatttaggaggggaacaagacccttggattttaatcagaaccagctgcttgacttgatggtcacttcccgtggtktgggktggtgtcttttccatttctggatcatcctgtgatctcaaaggtaactatgcaaagaatccagatggttctgaatgtgaaggcacaacaccacacagagacccctgtggccgacctgtgtagggcccccagatgatacataggtttagaatctcagcaaggggactccttggcttctttccagaaatgtgttatgagagctgtccacagaggcatgggctgtctcccccagagaatggaggccaagtatttttattttaccatgatgtccttgaagaggtctgctgtcagagcagaccccatctgtcagtgaggaggaatgtgtgcgtyttctgtagttttttgctgtttcccttccagctgtactgttcttttatggctgtcttgcccttcaaaaaagaagaaaaaaagaaaaaaaagaaaagagaaaaaaaagatttgtttagtttactgtgaaatgaactgtatggcttatttmcagtatttttaattcttaataaacacttgagctttgttamraaaaaaaaaaaaaaaaaa

SEQ ID NO: 2252 - DNA, 1356 bp, Canis familiaris
gccttcctcttcttgagctggactcagtgctggtccctgccccttcccagcgatggtgatgatgatctgtctgaggaagacttccagcttgcagagcgctacctgaaatcctactactatcccctgaatcctgctggaatcctgaagaagtctgcagcaggctcagtggctgacaggcttcgagaaatgcagtccttcttcggcttagaggtcactggcaaacttgatgataataccttggacatcatgaagaaaccaagatgtggggtccctgatgtgggcgagtacaatgttttcccccgaactctcaagtggtccaaaacgaacctaacctacaggattgtgaactatacccctgatctgactcattctgaagttgaaaaggcattcaaaaaagctttcaaagtttggtcagatgtgacacctctgaattttaccagacttcatgacggcactgcagatatcatgatctcttttggaactaaagagcatggggacttctatccatttgatggaccttctggtcttctggctcatgcttttcctcctgggccaaattatggaggagatgcccattttgatgatgatgaaacttggacaagtagttccaaaggctacaacttgttccttgtcgctgcccatgagttcggccactccttaggtcttgaccactccaaggacccgggagcactcatgtttcccatctacacctacacgggcaaaagccactttatgcttcccgatgatgatgtgcaagggatccagtctctctatggcccaggagatgaagaccccaaccccagacatcccaaaacaccagacaaatgtgatccctccttatcccttgatgccatcaccagcctccgaggagaaacaatgatctttaaagacagattcttctggcgattgcatcctcagcaggtggatgcggagctgtttttaacaaaatccttttggccggaacttcccaaccgtatcgatgctgcatatgagcacccctcccgcgaccttatcttcatcttcagaggcagaaaatattgggctcttaatggttatgacattctggaaggttatccccaaaaaatatctgaactgggatttccaaaagaggttaagaagataagtgcagctgttcactttgaggacacggggaagacgctcttcttctcgggaaaccaggtctggagctatgatgatactaaccagatcatggataaagactaccccaggctgatagaagaggacttcccagggattggtgataaagtggatgccgtctatgagaaaaacggttatatctattttttcaatgggcccatccagtttgagtataacatctggagtaacccgtattgt

SEQ ID NO: 2253 - DNA, 557 bp, Canis familiaris
ggaaaccatagcaactcctttttcgagggggcacaggcgtacatggaccacttgtgggaggaaggctgtgccaattgtgacctgccggagtccccaaagcccggccccacagaggcccttcagggcagcccagtgggcagatgctgattggaccagatggccgagatgaccaggagccaagcccaggcctctgaagctgacccctccggggcagcgaccagagcctgctcctcgtgcgtgcgagccgtggacgggaaggcagcgtgtggccagtgtgagcgtgccctctgcgggcggtgtgtgcacgtctgctccagctgcgggggcgtggcctgcgaccctgtgtgcccttgtggactgtggtgacgttcacgagtcggtgctctgtgccagcgtgctgccatgttcgaggcctgagggctggccttcccggacggactgcaccggtgtcgatgtccgtagaactgtggggggtgggggtctgttttatattttgtaccgagggcagaagtgaataaaccttttatatttggaaaaaaaaaaaaaaaaaaaaaaaa

SEQ ID NO: 2254 - DNA, 601 bp, Canis familiaris
ccgagatgcttttatggattgatccacgcccgctatatcctcaccaaccgtggcatcgcccagatgttggaaaagtaccagcagggagactttggctactgtccccgtgtgtactgtgagaaccagccaatgcttcccatcggcctttcggacatcccaggtgaggccatggtgaagctctactgccccaagtgcatggacgtgtacacacccaagtcatcgaggcaccatcacacggatggcgcctacttcggcaccggtttccctcacatgctcttcatggtgcaccccgagtaccggcccaagcggcccgcgaaccagtttgtgcccaggctctacggtttcaagatccatccaatggcctaccagctgcagctccaagccgccagcaacttcaagagcccagtcaagacgattcgctgattccccaccctacctgtccctcagtctttgacatctccgatcctttgctgccaccctttcaggaaccctctatggtttttagtttaaattaaaggagtcattattgtggtgggaatatgaaataaagtggaagaaaaggccawraaaaaaaaaaaaaaaaaaaaaaaaaaaaaaaaaa

SEQ ID NO: 2255 - DNA, 667 bp, Canis familiaris
ggaatgagaagctatcaccacctcgattatgaagacatcttcatctgttccagtctgccgcaagtacaaatagagtgcctgcatggtagaaggatggctggagaagaaactccataaagctgwamataagagtactgtgcacaaggactaatatttcccktcttaagtatcaaaagagccctggagcaaatcacaccattagggaggttttcatgatttgctttactttctaaaaatgaagctctctcacccagctgtgtttggaggagatctacttattattcagtctctaccgctttcccaaccaagctgtgatgtgaatgcaagcagccagtggacttgggaagatcctagtctgtcttgccatcctccaaataggaaatttcagtaaaaagccaccgtgctgagcagcctcacagggctctttggaaacattaaggttgataaaattctttggggacaaggtacattgtactctttaagaataagcagctcagcgtagccgtctcatcgaaggttgctgcatgttggaaaacaaatgcgaagtgagttaaactaaatggccgtgcatgcataacagaaatcagtgtcgaattaacaggagtgaaaatacgtttattaaaatgatctgtttttaattcaaaaaaaaaaaaaaaaaaaaaaaaaa

SEQ ID NO: 2256 - DNA, 668 bp, Canis familiaris
ccctgctaggtgtgacccatgagaagcaacgagagcttatgtgtattcccmggagctagtcctgtactattctgtagtcaggtgaggscmstgtgtggcgggctctagtcattccagtggaagatgaatgtaacctgcacggtgattaaagcmgttatttcccctctgaccccmwagagctggctccagaagattgggatcmatctgaatgttttatgtgttgcatttacttttacmaaawaaaaaaaaaagtatatatatatatacacatatatatattaaaaatacsaaacyaaaccccatctggggtttctagtggcggttgaaatattcccacatgtgatcatcccaaaaataagccattcctcacaccamcgtgggataaactccttgacttccaaggcctaggagttcatcctgctgtgtgttttagaatccctcccctgccttaatgttttatggcagtgaaatgcctcttgatcatgtccmagtgtgtctttcaactgtatctatttctgatcatgttccagttgcttggccctgccactggggcccagtactccttgtgagcataactgtactaaatcttttttccagatcagtataataaaggagtgatgtgcaawaaaaaaaaaaaaaaaaaaaaaaaaaaaaaaaaaaaaaaaaaa

SEQ ID NO: 2257 - DNA, 566 bp, Canis familiaris
ctgtagtcaggtgagggcagtgtgtgcgggctctagtcattccagtggaagatgaatgtaacctgcacggtgattaaagcagttatttcccctctgaccccwaagagctggctccakaagattgggatcaatctgaatgttttatgtgttgcatttacttttaccaattttttttaaagtatatatatatatacacatatatatattwaaaatacwawactaaaccccatctggggtttctagtggcggttgaaatattcccacatgtgatcatccwaaaataatgccattcctcacaccaacgtgggataaactccttgacttccaaggcctaggagttcatcctgctgtgtgttttagaatccctcccctgccttaatgttttatggcagtgaaatgcctcttgatcatgtccaagtgtgtctttcaactgtatctatttctgatcatgttccagttgcttggccctgccactggggcccagtactccttgtgagcataactgtactaaatcttttttccagatcagtataataaaggagtgatgtgcaataaaaaaaaaaaaa

SEQ ID NO: 2258 - DNA, 693 bp, Canis familiaris
ggcatacagacaggtcgtggcctagaggacccactttctctgggcctctkgcctctgaggctctgggacctgctgccccccaccgcggggtgaggaaaacaacttgggtctgagaacccagagtcaggatgtggtctgacctcccccaggcatctagttccctgtttgacggcggccgaggaaacctcccracacactctcagttatcagtggcccgaatcagaggctgaacagctctgcccacccctgggtgccgaggccgtggtgtcccagcacagaccaggccacagtgctctgtgcttagcgctcctgctggattgaccctcagacgcggagggaggcacacacagcctcagtcttcctctggaacccccttccctgtgtgcccggtcctcatgacccwcctgcccacttggggccttgccccttccaccccacccttctccagggacccttctctggccacatcacccccatcccttccaggccccaggtcgggagcagcaggaggaaggggaggggctgggcctcgctgctcccagtggttgacaggacaacactgtggggagctgtcgcctggaagggctgccggcatgagctgygttcaagctgacttctcatctggtcaataaagctcttagaacagaaaaaaaaaaaaaaaaaaaaaaaaaaaaaaaaaaaaaaaaaaaaaaa

SEQ ID NO: 2259 - DNA, 586 bp, Canis familiaris
ccccaccgcggttgagtgtacacctttgggtctgagtacccagagtcaggatgtggtctgacctccccccaggcatctagttccctgtttgacggcggccgatggaaacctcccacacactctcagttatcagtggcccgaatcagagtctgaacagctctgcccacccctgggtgccgagtccgtggtgtcccagcacagaccagscmacagtgctctgtgcttagcgctcctgctggattgaccctcagacgcggagggaggcacacacagcctcagtcttcctctggaaccccsttgccctgtgtgcccggtcctcatgacccacctgcccacttggggccttgccccttccaccccacccttcttccagggacccttyttctggccacatcacccccatccctttccagggccccaggtcggggagcagcaggaggaaggggaggggctgggcctcgctgctcccagtggttgacaggacaacactgtggggagctgtcgcctggaagggctgccggcatgagctgtgttcaagctgacttctcatctggtcaataaagctcttagaacagaaaaaaaaaaa

SEQ ID NO: 2260 - DNA, 625 bp, Canis familiaris
gaaaggccctcaggacccatctggacttcacagctgtgccccagtcaggatataactatggaatccagagttgattctaaccttctgcaaggcaagtgagtccctttcaagaatacatgttatgagactttggagtgattaccacaagattttagtattttggggcacctggctgctcagtgactcttgatcttggggaaatgagtttgagcccctgtgtggtgtggagattacttaaaaaaaatcattgtattctcctcctctaattggtgcattagaggcggcatgcttgctgccatcagcctcctgcattaccagcagaaagacttccattggtttctgggtgggtgccagagtcacaatggaggttaaaattgggaaaagtaatccmaactatttataccattgacatcgctgacacaagactttgaactgttgagggaattagtggttgataacagatggcaccagtttgtcttttaattcaattattcaaaacagaggtaagctgaataccgatactactcttttttgtccaataaccatttcttaatttctttcttgttcaataaatcatttttattttgactgaaaaaaaaaaaaaaaaaaaaaaaaaaaaaaaaaa

SEQ ID NO: 2261 - DNA, 687 bp, Canis familiaris
atatgggagatatgctgaaatacaggactkggtacgccgataatacaagwatgctgacwacgcagctwaaatgccgagccsktgawcmawwtggatgtaaataatcckgattttaaggctggtgtaatggctttggctraccytcttcagattcagcgtcatgatgattacctggwaatgcttaaggcmattcgcattttggtacaggagcgcctgacacmwgatgcagttgccmaagcmaaccmwachwragagggcttgcctgttgcattagataaacacawtcttggttttgacacmggagawgcagttcttaatgaagctgctcaaattctgcgattgctgcatatagaagagctcagagagytacagacmwaaattaatgaagccatagtagctgttcaggcmattattgctgatccmaagacagaccacagactgggtaaagttggaagatgdacattttaggatttcagcttctcacctgattagtacmattgggraccatgtacgctctggcatgtgtttggraatcaaatgtcacatkttcaagggaagaatcctagaaaattgactatgttctcmagatttactatcattgtttttttttttctttaataaagttcaggaaagtgraaaaaaaaaaaamaaaaaaaaaaaaaaaaaaaaaaaaaaaawaaaaaaaaa

SEQ ID NO: 2262 - DNA, 728 bp, Canis familiaris
tggtcacgcttgctcaggcccaagaatctcattggatgctggtgtagatgccctgcgggtgggcatggcagtkggctccatctgcatcacccaagawrtgttagcctgtkggcggccccaggcaacagcagtttacaaggtgtcagaatatgcaaggcgctttggtgttcctgtcattgctgatggaggaatccmaaatgtgggtcatawtgccmaagccttggcccttggggcctccacagtcatgatgggctccctcctggctgctaccactgaggcccctggcgagtacttcttttctgatggaatccgcctwaagaaataccgtggtatggggtctcttgatgccatggacaagcatctcagcagccmaaaccggtatttcagcgaagctgataaaattaaggtggcccagggggtgtctggggctgtgcaagacaaagggtccatccacaaatttgtcccctacctgatcgctggcatccagcactcctgccaggacattggtgccaagagtttgacccaagtccgagccatgatgtattctggagaactcaagtttgagaagagaacatcctcagctcaggtggaaggtggtgtccacagcctccattcgtacgagaagaggcttttctgaaaatggatacagcatacccccttggtttttcaataaaagtttgggraaaaaaaaaaaaaaaaaaaaaaaaaaaaarrraaaaaaaaaaaaa

SEQ ID NO: 2263 - DNA, 680 bp, Canis familiaris
tgctaggccagatctcattgatctggtktagatkcctcggtcggcatgggcagtkgctccatctgcatcaccccagaagtgttagcctgtggcggccccaggcaacagcacgtttacacaggtgtcagaatatgcaaggcgcttttggtgttcctgtcattgctgatggaggaatccmaaatgtgggtcatattgccmaagccttggcccttggggcctccacagtcatgatgggctccctcctggctgctaccactgaggcccctggcgagtacttcttttctgatggaatccgcctaaagaaataccgtggtatggggtctcttgatgccatggacaagcatctcagcagcccaaaccggtatttcagcgaagctgataaaattaaggtggcccagggggtgtctggggctgtgcaagacaaagggtccatccacaaatttgtcccctacctgatcgctggcatccagcactcctgccaggacattggtgccaagagtttgacccaagtccgagccatgatgtattctggagaactcaagtttgagaagagaacatcctcagctcaggtggaaggtggtgtccacagcctccattcgtacgagaagaggcttttctgaaaatggatacagcatacccccttggtttttcaataaaagtttgggaaaaaaaaaaaaaaa

SEQ ID NO: 2264 - DNA, 685 bp, Canis familiaris
actgccaccccaaacatcctgactaccagacaccctaagattcagcagtgcgtgattcctccawatcggtggcgccaaccgggccacccgcaacctaggcaaacgagactaatgaggcctcttcatattctgatcaaggatgagttcgaccaaaggacgttgagraaacaacggtagracaactagatgraacattagatcaaatgaatgaaaccgraagttcaacaagacaccggacaaacactaaacgggtttatcagaccccgtcgacaagraatgaacgagatggttcgtaatttgraaaagtaggacttgtttattcctcaaaagatcaatggacatccgatccttcgagtggtccagtaggctcaccagcctctcaggggttatatcattttgtttaaccatcctttacaaatccaaaaatcttaagcaagttccgtcttaagtttccatctatgaggtcttctggtaagtccgtcgtcgtgttgatggagagaagaggaccagttacagaaatcccagtcatctgatgttcacgtgtttattttcaggttcatttatttccacgccaccgattctttttaacaaaaaaagatctgatctaccttctgtaaaaataaaatcgatttaaagtgraaaaaaaaaaaaaaaaaaaaaaaaaaaaaaaaaaaaaaaaaaaaaa

SEQ ID NO: 2265 - DNA, 685 bp, Canis familiaris
tgacggtggggtttgtaggactgatggtctgtgggattctaagtcgtcacgcactaaggaggtwtagccaccgcggttggcccggtgggcgttggatccgtttgctctgattactccggagaagtataagactagttcctactcaagctggtttcctgcaactcytttgttgccatcytgttgatctacyttgtaatctagtttacttactttggcyttcaagttgttctgtggcctgtttgtgatttgcccaaatagtctggggcagctgttcyttacttgctctaccaagcattaaacyttttcatcctgaacaaataaggagttttctagttacctgtaggctaggaagctcaccaggtcatccgagtggtcggagagtccccaatatagtaaaacaaattggtaggaaatgtttaggtttttagaattcgttcaaggcagaattcaaaggtagatactccagaagaccattcaggcagcagcacaactacctctcttctcctggtcaatgtctttagggtcagtagactacaagtgcacaaataaaagtccaagtaaataaaggtgcggtggctaagaaaaattgtttttttctagactagatggaagacatttttattttagctaaatttcacytttttttttttttttttttttttttttttttttttttttttttttt

SEQ ID NO: 2266 - DNA, 909 bp, Canis familiaris
gaggtttagccacccgcggttggcccggtggcgttgatccgtttgctcttgattactccgggaagtataaggactagttcctactcaagctggtttccctgcaactcttttgttgccatcttgttgatctactttgtagatctagtttactactttggctttcaagttgttctgtggcctgtttgtgattgcccaaatagtctggggcagctgttctttacttgctctaccaagcattaaacttttcatcctgaacaaataaggagttttctagttacctgtaggctaggaagctcaccrggtcatccgagtggtcggagagtccccratatrgtaaaacaaattggtaggaaatgtttaggtttttagaattcgttcaaggcagaattcaaaggtagatactccagaagaccattcaggcagcagcacaactacctctcttctcctggtcaatgtctttagggtcagtagactacaagtgcacaaataaaagtccaagtaaataaaggtgcggtggctaagaaaaattgtttttttctagactagatggaagacatttttattttagctaaatttcactaaagtgtgttagccacaatgaaattctctaaaaatttacctaacagagatgagaccagttgttgcatgtgccaggaagatgtcatcagcatgtttgctattgtcagccagctgtattcaacatctgagtttgcatcaacagggtcaggttatattttttcttgttccttttgacaattaacagtgaacttgatttgggtttgtcctagcactatgcagggccttctaaagttgaggtaaccaatctctaaactactccatctttcggttgatgaattcacaggttgtgtaagccttttgttatttttgtgtcattattctkwwkkttgc

SEQ ID NO: 2267 - DNA, 622 bp, Canis familiaris
cccataaaattgaggggcccatctagttcaaaagagcagaggacatgtgagaccgctcccccacycaggtccmaaattgggatctctctcctacccagcccccattacctaggggaccactcttccccagccctgaacttggggcttggagaccagagcatccgtggccagcctcaaactctggacccagagatactccaaccccyagtctgggacctgcccatctaccatgctcatccccaaagctgggatctgggaccaaggcattctcttgaacccgggattaaggctcttgaccctaccccagctttgaaaccaggtcagggcattgccaaatcttgaaccctggccccaagtgttcccagcccccttcaggacaggattcaggcatcctgaccctgttgaacccttggttccaggtgacccaaacactcacaagtcccacttgcctccctccagcttccaaatttctacagygatgaggaccatggggtgcggtggggtggggtgaggtgagccaagccctgacccggcatggggcatctgtatcagtgttactgcaacaataaaggctgttgcatcgctcmarmmmaaaaaaaaaaaaaaaaaaaaaaaaaaaaaa

SEQ ID NO: 2268 - DNA, 743 bp, Canis familiaris
ttgtcgggtccaagaaaatgagtcataatcagcatcacggacagtccgtgtctctgcccagtgacgtcascgatgtcattaaaaaggagracamcctgracatggttgtccgcaggggcaatgaagacmwtakgatcacagtgattcccgaagaaatcgacccgtagggagaggcatgagctggatttcatgtttcccgcaaagactctccagtggacgatgcatgatgactctgrgcgggtggcacggcgcccccaggactttggaccgtgttgkttgtccagcagaaacacctggcchacagaatccttcttgatagtttgcaggcgaaacmaatgtaatgtcgtagatctgcaggcagaagctcgcccttctgtatcctatgtacgcagtgtgcttttccttgccagcttggactgttcctgcttagacmgtcaacgtttgtctcttccttttaccgagtcatcatcttagtccgactaaggcagttaatgtaatgcgtagatggaggaaagtcccgcgggagccaggacggtcctgggcacgtttawgctttcctcctagtcagcacccagaggaggtcgacgccagagaccaccgctgggtggatgctggcttccagaagggccagagtccctcttttaggaaactcttcagaactgggagcmcagtgactgagtttgagctattaaaacccttcttcatamwmwraaamaaaaaaaaaaarraaaaaaaaaaaaaag

SEQ ID NO: 2269 - DNA, 675 bp, Canis familiaris
ggactccttgtgtctggagcagctaccggtgctggacgcctcctttctcagacctgggggccccccccaggcggggaggggtbytgttggggcctgtkktgcttcatgggctaggaccttctctgcctgactctgtccgccgaaagcaggcccaccmggaatctcacagcatcagctctgtgccacctcccaagagggctcctcacyatctagagggctttgggccagggcaccgagagcccccagtctggggcacaccaagggagggtgaagcgtgccgggcaccccaggggaggggtggcacctggggctcttggccctcccacccggagcctgtgacctgttaggcagccgggacccttatttaaaactcacctcccgatcgcccctaaacaagcagaagagaagagaaaggacactgtgtattttgtatttaaaagtaattaattaattatttaaagagcggaaaacaaaacaaaaaagataaagagagaaatgccaacaggaaccagcagactttggagacagggctcaccctactccttgcctcagggcttcctcagcgactatggggagccgtttccaggccaaccccccctccctcagcctgcctgtagcacccactgtgaatgttggaatatatggtctcctttgcmwmaaaaaaaaaaaaawaaa

SEQ ID NO: 2270 - DNA, 579 bp, Canis familiaris
agctccgggggccaatgaggatgatctgatgcttggagaccagcccctatgtcaaggaattcagagatggctgtcagacaacagcaaggcctggacggtgctggatggttcggactcctgtgctggagcagctaccggtgctggacgcctccttctcagacctgggggccccccccaaggcggggaggggtgctgttggggcctgtgtgcttcatgggctaggaccttctctgcctgactctgtccgccgaaagcaggcccacccggaatctcacagcatcagctctgtgccacctcccaagagggctcctcaccatctagagggctttgggccagggcaccgagagcccccagtctggggcacaccaagggagggtgaagcgtgccgggcaccccaggggaggggtggcacctggggctcttggccctcccacccggagcctgtgacctgttaggcagccgggacccttatttaaaactcacctcccgatcgcccctaaacaagcagaagagaagagaaaaaaaaaaaaaaaaaaaaaaaaaaaaaaaaaaaaaaaaaaaaaaaaaaaaaaaaaaaaa

SEQ ID NO: 2271 - DNA, 640 bp, Canis familiaris
acatcattaccaatttatcctccgtgattcaaacctagtattcctctcgccttaattattagtactgccagattcttcctcctcctctgamcctattcagatctgtgccgcttatccctatgccacaactcattwwwtmcctgtgacccccgatactatgtactcacttaccccataacctaatttcaaattatcatccacctccackactaccaacttttatatgcttgctgacttcttaactgtcttctttccctgattattttgccgcatgttctgccaataaagtttcactctccactgggataagcactgatgcctatgctgaagatattcctttatcatcattatatcccccmtttatttaatttttatcatacttcccattttttgttcccccttttaactgttcttacgctcttccttaccctccgcattattaatgctcttgccctcctatttatggtgtaggaaatgaggcttttccctcttttcactactctttttcgtatcaattttatttatcttagatagaatactaataaccatctaggttaaattcctagtcattagtctagtttttactacgaagataaacttcatattgttctaattttttttttttttttttttttttttt

SEQ ID NO: 2272 - DNA, 640 bp, Canis familiaris
tgtagtaatggttaaataggaggcactaagtttggatcataaggagagcggaattaataatcatgacggtctaagaaggaggaggagactkggataagtctagacacggcgaatagggatacggtgttgagtaawwwakggacactgggggctatgatacatgagtgaatggggtattggattaaagtttaatagtaggtggaggtgmtgatggttgaaaatatacgaacgactgaagaattgacagaagaaagggactaataaaacggcgtacaagacggttatttcaaagtgagaggtgaccctattcgtgactacggatacgacttctataaggaaatagtagtaatatagggggkaaataaattaaaaatagtatgaagggtaaaaaacaagggggaaaattgacaagaatgcgagaaggaatgggaggcgtaataattacgagaacgggaggataaataccacatcctttactccgaaaagggagaaaagtgatgagaaaaagcatagttaaaataaatagaatctatcttatgattattggtagatccaatttaaggatcagtaatcagatcaaaaatgatgcttctatttgaagtataacaagattaaaaaaaaaaaaaaaaaaaaaaaaaaa

SEQ ID NO: 2273 - DNA, 636 bp, Canis familiaris
actgcttctgacccccagatgggcctcattactagacttktcttkttaaagaagcgctgtttttaagggttttaaaaacgttttgaagagcacttcagatttttccttttttgtttttactatgagccataagttttttaggaaatcattgggggttgcgtgggttttggttttggttgtgttgccttttttgtttctctttttagtggggtcaggcccgtgaagttggktgccccaattcacttctcttaagattgaacggactctgaatccgctttttgtcggaagctgagcaagctgtggcttttttccaactctgtgtaacgtttctgagtgtagcgtggtaggacccatcctggggcagtagtagcagaggtgccctggctgccctgggcctggcctgtgcggcccttctgtgctgtgtatgacccacagtagacttgcagacgtcccctcaagaggttcttgaaaatgtttatttatattgtccttttttactggaagacgtatgcatatcccattgatgttgtatttgaagtggttaaggaattcttgtacgcagttttctttggctttacgaagccgattaaaagaccgtctgaatgaacccttaaaaaaaataaaaaaaaaaaacta

SEQ ID NO: 2274 - DNA, 627 bp, Canis familiaris
ccgtctcagagacctgtgtctcctgggagatagtaccctcctctgctccagccttcatcttgggtttgatggtcgctgatatggawtaccccaggctggcaccctagtgtttgtctcctggctaccmcaaaggraaaagatcactacmatagttttacacmaagraaaaactttaaaatctgatgactataagcmaaaaaaaatgtgggagtgtaggggaggtggatgtcaacvatccccacagttggctcttgggagttgtgaaggagggtaagaacttaaagaccaggtcatgctttgaggggaggggcttcatagattctcccaggctctcacctttccccttagccacgtctgctgtcctgagacccagaagtgatggagagaaacccaccagagaaaaccctatctggaaggaatgtatttgttgctaaattttgtagcactgtttacagttttcctccatgttatttatgaattttatattccgtgaatgtatattgtctgtaatgttgcataatgttcactttttatagtgtgtcctttattctaaacagtaaaatggttttatttctatcacacmaaaaaaaaaaaaaaaaaaaaaaaaaaaaaaaaaaaaaaaaaaaa

SEQ ID NO: 2275 - DNA, 639 bp, Canis familiaris
ccattaagttgccatctaatacccgttatcccaagactctttcctggagctggagccagtcctcaggccatattctcacaagggcatgtttgccaaacctctgagcagatagatagaagatgcccatgacccagragccatcagatttccaatttgcccctcgttcagtggaatctcgtaccaaccccatgatgcttaaggtatttagtcatgagtttcatttgtctctcagatgctagagttgtgataatccatgactcctaagagtctgtgatgttttgtccttttattctaaaattcctgtctaatacctgctggtctcttcctgccagcatgacttcccttggccttcgatcctgggaaggtgaagaaaactgatgagagccaggcccagagctccatgcaggacttcccccttggattacctttgggaagaaacactgtctcattcaaggcagactgggtcagagattgcagagcaacaaagatctcaaagactaatggtggcatttgctgcttagagctgttgcccaatttgaagcagagaaacttgaggaagggcttttgtgttttccctcttgggraaacagtaaactgttctaaatcctgaaaaaaaaaaaaaraaaaaaraaartgaga

SEQ ID NO: 2276 - DNA, 644 bp, Canis familiaris
cgtgggcctcaccgtctcctatgggcgtgccctgcaggcctctgccctcatgtcctggaaagggcaacmagacmatgctgggctgccactgaggagttcatcaagcgggctgaggtgaatgggcttgcggctcagggcaagtatgaaggcagtggagaagatgktggagctgcagcacagtccctctacattgccaaccatgcctactgagtatgcattccacgccacaacctttgacctggccacctgcaccccatttcaccmatagttaaggccagagccaaatagccatgcagagcgagacgcctccatccagcactgagtcatcgttccttttttgtcctccccctctcccactgctgcacctgggatcactggatgggagaatagggcgcccctcatgactgagggcagaagttgctagaagtcagagcaggatgcctgggtttccccctgcctccaccagcccctaccatttccccatgatatggtagcttctccttgggctttccttgcccctgtctcytgggatcagagagtaggatactagacatgactcatgtcttgggtacataccacatagcaaataaatggtagcmaaagaaaaaaaaaraaaaaaaaaaaaaaaaaaaaaaaaaaaaaaa

SEQ ID NO: 2277 - DNA, 619 bp, Canis familiaris
gtatccgtaaatggagagaagagcaaacggaacgcttggaagcccttgatgccaattctcggaagcaagaagcagagtggaaagaaaaagccataaaggagctagaagaatggtatgcgaggcaggacgagcagctacagaaaacwaagcaaacaacagggcagcagaagaagcctttgtaaacgacatagacgagtcgtccccaggcactgagtgggaacgggtggcccggctgtgtgactttaaccccaagtccagcaagcaggccaaagatgtctcccgcatgcgctctgtcctcatctccctcaagcaggcccccttggtgcactgaagagccatcctgtggaaacactacatctgcaatatcttaatcctactcagtgaagctcttcacagtaattggattaattatgttgagttcttttggaccaaaccttttgtctttagagttgatcattgtttgtgattgcatgtttccttcagctgtgttctccctggcaggcagagaggagggggaggaaaagaggggggaagcctcccaaaggtagcctcaacctctactyttgtgcattattctcagaataaatttgtttcaaacaataaaaaaaaaaaaaaaaaa

SEQ ID NO: 2278 - DNA, 599 bp, Canis familiaris
ctagggactagaaccgatttgattccgtactcaccgtctacggtgctgctttgctgctaaycmacactgcccatgtctcccacgagtcggggcggcctgccagcagggccatgcctgaccgaccgggtgaagcctcactgatggaattctgggcgctgggaccmaagagctggcmaaggctggggccccggggctggggctgggggcttggcggggaggtggcccgaagcagacagggcgtaggagagaggactagggtctaggggcagtggctggcatggctctgggctcttggtgacctgcttaagctcctgctgcctcttggcattctctgatggtttgggggctcgggaatctgtgccctcatctcagacacggactggaggatccacggacggccttcaacttctcccgctctgtgcccctccacccccggacaccctgtcccgcctctctctccacagtatgcatctgtagcctgcccctccacagaggctagccagcccggggcggccgagaaataaacagcattttctgatraaaaaaaaaaaaaaaaaaaaaaaaaaaaaaaaaaaaaaaaaaaaaaaaaaaaaaaaaaa

SEQ ID NO: 2279 - DNA, 605 bp, Canis familiaris
gcaggtgctaaacctctcagccacccagggatcccaggattaagtagttttgagtgtttactgaatgtttatatacctggaatggaactaaggctttacatatacagtctcatttgaatttgttataattctatatcatggctactgttactggctctagtttttctggtgaaaaaagtgaagcacmagaattgtgaatccaatttgtttgttgaagatgctacgaagtggcaaagtcaggctttaaatgcacagactatctcctagcccttaaattctgtcctgccttgtggtctttaacctaactggtgtatgagatatttgccatgtctagtgtttggactacacggatgtacacaacatctagtccttcccctccatggagtttgttgacctgtaatagactgagctttgcactggggaatccctgttcccccatctctgtatgaccacttatgtagtgtatcaacaagggatgtaggcatgttaaaaaagtcatctctgaccctcatggctgttggagggtgcctctttttaattaaaaaaattaagacctgwwwaaarwrraawwaaaaaaaaaaaaaaaaaaaaaaaaaaaaaaaaaa

SEQ ID NO: 2280 - DNA, 602 bp, Canis familiaris
catctacgtaccttacccaaatttgctccggtgccagaaatacagctccatttgaacaaagggtatccaatrcaaaccgtactgtaaactggtttaaaatgtgggggcaaggaggagtgatgcatttcaaaagcctgatgacatccgagccaaattaggggaagtttccccatccmaaaattggttaccagttatcagagtatctgatgcaggcactcatggctcctgagaattcctcagctggggtaatggggtcatactatgaatccctcactacmaaatgacttgagtccagcgaaatctcattagggttaagaatattttcagggatccttaatactttgaatttttgtttcgtctgaaattggattttattttattttatcttataatttcagttcatctaaattttgtgttctgtacatgtgatgtttgactgtaccattgactgttatggaagttcagcgttgtacgtctctctctacactgtggtgcacttaacttgtggattttttatactaaaaatgtagaataaagactattttgaagatttgaataaagtgatgaagttgcattacacctcwaaaaaaaaaaaaaaaaaa

SEQ ID NO: 2281 - DNA, 674 bp, Canis familiaris
ccccattacttctgcttttgcatctcctcaggcaaaagtggagggtgcctctctggaccctcctcataggttgtttcttcatctacgaaccaaaccgcgaagtttgctccggtgccagaaaracagctccatttgaacaaagggtatccatgcaaaccgcactgtaaactggtttaaaatgtgggggcaaggaggaggatgcatttcaaaagcctgatgacatccgagccaaattaggggaagtttccccatccmaaaattggttaccagttatcagagtatctgatgcaggcactcatggctcctgagaattcctcagctggggtaatggggtcatactatgaatccctcactacaaaatgacttgagtccagcgaaatctcattagggttaagaatattttcagggatccttaatactttgatttttgttttctgaaattggattttattttattttatcttataatttcagttcatctaaattttgtgttctgtacatgtgatgtttgactgtaccattgactgttatggaagttcagcgttgtacgtctctctctacactgtggtgcacttaacttgtggattttttatactaaaaatgtagaataaagactattttgaagatttgaawaaarwrawraarwtgccaaaaaaaaaaaaaaaaaaaaaaaa

SEQ ID NO: 2282 - DNA, 608 bp, Canis familiaris
tggtttctckgtatctatccacmagcamcaaatacttaaatgtatgatcttgcagggraatttttggtttatttgtttaaaaaaagtattgagaatcagattgacaatcggcatcagagaaccggaggtttgggtttaagagatatttataaaactttacaagccaggtaggacacatgccagaattgcccaactgaatgacatctctcckgtcattcatgcagtgcctggaatcctcaccagttaaatccaagatcaggatctggagttacaaaacacagtgtttctgacctaaaacagttcttcttgcagatgaatgtgatttcaactcaggacctgtccaaatgaggagttttaaaatgtttgggtttttttctatttttagacatctaattctatagattctaactttttctaacctcttctagacatgccaaatactggcaaaaagaattactttttgaatgttgaagcacttgtaaaaataaatccgtgagcaaaatccttttaaacacagaaatcccaagttcatcttgttggtgggctcaagcaattctgtagcaaataaatcctttgaaagagctccmaaaaaaaaaaaaaaaaaaaaa

SEQ ID NO: 2283 - DNA, 677 bp, Canis familiaris
ggaacattgccagcaagagggagaggtgaagattctgacaaaaagattgaagacctgatcaaataccgtggatcctgagtatattgaccgcattgccatacctgatgcctctaagctgcagtttawaktagcagaagagcagtttatcttatcccagattgcactcctggagcaggtagaggccttggtgcccatgctggacagcgctcacatcaaagccgttcctgagcatgctgcccgcctgcagcgcttggcccagatccacatccagcagcaggaccagtgtgtggaggtcactgaggagtccaaggctctcctggaggaatacaacaagactacaatgcttctctccaagcaatttgtgcagtgggatgaactgctttgccagctagaggccgccaagcaagtgaagccagcagaggagtaatggctgcttcccattccagggtgggccaggacgacaaggctcaggacgcaaagtgtgaaactgcctttgtaacagggcagaagcagctctgtattggattcacaacctacctatctgcattcaggtggggctcggaggtcagaggtctggctacttgaggtttgctgtttgcaccccctccccacattagtgtcctattccagtaacaataaactatagaaatcamaaaaaaaaaaaaaaaaaaaaaaaa

SEQ ID NO: 2284 - DNA, 731 bp, Canis familiaris
cttgtctttgccctgtgctggcttccccttcacctcagcaggatattgaagctcactatttatgatcagaatgatcccaatagatgtgaacttttgaggtaagaaaggtaaaagagagttttgtaggtaactgccattcagaagtttttttcattgatccctttcataggcagagagagagtatcattttgctagtctttagggagcaaggagtcaagattctcattttttatcttcacccctattgtagagaaaggaataaaggcgacttatgagaacactgggaatggagagccagagctgtcaaaatgttgagtgggtaccacaattgggaaatatcagctccaattctcctttgcacctcacaaagtcttttctcagccagccccagcacttccagatgagattttattgtaaaagagagaattgggcatgggcagaagggcatgatgacagagagagagagagagagagagacagagacagagagagagacagagagggggaaagagagagagaggtcatcattagcaaagaccagtgataaagtcaaaaattatggatatgggtaatttttttcttcacaaaaactcaaaagtttgcgagaatacatacttaaagcaatgtattgttcacagacatattttgggtggttttttgcagctttttgttggtgttggattatatcggcatcaatatggcctccctgaattcctgcattaatcctatag

SEQ ID NO: 2285 - DNA, 710 bp, Canis familiaris
cacctccctgtgccactggccgcctgccccagggttcgtgacggccaattcggattgttgaacaagatgcttttcaggtatcaaaggttaccattggttgcaagcccctattttggggggagtagatgttactggacctcacctctacagcatctatcctcatggatcaactgataagttgccttatgtcaccatgggttctggttccttggcagcaatggctgtgtttgaagataagtttaggccagatatggaggaagaggaagccmtagaagctggtaagtgaagccattgcagctggcgtcttcaacgacctggggtctggaagtaacattgatctctgtgtcatcagcaagagccaaactggacttcctccgcccgtactcggtgcccaacaagaaggggatctaggtttggccggtacagatgtgagaaagggaccaccgcagtcctcactgaaaaagtcaccaccctggagattgaggtgctggaagaaacagttcagacaatggacacttcgtgaatggcatctgtggatggatggttactgctctacaagattggggtgcggggggacagtggaggcgcccccctcagaccttcatttggcagtgtctgctgaatgagacccaataaaacatgaaaacccagaaaaaaaaaaaaaaaaaaaaaaaaaaaaaaaaaaaaaaaaaaaaaaaaaaaaaaaaaaa

SEQ ID NO: 2286 - DNA, 656 bp, Canis familiaris
gaaggactgggccaatacgagagaagaccgaagagagaccattggttttgcaggagggtaaagataggcgggaagaaaggacgtagatgagccacttcatatgaccacktcatgttctgcaccaaagggaagatagatggaagattccaggagtgwaccgaatcagkgaatggcttttggwacgtggaagtctcagcattttgtaaacagaaagaactccwatagwaagaaagtagccagaactgtaggaaggagagaagwwacatwwaagataccataaagcttttcatcagaggtgtaaagwaaataggtgcaaatggaagaaaatgtaatatcaggagcaaactcatccagcttcctcgtttctgtgagaaacaggaaaccagatgtttgctaatgagaatgttggtgatattggtagggaacttaaaaagaaagatgtggtttccatggggaagctgactgtgtttattcgcattataagatcacttttttcccatttgttggtctgatttattgacctgttcttcaggtatagaagttttcactattatgtttctaatttaagcaaatctaatctgtaagattataaaattttaaaataaggatgtatagttattgccttgctaagacagctatgctttcaaaaaaaaaaa

SEQ ID NO: 2287 - DNA, 640 bp, Canis familiaris
caggagccgttgcgatctgaagaggccggacatggccaaaccggatcagtgcctttggctacctggagtgctcagccaagaccaaggagtggktgagggaggtattcgagatggccactcgggcggktctccaggttcgcaagaataagcgccggaggggttgtcccattctctgagaccactgaggcctcccctgttcacsmcccccccttcatgggggtgcagaagctccccacttcctggccccacacttgttgaaggaaggcttccttgtcattccctccagcccaggactgcatctgagtttcccctgccccaccagaccccagggtggtggtaggctggccctccctgcccttccagagcaaagtcccttgtcctgttgccttggtccaggggtgaggctcttgatccctcagccttccccagaggatcatcacacaccagcactttatatactttgggctcacaggagtgtctggggtaggggacttggagggtgtatgtcacccagagccccgggtccctggcatttatgctttggttggggaccttgcctctggctgtacttggtggaaggcatgaataaaggccacaggttccaaaaaaaaaaaaaaawaaaaaaagaaaaaaaaaaaaa

SEQ ID NO: 2288 - DNA, 752 bp, Canis familiaris
cctggagaaccacaggatgtccctgagacatccagagccagagaacagccctggaatggcgggtttcaaatgcattacgagaagacccskttgatcagttggctttcatcgaagagcttttktcacttatggttgtcaatcgcctgaccgaagwactcggctgtgatgagattattgmcagagakkgattacacgctgttaaaagaggaggaagctacttgaggagagacccgacattscacggtcttttgggctcattccmgatagatagtaacggkgccaagggaaaaaagtcgatcttcaaagaaawtttttgttgttgtygtgcagagtagaatagggcagtgactgcgctcttatgaaagcattgttggagaagaagaagaaacgtatcaggactgtggaaatctgttttcaagaatgttcctgawacacctgccgcttagactttgttactgatcccggttattttccttgcatttggggaaaatacctcycctatatttcactataaggaatggttttgcaagaataagttatgaccaagacmaaccgccagtacaagacccccactgataccaattacgtgagaaaaagtagtaacatccaatttaggacacaagatgtctgaatcgtttggactgaaagcctactgagagaactctggaggttccactttgtggtctgtccaagccagtgttcaaaggctaaatttttagtgwaaaaaaaaaaaaaaaaaaaaaaaaaaaaaa

SEQ ID NO: 2289 - DNA, 682 bp, Canis familiaris
taaaagcaggcatttaccctggcgtcttcatggcttctgctgttagagaggacaggccgttgttggcagctgtctggtcacccattctccgaaagctgcctggggcctccctgggtgcttctgaagatctctcatcagacacctcttgcttcttgttgcccaggttgctcakcagaaggtgaggagcgaaggtcaggaggtkggkgtgstttgtaggatcctaagtgtggccagggagtaaccagggtaaagagaggccagggtgggggcagggaaaatgccctggggkttctytacctgktatgagggaaatgaaagcctcctgtgatgtccatggaaacttctatgttctttctttacattaacctggggaggaccttgarcgaaagatttcccctcaaagtytgtgctgggggattttagacttgagccttaaacctgcctctttctttgtgacaccaagtgcctcaagcggggaagggggaacamgagtcactgttgtgggggtggaaaccmaatcagcccgagggtgtaattaggacttctcttaactacttggtcctaaatatatcacacmaaaggacatatctagaagtgtaataaagttttatgtttagaagttaaaaaaaaaaaaaaaaaaaaaaaaaaaaaaaaaaaaaaaaaaaaaaaaaaaaaaaaaaaa

SEQ ID NO: 2290 - DNA, 677 bp, Canis familiaris
  misc_feature (13)..(13): n comprises a, c, g, or t, or includes no nucleotide
aggagagtcagcnaagtcaagcaacagggggcaatwaaaagcagcatctaccctggscttctcatggcttctggtggtagagaggacaggccgtgttggcagctgtctggtccccattctccaaagctgcctggggcctccctgggtgcttctgagatctctcatcagacacctcttgcttcttgttgcccaggttgctcagcagaaggtgaggagcgaaggtcaggaggtggggtggtttgtaggatcctaagtgtggccagggagtaaccagggtaaagagrggccagggtgggggcagggaaaatgccctgggggttctctacctggtatgagggaaatgaaagcctcctgtgatgtccatggaaacttctatgttctttctttacattaacctggggaggaccttgarcgaaagatttcccctcaaagtttgtgctgggggattttagacttgagccttaaacctgcctctttctttgtgacaccaagtgcctcaagcggggaagggggaacaagagtcactgttgtgggggtggaaaccaaatcagcccgagggtgtaattaggacttctcttaactacttggtcctaaatatatcacacaaaaggacatatctagaagtgtaataaagttttatgtttagaagttaaaaaaaaaaaaaaaaaaaaaaaaaa

SEQ ID NO: 2291 - DNA, 653 bp, Canis familiaris
acacaactggcgagcttgcaggccctgaccytagggaggggcgactaggagacgctacgcaccggggtgtccgttgtatccaactacgcagtccaggaggagggtcacagctcagggctgtacttgtcgggagctcctagctgtacagtgcgcaaggccttgatcttcctgtaccactgttaagttgtggttcagggatgcttggccttgaacgccggctgttgcaactgtttcccccaagccttgattggacctggaggcgctcccagaggaccagtgactgcacgaatgtccacagcacccccgggctgcacttggccccctgccctttgaggctgggcccagagcatgaatgcagcccacacccaaccccgagtagaacactttgcaaccaatgttaagcatctgttgcctgtgaagtctacaggttcccagcagggttcccatgcacagatttctagattaaggacctttactaagcaaacactccactcaacctccttgctacaggtgcctggacagacatagattattacacttggagacctctggcttgtaccccygaggaaaatagagctgttatttttggccactgagtccctatktttttttttttttttttttttttttttttttttttttttttttttttt

SEQ ID NO: 2292 - DNA, 653 bp, Canis familiaris
tgtgttgaccgctcgaacgtccgggactggratccctccccgctgatcctctgcgatgcgtggccccacaggcaacataggttgatgcgtcaggtcctcctcccagtgtcgagtcccgacatgaacagccctcgaggatcgacatgtcacgcgttccggaactagaaggacatggtgacaattcaacaccaagtccctacgaaccggaacttgcggccgacaacgttgacaaagggggttcggaactaacctggacctccgcgagggtctcctggtcactgacgtgcttacaggtgtcgtgggggcccgacgtgaaccgggggacgggaaactccgacccgggtctcgtacttacgtcgggtgtgggttggggctcatcttgtgaaacgttggttacaattcgtagacaacggacacttcagatgtccaagggtcgtcccaagggtacgtgtctaaagatctaattcctggaaatgattcgtttgtgaggtgagttggaggaacgatgtccacggacctgtctgtatctaataatgtgaacctctggagaccgaacatggggrctccttttatctcgacaataaaaaccggtgactcagggatamaaaaaaaaaaaaaaaaaaaaaaaaaaaaaaaaaaaaaaaaaaaaaaaa

SEQ ID NO: 2293 - DNA, 725 bp, Canis familiaris
tctctatggaggctcccccaactgggccccgggatccaggaggtgaaccaggagctggcgcaaggagcgcatccgcaagtgcccctgggcaagagaggactgttgagsmmatggtggcaggactggccgcacctccttacacctgcaagagcaactggcamcaggggctggaactggacctcaggagtgaacaagtgtccagctaggaccacctgccgcacatttgaggcctactttcccacgcctgcagccctgtgtgagggcatctgggatcactcctacaaggccaccaactacaggcgggggagtggccgctgcatccagatgtggtttgacccggcccagggtaaccccmatgaggaggtggcgaggttctacgcaggggccaggaacgctggggttatgccccaagggattgagcatctcctgctcagcctggcccccatgctgtacctctggctccttggccgggtctagcccgacccagatgtccactccgcatgtcccgggttctgatgaccaagttgggttcagctcagctctcacaaatgtgggtaccctaagtgagcctccatctattatccatccttcccttttgtcatccagtttctgctccatggtgggccttggggtttctctggcaatcagttcaaataaagagacagacataaaaaaaaaaaaaaaaaaaaaawaaaaaaaaaaaaaaaaaaaaaaaaaaaaaaaaa

SEQ ID NO: 2294 - DNA, 662 bp, Canis familiaris
aaccagacctggcgcaagagcgcatccgcaagtgcccgtgcagagaggactgtgagccatggtggcaggactgccgcacctcctacacctgcaagagcaactggcacaggggctggaactggacctcaggagtgaacaagtgtccagctaggaccacctgccgcacatttgaggcctactttcccacgcctgcagccctgtgtgagggcatctgggatcactcctacaaggccaccaactacaggcgggggagtggccgctgcatccagatgtggtttgacccggcccagggtaaccccmatgaggaggtggcgaggttctacgcaggggccaggaacgctggggttatgccccaagggattgagcatctcctgctcagcctggcccccatgctgtacctctggctccttggccgggtctagcccgacccagatgtccactccgcatgtcccgggttctgatgaccaagttgggttcagctcagctctcacaaatgtgggtaccctaagtgagcctccatctattatccatccttcccttttgtcatccagtttctgctccatggtgggccttggggtttctctggcaatcagttcaaataaagagacagacataaaaaaaaaaaaaaaaaaaaaaaaaaaaaaaaaaaaaaaaaaaaaaaa

SEQ ID NO: 2295 - DNA, 657 bp, Canis familiaris
taccctagtcttacaccagtgtgaaccttcagagagagctttctgataccccttactataggggaagcatgagggagaggacagctttaggatgtttaggaacttaactattcaagaatagggaaggagtcagccagccttgggccagcaaggtttctttacctgcattgttacctgcctttgctcacccaggaaatcmaccctgtacttgtttccctctttgaagcaagtgtcttgsttgactaatactattttattgtaactttaaaaatgaaagttattgttctamatttatagcaggtgccttatcttttgctttgagtcmaaccattccatattagaatttcccctggtttactatagacmattggctttaagtaacttagggttttgggccgtkttctctttttttttaattgtacaatgtcttcattaatttgcactgttaaatttccatagctagcaatcattcttacatactgtaaaagttgcattccctttgtatttcacgtgtaatttcctaattgagwacattttatattaaggatggattatgcactgtttgggtcmatgaaagcaatgtcttatttgatttatcctttamaaaataaagttccctgattatttgatgccttctaaaacaaaaacaaaaaaaaa

SEQ ID NO: 2296 - DNA, 572 bp, Canis familiaris
actctggccacagaggaagctgaacgcattggcgtcgaccatcgtggcccgaatgacagccacaggcatgcggcgagaactccacaagtggccgwacacctgatagcacwacacagtgccattaagatgctgcacagccgggtcaagctcatcttggaatatgtcaaggcctctgaagcgggagaggttccctttaaccatgagatcctgcgggaggcctatgctctgtgtcactgcctccctgtgctcagtacagacaagttcaagacagacttttacgatcaatgcaatgacgtggggctcatggcctaccttggcaccattaccmaaacctgcaacaccatgaaccagtttgtgaacaagttcaacgtcctctatgaccgacaaggcatcggcaggcggatgcgggggctcttcttctgagagggtacttgaagggacgatgcacaggttggacagtggtcccaccaggggaggggcatcacactccctttagagaaacctcctgttgataataaaagaggagcagcccctcagcammmmaaaaaaaaaaaaaaaaaaaaaaaaaaaaa

SEQ ID NO: 2297 - DNA, 684 bp, Canis familiaris
ctggtaacctctcttgcttcctctcttcttgcmctkcaggctgctgctgcagtttacgtagttgttcctgactgatttkssyyttctgtgccggtgagttttgttggctcgtttggsatagacctttcagggacaacgtctggaatctggggaatcttgtgactcataccggtttacattgttataccagaaagactactcytttcctgtagacatcttgtgccctgcaactgtatccatctatgaaaaaggggttgccytgtaagtggtcaatacactgcttgctcttcatgctgcagcagtgtttaactttgaacttggagttgcagacactttctaacttgttttctctctgtcaccttcagatcttgtggtgtgagttgttgttgtggaagtagtttcgggagatgtggaattggtctatgttaaggactagactcttgctttagagacttgtgctttggctgaacgtgcccagttgttcttctgattagtataagatttagcataataggttaattcttagattccgatagttttcgtggtcaaaaaaaggagaaacttttgttattcagctgcaaggaaagtttaaagatcagaaacatactaattatttgaataggcaacaagaaggthbtkywytttttttttttttttttttttttttttttttttttttttttt

SEQ ID NO: 2298 - DNA, 684 bp, Canis familiaris
gaccattggagagaacgaaggagagaagaacgkgamgtccgacgacgacgtcaaatgcatcaacaaggactgactaaamssrraagacacggccactcaaaacaaccgagcaaaccstatctggaaagtccctgttgcagaccttagaccccttagaacactgagtatggccaaatgtaacaatatggtctttctgatgagraaaggacatctgtagaacacgggacgttgacataggtagatactttttccccaacggracattcaccagttatgtgacgaacgagaagtacgacgtcgtcacaaattgaaacttgaacctcaacgtctgtgaaagattgaacaaaagagagacagtggaagtctagaacaccacactcaacaacaacaccttcatcaaagccctctacaccttaaccagatacaattcctgatctgagaacgaaatctctgaacacgaaaccgacttgcacgggtcaacaagaagactaatcatattctaaatcgtattatccaattaagaatctaaggctatcaaaagcaccagtttttttcctctttgaaaacaataagtcgacgttcctttcaaatttctagtctttgtatgattaataaacttatccgttgttcttccadvamrwraaaaaaaaaaaaaaaaaaaaaaaaaaaaaaaaaaaaaaaaaa

SEQ ID NO: 2299 - DNA, 631 bp, Canis familiaris
taatggaaaatctggattctgatgcccaagggttaaataaagcctcttggatttcattgcaatgatatacagccactatgtttatttttgatcagtggcattttagccgctgtttaattagggtactgaacgtcactgtcagtactagggttttgtttttgtttttcttgggtcttttttggcacatgtggattttgttttgtataaaatgaaatgactttttcttgctctctgatgatgggtttaaaattaaaggaacatctggtcgtggtgtgggggtgagccagcattatgtcgtgactgatgtatattagttacttgtacttttttttggatctttgcaaaggggaaaactacaagtaacgagttttawataattaatttaaatttgttacaggttttcatgttcaggataaacaatttttcagccttgggtgaaaatacttgcaacagtttaaggtgactgtattttaccttaagacaactgttgcaatgccaatttttttttttttttttttttggtgtgtgtgaaaacacttcaaaattaaaagatgtacatttaaaattggttgtgtatctaatctgccccaggttcagtaaataaacaattctttttaaaaaaaaaaaaaaa

SEQ ID NO: 2300 - DNA, 683 bp, Canis familiaris
ttctgtcacytggcttggatcmacacacccaagaaacaaggtggactgggaccccatggamcattccctggtatcagacccccaagcgkaccattgctcaggactatggagtcttaaagkctgatgaaggcatctcgttcaggggcctctttatcaktgatgataaaggtatccttcggcagatcwctgtrwacgaccttcctgttggtcgctctgtggatgagachctgcgactggttcaggccttccagtttactgacaagcatggggaagtgtgcccagctggctggaagcctggcagtgataccatcaagcctgatgtccagaagagcmaagaatatttctctaagcagaagtgagcgcctcgccattttaggtccgggctgtagtgggggatccatgaaaacagaatctttttttgtactattgtcatgcttataacaagactttagactctgcagatrtggtatgtggtatgggacaagaccgccctttcctgcaggggttggggaggccagcctttcttcctctggagagaatggtctgaggtgtgctatggggcaggccmactgatatgtacagtagtagcaaggcatcacttttgatcttttgttgtttctattaaacttgaactgagaaaaaaaaaaaaaaaaaaaaaaaaaaaaaaaaaaaaaaaaaaaaaa

SEQ ID NO: 2301 - DNA, 708 bp, Canis familiaris
  misc_feature (84)..(84): n comprises a, c, g, or t, or includes no nucleotide
cttcgtggagtctcaggtcggtcacctggctgtggatcaacacacaccaagaacaaggtgggactgggacccatgaacattccntggtatcagacccccagcgtaccattgctcaggactatggagtcytraaaggctkgatgaargcatctcgttcaggggcctctttkatcaktkgatgataaaggtatccttcggcagatcatctgtaaacgacccttccctgttggtcgcttctgtggatkragacactgcgactggttcaggccttccagtttacttgacaagcatggggaagtgtgcccagctggctggaagcctggcagtgataccatcaagcctgatgtccagaagagcacaagaatatttctctaagcagaagtgagcgcctcgccattttaggtccgggctgtagtgggggatccactgwawacagaaatctttttttgtactattgtcatgcttatawcaagactttagactctgcagatgtggtatgtggtatgggacaagaccgccctttcctgcatggggttggggaggccagcctttcttcctctggagagaatggtctgaggtgtgctatggggcaggccmactgatatgtacagtagtagcwaggcatcacttttgatcttttgttgtttctattaaacttgaactgagaaaaaatataaaacataaaaaaaaaaaaaaaaaaaaaaaaaa

SEQ ID NO: 2302 - DNA, 679 bp, Canis familiaris
tcgcgaacatttgcgatgtgtcaatkkycccssccaacaaccsraaaactccawtcmcttgggattatctccsggagatcctctgacatcactatcwmgacgtgtggtgtcaacgsgtccaccgtcgggctatttytcggaagaactagatcctcmwaacgtctccgaaacatccttttgagatggcactcgccgtggatgggttggatctyatggctatgwagaacatcttctggtctcgtccacgtcagaccgtcgacagacctatcgcacctcggtttcccaacggkgacccgagactacggaccctggagattccggaactgatgatctggatggctaggaacgtcgacwagaaccacgatctcattcaccgggtagcgacccggaacttgaacttgsgtccggcggacaacatggagatgtggaacaactccccgtttagtaactttaatcgccagcaatttcaacatatcctccggcaaaacgccgtgatgggacatccgtctcccctgwaatagatgggtaatgctccggggttccagaaatccacccgtgtggagtgatcacaaggttcgaggagggcaagggtattgatcgggaggaataaatggtcgttggtctgaaaaaaaraaraaaaaaaaaaaaaaaaawaaamaaaaaaaaaaaaaaaaaaaac

SEQ ID NO: 2303 - DNA, 679 bp, Canis familiaris
agcgcttgtaaacgctacacagttammrgggssggttgttggsyttttgaggtwagkgaaccctaatagaggscctctaggagactgtagtgatagwkctgcacaccacagttgcscaggtggcagcccgataaaragccttcttgatctaggagkwttgcagaggctttgtaggaaaactctaccgtgagcggcacctacccaacctagartaccgatacwtcttgtagaagaccagagcaggtgcagtctggcagctgtctggatagcgtggagccaaagggttgccmctgggctctgatgcctgggacctctaaggccttgactactagacctaccgatccttgcagctgwtcttggtgctagagtaagtggcccatcgctgggccttgaacttgaacscaggccgcctgttgtacctctacaccttgttgaggggcaaatcattgaaattagcggtcgttaaagttgtataggaggccgttttgcggcactaccctgtaggcagaggggacwttatctacccattacgaggccccaaggtctttaggtgggcacacctcactagtgttccaagctcctcccgttcccataactagccctccttatttaccagcaaccagactttttttyttytttttttttttttttttwtttkttttttttttttttttttttg

SEQ ID NO: 2304 - DNA, 602 bp, Canis familiaris
ggaggatcctcttgaacatcactatcatgacgtgtgtgtgttcaacggggtccacccgtccgggctattttctcggkaagaactagaatcctccaaaacgtctccgaaacatcctttttgagactggcactcgccgtggatgggttggatcttatggctatgwagatacatcttctggtctcgtccactgtcagaccgtcgacagacctatcgcacctcggtttcccaacggggacccgagactacggaccctggagattccggaactgatgatctggatggctaggaacgtcgacatagaaccacgatctcattcaccgggtagcgacccggaacttgaacttgsgtccggcggacaacatggagatgtggaacaactccccgtttagtaactttaatcgccagcaagtttcaacatatcctccggcaaaacgccgtgatgggacatccgtctcccctgwaatagatgggtaatgctccggggttccagaaatccacccgtgtggagtgatcacaaggttcgaggagggcaagggtattgatcgggaggaataaatggtcgttggtctgaaaaaaaaaaaaaaaaaaaaaaaaaaaaaaaa

SEQ ID NO: 2305 - DNA, 602 bp, Canis familiaris
cctcctaggagaacttgtagtgatagtactgcacacacacaagttgccccaggtgggcaggcccgataaaagagccmttcttgatcttaggaggttttgcagaggctttgtaggaaaaactctgaccgtgagcggcacctacccaacctagaataccgatacwtctatgtagaagaccagagcaggtgacagtctggcagctgtctggatagcgtggagccaaagggttgcccctgggctctgatgcctgggacctctaaggccttgactactagacctaccgatccttgcagctgtatcttggtgctagagtaagtggcccatcgctgggccttgaacttgaacscaggccgcctgttgtacctctacaccttgttgaggggcaaatcattgaaattagcggtcgttcaaagttgtataggaggccgttttgcggcactaccctgtaggcagaggggacwttatctacccattacgaggccccaaggtctttaggtgggcacacctcactagtgttccaagctcctcccgttcccataactagccctccttatttaccagcaaccagactttttttttttttttttttttttttttttttt

SEQ ID NO: 2306 - DNA, 756 bp, Canis familiaris
ctgaagacatctgtttagcaagaacctgtggatgccctgccacctccggaccacgscmaggctttctkgataagcttktcggggagttcctggaaacgacatgcatcaatcctrcaktcatctgtgatcacccgcagataatgagcccyttggctaaatggcaccgytctaaagagggtctgactgagcgctytgagctgtttgtcatgaagaargraatytgcaacgcctacacsgagctcaacgaccctgtgcggcagcggcagctatttgaagaacaggctaaggccmaarctgctggcgacgatgaggccatgttcatagatgagaacttctgcactgctctggaatacggsctaccccccaccgctggctggggcatgggcatcgaccgtgtcaccawgtttctcacagactccmataacatcaaggaagtacttctgtttcctgccatgaaacctgaagacmagaaagacagtggagctacccctgaaacattacagagcacgacagctggcacttctgtctagaaaaggatcactgcaagtcctgtaactcaggcctctctgcatcttgcacaagttcaaggactgcaggggagttctcgtgtgtttgacgatcacagttcagttcagctacgagaatagagaagaggaattaaaaattcctttttacttcttgttcccmmaataaaccmtttgtctctaaaaaaaaaaaaaaaaaaaaaaaaaaaaaaaaaaaaaaaaraaaaaaaaa

SEQ ID NO: 2307 - DNA, 732 bp, Canis familiaris
  misc_feature (50)..(50): n comprises a, c, g, or t, or includes no nucleotide
tgttgatcctccacctcgaccacgccaggcttcttgataagcttgtcggngagttcctggaacgacatgcatccatcctacattcatctgtgatcaccccagataatgagccctttggctaaatggcaccgctctaaagagggtctgactgagcgctttgarctgtttgtcatgaagaaggaaatctgcaacgcctacacsgagctcaacgaccctgtgcggcarcggcagctatttgaagaacaggctaaggccmaagctgctggcgacgatgaggccatgttcatagatgagaacttctgcactgctctggaatacggsctaccccccaccgctggctggggcatgggcatcgaccgtgtcaccatgtttctcacagactcccaatwacatcaaggaagtacttctgtttcctgccatgaaacctgaagacmagaaagacagtggagctacccctgaaacattacagagcacgacagctggcacttctgtctagmaaaggatcactgcaagtcctgtaactcaggcctctctgcatcttgcacaagttcaaggactgcaggggagttctcgtgtgtttgacgatcacagttcagttcagctacgagaatagagaagaggaattaaaaattcctttttacttctygttccccaaataaaccmtttgtctctaaaaaaaaaaaaaaaaaaaaaaaaaaaaaaaaaaaaaaaaaaaaaaaacaaaaaaaaaaa

SEQ ID NO: 2308 - DNA, 621 bp, Canis familiaris
ctcaaccagtatagcgccaagtctggagaagtactggtgaatgttaaggagcactcccggcagatcaatgatatccmgttatccagggacatgaccatgtttgtcactgcttccaaggacwacacagctaagctctttgactccacaactcttgaacaccagaagactttccggacagaacgtccagtcaactcagctgccctctctcccmwctatgaccactgtggtgctgggtggtggtcaggaagccatggatgtaaccaccacctccaccaggattggcaagtttgaagccaggtttttccacttggcctttgaagaagagtttggaagagtcaagggtcacttcggacccatcaacagcgttgccttccatccygatggcaagagctatagcagcggcggtgaagatggttatgtccgcatccactacttcgacccacagtactttgaatttgagtttgaggcttaagaagcttggatctccatcagggccaggggraattttctgggccagggctcaccaagttttggactctgagaagtaaattagtttggaaataaaaaaaaaaaaaaaaaaaaaaaaaaaaaaaaaaaaaaaaaaaaaaaaaaaaaaaaaaa

SEQ ID NO: 2309 - DNA, 633 bp, Canis familiaris
ccttagcccagccctgtcttcctgcccctttctcttccaccagacccatgagtgttctcgaaccagagctttttcattttgcawatctgagccccccgwycctgagctgcttcccctagcgtagctcattctcttgcacctgcttggtgaaatgaaggggctgggcacctaacctgttattcagtgaaaacaatcaggtttgctaattgtaattactcacagatgccttattcacacttacaggtacaattcgtaattttgaactaagctttcggaaaaccgaattaaatactttctctttcttttctactgcttaccattaatattttgtaaggagaaatgaaaaaaagttttagcatctccaacagtgtgttccatgagcttcctggtgggaggtgataaaggcattttttttaactgactaaaaatggttagccacagcacccatgaaaatatctcagaatgtttttaaaatgaaaaaaaattctgtgacatggaaatagcaatttagagggggtctagggtttgttggaagctttgaatggctgctttgagtcttctctggacctccctcatgatttccacaccaatttccatctacatcaaaaaaaaaaaaaaaaaaccaccaaaaaa

SEQ ID NO: 2310 - DNA, 631 bp, Canis familiaris
ccgagatctttctttcatggtaatgttttcctgataaacattttcttgaagtgaatacatcgtcaaaaccgatttgcaattctcctaaacccgagtaattgttcatgtttcaccggaatatttaggatgtgaaaggcaggtttctttcactgatgggacacacaggtgggmagcgcacmaagcctgtagcgtcccaggcctgatagaagcgctctctgtggaagacacgtgagagaagtgttgctaattttaagtggtgttcttatgagcatgattagaaagtaacttctaaaggacmactgtttatggaaaaaaaataagctgttaaaaaaaaaaaggaaatgtagattaattggggaaaatgggcgattgatggagaccgtttccctaacacactacatcatttatgtgctagtactttaactttttaagaaaatgtacttctacgttttgtactctgacatatgtgtgtttattttttaattgagaatgctgtgcctccagaaggcatgcagccaaatcaatcctatcaaaccattttacctggagtttggtactggtttttacttctctgattctgtataagaaaaataaatacaattgaatttccacwwrraaaaaaaaaaaaaaa

SEQ ID NO: 2311 - DNA, 666 bp, Canis familiaris
aagttgctgacaccggccccccgccagccgtcaagatactagcccagcgaaggmtctkactctacttgacaatcgtgttggttttggcctgccaacctggtgagttgtttgcaargggcytgataggcccagcattagaggttgtctcctctggttgaggtgcatctgtatgatttgtcgtagtagtataagtacacaacggtacagtagtcgtggtggtttgagttgttgcgttgtggcattgtgtggttcgccaagctcygatagtgacwttgtttgcctywtttccagctcaagaagccttgacaacctataatcatgtagagtttccaagggtcgtagtgtctgtataggcytttaatgtggtgagcgaccgttgctaactggctgtaggcaagsacaggggcacaacatttcatgaaccygagggtataggttaatyytttcaacyttatcygagagatgaggttgtagtatttgaaggttctgtatagcaggtggtgcggtactcagcaaaagtggtcatagagctgacctaggtcgaggcagcaaaattattgtacattttaatctacgatgtactaagaccaatttattttgcaattttgtcyttttttttttttttttttttttttttttttttttttttttttttttttttttttt

SEQ ID NO: 2312 - DNA, 666 bp, Canis familiaris
ttcaacgactgtggccggggggcggtcggcagttctatgatcgggtcgcttcckagamtgagatgaactgttagcacaaccaaaaccggacggttggaccactcaacaaacgttycccgractatccgggtcgtaatctccaacagaggagaccaactccacgtagacatactaaacagcatcatcatattcatgtgttgccatgtcatcagcaccaccaaactcaacaacgcaacaccgtaacacaccaagcggttcgagrctatcactgwaacaaacggarwaaaggtcgagttcttcggaactgttggatattagtacatctcaaaggttcccagcatcacagacatatccgraaattacaccactcgctggcaacgattgaccgacatccgttcstgtccccgtgttgtaaagtacttggrctcccatatccaattarraaagttgraatagrctctctactccaacatcataaacttccaagacatatcgtccaccacgccatgagtcgttttcaccagtatctcgactggatccagctccgtcgttttaataacatgtaaaattagatgctacatgattctggttaaataaaacgttaaaacagraaaaaaaaaaaaaaaaaaaaaaaaaaaaaaaaaaaaaaaaaaaaaaaaaaaaaaa

SEQ ID NO: 2313 - DNA, 628 bp, Canis familiaris
  misc_feature (107)..(107): n comprises a, c, g, or t, or includes no nucleotide
gctcagcatgttgctgaagattgatgagtagagccccaagtcctgaagaggccagcgggcaagccatgtggggccctaggaaaggggatcatggtgggagggcmgcntgtcatccgtgttttagatggggctcattgtgccacagggctcatgggtcactggttctccmagtgccaggggtgcgccaggtggtggcactgagccccctcccaacactgtgcccttgtggagaaagcactgacctgttctgcccccttaagtccccctcttctgacgtgcctttcgcacccctcccattaggaccatcagtcccctccctgtctgggagacctcttttctttctctcccctagcccttcttggcacccagccaccctgcccacggggtgtcctcttctctcccatccccccaccccttgtggccacgcctggctgattttgtaagatactgggttggagcccmgtgattttttttttttcttgtaatttaaacaggcccagcmttgttggttctatttaatggacacgagataatgttagaggttttaaagtgattaaacgtgcagactatgccaammaraaaaaaaaaaaaaaaaaaaaaaaaaaaaaaaaaaaaaaaaaaaaaaaaa

SEQ ID NO: 2314 - DNA, 666 bp, Canis familiaris
aaggggaaatamacattgaatcagaatgaatcatagaaaaattactagaataatatytgakgttcatgatgattatggtagaagatagtttttggtatgttttaaatatttgtctgctgtagtctgtttgctgtatatgctgaaatttttgtattccmcttagtatttttatagtctaggaaaatattttctaagaccmgttttagatgtgctcctattcctatgtaatactcmatttactgtacctgcttgatggttagaaggaagccmgaagctgaattcaggcactttcttccmaaaaaactaattatggctcattccttttgacmagccgtaraattggatcmatttttaaaccgtaaattctaattgatttttaaataagtttttggaagaactttgttactagatagttgaataatctttataagatattttatatattagaagcmattataattaaatctgtggtttctgaactaaaatggtgctagttccmggtgaagaaatgtaaagtgcmagtgagattctctggtgtcattggcattccmaacttttctctttgtttttgtctaatgttgcctttggatacgtctgtttctataaataaatttttgaacmatamwmawaaaaaaaaaaaaaaaaaaaaaaaaaaaaaaaaaaaaa

SEQ ID NO: 2315 - DNA, 625 bp, Canis familiaris
acaccaagagtaatctcctgaggatcactccagaaaagagatccaagtaccattctttcccagtcccgtgaaattgttgtcttttttatgggcatgcagaggggtccggggtgagggaagkttctgtctaatcctccmrtttttcttatcttggtcttgctgtctcagcttttgacactccagccctcwacawgctcactgacctttctgttgcagatgggtggtgctaaccttctccaactcttgccctgtcctgtttcattctcgagatatgtttctcatgatttgaggaattaagaaacmwaagcmatccagaatacgattacctttgttcttttcagggcmattccatccctctggatacccagccgataagctgtgagatgagagatgctgttcatcagttcaaaggagatggcctacagaactcattctcacctcctcttgctgcttaattccmatttctgtttcttccctctggttttctatgggtatgctagtgggtatgggacacatcctgtctctcccaattgtatattttgtagtgacatttctatttaacgagttcattaaagtacmgttgctggcawwaaaaaaaaaaaaaaaaaaaaaaaaaaaaaaaaaa

SEQ ID NO: 2316 - DNA, 624 bp, Canis familiaris
  misc_feature (349)..(349): n comprises a, c, g, or t, or includes no nucleotide
aaggaaatggacccagagtatctcctgaggatcactccagtagagatcccataccatctttcccgtcccgttgagatgttgtctttttatgggcatgccagagggggtcccgggtgagggargttctgtctaatcctccgatgttktcttatcttggtcttgctgtctcagcttttgacactccagccctcwacaagctcactgacctttctgttgcagatggggtggtgctaaccttctccractcttgccctgtcctgtttcattctcgagatatgyttctcatgatttgaggaattaagaaaccaaagccatccagaatacgattacctttgttcttttcagggcnattccatccctctggatacccagccgataagctgtgagatgagagatgctgttcatcagttcaaaggagatggcctacagaactcattctcacctcctcttgctgcttaattcccatttctgtttcttccctctggttttctatgggtatgctagtgggtatgggacacatcctgtctctcccmattgtatattttgtagtgacatttctatttaacgagttcattaaagtacagttgctggcattaaaaaaaaaaaaaaaaaaaaaaaaaaaaa

SEQ ID NO: 2317 - DNA, 668 bp, Canis familiaris
gtgtagcgatgtaatacatagacacattacacctcctgtgttgaagggcctaacggttttkggagtatcaactggtcccgttatctcttaaggtgaattctttgaacgctgttcatttaccaagttgatccagtgtgtcctttctgttaagtaagactwaagagtaaagkcggggagggggccagcctccmaatgcagccacggatgtcttgctgctgcagcccttgccccatctgtcccctgcagacaggtgaggtcctctttcgaatgccmaaacccactattcactggtgctgacgacatagaatggggttgagagaagatcagcggggacttcacattgtcattcmaaaccttgtgtttttttatgtttgtggaaaaccttcaagtgaatggaatgattgccttgctggtgtccctttgtggaccaggggtgggaagaggggataactttgaccctgatggtgcctgggtgatgtgctcagggaagcttgtctctgggggttctgtggcagtgaacactttccactctctgacactttatcctgatttatgtctccaggatttggattttgatttttcaaacgtagcttgaaatttcaataaactttgctctttttgttttctaaaaawaaaaaaaaaaaaaaaaaaaaaaaaaaaaaaaaaaa

SEQ ID NO: 2318 - DNA, 899 bp, Canis familiaris
cgagtacctggtcaaccactttaccactagcagtcaacaatgaacaccagtgagtacactatgctggcacccctggatccactgggccacaactatggtatctatactgtcaccgaccaggaccctcgcacagccaaggagattgcacttggccggtgctttgatggcacatctgatggctcctccagagtcatgaagagcaacgtgggagtagccctcacctttaactgcgtagagagacaggtgggccgccagagtgcyttycagtacctccagagccccccctcccggccccctgccacaagcactgtcagaggaagagtgtcctcaaggagacagcaacgggctagtagggktgsmcagckcgggtgagaaggcgtggcctctctgaggtttcctgggattgctcctcagcctctgagcaactaagtcatatggtacttttcttcccccacctcatgtgacagccattgtgagactgatgtawaaactgtcacttggttaatttaagcacatctgttctggtgcaatttgcttgttttcttcatgcctttacttactgtctttaccccatgatacygattggcaccagagatgtcmaaataaatcttttttgtcttgttctttaaaaraaawamaagaaactgaccwttgataaagtcagtggccatcaacraaaawrwmmwtcctttatttttgcagggttttgctcacctctacygtaatgataatctgatgttaaagaccaaataaccaatagaaagcatatttcttggccttggtctatgggatgtcagcaaggcctctatcacagtccgcacatataaatggtggtgaaataaaggaataatctacaatawwmwwamwwraaaaaaaaaaaaaaaaaaaaaaaaaaaaaa

SEQ ID NO: 2319 - DNA, 687 bp, Canis familiaris
gggtaccccaaccttacgcgttagagagacagkkggccsccagagtgcccttccaggacctccagrgccccccctcccggscmcctgccacaagcactgtcagaggaagagtgtcctcaaggagacagcaacgggctartaggggtggccagcgcgggtgagaaggcgtggcctctctgaggtttyctgggattgctcctcagcctctgagcaactaagtcatatggtracttttcttcccccacctcatgtgacagccmttgtgagactgatgtaaaaactgtcacttggktaatktaagcacatctgttctggtgcmatttgcttgttttcttcawgccyttacttactgtctttaccccmtgataccgattggcaccagagatgtcmaaataaatcttttttgtcttgttctttaaaagraatacmmmgraactgaccmttgataaagtcagtggccatcaacgaaaatgtccttcctttmtttttgcagggttttgctcacctctaccgtaatgataatctgatgttaaagaccmaataaccmatagaaagcatatttyttggccttggtctatgggatgtcagcaaggcctctatcacagtccgcacatataaatggtggtgaamtaaaggrataatytacaataaaaaaaaaaaaaaaaaaaaaaaaaaaaaaaaaaaaaa

SEQ ID NO: 2320 - DNA, 716 bp, Canis familiaris
  misc_feature (33)..(33): n comprises a, c, g, or t, or includes no nucleotide
tttgagcaacttaatcatatggactttgctgcncccccstcakgtgacagccattgtgagactgatgtaarawctgtcaacttggktaatttaagcacatctgttctggtgcmatttgcttgttttctkcawgccyttacttactgtctttaccccatgataccgattggcaccagagatgtcmaawkaratctkttttgtcttgttctttdaaragaratacmagaaactgaccattgatraagtcagtggccatcaacgaaaatgtccttcctttatttttgcagggttttgctcacctctaccgtaatgataatctgatgttaaagaccmaataaccvatagaaagcatatttcttggccttggtctatgggatgtcagcaaggcctctatcacagtccgcacatataaatggtggtgaaataaaggaataatctacaatattcttacttgaaatgtaaataagttatttctttgatgaatttggaacgctagtatacatcccacattaagctgttgaacacagggtaatcatagttcctctgccaagtctggaaagaccatctcatgactaccactgcgatgggctgctgactatatttgtgcatttccttttatatttacttttgttcttgctggaggcccagtgtaccccagagcagatgtcaataaatgcacatttggtawwwraaaaaawaaaaaaaaaaaaaaaaaa

SEQ ID NO: 2321 - DNA, 612 bp, Canis familiaris
ggtaatctatactggtcaccgaccagggaccctcgcacadscmaaggagattgcacttggccggtgctttgatggcacatctgatggctcctccagagtcatgaagarcwacgtgggagtagccctcacctttaactgcgtagagagacaggtggccgccagagtgccttccagtacctccagagccccccctcccggccccctgccacaagcactgtcagaggaagagtgtcctcaaggagacagcaacgggctagtaggggtggccagcgcgggtgagaaggcgtggcctctctgaggtttcctgggattgctcctcagcctctgagcaactaagtcatatggtacttttcttcccccacctcatgtgacagccattgtgagactgatgtaaaaactgtcacytggttaatttaagcacatctgttctggtgcaatttgcttgttttcttcatgcctttacttactgtctttaccccatgataccgattggcaccagagatgtcmaaataaatcttttttgtcttgttctttaaaaraaawamaaraaactgaccattgataaagtcmgtggccatcmaaaaaaaaaaaaaaaaaaaaaaaaaaaaaaaa

SEQ ID NO: 2322 - DNA, 703 bp, Canis familiaris
aaggtgggcccgcgcagaagtgcccttccagttacctctcagagcccccacttcggcggccccccttgccaacaaggcaccttgttcaggagggargagttgtcctcaaggagacagcwacgggctaktagggtggcccaggcgcgggtgagaaggcgtgccctctctgaggtttcctgggattgctcctcagcctctgagcmactaagtcatatggkacttttcttcccccmcctcatgtgacagccmttgtgagactgatgtataaactgtcacttggttaatttaagcacatctgttctggtgcmatttgcttgttttcttcatgcctttacttactgtctttaccccatgataccgattggcacgtagcccccacgagatgtcmaaataaatcttttttgtcttgttctttaaaagaaatacmagaaactgaccacttgataaagtcagtggccatcaacmaaaatgtccttcctttatttttgcagggttttgctcacctctactgtaatgataatctgatgttaaagaccmaataaccmatagaaagcatatttcttggccttggtctatgggatgtcagcmmaggcctctatcmcagtccgcacatataaatggtggtgaaataaaggaataatctacmatawwmwwaaaaaaaaaaaaaaaaaaaaaaaaaaaaaaaaaaaaaaaaaaaaaaaaa

SEQ ID NO: 2323 - DNA, 887 bp, Canis familiaris
tcgccagaagtgccttccgtacctccagagcccccccctcccggccccctgccacaagcactgttccagagggaagagtgtcctcaaggagacagcaacgggctagtaggggtgccagcgcgggtgagaaggcgtggcctctctgaggtttcctgggattgctcctcagcctctgagcaactaagtcatatggtacttttcttcccccacctcatgtggacagccattgtgagactgatgtataaactgtcacttggttaatttaagcacatctgttctggtgcaatttgcttgttttcttcawgcstttacktactgtctttaccccatgataccgattggcacgtagcccccagagatgtcmaaataratcttttttgtcttgttctttaaaagaaatacaagaaactgaccattgataaagtcagtggccatcaacaaaatgtccttcctttatttttgcagggttttgctcacctctactgtaatgataatctgatgttaaagaccaaataaccaatagaaagcatatttcttggccttggtctatgggatgtcagcaaggcctctatcacagtccgcacatataaatggtggtgaaataaaggaataatctacaatawwmwwamttgaaatgtaaataagttatttctttgatgaatttggaacgctagtatacatcccacattaagctgttgaacacagggtaatcatagttcctctgccaagtctggaaagaccatctcatgactaccactgcgatgggctgctgactatatttgtgcatttccttttatatttacttttgttcttgctggaggcccagtgtaccccagagcagatgtcaataaatgcacatttggtatttgaaaaaaaaaaaaaaaaaa

SEQ ID NO: 2324 - DNA, 662 bp, Canis familiaris
ccagactggctggatcagatgcagtcacagccagggaagccattcggcggctccggccacttgccacgtggttagcgactcgtgggactcatcccaggccttcgcagattatgtcagcactatgtgatggggcccatgcttcacaggcccatgctcagtaccatcagcttgcaggggctgagacctgggttgtgacatgggctgcccagaactcccrracaccagttctgtctttctctttctgccacctttttttctctttttkccttcttcccttgcactgaggtcctggaggccttgatgggactcagcaaaggcatttccacaactgggtgtagagcctttgggccccttaccccagtactctgggaacctgggccaggttacagtgctcatcagtcactggggacagctcccctccccctgcctgaggttcctgttttgcctcctcaagcagatacccaggctttagagaagtttaggagtgtccattaccaggcctcttctccactgggcttcttaccatgctgctcccaggcctcagtccctttcatacctttattcctttcttttttttaaccaaaaaggttttcttataaaataaactttgggcaaacawmaaaaaaaaaaaaaaaaaaaaaaaaaaaaaaaaaaaaaaaaaa

SEQ ID NO: 2325 - DNA, 622 bp, Canis familiaris
agatgtccgacttatccgagagcagcatcctaccaaatccccagtgataatagaacggtacaagggtgagaagcaacttcctgttttggamaaaccaattcctcgtacctgatcatgtcaacatgagtgagctcattaagatcattaggaggcgcttacagctcaatgctaatcaagccttcttcctgttagtgaatggacacagcatggtgagtgtgtccacaccgatttctgaagtgtatgaaagtgagaaggatgaagatggattcctgtatatggtatatgcctctcaggagacatttggaatgaaattgtttgtgtaagactagaaagatgcatctcttctagaatttttttaaacccttaccaggagaaaaaaagggatattaccaactgagattgatcagcttcatctaatcacagatcatcaaacacagtagtgtttctgcctaggagttttaggaagttgttttgtactgcaagcagaaaaactgagctccaaatgacgcacattcagctttggaaaactatattatttaacctaggctgttttgttttcaaatttaggcatttaaaaataaaatactttgcattgtaarwwrmmaaaaaaaaaaaaaaaaaa

SEQ ID NO: 2326 - DNA, 747 bp, Canis familiaris
caagcagggagctcctggtgcatctggagaccgaggccccccaggccccgtgggtcctcctggtctgactggtccttctggtgaacctggacgagaggtgagcagtgagacccgttgtgcatggcccttactggggagaggtgtgctgggccaggccaagtcctggtgccccggcggaggggatgacaggacgggctgataggccccagtgcccggctgtggtggggaggatgtgatgggagggagaagggcatggggtgcagagctggtgcatggggaggaaggcacaaggaagcctggtgagcttcggcagctccagctgcatggaagggagcaggctggggcccggggggaggctgggggagcagagtgggagccgtgcaggggcagctctgaaggcatcctgcttccccttgcccagggcagccccggtgctgatggtcctcctggcagagatggcgcagctggagtcaaggtgagtatctggcggtctctatgtgcagtggggacagggaggacattctgttgggcctaacaggtcagcctggggtggcaggtcgggggtcaggatcttgtctcagttcgggaggtcagtttctccatgtctccctggaacactcttctctaagcccgagacctctctcctgacagggtgatcgtggtgagactggtcccgtgggtgctcctggagcccctgggtcccctggctctcctggccccgctggcccaactggaaagcagggagac

SEQ ID NO: 2327 - DNA, 631 bp, Canis familiaris
gcataaacttcgttcttaataatatggccctcttttgggaaaattactccaatgagaaaagatgtggaaacamgtgatgaagttcmaattctgggcagcctctgaatgaaatgctattttctttagaaacmgaatagctgccttagacacttatgaggcatataactagtatttcatatgccctataaatgtcttcagtgttcttcagggtaattaggatcttaagagatttggttcagatccmgacacatacacmttctgtattttagctcagtggtttttaaaaaaggaagatgccacacagccaaaagtgtttactttgttagacmaacccaatcggttctcaccaaatgaccggtgcttataaaaagttattactcagtaactcccaaaccacctgaatgcataggacccagagggaaatcagcctgtgtttagtatttacattggacaccggtttcataatcactgtcttatgtgaaaactggtggagaaaattctataacctctttgctgtttttgatacctgctttttgttttgttttgtaaaaatgataaagttctgaaaataaaatgtcagtgttgaataaaaaaaaaaaaaaaaaaaaaaaaaaaaaaaaaaaaaaaaaaa

SEQ ID NO: 2328 - DNA, 683 bp, Canis familiaris
cactcatcttaacgacaggggatgtctacactcttkgtttgtwarcggkttcgtgtccactagttgtggaacgttgacgtgwagtgagacgttgtggaacgatgaggtcccactctttycacagytttgtgataaatcacccgactagattggtcttttcgtggcaactattgactaggcgtgactattttaaatcwaatcattgtgagttctcatttcctttcccatgaatacccaacgagaccgaggaagghagatatagratctattcaaatcattttgtgacaatttcaactaccaaacttagggraagagttgtcgttggagttaagtccggtcgaatattctaacaatccgatatggttcttagtctcatatttaaaatatggrgactctggaggttttggraaacattgtactaatcatgtacaaatatgtttgtgttatgtcttatttatgaatttttgggactatttttatatccaaaaaattctattcaacagatttactatcgacttcataacaccaatttcctataattatccttcctcattattttttatagtctatctcggaaacgtttagtagtctccaaacagaagtctttaataaaacatttagattggarraaaaaaaaaaaaaaaaaaaaaaaaaaaaaaaaaaaaaaaaaaaaamaaaaaaaa

SEQ ID NO: 2329 - DNA, 683 bp, Canis familiaris
gtgagtagaattgctgtcccctacagatgtgagaamcaaacawtygccmaagcacaggtgatcaacaccttgcaactgcacwtcactctgcaacaccttgctactccagggtgagaaargtgtcraaacactatttagtgggctgatctaaccagaaaagcaccgttgataactgatccgcactgataaaatttagwttagtaacactcaagagtaaaggaaagggtacttatgggttgctctggctccttccdtctatatcytagataagtttagtaaaacactgttaaagttgatggtttgaatcccyttctcaacagcaacctcaattcaggccagcttataagattgttaggctataccaagaatcagagtataaattttataccyctgagacctccaaaaccytttgtaacatgattagtacatgtttatacaaacacaatacagaataaatacttaaaaaccctgataaaaatataggttttttaagataagttgtctaaatgatagctgaagtattgtggttaaaggatattaataggaaggagtaataaaaaatatcagatagagcctttgcaaatcatcagaggtttgtcttcagaaattattttgtaaatctaacctyytttttttttttttttttttttttttttttttttttttttttttttktttttttt

SEQ ID NO: 2330 - DNA, 715 bp, Canis familiaris
acaaattgggagacaactgtgtgtgctttgtgttttcgtgatttagacaaagaccctggatttgggttaagctgtttggggatccggggagtgtacgtcgggatggttgggacgtagtcgtcctttgtggaaccgtggtcttcaaactgaatatattattctccgtctaacgaaggtcctcgtaaacggtccataacgggggagttgtcgaggaaagtgcgagtttcgaatgtgtcggggtgccagcaccgggtgaccccacgagacgtggtcccctgggttcacccgacccccgatttgtcgtggtcgaaaatgtaaagtcttttctttgacgacgwwwagawagaggatgatgggattcggggatgtacatcgactgtcgttggmgcttcgtgggtcgccgtctaacggacaccccattgaccccaacttgagtttagacgaaatggggtcgtggggtgtcgggactcgtcagccaacggggtggtggataacgaacttgattgtttgactcggattccgatgtagatacagacctctcacactacatctctaccttagtgtagatctatgtcttgtttgttgaaaaggatcttaagtttctcaaagcagttttagagtggaagagcgtttagacgacaacaaataaaccatatcaaaaataaaaaaaaaaaaaaaaaaaaaaaaaaaaaaaaaaaaaaaaaaaaaaaaaaaa

SEQ ID NO: 2331 - DNA, 715 bp, Canis familiaris
tgtttaaccctctgttgacacacacgaaacacaaaagcactaaatctgtttctgggacctaaacccaattcgacaaacccctaggcccctcacatgcagccctaccaaccctgcatcagcaggaaacaccttggcaccagaagtttgacttatataataagaggcagattgcttccaggagcatttgccaggtattgccccctcaacagctcctttcacgctcaaagcttacacagccccacggtcgtggcccactggggtgctctgcaccaggggacccaagtgggctgggggctaaacagcaccagcttttacatttcagaaaagaaactgctgcwwwtctwtctcctactaccctaagcccctacatgtagctgacagcaacckcgaagcacccagcggcagattgcctgtggggtaactggggttgaactcaaatctgctttaccccagcaccccacagccctgagcagtcggttgccccaccacctattgcttgaactaacaaactgagcctaaggctacatctatgtctggagagtgtgatgtagagatggaatcacatctagatacagaacaaacaacttttcctagaattcaaagagtttcgtcaaaatctcaccttctcgcaaatctgctgttgtttatttggtatagtttttatttttttttttttttttttttttttttttttttttttttttttttttttttt

SEQ ID NO: 2332 - DNA, 654 bp, Canis familiaris
gagaagaccattaactgaagtctggaagcattctctgaaaagaaaattggaacgctaagacagtgtaatgtggttggaaatgctactgcttctctagtgaataaaatcggcctagatgcagaaaggagcaaactgtggaaatgcagawaatgcttgcagaatacatttggttcccgggagtcaccagcattgcctcttctgttttccctgtggaaccgtcaaaggagaaatcctgccccagatgctcaaggacagagggattcccatggaaagcatcactgtctatcagaaggtcccacacccgggaatccaagtgaacctcaacagctactatgctaagcagggcatcccggccagcatcacatttttcagtccctctggccttgcgtacagcctcaagcatattcaggagttatctggtgacaacattgatcgaattaagttcgccgccatcggccccagcacggcccgcgcactggccgcccagggcctgcccgtgagctgcacggctgagagccccacgccgcagggcctggccacgggcctccgcttggcactggaggccccgcgctgctgagtccccgctggcagcgggaagaaaaccaaataaaccgccctggctcctcaaaaaaaaaaaaaaaaaaaaaaaaaaaa

SEQ ID NO: 2333 - DNA, 727 bp, Canis familiaris
ccactcccccagctcgggaaggagcgggccctcccgacccctacaccagtcgggaacccttttcctggcgacccgtcarcctgctcgatcccggccttccgccstggtccccacagtcacgccggcccccggccccgccaccaccctccsttctcagsmagtgatgtgagcttcctcagggaacccgggaagggccgagggtccccgagtcagagccgaggcctggggacacaccgggaggggccatggacccccaggtctggccctcaggtgggktggaaacgtgctgacggccactatgtcccagaaggacggcatgctgctgtckcaggcagtggtgtagctcagctgtgtggacagggtgtctgtgtgcccctgtgcaagtgcctgtgcaagtgtccggccgtgtgggagccagagcgcgggcgtcaggagacctacgtyggcagcggctgagctcccggggccccaacaacaaagctgctcttccctggcattcatgcggcccacgctcactcmcmaaccccttttggragacggggttccactgcatctgggttcggactgctggacccaggagtcagccaccscccagctgccgcccccacccctcccccgcatcagagtcggcctgctgctttggtgcctcaaataaacacatgttcccmammmwmaaaaaaaaaaaaaaaaaaaaaaaaaaaaaaaaaaaaaaaaaaaaaaaaaaaaa

SEQ ID NO: 2334 - DNA, 699 bp, Canis familiaris
gtgaacgcaccttcatgccaatcaagcctgatggagtccagcgcagccttgtggagagatcatcaagcgtttcgagcaaaagggattccgcctcattgctatgaaattaatccaggcttctgaagaccttctcaaggagcactatattgacctgaaggaccgtccattctttgccggcctggtgaagtacatgcagtcagggcctgtggttgccatggtstgggagggcctgaatgtggtgaagacaggccgagtgatgctcggggagaccaacccggcggactccmaacctgggaccatccgtggggacttttgcatccaagttggcaggaacattatccatggcagcgattctgtggagagtkcggagaaggagattggcttgtggttccagcctgaagagctggtggattacaagagctgtgctcagaactggatttatgagtgacgagtgatgagggagcagacctcagtgctttgcccgttccattccctttccctcccatgagcaaggggccaggctcttgcaaatccagtgatttttgagaacttccttataacctggaggggacctcttggagctgggagtgcttcccgtacagtattatgggctgccatcagattaaaatgtttcatccccaaaaaaaaaaaaaaaaaaaaaaaaaaaaaaaaaaaaaaaaaaaaaaaaaaaaaaaaaaa

SEQ ID NO: 2335 - DNA, 2374 bp, Canis familiaris
atgcgggcgcggccgctctgggccgcggtgctgctgctgggggcgctggcgggcaccggcgtcggagtgtccaacatctgtaccacacgaggtgtccactcctgccagcaatgtctagctgtgagtcctgtgtgtgcctggtgctcagatgaggccctgcctctgggmtctccccgctgtaacctgaaggaaaatctgctgaaggataactgtgccctggaatccattgagttccccatcagtgaggtccgcatcctggaggccaggccccttagcaacaagggctctggagacagctcccagattactcaagtcagccctcagaggattgcgctgcggctccggccagatgattcaaagaatttctccatccaagttcggcaagtagaggattaccctgtggacatctactacttgatggacctgtcttattccatgaaggatgatctgtcgagcatccagaacctaggcaccargctggcctcccagatgcacaagctcaccagtaacttgcggattggcttcggggcttttgtggacaagcctgtgtctccatacatgtacatctccccaccagaggccctcaaaaacccctgctatgatatgaagaccacctgtttgcctatgtttggctacaaacatgtgctgacgctaactgaccaggtgacccgcttcaatgaggaagtgaaaaagcagagtgtgtcacggaaccgagatgccccagagggcggctttgatgctatcatgcaggctacagtctgtgatgagaagattggctggaggaatgatgcatcccacttgctggtatttaccactgatgccaagacccatatagcgctggatggaaggctggcaggcattgtccaacctaacgatgggcagtgtcacattggcagtgacaaccattattctgcctccactaccatggattatccctctctgggactgatgacagagaagctctcccagaaaaacatcaatttgatctttgcagtaacggaaaatgtggtcaatctctaccagaactacagtgagctcatcccagggaccacagtggggattctgtctacggattccagcaatgtccttcagctcattgttgatgcttatggaaaaatccgctctaaagtggagctggaagtgcgtgacctccctgaggagttgtctctatcgttcaacgccacctgtctcaacaatgaggtcatcccgggcctcaagtcttgtgtcggcctcaagattggagacacggtgagcttcagcattgaggccaaagtgcgaggctgcccccaggagaaggagaagtccttcaccatcaagcctgtgggcttcaaagacagcctcaccatccaggtcacctttgactgtgactgtgcctgccaggcccaggctgagccttccagtcaccgctgcaacaatggcaatgggacctttgagtgtggggtgtgcctctgtgggcctggctggctggggtcccagtgtgaatgctcggaagaggactatcatccctcccagcaggacgagtgcagcccccgggagggccagcccgcctgcagccagcggggcgagtgcctgtgtggccaatgtgtctgccatagcagtgactttggcaagatcacgggcaagtactgcgagtgtgatgacttctcctgtgtccgctacaagggggagatgtgctcaggccatggccagtgcagctgtggggactgcctgtgtgactccgactggaccggctactactgcaactgtaccacgcgcactgacacgtgcatgtccagcaacgggctgctgtgcggcggtcggggcaagtgtgagtgtggcagctgcgtgtgcatccaacctggctcctacggggacacctgcgagaagtgccccacctgccctgacgcctgcacctttaagaaggagtgtgtggagtgtaagaaatttgaccgaggaactctccatgatgataatacctgcaaccgttactgtcgtgatgagattgagtctgtgaaggagcttaaggatactggcaaggatgcagtgaattgtacatacaagaatgaggatgactgtgttgtcagatttcagtactatgaagactccagtggaaagtccattctctatgtggtagaagagccagagtgtcccaagggtcctgacatcctggtggtcctgctttcagtgatgggggccattttgctcattggccttgctactctgctcatctggaagctcctcatcaccatccatgatcggaaggagtttgctaaatttgaggaagagcgagccagagcaaaatgggacacagccaacaacccactgtataaagaggccacatccacttttaccaacatcacctaccggggcacttaacaccaaggagccatcctca

SEQ ID NO: 2336 - DNA, 11420 bp, Canis familiaris
tctagatgccaatgccttgggcatctgagctggcttggatgtgggtgcctcaggcagagtacatgatccatgttcaggttcagtgtgtgtctcccagtgctcacagtagactgagggctctaaagctctactcctgggggttggggtagagaatctgattggctcctgggtcaggtgactttcctgggcaggcctagaggccaaaggggcagggtacatgaccctgcaggggttctggctttgaggggtgtggtcaaccctttaggggagcaggtatagtagcaggaaatggatgatgaccccacacagtgggtacagggaagcaagatgcctaatagatgtcgacagacttaaggactggaccttgtacttctgctattctctttcccagcatcccaggagcctttccagaacccagtttgcttttctcacttgtttacaaaggtggccaagaggtgccaggaagcctgtcacttagcagcttggtgaatttgggcaactaataacagatttctgagcatcctcatctgcaaagtagagatgataagagtggctatgtgccattgtgttggggcagttacaggagccgttggagcgaagggcctagctgaatggccagcattcacatggctgggactcttagaggtgtatcttttcatcacaggaattggaaattgggatggtgcgtccctgtgtaattgacagtgtttctattatactgccccataaaataggtacatcttataattaatggcatccgagatttggtgaaatatggaatcattaccagttgtgctaatctggggaaaactacaatgtctctgagtaaaaatgtccccatctgcaatatagacacaatgttcctccttcagccagccactttgaggtcaaaatgagactgcacttgtagacagtttgacactgcccatccctcacctccctccctcctggatggcaccaattggtggacaaaggtgggctttgggcaaacagggccatcctgagccaggagcctgtttgtttatctgtggagggggaggcctcagcactgagggccaagcaaatatttgaggttatggattaactcactcaaagtccaggctgtcatggcggtgggacagcaaccgagcactttcttcccggcccaccccagtaagtccacttcgtggcaggtttggtgaggaggatggaggagggatgagcagatgttaaggttgaatcctccagccagggttccagaggctgtctagggcttgggcgaatgggaactccgggctctgccaccagccaggccagggcgctggctggcattcctcaggcctgggtgccacagtccaacggaccttcttcccagactttgaggcaagtggaagtcatctgaggactgccagggcccagggatgttgtcagggccagcttggagcccaggactctccattctccccacctgatccccacctctacacctgggggtctgatttaaacaaaagtcagcagcagccaccaagggagtcagtgaagatggaaagtcaggtcagatggagggggggggggttgcagatgggacaagcaggttgatccaccaggcttggaggcagtggaaggctcactcctcagtttcctgtcaccagtgctactgatggggctctgtgggacacccaatagtttggggcaggggataagaatccaggcctggagccacatgggcctgggctcagatcctagttccgtcatgtcctgattgtgggttctcagtaagccacttcccttccctaagcttcaatgtgccctctatgaaatggggtgatggcatccatacctccctcatgggcattgtgagctttaactgagataataagagctaatatttcctgagcatctggtgtgtataagccctgtcttaagagcattctgtggattaactcatttaatactcacaataaccccatagggcagatatgcaatttttctaaccaggaaactgaggcatggaacagttaggtatcttaccccgtgttgttgtcctggagctgggatttgcatcaagtagtctgacttggtggctggccttctacaccatgcacaaattgcttggaaaacaccatgaatgtccaataaatgttagttctgactcttaggctggctcttagatcagtgaaggcaccgccccctgatccgcacaaagaacagggccaaggaaggtacttgccatggcccttttgtactgaggccccttggatcttccctaggactccgtgccctttccactttttctcttcacccctcaaactctgggcaactgctgtgaccctagccctacccgggcaaggaccccaaggtgccagtgactgtctggctactgaacagggatcccccagccgcagccctcacattcagctcccatctggggaccaggcagcaggcagaacaggagctggtggggctgctggaagctcagaagtcctcctcagacaggtgtcagcaactccagaatgtggcagctcgcaagcctctcgctattgttgaccatctgcggaacttgcagcacagcagctcctcctggtaaggccactctcctccttcgctgggacctgtggggccttgggggcagccttctctggagcctgtgcaaggacctctaccttgcagcctctcttctgagcctcagtgtgacatgagaggcactgtggggaggaactgcctgacagtcccctgctggccagttcttggcatccagcagctgcccccatctgggcaggcgggtaggggggtggtggtacctgtgacagcagagtactgtggtaaaagcttggagcccctggagggcaagtcctgaagctccttcctccagtctgggagtgggctgcagagtccccagggcctttctcctccccctactcactccttcagctgtgaaagccccatgaggccaccacccaagctgctgccacagggcagcctcccttccaaggcacgtgtacagtgactgccctgccccatccctccctgagctccccctcccccctccaccccaaccaacagggtgtgcagcagccctgagggggaatgagctgctggcatcttcctgaagctccccaccacacactcattctgttgctggcatttgagcctcttcttgagctgcttgtctgcctggggtgcccaccgactcccacccgtgatccacttggctcctatgaccagacttgggtcagatgccttcctttcctggcctttgcactcccctgacttggtctctccacctcagcatggcccaacagactcctctcagaacccaagagacaggtctgctgtcttgcaggtctgcccagcagaggggaaggcagaggagttgctccactgagggaggtcaagtagaggtggggagggaggagggatggtgtcaacagagggttgcacaggggtactctgagagtaatgagacgggggtgatggtcctgctaataacaacagcataccaccaacatgtgtcactgggcgctgtttgacaccattatctcattcttgtgtttggatgaacaaacaggtttagagaggcaaaggcagtggctcaaggtcccatggaggtcaggctgggtccaaagggaaggctgtctatccagtacacgcactttgagtggccaactctcccatccttcaaggctggctatccactgtgtgtggaggaagagagcagatgagctgggttaagtcctgaaggcctgagacaagaacacctcttggggctcagcacagagtggcccctacctcagacccctccctctaagtgagcttcccctctctccaaaccaggctcagtgttctctagcagcgagagcgcccaccaagtcctgcggattcgcaagcgtgccaactccttcctagaggagatccgggcaggcagcctggagagggagtgcatggaggagatctgtgactttgaggaggctaaggagattttccaaaatgtggatgacacagtaaggccatccagtggctgggtgcaggctcaggggtcggctggtggccagcaggggtctggaggaacaagctggtgccccagtgctgaggccctcttgggagtctggggaggcaatgggcaccaaccccttctccattcagcctgctgtgcgtggtgtgggggtgagtggaatgaagaggacactggccctatggtcttggtcaggcacatgtgactgcaaggaacagaactctgcaattaaaaaaaaaaaaaaagaactctgcaattaactccaggaatagagagtttggggaatccttaggctgggattcccaaaaaccccactgaagaagttcagcctgccatctgcccaaaactggccactacagcctcccctgttctctgtgaccaaaatgccccttctctgtttccagccatgcacctgcagatcagggtgtgtgtggcccaagactccctgatgtctgtctacatacactccctctgtgcctcagttcaaattctcaaagggcaaaatctgattgctcaggggatcagaaggaagagtccaggtcctctctgactcctggagcctgatagtagcagccctgaggtggaaggatggattgtgaagggaagtagctctctgatacaaggctcagaccctgcatccccaggggcttacttgagcaagtaagaccaggagttgtgctcccacctggggtttcatgctaagctgtctgtagggatgcccttccttcccgtttagtgcttccaaggctaagggggcagctctgctctgccccttcagctgctacctccttgcctcaatccccactgcctctttcaacacacacccaaaagactttctgcagccacaatctgagcaccttaccttaagtctcctaggcccagcagggcagagccactgctacagtgcttgatgctgtaggcatccagccatggatctcaggtgtggcgtcccagatcagtagcagcagtggcagggacttggatagacaagcagatcttctgaaccagcaatcaacatctgaccaacaaggtctcaactctgagaacactggcttaggggaagaccacatacaggagaggcccagaaaagcctaaaggagtgatgggggttggaaggaggcaaagctgctgggtgggggatttgggtcccttccctcaaacagtccataccttgggcttccagctgtgtttggggggtggggatggaggggtgcatgggatgtgggtggagatgggccacaggcgacaaggagtgtggccatcctccgggcagcttcaccagcggctggcagcaggcaagcagggagggctagagccctcttgtccagaagcccttccccctgcagccccacctgggccagactcaggaggcgccccacgggctcccccatgcacagaggagctgatggcctaagaccctgtctctgttcctccacagctggcttactggtccaagtatgtcggtgagtgcgctctagatcccaagctgccgcgcccccgccccgctggggtccccgagctgctgcaggggccgggaaaacgcggcacagtgacgcccctcctcccatgtcgcagacggggaccagtgcgcggccctgcccccggagcacgcgtgcgatagcccgtgctgcggacacggctcctgcatcgatggcatcggtgccttccactgcgactgcggccggggctgggagggccgcttctgccagcacggtgaggggggggcggcggggaggggaggcgggggccaggagggagggggcggggggagcgccgtgccaccggccctcctgctcctcctcccccccatccacccagaggtgagctacatcaactgctcgctggacaacggcggctgctcgcactactgcctggaggaggagggcgggcgccactgcagctgcgccccgggctacaggctgggggacgaccacctgcagtgccagcccgcaggtgagccccaccccccctgtcccggtgctgggatgggcacagggaggttccctgggagggggcgagaagaccggctgcaggctgcaccggggctcggggtgcagtcagcccttgggtcacttgccctcgctggcctgccgtcctccaggtgcccccgctcaccctggggacagttctggaggagcatgagcccatagggagctcctctcccaaactcggagcagctgtagtggaccaggcctccagcatcttcctccatctaccttggatggctttattttctgaagacaccttgtccagcttggcatcccagttcccctctcacctttggcttctctgaggagagacaggaaccagagacaggagagtctgccttcttttctttttccttcctatacattttaaattttatcaaaattgtatatgccctaggaagtgagaattttacagctcttatgatgaatttcagcaggttgctcctcagggtgggttttttttgtcattcgctgtacagtgcccttggtgggcccttctcaggtgggatatctaccgcctgggcacatttccttagtcatttctttgatactctccttcctgctgtgtctctgttctgtcctggttctcctgtgactcagatctctttcctctgggttgctcttctaggtttgttattgcttctgttttccacctctttgacttcgtgttcttctttcaggggatcttccacaacgttatattccaattcttttactgggaagaaatatctaacattttattctgaattagagattcacaggaacctacaaggaaatgcctgtgcacctgctggcctgtgggttttcctgcgggaccatcgggtggcccaggtcactggcagaacccctactgcccagttcctcaggtctctaggccatttcctaagaagaatcttccaggctcatgtttgagtgggccccgcctgccttccaggcccctggcgtctgcccagtctgcagatggctgtgtgattcccccggtcagccttgcacattgctctttcctgtggctggagtcccagatcacagcctctaactcaattcaccctgtgcagagaatacacctatggtcttttacagggctgagaggagaatctagccactgggcacctgggacaggggtctagggctctagcagtttcctttccaaactcagcattcctgtctagtcctacctaccctgtgtccttcagaaatactgaggcttctggaggggttctgtaataaaagcagtttgctgctggaatcctctattactggctaaggtttttgttttctcagtcagccatatcagttaccatgtccagcttctggatttttgtggctgttatctgtctctgttctctaccgctaagcacttccccttctgatggctgcccactgctcctattatcaaacctaaatggcgcatcatgaacagatgctggaagccctcccatccctcagttctctgtcctgtgctctctcttgacagaggacctcacaactatgcacagagctactttgggggctctccaggaatgcccaccacttccttcccataattttttacatgtgttaagggcttgatggcatcccagcctgagactttacttatgttggattactctcagcagtcctgggtatactgaactctgagaagtttaaccacctgtccaaggacacacagagaggtagtgatgctgcttggcctggctcttaccattaggtggcatggtttgttgactgaccaactaaccagagaggatttgcaggttattggccttgggtgcctgagcatcacatacccctttaaccctacaggtggagcaaactagcctgcaggcaggaagtgggcaaagatgagagggcagtcttggggagtagtgcctggcaggaactcactagcttccctctatcttcagtgaagttcccttgtgggaggccagggaagcaaatggagaagaaacgcaagcacttgaaacgtgacacaaaccaaactgaccaaatagatccaaggctcgtcaatgggaaggtgaccagaaggggagaaagcccctggcaggtgagaggagaggcagctgttgagctgttgggtcaggaatcactgagcccctactgggaattcctggtcaggatgtacaaatggagagaaggaatgctgctttcacttagggtgggggtggggggtggggggtgcggaggggctgtgccgggaaagctggaggtccctggtgggagtcatgactggggcagggtgggtggagcacaggggcatggagcagatgtgcaggaaggcaatagttttaacaaagagctggaaagatcatgtgctgcatgtggcattttagacagaggcctaatgggagagatgttttgcttaagaaaagtggggaggggaaggttgaccctgaggtacctctccagcctcatcatggacactaacacttatttgatcccaggcaatgggggatacagaaatcaataagcagggcaatcccctggggggctcatagacccagggagggtcaggcctctaaacacaaccactcggtgggacctacaaggatggccagcaggataggggctgatgcaaccctcagggggatactcaacgtagccttcaggcttcaaaggtatcttagagaatttgatcctggcctgagccctaagggtgagtagaacactctgggtgctgctaagggtgactacagcaacagtatgagcagaggcacagatatgccctgcaacaggccaactctgtaaaacaagcagaaatagaaaatgccagtgaaggaccataagtccatgcttatgtgaccagggaacccaggaaaatccacctatgcagctagtgcctcaggcttaaggaccatactggggacatgctgaaaaccacgggccctgacttagagtatcaggggtactgttgtgatgtcactgcccactctcattccaggtggtcctgctggactcaaagaagaagctggcctgcggggcagtgctcatccacacctcctgggtgctcactgcggcccactgcatggaggactctaagaagctcatcgtcaggctcggtgcgggctggggccaggcaggagggggccaccagaggcctcagggaggggtggcaccagacaggctagccaggttttgggtgcttgagctccatggaaggtgtctggggtgaagaggcttgtgtgtgccccccagccactcctgtggtagaattttaggcagagtgacacctgatatttggtaggtaggggattctcttcaaatctggtgcccaggtgtttacacacatatgtttgcaaagtgagtgggggtggctcacacagacacacttgtgtctgcactcccactcccatgacacaggctgtgtgtgcagagctccagcaccattaggtgcagagacccacagggcatctacatggcctggtctcagagccaggcttcacacagactgatgagaacagagctgggccacagaggcccaagcatcttccctgcttcccccagctgctccctgcagtggtccagggccacaagcccagccccactctatcagtttctggcaggggctccccactgttgatgcaggaaagaaggaaaaggtacattgaaaatgaccaaattcatattccttccaattacctccagcacaaccaaagaccatttgcctccagtggcgctcagtttaggatttccaactaccccacccctcttctctcacccctccaggagccaccaaccttgctggagacagccttgctgtctcttgtgtgtaatccagacctttcttccctggcagagcctgtgtcctgttggtcctctctgggtcttgctgctcttgctccatccccatcgtggcttgtccttacctcaccctcaggccagcaccactcacaggagagtcgtatctctctactgtggttgctccatattcccttttgtggctccagtctatgtcccaggcttccctgctgactgcccactgctgctggcttgccaggcctcactgctccatcagtgagcgagtcctgaattccagcgttttgccccttgaggactgacaccacagcggttacgctggcagggatctgaggcatggactcgtggccctcatgattacagtgcctgggatacacaaccactctgactgctcctctgccctgcaggggagtacgacctgcggcgctgggaaaagggggagatggatgtggacatcaaagaggtccttatccaccccaactacagcaaaagcaccacagacaatgacatcgcactgctccacctggcccagcctgccatcttttcgcagaccatcgtgcccatctgcctcccagacagtggccttgcagagcgtgagctcacccaggttggccaggagaccgtggtgactggctggggctaccgcagtgagactaaaagaaaccgcacctttgtcctcaactttatcaacatccctgtggccccgcacaaygagtgcatccaggccatgtacaacatgatatctgagaacatgctgtgtgcgggcatccttggggactcacgggatgcctgtgagggggayagtggggggcctatggttacgtccttccgtggcacctggttcctggtgggcctggtgagctggggcgagggctgtgggcgcctccacaattatggcatttacactaaagtcagccgctaccttgactggatccacagccacattagaggtgaggaggcctccctcgagaaccaggtaccttagcatccctcaggcttgtgtctgaaccccagaggccactcatggagtgggggctggattgctgaatggcaatatttgaaacattaaagaggacatgtgacaagcataccagctacagttctgtctgttgttgcatcccttttctggactgttctggagggaagtaacatttgtggagcatctactgcatgtctcacatattatgaacacaatcttatctaacgcccaaagcaagtctgtgggatgggaaatagtagtaggtccaagtctggtgggatctgaggctgataacatttggagggggctctctttctgaaaaataaaaaaaagttgacagtaaaactgtgagagcttctcccaaggccctggaaggagcctgcacaaaacacagatctggaagccagagctttacagtaaacccaacaagacagtggttttgaactcctattacagaggaggaaactgaagttcaggagggtttatgtggtggaatcaggattcaaatctagatctgactcccaaacccctgtgcccctggtctgttctccactggtcttgacgggcagctgtgttgagcacctgctggatgtggagtccattatcagtccattggggaagtagctagagactcagaaggtactgtttccgctcagaatgagctcatagtgtagttggggaagctgttgaggaaccatttcacacgatc

SEQ ID NO: 2337 - DNA, 896 bp, Canis familiaris
ccaactggttgccgtggttaggatcttgaccttgaagcccgtccacacagtggcagcattccggttcttagtaggcccagcgctggcgttgctggtgactttagtgatccggtgtctggagctgacccactccagcgttgagggtagctcactttgggtcattagtgacacaggttcgcctgtagcgagtttaggttgtgttcaaagccsacgttgcagcattcatccttgtctcataaggccgccagctggtagtgtaactgttctagttggttgtttaggcacgactccaacgggtgatcctggtccagcagttagaattgtaggcacacgtctaagtgtaagcctccatctggttgcagcaggttgscgtggtgtgctggtaagcacagccacaaccyttcaaaacaacccagttccagtgggtttccttccaggtaactcacccacaggaagtctcactcactttttgttcgcaacagtaattgtcggaagtttcatgggtaggtctggaatacttcgtttcaacactgctactagtagtccaagtgagttgcaagccctgtaacggagctgcttaatcatcctgcttgttatttttttttttgtttaacgatacaatttgtttctgcaaacttgagccaaacagctgaaaaactggtgcgcttgtatgtaaaggttaatggtgattccacatgaacaattgttccttctcacaattttgtaaatggtgtttgaaatcttctattacatgaaatcgttgttttcaagagcatgttatcaaaaatttttgataaaaagttatcctaattttcagcaaaaaaccttyttkwtwywktyyttcaagaaacagcaacttatttacaaaggttttcacwwttttttttttttttttt

SEQ ID NO: 2338 - DNA, 896 bp, Canis familiaris
ggttgaccaacggcaccaatcctagaactggaacttcgggcaggtgtgtcaccgtcgtaaggccaagaatcatccgggtcgcgaccgcaacgaccactgaaatcactaggccacagacctcgactgggtgaggtcgcaactcccatcgagtgaaacccagtaatcactgtgtccaagcggacatcgctcaaatccaacacaagtttcggstgcaacgtcgtaagtaggaacagagtattccggcggtcgaccatcacattgacaagatcaaccaacaaatccgtgctgaggttgcccactaggaccaggtcgtcaatcttaacatccgtgtgcagattcacattcggaggtagaccaacgtcgtccaacsgcaccacacgaccattcgtgtcggtgttggraagttttgttgggtcaaggtcacccaaaggaaggtccattgagtgggtgtccttcagagtgagtgaaaaacaagcgttgtcattaacagccttcaaagtacccatccagaccttatgaagcaaagttgtgacgatgatcatcaggttcactcaacgttcgggacattgcctcgacgaattagtaggacgaacaataaaaaaaaaaacaaattgctatgttaaacaaagacgtttgaactcggtttgtcgactttttgaccacgcgaacatacatttccaattaccactaaggtgtacttgttaacaaggaagagtgttaaaacatttaccacaaactttagaagataatgtactttagcaacaaaagttctcgtacaatagtttttaaaaactatttttcaataggattaaaagtcgttttttggaaraamwawrwmarraagttctttgtcgttgaataaatgtttccaaaagtgwwaaaaaaaaaaaaaaaaa

SEQ ID NO: 2339 - DNA, 676 bp, Canis familiaris
ttagggttcaatcctagagaatcgttcttcagcctgttcttacagtcagtttcagagagtcaggactttattgttccyttggtagtactttttcctggagttgaattcagatgtttttcttaawgtgtccmttaatgcttccttaaaatcctcacttggttttgatttatagttcatttgcccttcttttttgtccayttktccmgactataaataatcctgagtgagagttggggtggttgggcttggtgtcttccawgtctaccccttcawgcaccagctgaatggggaccactttgggtttgagctctcttagaggtgattggcaggraagacagacaccgaactagtggggaggtctcgtgaggccgctgggatcaatgtggagtggcttgcctggttctccaccttataactggtgtgtggggaaacattaacacaacctccctgacatgcaaggatttgcccttgtgctttctttccatactgtcttgaataaatgaaaagggaatgttggcacctatcctaatcccatccccccacttacttggggtgcttatgggacagtgaagaaatgtcagaccmacgtatggttctgacattctaaattatttaataaaatgagtaacttaaaaamawraaaaaaaaaaaaaaaaaaaaaaaaaaaaaaaaaaaa

SEQ ID NO: 2340 - DNA, 700 bp, Canis familiaris
  misc_feature (60)..(60): n comprises a, c, g, or t, or includes no nucleotide
gagagcacggacgtgtacgagctgttccctgcgcttctcgggcctacacgtgctgcgcgnccgggaaccagcgctgctgcagcgctaccgggcgcaggcgtgcagcgcgcggctcagcgaggacctgtaccaccgctgccgccagagcgagctggagggcctgggctcccgcacccagctggccatgctgctctttgagcaggagcagggcaacagcacctgagcccgccccgcgccccggaaccccggcacggcgrcaccccctcctccccaacgatccgcagccccctgccagcctcgccggacagggctggccgtggcctyggatcccagggcagcccrcgggccccactctctagctgtgtgggtcctcgggctcaggacaggccccccgggagstaccttcggagccacccctccccacccccaacctggtctccctgtctcccacccttgacgctgctgattcaggctgtggccccttgagtatttatgcagtgcagtctgcctgacgccagccccatctcctaggacctcctgggagtgggctgtagatgagtggttggggacgaggggagccgagagaggaaggtggggtatctcccagcttctcccttctggacctggatgaaggtccctgcctttaataaactggttgagtgtgramwaaaaaaaaaaaaaaaaaaaaaaaaaaaaaaaa

SEQ ID NO: 2341 - DNA, 707 bp, Canis familiaris
acgccgcgaggagcagtaccctgcacccgcstctacgtccatccacaagccgctgcaagcagtgtctcaatgaggtctgcttcttacagcctccgccgcgtgtacgtgktamacaaggagatctgtgtccgcacmgtctgtgctcacgaggagctcctycgagctgacctgtgtcgggacaagttctccmaatgtggcgtgatggccagcagcggcctgtgccmgtctgtgsmggcctcctgtgccaggagctgcgggggctgctaggkcggagctggcaccccaagccctgggcctttctcggatccggggccctcaggccctgcctgacctggtgcttttctccccggcctgacattccttttattccgtaagaagttagtggactatggccccgggggggttggtctcgggcccctctcccagcctgtggccacccggggacccaaggggggctctcctccactgcccagggctcaccccctgatgaggggcatccgggcctctgatgtgccttctctgtccccctgcccccagcccctccaggtaggctgtgcccctcacaccccagctggtccactaggacttcgtacagctcccgggcatagaccacccttgttttatacaaaattaaaatggtttttammaaaaaaaaaaaaaaaaaaaaaaaaaaaaaaaaaaaaaaaaaaaaaaaaaaaaaaaaaaag

SEQ ID NO: 2342 - DNA, 631 bp, Canis familiaris
acttggatgatggaggaatggatcattgtctctwtcgtgggatttttctttgrawgtcwtttgagtgacggatatatatctattggatctttggagaaatcastttcagacctttggagaaatatttcaggccaggatatttataagaaaggaaaatggaaggttccacgtagactagaaatacttttagcgtgtatctcaaatgctgacacagacatctgtgtcatttacgctgacacagacatccgtgtcatttttcttttccagtttctcaagaaggaaggtcmatgaaaccgaaaaggtgtggttagaattctttttttcactttcgtaacmttaatttatgactgcgttcgttcagcccagtaatctgagaaatactgtgcaaattctagcaagtgtgtcttctataacctggatgttagaatagccmatatgtacmaaaagattaaatcaagtattttgtcctatgtataacacaaattacttttacacagagaaagatgtttctaggaaaaagaaattctggtaattcatactatttctttgtatgrammmaataaaatttattttaccmaaaaaaaaaaaaaaaaaaaaaaaaaaaaaaaaaaaaaaaaaaaaaaaaaaaaag

SEQ ID NO: 2343 - DNA, 610 bp, Canis familiaris
ggaagcaccaacccattctcagtacctcctctggccagaaggccccaagcgctgtccccagggctgctctggcccagtgctggccccgcgatcacctgatggacgcaccaggcaaccagggccctgaccgcagcattcccagctgctcccccgccctgccccccagctgcccggcagctgggcctcacgagggctctggggacacttccataggaaggggccggcactttgtgattgccgcgtgtttagtgttaagccccctgcccccagtgcmaatccctgtgttttgctatctcctgrsaccaaatgtaaaccgacacctgaaagccaaaggtatcgaataccttttttacccataagggtttttaccaagaatgtgtctcactaggaactaggacactcatcggcccgagaccyactcctagataaaaggaataaaggagaatcgtgtttgtaataagttacaggattgtttctgtcctggattttaaactttttgttaaattgtgaaattatggaggagttttatagaaaaaaaaagtgaaataaagtcagatgggraagccaaaaaaaaawaaaaawaaaaaaaaaaaaaaaaaaaaaaaaaaaa

SEQ ID NO: 2344 - DNA, 691 bp, Canis familiaris
accttcgctgactatgaatcgtgratgaatgcatggaaggcgtttgtaaaatgttatgragracatctgaagagaatgaatcycrcagcccctctatcacatatgatatcagccrsttgtttgattttattgacgatctggccgacctcagctgccttgtttaccgagctgatacccagacataccagccatataacmaagactggattaaagagaagatctacgttctccttcgtcggcaggcccmacaggctgggaaatagtggagttggaagcascagggggatgggggtgggcytggracacmaggtgtgtacagcgtgctgtagtggaagttttgtattatagtaatccygtttccmttttggtatactctagtcaggattgaatgtattagatgaaatgtaaggatcttgttcaatctgaaacccccatcgccccctttccctccctttttttttttacttaaacatttttatgataatttagatggaagttgtttgtcagttaatgttggttccagtccttcaaactgttcatatctgctttataacattcattgtactaacccttcaggttggggtggggggctggtgacagtttagttatgtcctcmagataaagtcttagtgaaaaaaatgaataaatgttctttagttawawwwwaaaaaaaaaaaaaaaaaaaamaaaa

SEQ ID NO: 2345 - DNA, 590 bp, Canis familiaris
acctgcagcttcacaccaggctccttgcacattgacagcctataagctgacccccmgtggctatgaatggggtcgccagwacacagataagggcmacmatcccmagggctatctaccctcacattacgagagggtccagatgctgctgtcagatcgcttccttggcttttttatggtccctgcccagtcctcatggaactacmattttatgggtgtccggcatgatcccmacatgaagtatgagctgcagctggcmaatcctaaagagttctaccmcgaggtgcacagaccttcccacttcctcaacttcgctctcttgcmagagggtgaggtctactctgcggaccgagaagacctctatgcctagttgtttcctcacctcccccttcttcacactccccmagactggagccttttacmaaaccccmaaaagaagctggtgacattcagcagcttggttccttttctccctgtttgtgcttcttgtaattgatctctcgtggcatgtagtcctgagccaaatgtaataataaattttgtataaataggaaaaaaaaaaaaaaaaaaaaaaaaaaaaaaaaaaaaaaaaa

SEQ ID NO: 2346 - DNA, 622 bp, Canis familiaris
ggctcaccytactccttgcctcagggcttcctcagcgactatgkggagccgtttycaggccaaccccccctccctcagcctgcctgtagcacccactgtgaatgttggaatatatggtctcctttgcctcagggtctgactctytctgccmaggggctttctcggctccaccagggtgtttggctccccgacccacacacaggctgtgtctcacttggtctgggacttgcaggaactgactgttacctggtgascaggcctccaccacttcccaccccttccccccggggcagggggagtggaagggtgaggggtgagagcagggctgctttcagcactgtcaaaataccrwaactcgtccttatcagccagccagtcaccatggctctgagcccccgagcaatccactaccaccctggccactctggtcccacccctgagcaccctctcsccttccctgatcccataatggaagggttaatgtgtggcatctggatggaagggactcccgggaccttgtccagccctccgaccagtttcctttctgactgatggctaaataatgtgatcgtctcctctagggcmaaamaaaaaaaaaaaaaaaaaaaraaaaaaaagaaaa

SEQ ID NO: 2347 - DNA, 680 bp, Canis familiaris
ggcgcckktctgctgcartcggactgtgtggctccaggaaggrraatcccctcgacagtgtctgaaggaaggaaactgcaaagctctgrartactcattktttgaatgtaaaagatcaatgttggatgccagagccagattccgaggaagaaaaggatattgaatgctagcatgatgaagcccaaatgagaacmagttttctccagtcacttacsaaagdaaagcccgaataggagacagactttttgctgtatctagtgggatggtccagtttttccctccatgracmatggagaaaatggatgagttctgtttttgaatatgtataagctaaatgattctcttgctccaagttaacttttcaaggaaaaatctaattgaacagctatgagctgggagcatcatactgtttgagaattttttgaaagcataaaaagtgaaaagattgttattttccaacttgattcttcaaccaaatgacacatttgcacatccttttgaatattacgaaggccaccgatgggactgtgaaaattgataacattgcagtcgggggagaaaatgtctatcgggaaagtttcggataaagctttcttttactcaatctgtcctatatggttctgaaataaatttgtgtttgattccttggaaaaaaaaaaaaaaaaaaaaaaaaaaaaaaa

SEQ ID NO: 2348 - DNA, 701 bp, Canis familiaris
actgtgtgcttcaggtagcgcgccgggcgcccggggaaggaaatccccctcgacagtgtctgaaggaaggaaactgcaaagctctgaaatactcatttttttggaatgtaaaagatcaatgttggatgccagagccagattccgaggaagaaaaggatattgaatgctagcatgatgaagcccaaatgagwacacagttttctccacgtcacttacmaaagwaaagcccgaataggagacagactttttgctgtatctagtgggatggtccagtttttccctccatgaacacatggagaaaatggatgagttctgtttttgaatawgtataagctataatgattctcttgstccaagttaacttttgcaaggraaaatytaattgaacagctagtgagctgggagcatcatactgtttgagaattttttgaaagcataaaaagtgaaaagattgttattttccaacttgattcttcaaccwaatgacacatttgcacatccttttgaatattacgaaggccaccgatgggactgtgaaaattgataacattgcagtcgggggagaaaatgtctatcgggaaagtttcggataaagctttcttttactcaatctgtcctatatggttytgaaataaatttgtgtttgattccttggraaaaaaaaaaaaaaaaaaaaaaaaaaaaaaaaaaaaaagaaaaaa

SEQ ID NO: 2349 - DNA, 683 bp, Canis familiaris
aaagcatccggaagaagacagttctgggccgtctacttcatcagtcctgccgaacggaacctgatcgaaagcctctgcggggaggtggttacaaacccactgtctggtgaaggaggtggagcctgctcctggagacctggacgcagaggcccgtcatctggtggatgaggctaagaatcttgttagtgtcactttggacattagcaagatgaatccgtaaccctcwattcaactgccttacgcgcatgcttttcacagtgactagccaaggggaktggggtttatttctgttcttaaccacacatgcatctttattggttgaagtcagcataggataatagcaccactagcagtagtgacagttggtcacacttcactaaagccagtgactgcattcattgattcatgggtaatttctaggtggtagataaagccctccaggtgattaacaatcttgataaaattaatggttcttcaagttagaagttgttgctggtaggacagtctctgtgacaggttgcgttgaatgatgtcttccttgtaaacggtgagcccaccagcgaggattactgatgcagacagttgatggggttgtttctgtatatttatttttatgtacagaactttgtaaaaaagaaactgtaaatattaaaaaaatacaaaaaaaaaaaaaaaaaaaaaaa

SEQ ID NO: 2350 - DNA, 668 bp, Canis familiaris
acgaaggagagagatgagaagtctctagaaatgaaacccgaataaggaggaagactgtcactctccgactttaagccacccmaatctgaacagcctctgaaggtaatgccagcccctcmaccmaaggagaatgcttgggtgaagcgaagttctaaccctcctgcccgatctcagagctcggacacagagcaacagtcycccacgagtggtggagggaaagcagtcccggctcagcccccggaggaaggaccagcaaggagagcagatgaaaacmaagtagatggggtgagtgtcccmaaaggccacagtgggaactccagccgtggtccaggagacggagggaacmaagaccactggaaggagccagacaggaaagacggcaaaaaggatcaagactcccgatctgcacctgagccmaagaaacctgaagaaaatccagcttccaagttcagttctgcaagcaagtatgctgctctctccattgatggtgaagatgagaacgagggagaagattacaccgaatagacctctgcatcctgtgctttctcctagtctctccaccctggaacattcgagagcaaatcaaacctctatccagacaagacaataaaactcaccatctcctggaaaaaaaaaaaaaaaaaaaaaaaaaaaaaaaaaaaaaaaaa

SEQ ID NO: 2351 - DNA, 645 bp, Canis familiaris
ggacggataacaatttcacacaggaaacagctatgaccattaggcctatttaggtgacactataggacaagtttgtaccaaaaagcaggctggtaccggtccggaattccckskmtctcatctcttctccttcttggtctggtcctgacagccaccatgacgttccccctggagaaggctctggatgtgatggtgtctactttccacaagtactctggcaaggagggtgacaagttcaagctcaacagatcagagttaaaggagctgctgatgcgggagctgcccagcttcttggggaaaaggacggatgaagccgccttccmaaagctgatgagcaacttggacagcaacagagacaacgaggttgacttccaggagtactgtgtcttcctgtcctgcgtcgccatgatgtgcaatgaattcttcgaaggcttccctgataagcagccccggaagaagtaaaggcctctgtgcgggaggggttgggtccaccagctgaggtcttacctgttggcagcaggcacaggacctcaccctggctccccagatgtgtgcaagttgtagaccatgtttaataaagattcttggaagctttaaaaaaaaaaaaaaaaaaaaaaaaaaaaaaaaaaaaaaaaaaaaaaaaaa

SEQ ID NO: 2352 - DNA, 617 bp, Canis familiaris
ccagggcgccccccggggatgtgtttacacgcagggctcacagatctggctcctggggcacctctcctccccgggagcccagacgccgctggggacactgatgggacttcctaagatcgagacaaggccagctattctgttttgtgatctcgcaggtgaccgtgggaaaggtggggacaaggatggagcgagagcagacgggcaagccctccccgtgcatggctccacctcgctcgtccgtttcctctgaccmaagctgcttgcacgtacatatactgtggcctcctttcttctcatgtgtaaattatgcctctggtgaagtgagatgtgcccgtgtaggtcccgtatttcatgcctccgttgcccgtgaaagcgtggttccctcgtggcctgtgatcgcccccgagcctggttatgttgtggtatttatgcgctctcaatctgcccgtttccaaggaaatgcatgcgtgcccagtgccgtggagaccgtcccgtccacgtagtgagcgcaggcatctgtgtagggtctgtcctccctgttgattggtctggcatttcccrtattaaaaatgatcaaataaaaaaaaaaaaaaaaaaaaaaaaaaaaaaaaaaaaaa

SEQ ID NO: 2353 - DNA, 570 bp, Canis familiaris
caggacctgaacttttttttcttttaatttgaatggttccytaaatggttaacatttctgaagccatattaagraagattttaaatgttattttggaagacttttgatgtgtgtataccaatagcmggaaataatgaatagttcacaagtccttttaaggagaaaatctwaaatgaaaagtgtatgtacagaacctatataaatgacccgttaatgcttaagcgtggaagtagtcctattgatttgtcattctcmagatatttaatatcaactgcacttatgtattatgtgtgctttaatcacgtaaaaaccacacgaggattatatagactatgattgagttactttgctatgtatgaggatgagggggatttaatagcctcataaaagttgatttggtttaaagccaagttttatgaatctgtaactagaatttgattttaatccccattatgttccatataaccttttcccaagagcaacctttccccaagagcaacccataaattgaaactcttctctgtraaaaaaaaaaaaaaaaaaaaaaaaaaaaaaaaaaaaaaaaaaaaa

SEQ ID NO: 2354 - DNA, 645 bp, Canis familiaris
attccggcataattttggtttgtttatgaratacagcatggtccatcagtgctcattggacagttraaactattgttwaarcagtgctgctgcttcttgggctcctgacttccctggaggttctagaggaaggttgcacgtrggcttattggcascmgtctatgctgaggtccttagggacccmcagtggtgtttttgaacatggggtgcagaggccttcctggatatggatgctactgaggaaggaagaaagaagccmaggccaggagcatgaaatgggggtttgcactagtagacatcgtgaggatttttccttcttgtggtaaaatgttaagaaaaattatgtgcmatctgcctctattcattggagagtttctttccmagggttatttgcctcatctctgatctttagtgaaattttatgtataattgttatgtatttattccmcctcgggaacagaaaacmcctgtttactgttgcactttagasccagtgtgttttattaatgcmactgtgacacmaagtctcctttaccttttcmaaatgttatggctttaaattatgatttattttgattgtggaataaatacmtgaatgaaaaaaaaaaaaamaaaaaamamaaaaaaaaaamacaaaaaaaaaaa

SEQ ID NO: 2355 - DNA, 670 bp, Canis familiaris
atgtgcccgccgcgcggcctcctccttgtgaccatcctggtcctgctaagccacctggaccaccttacttgggccaggagcctccccacagcctcaccragcccaggaatattccagtgcctcaaccactcccaaaacctgctgagagccgtcagcaacacgcttcagaaggccagacaaactctagaattatattccctgcacttccgaagagattgatcatgaagatatcacaaaggataaaaccagcacagtggaggcctgcttaccactggaattaaccatgaatgagagttgcctggcttccagagagatctctttgataactaacgggagttgcctggcctctggaaaggcctcttttatgacggtcctgtgccttagcagcatctatgaggacttgaagatgtaccagatggaattcaaggccatgaacgcaaagcttttaatggatcccaagaggcagatctttctggatcaaaacatgytgacagctatcgatgagctgttacaggccctgaatttcaacagtgtgactgtgccacagaaatcctcccttgaagagccggatttttataaaactaaaatcaagctctgcatacttcttcatgctttcagaattcgtgcggtgaccatcgatagaatgatgagttatctgaattcttcctaa

SEQ ID NO: 2356 - DNA, 695 bp, Canis familiaris
ccgccgtcctcggcgggtggcacggcaggatgttggctaccagagtgttcagcctcatkgcaacgggcgttttccacctcggtgtgtgtccgagcacatggaagtgttgtgaagagtgaagacttcgctctcccgagttatgtcgatcggcgtgactatcccctgcctgatgtggcccacgttaagwacctctctgccagccagaaggctttgaaagagaaggagaaggcttcctggagcagcctctccattgatgaaaaagttgaattgtaccgcatcaagttcaacgagagctttgctgaaatgaacaggagcacaaatgaatggaagacggttgtgggcaccgccctgttctttatcggcttcactgctctcattctcatttgggagaagcactatgtgtacggccccatcccgcacacctttgaagaggagtgggtggccaagcagaccaagaggatgcttgacatgaaagtcagcccgattcagggcttctcagccaagtgggactacgacaagaatgagtggaagaaataggagcctgccagtcatccatctgaacctcaccgtgttctgtttgtcacctcctggagctcaacacattcactggaaaccattatgttacagcaccagtgctaataaatgagcagtctacgtgaaaaaaaaaaaaaaraaaaaaaaaaaaaaaaaaaaaa

SEQ ID NO: 2357 - DNA, 611 bp, Canis familiaris
accgtgtgggacatctcaacacggggagatctgaccaaaccgaagaccacgtcctctcagccgtggtcacccgacacggacggccggtctcgggctcgacgttttgtgccgtttttaacgtttgattattaatggccaacaatctcgctcctgaggccctgtcaggctctccaaagacgacttcccatttacagactctgagaatgaatcctgttttgtttcctgacgttttaaacccgcctttaaggraaaaagactcgaactttgctcctcatttccccgacaacgtctgatcgatactactgtgttgatccaaaggagraacgttttcataaaaccgggttagtccgtaaacccccgatatttccaccacacttccccgacaagacgttagtggagagccgagggaccctgctggggtcggtctcggtccttaggagaacggataattacaccacccccacgacgtgttctccggacgcgtcaagaggtcgatactcccgttgtaaccgttgagctacgatggactccccgatgagatagggtttcgggtctcaaataaacgaatcttaggtagtaaaaaaaaaaaaaaaaaaaaaaaaaaaaaaaaa

SEQ ID NO: 2358 - DNA, 611 bp, Canis familiaris
tggcacaccctgtagagttgtgcccctctagactggtttggcttctggtgcaggagagtcggcaccagtgggctgtgcctgccggccagagcccgagctgcaaaacacggcaaaaattgcaaactaataattaccggttgttagagcgaggactccgggacagtccgagaggtttctgctgaagggtaaatgtctgagactcttacttaggacaaaacaaaggactgcaaaatttgggcggaaattccytttttctgagcttgaaacgaggagtaaaggggctgttgcagactagctatgatgacacaactaggtttcctcyttgcaaaagtattttggcccaatcaggcatttgggggctataaaggtggtgtgaaggggctgttctgcaatcacctctcggctccctgggacgaccccagccagagccaggaatcctcttgcctattaatgtggtgggggtgctgcacaagaggcctgcgcagttctccagctatgagggcaacattggcaactcgatgctacctgaggggctactctatcccaaagcccagagtttatttgcttagaatccatcattttttttttttttttttttttttttttttttt

SEQ ID NO: 2359 - DNA, 650 bp, Canis familiaris
  misc_feature (53)..(53): n comprises a, c, g, or t, or includes no nucleotide
cctgcctcctcccgcctgcaccccgggcccctaggcaaaacagcagagtaggnctgagcggtggacctggcttcctcccgcctcctgccgcctccttctctgggaakgggtggggggaktagaggggccccgtggggtgagcgtgctgctggctgccgtcacccctgctgcccagagccacccaagacctcgcaggcctgtgggatttgctctcccaggcttctccccacaacccctgtccgttttgtccctggctccccataccagtcccctaacttgttggttcctctcccctccctccctagagagttggtgagatcttttgagcaaaggagggtagggggagcaagaagagtggggcggctcagcaggccccccacgccctgcctgagctgctcctcggggtcacccccttcccttggatcagctggggattccctgctccttcccatgcccacattgttccctacaatacgtgcttccaagttgaggtgcctttgcctctgtttctgaggaaatgggagaaagttgcccaccacctctgacacgatcccactgaaaagggtggggtacggaaccacccaccatgttcttgaacaatcaggtttctcagtaaagaactggactatcgatccawmaaaaaaaaaaaa

SEQ ID NO: 2360 - DNA, 668 bp, Canis familiaris
taccactcccacacttgtggtagatactatgaactgagcccagatgtttcctctggatccttctaatgcccagtgtctattaataccataagattagaggccatcaccacacgacagccatcagctctccccactgtgctcccaggctggcccagttctagtcccttggkggccaggtacaacatggatgttctacwctcaattgtttaaagggagttgtaaacactaattgttgtcmaacttttgagattttattttaatccatgatagaatgtatcccattaggtttctttattccatattagratgtggaacagaattcacattaatgtggtttctttccaaatttgcgtacctttaaagaaaagttttattgatttgtttttctttgttagtacatgattattccagatctggagaaccaaaagtttttatcctttaaaatgtgtccatagggagtttccactttgggtggtgaacaagttctgaaactacrcagtggtgatgtttgcacagcatgcctctgaattgtatactttaaaatggtttaaatgataacttttatgtggttttttaacgtattggcccattttatggtatgtaaattacatctcmatgaaactgttaaataaataaatgtagaactgaaaaaaaaaaaaaaaaaaaaa

SEQ ID NO: 2361 - DNA, 908 bp, Canis familiaris
acaggatgcctcgctggcggagcgactctttcctgccaatgttgctcactcggtgtacatcctggaggattcttattgtggacccacagraccagaccatgaccaccttcacctggwacatcaaccacgcccggctgatggtggtggaggaacgatgtgtttactgtgtgaactctgatatacagtggctggaccgaaatccgccgggaagcctgggtctcctctagcttatttggtgtctccagagctgtccaggaatttggtcttgcccggttcaaaagcaacgtgaccmagacaatgaagggctttgaatacatcttggccaagctgcaaggtgaggccccttccaaaacccttgttgagacagccaaggaagccaaggagaaggcaaaggagacggcactggcagctacagagaaggccaaggaccttgccagcaaggccgccaccaagcagcagcagcagcagcagcactttgtgtagctagcccaggmccctggtgcggtaggacacctgaccacccggcccmattctctctgcctttttccccttgtactttattattaaaagtccacttccagcmytwwmtactgtctgggtggtgggttgggggcgggtgtcttgtttggccttcatggtgtagcaggcacattgtcctctgagccgggcctgcctgttcccacgttgagcagccaaagcaggcacagagtgttggcctgctcagggtcaaccagactacatgcaggtgtggggatgacaaatgctagtctgtaagctccgtgagggcagggcccttggtcatgttctctgctatgtcccaagtacctggaacattatctagcacataacaggcactcaatmaatattttttggattcaaaaaaaaaaaaaaaaaaaaaaaaaaaaaaa

SEQ ID NO: 2362 - DNA, 650 bp, Canis familiaris
ggagaagcgctgctgggatatcgccttggggcccctcaaacagattcccatgacctcttcatcatgtacatggcagcaatactatctccatcttccctactatgatggtgtgtatgatggcttgcggcccattcaggcactttatggcccmtttcagccactttcmagatgctagaaagttcaagcccagaagtttcttcagggtttggtgtatctcattggaaacctcatgggtttggcattggctgtttataagtgccaagtcaatgggactgctgcctacacatgcatcagactggttagccttcattgagccccctgagaggatggagttcagtggtggaggactgcttctgtgaacctgagaaagaagcacctgctgcctatgtaggctctttcccagcacactaactctcagtgttagcacttatgctgaagagaacccmaagctctctttactccttggtgaggagaccmatcccagaaagacaacatatgttatcactgcaaacacmaagaaactatatcacagcccttgactgaaaataatgtagaaaactttatttatgtttccagtacagagcmaaacaacaaataaaactgtaactctatgtaaaccaaaaraawrgttgctgctaaaaaaaaaaaaa

SEQ ID NO: 2363 - DNA, 752 bp, Canis familiaris
cctggcctgcgtctcacccctgcacctcgtcgagctcaggaggaagcgtgtgcctgtcacttgtggggctgccgcctgactcgggagcctgggacgactaccaggttgtggccmccargagccatccagcctggggaccccaggagcacgggttagcagcgscsggtcccacctaccccgcagtctgccccttgtaggacacccccccacccagctcacgccaggtaacacggggccccatcggtgttgtgagctgtccacccaaggggtttgggctgaattccatcttcctcctcttcagtcatttccagccaacctgaatatctagacccttcttccaattaaagactgcctctcctctgttatattcacatatacaaataatgctgccacatgttttctaattaggtgagcgagctcagagttggtgcttcttcccccaccccccactccgaaattctcttacaagataccattattatattttcacagactttgaaacacaaagtaacttagtggcatttaatattgggcatctgggcctttgaaagtatagctcagaagaaaaaccaacccacctgtgtaagtgamtcatctttctgttgttccaattctgtgggtaactgatgtaacggtgctataaacctgggtcctgggtgatgaggacacccactgagcgccatgtgtcatcacagacacttacacatacttgaaactttaaataaaaggtttatgataaaaaaaaaaaaaaa

SEQ ID NO: 2364 - DNA, 674 bp, Canis familiaris
  misc_feature (31)..(31): n comprises a, c, g, or t, or includes no nucleotide
aaactattagcgttacaggccagaagaaaanccttggtaatggtaatgatctgttactttagtgacagctgtgcccagaaaaattaaatgaaatagtagatcaaataaaactagaagagaagaagaaaaggaacccaaagagaaagaggcagaagaagctgaaaagccattatttcatggcactcctgtcacacattgagaatttcttaagttggaaggcccaatttgatgcagaactcttggaaattaaaaagaaacgaatgaaagaagaagaacaagcacggaaaaaataaattaagtgggaaacagctatttgaaacagatcataatcttgacacatctgatatcccgtttttggaagatgctggaaaccatgtggaggtagatgaatccctattccaggaaatggatgacttggagctagaggatgatgaggatgatccagactataatcctgctgacccagagagtgatctgactgactaatggactatccccatctacagagaggtgtgactgccacagcatctgtggctgtgtggaggtgttgattttcctttctttttttctaagaaaaaataattttcaggagaatattcttctgatagctttcatcattgaacttaataaactgaccttaaagtttcaaatawaaaaaaaaaaaaaaaaaaaaa

SEQ ID NO: 2365 - DNA, 667 bp, Canis familiaris
aaatcatcgcagacatcaagaagatggccaagcagggccmagatggacgctgtgcgtatcatggcmaaagacctggtgcgcactcggcgttatgtgcgtaaawttgtgttgatrcgggccaacatccaggcggtgtccctgaagatccagacgctgaagtccracaactcaatggcacaagctatgaagggggtcaccaaagccatgggcaccatgaacagacagctaaagttgcctcagatccagaagatcatgatggaatttgagcggcaggccgagatcatggacatgaaggaggaaatgatgaatgatgccattgatgatgccatgggtgatgaggaagatgaagaggagagtgacgctgttgtatcccaggtcctggatgagctgggattgagcctgacagatgagctgtcaaacctyccctccaccggaggctcactcagtgtggctgccagtgggaagaaagcagaggctgctgcctcagccctagtagatgccgacgcagacctggaggagcggctcaagaatctgcggagggactaatcaccctatactaccatgagtgggaggtgggcmatcgatgcccagttttgctgtactacttctgtaataaaagattggacactaaaaaaaaaaaaaaaaaaaaaaaaaaaaaaaaaaaaaa

SEQ ID NO: 2366 - DNA, 732 bp, Canis familiaris
tatcaacggtcaccactaaccctctctgagaggcttacaagggaaaagattttcttggcaatttcccccaacagtgtaagtcactgggaacttttttctagaaatcctaagggaagaacaaccctgttttaaatcctcttgttcttttggctcgtcacagagaaggwactaagggagcagcagkacagaagcaacctgcaggtgtttggaaktggtkcggakccggachatgagtccgcggcagagaggaggggacttttgtctcgcaccatagtgcaggctgtctctgaagawacggacttcactgtacatatgagactatttacgtgtaaccagcgtgggaatgcgtaggggaatctaatgagaaaacccmgttctcaagagtggtggtgtcagtgaacgctctgtggccagtgtaaagawaaacccttgcagttgtggacacttgtccctgaccagataccatttctgccagtattcctctgttatctgccccagaactgatgttttttaaagtactgaagagaaatgaagttgatgtctgtctgtcccaggttttaacmaaactgtatttgtaaagacattttgtagtctaagtcttgtcagacgatgttcaaagtcccggcygacgaccggcagttggtatgaggtaacctttaacattttgtaaaaggccgttcttgggraaaaaaaaaaaaaaaaaaaaaaaaaaaaaaaaaaaaaaaaaaaaaa

SEQ ID NO: 2367 - DNA, 706 bp, Canis familiaris
tgtatacacctcatgctagcctcatgaaactggrataagcctttgaaaagaratttgtscytgaagcttgtatctgatatcagcmctggrttgtagaamttgttgctgatckkgmcytkgtatccvagktaackgttcccykggwatatgtktaatascckgkacatatctttgatttramcccttagcacatscggctcggtcacttcacggctgagsttgagaacatgtttatgggagagaaatccmctgatttggagaatccmcragaccatcgggttcttgatctgtgcmggkwattcatgtgtaagagccgcctattccaggatttctctagagsstggcaagagtctgaaccagttgtcatttctgtcttgccggtctaacagggttgggaaggtccgagccttaggacccactttcctgtcttacccmatgttttcctgccagaacaccgtgggtggttaattgccttgagttggaamacggtttgcatttacmactgtaaatttattcatccttttaatttatgtaaggttttttgtacacmattctcaattcttttaagagatgacaacaaattttggttttctactgtcatgtgagaacmttaggccccagcaacgcgtcmttgtgtgaggaaaataaagtgctgcagtaamrwraaaaaaaaaaaaaaaaaaaaaaaaaaaaaaaaaaaaaaaaa

SEQ ID NO: 2368 - DNA, 657 bp, Canis familiaris
ctggaatacgcctctgagaaagagaattggtgccctggaagctgtatctgaaatcaggcacggattgaagaacttggtggctgatctgtgacsttgtatccmagttaactgttcccttggwataatgtttaataccckgtacatgatcgtttgatttaaacccttagcacatgcggctcggtcacttcacggctgaggttgagaacatgtttatgggagagaaatccmctgatttggagaatccacaagaccatcgggttcttgatctgtgccagggtattcatgtgtaagagccgcctattccaggatttctctagaggctggcaagagtctgaaccagttgtcatttctgtcttgccggtctaacagggttgggaaggtccgagccttaggacccactttcctgtcttacccmatgttttcctgccagaacacccgtgggtggttaattgcccttgagttggaaaacggtttgcatttacaactgtaaatttattcatccttttaatttatgtaaggttttttgtacacaattctcaattcttttaagagatgacaacaaattttggttttctactgtcatgtgagaacattaggccccagcaacgcgtcattgtgtgaggaaaataaagtgctgccagtaaaaaaaaaaaaaaa

SEQ ID NO: 2369 - DNA, 655 bp, Canis familiaris
cagatggcggagaagaaccaggcaaaccttgccgcgaaccacgggaacacggaccagatgtaggtcacagtcttccttaacgtctagacctttgtccggacagcaaggaagtgtaggtttaaggaccttctcttcaacaccttcttgatcactgcgaggaaggccggaggtgtctgggtcttgggccatcatggccaacatcaaaagtcggtccggcccaaaagaaaagacgtctccttctaccaaggataagccatcatctcgctctggaccacctcgggaacgtcaacctctctcgagtcgcgctcactacggctcgggccacggcgatggtgaaacgtccaccgaacatggtgaggttgcatgacttccgggtccagtggggtaacccttctccgaggctgttcgtgtgtcctggagcgaacccggcacacctctagacagagtttccgaaccggggaccaaggggagagacggagaggaaagggtagctcacatggaacccggccaacttgcacgctcggacaccggcgacccggacggcaccgtagaaaaagtaaggggacatggtcggttcttattmaaaacattttcaatcggaaaaaaaaaaaaaaaaaaaaaaaaaaaaaaaaaaaaaaaaaaaaaaaaaaaaaaa

SEQ ID NO: 2370 - DNA, 655 bp, Canis familiaris
gtctaccgcctcttcttggtccgtttggaacggcgcttggtgcccttgtgcctggtctacatccagtgtcagaaggaattgcagatctggaaacaggcctgtcgttccttcacatccaaattcctggaagagaagttgtggaagaactagtgacgctccttccggcctccacagacccagaacccggtagtaccggttgtagttttcagccaggccgggttttcttttctgcagaggaagatggttcctattcggtagtagagcgagacctggtggagcccttgcagttggagagagctcagcgcgagtgatgccgagcccggtgccgctaccactttgcaggtggcttgtaccactccaacgtactgaaggcccaggtcaccccattgggaagaggctccgacaagcacacaggacctcgcttgggccgtgtggagatctgtctcaaaggcttggcccctggttcccctctctgcctctcctttcccatcgagtgtaccttgggccggttgaacgtgcgagcctgtggccgctgggcctgccgtggcatctttttcattcccctgtaccagccaagaataakttttgtaaaagttagccttttttttttttttttttttttttttttttttttttttttttttttttttttttt

SEQ ID NO: 2371 - DNA, 1056 bp, Canis familiaris
gactcaggcatcctcactgtcctgcataagcgtccactgtggtgcctccacttgacgtgcccaactggctttcccaccagctccctgcccaaccgggggtttaagtgctccacccgacgtgattcagcgacccaaggcggatgatacaagcgcagccaccattgagaagaaagccacagcaaccatcagtgccaagccacaggatcactaatcccaaggcagagattactcgattcgtgcccacggcattaagggtacgtcgggagaataaaggggctgctgctgctccccaaagaaagtcagaggatgattctgctgtgcctcttgccaaagcagctcccaaatctggtccatctgttcctgtctccgttcagaccaaggatgatgtttatgaagctttcatgaaagagatggaagggctactgtgacagctcttaatgccagagcgtttctgttyawaccagaggttggtggggaaagaggctcttactaaacttagtgwaagagcgactttcactgtcagggtatttttaaatttcagttcaaggaatatcctaaagtttagccttgttcagaatttattgcatataagagaggattatttcattcagaataaattggttattgaagcagtgctgctaacatccattccctttcataccaccgttttcatccggtttgttccccttctccagttttttggaaacttgtgatcgaggggatcttgttacttatttgttttgattctcttcttgtgtgcagtgggcactggagtagagatttctggraaaaaaaaaaaaaaaaaacagtttattttaccccatcttgccttttgtgtttgagttattttaatattttcttgtaaatattttgtaatattttagtgaaatggatcgcaatgtcatttcctaatacmaagcaagatatgtgggaagaaaatgtacaattctttgattaaaattatttcccactgacctaaactttgagtgtttcgtggaataaataaataaatgttctacaccaaaaaaaaaaaaaaaaaaaaaaaaaaaaaaaaaa

SEQ ID NO: 2372 - DNA, 589 bp, Canis familiaris
ttgtgctaaaatggccctgatacctgctaggtggttttactgagctgttccccgawwattgraactggggramgggagagttctgtgatcccgacatcctaataaagagtccttaacctacaagcccgcgtatccacacagttgctattacgtgagaagtgttmcatctattttctgtatgcacctgtcgcctgggtaaccagcctgagccatgcctcctacacctgccagtcagtgtggactggcggtaccctggkcggagggaggctgagctgcacawtggtcgtgaatggtcgtgaacgtgggcttgacagaaggcagcagcagggctgtttgcagctactttgatttattagattacgagtttaaacatactctgttcactagttactgcgtgtgtaaactgcttatcggtcattgtatctgctggaatcttaatrcagattcctgtgaatcctgtatgcaataaaaatggctctcgggcacatctgctccacatgtgtaatatccccaaatttagctttttctcagcgtgtaagttccctctttgtcctataataaaatctgttctgttgtgawwmmmaaaaaa

SEQ ID NO: 2373 - DNA, 2944 bp, Canis familiaris
  misc_feature (1385)..(1385): n comprises a, c, g, or t, or includes no nucleotide
agactgcgcacgcgtgtcagtggccctagcagcggacccggctggcagttccttcctcggaaggagagattcttctgccatggaatcctacgatgtgatcgccaaccagcctgtcgtgatcgacaacggatccggtgtgattaaagctggttttgctggtgatcagattcccaaatactgctttccaaactatgtgggcagacccaaacatgttcgcgtcatggctggagcccttgaaggcgacatcttcattggccccaaagctgaggaacaccgagggctgctctccatccgctaccccatggagcacggcattgtcaaggactggaacgacatggagcgcatctggcagtatgtctattctaaggaccagctgcagactttctcagaggagcatcctgtgctcctgacggaggcgcctttaaatccacggaaaaaccgtgaacgagcagctgaagttttcttcgagaccttcaatgtcccagcccttttcatctccatgcaagctgtgctcagcctttatgccacaggcaggaccacaggtgtggtgctggattctggggatggtgtcacacatgctgtgcccatttatgagggctttgccatgccccactcaatcatgcgcatcgacatcgctggccgagatgtctcacgcttccttcgcctctacctgcggaaggaaggctatgatttccactcatcatccgagtttgagatcgtcaaggctataaaagaaagagcctgctacctgtccataaacccacagaaggatgagactctagagacggagaaggctcagtactacctgcctgacggcagcaccattgagattggtccttcccggttccgggcacctgagctgctattcaggccagacctgattggagaggagagtgagggtatccacgaggtcctggtgtttgccatccagaagtcggacatggacctgcggcgcacacttttctctaacattgtcctctcgggaggctccaccttattcaaaggttttggtgacagactactgagtgaagtgaagaaactggctccgaaagatgtgaagatcaggatatccgcacctcaggagagactgtattccacatggattgggggctccatcctcgcctccctggacacctttaagaagatgtgggtctccaagaaggaatatgaggaagacggtgcccgatctatccacaggaaaaccttctaatgttgagacatcgtcttcacctctctctgaagttaactccactttaaaactcgctttcttgagtcggagtgtttgcgaggaactgcctgtgtgtgtgattgtgtgtgtgggtgtgtgggtacgaatgtgtgcgcatatgcgagtgccgtgtggcccagggatcccagggcccagnaaggacgatgaactacccatgatggcaacggcctgaggcctgggggttgaccactacctggcccctgacagggaagaggctggcagagagctccactccttcgtcagctgggccttcgtctggctgtgtgggactatgtttactaccatagggagacagagagggtaaatcccgggagatttgctgctgcccatcctaggctgggctagccccaccccatcccacccccagggtgccctgaggcccaaggcagccactgcctccgttgcttgtcctgctctcaatgccaattaatcatggactgaggactagggccgaggttgagttctgtctggttttgttgcagtttgggtttgggaggctggaagagcactgcgggaactattactgagactctggggtcaggagacggcagggggccctcagcctcacctggggaccaggaccacactgggcatttgaagaggcagaagtagtgctacttctcattggtggcagagtgaatgctccagcccccaccccctgtccagggggtctcagaagagtttcgggagcctgttggccccaggccctgttacttgcttttcatccatccttgggcaatgccatcttcaaacagttttatttattaaagtgtttgttcagtatgggactggagagggagctcattgcctcctgcccaccagtcaccttgttcacactaatgtttacagaacctcagtttagcatagcgtccaaggccctgccactccctcctagtggtgaactgaccgtatccataggccacagggctatttaagagcagaggctacattcaaagtcactaccaccagcctctttctttcttcctcttccatttgctcactgccctggaatcaacaggctggttgctggttgcattttctgaaacaggaagtaggaatcactgtttggcagaggcctctagcaaaggaggggtaatgggaatccaacccccttaggactggagaaagagctgcaattaaccaggttgccttttcccactctagctgccccagggggctaggttgtagaggtgacaaggaacccactgtactaatttgtgccattcttaactttggacttgtctggtaaaggagagagggggccgaaccagagtgccaggagctgacaggcttatctcccctgatccagtggggccaggtgcctaccctagaccaggctggcctagcagtgtccaaaggctttttagcccagatggtgcaaagctggggctagcagatcttcacccgcaccctcacctgtgacacccaagacctgcccgataccagattccgggcagcattctcccccatgccgtccaacgaccaaaggccctgccaggtatgggccaaggcagcaggtgtgtgtgaaagcgatgtggcgacccgtggactgcagtgtgcttaaccagctcacctcccttctcttagcccaagcctgtcccttgcacaaaccacgttgcctggtggggcccagtgtacttaaataaagtccttccaatagaaaaaaaaaaaaaaaaaaaaaaaaaaaaaaaaaaa

SEQ ID NO: 2374 - DNA, 728 bp, Canis familiaris
tacctgcagacaccctctactatgctatgaaggagccagggacagatgatcataccctcatcagagtcgtggtgtccaggagtgagattgatttgtttaacmttaggaaggagttcargaagaatttksccamctctckktaktccatgattaagggtgrwacatctkgggactataagraagccctcttgatgctctgtggaggagaagatgactgaggcatcagccagagagagatcttatgctgtgcctgccaccgccacttsgaccttcctkcacagcttgctgcactttttatatgccmgtgcttgacacattgccttattyacgtagcgtgctaataaccmaagcatacatgctgcagaakaaaaataacggtgcttctttcttaatgktcmattaaggtctttctctttgtctgttgtagtactaaagtgtacttacgttattaaagtctaaagtctgggtcatttagattttcttttaaaagatcagactgcttttasccyttttwaaaaaacttcatttatattaaattgaaaactgtatttccytaatcggaatcttagccttaaaattatgaaatcctggaagtgttattaatcaagtttgctactaaattaaacctgaaaaattatggtggttgcattcraaagattagtaagaaataaacatttccttccsmctgaaaaaaaaaaaaaaaaaaaaaaaaaaaaaaaaaaaaaaaa

SEQ ID NO: 2375 - DNA, 639 bp, Canis familiaris
aactgaaatgggggacggatgaagaaaagtttatcaccatctttggaacacgaagtgtgtctcatttgagaagggtgtttgataaatacatgactatatcaggatttcaaattgaggaaaccmttgaccgggagacttctggtaatttggagcaactactccttgctgttgtgaaatctattcgaagtatacctgcctaccttgcagaaaccctctactatgctatgaagggagcagggacagatgatcataccctcatcagagtcgtggtgtccaggagtgagattgatttgtttaacattaggaaggagttcaggaagaattttgccacctctctttattccatgattaagggtgatacatctggggactataagaaagccctcttgatgctctgtggaggagaagatgactgaggcatcagccagagagagatcttatgctgtgcctgccaccgccacttcgaccttccttcacagcttgctgcactttttatatgccagtgcttgacacattgccttattyacgtagcgtgctaataaccmaagcatacatgctgcagaataaaaataacggtgcttctttcttaawrwwmaaaaaaaaaaaaaaaaaaaaaaaaaaaaaaaaaaaaaaaaaaaa

SEQ ID NO: 2376 - DNA, 614 bp, Canis familiaris
cctagtatcacaaagtaagctaaatctggtctactatgtttctaggggtaagcacmatgacmmwwdatatagtgttattcctcacttctgagactttgtcccagtgtacagrrattctgtgattctgacactaattctctgagaagggttgctgctatcagccttgcccactgtgacttctccacaccgaaggaggractctctagattgatgcccacagcactgtgatcagagcttccagacattgccttgagaaatgagagggcaagtgtcttcacccaaagcccccagggctccctttcttcccaatgttaggaggcagggatgtcgacagccctctcactgcagcccctagcacttggtcagtcaccctcagccttagcactttgttcactgtcctgtgtcagagcactgagctccacccttttctgagaaagtatgtcggctgaaggtggttcatttgttttttaattgtatatctttttgtatgataaaaactatattttgtacttaaccagatatattttcaccccaagtggggggtattctttgtaaaaaaaataaaataaaaataaaagttttttcatgaaaaaaaaaaaaaaaaaaaaaaaaaa

SEQ ID NO: 2377 - DNA, 721 bp, Canis familiaris
tttgggagctcttctggccaaatccgtccatggtccccctcagagcatagctctgaagaagcccgggttgagactctttggtgcacccaaatggagtgcagtgtgggttctcccttcctttgcacttcttagtgtagtgtaccctcttgtggattttcattaawttagagcattggtcactggaaagatcctgttkcccatctccttttctgacactcaccatctccatcctgatcctctggcccccacggagatgagcttktaawtkataktcactttctcacttatcaggaggtcctgaagagatagaccctgtaagacaggcaagattaataacccttttacaaaggaggttgagaaaagcmaaggggttggttcactgctcatgaactaatactgtccacctttgtatcctcaaatgctcaattgcattttagttttattttgtgtgattacagaatgttcagtctttctgtccaagccttgattttgctgatgaagacactgatggtctgatcagttattcaactgcttttggctcttgggtcctggagttgatcctaagggtttcatgaatccaaatggatgccaggcattatcataaactgaataaatcttatgtttcttacatgtgtgttttcaaatgtgtgtagatgctattgttattaataaaacaactgattattttaaaaaaaaaaaaaaaaaaaaaaaaaaaaaaaaa

SEQ ID NO: 2378 - DNA, 626 bp, Canis familiaris
  misc_feature (39)..(39): n comprises a, c, g, or t, or includes no nucleotide
aatatcataaccagtaattagcccactcccagaagcagnaaggaatctgtttgaaaatggatcagcatatattggacttaatgctgctctctgtggtctaatagcaacagtctttttcgacgcatcttaaatgtgacacaggctcgtatagctgctggcttaccaatggcagtgatcccgtttttgacggctcatgcatcttacaaaggttttgtaagtttacctttgaatacaggtgatttgaattgtgaaacctgtaccataacmcggagtggattggttggtctggtctttggtggtctgtaccctgttttcttggctatacctgtkaatggtggcctagcagccagatatgagtcagccctgctaccagagaaaggaaacatcttaacytactggactagaatttctaagcctgtctttagaaagatgttgtttcccattttactccagactgtgtttgcagcatacccttggatctagaccaatataaactaattataaaggcccttcagttacctgaacctggtctagaaattcagtgacggttaaacaaatgtgtacaccaaaaataaagttgtaatgtatgaaaaaaaaaaaaaaaaaaaaaaaaaaaaaaaaaaaaa

SEQ ID NO: 2379 - DNA, 685 bp, Canis familiaris
atcgtgttatgaacacagatcagtggtacaacgtattagaattcacagaacttgtcccatgccgaccttagtaactatgacgaagatggtgcttggcctgttcttctcgatgaatttgttgagtggccaaaaattcgtcaaacatcatagcmagaactaaatgtgaagaaaatgcaaacctttttgcactcacgtgtatacaggctaaggagaccaaaaaatcccaagggtgcattttcattcatatgaaagacttcacatagtacttttttttccttttttttaaaggaagttttcttgttacatgtgatgggcattgagccacacctcttctgagactgaatattgaagcttttgttttgagttatgtttataacatttatttcagaacaataaagattcagatttgtgacaaggccttaaagtgaagatgtcccttcagtgtcagagtggtatttatttttgtagattttaatccttgaattttagaggatgtttctcaccatgaatttggaattttaaagattttaaacaatcttaatatttggcaatgcagtccactgatagtatggctcattataatcatctgtgcacaattaggaagaacattggccttggcttctgggataatgattttctgatacaggtaataaacatatttctagatattkrgaraaaaaaaaaa

SEQ ID NO: 2380 - DNA, 628 bp, Canis familiaris
caggtccatctggmcacacgkcaggtgcacccgtggcctgcgtcccccmccsccmycsctgggcctgtgctgctgacctctscctgagaacatgcctcagctgtgagagacacaccmgactwcggggtcgatgtgggctggtttaggttttgtgtttcgggtaktcttgacaagtgctttctgctgtcccctcgagacagcccrcggctgcacactgtcctgcctccccacctccactccacagctctgtgtggcccttccagctatttggggtctgagtttcagttcatttctgattcaccgtcttgtttctcattctcgcattgggatggatcccaggaagggggcgtggcagctctgctgctgacctgccggagcttttgtcctgcctgagaccacaccgtccaggtttacacacggtttactgacggtccctgagacccctwaaacgacaaggaccgggggctcagccygtgccmagtgaggacacactgccaggctytatctcatcattcaaggacaaggcacttaatacacatttggaataaacagcttcgtgatgaagtaaaaaaaaaaaaaaaaaaraaaaaaaaaaaaaaaaaaaaaaaaaaaraaaraaaaaaaaaaa

SEQ ID NO: 2381 - DNA, 600 bp, Canis familiaris
cgtcttgaatggcaccctagtcgctgatcgtcccgtagtcccctcacgggcacaacaggaaccaacgaaattccaggacagaactcctatgccagaccaacagatgcggcgcatacagraagacccgttgtcgaacatgctcccggcgtggaaccatatcatgatggccccgccccaaaagatgtaggggcgacacgttcaccagttgtttgagagaagagggcgacctcgtccaactcgacctcctcccactcaaccagcgtgccatcccccaccaaatgtctcggtcgattgcggtcaacaacccccacaacagtagccaccaacacatgaaccgtttgtcgaaacccaacatgtgggagttgaacattggtgcatagatgctctttctgagacagtagggggtgaggctgtgacccaacatggacaaattgaaagttgcacacgacatccaagaagatttaaaggtctcaataacccattcacccctggtgagaacgggtgggtcgggttgggggagatggggatgtctgtttctcagttcagataaacacgttgtgtcttwwaaaaaaaaagaaaaaaaaaaaaaaaaaaacaaaa

SEQ ID NO: 2382 - DNA, 600 bp, Canis familiaris
gcagaacttaccgtgggatcagcgactagcagggcatcaggggagtgcccgtgttgtccttggttgctttaaggtcctgtcttgaggatacggtctggttgtctacgccgcgtatgtcyttctgggcaacagcttgtacgagggccgcaccttggtatagtactaccggggcggggttttctacatccccgctgtgcaagtggtcaacaaactctcttctcccgctggagcaggttgagctggaggagggtgagttggtcgcacggtagggggtggtttacagagccagctaacgccagttgttgggggtgttgtcatcggtggttgtgtacttggcaaacagctttgggttgtacaccctcaacttgtaaccacgtatctacgagaaagactctgtcatcccccactccgacactgggttgtacctgtttaactttcaacgtgtgctgtaggttcttctaaatttccagagttattgggtaagtggggaccactcttgcccacccagcccaaccccctctacccctacagacaaagagtcaagtctatttgtgcaacacagaawwtttttttttctttttttttttttttttttgtttt

SEQ ID NO: 2383 - DNA, 646 bp, Canis familiaris
agcttctccagcmacctggcatcctcaagaaggaggactttgaaaggacagcgctgacctggcctacrcggcytwccgcacagccctgtcccaagggcatcagaaggacatctgggcccagtccctccttagcctcttccaggccttgcggcatgacttgatgcggtcctcgggccccagagggtctccctgagagaccggcccacacccgaccacgggacagggaccagcacacacagtaatccmaatactcttccttctctactccgtttacagagcccagcaacmaagcacatgccaccaactcagagtagcggaggtaaaacaagtggcgccacgttctttgccctttgtagatccctgacaagcacgtttacccatgtcaccatgtgacctgcactggaagaaagggcaagggtgggaattcgagattcctccaraggccaaatgatttgctgagtgtcatgtggaagtctaggatatgcctcaacactgactgccgcaaataccctagggcaaggccagagctagaggatccagcacagaggtttgggcacagcgggaagatggaggacagacctctggggtgtgagttgattaaacatctttccmaagattctatggtaaaatattaaaamaamaaaaa

SEQ ID NO: 2384 - DNA, 660 bp, Canis familiaris
ggcaacacctctccccatcggagctgcgggcggagcggcggcggaacggtggtgccccccccctccccccgggcacggggccatgtacaacgggatcgggctgccgacgccccggggcagcggcaccaacggctacgtccagcgcaacctgtccctggtgcggggccgccggggtgagcggcctgactacaagggagaggaggaactgcggcgcctggaggctgccctggtgaagcggcctaatcctgacatcctggaccacgagcgcaagcggcgcgtggagctgcgatgcctcgagctggaagagatgatggaagagcaggggtacgaggaacagcaaattcaggaaaaagtggctacctttcgactcatgttgctggagaaggatgtgaaccctgggggcaaggaagagaccccaggacagaggccagcggtaactgagactcaccagttggcagaactgaatgagaagaaaaatgagcgactccgtgctgcctttggcatcagtgattcgtatgtggatggcagctcttttgatcctcaacgtcgtgctcgagaagctaaacaaccagctccagaacctcccaamccttatagccttgtccgggaatccagcagttctcgctcaccaaccccaaagcaaaaraaraaaaaaaaaaa

SEQ ID NO: 2385 - DNA, 573 bp, Canis familiaris
caaagtccccagagtgraaatttgcccatccttcctgctttctatttttatgaagaccatcaaagctggcctgagaaacacccatttgtgactttttttaaacggtcaatgatgtccttaaaatgtggtctgccacatctgtacmaatggtcctatttttgtgaagagggacgtgagatwaaatgatgttatacatcmatatgtatatatgtatttctatatagacttggagaatactgcccaaacatttatgacaagctgtatcactgcctttgtttatatttttttgactgtgatattccccacaggcacattaactgttgcacttttgaatgtcccaaatttatattttagaaaaataaagagaaaaataccgttaagtgtttcccaaacacgtggtgtggtgaatgtgtgagaagtaactcmataggtagggtctactgataaaaaaaaaaaatgtattacmaaatgccccgttcgtgtttttgttttaaaacgtgtaaatgaagatctttatatttcmataaatgatatatataatttaaarwwaaaaaaaaaaaaaaaaaaaaaaaa

SEQ ID NO: 2386 - DNA, 759 bp, Canis familiaris
ccagcagcttcagggggaaaccaacatcctcctgctggggagactcccatgggggacctcactatgkctgatggggtkcctggtgtggagaacattctcaagattggcttcttaaatgacaaaggtggaagakcggcgggagcgctacatggactcctatgacattgtgctggagaaggacgagacactggacgtggtcaacgggctgctgcagcacatcctccatcagggggactggatagagatgcagggctcctgagggcaggtgtggggctggagctgcaggctgcggagaggagggagcctcacccggaggccgccctgtggggagcgctgcttctccctgtgtgtgcagagtccaggggggtccagctgctgagcccaggcctctccctcctttcccagcgtcttctgttgtgttctccagagttttgcgggaagcccaagagatgggagggccaaccaggtgaacacaggacctatagagtgttagcactctagggaccatctagtccaggggttcttttttcccccaatttttaaaaataggaagctattcttcaaacatctaatgtgtgaaacagatcaaaataaaaaaaggaaaaaamarmwrwwwwgatttggtgggtacagggctggctggctcagcctattgtgtgactcttgatctcagggttatgagttcaaaccccacgttgggtgtagagattacttagaaaataaaatgttaaaaaacaaaaaaaaaaaaaaaaaaaaaaa

SEQ ID NO: 2387 - DNA, 704 bp, Canis familiaris
  misc_feature (3)..(3): n comprises a, c, g, or t, or includes no nucleotide
ccncacgccttgaacgacaacccggggtaccgatcccggaattgttgcggtcggtcagaactacccccgttggggctacctctcaggcctgaacgagatcagcggcttgttttgccctgcacttctatggcytagagcacccggagggctcatagcccgtgggctcctacgagagcagacaggtggtgttgccaggagtctggggcttgaaggcccgtgccaccgggktcatcgcgtcagactassaccctcttcccggtgtccytgwtgtcccgtgagttgcagccgaccggaactttgttggactaaacaaccgccwwctgtgccgaggagggagaggacgcaggtggaggccgctaagtcttgccctaacagttggcaggccgagcaatcctcttgatcttggcyttgtggttaagcaggcctcgagagcggggagaggcctagttaccagaggtgctaccaaaaggtggaggcttcctccttctctacggctttcccacatcataccgctgtgtagccccagcaggccgctttgagggacaataagcagcacgccggtcagggcgacagcggggttccttgtcagagctggtgttggtgttcatggcaagtggggcacttatttgagagaccaacagccyyyyttttttttttttttttttttttttttttttttttttttttttttttttttttttttt

SEQ ID NO: 2388 - DNA, 704 bp, Canis familiaris
  misc_feature (3)..(3): n comprises a, c, g, or t, or includes no nucleotide
ggngtgcggaacttgctgttgggccccatggctagggccttaacaacgccagccagtcttgatgggggcaaccccgatggagagtccggacttgctctagtcgccgaacaaaacgggacgtgaagataccgratctcgtgggcctcccgagtatcgggcacccgaggatgctctcgtctgtccaccacaacggtcctcagaccccgaacttccgggcacggtggcccmagtagcgcagtctgatsstgggagaagggccacaggracwacagggcactcaacgtcggctggccttgaaacaacctgatttgttggcggwwgacacggctcctccctctcctgcgtccacctccggcgattcagaacgggattgtcaaccgtccggctcgttaggagaactagaaccgraacaccaattcgtccggagctctcgcccctctccggatcaatggtctccacgatggttttccacctccgaaggaggaagagatgccgaaagggtgtagtatggcgacacatcggggtcgtccggcgaaactccctgttattcgtcgtgcggccagtcccgctgtcgccccaaggaacagtctcgaccacaaccacaagtaccgttcaccccgtgaataaactctctggttgtcggrrrraaaaaaaaaaaaaaaaaaaaaaaaaaaaaaaaaaaaaaaaaaaaaaaaaaaaaaaaa

SEQ ID NO: 2389 - DNA, 623 bp, Canis familiaris
actacgctgcaacatgcttatgatctccaccataaacatctcgwttccggtacctctwcccaactggttactctactgtcactgtcytttaacctaagactcccaatcatctcytacttggtataccatggtgccaatcaccatcaccagttaccaktatactcatgaaaataaaactccagtccataatggtgtccctgtawtcatctccccagcwttcccccawwtctccccacctctataawttccagtgagtataaaacataacgccatagcataccatcgtacctaaccattatttaatggtggagatcacgcccatgataacacctaccattacaaggctaactaacctcaccacctctctacattgcttcgctgctattataaccggccccaatgccttagccataacagtcaaaatgacgccgtacaacactcaaattctagttaaggtggtcttcctgaagttctcccaaactactaatacggtcttgacgcaacttacaatataaactcctacaataagtaccattatccyyctgaatgcgaatacgttttcttccaacattttagttgtttttttttttttttttttttttttttttttttttttttttttt

SEQ ID NO: 2390 - DNA, 623 bp, Canis familiaris
tgatgcgacgttgtacgaatactagaggtggtatttgtagagcwaaggccatggagawgggttgaccaatgagatgacagtgacagraaattggattctgagggttagtagagratgaaccatatggtaccacggttagtggtagtggtcaatggtmatatgagtacttttattttgaggtcaggtattaccacagggacatwagtagaggggtcgwaagggggtwwagaggggtggagatattwaaggtcactcatattttgtattgcggtatcgtatggtagcatggattggtaataaattaccacctctagtgcgggtactattgtggatggtaatgttccgattgattggagtggtggagagatgtaacgaagcgacgataatattggccggggttacggaatcggtattgtcagttttactgcggcatgttgtgagtttaagatcaattccaccagaaggacttcaagagggtttgatgattatgccagaactgcgttgaatgttatatttgaggatgttattcatggtaataggrrgacttacgcttatgcaaaagaaggttgtaaaatcaacaaaaaaaaaaaaaaaaaaaaaaaaaaaaaaaaaaaaaaaaaaaa

SEQ ID NO: 2391 - DNA, 609 bp, Canis familiaris
cagaagtatgtccacccaaccagactttctcaatttagctaatagtacaagctcctgtgtgttcctcatggtttgccttccktrwtttctgraagactcagtgaagctatagtcacagtaataataggtttggggatagcattacacattgaactttgttctcttgccacattatcccaattggttcaaggcccttaagatagtagtcactttagtggccttgttttcakttataatcactttactagttaaagaaatttatccagagaaaggacccaagagacctggtcaaatagaatawatraaaaactactctgtagatgacgttagcatgttggctataagccttggaatgttttgttttagcatcacctttttcctcctcctgtttagctttttttctccatcaatggttayttatccttaacagattattttcatttctagaaatctttattgtcaaatatttacttgattgataacagtttgaaaatccctaacaagtcattttcacttaacagtttttggtctttatgaatatatattttaatgttttacttttttaaaagaatataaaataataaaaatgaaaatccaaaaaaaaaaaaa

SEQ ID NO: 2392 - DNA, 605 bp, Canis familiaris
aggattttgcaagggracagttcactgactaggaaagcactacatgtktaaattcagcattagtgcawtgkgragggactttactgctttgtgcttggcatgtcattattgttccawttgacattagggccyttccmaaatgaatgtgaggaattgctttcacttcaagactttccttcttgttcagtraaactctaggaggtgttatggggggagggaagggaacccaatgccttgaaactttttatttggctcatgccatgttatgatcatgtaccttttaaaataaggggaaatagtatctttaaagttaawgtctagccacagagtttagttaacgaagaattaaactgcactgttgatcggtgctttgtgtaaawacatcttaacgttttggttgagaggggccttaagaaggacagttcattgtaggraagcaattctgtacatgagtttaagcatacttgttgcattgtctctgcagattctatttttgtttacaatattaaaatgtatgttagcmaaaatgggtggattttcaaataaaatgcagcttccacmmaaaaaaaaaaaaaaaaaaaaaaaaaaaaaaaaaaaaaaaaaaa

SEQ ID NO: 2393 - DNA, 745 bp, Canis familiaris
gaagaggagaacggagccgaggaggaagtagaagaaacttccgaggatggagaggaggaagatgaaggggaagaaagaagatgaggaagaagaagaagatgacgacgaaggggcccgcgctgaagagagctgctgaagagggaggatgaagcggatcccaagcggcagaagacagaaaatggggcatcggcatgagcccccctgcagttgggctggggbtgggaggcccctcaagggcctggagktgggartgggaacagacgagtgcagccactcttcacctggctcctggctctggacactgcaccagagctgccaccctctttgcccccagcctttctcatgtccgcctctccagacactgccccttccatccttactctgccattgttccacctcccgacctgctccatctgagctccccagctggtccctaattgctcctttccctgtctttactctcctcctctctccccattccctctggtagcctcttcctcctcacatctgcatcccagcctcatgtcctgtccatccctacccygcctgatccctgggtctccctcagatcccctcctctcagacagcgccaggccggggtggggccagggttggggccgagccccmcagctgcccccctcccctcccctttttgtataatttaataaagaaacggtcgcgcttctgcttmwwaaaaaaaaaaaaaaaaaaaaaaaaaaaaaaaaaaaaaaaaaaaaaaaaaaaa

SEQ ID NO: 2394 - DNA, 715 bp, Canis familiaris
cgagtccatggggaaatccagacccaagtggaggggctytgcaggccctgacwcaggaactggggarctgtgagtaakcggctggccstcttggagaacagggtcgtctgaggctgccwgtcsscrcsgcggcctctccgtykccccacccchaatgcagcccacggagtcctgcgcgtgtcccctagagycctgagtttagtctagttttgccatttcggtgacgggagttggggagagkcaggccccaggcctccccctyttccacatcctgccagccctgctgggtgcatgggtgagtgtgctaggagcctggcagcctttgggagcawgtatgtgtgaggtagcgtgcacatgtatgcgtgtatgaggagtggcagccttgggagcgtgtgtgtgtgtgtgtgtgtgtgtgtgtgwatgtgcaggtgcctgcctgagggcgggcgtgtatctggagcagggatgtgtgtgtgtgagaacacaggggtgagcgtgagagggactgtgtttgcatttttttttcaattgaaagcttaatatattcctatttttttagttaaccctttcctgactgcgagtgctgtgaatctctttcctgatttttctattcccttttgaaaaacmattaaagatgatttaattyaarmmmwraawrrrrvwaaraaaaaaaaaaaaaaaaaaaaaaaaaaaaaaaaaaaaaaaaaaaaaaaaa

SEQ ID NO: 2395 - DNA, 663 bp, Canis familiaris
caggctgttacccgttcccggattcccggatgtctgcttcaggctcctgaacaggtgaactggaagctgtgagttagcgctgtccttcttggagtacaggtcgtctgagctgcctgtccccgcyscggcctctccgtctccccaccccaatgcagcccacggagtcctgcgcgtgtcccctagagccctgagtttagtctagttttgccatttcggtgacgggagttgggkagaggcaggccccaggcctccccctcttccacatcctgccagccctgctgggttgcatgggtgagtgtgctaggagcctggcagcctttgggagcatgtatgtgtgaggtagcgtgcacatgtatgcgtgtatgaggagtggcagccttgggagcgtgtgtgtgtgtgtgtgtgtgtgtgtgtatgtgcaggtgcctgcctgagggcgggcgtgtatctggagcagggatgtgtgtgtgtgagaacacaggggtgagcgtgagagggactgtgtttgcatttttttttcaattgaaagcttaatatattcctatttttttagttaaccctttcctgactgcgagtgctgtgaatctctttcctgatttttctattcccttttgaaaaacaattaaagatgatttaatttaagcctgaawrrrrmwaaaaaaa

SEQ ID NO: 2396 - DNA, 618 bp, Canis familiaris
gcccgggaatgcctgaccctgctctcttcagcgcctgggctctcagaagttcttctttggagatgcccctgcctccctggatgcctttgtctttggctatctggccctgctgctgcaggccaagctgcccagtggwaagctgcaagcccacctgcgggggctgcagaacctctgtgcgtactgcacacacatcctgcagcctctacttcccctgggatggagctgacgtgccactcgcacgccagacaccagtgggcccagagacggaggaggaaccataccggcgccggaaccagatcctgtctgtgctggcaggactggcagccatggtgggctacgccttgctcagtggcattgtctccatccagcgggccacaccatgctcgggcccctagcacacagtccttgagcatagctgaggaggatgaagacgaatgacttgtcctcatgctctcaggactgagttttctactctcgtacattcyagaggcccctgtgtttccctgttgttggtacggctggaagtgagctgctgctcccataataaacctgtccacgctgamwrraaaaaaaaaaaaaaaaaaaaaaaaaaaaaaaaaaaaaaaaaaaaaaaaaaaa

SEQ ID NO: 2397 - DNA, 644 bp, Canis familiaris
cacggtggwggcttkgrgcttcagacaacggacgacccgktaccgggaactaccgtctcctkcagccaccgcctagccgccattgaacgtcccctycgtgtactttgacgagatccagtggagctccggaggcgtggacggagcctcgacagcscaggccccgttgtacggcccgcagggacagacaccttttttggaaggagtagtctacgccttggcttccggagtaaggttgggacattggtaatctgagtttcagtcctaactgttctgtctggccctgtaagttgaggatccaacagccacagcccagtaatactttgcccacttggttcctccttgtgtctgtttgttgctgtttttctaattgctctgaggtttatactcaaaagtagtgtaagacttataagcccgtctgtagcgtctccgtacaaatgcctgtgttcaaacaggktcctaatttgtgtaccaggggtcagccctgacagagggcagcttagaagtaggccgactcccactagtctactatgtagtctacttatgaggagctgaggttagccctgcgtgaattcatctttggttttataaacttatttggtactaaagtcttcctkwttttttttttttttttttttttttttttt

SEQ ID NO: 2398 - DNA, 644 bp, Canis familiaris
gtgccaccwccgaamcycgaagtctgttgcctgctgggcmatggcccttgatggcagaggamgtcggtggcggatcggcggtaacttgcaggggargcacatgaaactgctctaggtcacctcgaggcctccgcacctgcctcggagctgtcgsgtccggggcaacatgccgggcgtccctgtctgtggaaaaaaccttcctcatcagatgcggaaccgaaggcctcattccaaccctgtaaccattagactcaaagtcaggattgacaagacagaccgggacattcaactcctaggttgtcggtgtcgggtcattatgaaacgggtgaaccaaggaggaacacagacaaacaacgacaaaaagattaacgagactccaaatatgagttttcatcacattctgaatattcgggcagacatcgcagaggcatgtttacggacacaagtttgtccmaggattaaacacatggtccccagtcgggactgtctcccgtcgaatcttcatccggctgagggtgatcagatgatacatcagatgaatactcctcgactccaatcgggacgcacttaagtagaaaccaaaatatttgaataaaccatgatttcagaaggamwaaaaaaaaaaaaaaaaaaaaaaaaaaaaa

SEQ ID NO: 2399 - DNA, 683 bp, Canis familiaris
ggacatcgatgagtcccgagactgaaccagcgcgggttgctgtgcaagagcgagcgctgcgtgaacacgagtggctccttccgctgcgtctgcaagctggctttcgcgcgcagccgcccgcatggggcctgcgtgccccagcgtctgccgctaacggagagccacatcttggccatcagcgaggggcttccacctgaccctctgggcgagctctgcctctatcatctgccgcaactcggggcttggacccagagctctccagggcccgcagaccccttcctgtgcctggagttccaagggcatctgtagcgggatgccacccaggtcacaggcggagattgggtctggggcactggtggcttcctcccagagggcatttcctggaaactgataaatcagattgtgcctctttactcttggcttttgaacaaatcgatgttcacatctgcgatgggcatggactccacagggcagcaccagacccaagcctcctaggaggggctacactgagcccagcaccggggtgtgaaatagaatttattgtggctctgattatgtacacgtgagatgtgtctggccagggggccaggctggcatggtttgtacaataaatacatctgtgggcctgctctccacagctgcaagcgccctaaaaaaaaaaaaaaaaaaaaaaaaaaaaaaaa

SEQ ID NO: 2400 - DNA, 848 bp, Canis familiaris
gccccgtgcgtgctggggaagccccctcgagaagaggacagcgtctgaagaggattcagatgagtgccgctgcgtgagtggccgcatgcgtgccccggcccggcggtgcggtgtgcgagtgtcccggtggcttccagctggatgcctctcgtgcgcgctgcgtggacatcgatgagtgccgagagctgaaccagcgcgggttgctggcaagagcgagcgctgcgtgaacacgagtggctccttccgctgssgtctgcaaasctgggcttcgcgcgcagccgcccgcatggggcctgcgtgccccagcgtcgccgctwacggagagccacatcattggccatcagcgaggggcttccacctgaccctctgggcgagctctgcctctatcatctgccgcaactcggggcttggacccagagctctaccagggcccgcagaccccttcctgtgcactggagttccaagggcatctgtagcgggatgccacmcaggtcacaggcggagattgggtctggggcactggcggcttcctcccagagggcatttcctggaaactgataaatcagattgtgcctctttamwmwwrrmttttgaacaaatcgatgttcacatctgcgatgggcatggactccacagggcagcaccagacccaagcctcctaggaggggctacactgagcccagcaccggggtgtgaaatagaatttattgtggctctgattatgtacacgtgagatgtgtctggccagggggccaggctggcatggtttgtacaataaatacatctgtgggcctgctctccacagctgcaagcgcccacaccgacagttcaatccaaaaaaaaaaaaa

SEQ ID NO: 2401 - DNA, 687 bp, Canis familiaris
ccaagtggttcgcatcacttcaacaacgcaaccagagacmcggtatttgatgtacccgttcaaagagttcagccttttttatgcagctctgaaggagtttgttgacctcatgaactgtaaagaattcaagtttactttcaagatgaatccaggtgatgtgattacttttgacaactggcgcttactgcacggccgacgcagctacgaagcaggaaccgagatttcccggcacctggaaggcgcctacgccgactgggacgtagtgatgtccaggcttcggatcctaaggcagggggtccaacacagaaactgactctcccgtctgtgagctcagtaaggttccaatgactatattttgtccgatatggcaaggtggccttcctcgaccatgacccatggcctttacatactaatttctttcccatcgaacacgtcccctctcttgaacgggttcccttcctttgtgctcatacagcgagcccactctgtagacggctgagccctgctcttcccagatagagcatctctccggctctattgtacgtatgacctaatttctcttgcctgtatatgagtctccagaatgcctacaaatagtttagtgtcaaataaaacttggtcagataaagctctttttaaataaagcttgtgtttccaataaaamwmawmwmaaaawawraaaaaaaa

SEQ ID NO: 2402 - DNA, 653 bp, Canis familiaris
cagacctaagatgaattatgagaaactgagccgtggcctacggctactattatgacmamacatcatccacaagacakcgggkwaacgctatgtgtaccgctttgtgtgtgacctgcagagcctcctgggctacacgcctgaggaactccacgccatgctggacgtcaagccygatgccgacgagtgatggacaccacagggctcggggaaactctgctgagacattttgaagaacaaccatgtcggtcggactcttaatttttaattgttattctattkttaattttccagaactcattttgtttacattcaggggtgggagctaaatgagctgcagctataatcaattgtgcgcagttggaaaaaaagagagccaggacttgtggggtgggtgggacmagaaattcttgagcaaattttcaggagagagagagaagggtcttcttagaagcttgaaggatctggcttaagggaggaggagacgaatgtgtaccattatttctaaaaatcatccataaaaaaatgtgtcttgagttatggatctattagcaaaagaaattgagacatcaggagtcatgagacccatgaaaggcaattaccttgcttttgttttaaggtctgggagggcaaaaaaaaaaaaaaaaaaaaaaaaa

SEQ ID NO: 2403 - DNA, 616 bp, Canis familiaris
cttaagagagtacatccagcccatccattggcaaagccagcggggaccaagcagggcttcaggtggcagtgtggccccagcscaggagtcatttccacagatgactggggccagttaggcccttgcctgttggtctgcagggtccctgtaggaaagggtgcaygtccgtggccgctgctgttcctgctcacctggccctgctgccctgcttgggtcctcttccracacctctgcgcaaacagcccmagaattatcattagttaccamagaattacccagaatggttctgtttctacgtgtactcatgcacgcacatccacaccccacgtctccctctgaaattggtgagaaaattgagagccggctctgcagggtcttcacaggcccctgctgcagtgtcatggcagtcttgcaggttaccttggcaacgtgtacattacttttttttttggcattgtacagtcagtactataaatttgttgttttgagttttgtaacttgtagcattttaggtgccgttgtgtttgtactttgttgtgtagagtgaagggactgttgaataaacaggattagaatgcmaaaaaaaaaaaaaaaaaaaaaaaaaaaaaaaaaaaaa

SEQ ID NO: 2404 - DNA, 671 bp, Canis familiaris
ccacttgtgccacaacaccccgggctgggacagaggggtggcaggctgctcagaagtkgggtttkcarsgtggagatyckgtctcctgagggccaccccmcaggtacgcactgtccamcaggggarctgcatgtggctccccaaggcatcatgggtggcccctstgatgatctggggtcaggccatggcttggcccccamtccactgcctytgcatcaccaagtcacctcaccctgaagattttctcagatgtccttgcacagctgcttgttcctgggggtgaaggtcaagtgaggcagctccagcctggcggccccttccccagcctcctctgtggccctgcatcctctgtccccmtgatctgcttcctggggcaggggctgcagacccacaggctgcatggcagtggctggtgctcagggaccvctggtcccccmgccctratytccagtgcctcactaaccttytagcaccmtggtccgtgctcagatgtgcacctctagtgccttytcttggggttttytcagtcatcctgaccmgatatcgtactgaaaatattatgcmaaccgtttaagctttactaatcaataaatgatttaaagccmaraaaaaaaaaaaaaaaraaaaaaaaaraaaaaaaaaaaaaaaaaaaaaaaaaaaaaaaaaaaaaa

SEQ ID NO: 2405 - DNA, 651 bp, Canis familiaris
ggcagtttctttagatccttccctagcgctagtatcataaagctggcaaacttgccaagacctccttgcctttgtgggttcctctcctgaatcggggatgacaggatgctacttccmgtccaggagtccmctgacaggttctctgctggacacttcagtgccccctgstcctccccagtwaaggcggcttgtcagaagcsaagacmacttcctttcccytaaagcaccagtccmaagaggaggactgaaggcttccttytcctccctcacctcctctgctttatcttcccytctctgctttttagagttgcagctaattgttttaaggggtggagggagggagcctggggacacmaacktttttttttttttttttataatacaaagctttgcttctccgtcctccttttcttggttcccttctctcttctgaatggttggagatgcttcagctgagggaggatggggattgtgggacaaggtcccttggtgctgatgggctgaaggggcctgagttgtgggcaggtacagtttcctgtgggctctggggagcctgtcatgttgctgtgtcctggtgagcagcccgaccaataaacctgcttttctaaaarraaaaaaaaaaaaaaaaaaaaaaaaaaaaaaaaaaaaaaa

SEQ ID NO: 2406 - DNA, 693 bp, Canis familiaris
gggtgagggcttcaggaggcgtcggctgcaaatgcagagcccagctcgccggcaccccctgccggtcccacaaggtctgtcccccatggcgcattctggggggacagttgcctgatgactcagcccctgcttgccactcggartccctctaaggaacccaggggtcagccccacctgggggccacccgccgtccacgccgtccgctcgcaggaccccagagcccmacgtggccactgctgttaggcttccatgagcatcgtctcatcgactggggaggaaggttccagacctgcaggctcctgctctctccgcaggaaagaacccccatgtaaagcatcagtggagaacacccggggccacacgagggatgggggaccctggcscccaagcgcggcgcgaacttccmaactgcggcaagagctttcawactcacggtgcacgtgtgaccggttctggttgctttctcttaatatatattttatttcaaagcaaaggggagggcgtggacaccattccagcacagaggtcatcaggctggttaggggtgcgttgttcaaacatgtttattgaaataacaccaggcagtgatacgttggaatactaaaaagtaaccgagatttttatatttttgtaaattatactttccatactgtaaaaaaaaaaaaaaaaaaaaaaaaaaaaaaaaaaaaaaa

SEQ ID NO: 2407 - DNA, 782 bp, Canis familiaris
accgctccgggggtggaaggaacctctgcatccgcaggcagcgcacagcctccagggtgagggcctcaggaggggcgctgcatatcagggcgcagctcccgacacccctgccgttcccacaaggtctgtcccccatggcgcattctggggggacagttgctgatgactcagcccctgcttgccactcggratccctctaaggaacccaggggtcagccccacctgggggccacccgccgtccacgcctccgctcgcaggaccccagagcccaacgtggccactgtgttggcttccatgagcatcgtctcatgactggggaggaaggttccagacctgcaggctcctgctctctccgcaggaaagaacccccatgtaaagcatcagtggagaacacccggggccacacgagggatgggggacctggcgcccaagcgcggcgcgaacttccaaactgcggcaagagctttcatactcacggtgcacgtgtgaccggttctggttgctttctcttaatatatattttatttcaaagcaaaggggagggcgtggacaccattccacacagaggtcatcaggctggttaggggtgcgttgttcaaacatgtttattgaaataacacaggcagtgatacgttggaatactaaaaagtaaccgagatttttatatttttgtaaattatactttccatactgtagattgtgtacgttgtgtgtttttatagaaagctaataaattaaaggtacagcggtacctgagaaactgaaaaaaaaaaaaaaaaaa

SEQ ID NO: 2408 - DNA, 679 bp, Canis familiaris
  misc_feature (16)..(16): n comprises a, c, g, or t, or includes no nucleotide
atacgctttccactanactgaaaccacggtcagagagttcgactttgttaaatatcttgagatgtaaatgaaaagtactactgtatagtaaaggttggtttgagccaactctccagctgctgttgaagaatatattgtcagaaacacaaggcttgatttggttcccaggaccagtcaacacggtgatacgacataaatcaagccattgattcgggggaacagaagatccataacttagaaatacgggttttgacttaactcatcagagaactcgccataagcgttgctgatagaagagtggcctcgtcattcctctcgacaaggatacagcagactgcacggccaagaagcctcggaccatggcggacacgtattcggaatcagaagctgacgtggtcactcgcacccatcgcattacctcactggccgcccaaatgggggaaggtgtctgtccgctgcctcacctgtgacgctgcgacttaggcacctcaacccaagacccgaatgctgggaggggagtttcttccgatggctgggcagcctcggcggagcagatgcacgaagaccacggagtggtagggcagcccgcggcggccttccttccccagcacggccctggggtgttctcggtgaagtcgggacgctctgtttagagcaagggcttggaaacagaaatgcc

SEQ ID NO: 2409 - DNA, 645 bp, Canis familiaris
ctgggatcccttgccgagccttagcctatgaagggcacdacacatgtgcttctgccagcccgctttgcagtttgggctctgtcctcagtgtagcacccbtaaggcctatgaggccaaagcctgctggcaatggcccctctgtgcagtgaccytggcctgtcaccactggtccccgccaagtgcagccagctcaccgtgcmaaatcatgcmataaatctgtaaaatatgtttgtaaataccmaatcgggacaggtgktcgctttcctccacccaccagcatttcaatcagtagggtttcttatatgagtaggtccttgggcattgacataggtggtagacactggaagtgggaacatttggaaccggttgggctgtccattcagtctgtccttgaggtttgcagtcaccaggtggcagcaaggcctgagtgatgctgctgtgttcaacaactcacacccacttgtgactcctgagtttctttcacctgctttttaagaatgaaatgtaacttctttactacmatcagctcgctattaataatcccatataccagtatcatgtttaaaagatgctaaaagagaaattaaaaatttaaatgtttaaatagaaaaaaaaaaaaaaaaaaaaaaaaaaaaaaaaaaaaaa

SEQ ID NO: 2410 - DNA, 617 bp, Canis familiaris
tcccttgcagcaagcactacaatgaaagtgattgtcaatgtgaatagcttagaatatctgcmaagggtaagctgattgaatgccytgaagtattatccactggtcagatggtaaactttattcagtattatttatagttgcacttgattgcagttctgtgaggctcgagcattcatacacctcacctgccttggcaagcctatttttgtgacatggcagcacagatttaacactatgcattgaaagcactttttttgtaatgagtttaacctcccaccccccccaaaaggaatgccaattaagttttgttaactgtgtcatcaacttatcctagtacctcagtattcattcctgttacctgcatatcttaaaagaaatagctgttactaatgcctttttgttttctattgagtgtacactactgaataagtgtaggagtttatgtttaccatgtaagttttgcaacactaaaaatattttgaatatcagtcatgatggcaatttctgtataaaagagccttaaatggaacattgtttttgagatcaaactccctaccctcacaaaaatggccacgttgcaataaaaattgtggcatattamaaaaaaaaaaaaaaaa

SEQ ID NO: 2411 - DNA, 653 bp, Canis familiaris
tcggaagcgcttccccaccgcctgccccggaggcccaatgacatttatgtcaacatgaagactgactttaaggcccagctggcccgctgccagaagcttctggacggaggkgctcggggtcagaactcatgcagtgagatctacattcatggcttgggcctggccatcaaccgtgccatcaacattgccctacagcttcaagcgggcagcttcgggtccttgcaggtggctgccmatacctccaccgtggagctcgtcgatgagctggaaccagagactgacacacgagagccgctgacccgcatccgcaacaactcggccatccacatccgtgtcttcagggttacccccaagtaatcgaaatgagggtgggcaccttatccacccacccccacataggtaggctcagatattggctcttcttgtactgaatacagtcatggacctcctacccgagccacgtaagaaaaaccctattaccttacagcccagaggactctgartggagaagaagagtattgtctcttgttgggcccaagcagtgggtcttcctgagtctatgatctgtaaccattgtcagagacaataaaaactacccagctgtgttagtatgcagccaccccamwraaaaaaaaaaaaaaaaaaaaaaaaaa

SEQ ID NO: 2412 - DNA, 640 bp, Canis familiaris
cctgctgtttgacctgtggggaaggaggtgaaggaggccatcaacccacagtgtttcaggctcaagtgtgagcagaactggggaagcctgtgctccatcttgagcttctgcactcagccatccagaggccccccacgggtaccccctgagcgccaactccaaagtggacagagccaagctctccaagacccaaccacggggaggcaggtcaccacgtctcagagcccagtagttgggagacaggccgaggcaccaagggcgagggaggtagcaaaagccacctgaacgcacatgcccggggcagggcggtcggccaagggggccagggaacttctggaagcagcgagtgggaggaggaaccctccgagtattccgatatccggaggtgaaacaaaaaggcctggccgggaaatctttcctccacgccgtccattttcttctctatggacattccaaaacatttgccattaaagaggggggatgtcacacgcaggatttggtggggattgcggactggatgaaggtgtgtgctagcagaatgaacaggtgaggcagagacggcctaggcagcggcaggtctcagctgttcccggctgttccccaggggggctccactcttgcacatcctcaagtgcgatcg

SEQ ID NO: 2413 - DNA, 653 bp, Canis familiaris
tccgggattaatatccatgttgtggatctgacccagggccatatcgcgcttgaggaagctgaaggagcagtgtgctgtcggatctacaacctgggcaccggcacgggctactcagtgctacagatggtcgaggccatgaagaaggcttctgggcaggagatcccatacaaggtggtggcacggcgggaaggcgacgtggctgcctgttatgccaaccccagcctggccctcaaggagctgggctggacagccgtcttagggctggacaggatgtgtgaggacctgtggcgctggcagaagcagaacccttcgggctttggtggccaggcctgaggccctcccctgccacgcatagkagaggagacaaaggacagcctgctctccggcctctggtgggcacccatggcctcagcctccctacctcaagccccagatgggcctgctcagcccgccgggcacaaggcccagcactgtgctgggcaggagttggggctcgagcccttcaggctccaggaagcatcgggaccaccggaagcaaacgggggagcaggggccctgggagaggcactaatttatactgctctgaaagagcttcccmaagtatttaaaataaaagttttttaacattgggamaraaaaaaaaaaaaaaaaaa

SEQ ID NO: 2414 - DNA, 430 bp, Canis familiaris
agcgccgccgtctctccgcccgctgtcccggactccagccgccccttctcgccatggatcccaactgctcctgcgccgcggggggctcctgcacgtgcgccggctcctgcaaatgcaaagagtgcagatgcacctcctgcaagaagagctgctgctcctgctgccccgtgggctgtgccaagtgtgcccagggctgcatctgcaagggcgcatcggacaagtgcagctgctgtgcctgatgtgggggagagcctattcctgatgtaaatagagcgacgtgtacaaacctacagtttgtggggggttttttggtgctttttgttttgggtccaactctgacccgtttgctactacattcctagttattttccctatgaaataatacgtgaattataataaaagctgtcgactttaaaaaaaaaaaaaaaaa

SEQ ID NO: 2415 - DNA, 774 bp, Canis familiaris
atggtgaaaagccacataggcggctggatcctgcttctctttgtggccacatggagtgacgtgggcctctgcaagaagcggccgaagcctggaggatggaacacagggggtgggagccgatacccaggccagggtagccctggaggcaaccgctacccaccccagggcggtggtggctggggtcagccccatggtggyggctggggtcagccycatggtggcggctggggtcagccccacggtggtggctggggacagccacatggtggtggtggttggggtcaaggtggtggcagccacrgtcagtggggcaagcccartaagcccaaaaccaacatgaagcacgtggcaggagccgcagcagccggggcggtagtagggggccttggtggctacatgctggggagtgccatgagcaggccactcattcattttggcaatgactatgaggaccgttactatcgtgagaacatgtaccgctaccccgascargtatactaccggccagtggatcagtacagcaaccagaacaactttgtgcgtgactgcgtcaacatcactgtcaagcagcacacagtgaccaccaccaccaagggggagaacttcacagagaccgacatgaagatcatggagcgtgtggtggagcagatgtgtgtcacccagtaccagaaggagtccgaggcttactaccaaagaggggcaagcgccatcctcttctccccgccrcccgtgatcctcctcatctcgctgctcattctcytgatagtgggatga

SEQ ID NO: 2416 - DNA, 872 bp, Canis familiaris
cgtttgcactcctgcgctcgtcaacccggggtcatcgctcccatggggacctaaagcgtgccgaccgggaccacatacctcttgaagaagaaggagtcagccgtggcgagtcgtctctgtagaagctctgggtatagacatccgcgcactgttccatttcctgctttgatttgccctcgaacttgggaggaaccgatctgcagcatgacctatcgatatggtgctaaatgtgtctgtggactccgtgctctccgtctccaggcagttatatcgtatactttgaacgttgtgtaatagttacccactgctggtgtttatgtgaacaykttctataaactcagacccgccccccggcccctgcctccccaccccggagtttcacactatgccactttggggcgagcgcaaggtctagaataggactccccactcaccgcggctctgtatgcttctgcttggttcatcccttccctctccagtaggcacgacgttaggtggaaagcctcgcatggggaacamacaagagtcccgcttttcaattcccgccgccaccccaccctccccagttcccagattagacttcaagccgatttttccttttccaragcctctgacaratgacccagttagaaggaagcaaaaatcccttcatctttgtgcactgttgtgagaccatgccttcattaaagaatgaaaaaaaamwvaaarwmawaatagagaatatttttggcattcctctaatgttgtgtgttgtggtttattatttttttttgtgcggggcgggggagggtgattaattttaattttaaaaattttaggaaatttatacaagaaactttttaataaagtatattgaaagtgtcaaaaaaaaa

SEQ ID NO: 2417 - DNA, 664 bp, Canis familiaris
gactgggcaccaatccctgaagagttcaggattgaaaggacttccagggaatgaaragctctcctatatccgcatgctgataccatataactaccatccctcaaggtgatagaaaattcccmaggcagtttgaacacctaaatctaaacctttagcatccmaaaaattgttttggaaatttaaatggtgactgaagtagccagtgttatttctggtaaattctctacccttggaagtatttctgttgctcctggatgacccctgggccatcaaggcctactgtagaggtagctagacactttttttttttaaatgaaagtttttgcgtgtttcttaaagatttatttatttattcatgagagacagagacacaggcagagggagaagcaggctactccatgcaggttgcctgacgtgagacccgggtctccaggatcatgccctgggccgaaggcagcaccagaccgctgagccacccaggctgccctagctagacccttttacctataaagtttcttctaagatataacttagcacacaatgatttcatattaaataattgtaataaaaaaaaagaaattgtgatagcccaaaggaaaaaatacagtaattaaggaaaaaaaaaaaaaaaaagcccagaatactttcatgacattaaaaaaaa

SEQ ID NO: 2418 - DNA, 660 bp, Canis familiaris
gggtttaccccccmaagtggwgrwctgwcgatgctcccctctaggggctgygatgggracagggtctctggtctgcagcccmagctcatccctccayctgcctgtttytactccacctgcacttcagcaatgcctccctgggtgtcctccacatgctcctttgacytccagaggcgagggccagaygsagatgwaggggaggccccaggaccctctggtccccaggcccttgccctcagctccacctccccaccggggkbtgtgaggctkckgactgcccgtctcactcccatggagtcactaagccmatgycaggscctctctgcccgcaggggctcagacscctgcctctccmttatttatttgctctgctctcaggaaagtggtgtggtcctcgcccccmaaaggaacctggcmaaggcctgaggacgccmtthcaggtcactgctggccaacgcccagccccagcctatgccctaggctgcacacagcaccccmagcagcagtgtggtggctttgctgaggggccggggcccttggggtggggccatgccttcagtgtgttctgtaaagggtctgggatttgtcggtgccmaataaatgttcattcactgawrrwraaaaaaaaaaaaaaamaaaaaaaaaaaraaaaaaaaaaaa

SEQ ID NO: 2419 - DNA, 695 bp, Canis familiaris
atgaccatccgtaccaccagagctatcgccacctgtcgccaagtgtttcagaataccgcaagtacagtaagcacgacatgaacmaagytctggatctggagatgaaaggtgacatycgagaaatgcctcacggctatcgtgaagtgtgccacaagcaaacctatgttctttgctgagaagcttcatgaggccatgaagggttctggaactcgtcataagacactgatcagaattatggtttcccgttcagaaattgacatgaatgatatcaaagcatgctaccagaagttgtatggtgtctctctctgccaagccatcctggatgaaaccaagggagattatgaaaaaatcctggtggctctctgcggagactaactttcctttgatgatcacaagcttcttgatcagaagactttttaatcatatcttttcattccatatcatagacttaaataggaaagttttctcagcaggaatacagtctagctaaatactttctaaaaaatatagcctataaattgtttttatatcgcaactccatgtaagtttttttaaaactatatttatcccaaaatataaaacctcataaaagattgtcctaataacattacctgagaaagatgtttgtgcagtagaaaataaaatgatcttgcaggamaaaaaaaaaaaaaaaaaaaaaaaaaaaaaaaaaaaaa

SEQ ID NO: 2420 - DNA, 722 bp, Canis familiaris
caactggttaacctattagatcaatcatcttcascatttgtatctgggggggggaaaaggtcctawwaktcacacbtatktavacytymaattttkagcmmtagccmaatagctttcctgaagcakttcaatagttaagcactcgtgctgamawacawgtcckkaaatctttgcmaagtactgdaaagattgtttgaatcattcmarttgatttcagctgcataccgdatacctgatctcttcvaaacattttcgttctttctktacccakgttaccawgtctgaawgtactctgtcaagctatccctttaagcagctgtcttcctactgttgttaawgtaattctgatgaagctgaacgtagactgaatgtgaagtctgagcacmwaaataccacatgacatccctaccattttagagtacgtactttttttaawacctaagacctctagaaatgaatgtatcagagaatgtaatgaaaayctcttactttaaaaaagtccttsatttggggagggacatgggaatgctgcatttgttggcctctttctttctgaaaggacctttcctctgcttacccttcaacatgcttcaattttatcaacgctatgttttgtatttttcaagcmagtatcaactctgcaataaagagatgtagtttttttaaramrraaaaaaaaaaaaaaaaaaaaaaaaaaaaaaaaaaaaaaaaaaaaaaaaaaa

SEQ ID NO: 2421 - DNA, 595 bp, Canis familiaris
ctcccgttgtaatyttcaggaagtccagagtcctgktcacatccgggcactkgcagacaaggcccagtcctctgccacatcctgctgggggacctcagkataagrwaagcatcccatctggggcccatgtgccattccgagtgaccctgcacaggacccctggggcgtcctcaggcatcttggactggaggtccmatwaaaggttagcmacttactattaaatggttgtttcagatcatattgatctctttcctttttccttttgtcctttcactgtatgacttgaatcagttttgattctatttgtaagtttttctcgttactaggcgcctgcatttcggttgcattttctttggcagtatgtagggattcmgcatcctggttttcaaccctcctgcaggcactgtggggttacgagggccagcggacccacctcacttaccttgctgcatgatggtcagtagctgatctgttatggcattcactcccagmttaattttctgtgtttgaaatatgtgcatatgtgctttaccagaataaaacctctgaatttaaaaaaaaaaaaaaaaaaaaaaaaaaaaaaaaaaaaaaaaaa

SEQ ID NO: 2422 - DNA, 632 bp, Canis familiaris
gaaagaggtctaggaactgaagagactcccgtggaatctcaggaagtccagagtccggttcacatccgggcacttgcagacaaggcccagtcctctgccacatcctgctgggggacctcaggataagaaaagcatcccatctggggcccatgtgccattccgagtgaccctgcacaggacccctggggcgtcctcaggcatcttggactggaggtccaataaaaggttagcaacttactattaaatggttgtttcagatcatattgatctctttcctgttggtccgtgttgtgtcccttgtcagctgtaatgaacttgaatgcagttttgattctatttgtaagtttttctcgttactaggcgcctgcatttcggttgcattttctttggcagtatgtagggattcagcattcctggttttcaaccctcctgcaggcactgtggggttacgagggccagcggacccacctcacttaccttgctgcatgatggtcagtagctgatctgttatggcattcactcccagattaattttctgtgtttgaaatatgtgcatatgtgctttacagaataaaacctctgaatttaaaaaaaaaaaaaaaaaaaaaaaaaaaaaaaaaaaaaaaaaaaag

SEQ ID NO: 2423 - DNA, 731 bp, Canis familiaris
tgtccggctgtcccgcagttcgtgctttagcacatctgtggtcagccttttccaagctcgtgagccaccgttcagatatatgtatcgaaggtcgctatgccctgcccttaktctgctgcatcgaacagaatawactggracaagtagmaaaggaattgttgagagtagcacaatcktgaaggaacctaaaatggctgcttccaytwtgaatccctacataaagcgttccgtgaaagtgaaaagcctraatgacatgacagcmaaagagaggttctctcctatcacatccaacctgatcaatttgcttgctgagaacggtcgcttgaacaataccsctggagtcatttctgccttttccaccatgatgagtgtgcaccgtggagaagtgccgtgcacagtgaccaccgcgtctcctttggatgaagccactcttactgaactaaaaacggtcctgaagagcttcctaagcaaaggccaagtattgaaattggaagttaaggttgatccgtcaatcatggggggaatgattgtscgtattggagagaaatatgctgatatgtctgcaaggaccmagattcagaagctgagcagggccatgcgggaggttttctgaaagtattgattatctgtcagtgaaaactcctaaaacttggagcaacaataaaatgcttcctgaacagaaaaaaaaaraaaaaaaaaaaaaaaaaaaaaaaaaaaaaaaaaaaaaaaaa

SEQ ID NO: 2424 - DNA, 4050 bp, Canis familiaris
gcaacacgggaaacctcacccggcccggacacggacaggattgacagattgatactctttctcgattggctgggtggtggtgcatggatggcgtgtccgtggaaatttcttttcagggccaaattccaccaatatggaatgaaagaggaaaaagacattaacaacaatgtggagaaaccccccggtgccactcccagcccatcgacacaggatgaccttaagaatcacaagcatcataatgattccccgcagcccctcacggagaccgtacagaaacttccagaatctctggacaagctgcatgcaaccccattgtcccgcccacagcacgtgaggatcaaaaactggggcaatggcaggagtttccaagacacacttcaccacaaggccatgggggttttagcttgcacgtccaaattatgcatggggtccatcatgaacaccaagagtttgaccagaggacccagcgacaagcccacccctacagaagagcttctacctcaagccattgaattcgtcaaccaatattacggctccttcaaagaggcaaaaatagaggaacatctggccagggtggaagcggtaacaaaggatatagaaacaacaggaacctaycagctgacgggggatgagctcatcttcgccaccaagcaggcctggcgcaacgctccccgctgcatcgggaggatccagtggtccaacctccaggtctttgatgcccggagctgttccactgccaaggaaatgtttgagcacatctgcaggcacctgcgttatgccagcaacaatggcaacatcaggtcggccatcaccgtgttcccccaacgaactgatgggaagcatgacttccgagtctggaacgcccagctcatccgctatgctggctaccagatgcccgatggcaccatcctgggggaccctgccagtgtggagttcacccagctgtgcatcgacctgggctggaagcccaagtacggccgctttgatgtggtgcctctggtgctgcaggctgatggccaagaccctgagttcttcgaaatcccacctgaccttgtgctcgaggtacccatggaacatcccaagtatgagtggttccgggagctggagctgaagtggtacgccctgcctgcagtggccaacatgctgcttgaggtgggtggccttgarttcccagggtgccccttcaacggctggtacatgggcacggarattggggtccgggacttctgtgatgttcagcgctacracatcctggaggaagtgggcagmarratgggcctggaaacacacaagctggcctcactctggaaggaccgggctgtcattgagatcaatgtcgctgtactccacagtttccagaagcaaaatgtgaccatcatggatcaccactcagctgcagagtccttcatgaagtacatgcagagcgagtaccgctcccgagggggctgccctgccgactggatttggctggtccccccaatttctgggagcatcactcctgtgttccaccaggagatgttaaattatgtcctgtcccctttctactactaccaggtggaggcctggaaaacccacstgtggcwggatgagaagcggagaccccasaggaraaagattcaacttaaagtcytggttaaagctgtgctttttgcctccatgctgatgcgcaagacmatggcatcccgagtcagagtcacaatcctctttgcgacagagacgggaaagtcagaaacgctagcccgggacctaggggccttgttcagctgcgccttccaccccaaggttctctgcatggacgagtacaagctgagccacctggaggaggagcagctactgttggtggtgaccagcacgtttgggaacggagactcccctggcaatggagagaaactaaaaaaatctctcttcatgctgaaagagcttaccaacaakttcaggtatgcsgtgtttggcctcsgctccarcatgtaccctcagttctgtgcctttgctcatgacatcgaccasaagctatcgcatctgggggcctctcagctcrccccarkwggggaaggggatgagctcartggamargaggaagccttccgctgctgggccgtgcaaaccttcaaggcagcctgtgasacgtytgatgtgcgaggcaaacactgcattcagatccccaggctctacacttccaatgtgacctgggacccacaccawtacmggctcstgcaggactcgcagcctctggacctcaacaaagccctcagcaraatgcatgccaagaacgtgttcaccctgaggctcaaatcacaacggaatstacagagtccaawatccarccgcaccactctccwggtcgagctctcctgtgaggacagccaggagctgagctacctgccaggagaacatctcggagttttcccaggcaaccagctggccctggtgcaaggcatcttggagcgagtagtakacagccctgcaccccwccagcctgtgcacctggagaccctcagcgagaggggaagctactgggtcagaracaakcggctgcctccgtgctcactcagccaggccctcacctacttcctggacatcaccactcccccgacccatctgctgctccgaaagctggcacagctggcccatcaatatgccgaaaggcacaggttggagatcctgtgccacccctcagaatacaacaagtggaagttaaccaacagtcccaccttcctggaggtgctggaggagttcccatccctgcgggtgtctgctggcttcctgctctcccagctccctattctgaaaccgcggtactactccatcagctcctccagggactgcacacccatggaggtccacctcacggtggctgtgctcgtgtaccccacccgagatggccaaggtcctttgcaccatggtgtctgtagcacatggctcagcaacctgaagccccaagacccagtaccctgctttgtacgaagtgccggcaacttcaagctccccgaggatccctcccgtccttgcatcctcattggacctggcacaggcatcgcccccttccgcagtttctggcagcagcggctccatgacatcaagcacaaagggctccggggcagccgcatgaccctggtgtttgggtgccgccgcccagatgaggaccacctgtatcgggaggagatgttggagatggcccagagtggggtgctgcatgaggtgcacacagcctattctcgcctgcctggccagcccaaggtctatgttcaagacatcctgcggcagcagctggccagccaggtgctccgcatgctccatgaggagcagggccacctttatgtctgtggggatgtgcgtatggcccgggatgtggcccataccctgaagcacctggtggctgccaagctgagcctgagtgaagagcaagttgaggactattttttccagcttaagagccagaagcgctatcatgaagatatctttggtgctgtgtttccctatgaggtgaaaaaagatggtgcagcaaaacagcccagcgatcccagagttccagcagcccacggaagaagttaaagttgctgccatagaattgaatgatgaaaccaactctcgattatccgaggcacagggcctggggagatggaaggaaattgcatccccgagcctcatatctatctccccagctgcttccccaccacacccgatacttgacctggactgttacacccagatgatggaactcttgtctcccttgagcccaccctttccaggtaatggagagaatgggccttccaggtctcttgaaaactaaatctgcagtgccaggcccagctgatgggtgagaaggatggcactttcatctgattgcaccactttgagtgaccagcaggagacgatgtcgtcctgccctgtatttatttgccctgtgtacagttatttataactctgtatttaaaacaaaacaaaacaaaacaaaaccccaacccactcttctcggaagggccacttgggccctccctgtaccactccttgaaaggagatatttatatgaaatgcattttattttaacca

SEQ ID NO: 2425 - DNA, 637 bp, Canis familiaris
gggatgataatggacaagctgctgcccgcagcccgctccgcaccaagcctgagttagcaactgggcgtcctgctccctacccgctgcctgtgatctgtcgcgactccgcggggcccgcggtctcggtaaccaagaacacttaccttctctgattgtttttcaagttttaaaacttcgatccacccctatgagagcaagttcttgtggaaatatttttggtgtaaaatcattccagagtatgtactatttaactgatagctgcatgaaagtaagattcgtgttactttggctttttgtctccgttgacacggttgcacatttccaagttactacagcgtgaaaactgtgtgtttaaaaaaaaawaaaaaacaaattaaaaaaaagagattgtggcctggttttgtaaaagttttaggtaaaattacaactgattgttttaggaatcattattaaaatttttctgcaaatcataaagctatatcaaggtgttgagcttagccactatgcacattgtaattactcatcgtggctgtccagttctatgatgcattctggcattttgtaagctgctctgactagcaatatatagattcatttaatgtgttaacattggttaataaatgtatttaaaaaaaaa

SEQ ID NO: 2426 - DNA, 637 bp, Canis familiaris
  misc_feature (42)..(42): n comprises a, c, g, or t, or includes no nucleotide
aacgtaaccaaaggaactgaggtgtggtgccgatgccacagngagctctgtgagggacgccaggatcgcggcactctgkgccgggaggggacagcatgccacccgcgkcagcccccgcggccctcctggcctgcccctcgttcctcggtggcarcagccggacacttgtccctgagagcatccgtcatagacctgttgcccmgtgtcgtcctccgtgcatctccacctgtgcatcagctctaacatcgtacctcgggcacgggtcccgtgtgcacgaccgagaccccacttctgagagggagacagggcacaggtacacmaagtcacgtacgattccacgagacctaaaaccgcaagctgttcacayagcgcttgtgtaaggaggtctgctcacaggtagcggcagatgaacccgagcgaccccmatctaacmaataaaggatttcacgtacggtaccccctccacacatggtctagtctgatttacctgcttcctgggtacmaacttttgactgtctctgagtaacagtatttattgaaggaaagtctactgctattacctgttgtgataaataaagccmctcgtgtgaaarmmwmmaaaaaaaaaaaaaaaaaaaaaaaaaaaaaaaaaaaaaaa

SEQ ID NO: 2427 - DNA, 643 bp, Canis familiaris
atccccaataaagaccaccatttccccaagaagtctccccagcagtctgtgtggtgttcagacatatgaagagaagmaagacagcatctaggacggagtaggcccctcagagagaatrcttgagacktcactcagtggcccccagaggtgctccatggagaaggcaagccatggggatgaaaccccacatggtctagtggaaccatggcagccacccatgtacatkccccatggtcggtcccagccccttcattccagttgcctcccactgtagaggttgtaaatcccaattcccactgttccagcttcctttgcagcttggggtgacaagtgaccaggtatggccagtgcaatttaagaggcagtcttacaggggcttctgggaaagtttatgcttttctgataaaagaggcagacatgggtaacacctctctgcccctccattcttcctgccttgattgaggatgtgatgcctggagccccaacakccaccttgctacaatgagaaaaaggccaagagaatctcacagacactgacctaccctaccatcatttgaccaagctgatgccggcagccatactccttcagaattcttgtaaataaagtgaaaatcccctttgtttwaarmwaaaaaaaaaaaaa

SEQ ID NO: 2428 - DNA, 770 bp, Canis familiaris
tgtcataagtcgcagatctcggcatgtcagtcctctttttttatttttttttaattttaatttattttatgatagtcacacagagagagagagagtagtaggcagagacataggcagagggagaatcaggctccatgcaccgggagcccgatgtgggattcgatcccaggtctccaggatcgtgccctaggccaaaggcaggcgytwaaccgctgcgccacccagggatccccatgtcagtcctcttaagataaaagtcaaagccctaccyytaagcactctccctttcatcccagaccactgtcctatttgctgttctgcttgttaggcactctggtgcttccatattgctctgtgccttatcctgccttgggggtttttgcatatactgttcctctgtttggacagctcctcaccatccttccccaacccgcaccccacccctttcctgggtaattcctgttcatcccttgaacttaactcaaatgtctcttccatggcaaaacctcatctgctatcagagaacctatcaaacccccaggtgataccctttcacaatttgccataacttttttttttatgataaatagcatgataaaccatgatttatttgtgggawwrwwwrawwaatatttacctgtaaccctagactctaaatttcttgggttaaggggtatctttgtcttgttaacaacatatttcaagcacattgcctatttataataggtgctcaataaatatttggagaatgaaaaaaaaaaaaaaaaaaa

SEQ ID NO: 2429 - DNA, 943 bp, Canis familiaris
gagcggccgtgagtgtgcgctttcctcgggcccccgcccgccgccgccgccggcatgagctacgaccgcgccatcaccgtcttctcgcccgacggccacctcttccaggtggagtacgcgcaggaggccgtgaagaagggctcgaccgcggttggcgtgcgaggaaaggacattgttgttctgggcgtggagaagaagtcagtggccaaactgcaggatgagagaaccgtgcgcaagatctgtgcgttggatgacaatgtctgcatggcatttgcagggctcactgctgacgcgaggatagtcatcaacagggcccgrgtggagtgccagagccaccggctgaccgtggaggacccagtcaccgtggagtacatcacccgctacatcgccagtctgaagcagcgctacacgcagagcmatgggcgtaggccrtttggcatctctgcccttattgtgggtttcgactttgatggcacgcccagactctatcagactgacccctcggggacataccatgcctggaaggccaatgccataggtcggggtgccaagtcagtgcgtgaatttctggagaagaattacactgatgaagccattgagactgatgacctgaccattaasctggttatcaaggccctcctggaagtggtycagtctggtggcmaaaacattgractggctgttatgaggcgagatcaacccctcaagattttaaatcctgaagaaattgaaaaatatgttgctgaaaytgaaaaaraaaaaraagaaaatgaaaaaaagaaacmaaagaaagcatcatgatgatggaatcttgtagtgatttttaaattcagatcatggaagattctcaaaaatgatatgtaggcatttccattccatttactgtccgtgtgtcctgcaataaatttgtttgttgacctttaaaaaaaaaaaaaaaaaaaaa

SEQ ID NO: 2430 - DNA, 624 bp, Canis familiaris
ggcctgacctaagagagactgaactgatgtcctagagtcctgagtatctaaatggcccaccttatgccaggagcaggagatgccagtcactgcaggggagttagtgtctggtcagctgggctctagcctgtagcttttccttctgcgccctgacaccagtggtagtcgtcatcgagccttttgctgttagcacttgagctccctcacgcatctcatcttgtcagatgaatccagtttctccaaagtggaagctaaccaagcatgagagaggtttgtctgcaggaccaagcggcttggatcccaccaaccccatgccccaaatccatgtgtattgacttctggctgcctgggtgctgtccttgcttggggagctcagacagcctgctctctgggcatccttggccaggctccccttctgcagcttggacccctcctttgccctccattctctgcttggctccagtccccaggggacagttgccacctcccactgccaatgctcttttgttatttgtgatttttttctttcggggcccaaagttcagtgaaactgtaagcttcaataaaaggaccaaactctagactctcmaaaaaaaaaaaaaaaaaaaaaaaaaaaaaaaaaaa

SEQ ID NO: 2431 - DNA, 639 bp, Canis familiaris
agcgtgtgcctacctggtctctggggccaccggtcaggctggacgtcacccstccccccacctccactagtggcccagggcctgttctgggagraagcccctcacactgcctgggctcttggccaagcggccmaacagatgaagtcagtgagtgtktggggtgaktgtgagctcaccagggcccccagaggaagccctcgggcctcttccctcccctcgcaccagggcgggagcccaggcctgttgccggcagctgtgcttgcagctgtgctgttgctccctccaggaatgtgggacaggcccmaatgttccagggagatatcccatgtgggtgggggcttagcgtcgccaatttggttctatgtttggcctccaactatacaaagttccccctgaataacgattgcacagggtccatgtgggaggaaccccagtgccaagctgggtgtcctgaaagcccggcccctccaagtgttaagacagcaagggggggagttaggaggctgccacctcgggagacgtgcttctgtgctgcactgtgaacacagcctcgtgctgtgcccttcttctcacccagggatactaagacaacmataaaatctttttcttttgtgtaaaaaaaaaaaaaaaaaaaaaaaa

SEQ ID NO: 2432 - DNA, 605 bp, Canis familiaris
atgtcagactcggcacttgccgggccagtggtcacacgcctctgtgggatgtggtactccwacactagtgccaccctcctccaccccagagaggctataggcctttgagggctctcaagccctaggaaaccaggagcctggcagaactagaggagggaacaggttcagcccacccctgcctccttcctctttcatcaagtgccttacaaccacaaagagtcagttctctggttccttgggagctgacagctggagagtgactcttcaaaatgtgtatttctgtctcaaggtcacaggttcgcyctctgaccaggagactgcagtcaggaaccagttccccttgcaccatcccagaggctgccttgggcatctctgcagcccactgaccctgtcacccagctgttggaacccggtttccccgagttttcaacacggaaaggtgaaggaggttgcagggaatgacgttccccgcccccccagcgcgctctcacctctcttggactgtgagaaggctacctgggcatctgattcactcagaccattcagtctgtaataaaaatatttattgaacaccaaaaaaaaaaaaaaaaaaaaaaaaaaaaaaa

SEQ ID NO: 2433 - DNA, 674 bp, Canis familiaris
ttagaagagattaaggacttatgcctgaaatgaagatgtactggcctgatgtgatccatccactcaatcacagccatttctggaagcacgagtgggagaagcacrgcacctgtgctgcccagctagatgccctymactcccrgaagaaatactttggtggaagcctggacctgtaccgggacccttgacccttaatagcatgctcccaaaaattgggaataaagccgtctatcaactactaccaggtttcagatattaaagatgcccttgccggcatatacggagtcatacctaaaatccmgtgtcttccgccacaacaggagggtgtttgttggaaagtagaacacacaggagtctcaactgatgagacccgattgtcttcagccaggaccacaggcaggaagaaatattctggatgacaaatccatgtaggtttttgttctaccacmaatttgagtgacttgggcagccggggtggctcrgcggtttrgcgccgccttcggcccggggcgtgatcctggagacccgggatcgagtcccacatcgggctccctgcatggagtctgcttctccctctgcctgtgtccctgctctcccccttactctgtgtctctcatgaataaataaataaaatctttaaaaaaaaaaaaaaaaaaaaaaaaaaaaaaaaaaaa

SEQ ID NO: 2434 - DNA, 678 bp, Canis familiaris
accggtccggaattcccgggatgaaccgcaagttgagccgggtggagatcctccaagcacgtcatcgactacatctgggacctggagttggagctgaactcggaatcccmagtcgggaccccgggagsccgggggctccccgcccgggctccgctcagcaccctcaacggcgagatcagcgccctggcggccgaggcggcgtgtgttccggcggacgatcgcatcttgtgtcgctgaagcgcctctctccaggactggcggaccccagccctccagggggcgagaagaacccgtgctctgatcctgccgagcgcctcgctggagctggggaggacacacgattgagctcggcgaccggtggggcgcttgctggatccagcccagggcccgggacggagggctgaccctccacctaccaaccaccagagacttgggggacccctccccagtgtgtttctattttttgaaaagcagacattttaaaaaatggtcacgtttggtgcttctcagatttctgaggaaattaattgctttgtattgtatattacmatgatcacccgagaatattgttttacmatagttctgtggggtggttttctttttttgttattaaacaaacactttagactamrrwaaaaaaaaaaaaaaaaaaaaaaaaaaaaaaaaaaaaaaaaaaaa

SEQ ID NO: 2435 - DNA, 675 bp, Canis familiaris
aagaaccgttggggatcaacggaccctctgttcagggagccggcgctggcggtcgtcgtcactkaaccccgattggtcgyaggcagggaccaccagtccacacaccaacgcgraatgtcttgccccttcgattctccatcggratgtgactcttgtgratttccttattctcaaaaaaccccacaaccatattggtccagtgagccatagtagtctcggtgctgcggtccccgggraaacacggrcgacaatggcwaacgtttttaatgtctgcaaacaacagcatctggcggrctatcttcttacaaacggggtaaagraacaacctaacaaaggtacaaggdaacgagggaacattgacgctgttcttagtggagctctggtggragagaaagctgccgctattcgtttcaacaaagacgctagtaacaaaaataaccaacaccgtcgacaatatcgtaaagttttccggaacacaatcaaccaccggraacaaaaagcggaccmagacattcggracacagccaccgtctggtgtgtcacacgttgtaggtgtaactgtcactggactgraaaatcacatttttgtaacactcaggaaaataaataacatgacagrggraaaaaaaaaaaaaaaaaaaaaaaaaaaaaaaaaaaaaaaaaaaaaaaaaaaaa

SEQ ID NO: 2436 - DNA, 675 bp, Canis familiaris
ttcttggcaacccctagttgcctgggagacaagtccctcggccgcgaccgccagcagcagtgamttggggctaaccagcrtccgtccctggtggtcaggtgtgtggttgcgcyttacagaacggggaagctaagaggtagccytacactgagaacacytaaaggaataagagttttttggggtgttggtataaccaggtcactcggtatcatcagagccacgacgccaggggcccytttgtgccygctgttaccgwttgcaaaaattacagacgtttgttgtcgtagaccgccygatagaagaatgtttgccccatttcyttgttggattgtttccatgttcchttgctcccttgtaactgcgacaagaatcacctcgagaccaccytctctttcgacggcgataagcaaagttgtttctgcgatcattgtttttattggttgtggcagctgttatagcatttcaaaaggccttgtgttagttggtggccyttgtttttcgcctggktctgtaagccytgtgtcggtggcagaccacacagtgtgcaacatccacattgacagtgacctgacyttttagtgtaaaaacattgtgagtccttttatttattgtactgtcyccyttttttttttttttttttttttttttttttttttttttttttttttttttttt

SEQ ID NO: 2437 - DNA, 666 bp, Canis familiaris
  misc_feature (45)..(45): n comprises a, c, g, or t, or includes no nucleotide
tgggtagtcattcttactcaaaagtgcactgctctgtccctcacncgtgactggctagctgcctgtatttgtgggattctttgacacttggtggtactgcattcttgccaggcatacctcctgtttgagtaggaaggagccttgtaagatccttcacaggcacgtgcatgtgaagcatgctttgctgctatgaaaaagaacatcagaaatgtatatatcatgttattttatatttttgcttttggtgtagagtgaagccatttctatcaaaatctagccagagcccttcactgccatgatagctggggctttaccagtctktctactgtgatgatttgtagacttctggttttatttctatatttatttttaaatatattatgtgggatatttagtggtttatgtctctttaagtttgaattagcgtttctaaaatggtggttactttgaatgttacaaatggatcaaggcattaaaatgtatgagatttatctttccccagaaacaagtactgatgctattgtaaaacaagtgtgtatagtgcctaaaaattgtaatgaaaatccttttaaccatttcaatccaaatgtttaacaaatctaatctcttattctaataaatatactatcaagttaaaarrawaaaaaaaaaaaaataaaaaaaaaa

SEQ ID NO: 2438 - DNA, 635 bp, Canis familiaris
gacacctgtcgagaacctctaagggcgaaggatcagaggtccccagctaggctctgcttaccwacatgcacaaagcatacgaaggaagaatctgcmaagaggctcaagggaaagcachatgtgataaggcgatcactttgcatgaaaacctgttttcttgcmaagaggcttagaattagttggaattgggtagggttcctgcaagcacaccaagagtctgtaacctagcctgttcattttatgtcctttactactcatgatatcctgttcttctccccggtcgtctggcaacttttcctgaggactgagtttccgaaccmacagggctcgctcttcctccgaggagggaatatctgggcctcagttttgtgggcttgggaggatgatgtgtcttgtcaaggggtaaagagcaaccgatcgatccctgcttaaaactatcatagtcattcccmaatagaacacktaaaagttctctgtattagawaaaggaacaagataccmattgtatattttcttttctttatttattctctgtaagtctgtcagatgataaattgtaaataacyatgattaaagaaatatgctactgaaaaaaaaaaaaaaaaaaaaaaaaaaaaaaaaaaaaaaaaaaaaaa

SEQ ID NO: 2439 - DNA, 1259 bp, Canis familiaris
aattcggcacgaracaagcttctcatccactgaacataagcaaggataccaggcacagagaaccaaactattatataaaatcaaatccctaaaatggaagaagccaaaaaccaaagtttggaggaagactttgaaggacaggccacacatacaggacccaaaggagtaataaatgattggagaaagtttaaattagagagtgaagacagtgattcagttccacctagtaagaaggagattctcagacaaatgtcttctcctcagaatagagatgacaaagactcaaaagaaagattcagcagaaagatgagcattcaagaatatgaactaattcaccgagacaaagaagatgaaaattgccttcgtaaatatcgtagacaatgtatgcaggatatgcaccagaagctgagttttgggcctagatatgggtttgtgtatgagcttgagactggggagcaattcttggaaaccattgaaaaggaacagaaaatcaccacaattgttgttcacatttatgaagatggcgttaagggctgtgatgctctaaatagtagctttacatgtcttgcagctgaataccctatggtcaagttctgtaaaataaaagcttctaatacaggtgctggggaccgcttttcctcagatgtgctccccacactgctcatctacaaaggtggggaactcmtaagcaattttattagtgktactgaacagtttgcagaagaattttttgctggggatgtggagtctttcctaaatgaatatgggttactacctgaaagggagatacatgccctagatcagaccaacatggaagaagatactgaataaagagtcactatgtcaaatcttgtatttctcctttacaaattgtacattgattttggtagtatccatattcctttrgtgaacaccaagtatggccatggctattttaatttgcaggggataaaaagattgatactaaaattatttgatttcagcattttttagttacttaagtgcatagaggctttactacaaaatattgtagtctttagcaacatgttagtaagcaaagaggatataaataatattgtggcagttttcaaaaattcctttcaagttatatgttgacttttttactccttgtttttgtttttgtttttttttccccctcagtggtgttatttgggctttccaaattacattatcaatcataattttgcttgtatgataaaaataaagtcttaagaggatatacaaaaaaaaaaaaaaaa

SEQ ID NO: 2440 - DNA, 578 bp, Canis familiaris
cagacccccaaggggccaggtctcaaagcgtttccgagagcagggctggccaatagctgggcatgtacctgctaccagactctttgccaccatctgagcaggcctgagacttcattgcagacccttctgcccgctggggctgcaggcagctcagcttccagcacggacaggacatatgatgctaactgctgcccatcatgacactctgaactctcagtgtggcgcagaaggatgccagccacgtggtcacttgcaaggacatcagtgggacctccagcagactcgtgatgttcatcccccagcttcagaggccctttgagagcccacacttcacatggactgaagtagacccttcgcatgaagacagagttacgtggaggaccacccctcccctctcctcccagacaagaaaaggagtcattaaacactggggatttggatacagttaactagggagaagggagagttttggaggggaggaaaacagcaagtgtatttatmaacttgtaaccacatgcaaataaagaggagataagammwaraaaaaaaaaaaaaaaaaaaaaaaaaaaaaaaaaaaa

SEQ ID NO: 2441 - DNA, 587 bp, Canis familiaris
tcctgggagagggggcctagggcgttggagctatgggtcgtggcggaatcggtggtagaggtcggggtatgataggtcgggkaagagggggctttggagkccgaggccgaggccgtggacgagggagaggtgccctcactcgccctgtgctgaccaaggagcagctggacraccagttggatgcatacatgtcgaaaacgaaaaggacacctggatgccgagttggatgcctacatggcacaaacagatccagaaaccmatgattgaaacctgtccaccctactgtgagagactcttattcaaaagtcaccacatctgtaaataaccttgagataacagatggagaagaaacctgatcgatgctggaaggacctatcacaataggctatggacttatttgccaccagtttgtgcatttagtgtgttccttttactttttttgatactgtgttgtatgaaacctttctttcctctgacttgggttttgttttgtgtttggggtttttttcccccatcgctctgacttctctttaaacatgaatgtggtggccttgtggctagaamamaaaaaaaaaaaaaaaaagggc

SEQ ID NO: 2442 - DNA, 687 bp, Canis familiaris
gctgagataatgattttgtgttactccactagacatccagataacttgtaataaagctgatagcatatattcatacctatgtacacttgggtraaaatatggcagtggaagastggtgtcagactattaccctacctgtgacttgtatgtcgtagaaaacgctgttaaacgttggacaggacttgrattcmaagcatgtgaagtggatatcgtacacgtgtggtggaatgcaagagatgcagtgcctttccccattcattcccgatggaatcgttacagtcggttaaagtctgtaattttttttttctagttgtaacgtgtctgtctggtaaataggtatcctattttggccttacgataccgtmacaaaatgcatcrttttgmaaatacctaatgccmagtaacagtgcatgctttggaaatttggaagatggttccctttaagaagcaaatacatatttgattgttcatatccagaaactgactgaatgttctcraaacgctgtttacagtactcggtgaggtgggggggcaggtgagggagagatcattgcccagctgttcaagtgttcctggttaagtgcttttaaactggagaggctaacctcaaactattttttttaactgcagtctataataataaatcagcacaatatgctctttacggaaaaaaaaaaaaaaaaaaaa

SEQ ID NO: 2443 - DNA, 744 bp, Canis familiaris
  misc_feature (224)..(224): n comprises a, c, g, or t, or includes no nucleotide
ggcctgtaccgtccggattcccgggatgcygaarawgcgraggscarktcctgtgctcgatksccgagscmatctyctggsccgcctkgssvccawkgtggccmhacaggkgcttctggsccggaargtygtadtsktgcgctktgaaggcatcaacahttctggcmadttctacagadmcaagttgaaktacctggccttcstccgsmagcggatgwacaccnacccatcccgtggcccckatsacttccgggcacccasccgtatcttttgscggacagttagaggcatgctgccccacaagaccmagcgaggccaggctgcvctggaccgcctcaaggtgtttgatgggatcccaccmccctatgacmagawaaagcgaatggtggttccagctgccctcaaggtggtacgcctgaagcctacacgaaagtttgcttacctggggcgcctggctcacgaagttggctggaagtaycaggcagtwacagccamcctggaggagaagaggaaggwaaaggchmagatccmttatcggragaagaaacagcttatgaggctacggaaacaggccgaaaagaatgtggagaagaaaattgacaaatacacagaggtcctcaagacccmtggactcctggtctgagcccmmataaaattgacttattmawmmwdvaaaaaaaaaaaaaaaaaaaaaaaaaaawaaaaaaaaaaaaaaaaaaaaaaaaaaaaaaaaaaaaaaaaagg

SEQ ID NO: 2444 - DNA, 724 bp, Canis familiaris
ttgacaataaacagcttgtaccgtccggratcsgswrycgaagatgcggagggcaggtcctggtgctcgatggccraggccatcyccysgsccgcctgvcgkccattgtgkccmamcaggtgcttctggsmcggaaggttgtagtcgtgcgctgtgaaggcatcracayktctggcmatttctacagawwcaagttkaagtacctggccttcctccgcaagcggatgwacaccracccatcccgtggcccctatcacttccgggcacccagccgtatcttttggcggacagttagaggcatgctgccccacaagaccaagcgaggccaggctgcmykggaccgcctcaaggtgkttgatgggatcccaccaccctatgacmagaaaaagcgaatgkkggttccagctgccctcaaggtggtacgcctgaagcctacacgaaagtttgcttacctggggcgcctggctcacgaagttggctggaagtaccaggcagtaacagccaccctggaggagaagaggaaggaaaaggccaagatccattatcggaagaagaaacagcttatgaggctacggaaacaggccgaaaagaatgtggagaagaaaattgacaaatacacagaggtcctcaagacccatggactcctggtctgagcccaataaaattgacttattcatcmwraaaaaaaaaaaaaawaaaaaaaaaaaaaaaaaaaaaaaaaaaa

SEQ ID NO: 2445 - DNA, 1144 bp, Canis familiaris
ctggccgcctgcggccattgtgccaaacagtgcttctggccggaagtttgtatcgtgcgctgtgaaggcatcaacaattctggcaatttcttacagaaacaagttgaagtacctggccttcctccgcaagcggatgacaccaacccatcccgtggcccctatcacttccgggcacccagccgtatcttttgctggacagttagaggcatgctgccccacaagaccatagcgaggccaggctgctctggaccgcctcaaggtgtttgatgggatcccaccaccctatgacaagggctcttaagctcctctccttctctaaccagaaaaagcgaatggtggttccagctgccctcaaggtggtacgcctgaagcctacacgaaagtttgcttacctggggcgcctggctcacgaagttggctggaagtaccaggcagtaacarccacyctggaggagaagaggaasgaaaaggscmagatccattatcggaagragraacagcttatgaggytacggrwacaggccgaaaagaatgtggagaagmaaatkgacvratacacagaggtcctcaagacccatggactcctggtctgagcccmatdrawttgacktattcatcawrmwwrrmmwggcctgcccttcctccatcgccgccctaggatatgggggactcccaggggctgctgccctcatgcctcaggcaacctggggcttacagtactgggaacacaaggctttagtcactactgttaagaaaggtcttctaaaaagttaaawwwaaaaattcttaagagttctgaggcataagtgcctgtgactcattcctgagagttattagtgccatttcactgtaagcmagaaagacctggaaaatggaggggagcccttcgttgagaatggggtgtatttaaacttgtcatgcacagtcaggcgctatactctgtagctgttagggtgtgaggatgctgggggccaagcctggtgtacagaggtagttccagatctgtagatggggaacagccaaggggtcacaggctctacccttgtgctathcctgtaattctgtgatccmaacctaataaattatttttaaagaaaaaaaaaaaaaaaaaaaaaaaaaaaaaaaaaaaaaaaaaaaaaaaaaa

SEQ ID NO: 2446 - DNA, 800 bp, Canis familiaris
  misc_feature (654)..(654): n comprises a, c, g, or t, or includes no nucleotide
  misc_feature (666)..(666): n comprises a, c, g, or t, or includes no nucleotide
  misc_feature (689)..(689): n comprises a, c, g, or t, or includes no nucleotide
  misc_feature (737)..(737): n comprises a, c, g, or t, or includes no nucleotide
  misc_feature (772)..(772): n comprises a, c, g, or t, or includes no nucleotide
gaggggcaggtcctggtgctcgatggccgaggccatctcctgggccgcctggcggccattgtggccamacaggtgcttctggsycggaaggttgtagtcgtgcgctgtgaaggcatcaacatktctggcratttctacagaaacaagttgaagtacctggccttcctccgcaagcggatgwacaccaacccatcccgtggcccctatcacttccgggcacccagccgtatcttttggcggacagttagaggcatgctgccccacaagaccaagcgaggccaggctgccctggaccgcctcaaggtgtttgatgggatcccaccaccctatgacaagaaaaagcgaatggtggttccagctgccctcaaggtggtacgcctgaagcctacacgaaagtttgcttacctggggcgcctggctcacgaagttggctggaagtaccaggcagtaacagccaccctggaggagaagaggaaggaaaaggccaagatccattatcggaagaagaaacagcttatgaggctacggaaacaggccgaaaagaatgtggagaagaaaattgacaaatacacagaggtcctcaagacccatggactcctggtctgagcccaataaaattgacttattcatcawrmwwrrmmtggcctgcccttncttcatcgccgncctaggatatgggggacttccangggctgctgccttatgcctcaggcaacctggggcttacagtactgggnacacaaggctttagtactactggttaaaaaaggtnttttaaaagttaaaaaaaaatttttaaa

SEQ ID NO: 2447 - DNA, 618 bp, Canis familiaris
tgaggtctacggatacatggctcgtttagtaatgttggagaagaaaawttgacraatacacagaggtcctcaagacccatggactcctggtctgagcccartraaattgacttattcatcatgcttggcctggcctgcccttcctccatcgccgccctaggatatgggggactcccaggggctgctgccctcatgcctcaggcaacctggggcttacagtactgggaacacmaggctttagtcactactgttaagaaaggtcttctaaaaagttaaaaaadaaaaattctyaagagttctgaggcataagtgcctgtgactcattcctgagagttattagtgccatttcactgtaagcmagaaagacctggaaaatggaggggagcccttcgttgagaatggggtgtatttaaacttgtcatgcacagtcaggcgctatactctgtagctgttagggtgtgaggatsytggggsccaagcctggtgtacagaggtagttccagatctgtagatggggaacagccaaggggtcacaggctctacccttgtgctatccctgtaattctgtgatccmaacctaataaattatttttaaagaaaaaawaaaaaawaaaaaaa

SEQ ID NO: 2448 - DNA, 705 bp, Canis familiaris
ttttgtacaaaaagcaggctggtaccggtccggattcccgggattcctggtgctcgatgccgaggccatctcctgggccgcctgcggccattgtggccmaacaggtgcttytgggccggaaggttgtartcgtgcgctgtgaaggcatcaacatttctggcaatttctacagaracaagttgaagtacctggccttcctccgcaagcggatgaacaccaacccatcccgtggcccckatcacttccgggcacccagccgtatcttttggcggacagttagaggcatgctgccccacaagaccaagcgaggccaggctgccctggaccgcctcaaggtgtttgatgggatcccaccaccctatgacaagaaaaagcgaatggtggttccagctgccctcaaggtggtacgcctgaagcctacacgaaagtttgcttacctggggcgcctggctcacgaagttggctggaagtaccaggcagtaacagccaccctggaggagaagaggaaggaaaaggccaagatccattatcggaagaagaaacagcttatgaggctacggaaacaggccgaaaagaatgtggagaagaaaattgacaaatacacagaggtcctcaagacccatggactcctggtctgagcccaataaaattgacttattcatcawraaaaaaaaaaaaaaaaaaaaaaaaaaaaaaaaaaaaaaa

SEQ ID NO: 2449 - DNA, 645 bp, Canis familiaris
gtgttcccacccccytagaggacaacccatggtccywaggtgaccrgagcscagrcagcctgacgtgcacctctgcacacagcaccagacacctgccaccaacggggcagaaggtgagcacggcccgcggccaccccacggcaccaccagctgccgccccggagagbcgsccttaaagcatcacgtggtacccagtctgcaccgcgaaacaagcttgaggtttggtacagatacaaattaaaatctacaaactgtccaatatgtggtctgaattttgacagtggagttttttggtgaagtattttaggtrgaggaatgaaatctaagacttatttaagacgaaacagaacataggcccgaggcctgggtgctgctccaagtggctggggtcggggagcgcaccccgagtcagcacgcagaggcaccgagggacaggtgcgycccgcactgagcagcaggccrccgggacggaaggcagggcaggcggccccgtccgcagggggcttacccaccgggaggagtgaacgtgtgcctttcctcctgagactarcaacagaacccacaccaacmcccgccsctggacaggctccgtgtctggagtgactaagcgcagagagagagaagggcagaagctcgcaggtgtgc

SEQ ID NO: 2450 - DNA, 586 bp, Canis familiaris
cccgcgccccscsccytttcccgggcgccccgccccgccgcctcgccttctcctcggctctcttatttagttaaccagkgtctccaaggttctgtgtctagtgtgggggctttctgggkttgctgggctttaactctgggggctttcgtaggcgcatcgcctgcaaactctatgcgcccttcgcrgcggagacgccccgggtgcctgggtgcgcgtaagctcacgtggccacgtggaaggcccggcgctggggtggcgcaggtggcgcaggtgcgcaggcgggcgcaggtggctgcgggtgggcgcaggtggcgcagggcccgccgcctgccgctcgctgtatcctgcgccctcagagccgcagcccgttagggagacaagtagatagctcgtttgaacacacccccgaggcctgggtcacccatgcacccgggccctgcgttgggggcttcgcttctgtgtgcttatgggaaacctgtactccgagaaggggggattctcatcctagtaactcctgagctaagttttattattcagccaataaatatgttctcgtgtaaraaaawaaaaaawaaaaaaaaaaaaa

SEQ ID NO: 2451 - DNA, 592 bp, Canis familiaris
tggaccaactaactctaagggctatttctaagactgaaaaaatcaactttttctcacactraacatttgaggggttgtgggaggtgcatggcattagacaagattcagttcaccttgggaagtagccacaggaaagatgagaaactagtcagctagttctggcacaccagcaacctgcctcaaaaccaaaaccaaaaccaaaacccacacttttaagaagttgtgtcataaaaaaaaatattctgccacagagtctaaatcaccttggactttgcatacttctatgaaattctgtgataatattttttaataagttgattctctggcatctatttttttgctttccataactcatcaccggtggtacttttccttaaagaataaactaatattttttatgttttaacattggacagttttagatgagtcagaagttaaaaggcaaaagatgtagctactaaatggtggggggggggggttaaattaatattaaaataatccaacctagcacttttgatgatttttatattgtttaatgtacatttcattcaaaataataaatacttattgctgctgaaaaaaaaaaaaaaaa

SEQ ID NO: 2452 - DNA, 653 bp, Canis familiaris
agcgtctaacccaactctcgctgattgacaatcgtcatgttgttgccatagtagccttcgtcacaacgtgacactgtcggcctctggtttscctgtcgccccaaaagctgttgaaccacagcatcaggaggcctgaaaaggcccagggcagtagccacagtccttgtcccaagttctctggtaggtgcccctcctgatgactgtgcgatggaagccagttgctctttgtggttgctgctctggccttgagtgactgtccacaagttatttttttctcttaggagtgataccttttctgcatccatgctccatagagtctttcctttgcagaacatcctggaatgaaaggatttggcttctactatttttattaaactgtttttttttttttttacatctgttttctcccttcctaggctatgaagcaatacagatagttactgcttttatccctctcagatccctttctaagaactgagagcgaggggagggcgtcagatcgcttcctgcaccaggaacagagttctgcaaagggtctacttacgctgctgggctgactcttatggggtgacactgccctttgcttttattgtgaaaaagtaaaatcctccaagcctttgggagtcttcaaaaaaaaaaaaaaaaaaaaaaaa

SEQ ID NO: 2453 - DNA, 2390 bp, Canis familiaris
cgaccgtctgtcctgccctgggagacaatgtccatccaagtggagcatcccgccggcggttacaagaagctgtttgaaaccgtggaagagctgtcgtcgccgctcaccgcccacgtgacaggcaggatcccgctctggctcacgggcagtctcctccgatgcggaccggggctcttcgaggttggatctgaaccattttaccacctgtttgacggacaagcccttctgcacaagttcgactttaaagaaggacacgtcacctatcacagaaggttcatccgcaccgatgcttacgtccgggcaatgaccgagaaaaggatcgtcataacggaatttggcacctgtgcgttcccagatccctgcaagaatatattttccaggtttttttcttacttccgaggagtggaggtcactgacaatgcccttgttaacgtctacccagtaggggaagattactaygcctgcacggagaccaacttcattacaaagattaatcctgagaccctggagacaattaagcaggttgatctctgcaactacgtctctgtcaatggagccaccgctcacccccacattgaaaatgatgggactgtttacaacattggtaattgctttgggaaaaatttttcgattgcctacaatattgtaaagatccctccactccaagcagacaaggaagatccaataagcaagtccgaggtcgtcgtacaattcccctgcagcgaccgattcaagccatcgtacgtccatagttttggtttgactcccaactatattgtttttgtggagacgccagtcaaaattaacctgctcaagttcctttcttcgtggagtctttggggagccaactacatggattgttttgagtccaatgaaaccatgggggtttggcttcacatcgctgacaaaaaaagaaaaaagtatctcaataataagtacaggacctcttcctttaatctcttccatcatatcaatacttacgaagacaatgagtttctgattgtggatctctgctgctggaaaggatttgaattcgtctacaattacttgtatttagccaatttacgtgagaactgggaagaggtgaaaaaaaatgccagaaaggctccgcagcctgaagttaggagatmcgtgcttcctytgaatatcgacaaggccgacacaggcaagaacctagtcaccctycccaacacgacggccactgcaactctgcgcagcgacgagaccatctggctggaacctgaggttctcttctcagggcctcgtcaagcctttgagtttcctcaaatcaactatcagaagtmtggcgggaagccttacacgtacgcgtatggacttggcttgaatcacttcgttccggacaggctctgcaagctgaacgtcaagactaaagaaacgtgggtatggcaagagcccgactcatacccatcagaacccatctttgtttctcacccagatgccttggaagaagatgatggtgtagttctgagtgtggtggtgagccctggggcaggacaaaagcctgcttatcttctgattctgaatgccaaggatttgagtgaagttgccagggctgaagtggagattaacatccctgtcacctttcatggactgttcaaaaaatcctaagtacattctagcaaattatatttctattgacaaagtcaagaaaaagtgaggtctgcaatcaaattctgttcaattttagcctgctgtattacakggttttaacttgcagatgcacacgattttgcaatattttacagaaagcacagagggtagcaagcaattccttctaaaaaaaaatgagatttagataatcataatttctttgtgatacaggcagaccataactaaaaactcttttatatatttagcaatctaatagacaacgaatgtagatttattaaactttcttgttcctattatgaaagtgtattttaggtgcccatcttctccaattattttttaacatttaaaagccaaagttctctacacctgattggtatgtggctttgctgagcgcaaggcggtaccatgcaaaaaggctaaattactgaaatgtcagaccaaactttttcacaaaccagggactatcatctaagagtaatcccagtaattagtatatgtatatgtatgtgtatatatacctaagtgtatgtatatgtatatatatacactcctattattgttacaagattctcaagctttatgaccttcaacacttccatttaatataggcaattactgattatttctgattttacaataagaaagcctctctctctaatcaactgacaacttaatctctgtgatgttatttgattagaagctatctattaaaagcttacataacatcaaagcaaaaaaaaaaaaaaaaaaaaaaaaaa

SEQ ID NO: 2454 - DNA, 770 bp, Canis familiaris
tcaggcttggatccgcatatgaagagactagcarggatattgtttttcattttaaaaggaatcagttctggccatgagaggaactgaggtacaagccggtwatccaaaaggcatccacacctgggtkttcstccaaccgtgaagaawattgatgcagctgtttttgataaggagaagaagaaaacgtacttcttcgtaggagacmaatactggcgatttgatgagaagagacaatccatggagccaggctttcccmagcmwatagcagaagactttccaggggttgactcsaaggttgatgctgcgtttgaagcatttgggttttactawttcttcaatggatcttcacagttggagtttgacccmaatgcmaagmaagtgacacawgttttgaagagcmacagctggttgaattgttgagctgctgagatgcacaacacagtcatttgaaatgaagctaataagtctttacctaaatctttgtgaattgagctggtttgttttctcctgcatgtgtggtgactgacagtatgagggtcacctgcgtgtcttgctggtcaattcacattattattggacatttgagcatgctgctgagctggtgctttgatcacatgggataacttccacagaaggggragcactcatgtgcaagaccagtgactgtatatagactatttacttgttatttaataaagagaattggtcagttaaaaaaaaaaaaaaaaaaaaaaaaaaaaaaaaaaaaaaaaaaaaaaaaaaaaaaaaaa

SEQ ID NO: 2455 - DNA, 692 bp, Canis familiaris
tgcatccccagccccaggagcacctgatcagctyccagatgactgtggsagcytggcakcggccccactactkgaatgtgggcctctgcsckgacaccctstgcccmagccctgcaggctccagcccccggtgtggggatgcaggctcccgctgctgctctgttcgccgcctggagagcagggagatccactgctccaactatgtcctcccagtcaaggtggtggctgagtgtggctgccagawatgtctgccccctcggggactggtccggggacgtgtggtggctactgactcaggggaacccctgcgttttgcccagatcctgctaggccaggagcccattggattcacctcttaccagggcgacttcaccatcgaggtgccaccctccacgcagcggctggtggtcaccttcctggaccccagtggggagttcatggacactgtcacagtcctgccttttgacccccgaggtggcggcgtgtaccacgatgtcaaggccatgcggaagaaagcccccgtcatcttagatgccggggagagcaacaggatccctcttggagagatgcaagacgaggccccactgggcgagctggtcctcccacctggagccttccgcagagctgatggcgaaccctacaccggggctgtggaggcccgggtgacattcgtggacccccgcgatctcagc

SEQ ID NO: 2456 - DNA, 625 bp, Canis familiaris
taccctctgggttgggtttgtattgttttgatctttgtcaytttggccmaargktgccatcactgctaaaggtaccawtgtcaaaattccaggcaccaagcatgtggatatgtatagcgaggctcactcacagccagctaactgacattaataactaacaaatggattctcttacatgatgctggaactcctgatagtggtaattattattgagaaatgacttttgggaagttaaggtggcataaagaatttgtcatctgaaggctcttgcaggtaaattatggtaaactttttgtaagggagcagacttttaaagacccgcacaaataccggatcctacactgactttgaaaaaggcatatatgtactagtggcatggaaaacgcactatactcatgcatgcaaattagacaaccgagtatgaatctatttgtgggtgtactatagctttagccatgtcgcgggcatcattctctaccatccacttgtccatatgaagcttgctgccaaaatggtagcctggctcatcttctgaacatttggctcatctatattttggtccttgagactcaaaatttgacttattcccatgttgtgaaataaaaagacagtatcttcaaaaaaa

SEQ ID NO: 2457 - DNA, 603 bp, Canis familiaris
ctgcaaggaagtggcagcccgctacccgcagatcacctytgagaatatcgatcgtggacaacaccaccatgcagctggtgtcgaggccacagcagtttgaygtcatggtgatgcctaatctctmcggtwacattgtcaacaatgtctgcgcgggactggtggggggccctggccttgtggccgggsccaactatggccacgtgtacgctgtgyttgagacggctacaaggaacacaggcaagagtatcgccmataagracatcgccwaccccacagccacgctgctggcaagttgcatgatgcttgaccacctcaagctgcattcctacgccacttccatccgtaaggccgtgttggcatccatggacaacgmaaatatgcacacccccgacataggaggccaaggcactacgtcggaagccatccaggacatcatccgccacatccgcatcatcaacggccgggccgtggaagcctaggcggtccctgggactgcctccacccgctaccccttcccactgccggcactgcagcccaggtgggtgggcagaccgagaataaaccaccctctgtcccctcwaaaaaaaaaaaaaaaaaaaaaaa

SEQ ID NO: 2458 - DNA, 685 bp, Canis familiaris
ccmatgtactactttaccctakgatcccatggattggcaaactgttgtgatcttgaggacttcttcgtaatgagtgattatagaggctttgrcmtaggatcrgaaattctgaagaacctaagccaggttgcgatgaaatgtcgctgcagcagcatgcacttcttggtagcagaatggaatgaaccatctatcvacttctacmaaagaagaggtgcttctgacctgtccagcgaagagggatggagactcttcaagatcgacaaggagtacttgctaaaaatggcagcagaggagtaaggcgtgtgccggtgcagacgatgacagcttccattctattttagattaagttctcaactgatcttgctttctatcctgtttgtagtcmaataatagaatgwacacccattccmaagctttattaccagtggcgttgttgcatgtttgaaatgcggtctgttgaagatggcmatcttgtatgcagtttggagtcagatttctccttgaacatcttttgataaammaggtggtatgatcttaatgtatatgaaaaaaacttcattcttgtgagtcatttaaatgtgtacmatgtacacactggtacttagagtttctgttttgattcttttttaataaactgccctttgatttaawwrrdawaaaaaaaaaaaaaaaaaaaaaaaaaaaa

SEQ ID NO: 2459 - DNA, 671 bp, Canis familiaris
agtggcttctattaacaattaaaagtaccgcaattgtttcccttttttgctcagggatgatggggatttcctgtktaccttctgaggtaggatttkttaattgaggagaatagaccttktwaatattatcacaagggtctacagtataacctggaacttacacatactgcagatatttctttaaagtcatacaggaaaatgagccaacttcttaacatctttggagagaactttaactagtaaacrattttataactaaggaatcatcaaagctactgtcctgattcctgatagggaaaaaaacratcctatttccttaaagcaagaagaagtggcttattttgttcctgataatttacagractagaataaatttttttctttccagtttggacttaaatctaccaattggagtctgtgcatgaaatacgaagttactttttatagagattaagtgcttttaagtccctagaaggcttgtccctagagtaatgatgttggtaataaaagcctcaaaatctgaaaaccttagtggtaccatagcatttggttcttctaccgaagtggagtggcagctcgttgttgagagttgcatgcagcaaccaagtggccagcaatgaaataaatacttctagaatgttmaaaaaaaaaaaaaaaaaaaaaaaaaaaaa

SEQ ID NO: 2460 - DNA, 620 bp, Canis familiaris
ggagaatttctagggaagttatctcacatcttggctttctgaagaaggtcctctctgagctaagatttktcttgacagattatttatcgracacctctatgtgccaaggctctatgtcaagtattttgatagagatccctatgttccatcccgtcaacccccatcacatctttgtgaagtgcagtttactgtccctggtttacagacacagagggcaagccgctctgtggtgacattaagtcatgtagttctgtctttgggcttagccagacttcttggctcaggctcagggctgtgccacctgctacccgtgcatcccggagaagggcccaccagtggctgccaggagattgttctagcctggccttcccttcccgtctctgtgtgtggtgccttggttctggtgtccgtgtgtttgtgtctgtttttcgggagctctcggcctgtgtaatgtcgcttccctatggtgaccctcctcacccggccttctgctggagaagggtgatgtgggccactgtgaactgcagcagcatgctggtggatccatagcgtggattacctttgtataaagaaacagcctccaacctgaaaaaaaaaaaaaaaaaaaaaaaaaaaaaaaa

SEQ ID NO: 2461 - DNA, 674 bp, Canis familiaris
  misc_feature (40)..(40): n comprises a, c, g, or t, or includes no nucleotide
cccaggtgcggataggggttctctggccttggtgttagcnatcgtaaggttgccttccaggcagaccgttgcagatcctgaacttccctkccaacgaaactttcatcggactccgccctgtaccagcatttggcccactccttacrgcccctctcgcgtcaactctcagagcttgagctagtacgtactggctctacttgttgttcggccytaccggctgtaaaatatccacggtgtccagcaggtgtccagcctcaacctggccaacaggcttgccccaggtagttttctaggtccaccaggttggatattcaggcaacgttgtcacagaccgttttaaatacagcctcgaagagggctactcaatactgctctaagtacgcaggcagcaggcagtgtagcacggggtacattctgtctgcctgcattttgagaggtagtgcttgatcggcaggtgcgctgtagtgactggcctgtacaactacagatgccytgtggtgtgctacttgcccytgttctacgaggtgttgtacgtcaaagtctgagagacctgctaataggccaccaccctgattccaggctggagaaattatttgtaaagaagtaaatttttttttttttttttttttttttttttttttttttttttttttttttttttttttttttttttt

SEQ ID NO: 2462 - DNA, 674 bp, Canis familiaris
  misc_feature (40)..(40): n comprises a, c, g, or t, or includes no nucleotide
gggtccacgcctatccccaagagaccggaaccacaatcgntagcattccaacggaaggtccgtctggcaacgtctaggacttgaagggamggttgctttgaaagtagcctgaggcgggacatggtcgtaaaccgggtgaggaatgycggggagagcgcagttgagagtctcgaactcgatcatgcatgaccgagatgaacaacaagccggratggccgacattttataggtgccacaggtcgtccacaggtcggagttggaccggttgtccgaacggggtccatcaaaagatccaggtggtccaacctataagtccgttgcaacagtgtctggcaaaatttatgtcggagcttctcccgatgagttatgacgagattcatgcgtccgtcgtccgtcacatcgtgccccatgtaagacagacggacgtaaaactctccatcacgaactagccgtccacgcgacatcactgaccggacatgttgatgtctacggracaccacacgatgaacgggracaagatgctccacaacatgcagtttcagactctctggacgattatccggtggtgggactaaggtccgacctctttaataaacatttcttcatttaaaaaaaaaaaaaaaaaaaaaaaaaaaaaaaaaaaaaaaaaaaaaaaaaaaaaaaaaaaaaaaaaa

SEQ ID NO: 2463 - DNA, 657 bp, Canis familiaris
ggtctgcgcccgagcctaccaagcagccggcctacccgctgcggscctcgcttacgtcctytcgcccatcaaggagccygtcaaggcctcgccgagagctgcctcgcccgccaagcccagctcsctggacctggtgcccagcctgcccaagggggccctcccggcrtcgcccgccctgcctcgggcctcccgctcctcaccgggcctctacacctctcctggscaggacggcctccagcccacggccgtgagcccaacctacagcagcgatatctcccccgtgtcgccctccagggcgtggtctccccgagccaagcaggcccccaggccttccttctccacccggaatgctgggatcgaggctcaggaccgccgcgagagcctgcccacctccccgcmctggacgcccggcgcctcccggccccccagcagcctggacggctgggtgagcccggggccgtgggagccgggccagggcggcagcaggagcagccccccgccgcccccgccgcccccgccgcccccgccgcccaggtccccctcgtggagcgagcgctcgccgtccccgctgcggcccgaggccgaggcgcggccccccagccgccagctgcaggcgctcctggcgcggaacatcatcaacgcggcccggcgcaagag

SEQ ID NO: 2464 - DNA, 594 bp, Canis familiaris
aaggcctcgctcgagagctgcctcgcccgccaagcccagckycctggacctggtgcccagcctgcccaagggggccctcccggcgtcgcccgccctgcctcgggcctcccgctcctcaccgggcctctacacctctcctggccaggacggcctccagcccacggccgtgagcccaacctacagcagcgatatcgtcccccgtgtcgccctccagggcgtggtctccccgagccaagcaggcccccaggccttccttctccacccggaatgctgggatcgaggctcaggaccgccgcgagagcctgcccacctcmccgcactggacgcccggcgcctcccggccccccagcagcctggacggctgggtgagcccggggccgtgggagccagggccagggcggcagcaggagcagccaccccgccgcmcccmgccgcccccgccagcgccccgccgcccccgccgcccaggtccccctcgtggagcgagcgctcgccgtccccgctgcggcccgaggccgaggcgcggccccccagccgccagctgcaggcgctcctggcgcaggaacatcatcaacgcggcccggcgcaagagcg

SEQ ID NO: 2465 - DNA, 610 bp, Canis familiaris
caaggcaaacactgaacatttcagagctatgagaatgcttctgaatttgagtttgctagctcttggggctgcctatgtttctgcctttgctgtagaaaatcccatgaatagactggtggcagagaccttgacactgctctccactcatcgaacttggctgataggcgatgggaacctgatgattcctactcctgaaaataaaaatcaccaactgtgcattaaagaagtttttcagggtatagacacattgaagaaccaaactgcccacggggaggctgtggataaactattccaaaacttgtctttaataaaagaacacatagagcgccaaaaaaaaaggtgtgcaggaraaaratggaragtgacaaakttcctaractacctgcaaktatttcttggtgtaatraacaccgagtggayaccggaaagttgagaacaaaccggcttattgtagtggaagattttggagaagaatggttttttggcgatgagaatgagggccaaccaacagtagggacttaatggccagtataactaagcttcagagacaaagtaaatatttcaggcatcctactactttatcacttcacacagatgaaatatatttgag

SEQ ID NO: 2466 - DNA, 748 bp, Canis familiaris
gaacaagtttgtacaaaaagcaggctggtaccggtccggtattcccgggatctccagtgtcytccgctgtggcaaaaagaaggtctsgttggaccccmwkgagaccatgraatcgccaatgcaaactcccgtcagcagatwckddaactgatcaaagatggsctgataatccggragcctgkgackgtccatkcccgagctcggtgccggadaracactctggcccgccggaagggcaggcatatgggcattggtaagagaaaaggtactgccaatgctcgaatgcctgagaaggtaacgtggwtgaggaggatgagaattctacgcaggctgctcasaagataccgtgaatctaagaagattgaccgccacatgtatcatagcctgtacctgaaagtgaagggtaaygtgttcaagaacmagcggattctcatggaacacatccacwagctgaaggcagacaaggctcgcaagaagcttctggctgaccaggctgaggcccgcagatctaagaccaaggaggcccgcaagcgccgtgaagarcggctccaggccaagaaggaggaaatcatcaagactctgtccaaggaggaagagaccmagaaataaaactccctctctcttgtctgtacatagtggcctcagcatgaatcagatcagttattcaataaaacaaacctttawmwrmmmmaaaaaaaaaaaaaaaaaaaaaaaaaaaaaaaaaaaaaaaaaaaaaaaaaaaaaaaaa

SEQ ID NO: 2467 - DNA, 744 bp, Canis familiaris
cgcagccatgagtatgctcagcttcagaagagccttgcctccagtgtcctccgctgtggcaaaagaaggtctggttggaccccatgagaccrtgaaatcgccmatgcaractcccgtcagcagatacgaaactgatcaaagatgggctgataatccggaagcctgtgactgtccattcccgagctcggtgccggrraaacactctggcccgccggaaggdcaggcatatgggcattggtaagagaaaaggtactgcchatgctcgaatgcctgagaaggkwacgtggatgaggaggatgagaattctacscagkctgctcagaagataccgtgaatctaagaagattgaccgccacatgtatcatagcctgtacctgaaagtgaagggtaahgtgttcaagaacmagcggattctcatggracacatccacaagctgaaggcagacmaggctcgcmagaagcttctggctgaccaggctgaggcccgcagatctaagaccmaggaggcccgcaagcgccgtgaagarcggctccaggccmagaaggaggaaatcatcaagactctgtccaaggaggaagagaccmagaaataaaactccctctctcttgtctgtacatagtggcctcagcatgaatcagatcagttattcaataaaacmaacctttatcwrmmmaaaaaaaaaaaaaaaaaaaaaaaaaaaaaaaaaaaaaaaaaaaarraaaaaaaaaaaaaaaaaaaaaaaa

SEQ ID NO: 2468 - DNA, 709 bp, Canis familiaris
agagctgccctccagggtcctccgctgtgccaaagaggtcttggttggacmccmatgagaccatgaatcgccmatgcwaactccccgtcagcagatmygkwaactgatcaaagatgggctgataatccggragcctgkgactgtccattcccgagctcggtgccggraaaacactctggcccgccggaagggcaggcatatgggcattggtaagagaaaaggtactgccmatgctcgaatgcctgagaaggtaacgtggatgaggaggatgagaattctacgcaggctgctcagaagataccgtgratctaagaagattgaccgccacatgtatcatagcctgtacctgaaagtgaagggtaaygtgttcaagaacmagcggattctcatggracacatccacaagctgaaggcagacaaggctcgcaagaagcttctggctgaccaggctgaggcccgcagatctaagaccmaggaggcccgcaagcgccgtgaagarcggctycaggccmagaaggaggraatcatcaagactctgtccmaggaggaagagaccmagaaataaaactccctctctcttgtctgtacatagtggcctcagcatgaatcagatcagttattcaataaaacmaacctttatytgccmaaaaaaaaaaaaaaaaaaaaaaaaaaaaaaaaaaaaaaaaaaaaaaaaaaaaaaaaaaaaaaa

SEQ ID NO: 2469 - DNA, 711 bp, Canis familiaris
gattmsyrkgmtcaggcttcagaagaggcttgcctccagtgtcctccgctgtggcaaaaagaaggtctggttggaccccaatgagaccaatgaaatcgccaatgcmaactcccgtcagcagatacgwaaactgatcaaagatgggctgataatccggaagcctgtgactgtccattcccgagctcggtgccggaaaaacactctggcccgccggaagggcaggcatatgggcattggtaagagaaaaggtactgccaatgctcgaatgcctgagaaggtaacgtggatgaggaggatgagaattctacgcaggctgctcagaagataccgtgaatctaagaagattgaccgccacatgtatcatagcctgtacctgaaagtgaagggtaaygtgttcaagaacaagcggattctcatggaacacatccacaagctgaaggcagacaaggctcgcaagaagcttctggctgaccaggctgaggcccgcagatctaagaccaaggaggcccgcaagcgccgtgaagarcggctccaggccaagaaggaggaaatcatcaagactctgtccaaggaggaagagaccaagaaataaaactccctctctcttgtctgtacatagtggcctcagcatgaatcagatcagttattcaataaaacaaacctttatctgccwrwmwmwwttcaaaaaaaaaaaaaaaaaaaaaaaaaaaa

SEQ ID NO: 2470 - DNA, 711 bp, Canis familiaris
ttttttttttttttttttttttttttttgaawwkwkwywggcagataaaggtttgttttattgaataactgatctgattcatgctgaggccactatgtacagacaagagagagggagttttatttcttggtctcttcctccttggacagagtcttgatgatttcctccttcttggcctggagccgytcttcacggcgcttgcgggcctccttggtcttagatctgcgggcctcagcctggtcagccagaagcttcttgcgagccttgtctgccttcagcttgtggatgtgttccatgagaatccgcttgttcttgaacacrttacccttcactttcaggtacaggctatgatacatgtggcggtcaatcttcttagattcacggtatcttctgagcagcctgcgtagaattctcatcctcctcatccacgttaccttctcaggcattcgagcattggcagtaccttttctcttaccaatgcccatatgcctgcccttccggcgggccagagtgtttttccggcaccgagctcgggaatggacagtcacaggcttccggattatcagcccatctttgatcagtttwcgtatctgctgacgggagttkgcattggcgatttcattggtctcattggggtccaaccagaccttctttttgccacagcggaggacactggaggcaagcctcttctgaagcctgakcmyrskaatc

SEQ ID NO: 2471 - DNA, 729 bp, Canis familiaris
tctggttggaccccccatgagaccaatgaaatcgccaatgcaaactcccgtcagcagatacgagacgtgatcaaagatgggctgataatccggaagcctgtgactgtccatatcccgagctcggtgccggcaggaacacctctggccccccggaagggcacgcgcataatggggcatctggtaagaagaaaaggtgctgccccaacagctcggaagtaccctgatgaaaagagtaatcactggtagtaatgagaggagagtagatgaaatttttatcagcaccgaggtgctgtcttcgagagatatcccctgtgatatttagagagagttttgcccgcgccacaatagtgatactctatacgccgtgtcaccgtgaaatgtgaaggtgtaattgtgttcaagacacaacgcggattttcatggacacaccaatccacaagctgaagccaagacaaggctcgccaagaagcttctggctgaccaggctgaggcccgcagatctaagaccaaggaggcccgcaagcgccgtgaagaacggctycaggccaagaaggaggaaatcatcaagactctgtccaaggaggaagagaccaagaaataaaactccctctctcttgtctgtacatagtggcctcagcatgaatcagatcagttattcaataaaacaaacctttatctgccmaaaaaaaaaaaaaaaaaaaaaaaaaaaaaaaaaaaaaaaaaaaaaaa

SEQ ID NO: 2472 - DNA, 683 bp, Canis familiaris
acgtatgccaacacccggtggacatgtggagtgtcgcttgtatctttcgcagagatgtttcgtcgcaagccctctcttctgtggaaactctgaagctgaccagttaggcaaatctttgatctgatcggctgcccccagaggatgactggccccgagatgtgtctctgccccgaggagccttttcccctagagggccccgtccagtaacagacagtggtacctgagatggaggagtctggagcacagctgtctgctggagatgctgacttttaacccacacaagcgaatctctgccttccgagccctgcagcactcttatctacmaaaggcagaaggtaacccagagtgagcagtggaatggctgcaacggtagcaagaggagagaagctgtcttttctcttcctttgaacacttgagtggagagctccccaaactaagaaggcagtcttgaccttcatctctgaggctgtggaaacaactcccactttttacagagaatattttgctgccttaatgacattccctttccacctctccttttgaggcttatccttctcctgccccctcctccccattttcatacaccaagggggtatgtcccttgttctcccctttctatcttgatattgggatcttttttatacaggaaaaacwaaacaaaaaaaaaaaaaaaaaaaaaaaaa

SEQ ID NO: 2473 - DNA, 673 bp, Canis familiaris
taacaccttgcattactggtcatgcagaagcccaaccacatcacagaaatgcttccttggaatattaagtcagcttggtgctgacagcttwacaagtcttaggaagttagctgaacagttccctcggcaagtgtttggatagcaaagcaccyawaccacgaagacattgatgaagaggatgatgatgttccagatctcgtagaaaattttgatgaggcatcacaagaatgaagctaactaaaattttttgttctgtgtttggaagctggcatggactagatttaacmaatcagctatgtggttcccaaagtyttacagacatggagaacatcaactgttactagttcagtaatataaatattttgtatattaataatgctgtttgttyagcatttttcrgtcatttgattttgcattttgcacttcctcccaggatctattcttttggtcaaaatacgaagtattggtgcagtttgagggtgttttggtgtttgattctcagttttctgttttttttttgtttgggtatttttggtatgtgtatgtctgtgtatgcgtgtgggtatgtatgtatacagtggagagcaaattggaaaacggttctatttatcgtccttcttccccccagtagaaaataaaacaaatctttacatttrwwaaaaaaaaaaaaaaa

SEQ ID NO: 2474 - DNA, 5431 bp, Canis familiaris
gaggcagaaagtgccacgactccacacgcgcgcacgcagccagcgagcggccggagcggacggcggacggggcggacggcggtggggtcgcggcgcctgcagctgctcggggcggcttctcggcggaggctcggccggctcctctctcccggctccgcggcggcggcggcggcggcggcggctcctgccctttcgctctccctcccgcgtctccggctgcaggtaaagggaaagcaagccaggatggatatttacgacactcagaccttgggggttatggtattcggtggattcatggtcgtttctgccatcggcatcttcctggtgtcaaccttttccatgaaggagacgtcatatgaagaagccctagccaaccagcgcaaggagatggcaaaaactcaccaccagaaagtagagaagaaaaagaaggagaaaacagtggagaagaaaggaaaaaccaagaaaaaggaagagaaacctaacgggaagatacctgaccatgagccagcccccaatgtgaccatccttctcaaagacccagtgagggcacccgcagtgcccgtggctccaactccggtccagcctcctgtggtcattgcccctgtagccacagtaccagccatgccccaagagaagttggccccttctcctaaggacaaaaagaaaaaggagaaaaaagtggcaaaggtggaaccagcagtcagttctgtagtgaattccgtccaagttcttgcctccaaggctgccatcttagaaactgctcccaaggaggtgcctatggtggttgtgcccccagtgggtgccaaggccggtaccccagccaccagcactgcacagggcaaaaaggcagagggagcccagaaccagagcagaaaggcagagggagcccccaaccagggcaaaaaggcagagggggccctcaaccaaggcaaaaaggcagagggggcccagaatcagggcaaaaaggtagaagtggccccaaaccaaggcaaaaaggcagaggggggccagaatcagggcaaaaaggtagaaggggcccagaatcagggcaaaaaggcagaaggaaccccaaaccagggcaaaaaggcagaaggggcccccaaccaaggcaaaaagacagatggggctcccaaccagggcaaaaagtcagaaggagctccaaaccagggcaaaaaggcagagggggcccagaatcagggcaaaaaggtagaagtggccccaaaccaaggcaaaaaggcagaggggggccagaatcagggcaaaaaggtagaaggggcccagaatcagggcaaaaaggcagaaggaaccccaaaccagggcaaaaaggcagaaggggcccccaaccaaggcaaaaagacagatggggctcccaaccagggcaaaaagtcagaaggagctccaaaccagggcaaaaaagtagagggggcccagaatcaaggcaaaaaggtagagggggtgcagaatcagggcaaaaaagccgaaggagcacagaatcagggcaaaaaggcagaagggacctccagccagggtagaaaagaggaggggaccccaaacctgggcaaaaaggcagaggggagccccaatcagggcaaaaaggtggaagtggttcagaaccagagcaaaaaggtagagggagcccccaaccagggcaaaaaagcagaggggtctcagaaccagggcaaaaagacagaaggggcctccaaccaaggcaaaaaggtggatggggctcagaaccagggcaaaaaggcagagggagcccccaaccagggtaaaaaggtagagggggctcagaaccagggcaaaaaggcagaggggacccccaaccagggtaaaaaggcagagggggctcagaaccagggcaaaaaggcagagggggctcccaaccagggcaaaaaggcagagggggctcccaaccagggcaaaaaggcagagggggctcccaaccagggcaaaaaggcagagggggctcccaaccagggcaaaaaggcagaggcggctcccaaccagggcaaaaaggcagagggggctcccaaccagggcaaaaaggcagagggggctcccaaccagggcaaaaaggcagaggcggctcccaaccagggcaaaaaggcagagggggctcccaaccagggcaaaaaggcagagggggctcccaaccagggcaaaaaggcagagggggctcccaaccagggcaaaaaggcagagggggcccagaatcagggcaaaaaggcagagggggctcccaaccagggtaaaaaggcagatttggttgctaatcaaggcacaaaggcagagggtgttgcaggccaggggaaaaaagcagagggggcccccaatcaaggcaaaaagggagaaggaaccccaaaccagggcaaaaagtcagaaggatctcccaaccagggcaaaaaggtggatgcgtctgccaatcagagtaaaagggcagagtcagctcctatccaaggcaaaaatgcagatatggtccagagccaagaggcaccaaagcaagaggctcctgcaaagaagaaatctggttcaaagaagaaaggtgagcctgggcctccagactctgacagccctctctacctcccctacaagacgctggtctccacagttggaagcatggtattcaacgagggtgaggcccagcggctcattgagatcctgtccgagaaggctggtgtcattcaagacacctggcataaggctactcagaagggtgaccccgtggcgattctgaagcgccagctagaagagaaggagaagctgctggccacagagcaggaggacgcggctgttgcgaagagcaaactgagggaggtgaataaggagctggcagcagaaaaggctaaggcagcagcgggggaggccaaggtgaagaagcagctggtggcccgggagcaggagatcacagccgtgcaggcgcgcatcgaagccagctaccgggagcatgtgaaggaggtgcagcagctgcagggcaagatccggacccttcaggagcagttggagaacggccccaacacacagctggcccgtctgcagcaggaaaattccatcctgagggatgccttgaaccaggccacgagccaggtggagagcaagcagaacaccgagctggccaagctccggcaggagctcagcaaggtcagcaaggagctggtggagaaatcagaggctgcgcggcaggaggaacagcagcgaaaggccctggagaccaaaacagccgccttggagaagcaggtcctacagctgcaagcatctcacaaggagagtgaggaggccctgcagaagcgcctggacgaggtcagccgggagctatgccgctcccagaccagccatgccagcctgcgggcggatgccgagaaggcccaggagcagcagcagcagatggctgagctgcacagcaaacttcagtcctccgaggcggaggtgaaaagcaagtctgaggagctgagtggtctccatgggcagctcaaggaggccagggccgagaactcacagctcatggagagaatccggtccatcgaggccctgctggaggcgggccaggcccgggacacccaggatgcccaggccagccgagcggagcatcaggcccgcctcaaggagctagagtcccaggtgtggtgcctggagaaggaggccaccgagctcaaggaggctgttgagcagcagaaagtgaagaacaacgacctccgagagaagaactggaaggccatggaggctctggcctcggccgagagagcctgcgaggagaagctccgctccttaacccaggccaaggaggaatccgagaagcagctcagcctgacggaggcccagaccaaggaggccctgctggccctgttgccggctctctccagctcagccccccagagttacaccgagtggctgcaggaactccgagagaagggcccggagctgctgaagcagcggccggctgacacagatccgtcctcggacctggcttccaagctgagggaggctgaggagacccagaacaatctgcaggccgagtgtgaccagtaccgcaccatcctggcagagacggagggcatgctcaaagacctgcagaagagtgtggaggaggaggagcaggtgtggaaggccaaagtgagcgccacggaggaggagcttcagaagtcacgggtcacagtgaaacatctcgaagacattgtagagaagctaaaaggagaacttgaaagttcagagcaggtgagggagcacacctcacatctggaagcagagctggagaagcacatggcagctgccagcgctgagtgccagagctacgccaaggaggtggcggggttgaggcaacttttattagagtctcagtctcagctggatgcagccaagagtgaagcccagaaacaaagcaatgagctcgccctggtcaggcagcagttgagtgagatgaagagccacgtagaggatggtgacgtagctgggtccccagctgcccccccagcagagcaggaccctgtcgagctgaaggcgcagctggagcggacagaggccaccctggaggacgagcaggcgctgcggaggaagctcacggccgagttccaggaggctcagagctctgcgtgccggctccaggccgagctggagaagctccgcagcacagggcccctggagtcttcagcagcagaggaggccacacagctgaaggagagactagaaaaagagaagaaactaaccagtgacctgggacatgctgccaccaaattgcaggagcttttgaagaccacccaggagcagctggcaaaggagagagacacagtgaagaagttgcaggagcagttggrcmaaacagacgacagcagctcaaaggagggcacttctgtctgagtctgctcttcgggaaaagaagttcccattcaacttaccmwaatgccttacacattccttaccaartaaatraaccaaccaacacaccgttatccaggcccaacctccagtagctctgagagaagccatgagagactcttagaatcacagaaatagaccttccagacccctkgtttgtaaaagaacctttgtcacatttgataaacactattccccaggaccagccctggaccaccaccgagcagacgccaaagcccttaccagctctgtgacagaccccagggtatgtgctggggaggccgggacgctgggtatctgtatgtcaatcagtgcaattgttttcttcccctgggcttgggggtcaggaggcgagcggacctggtggtgagtctccagggctgtggagcagactggaggggcccagcccagccggggaggcagcagccyctcacccaccgggggaagtkgccagcaagaatctgatgtgtgacttcctggatgttaatgccattaaaaccaacattgttgcccggcaaaaaaaaaaaaaaaaaaaaaaaaaaaaaaaaaaaaaaaaaaaaaaaaa

SEQ ID NO: 2475 - DNA, 653 bp, Canis familiaris
agccagttggcacatactagccgacagcagctcaaaggagggcaattctgtctgagtctgctcttcgggaaaagaaggtccccagtcaactgtgcccaaaggccttacacagtgcctgtgccgatgtattgtccgtccgacacaccggttatccaggcccaacctccagtagctctgagagaagccatgagagactcttagaatcacagatatagaccttccagaccccttgtttgtaaaagaacctttgtcacatttgataaacactattccccaggaccagccctggaccaccaccgtagcagacgccaaagcccttaccagctctgtgacagaccccagggtatgtgctggggaggccgggacgctgggtatctgtatgtcaatcagtgcmattgttttcttcccctgggttgggggtcaggaggcgmscggcctggtggtgagtctccagggctgtggagcagactggaggggcccagcccagccggggaggcagcagccyctcacccccgggggaagttgccagcaagaactgatgtgtgacttcctggatgttaatgccattaaaaccaacattgttgcccggccaaaaaaaaaaaaaaaaaaaaaaaaaaaaaaaaaaaaaaaaaaaaaaaaaaaaaaaaaaaaaa

SEQ ID NO: 2476 - DNA, 660 bp, Canis familiaris
agggtcgaaacagctaaaggtcagtttgagcaaaccgcttgaatgtcgtacaggataggctcaaggcgattggcagccacccacttgkkattcatcttccaasscctagctattgtagcaattatctgtccactgctgttacaagttttgccctgtgtacctttgtgcccaccgtgctcctcgcttgttgtaactacgatgtgaccagttgttgttacctcagttgttccattgttactagaagttgcatttcccgatagctttgtcctagcgccggttctcctaacaacgcctggccttgttactctttcaccggtaggtattggcggctgctgcaaatgttgcctttacggtggtgttgggtgaacctggcttgttgccctcggatgggttgtttggtttgttttcagaaggagagtttttgccgttgtttccagaggatggttttttggcagctgcatccttgtttcctgctgcagtcttgtttccaggtgttttgtttccatcctcggttgtgttgttgcccgcagccatttttcaatataaagaaataacctattttcactttactaaaaggtctgcattaaaatttatttgtccagtactttgtctgagtgtttytwttttttttttttttttttttttttttttttttttttt

SEQ ID NO: 2477 - DNA, 660 bp, Canis familiaris
tcccagctttgtcgatttccagtcaaactcgtttggcgaacttacagcatgtcctatccgagttccgctaaccgtcggtgggtgaacmmtaagtagaaggttssggatcgataacatcgttaatagacaggtgacgacaatgttcaaaacgggacacatggaaacacgggtggcacgaggagcgaacaacattgatgctacactggtcaacaacaatggagtcaacaaggtaacaatgatcttcaacgtaaagggctatcgaaacaggatcgcggccaagaggattgttgcggaccggaacaatgagaaagtggccatccataaccgccgacgacgtttacaacggaaatgccaccacaacccacttggaccgaacaacgggagcctacccaacaaaccaaacaaaagtcttcctctcaaaaacggcaacaaaggtctcctaccaaaaaaccgtcgacgtaggaacaaaggacgacgtcagaacaaaggtccacaaaacaaaggtaggagccaacacaacaacgggcgtcggtaaaaagttatatttctttattggataaaagtgaaatgattttccagacgtaattttaaataaacaggtcatgaaacagactcacaaarawaaaaaaaaaaaaaaaaaaaaaaaaaaaaaaaaaaaaa

SEQ ID NO: 2478 - DNA, 734 bp, Canis familiaris
ttakccmctagaccaccttagaggaaaaaaatagggttggctttwaaagtacatcagttactcattccaagtactaattctctgggtcaacccacttgtccmattcccttaggctattgagaaagtctcctagttggtgtcaatatgtcagtagtttccattctgatccttacatgtgttctccacagttaacttttcgtcatccttattcagacccctcgaratacttgccmttgcataarcttgccagcccagttgtgcccaccttgatgtaaggtataccaccacattgtttccattctgtcttccagtagatgaggtttctgtttcccagagtgaatttgaggaaacmaaggagaggaattgccccagttctaagtttgctggcttaatccatctaattgctggtttccttgaagcagtttttatattttttttcaggagtcttaggcgtagttaaatgatttccagaaaacaggctcaaaaccttgagacctaaattcctttccactcaaaaagagatcctaaaccatatattttgtgtgtagagtttgttcaactaaaggaataaatgtttattaaactaaaatggacctgttatttcttgtcatctagtactaataagcraaccraataccctaacgraaaaattgtaatggcagaaacagctactttgagaggaaataaaatacggtacttagtcttgaraaaaaaaaaaaaaaaaaaaaaaaaaa

SEQ ID NO: 2479 - DNA, 593 bp, Canis familiaris
ctgcacggtcctctccctccgcctcacttcctcagggcctttctgtacctgttgcctggccactgcagcactaggcaktggcattagcttatgccawatactgcttttggaaagacctkttctctttagtcggatgccacctcttcccctagctatgagcagtcagggagggcaaacagccggctgggaaggcaggcaggccaatggccactcaggccgagagcctctctggactgctgcatgtaggaaatggataggaaccaggccctgtgtccagtccccacgtctcaagtctgtcctaagattacacctgctgtgatgactagggccagcctctgattgactctggggactagaacacagtagccgcaacttgaagacttacagatagaatttctatcagccttggggcctctggctggtgctgtgcagagggccttggacgatgggccagcagggccaattttttgttcaggtgcctacgctgttaactcacagactagagcgggatctcttggttttgcaccagctctgccaagccwctgtaccttatattaaacgttgtactcaammmaaaaaaawaaaagttatat

SEQ ID NO: 2480 - DNA, 663 bp, Canis familiaris
agccaaaagaagaaggaaaaccagtgagtgagggaaagccaaaagaaggaaagctagtgagtgagggaaagccaaaagaagaaaacttagagagtgagggaaagccagtgaatgaggaaaagccmaaagaagaaaagccagccatcggaaccaagggctgcaggaaagcgcccagctgggggatgatgtacccaggaaggccmaaagaaaaaccracaaggggctggctcagtgcctcaaggaatataaggaggccatacacgatatgcatttgagcaatgaagagatgataagagaatttgatgagatggccagggtagaggatgaggtgaagaaaaccagacagaaattgggggggtttatgtggatgcaaaaaagtttacaggaccccttccacccgaggggcccaagggaactgaggggtgggtgcagggccccacagaggggctttgaagacattccttttgtgtagtgcccttggcaggcatttgccctgtgctttaaccttatgctaatacttgctttagctatcactctgttatccaactgcaacccttgatgtttcagtagatttttgtccattgcatggaaaaatgtttatggcatattgtaaaattaaaaagaagagtttgatgaaccataaaaaaaaaaaaaaaaaaaaaa

SEQ ID NO: 2481 - DNA, 257 bp, Canis familiaris
actaccttcaactccatcatgaagtgtgacgttgacatccgcaaggacctctatgccaacacagtgctgtctggtggaaccaccatgtaccctggcatcgctgacaggatgcagaaggagatcactgccctggcacccagcacaatgaagatcaagatcatcgcaccccctgagcgcaagtactctgtgtggattgggggctccatcctggcctcactgtccaccttccagcaaatgtggatcagcaagcaggagta

SEQ ID NO: 2482 - DNA, 698 bp, Canis familiaris
  misc_feature (37)..(37): n comprises a, c, g, or t, or includes no nucleotide
ttcatcccagcagctgccatggatggattttgggagnacatggtgactcaagtgtgsctgtgtggagtggagtgaatgtggcaggtgtttctcttcaggaactggaatcccagaaaatgggamcagacaacgacagtgaaaattggaaggaagtgcataagatggtggttgaaagtgcctatgaagtcatcaagctwaaaggatataccmactgggctattggattaagtgtggctgatctcattgaatccatgttgaaaaatctctccaggattcatccagtgtcaacaatggtgaagggtatgtatggtattgagaacgaagtcttcctgagtcttccgtgtatcctgaacgctcggggcttaaccagtgtgatcaatcagaagctgaaggatgatgaggttgcccagctcaagaaaagtgcagataccttgtgggatatccagaaagacctaaaagatctgtgacttctggcttctaggctgtagaaatttaaaaccatgrtgtaattaactgtgagcctttagtttttcatccatatacatggatcacagtttgcttttatcttcctaaatatgtgaatctgggctcacagaatcaaagcccatscttggtttaatgcttgcaatatgagccttgaacaaataaaattacctaccgtagtgtgmwwmwaaaaaaaaaaaaaaaaaaaaaaaaaa

SEQ ID NO: 2483 - DNA, 651 bp, Canis familiaris
  misc_feature (43)..(43): n comprises a, c, g, or t, or includes no nucleotide
attataaactatccagaaggacataaagcagcagctgtgcttncagtcctggatttagcccaaagacagaatggatggctgcccatctctgctatgaacaagttgcagaagttttacaagtacctccmatgagagtatatgaagtagcaactgtgtgttatacaatgtataatcgaaagccagtttggaaaatatcacattcaagtctgcactactactccttgcatgcttcgaaactctgacagcatactggaggccattcagaaaaagccttggaataaagtgttggggagactacaccctgataaacttttcactcttatagaggtggaatgtttaggggcctgtgtaaatgcacccaatggttcaaataaatgacaactactatgaggatctgacacctaaggatattgaagaaattattgatgagctcaaagctggcaaaattccmaaacctgggccaaggagtggacgcttctcttgtgagccagctggaggtcttacctctttgactgaaccacccmaaggacctggctttggtgtgcaagtgggactttaatttatataytcaactgtaaatatgtcactggagaaataaagaggaatctcctatctacataaaaaawaaaaaaaaaaaaaaaaaaaaaaaaa

SEQ ID NO: 2484 - DNA, 774 bp, Canis familiaris
tggacctgggaccagactctgccggagccgacgctcggtccacaactgctctgccagtgagtgagcggagagaggctggccgccctgaagaacagctccaccagctctgccctctctggacagaagtgacctgatttcaccagggccgctggggacaattggccacttgccacgttttcctgaacctacccctgttctcgatgaacaagtgttgtctgcagtcctaagtagagcccctgtctgttttctcaktgtttctctgtgtggctgcgctgtccagcagcygtaccttgtctggagaggacctcccctgccaagtcttccccgctctttcgacctttgggtacttcccttgggttggcagaacctctcatttgtgttggagtaattctgggtttatagccccccggtcctcagattcatgaggcctttttgcccttgtgattctatagccggtagatgtaacccagwatcaccaggaagttacatctagatcaggaatggtgggagtggttcagaacaggtgtttggcacacggagtagtccmaatatttcttgattgtgtaaccgaattccggaacagatgtctgggttgttggttcacagacctcaccacccggccacaggccatgagatctcagaggcccattcctggggtggggcttgtattgatgcatggacttccttgtacttgagtaaatttttagaatgttaaaaaaaaaaaaaaaaaaaaaaaaaaaaaaaaaaaaaaaaaaaaaaaaaaaaaaaaaaaaa

SEQ ID NO: 2485 - DNA, 686 bp, Canis familiaris
  misc_feature (39)..(39): n comprises a, c, g, or t, or includes no nucleotide
cccctggcagtgcggtttgtggtgttgttggcagcagcnccagcaccagtggtggtttaggtagttagagtgctggctcagrcagcagtgcctttggsckttgtccccaaagcactccagcccttgtgatccagaagagwrggtcgttarattgcgcttgatcacgcttagtggtctcacactcagaggctcagcgcgatrgaagcagggtgctcaacgtattggtaggcaggacccagaggatcgcagtgatccgcaaccccagtggtgcactcactgtccaaatagtgaagattccactactcaggttagaaccttcggaaggtcttgcagtggttgttagccaaagacctgagactaccacagaaggttccttcttctgctgcacctaaacaggtgacagggacaaccgtggcctggtgcaagccaaaccgcagtgacctgtaaggctggaggtcatcgtgaccatatcgaggcggtttcaggtaccaggctgcgtggtgtccctgtcgcaggaacgtgtgatcaaaaccagggtgggggccaacctgctagagggcttttccaacttactgggcttgtacaacttgatttctacacaagactactacgccatgcagccagatccagcccaactgggtgtagggggactaatttggtttcagttctaagtttttttttttttt

SEQ ID NO: 2486 - DNA, 686 bp, Canis familiaris
  misc_feature (39)..(39): n comprises a, c, g, or t, or includes no nucleotide
ggggaccgtcacgccaaacaccacaacaaccgtcgtcgnggtcgtggtcaccaccaaatccatcaatctcacgaccgagtcygtcgtcacggaaaccsgmaacaggggtttcgtgaggtcgggaacactaggtcttctcwyccagcaatytaacgcgaactagtgcgaatcaccagagtgtgagtctccgagtcgcgctaycttcgtcccacgagttgcataaccatccgtcctgggtctcctagcgtcactaggcgttggggtcaccacgtgagtgacaggtttatcacttctaaggtgatgagtccaatcttggaagccttccagaacgtcaccaacaatcggtttctggactctgatggtgtcttccaaggaagaagacgacgtggatttgtccactgtccctgttggcaccggaccacgttcggtttggcgtcactggacattccgacctccagtagcactggtatagctccgccaaagtccatggtccgacgcaccacagggacagcgtccttgcacactagttttggtcccacccccggttggacgatctcccgaaaaggttgaatgacccgaacatgttgaactaaagatgtgttctgatgatgcggtacgtcggtctaggtcgggttgacccacatccccctgattaaaccaaagtcaagattcaaaaaaaaaaaaaa

SEQ ID NO: 2487 - DNA, 660 bp, Canis familiaris
ctatccatgccaaacggtcacaagtatgccaaagacatccagctagcacgccgcatacgtggagaacgtgcttaagaatccmctatgatggaaaacatttcattctttaaaaaaaawaaaaaaraaaaaattttttktttgtttctcttcttcctgttattggtagttctctgaacgttagatattkttkkttkttccatggggtcaaaggtacctaagtatacgattgcaagtggaaaaataggggacagaaatcaggtattgbcagtttttccattttcatttgtgtgtgaatttttaatataaatgcggggacataaagcattaatgcaagtcmwmatgtttcagtgaacacgtttcagcagttcaactttataacaattataaataaacctgttaaatttttctggacaatgccagcatttggatttttktaaaacaagtaaatttcttattgatggcaactaaatggtgtttgtagcatttttatcatacagtagattccatccattcactatacttttctaactgagttgtcctacatgcaagtacatrtttttaatgttgtctgtcttctgtgctgttcctgtaagtttgctattaaaatacattaaactawaaaawaaaaaaaaaaaaaaaaaaaaaaaaaaaaaaaaaaaa

SEQ ID NO: 2488 - DNA, 617 bp, Canis familiaris
cgggtcaccattatgcccaaagacatccagctagcacgccgcatacgtggagaacgtgcttaagaatccmctatgatggaaaacakttcattctttaaaaawawwtwaaaaattttttkttttttctcttcttcctgttattggtagttctctgaacgttagatattttttttttccatggggtcaaaargtacctaagtatacgattgcaagtggaaaaataggggacagaaatcaggtattggcagtttttccattttcatttgtgtgtgaatttttaatataaatgcggggacataaagcattaatgcaagtcaaaatgtttcagtgaacacgtttcagcagttcaactttataacaattataaataaacctgttaaatttttctggacaatgccagcatttggatttttttaaaacaagtaaatttcttattgatggcaactaaatggtgtttgtagcatttttatcatacagtagattccatccattcactatacttttctaactgagttgtcctacatgcaagtacatgtttttaatgttgtctgtcttctgtgctgttcctgtaagtttgctattaaaatacattaaactataaaaaaaaaaaaaaaaaa

SEQ ID NO: 2489 - DNA, 768 bp, Canis familiaris
ggtccacacactgcgtgcctcgctgttctcatttttggctcgctcagtgctccgttcctgacctctctggcttttcaggtcatcacgctgtggccgtcgcccgtttctgtttccttctacttaggattccccacactcggtctttgcagtagctgaggattttgccttttctcctgcctcccagtctgaccctccctagtcagatggcaatcccaattaggtttcttattttaggcccacccctacyttgttttggggggctccagagaccaggggggcctgcggtgttaggaagcagccttggaggttgccttggtgctgctcaaggatccatccagcaggggkcagtaagtgatgttgggagtatccctggctgctaggcccttggcaggggtggtcctttctacattcccattcacctgaaagctctttttggattgggtttctcattccattgttgcctgctccctcccacactctcctctggtagatttaattttacgctttcctttgttacagcccttttcttccccctctagagattcccctctgccactctcccctccagagtttgttttgtggtgttacagtggtaactgcagttctgaactggtttttctcttctttttgttctcctctggaatgtagactgtacatgtttaataactcaccttctctctccttgctcaaaatgtgggatacgcgatgactgtgaccctggttggaaattaaacttgttttatgcarmwwwaaaaaaaaaaaaaaaaa

SEQ ID NO: 2490 - DNA, 737 bp, Canis familiaris
aaaaaaaagttatgttagttggtagagtgttatgtataatgctttgttaaagaaccccctttccgcgccactggtgaatagggattgatgaatgsgaagagytgagtcagaccagtaagcccgttctgggtttcttggatatgttcccatgtaggaggtawaaccmattctggaagtawttatgagcttccataaacmacttkaattttagcataatgatggccytggattgtctgacctcagtagctattaaataacatcmagtaacatctgtatcaggccctacatagwacatacmgttgagtgggagtaaaccwawatraaaagatgtgtgttaatggctgtgcgagraaaatcgggataaaggcctaaacmggracmacttcacagcgttgatgctggatatgcataaggtgatggcmaaggtttagaacacmtttttttcmaagtctaaatctaaaacccmgagtaaacatctatgctcagagttagcataatttggagttattcaggaattgcagagaaatgcattttcacagaaatcaagatgttatttttgtatactatatcacttagacmactgtgtttcatttgctgtaatcagtttttaaaagtcagatggaaaaagcmactgaagtcctagaaaatagaaatgtaattttaaactatccmmtaaagctggaggaggaarrrrwaaaaaaaaaaaaaaaaaaaaaaaaaacaaaaaaaaaaaaaaa

SEQ ID NO: 2491 - DNA, 586 bp, Canis familiaris
cgacaattaagagcaccccatctggaaagagatacaagttcgtggcacacttggacatgggaagtatgagaaggtgctcgtggatgagggctcagtgccctaggcagtccttcctgctctcctgagactacaggtgcctctggcagcagcgtccacgtctgcaggggagagtccaccagacgcccaccccggccctgccatgagagccaccgtcatggcccgcttggcctgcccgcgcccctccatcacccaccacaatcatcgcccctctgctcatcaaccacctgacttctctcccctcccactctctaaccaccctgcctcccactctgcctggcatggcaggagcaggaaaggsactatcactggtgattgacccaaggagccatcccgcagaggccaagggttcccaaggaaggcccaggctgagcagagagagaacacctgctgggggacctccaggtcaagagacagagacacccgtaccacattctcaggcccctgcaccccccgcctcctgcttgcagcctcctccttctagtgcaataaagtttgtgtgttccaaaaaaaaaaaaaaaaaaaaaaa

SEQ ID NO: 2492 - DNA, 599 bp, Canis familiaris
  misc_feature (461)..(462): n comprises a, c, g, or t, or includes no nucleotide
tcatcgacagttaagagcaccccatctggaaagagaatacaagttcgtggccactggacatgggaagtatgagaaggtgctcgtggatgagggctcagtgccctaggcagtccgttcctgctctcctgagactacaggtgcctctggcagcagcgtccacgtctgcaggggagagtccaccagacgcccaccccggccctgccatgagagccaccgtcatggcccgcttggcctgcccgcgcccctccatcacccaccacaatcatcgcccctctgctcatcaaccacctgacttctctcccctcccactctctaaccaccctgcctcccactctgcctggcatggcaggagcaggaaagggactatcacctggtgagttgagcccacaggagaccactcccgcacagaaaggccacaaggggttcccaagggaagggccccagggcttgagcagagaganngaacacctgctgggggacctccaggtcaagagacagagacacccgtaccacattctcaggccctgcaccccccgcctcctgcttgcagcctcctccttctagtgcmataaagtttgtgtgttccmaaaaaaaaaaaa

SEQ ID NO: 2493 - DNA, 713 bp, Canis familiaris
ctgttctaataacagggcaaatgccgtttcagcaaggttaaattaggaatgtcctttgagtcagaaaagataggccatagactcattccccaacacaaatggtcattctatgaaatggtactgggcccaggaggatttcttcaaccactstcctactcttggtcttgracctacctctggattagatcttactgttgtagctgctcacagcatcctcctgcatgcttagagtaatgcttttgggggaacactggtaaaataccagtatttattgtttttcacctcctcttcagaggacttggaggtaagctgcattcattaattcaagtttccctcttgctgtctgatgataaaagcttgcattttgctwtatcagcatttgttakagccmatatttaaggacmagagttagaaaatctatcatttcctggcttacccgcagactatggcttaaccttgcagcatatcaacttatgtttcaagctagatatctttatttgatatctaaagtgcaagaccmacaacatatcaagagatctataggcaagaaggcmaagctcttgtatttttttcatccagacacttcaatttattttataaatttgttcatttttcctgttctgttttatataatacatggacttaactacmaaataaagtaaccagtaataaaataacmaararrawaawaaaaaaaaaaaaaaaaaaaaaaa

SEQ ID NO: 2494 - DNA, 564 bp, Canis familiaris
accagcacctcgctccattgggaactcagcaccatgaagcttttcccgggcctccttttctgttccttggtcctgggtgtcagcggccaatggtattcatttgtcrgygaggctgctcaaggggcttgggacatgtkgagagcctactctgacatgagagaagccaactacaaaaattcagacaaatacttccatgcccgggggaactatgacgctgcacagaggggccctgggggsgcctgggctgctaaagtgatcagcgaygccagagagaattctcagagaatcacagaccktttaaggtttggagacagcggccacggagcggargactcgaaggctgaccaggctgccaacgaatgrggccggagtggcaaagaccccaaccacttccgacctgctggcctgcctgacaagtactgagcttcctcttggctctgccctggggagccgrgctstgagccccctgaggssagggacacccactcgttgagatctctggccacgcaggctggggagggcacctaagaggtgtctaataaatgcttaagagatggactgttg

SEQ ID NO: 2495 - DNA, 611 bp, Canis familiaris
agcctccccggggagggacaccccaaggactctgcagcgaggatgaagctttctcgtgggcatcctatttgtgctccctggtcctggcgtcacagccagagatggtggacattcctcaaggaagcaggtcaagggactagagacatgtggagagcctactctgacatgagagaagccaactacmaagattcagacmaatacttccatgcccgggggaactatgatgctgcacagaggggccctgggggcgcctgggctgctaaagtgatcagtgacgccagagagaaatctcagagaatcacagatctttgttaagtttggagacagcggccatggagcggaggactcgaaggctgaccaggctgccaacgaatggggccggagtggcaaagaccccaaccacttccgagcctgctggcctgcctgacaagtactgagcttcatttcagttctgtcctcaagagccggtctatgagccccctaacgggaagaacacttattgagttagagttgctgaattctgtattctttctactcaatagtttagaaggagcacataaaaatgtttaataaatgcttgcaaaattcaaaaaaaaaaaaaaaaaaaaaaa

SEQ ID NO: 2496 - DNA, 616 bp, Canis familiaris
aaggactcttatcaggatgagcttctcgtgggcatcctattgtgctccctggtcctgggtgtcacagcccagagatggttgacattcctcaaggaagcaaggtcaagggactagagacatggtggagagcctactctgacatgagagaagccmactacmaaattcagacaaatacttccatgccccgggggaactatgatgctgcacagaggggccctgggggcgcctgggctgctaaagtgatcagtgacgccagagagaaatctcagagaatcacagatctttttaagtttggagacagcggccacggagtagaggactcgaaggctgaccaggctgccaatgaatggggccggagtggcaaagaccccaaccacttccgacctgctggcctgcctgacaagtactgagcttcatttcagttctgtcctcaagagccggtctatgagccccctaacgggaagaacacttgttgagttagagttgctgaattctgtattctttctactcaatagtttagaaggagcacataaaaatgtttaataaatgcttgccaaaattccaaaaaaaaaaaaaaaaaaaaaaaaaaaaaaaaaaaaaaaaaaaaaaaaaaaaa

SEQ ID NO: 2497 - DNA, 946 bp, Canis familiaris
atatttttatgtcacttagcamaagtggttcaatcagttkcagtgcygatcattttcctgcctatttgagccmctcttgtcatttctctcaaccccttccatccctggctaaatagagcagatgcmaaatgctccttagatggatctgtcattttgcccmgtaatcacmatccagattttgaaacctctcggtgaakggggaaaggccacaggcattgcttgaggaggaaagtggttaatacgtatcccacagctcccacaggtttaaattcaggtcctaatgtgtacaaatgtcatggacacctcgacccmcgagaactgacatcctgtgccmagacgctgtagggtacmgtgttcaacatttgcagattcaggtatcgagaagcagagatgtcttgtaagcagcactttactaacagcttagcatctgtacccagtgtctccacttgracatcagtctactaacagagtaccatattttatcttcacagtcagctgatgtaaactactgctattttccatcacatatattttgctttacatttttaaatacctgatgaggttagtcatttcttcctaacctacttagttaataattgccaaaamcaaamcaaacmaamaaaaaaaaramaaaaaamaaaaamaaaaaamaaaacctgacaagcaattgaaggatgtgatgacaatctctctgcagtatctgcattcagtttgtatgaaatatcccaacttatttcttgtggggtaggtttggtcagatagcaataaccaaatgacttgccaacataactggtgcaactggtattctacaaagatataaggaacacatagacgattccttttaggataagataacgcttcttccactagcttttgtgtagtgatggcttccaatagcagttgattgacagttatagaaaccttgtgtatatatcaaactccttac

SEQ ID NO: 2498 - DNA, 624 bp, Canis familiaris
tgtacccacctgtccgtctcggcttttattggggacctcacatcatctgaaaggtaccttgcagtaggcccgtaatcmrgctgacagggcctcaaagccacaggtagggaaaactgaggccttggagcctccagacacttggaatccctatttgccagttgtttggcctgtgacatcagccagcctcctagagggcctgtatccacatctggaaatagggaagatcatagctacctcatggttatgttgcaaagccttaactctttaccagcccctgggccacaaaaggtccttgataaagggtcgttctcaggaacaggatggatgcagaagggtggggttaggagttagggagacctgaggggccaaggccccttaggaggcttggaaagactgcctatgcatgtgcacccacacaccgacacaccattgatatacctacttgcacacgagagacgtgatgagaaagccaagcaakacttatgctttcatcatcmaaagtgttaatgaaggttctaagttgtattttctgtacttggtatcctgtattttctgatttttccaccaatatatattattttgctattaaagaaaaataattttttttcaaaaaaaaaaaaaaaa

SEQ ID NO: 2499 - DNA, 706 bp, Canis familiaris
aggctgttccagtatgatcctcagactattaattactggatatgttgcagtattatttgaaacctgacagatgcaaattaaagggagaatccaattgggagctggaatatgtgctgacacagacctacaacattgaagatttacagccmaaaagtttgtatggactagcraaacaatttgcaaccccgggcratgascagtttatgaaatactacmaatacttctttgtgagttacgacagcagtgtaatttgcgatgggaaatgtaaggcctatcaaatttgtgcmattttgagtcttgatcatatttcctacmaagattgcctcagacaacattatataaagcaccatccttaaagtatttcacagtttgtagaraatgcagcattgttctgtttctgagatcagtttgtgtgaattgttacataaatctttgtgagttagagcgggcaagcmaaattcctagcttggctttcttttttataatcctcaaatgtagatatttgtaacactttaaatctttactacatcgaatatattcmaactgtgccttactagaatgatgtctggatgtgaatatctgatcttccagtttatatgcctaatttatactcttgtacactcttgaaattaccatttatacaataaagcmaatgatttctcmwmmaaaaaaaaaaaaaaaaaaaaaaaaaaaaaaaraaaaaaaa

SEQ ID NO: 2500 - DNA, 668 bp, Canis familiaris
gggccatttgctcaggaaatacttggtgtttaaatgtagtcccaataccttttggaatttcagggagcacatttckkaactatattttttttaagcttaagtaaaaattaaagyaaaattccatraccwwagagaacccacattacctggtaggggacactcttgaccaaggtctcagtgtgcacgatggktgggggccactggggccaggtgactgcaggagttccaaggggagccagccgggtgccttagaaggaagggcttggagggacagaccacatggagctcagtaagacgtgacgcatcaccaggaaaactgattactctccttatgaccctaataaagttgcttttttcagactagaatgttgtgatgccctgatcgtaacatgcttcttcccykktcctcagcttcaaatgtaaattcatcactgggctcacttctaataatcgcagtgtttcctgcctcgggcttcgcaacaccagcctcacaaaatagtgtttgcttaggcggtaacttagactttacctgatttttgattacgacagcgatggctatagctataaggtataattttactgtcttatttaaattttatgaatttgaatgttttttacactaactttccccaataaagtccactatgaaaccaaaaaaaaaaaaaaaa

SEQ ID NO: 2501 - DNA, 723 bp, Canis familiaris
ggaactgaaaagcattggggattgacggtttgctaccmggccatgctgcccattaatgcccgcaagatgaawtttgctcttctaaaagggtctttcagcgagcaaggcattaacgagtttctcagggagctctcttttgggcgcggatctacagctcctgtcggagktggkgctttccccaccatcagcacsaragagccttgggatggcaaggatggcgagcttcccgtggaagacgacattgacctcagtgacgtggagctggacgatttggaaagagatgagctgtgagaggcttggcacagacttcagttttcttttcttgggagcagakttcyccagcagtgaaggwacattcttcacactcagatgagtctaccagtggcctttttaaccmakaagtagcacttgattggtcatgtgaaaacactgcawcagtgaactttgcatctcaagaaaacmatgaaaaattctatgaattgttgtagccagcgaattgggttgtcttatcaagtaatattttgaggaaaactgatgggctgttgacatacttttccctccctctgactgctgcttgaatgttcttggaggctgtttcttatatkaagttttttaatgtgattctttcgtttgaatattaatggcttttttccattaaaaaataaaataatattttggacaatgccmawraawaaaaraaaaaaaaaaaaaaaaaaaaaaaga

SEQ ID NO: 2502 - DNA, 637 bp, Canis familiaris
ctccatcgtaatccccatcaagaaactttgtttttattgtgttagtaattctraataactatgctcccaaacttgatttgacactccagaagtttttactaagggctgtttttataaaaactgctattgcttctracttagaatttgttaaaggaagagaatatactttcactacgttgcccctcctgtgccccaagaaagtctgttaaaaaagtcaagtaggcatcctcataattatgaagttgctaaggtagtatttgagattttcttttaagtcagtgaccgtaaggagatctacggcattaaaagtgatgtaaacagttactcagtgcagcaagtagcttgtgtccatccagaatggctgtacccatttatgacatgttatgggtaaatgtgcactggaaaataaacccaagaaccacmatatatcttatacttttgtgaactgtgttttatggataacttcagttttcccmaaaagctgacatatttcaataatttgacatcagtgttaattctgagttggcagaggtagcctaaccmactaccattatgttttggtactaagggctatacctttcaataaagttactgaaatgcmaaaaaaaaaaaaaaaaaaaaaaaaaaaaaaaaaaaa

SEQ ID NO: 2503 - DNA, 716 bp, Canis familiaris
ggcccccaatgacaagaagaatgggtcgaccccccattgtccatgaactttgaggtgccattcgcacctctggcctcaaggtgcgctactttgaagggtgtttgaaccgaagctgaactacagcgaccatgatgtcatcaaatggtgcgctacattggccgcagcggcatttatgagacccgctgctagctgcccagtagcagccagcctgcctccstacccgcccttttccacaggtctgggtgccctgggccrccacacttcagtgtctcctccctcctgctttgctgccttccctttgcaccagcccctgagtctaggtctggaccmatcacgttgtgagcgggactggtggagcagtccctgggctccctgggcagggtggtttctggggctcctactccaccatccatctgtcagccctggcccagtgccaggctctgtgttctgtgaccmaagccaggtgggctccctctcctcccctcccctgtggccacatctctggagtgggagggttggctgcccctcacctcggagctcccccmaaggccmgtaacggatccccagccctcaatccctattctgctttgggatagtgtgagcttcattttgtacacgtgtgacttcgtccagttataaaccccaataaactctgtagagcggaaaaaaaaaaaaaaaaaaaaaaaaaaaaaaaaaaaaaaaaaaaaaaaaaaaaa

SEQ ID NO: 2504 - DNA, 622 bp, Canis familiaris
cgccgccgccagcatggatgtgcggggcgcccagcgcttcgcagcccgccacggccgacacccaggccatcgccgaccaggtgaaggcccagctggaagagccgggaaaataagaagtacactacttttaaggccgtgacattcaggagccaggtggtcscggggacmaactacttcatcaaggtccmagttgacgatgacgaatttgtgcaccttcgagtatttcagagtctcccgcatgagaacmagccytkggccttgtccagctatcagacchachaagccaagcacgacgagsctggcgtacttctagttccgctctgagcgggcccrtccacgtggttccgtgtggttccgtcctctctgggcgtgtctgggatcmmaagccmatgctgaaaaaaaaraaaraaaaaaamaaaaaaagccawwgctgttgctttgcagggccacttagggagaggctgtcctgcacctgtcttggtccctgctcctaactcccgtgggcgagacaaagtcagcacagtcactgaccttcattaygttcatcgagggcttatagtctctttaaatacatatttgtagatctttgcgaawwwmaaaaaaaaaaaaaaaaaaaaaaaaa

SEQ ID NO: 2505 - DNA, 677 bp, Canis familiaris
cagtccgcgcaggcgcagcaccagcagcaggagccagggcccgggagrctattgarggktatttcacttgcagcagcaactgttgcgggttgctccagcacctgcattgtcattagaggctgagggcgtgtgcttggccyttgttaacaagtgcggccagttgcgcctgttgcgtctgcagagggtccggtcacggcctgtggacctgctgaggatactgctgaaccacatwtagggaaacgtcgttgcgtttaaagttgtagtctactcaatcaggcagttctgtgtacgtttagggctcgtcatagtaatcatcctgcgactcatagtcgtggtcgccgcctacggacccctgtgccccatctgcaactggctmggtgcctgcgacttcatcgtagtcatcagtccttcctccccacggcccacggcgccccggccgcggtggagtccctcagggcagccaagctcctcgaggcaaccgcagggcaaatcacctgctgtacaagccatcccccaaacagctgcctggttggttgtgaatttcttatatttagccaaagtataaactagcttgagccattctacgctaaactaaattttttatgtttattttgctgaaagaatttttyttttyttttttttttttttttttttttttttttttttttttttttttt

SEQ ID NO: 2506 - DNA, 677 bp, Canis familiaris
gtcaggcgcgtccgcgtcgtggtcgtcgtcctcggtcccgggccctcygataactyccmataaagtgaacgtcgtcgttgacaacgcccaacgaggtcgtggacgtaacagtaatctccgactcccgcacacgaaccggraacaattgttcacgccggtcaacgcggacaacgcagacgtctcccaggccagtgccggacacctggacgactcctatgacgacttggtgtawatccctttgcagcaacgcaaatttcaacatcagatgagttagtccgtcaagacacatgcaaatcccgagcagtatcattagtaggacgctgagtatcagcaccagcggcggatgcctggggacacggggtagacgttgaccgakccacggacgctgaagtagcatcagtagtcaggaaggaggggtgccgggtgccgcggggccggcgccacctcagggagtcccgtcggttcgaggagctccgttggcgtcccgtttagtggacgacatgttcggtagggggtttgtcgacggaccaaccaacacttaaagaatataaatcggtttcatatttgatcgaactcggtaagatgcgatttgatttaaaaaatacaaataaaacgactttcttaaaaaraaaaraaaaaaaaaaaaaaaaaaaaaaaaaaaaaaaaaaaaaaaaaaa

SEQ ID NO: 2507 - DNA, 607 bp, Canis familiaris
catcttgtacggggggaaaattagcccttgtgaccccttctcccttacccgcccactctgagccttactctgctgttcagccctaactggctagggaaaatgggccaatgaattgccatgggctagcaaagaccatcttctaactacttgamaagaccttttagctgatgagcttagcaggagaactatgtttttgaggctgatgagacctttgagctaaatgctgaagatgagtttaagatctgtacaaatgagattttctttttttaactttcttttgtaatacttgtagttgggaggggttgtggcaaatttaattatggaagaaaagaaactgtgccgttttgtaatggtggctggcatactcttggtgatttagtggcaaatagatttcccaccagcctctattgattgtactaactgtaagcctgctgggaggtggagtccatttggttcataagctctacctgccggtttggaatctaatctcacttcttagcctcagtaggctggctcagggccttctcattctccagctctcagcccaaataaagctttttttttcctggwaaaaaaaaaaaaaaaaaaaaaaaaaaaaaaaaaaaaa

SEQ ID NO: 2508 - DNA, 680 bp, Canis familiaris
tcctcctccgccctcgtctcctgctccgtgcgtcatgctcgtgctgtaggatctgggtccctctctcagggcgcctcttcctccccagccctcacagccgsttgctgctaaagtagacattttatctcttgactcgtgcagtcattcccttttgcttgtggctgagtctcggcttcctattagtcacgtaatctatatttttattcggaagcatctttttttttttaatagtcctcgccagacagacacatacaggcctttgctgcgtacacatttcaggtgagagtggttggcgggggagcaccgtgtcctcagtaaggagtaaaagggaagacctttaacggtaatctttgcgtctggtgagaatgtgtcatcagctttgttattgccmaactcactccttagagttttcttagaaaagggaaaaaaaaaagaagaagaagaagaaaaaggccagaaagtcatctgttccctcttccacgcaaaaccatgagaacaagccagctccctgccagtgacagggcttctcgtaatttggaatgtgccttaaaccccmatgtcmatagcccmaaaactttcgaaattaaagtcagccagttctggaacgttttggaaatgttaaaaaaaaaaaaaaaaaaaaaaaaaaaaaaaaaaaaaaaaaaaaaaaaaaaaaaaaaaaa

SEQ ID NO: 2509 - DNA, 651 bp, Canis familiaris
cgccgtcgtgtcctgctccgtgcgtcatgctcgtgctgtaggatctgggtccctctctcagggcgcctcttcctcccagccctcacagccgcttgctgctaaagtagacakktttatctcttgactcgtgcagtcattcccttttgcttgtggctgagtyctcggcttcctattagtcacgtaatcgtatattgtttattcggaagcatcttttttttttttaatagtcctcgccagacagacacatacaggcctttgctgcgtacacatttcrggtgagagtggttggcgggggagcaccrtgtcctcagtaaggagtaaaagggaagacctttaacggtaatctttgcgtctggtgagaatgtgtcatcagctttgttattgccaaactcactccttagagttttcttagaaaaggraaaaaaaaaaagaagaagaagaagaaaaaggccagaaagtcatctgttccctcttccacgcaaaacyatgagaacaaagccagctccctgccagtgacagggcttctcgtaatttggaatgtgccttaaaccccaatgtcaatagcccaaaaactttcgaaattaaagtcagccagttctggaamrwwwwrraaaaaaaaaaaaaaaaaaaaaaaraaaaaaaaaaaaaaaa

SEQ ID NO: 2510 - DNA, 738 bp, Canis familiaris
gcctggtgcgcctccgcccaagcccccggatggggcgaatttcagtgtgtcgctggagacgagcgcgctacttcacggtcaccatcacagatgtctcctacatggatcgtgtaccccagcggcaaggtatacgtggccgccgtgcgcctgggagcgcgtggtgctcacctgtgagctgtgccggccgtgggccgaggtgcgctggaccaaggacggggaagaakkggtggaaagtcctgcgctgctgctgcagaaggaggacaccgtccrccgcctggtgttgcccgctgtccagcttgaggactccggcgagtatttgtgtgaaatcgatgacgagtcggcctccttcaccgtcacagtcacagagtcttaccaaagtcaggacagttcaaatwacaatccggagttatgcgtcctcttgaaaaagccgaagacccggcggctctggtcccgcttccccccatggcgacgaacagctggtgctgagtagcagctgcccccctaatatggggcccacattcctctgtcctccccccgcccccccgccgccgccgttcctctttgcctctccccagactgcttcagccactgaccwtacctacccggcccccgtgggcgtttgagtttgcgacccctgtgttaaaccaataaacgcgcaaataaatgtamarmrraaaaaaaaaaaaaaaaaaaaaaaaaaaaaaaaaaaaaaaaaaaaaaaaaaaaaaaaaaaaaaaa

SEQ ID NO: 2511 - DNA, 1002 bp, Canis familiaris
acaaggtcgataggttcattgttctaaagaagaaaattacgaaaatgacgggtccacgatttagaggttcttcaaatccaagcagtttatgtctggaacaatgatgtcaaccaattcggacaaaaaatcgggaaaagtgttgaccacgtcgctcgggatcacaatcacatgaggaaacttgcaaaacgtctcttgaatccagtcaaggacatcatgctgctacacgtcccgaggaatggggtcaacacttgacccattcaaaatccacggttggacccaatcaacaacgtgtggtatatggcgattcgtcataggmatataagtaggatgggtgaacctgttggtggttgggttagtcaattagatgttcaaccgaagaawatgaggaaccytcatcgatgtacggtcaaaccagtcmataattyccgtaactkcccagtcacttttaagacgatgtggcgtcttcagaatccgagtgtacggaagagtggtgatgtcacccacgttgagttccagaagrataacgtgatgacactagggcctcccgtccgccacgataactagatgsaccttctgtaggttgataagaagrmtatatgtcgactgccatgtaatcagttgtcgggaggtccatagaagaggrmaaaccgttgttattgacctctcacggttttgacgaagggactcgactagtcccacatggacggatggaggttggcctctctgtagctcgcgtgtcggattgacgttccaaattataaataattgggaacaaacgggtgctttttataaggtccgaaaatgggattaatatgattcgtgaaaaaaaaaaaaaaatcaaacgtayatagtccaaagttaagtcgaatctccatgtttttgggagatcatttataatagataaacgkcaatatcgactttaaataattcggtagaataaaaaaatattttcggtcggraaaaaaaaaaaaaaaaaaaaaaaaaaaaaaaaaaaaaaaaaaa

SEQ ID NO: 2512 - DNA, 1002 bp, Canis familiaris
tgttccagctatccaagtaacaagatttcttcttttaatgcttttactgcccaggtgctaaatctccaagaagtttaggttcgtcaaatacagaccttgttactacagttggttaagcctgttttttagcccttttcacaactggtgcagcgagccctagtgttagtgtactcctttgaacgttttgcagagaacttaggtcagttcctgtagtacgacgatgtgcagggctccttaccccagttgtgaactgggtaagttttaggtgccaacctgggttagttgttgcacaccatataccgctaagcagtatccktatattcatcctacccacttggacaaccaccaacccaatcagttaatctacaagttggcttcttwtactccttggragtagctacatgccagtttggtcagktattaarggcattgamgggtcagtgaaaattctgctacaccgcagaagtcttaggctcacatgccttctcaccactacagtgggtgcaactcaaggtcttcytattgcactactgtgatcccggagggcaggcggtgctattgatctacstggaagacatccaactattcttcykatatacagctgacggtacattagtcaacagccctccaggtatcttctccyktttggcaacaataactggagagtgccaaaactgcttccctgagctgatcagggtgtacctgcctacctccaaccggagagacatcgagcgcacagcctaactgcaaggtttaatatttattaacccttgtttgcccacgaaaaatattccaggcttttaccctaattatactaagcactttttttttttttttagtttgcatrtatcaggtttcaattcagcttagaggtacaaaaaccctctagtaaatattatctatttgcmgttatagctgaaatttattaagccatcttatttttttataaaagccagccyttttttttttttttttttttttttttttttttttttttttttt

SEQ ID NO: 2513 - DNA, 691 bp, Canis familiaris
  misc_feature (53)..(53): n comprises a, c, g, or t, or includes no nucleotide
ttctcgcgcaaggccccacatctcatcctgccaccacgcgcagcggctccccncttcgtgggccagctcttcaaccagcacctggacgtcttctacctgttcgagcccctctaccacgtccagaacacgctcatcccccgcttcacycagggcaagagccccgcggaccggcgggtcatgctgggcgccagccgcgacctcctgaggagcctctatgactgtgacctctacttcctggagaactacatcaaaccgccgcccgtcaaccacaccaccgacaggatcttccgccgcggggccagcagggtgctgtgctctcgccccgtgtgcgaccccccgggctccgccgacctggtgctggaggagggggactgcgtgcgcaagtgcggcctgctgaacctgaccgtggccgccgaggcctgtcgggagcgcagccacgtggccatcaagacggtgcgggtgcccgaggtcaacgacctccgggcmctggttgaagacccaaggttaaacctcaaggtcatccagctggtccgagacccgcggggcatcctggcctcccgcagcgagaccttccgcgacacgtaccggctctggcggctctggtacggcaccgggcggaagccctacaacctggacgtgacgcagctgaccacggtgtgcgaggacttctccaactcggtgtccaccgggc

SEQ ID NO: 2514 - DNA, 742 bp, Canis familiaris
cacttgttgcccagcactactggcaccttmgtagaggtgtaccggrcagtgrgcttctgctggaactctatrtcagaamcagttggtagrcagctcgttyctctccggattdaggggcytgtcatagtacgtgatccggactctgttgtccacgcgccacccctactargtcyaagcgccctaggtctatggtgggcccgtgctggttaaaggagaggtctacgggccagacagcaacaagawtyttcccgwtcccymawhmwwctcktacctaagcctkacctgtggtcccttgatcaaacctgaccctgactcacatgggcacagctcagttaggcagtccagtccagtagacctaactaccctcccgcactctgagaggtcaaaacaccccacaaacattgtgtccagttcaggsctgtcagcttttrttttacacggagaacataaataaataagacaaccagattgtccaaagggacgtggctgtggctggtttcattcaggagagtgactttcgcccccagtgagtcagacccctgccctggcttgttgtacacccaactggagccgggcgctggttcagcgagagaccatctcttaggagcataacagagactttcyccacagataaaaaattttctacytaagtataatttttcyyttttttaataaggtttkwtybttttttttttttttttttkttttttttwwttttttttttttttttttttttgggcgg

SEQ ID NO: 2515 - DNA, 742 bp, Canis familiaris
gtgaacaacgggtcgtgatgaccgtggaakcatctccacatggccygtcacycgaagacgaccttgagatayagtcttkgtcaaccatcygtcgagcaargagaggcctaahtccccgracagtatcatgcactaggcctgagacaacaggtgcgcggtggggatgatycagrttcgcgggatccagataccacccgggcacgaccaatttcctctccagatgcccggtctgtcgttgttctwaraagggcwagggrktwdkwwgagmatggattcggamtggacaccagggaactagtttggactgggactgagtgtacccgtgtcgagtcaatccgtcaggtcaggtcatctggattgatgggagggcgtgagactctccagttttgtggggtgtttgtaacacaggtcaagtccsgacagtcgaaaayaaaatgtgcctcttgtatttatttattctgttggtctaacaggtttccctgcaccgacaccgaccaaagtaagtcctctcactgaaagcgggggtcactcagtctggggacgggaccgaacaacatgtgggttgacctcggcccgcgaccaagtcgctctctggtagagaatcctcgtattgtctctgaaagrggtgtctattttttaaaagatgrattcatattaaaaagrraaaaaattattccaaamwarvaaaaaaaaaaaaaaaaaamaaaaaaaawwaaaaaaaaaaaaaaaaaaaaaacccgcc

SEQ ID NO: 2516 - DNA, 587 bp, Canis familiaris
cgagggctccgaggggctccgccggtcgtgggtctccgatggtctcggaggacctcgagggttccgcctggagaccgcgtctcacggacccggagcgcgctccggcggggcgccttctcattgsttgaggccaagacgcacttccgcctcgccgcctctcattggtcggggcctgggcgccctgtgccggggggcctctcctagacggtagcctcagggctacttccggcagccggtgctgctcccgctggcccgcccgggcgtctggtggactggagctctggggatggagggctggtctctgctcctcgggggcctcggcgtcccccggcccggcctgtgcccccacgtccccctctgcgtccccagccccggcccctcagctgtcgagctggttttgatggccccccaccaccccacgtgtccgcgggaagccgaggggcgactccagtggcctgaggacacgtatttataggcccccggcagggctgccccccatccgggtgccccaggatgggctcctcccggcaggggcttggccataagctttctgaataaagtgccttttttttcwaaaaaaaataaaa

SEQ ID NO: 2517 - DNA, 665 bp, Canis familiaris
gggggaaaagccagtgggagcctggctgggattggtgaastctctgggcaagaagctggaggaaaggggctttgacaaggcctatgtgkkccttggccagtttctggtgctaaagaaagatgaagatctcttccgggaatggctgaaggacacatgtggtgccmatgctaagcagtcccgggactgcttcgggtgccttcgagagtggtkcgatgccttcttgtgaggctctctggatagcccccagtcccaagccccagcatggagtctcccgagtttgcagccgcgtgggaactcctcccctgtcctctacmaaggaagagattgctattgttgtactcacttctgatgtacttcaaggtctttgggagttctcttcctctcaccatttcaacttttttgaaattctcactcttgcatgcatctccccactccttccccctgccagtttcaygtcaacmattatcagctttaccgagtgagttcctggcccttccctcacccccacccccactagtctggtctgttttatgctatttggctccttttttggcagaacagtcactgtccttgtaaggttttttaaatcaataaagtcagtggccttcmaaaaaaaaaaaaaaaaaaaaaaaaaaaaaaaaaaaaaaaaaaaamaaaaaaaaaaa

SEQ ID NO: 2518 - DNA, 1655 bp, Canis familiaris
gcagaagtaacaagcgttcttccccgtgcgctcctagccttcacatagacacacctgcgtgagaagcagaggggaggaaagacacaggcccagaggccctgcactttgtgcggtgtggggggaaggcccaggtccctgcctgtctcagggaatccacaatgaatcaagaagcggcttttaggcacctgctcctgatgctgcaattggtgatgctcccagcggtcactcctgtaagagaagtggtgttggggaaggcaggagatgcagtggagctgccctgccaaacttcccagaagaagaacatacacttcaactggagagattcttccatggtccagattctgggaaatcagggctccttctggactgtaggcagctccaggctgaagcatcgtgttgaatcgaaaaaaaacctgtgggaccaaggatcctttcctctggtcatcaaggatctcgaagttgctgactcagggatttacttctgtgacacagacaagaggcaagaggtggaattgctggtgttcaacttgactgccaagtgggactctggcagcagcagtggcagcagcaatatccgcctgctgcaagggcagcagctgaccctgaccctggaaaacccctcagggagtagcccttcagtgcaatggaaaggtccagggaacaaaagcaarcatggtggccaaaacctttcactgtcctggccggagctgcaggacggtggcacctggacatgtatcatctcccagagccagaagacagtggagttcaacataaacgtcttggtgctggctttccagaaggtctctaacacattctatgcaagagaaggggaccaggtggagttctccttcccacttagcttcgaagatgaaaacctggtcggggaactgaggtggcaggcacagggggcctcctcgtccttgctctggatctccttcaccttagagaacaggaagctgtctatgaaagaggcccatgcccccctcaaacttcagatgaaggaatcgctcccactccgctttaccttgccccaagttttgtctcggtatgctggttctggaatcctgaccctgaatcttgccaaggggacgttgtaccaggaagtgaacctcgtggtaatgagagcaaatagttctcagaacaatctgacctgtgaggtgctgggacccacctcccctgagctgacactgagcttgaatctgaaagagcaggctgccaaggtctcaaagcagcagaagctggtatgggtggtggatcctgaggggggaacgtggcagtgtctcctgagtgacaaggacaaagtcctgctggcatccagcctcaatgtttcatccccagtggtcatcaagtcctggccaaagttcttggctatcacgctgggcgggatcttaggccttctgcttctaattgggctttgcgtcttctgctgtgttaagtgctggcgccgcaggcgccaggcagagcggatgtctcagatcaagagactcctcagtgagaagaagacctgccaatgctcccaccggatccagaagacgtgtagtctcatttgaggcgcggggccaggtggagcttccggcttgcaagctcaccggctgtcctcccctgcctttcctgctgggctcctgggcctgcggacagatgaatgtagcgaaccc

SEQ ID NO: 2519 - DNA, 684 bp, Canis familiaris
gaccatcagtcacctaatgcagccattactcaaatgaccctcttgcgccytttatcaaaagaagcctcccagracattacttacatctgcmaaaacagtgtgggatacatggacgatcaagccaagaacctcaagaaagctgtggttctcaaagggtcaaatgacttggaaatcaaggcggaaggaaatgtcagattccgatatattgttcttcatgacacttgctctaaacgaaatggaaatgtgggcaagaccgtcttcgagtacagaacgcagaatgtggcgcgcttacccatcgtagatcttgccgctgtggatgttggcagcacagaccaagaatttggcattgaaatcgggccagtttgttttgtgtagagcaggccaagatacattgaccaagagcaccacccccgccaccagtgaccaccaccattcacaagaattctgactatttgaagctgatcctgagactcttgaagtaaaggctaatcccgcatcagcactgtatatatggtcctaagtgcctggcctccttatccttcagaatatttattttacttacagtcctcgagtcttaattgatttaaactatttttcaatacaccagtttaggtttaagacaaccgatgataatgaccacctttttaaaaagtaaactgattgaataaatgaaaaaaaaaaaaa

SEQ ID NO: 2520 - DNA, 590 bp, Canis familiaris
aaggcgggacccgggacatcctgaccggcctgggcatcggggccgtggtgttggctatttatggctacacctttactccgtgtcccaggagcgtttcctagatgaactggaggatgaggccaaagctgcccgagcccgagccctcgcgagggcatcaggaccctgaaccaggtggacactgcacgtctccaacccgctggagcccctttcacgtggtggatgataccggtgaccctgtggaaatccaagcctgcacacagcattgatggcctcaaccttgaacgatgattgagcccaagaatttattgcatttgggcccaggtcaaggaagtattgcccaccttacacaaattgtgtccagtcactgagcccatcttgcagtttgtttccttttttgagagctgtataaccttggcttttctcaggctttcagactttgtggtttaccctctttacctccctggggcttagctgttatggaggtggcagctatgtgtaatgttggagcctaaagtgggaaagatggagttaggttgagaataataaactgagtcacctctcttggagccaaaaaaaaaaaaaaaaaaaaa

SEQ ID NO: 2521 - DNA, 625 bp, Canis familiaris
gtgcacattctatagctgcaaaacagataaaaggggacataacatttcacactgtatcttccttttgcagcaaatgcaaggattgctcttctctggggacctccctgtcacccacgtttcctgttctgggctcctactgttccatgcctgccccatggtttggtggttggagcctagagctcaccctgctgtgtttcagcagccctggcctgcaaagggttatagataggtcttacatccccatatatgggatttactcaacagccacatgaaaatagtgccttctgytcttcatccaagcatttatatagcatgtccccmagttggcactccctgaggactctggatgcccactttattctctggtctaaagtcccccctttcttgtgcctcctatgtccmatttgggatttttacagagggggctgtctccmaacagctccgccaggaaccmagcmaaggccagacacggctggcaggcaggctagtggtattatgtatatgagcgggatgtgtgtgtcattgttatttgaattgtgctgttgtttagggggggaataaccagtaaataatactaataaaggagctgatgttccttaaaaaaaaaaaaaaaaaaaaaaaaaaa

SEQ ID NO: 2522 - DNA, 669 bp, Canis familiaris
tcccggggatccgggaycacaaacaaagcttttgaagacgaccagagagwcagacggcaagggagagtcagatataatgtccacyktcccgggagcagccagccgggctcagcagcccccaggcccagaggacgaagaccccagcctggatgagtatgacctctatagcctggctcattcctgcctgggagtgggaggccggaaaggtcgcaccaagagagaagctgctgccaacaccaaccgccccagcmctggtggccatgagaggaagctggtgactaagctccagaacacggagcggaaaaagcggggggcacggtcctgagacggagctggaaatgaggccagagcacggacaccacacagcgacgaagacaggaccacggatcggcacctggaggcaggatccagacctgcttgccccccaccccacccccaggacttaccctacctgaccgaggctccgaggggccaccaaggaagtgactccagccccagaaaaaggacaagataggaagcaagaggcagggaatgaatggagaggcagagtcgcaaaaggtaccccctaaaaagaaaracactgaagaaattggctctcctggagtgtgggaaggaaggacaataaacaaagtacatctgcmaaaaaaaaaaaaaaaaaaaaaaaaaaaa

SEQ ID NO: 2523 - DNA, 678 bp, Canis familiaris
tccggaatccccgggatcacgaacaaagcttttgaagacgacagagagacagacgsmaagggagagtcagatataatgtccamcyttcccgggagcagccagccgggctcasmagccccccaggcccagaggacgaagaccccagcctggatgagtatgacctctatagcctggctcattcctgcctgggagtgggaggccggaaaggtcgcaccaagagagaagctgctgccaacaccaaccgccccagccctggtggccatgagaggaagctggtgactaagctccagaacacggagcggaaaaagcggggggcacggtcctgagacggagctggaaatgaggccagagcacggacaccacacagcgacgaagacaggaccacggatcggcacctggaggcaggatccagacctgcttgcccccaccccacccccaggacttaccctacctgaccgaggctccgaggggccaccaaggaagtgactccagccccagaaaaaggacaagataggaagcaagaggcagggaatgaatggagaggcagagtcgcaaaaggtaccccctaaaaagaaagacactgaagaaattggctctcctggagtgtgggaaggaaggacaataaacaagtacatctgcmwaaaaaaaaaaaaaaaaaaaaaaaaaaaaaaaaaaaaa

SEQ ID NO: 2524 - DNA, 665 bp, Canis familiaris
ttgtacaaaaaacaggctggtaccggtccggattcccggatggagagtcagatataatgtccaccktcccgggagcagccagaccgggctcagcagcccmcaggcccagaggacgaagaccccagcctggatgagtatgacctctatagcctggctcattcctgcctgggagtgggaggccggaaaggtcgcaccaaagagagaagctgctgccaacaccaaccgccccagcccctggtggccatgagaggaagctggtgactaagctccagaacacggagcggaaaaagcggggggcacggtcctgagacggagctggaaatgaggccagagcacggacaccacacagcgacgaagacaggaccacggatcggcacctggaggcaggatccagacctgcttgccccccaccccacccccaggacttaccctacctgaccgaggctccgaggggccaccaaggaagtgactccagccccagaaaaaggacaagataggaagcaagaggcagggaatgaatggagaggcagagtcgcaaaaggtaccccctaaaaagaaaracactgaagaaattggctctcctggagtgtgggaaggaaggacaataaacmaagtacatctgcaaaaaaaaaaaaaaaaaaaaaaaaaaaaaaaaaaaaaaaaaa

SEQ ID NO: 2525 - DNA, 3434 bp, Canis familiaris
aagctagccgccatggggaagggggtcggacgtgataaatatgaacctgcggccgtttcagagcatggcgacaaaaaaaaggccaagaaagaaagggatatggatgaactgaagaaagaagtttctatggatgaccataaactgagccttgatgaacttcatcgcaaatatggaacagacctgagtcgaggcctaacaaccgctcgagctgctgagatcctggctcgagatggtcccaatgccctcaccccacctcccaccactcccgaatgggtcaagttctgtcggcagctgtttggaggtttctcgatgttactgtggattggagcgattctttrtttcttagcttatggcatccaagctgccacggaagaggaacctcaaaatgataatctatatcttggtgtggtactatcagctgttgtcatcattactggctgtttctcctactatcaagaagctaaaagttcaaagatcatggaatccttcaaaaacatggttcctcagcaagcacttgtrattcgaaatggtgaaaaaatgagcatcaacgcagaggaggttgtartcggggacttggtggaagtgaaaggaggagaccgaatccctgctgatctcagaatcatatctgccaacggctgcaaggtggataactcctcgctcactggtgaatcagagccccagactagatctccagacttcacaaatgaaaaccccctggaaacgaggaatattgccttcttctcaacsaactgcgtgraaggyactgcgcgcggcattgttgtatacactggggatcgcactgtcatgggaagaattgccacacttgcttctgggctggaaggaggccagactcccatcgctgcagaaattgaacattttatccatatcatcackggtgtggcygtgtttctgggsgtgtccttctttatcctttctttkatccttgagtatacctggcttgaggccgtcatctttctcatcggaatcatcgtagccaatgtgccagaaggtctgctggccactgtcacggtatgtctgaccctcactgccaaacgcatggcaaggaaaaactgcttagtgaagaacttagaagctgtggagaccttgggatccacgtccaccatctgctcagataaaactggaactctgactcagaaccggatgaccgttgcccacatgtggttcgacaatcaaatccacgaagccgacacgacagagaatcagagtggtgtctcgttcgataagagttcagccacctggctcgctctgtccagaattgcgggtctttgtaacagggcggtgkttcaggctaaccaggaaaacctgcctatccttaagcgggcagttgcaggtgacgcctcagagtccgcactcttaaaatgcatcgagctgtgctgtggttctgtgaaggagatgagagatcgatatgccaagattgtggagatccccttcaactctaccaacaagtaccagctgtccatccacaagaaccctaacacgtctgaaccccgacacctgttggtgatgaagggtgctccggaaaggatcctggaccgctgcagctccatcctcctgcacggcaaggagcagcctctggatgaggagctgaaggatgccyttcagaatgcctacctggagctgggcggcctcggagagcgagtgctgggtttcygccaccttttcctgccagatgaacagtttcctgaagggttccagtttgacactgatgatgtgaatttccctgttgagaacctctgctttgtgggcttcatctccatgattggccctccacgggctgctgttcctgacgctgtgggcaaatgccgaggtgctggaattaaggtcattatggtcactggagaccatccgatcacagccaaagccattgccaaaggtgcaggcatcatctcagaaggcaatgagaccgtggaagacattgctgcccgtctcaacatcccagtgaggcaggtgaaccccagagacgccaaggcctgtgtggtacatggaagcgacctgaaagacatgacctccgagcagctggatggcattctgaagtaccacacggagatcgtgtttgccaggacctctcctcagcagaagcttatcattgtggaaggctgccagagacagggggctattgtggctgtaactggtgatggcgtgaatgactctccagccttgaagaaggcagacattggggttgccatggggattgttggctccgacgcgtctaagcaagctgccgacatgattcttctagatgacaactttgcgtcaattgtgactggagtagaagaaggtcgtctgatctttgataacttgaagaaatccattgcctacaccctgaccagtaacattccagagatcacccccttcctgatatttattattgcaaacattccactaccactggggactgtcaccatcctctgcattgacttgggcacagacatggtccctgctatctccctggcttatgagcaagctgagagcgacatcatgaagagacagcccagaaaccccaaaacggacaagcttgtgaatgagcggctgatcagcatggcctatggacagatcggtatgatccaggccttggggggcttcttcacttactttgtgattctggctgagaacggcttcctcccgacccacctgctgggcctccgagtggactgggatgaccgctggatcaacgacgtggaggacagctatgggcagcagtggacctacgaacagaggaaaatcgtggagttcacttgccacacggccttcttcgtcagtatcgtggtggtgcagtgggctgacttggtcatctgtaagaccaggaggwactcagtcttccagcaggggatgaagaacaagatcctaatatttggcctctttgaagagacggcccttgctgctttcctgtcctactgccctggaatgggtgttgccctgaggatgtaccccctcaaacctacctggtggttctgtgcckttccctactctsttctcatsttcgtgtacgacgaagtccsrwaactcatcatcaggcgacgccctggcggctgggtagagaaagawacctactactagacccccgtgtcctgcacgtygtgrakcawcwtgccacacactttgcacccaccacccaccccctctttgkgkacttcagtcttggaattcggaactytacccctggtaggaaagcatccgaagcatgtgggggaagcaagacgtcctggaatgaagcatgtagctatatgggggggaggggggagggctgcctgaaaaacatcgtctatgggaatgacagtggggatggtttttatgtgcctttttgtttttgtaaaaaggaaaacttggaaagactgaaagaatacattttatatctggatttttacaaataaagatggctattataatggraaaaaaaaaaaaaaaaaaaaaaa

SEQ ID NO: 2526 - DNA, 695 bp, Canis familiaris
agattggacaaaatcctgcagatgagggtcaaacccagcgaggtctcatgctcaaccccggggacaccaagggtcgcaaccagttgaatgagatgwrgctacmagtgactgttgtgccaarcaacaacaacaccgtggcacttcagaaatcctccccaaatacaaaacaagtccgtaggcttgcgagcatgtctactgagcttgacaagatcatgaacccgctcagagtcccgttggcttagaacatcacctgcctctatcgtgagttggggatgaagcttcttawtgaccacaatccttgtgttcttcaaatggcaaatttgttacctcaaaaatagattgcgacccttgccatcaccggacctcttcgttcttgcctatgtgaacgggvaaaacatcacttaattgtycaaccaaatcagattcaagttctttgaaagtgacgtcgtttcatggacgaacgaagaagtcttaaaaagaaccatatgacmaaatttttccatcctatgtatctttgtcaaaaaccmagacttgacgaccgtcatcaataacgtgtcacttctggacgragacaaagacgaacatcggacatcatttttgacagttatttctcataggttaacaawcgaataaaaagtagagtcawaaaaaaaaaaaaaaaaaaaaaaaaaaaaaaaaaaaaaamaaaaaaaaaa

SEQ ID NO: 2527 - DNA, 695 bp, Canis familiaris
tctaacctgttttaggacgtctactcccagtttgggtcgctccagagtacgagttggggcccctgtggttcccagcgttggtcaacttactctacwycgatgktcactgacaacacggttygttgttgttgtggcaccgtgaagtctttaggaggggtttatgttttgttcaggcatccgaacgctcgtacagatgactcgaactgttctagtacttgggcgagtctcagggcaaccgaatcttgtagtggacggagatagcactcaacccctacttcgaagaatwactggtgttaggaacacaagaagtttaccgtttaaacaatggagtttttatctaacgctgggaacggtagtggcctggagaagcaagaacggatacacttgcccbttttgtagtgaattaacargttggtttagtctaagttcaagaaactttcactgcagcaaagtacctgcttgcttcttcagaatttttcttggtatactgktttaaaaaggtaggatacatagaaacagtttttggktctgaactgctggcagtagttattgcacagtgaagacctgcytctgtttctgcttgtagcctgtagtaaaaactgtcaataaagagtatccaattgttwgcttatttttcatctcagtwttttttttttttttttttttttttttttttttttttttktttttttttt

SEQ ID NO: 2528 - DNA, 1080 bp, Canis familiaris
atgatatctaacggcacaggctcttccttttgtctggactctcctccatgcaggatcactgtcagcgtggtcctcactgtcctcatcctcatcaccatcgccggcaatgtggtggtctgcctggctgtgggcctgaaccgccggctccgcagtctgactaactgcttcattgtgtcgttggctatcaccgatctgctcctcggcctcctggtgctgcccttctcggccttctaccagctatcctgcaggtggagcttcggcaaagtcttctgcaatatctataccagcttggatgtgatgctgtgcacggcctccatcctcaacctcttcatgatcagccttgaccggtactgcgctgtcactgaccccctgcgctaccctgtgcttatcaccccagtccgggtcgccgtctctcttgtcttaatttgggtcatctccatcaccctgtccttcctgtctattcatctggggtggaacagcaggaatgagaccagcagtttcaatcacaccattcccaagtgcaaagtccaggtcaacttggtgtatggcttggtggatgggctggtcaccttctacctgccgctgctggtcatgtgcatcacctactaccgcatcttcaagattgcccgggaccaggccaagaggatccatcacatgggctcctggaaggcagctaccattggggagcacaaagccacagtgacactggctgcagtgatgggagccttcatcatatgctggttcccctactttactgtgtttgtttaccgtgggctgaaaggggatgatgccatcaatgaggcttttgaagccgtcgttctgtggctgggctatgccaactcggccctgaaccctatcctgtatgccacactgaacagagacttccgcacgscwtaccagcagctcttccgctgcaggmcggccagccacaatgcccaggaaacttctctgaggtcgaacagctctcagctggccaggaatcaaagccgagaacccatgcggcaggaagagaagcccctgaagctccaggtgtggagtgggacagaggtcacagcccctcgaggagccacagacaggtaa

SEQ ID NO: 2529 - DNA, 658 bp, Canis familiaris
gacctgratggarcggtggaagatgccaagacagcccggctgttcaacatcaccagctctgccctggcagcgtcctgcatcatcstkgtcctcatcttcctkcggtacccactcaccgactactaagaccccaccgggcaccgccggccgtggagacaaagcactgagacatgttcattttcacgactgatgtgatacgggatgccgtgtggggcagagcagggcatgtgccctggagtcccccctgaagctgtgaaccgggcagcgaggccgtcagaagctccgtatagtacasgggcagcgagcttcggkccggcgcaccctctctgcctcctgaccctctgcctctgcctgtttctggggtctgtgggtgtctccctgcgctgctgcaccctggcttccactggctgccctccctgacctcctgtgctcccctcccaggctcctggggcccctctgacctgacacccagcaagaagggcttctgtgggagcttcccggtttgggggggctgccmgcatctggggactcactctatcttccctgaccccatctcctccaagctgtgaccctgctcagagctcttgtatctgtgaactttcaataaaatacctgtctggctccmaaaaaaaaaaaaaaaaaaaaaaaaaaaaaaaaa

SEQ ID NO: 2530 - DNA, 767 bp, Canis familiaris
gtgcaaatgtggaggggacaacgtccaaatagggcttccaggaccaaaccacctgggtggaagttaatccgaggaaaactgtgggcaccactagccctgctgcccgcagaatggcttggatcgctggggaggaaagtaattacttgatggctttgaagaatctgtggtacttgggcattgtagatccatatccmccmttatgtgacattaaaggatcatatacagcgcagtttgaacataccatactgttgcgtccaacgtgtaaagaagttgtcagcagaggagatgactattaaacttagtccmaagccgcctcaacatcttttattttctaagctttgttggaatacattataccagaagtaatttgcaacatgttgtctgtttaacagtggacctatgtaatgcttttatccatgtttaaaaaggaaggaatttgatcmaaggcaaaccatctgatgtaattagtcaaggaaaaagctttcaggactttcaaatgttaactgtttttcccatctaggaaatgctataaagctcaaattagttaggaatgacttatacacttttttgttttgaacacttaagagatgcttttcagatatttatattgccatattcttgaattgaatgctttgaatgactacatccmattctgcacctataccctctggtattgctttttaaccttcctggaatccattttctaaaaaataaagacattttcagatctgaaaaaaaaaaaaaaaaaaaaaaaaaaaaaaaaaaaa

SEQ ID NO: 2531 - DNA, 688 bp, Canis familiaris
gcttaggactttgatttgataacgcccagagtggagacacagaaccattggtcacctactatgagacaatgacagtggaaagtgtgactcaagctgtgtccmatctagctcttacagtttggtgaagaagatkcagatccaggtgccatgtctcgtccctttggagtagcactgttatttggaggagttgatgagaaaggacctcagctgtttcatatggacccatctggaacctttgtacagtgcgatgctagagcmattggctctgcttcagagggtgcccagagctccttgcaagaagtttaccacaagtctatgacactgaaagaagctatcaagtcttcactcatcatcctcaagcaagtaatggaggagaagctgaatgcaactaatatagagctagccacggtgcagcctggccagaatttccacatgttcacmaaggaagaactcgaagaggttatcaaggacatttaaagaagcatgatcctcagaacttctctgggaccaatttaagttctcttaaatgcttttaacttttaattccagcttctgttccttggaagagatccagtgtatgtgcatttttttatgatgtctgtacataaaggcagttctgaaataaagaaaaatttcaaatttgttaawaraaaaaaaaaaaaaaaaaaaaaaaaaaaaaaaaaaaaaa

SEQ ID NO: 2532 - DNA, 643 bp, Canis familiaris
gaacctggagcgcaatgggcaatggcagcaagggccacagcgcagacactgccttgtacagccaggtccagaagagcagkgcctcaggaagctgggactgtgagctgtctagagcaggggctaacaggactggagtccaggcagaaggctccacgtgagaggtaggktgagbcgggggttgctgataggacccccacagggaggtggtactggggatcaaagaaacgtattagagcctgcaggaaccagagggctggagggtcccctgtaagccagcccaggggaccagagggatcaggggagtcaggggaaggatgatcaatctcaagaagtcctggaagtgggacagatggcagaggtgaaggatggggcctgagagagaccagcacccccaagtcatcctccccaaaggaatggacagctgctggaccaggtctatgacaatgggggctttgtctgggttggtacagtttgagggggctgaatggaggctacagggtgatgctggactgtgcctggatcgtcacccctgttttgttctttgccagagacagattttaagaagtttattctcattaaagtcagcttgggtttaaaaaaaaaaaaaaaaaaaaaaaaaaaaaaaaaaaaaaaaaaaaaaaaa

SEQ ID NO: 2533 - DNA, 266 bp, Canis familiaris
ctgaatataaacttgtggtagttggagctggtggcgtaggcaagagtgccttgacgatacagctaattcagaatcactttgtggatgaatatgatcctacaatagaggattcctacaggaaacaagtagtaattgatggagaaacctgtctcttggatattctcgacacagcaggtcaagaggagtacagtgcaatgagggaccagtacatgaggactggggagggctttctttgtgtatttgccataaataatactaaatcattt

SEQ ID NO: 2534 - DNA, 628 bp, Canis familiaris
agttgaagtggatatcttttgaaggagatagaaagtcagattctactgcttacattaccgtgatccctcagtgcataaaggaggaagatgccccctcagataatgacagtggcatctgtatgagtcctgagtcctatcttgggtccccycagcatagcccctctacctccaggggctctccaaataggagcctgctgtctccaggttccctctgtggttctgcccgccccaaaccctatgaccctcctggagagaagaccgcaaaagtaaaggttgagaaactagataagaaactgaaaaaaatggagcagaacaagacagcagccactaggtaccgccagaagaagagggcagagcaggaagccctcactggtgagtgtaaagaactggaaaagaagaacgaggctctgaaggagagggcagattctttagctaaggagatccagtatctgaaagatttgatagaggaggtcagaaaggccagggagaagaaaagggtcccctagttgggggtgtcaggaatgtgtgcttgtacataggcttgcgctgaagctgtgttgtaataaattattttgtagtgaaagtaaaaaaaaaaaaaaaaaaaaaaaaaaaaaaaaaaaaaaaaaaa

SEQ ID NO: 2535 - DNA, 764 bp, Canis familiaris
  misc_feature (262)..(262): n comprises a, c, g, or t, or includes no nucleotide
agtctactgtgcaatgaatcactgtgagtaacatctactattccattctattgaggtgtacctggaggcaacattttatgstttwgtttttgtgtgtgtcagtkttcatagtattcawwtttykgggtcactytawtaktktcatgaawttcagattsbgagggaaatgtttkktaracvkkkkackwmbktkkkkbktaagataagatgaaargcaggcctatttcatcacmagcacagacatagacacmcmgagacvamnracttatgctttatttgtaaatttagtgttttctccatctctactgtcmaatgatgtgcmaagtcttctcttggttgaatggaagtcagccmaggattataactcctgaatcttaacttaatatgccmaacagcatgggctacacacatatgaatatttaatatcttgraccmaatgatctcmaatttcmawgttcagatttgcttaactgaaaaataggtggtaaattttaagactgatgattttgcmaaatactagaccmaattcatgmagccacatacacttagagcmatattyttagtattaagaattatatagttacctagtgaaacttctcttttctagaattatttttcactytaagtcatgtgtatgttcctttttaatcatttgcatgttatgtttaacmagctcatagcmamaataaaacayagcmmmtggsmmmaaaaaaaaaaaaaaaaaaaaaaaaaaaaaaaawaaaraaaaaaaaaaaaaaaaaaaa

SEQ ID NO: 2536 - DNA, 617 bp, Canis familiaris
  misc_feature (12)..(12): n comprises a, c, g, or t, or includes no nucleotide
cagattctgagngaaatgttttgtaaacattttactackttkttttttaagataagatgaaargcacggcctatttcatcaccagccmcagacatagacacccacgagaccaccaacttatgctttatttgkaaatttagtgttttctccatctctactgtccaatgatgttgccaagtcttctcttggttgaatggaagtcagcccaggattataactcctgratcttaacttgaatatgcccaacagcactgggctacacacatatgagatatttaatgatcttgaacccaatgatctccaatttcaaatgttcagatttgcttaactgraaaataggtggtaaattttaagactgatgattttgccaaatactagacccaattcatgaagccacatacacttagagccatatttttagtattaagaattatatagttacctagtgaaacttctcttttctagaattatttttcactctaagtcatgtgtatgttcctttttaatcatttgcatgttatgtttaacacagctcatagccaaataaaacatagccaatggccaaaaaaaaaaaaaaaaaaaaaaaaaaaaaaaaaaaaaaaaaaaaaaaaaaaaaa

SEQ ID NO: 2537 - DNA, 625 bp, Canis familiaris
ttcaccttaataagtttcatgattccgattcctgagggaaattgttkkgtaaacattttactacttttttktttttaagataagatgaaaagcaggcctatttcatcacacagcacagacatagacacaccagagacmaccaacttatgctttatttgtaaatttagtgttttctccatctctactgtcmaatgatgtgcmaagtcttctcttggttgaatggaagtcagcccaggattatagactcctgaatcttaaccttaatatgcccaaccagcatgggctacaacacaatatgratatttaatatctgtgraccccaatgatctcmaatttcaatgttcagatttgcttaactgaaaaataggtggtaaattttaagactgatgattttgccaaatactagacccaattcatgaagccacatacacttagagcmatatttttagtattaagaattatatagttacctagtgaaacttctcttttctagaattatttttcactctaagtcatgtgtatgttcctttttaatcatttgcatgttatgtttaacaagctcatagccaaaataaaacatagccaatggcmaaaaaaaaaaaaaaaaaaaaaaaaaaaaaaaaaa

SEQ ID NO: 2538 - DNA, 675 bp, Canis familiaris
acctgattcccgccttttcttacggattgtgtccgggaccacaatttggatcttgtcgaagctgctaagccggcttggacagccagtgccctcatggcttcgggaagaaactgcagcattccagtctgggctgatgtccgggcctcctgtaccagcamaagccccctgcttccctaaagggcaagcccagagcagggcccaaaaggggggatagagtggcccagcmcctgccccttytacctcagtgggcccccaggcctgggatggctgagaaggggaagggcagtcctgttcccacagctctggggtcttataaaggggcttcccttgataccccacatcgtggtactaggcacctttgacccatggtcttagaaggtgggcaggaatgaaagggtccaggcagggtgtagaggaacttattaatccagtgacttccctcttcatccttcagcagtatatctatctatacctgactatgggagggaccccctactgtgggatcaatgggatctacctgtggcccggcctccctaagtgtcattcacattgaatggggacgaggccggacagtggctcatagagctaagtatgagccctagctgtgggctagaaatgtccttaaataaacatccttatttttcaaaaaaaaaaaaaaaaaaaaaaaaaaaaaaa

SEQ ID NO: 2539 - DNA, 700 bp, Canis familiaris
gctgcagttttcccatgggttactgcggacgagttcaaagccaagtcacgtagaatcgcatcactgttaccagaggtggtgtccgccgcgtcggggcggagcagagttctgtacctgcagcgttttgcacgccggccattcaaagccgcaagcaaatgccctctcgtgggagacgtagctttgctgtctgacgggctctacgatgccgctgacgtcagcacagggaagtgcgtttccagcctgtgagtaggtccttgcgtttaaaccctgatgcccagagcccagtaccttgtgccttcgtcgtggtcgctggcaaccgaaacggtctccctccgtcggccgagggagccaggttgacgacggctccctcagggccacactcctgctgtttttcaagacgttaacatcgatcgtagatccggaccaacccagaaacttaactcgtgtctcttaagtgggttaatgcgtctttattgtcagtggctagtagtgagtcttcatcataggatttccaggctgagaagaaaaggcagtgatgagtagccgacctgagaccgtgggaggaccccgcagttcgagcccccgtcctgtgtacccgcactgaccgcggcatgttcctcactgataactgtgtgtctctgacaaatacatttgcaaaaacggwaaaaaaaaaaaaaaaaaaaaaaaaaaaaaaaaaaaa

SEQ ID NO: 2540 - DNA, 638 bp, Canis familiaris
caacctggcaattggctaatcctccattgtacacatggggctcctaagtttacaaagtgragtagagctgcagtaatttgtcccggtgtctttgagggtgcctgcgttgcctctcagcacttctagcagktctacacccccaacaccaaagggcagtactacctgctggagaaagtattaggctgctacatcttcccagttgagcaagtctactctgtggtttcacagctaacacgcaaccaggtgggagaccgcttcgaagcctgcgatagacagctgtatggaatcccgtcagaagctactgagcccctaacatactacttaggtatcttgcgggaccaggcaaagacagaggtttcagtaatctccaaacctcaagcagttttggacttggccaacaaggcagtacctacagctaaagaggcagcagcaccagaggcagcagcctcctcagcagctccagcagcagccgctgcccctgccttggaagttgctttggttgtgacggtggttacggtcgtggtatagggtaaaggacacaaagtcattactcctttttgcttccttaactgccttgaaataaagagtttcttggtttatttggcaatcaacacaatttttttttttttttttttttt

SEQ ID NO: 2541 - DNA, 638 bp, Canis familiaris
gttggaccgttaaccgattaggaggtaacatgtgtaccccgaggattcaaatgtttcacytcatctcgacgtcattaaacagggccacagaaactcccacggacgcaacggagagtcgtgaagatcgtcmagatgtgggggttgtggtttcccgtcatgatggacgacctctttcataatccgacgatgtagaagggtcaactcgttcagatgagacaccaaagtgtcgattgtgcgttggtccaccctctggcgaagcttcggacgctatctgtcgacataccttagggcagtcttcgatgactcggggattgtatgatgaatccatagaacgccctggtccgtttctgtctccaaagtcattagaggtttggagttcgtcaaaacctgaaccggttgttccgtcatggatgtcgatttctccgtcgtcgtggtctccgtcgtcggaggagtcgtcgaggtcgtcgtcggcgacggggacggaaccttcaacgaaaccaacactgccaccaatgccagcaccatatcccatttcctgtgtttcagtaatgaggaaaaacgaaggaattgacggaactttatttctcaaagaaccaaataaaccgttagttgtgttaaaaaaaaaaaaaaaaaaaaaa

SEQ ID NO: 2542 - DNA, 655 bp, Canis familiaris
agtccttgtcagattaacttattaaaccctgtgttttccatgactgaggtcaagaactgccatttaaaattggaagttaatgaacaaaatgagaagttcaaagaagagggcaaaaattagaatggccaaacgatgtaagagtcaaagagcaaggagccgggacctattaaaagttacatttgctctgagaacttgctaggagagctccagtccctctgaggccggccccgaagccgtggggcagggaggccaggggcggccgtgtccctcaagctaagtcagagaaataccccttgaaactacggcatgttcctaacgtccagactgagcagggaggcttgtggtgaagccagaggcccccgcatccctgcaggtgagggtcaggatctgggcgctgcacctccggcctccctgtgcatcgccgggggactgggctcccctgaacctgctaaggtgcctgcggagggtccccacacaacttgtcctggaggtggtccggatgccagtaggatggccttggggacgcagctgctttccagaaggtcaggggaccataaaccacagaactgcaccccacatgctatcttcttgctttgagaccagactgaaaaaacaatctgtaggccaccgtcatcccttaaaaaaaaaaaaaaaa

SEQ ID NO: 2543 - DNA, 595 bp, Canis familiaris
ggggcaatatctgtgaacaccacctcctacaatgtaggcagaaccgatatcccagaaggactatatattgtttttagaaaggagagaaaattggtatttatttttctataatagtcatattagatatttagcacttgtaaataaatgtatatgtkttttataattctggagagacgcagagaatcctacccagcgwtgaggtatgagagggaaatcaaagatgccacaataacaggattcagcctggcaagagtaacagacgggtccgaacagactgagaaggcagcagaaagcccccagagaagctgatgagaggacgagccttaggtacactgtctacgatgacaaggagggaaaagccacaggatctcaggctggagatactcatgaagacagccagacctggtactacaggaaacgttttcagaagatgcccgtgagaatagactaagatgtgtatagtcctattagcattaacaaaccttccagaatcaataatctgtggcaacctatctctgtaaaaacaaacactgtaatttctaaataaatgtttagtcttycctgtaacgttaaaaaaaaaaaaaaaaaaaaaaaa

SEQ ID NO: 2544 - DNA, 621 bp, Canis familiaris
taaggagggtccctccaatcatgccccgggtctgtctcccccctccaccccacctttgccgcctcccatcattgtttcctctcctgtccatttcggaatstgctccccktkttccctccccagaatcatgtttggccatagtcaacatctgcactcatctaacagctgagggactcaggcctgcagggaatttggggatgcagaggagggcctgcaaacctggcctcccgggaagctatgcagaacaattgtgcagccagggacaggagagccagcctggatgtgaggcagggagggtttcaggaatggtggccttataaccatagaaacmtgaaaagcaagccaagtgacccttggggaaatgtatttgggcaggaagccaaaaggcagccaagttcacagagcaggtgaatttgcaggtagatggggaagtgggcaggctgggggatggccatagttggtgactgggagttcattttagctctgggaagaaatcagtgtttgtgatgagggtgggggaggggctgattgttttggtggtttgtgagcagagaaataaaatgaagaatttcctcwrraaaaaaaaaaaaaaaaaaaaaaaaaaaaaaaaaaaaaaaaaaa

SEQ ID NO: 2545 - DNA, 639 bp, Canis familiaris
gaacttaagggggagggtaagaatgcttatctaaaggcactggctccactatcatttggcttttaagccaatttaagattctggtgtttggcctcttcattcttgattgaactttgtagcctcgccgtgggaggtacctggtcttgacctgaggactgaggagagctggctaagtgttagactggtatgcataagaaattaatagagaaagatctgaaaacagaagtactccmaaagatgaaaatccggaacacttaaattaagctttagaagccaagactggcccggcctccctccccccccgggcgcacagctcagtactacagcatcagggcctgcctgtggtctttccatgctctgccactcgagagctggcactttttttaaatagacacaatgggtgttatttttatttacctttttgtaaagtgattttcagtcttctgtttgaggttcggggtgatcctgtcctgcacttgtgtaaatactgggtatcacgctctgatctacccgcttgccgctcgggtggctgtgcaactgaggacccttcatgtcacgcattgctgtaacaatgctaataaaacatctctttctttctwwrmmwaaaaaaaaaaaaaaaaaaaaaaaaaaaaaaaaaaa

SEQ ID NO: 2546 - DNA, 658 bp, Canis familiaris
ctcacccttcccccgcaaccccgggtcttgccggcaccccccactctgcaccctcaccctggggtggtggcsyaggcytagtgggctkggtggtggttccctggcgtgaactcgtggtcacctggkttggggtctctatttgtcaaccccgatttagtcgtatctctttgaaaaaaacccgtatggctccgcggccatgaaggtgaagatcaagtgctggaacggcgtggctacttggctctgggtggccaacgacgagaactgtggcatctgccggatggcctttaatggctgctgcccagactgcaaggtgccgggcgatgactgccccctggtgtggggccagtgctcccactgcttccacatgcactgcatcctcaagtggctcaacgcgcagcaggtgcagcagcactgtcccatgtgccgccaggagtggaagttcaaggagtgaggccaccctgtgccagcacccgccccacccccgctgccccgccaccctcttccctggcgacagcccctccggtggcagtggggacacacttgaaacaaggactggagctgtatttgtttttcttcagattgtgacacttttatccaataagtaaaactcattaaattgtctgaaccttgaaaaaaaaaaaaaaaaaaaaaaaaaaaa

SEQ ID NO: 2547 - DNA, 681 bp, Canis familiaris
acarctgttagtagttgagctaaatggtwkaacttgcattacycagtggtagagctgggcyttttcagccagtcattaaaactaggctaggtacmaycccgrgtcytttagagcaccyaggacywttwtaggctgtcctagtaagttgcactagaagtagatttgtcatccgtaggaataaagcaacgacataaaagagaaggaaaatcattwtktcgcytattactgtaacggttgtccacaatcgcactgctccytctggaccgccyttaacgghwtttgtagtaggtttactagtcccgtgtggagcyttcyttagtcaagtttgttgaggacytatttcagtaaccygtctgctacggttttgtatatgtttttgcaagactgacataaataccycaccyagtagaaaaagaatgktttgawtwttagcagttgttgcccytgaaagttaagggttttcactaggtgcaactaggagttggatgatgaacaggttttgcatcgggggtagtgtccggagcatttgaagttcgtgcagtaggtatagttccycctgaccyygttacagaaattttaactgtctaaattaggagtcccttatttttctataaagagtagaaawtttttttttttttttttttttttttttttttttttttttttttttttttttttttt

SEQ ID NO: 2548 - DNA, 681 bp, Canis familiaris
tgtygacaatcatcaactcgatttaccawmttgaacgtaatgrgtcaccatctcgacccgraaaagtcggtcagtaattttgatccgatccatgktrgggcycagraaatctcgtggrtcctgrwaawatccgacaggatcattcaacgtgatcttcatctaaacagtaggcatccttatttcgttgctgtattttctcttccttttagtaawamagcgrataatgacattgccaacaggtgttagcgtgacgaggragacctggcggraattgccdwaaacatcatccaaatgatcagggcacacctcgraagraatcagttcaaacaactcctgrataaagtcattggrcagacgatgccaaaacatatacaaaaacgttctgactgtatttatggrgtggrtcatctttttcttacmaaactwawaatcgtcaacaacgggractttcaattcccaaaagtgatccacgttgatcctcaacctactacttgtccaaaacgtagcccccatcacaggcctcgtaaacttcaagcacgtcatccatatcaaggrggactggrrcaatgtctttaaaattgacagatttaatcctcagggaataaaaagatatttctcatctttwaaaaaaaaaaaaaaaaaaaaaaaaaaaaaaaaaaaaaaaaaaaaaaaaaaaaaaaa

SEQ ID NO: 2549 - DNA, 631 bp, Canis familiaris
ccacattctagcattacgcaggccagcaactcccacgctgaatgcratggctcatcagattcaagagatgtttccccaggttccctaccatctcgtgctgcaggacctccagctgacacgctccgtagaaataacrmcagacracattttagaaggacggattcaagtaccttttcccacacagcgctcagatggtatcaggcctgcattgaacagtcccgtggaaaggccawatggagaccaggaggagggagaagcttctgtgcagactgagcgtgtgccactagacctcagtcctcggctggaggaggccttggatttcagtgaggtggaggtggagcccagtgagggggaagactttgaggcccgggggagccgcttctccaagtctgcagacgagaggcagcgcatgctggtccagcgtaaggatgacctcctgcagcaagctcgcaagcgtttcctgaaccgaagttctgaagtcgagtccgcctccrcctctgagagctgcctcacgtcagaaggcacgaactccgaccctgtgaccctgcgtcggaggatgctggctgcggcggccgaacggaggctccagaagcagcagatctcctagcgctcgctcgccgccggccccagc

SEQ ID NO: 2550 - DNA, 638 bp, Canis familiaris
ccagtccccttcctctacctcacagcctagggctggccaaggtgtcmcagrtcttctggttcattcctgkcctccacacagcctttatcaaacatgcgcatgggcaagctttccagcagttagggcaaccagctgtcctttaatcagtaggccaaggcaggtgctgggctggactggctgtctttctgggggtgtggtgaagaggggcacacagatattctgaaactcctgctccctttcctggagtgatgaaagaacatccccgaatatgtgcctatgccagagcctgtaggtcaggcttatgctgtagaaagccctccccatcctgggcagaattcagaggctgcattctttgtgaaaatcacgaggtgaaatcacagttttgaagaaagtcagaaaacaagcctgagagtgatttgttaaacccagcttgtattaataagaatgaacctttctcaagcacctgccatgtgccaggcactgagctagacactttatatakaggttggtgctttgcgacatttaagaccagaggaaagtaggggagaattaaggataacccctggggactggggaacgtggctcaaaataaaccaacccaagtgtgaaaaaaaaaaaaaaaaaraaaaaaaaaaaaa

SEQ ID NO: 2551 - DNA, 622 bp, Canis familiaris
tggaccaccctgaagggcagctgcggcctctcgaacagataaaagctggaatcgaagctcgctcagaagctaaaactagcagacttctgtgggctgggttagcactgttgtccgttcagggcggggccttggcactggctcacctggtgggtgtactcctgggatattatggaaccagtgacctacttcatcacagttgcaaattccatggtcttttttgcatactttataatcacccgacaggattatacttactcagctgttaagagtaggcagtttcttcacttcttccataaaaaatcacaagaaacmacacttttgatgtggtgcagtacmacmagttaaaagaagatcttgctaaggctacagagtcgctgaaacacggtgcgccactctctctatttgcgaatgcmcaggaaaggaactcaatggaaagaattaatcttgcatttttaaatatcattgaattttttccagtacgtgttgattctgcaacttaaaaactggaactttttgagtcccatagttcctttgaatttgattgttttaatctcttttgttaaattaaacaaaaatgyttgcmaaaccaacaaaaaaaaaaaaaaaaaaaaaataaaaaaaa

SEQ ID NO: 2552 - DNA, 748 bp, Canis familiaris
tcagcctggsgacgccactgcccatcttccgmgagaaaggactatgacagcctggcgcagcccggcttyttcgacaggktcatccgctggatctgctagcgccccagacccacgcccgygccccccrccyggcggcccccgcctcgagcccccsccccryttycagcccgcatctcaccctcccaycccggccccgcgcccccggccccgcgcccccygcgtcgagcccgggctccccagccccgcrggcacygtcctcctctccgtggtgctactcagactcacscagaggtcccgcacrtgcagacaycaggtctccaggtgtgggtrtgaagtcaggaagggaggacccccacccagcccagccccgcagaggatcccrccaccctgcacccctcctgtccccccatcggcccccygccctccacgcccaccctgggccccagaggcttggcagggctccggtggccagtgctccagatcctcatgggcacrgccctggctcccccggccttgctcagcccagccccatccctggactccttggcccctctggcgcccccgaggtctccgcctggcctctggaggtcacgtgacccagactgagccgggacagcaggccctgcacacccccccaccccgtgcacatgcccagtccaataaagtctttgaactgcmaaaaaaaaaaaaaaaaaaaaaaaaaaaaaaaaaaaaaaaaaaaaaaaaaaaaaaaaaaaataaaaaaaaa

SEQ ID NO: 2553 - DNA, 696 bp, Canis familiaris
cccctgccatcttccgcgagaggtactatgacagcctggckcatscccggcttyttcgacacggttcatccgcgtgkatctgctagcgccccmgacccacgcccgtgcccmccsmcckcggcccccgcctcgagcccccgccccgcttccagcccgcatctcaccctcccaccccggccccgcgcccccggccccgcgccccccgcgtcgagcccgggctccccagccccgcrggcacygtcctcctctccgtggtgctactcagactcacccagaggtcccgcacatgcagacaccaggtctccaggtgtgggtrtgaagtcaggaagggaggacccccacccagcccagccccgcagaggatcccrccaccctgcacccctcctgtccccccatcggccccccgccctccacgcccacyctgggccccagaggcttggcagggctccggtggccagtgctccagatcctcatgggcacggccmtggctcccccggccttgctcagcccagccccatccctggactccttggcccctctggcgcccccgaggyctccgcctggcctctggaggtcacgtgacccagactgagccgggacagcaggccctgcacacccccccaccccgtgcacatgcccagtccaataaagtctttgaactgcmmaaaaaaaaaaaaaaaaaaaaaaaaaaaaaaa

SEQ ID NO: 2554 - DNA, 720 bp, Canis familiaris
acttggcccaactcacctgtcatggcaacctctgtcatagcttccaatccttcacacttccgtacacagatacaggatttatggggaatctatatggtttgtgaaccagccaccattgcggacatgcgtacatgttgttcaaaaagaatggatgcgactctgtacaagtataactgaaagtgaagttgcacgagcccaaaatcttctgaaaacaaacatgttgttgcagcttgacggttccactccaatctgtgaagatattggtaggcaaatgttatgctataacagaagaattcccatcccctgagcttgaagcaagaattgatgctgtaaatgctgagacaattcaagaagtgtgcaccaaatatatttatgataagagtccagctcttgctgctgttggtcccattgaacaactgccagactttaaccagattcgcaggaacatgtgctggcttcgtgattaaaatgctcctattctaaatattttggacatgtatatttataaagctaactgatctgcaagttttaagctaccagtccctaaagaaaaaaataaaaacatgtacttggaaawwwrarwraamaamwactgcatcagactttggaaggataagaccaccacagtgaatggtacatcacactttcaaatcatcactataatcttaagaatgaaaatttgtacaatattttcagttttattataaaaatgcacacaca

SEQ ID NO: 2555 - DNA, 678 bp, Canis familiaris
  misc_feature (16)..(16): n comprises a, c, g, or t, or includes no nucleotide
ttcttaagagagatcnccttggcctagtgccagttctgagaaacagtcagggtcaattgatctakgaatctcctatcacttgtgagwwtctggatgaagcatatccagggaagaagctgttgccggatgatccctatgagaaagcttgccacaaagatggtgtttgagttattttccaaggttccatctttggtaacaggctttctgagaagacmaaataaggaagatggctctggcctaaaagaagaattacggaaggaattcagcaagctagaggaggttctgaccmataagaagacmactttctttggtggtaattctctttctatgattgattacctcatctggccctggtttgaacggctggaagctctggagttaaatgattgtgtagaccacactccmaaacttaagctctggatggcagccatgagagaagatcctgccgtatcagccctcctcaatgaggccaacacccytcgaggattcctcaatctctacttgcagaacagccccgaggcctgtgactatgggctctgatgggggcaagagtcagcaatgaaatgtctgatattttctttcactaaatgtctgatattttctttcactaatatgagtaaaaatgcgctttcattttaaaaaaaaaaaaaaaaaaaaaaaaaaaaaaaaaaaaaaaaa

SEQ ID NO: 2556 - DNA, 889 bp, Canis familiaris
ccataggaagacaccgggaccgatccagcatccgactctagcctaggccgcgggacggataacaatgttcacacaggaaacagctatgaccattaggcctatttaggtgacactatagaacaagtttgtacaaaaaagcaggctggtaccggtccggaattcccgggatcgtcctggtcgctgaaccttccagacagccgccacagcagcaatggccccgccttgggtgcccgccgtgggcttcaccctggtgcccagcctggggggcttcctgggctcgtactatgtccgcggggagggcctccgctggtatgccagcctgcagaagccctcgtggcacccsccgcgctggacgctgggccccatctggggcaccctgtactcggccatsgggtatggctcmktacatggtctggaaagagctggggggcttctcggaggagccgtggttcccctgggactctatgctgggcagctggccttgaactgggcttggcctcccctcttctttggcacccgacaaatgggttgggccctggtggacctcctgctgacgggtggkctggcaggagccacaggccgtggcacwsrcrcmagcgctggacggctgggccccatctggggcascctgtactcggccatggggtatggctcactacatggtctggaaagagctggggggcttctcggaggagsmcgtggttcaccctgggactctatgctgggcagctggccttgaactgggcttggccatcaccctcttctttggcacccgacaaatgggttgggcccctggtggacactcactgctgacgggtgggctggcaggagccacggccgtggcctggcacagggtgagccctccagccgcccgcactgctgtacccgt

SEQ ID NO: 2557 - DNA, 667 bp, Canis familiaris
caggcagcagcaggttgcccgccggtggctttgagctgaccaaggagcagatggatagatcctcagcccaggtggtggccgagatgctgttctgaagaggaaaggtcacagcgagattcttttccgtgcatgtgcacccagccctggtggtgaccgggkccgcgtagatgctggacgtcagaggaagggcaatgggkctgctgaagccagcagcattcacaccacagtgcttctcttcccgaggctgccgtccccggggctcatggagcgcgtggtgcctttgtgccgcccggggctcactgcctcaggacacggagtccgaattggatctccttcgtggggtgagggcacttctgtcacaggtgatgaaagccatctgagatacatcggaaaagctgctgtacacttcgcatatggctgctctgggtatttctagaatcccagggagccccagagcttgtatcctgggaccatggacaccgtctgatatgcttctctagatcattccagaaagattctgcaggactgtgttgattgataggtctgtttagatttttccaaaacgttaatatgccctcgttaaaggggcagggtaagaatccamgatgtattaataaaacgatggatcactaaaaaaaaaaaaaaaaaaaaaaaataaaaaaaaaaa

SEQ ID NO: 2558 - DNA, 620 bp, Canis familiaris
ccaggcggtaactttatgctgttccttttgcaggaaaggtcacagcgagattcttttccgygcatgtgcamcccagccctggtgggacccggggccgccgtagatgcctggacgtcagaggaagggcacatggggctgctgaagccagcagcaatttcacaccaccagkgcttctcttcccgaggctgccgtcccccggggctcatggagcgcktggttgcctttgtgccgcccggggctcactgcctcaggacmcggagtccgaattggatctccttcgtggggtgagggccacttctgtcaccacggtgatgaaagccactctgagatacatcggaaaagctgctgtacacttcgcatatggctgctctgggtatttctagaatcccacgggagccccacgagcttgtatcctgggaccactggacacccgtctgatatgcttctctagatcattccagaaagattctgcaggactgtgttgattgataggtctgtttagatttttccmaaacgttaatatgccctcgttaaaggggccagggtaagaatcccagatgtattaataaaacgatggatcactaaaaaaaaaaaaaaaaaaaaaaaaaaaaaaaaaaaaa

SEQ ID NO: 2559 - DNA, 1217 bp, Canis familiaris
catggctgtttacccggctgcattgtgggagtttgacctccgccgccgccaaccgccgcctcagcctgcgccgccgccgccgccgccgccgccgccgccgcgcacgccatgggagccgtgactgacgacgaagtcatacggaagcgtctcttaattgatggagatggtgccggagatgatcgaagaatcaatctgctagtgaaaagtttcattaaatggtgcaactccgggtcccaggaagagggatacagccagtaccaacgtatgctgagcacactgtcccaatgkgaattttcaatgggcaaaactttgctggtatatgatatgaatctcagagaaatggaaaattatgaaaaaatttacaaagaaatagaatgtagcattgctggagcacatgaaaaaatkgctgagtgcaaaaagcaaattcttcaagcaaagcgaatacgaaaaaatcgccaagaatatgatgctttagcaaaagtgatccagcaccatccagacaggcatgagacattaagggaactagagtccttgggaaaagaactagagcatctttcacatattaaagaaagtgttgaagataagctggaattgagacggaaacagtttcacgttctacttagtaccatccacgaacttcagcaaacactagaaaatgatgaaaagctctcagaggtagaagaagctcaagaagccagcatagaaacagatcctaagccatagacaagctaatcgttgaccattcccaagaatgtggaagtaacagcatgcgcctagtgtgtttagaatttgttatgttcttgagatacttaaagttttggcagtaaactactttcctgtcaaatattaawrmacagttcattcatatttctttacaccaaagagaaaaacttcagtatagatttgtttgtattggggaagcccgggttgctcagcagtttagtgccgccttcagcccagggcgtgaccctggagacccgggatcgagtcccaagtcgggctccctgcatggagcctgcttctcccctgcctgtgtctctgcctctctctctctctttcgctctctgtgtgtgtgtgtgtctctcatgaataaattttttaagaattctttaaaaaaaaaagatttgtttgtattgaaatgtcgttttttattcttaaaagaggaagcaatacccagaaatgtttaataaaatgttttcaagccagaaaaaaaaaag

SEQ ID NO: 2560 - DNA, 610 bp, Canis familiaris
accatatcttctccaggctctgacaggcctccctggaaacttccacatatttttcaactgcracataaagtcaggaaataaagttaacatagcttcattcactaacacagcrcggagactccacgaratccacccataattcgtcaagaggctgagaatttacttttkggtaattgcatgcaaatktctktcaccttcctgttcacactccaccctktctttttcttgggggaaactggtaacttatgaaatagtttttcctatgtttgtttctttaggaaatagatgtggttttgtttgattaatgtgataaattctgtttgaatgaaacagtggagggaaacatctactgagtttgtgtaatttttaaaattttgctgctagttaactattaacagatagaggaatcatacagatgctgctataaataagtagaaagtacagtataagtttaataactaaaatgctatttttaattttcacacttatttttctgtattgtatgtctaatcagatttctcttgttctgtgttaatgattttatgtacaaatgtaattgcttttcgtgggtagtatgaataaatttgataagtataarwwwraaaaaaaa

SEQ ID NO: 2561 - DNA, 634 bp, Canis familiaris
ctctggacaacaggacatggtgtgctatacagctcagrctytgggtccgtatcctctcacatggtggttttcggaagattcttggccaggagggtgatgccagctatcttgcttctgaaatatctacctgggatcggagtgatagtgacaccttcagawaaagcttatgagaaktccaccagagaagaaggaaggagaagaagaggaggagaatacggtaagaaccacctcaaggagaggaagaggaaagcatggagactcaagagtgaccttcctttctcttcgaccccctttcttgtccaaggggaagactgcagcctaagttaactgctcctggctttaataagggggcatttctgagggatagaggagacaggaagtgtcattccactgggttctgattggctcagtagccagaagtcttccatttatgacatatgccatccatgtatagtgaaacaataccagcctttctcctaagacttcagaaaacccagttcttgaaaacctctccaaccagtactttgttgttgaaatgttgtgaactgttaagtgtctggattttytttttttctaagaaaaatgattaaaaaacttcctagtarrrmaaaaaaaaaaaaaaaaaaataaaaaa

SEQ ID NO: 2562 - DNA, 616 bp, Canis familiaris
ccggcgggaaaaggagccctcgtgcaactgctctagttcagaagctctgctttccagccgagaggacgctgtctttgctcatctttccccacccgtgaggaccccacatccaggrgcacttggcctgcctgggcttcttgkattaattagccmttactttttcttttctttgraaaaaaaaaawaaaagacctagttaacagctaggtgacacttgggttagcaagaaaagacgctcaggtgccacgatcattgctgtcatatagacccggagcacaaggcccgtggagggtcttagtttcggagcaggraacaccgtgacattggtagacaccttggtttcaggggaggtgatgtgatgaggggggaagtatgtcacctacttctttggacctctttggctgtgatgcctgtgtgtgctgagcccctcgtgccgggtaagcttccaggtgaagagtggggttgtcatgaccttggctatgacgcccagcatttcgaggtggctccctctattctttactttgggcatcatagaaaacgtgtctctgggggattaatcttagagaaaaataaagcctttctgctgaaaaaaaaaaaaaaaaaaaaaaaaaaaaaaa

SEQ ID NO: 2563 - DNA, 649 bp, Canis familiaris
aatcacggcacttagaggaggttatttcttkggkggatttttatgcaccasccacactgttgagagcataatggaacatttgtctcgagacgttgatgtgattagaccgaatgttataagacaccctctgacccaggaagtaaaagagtgtgaagggattgtcccagtcccacttgaagaaaaactatattccacgaagaagaggaaatgagaagatttaccagattttagctttgtatttaattctctcacttttgagtaccatggattaataatttacaaacttgacccttatatgagtattaggtgccatttgtttttctaaggtatttttagctcttgatctctcttgccgtgagaggtaggggaatggtttgcttagagccattttgtaatctgtggtaccagcacatcattcttgatttcatttcattaatgtaatttctttgccgttgaggactttgcccaacaacaacactaataccattttgaagagcmaagcttatgaaaaatgccttgaattgcaagctaatcattcactctgttataaccatgcaaaatgaaaattcaggactactgtatcggatgagtaacttctgaccaggataataaacacamtttcagaaaaaaaaaaaaaaaaaaaaaaaaa

SEQ ID NO: 2564 - DNA, 681 bp, Canis familiaris
tgtcctaagccccaggagtscctggctcagcttctttcccacytgaaggcagcttgaagttagaagggwacaagatggctgactatgaaaccagtgtccaattttgctggcaatcttataaggagcagatggactctatccccaaggattggtgcgactgggccatgattakcaggccttatagcgacctacagtattkcttggagcattttsmagaagcatttggcctgggcttccccaatccctgggcagaagaggtcatctttgagactcaccagatccactttgccaactgctccctggtgcagcccaccttatcagaccccccmgaggatgtactcctggccatgatcatagcccccatctgcctcatccccttcctcgtcacccttgtggtatggaggagtwaagacmatgaagcccaggcctagggtggtatgagcttttcttggaagccmttttactccttttccctgctaccmscaggtctctcttcccctccctgcctccttttcttactcccacccccmccmcagatccttggactggtggaaatggraacccagcggkgtcacagcacmagttctgtactcttctaaataaaagtttttttttgtacwawmmmmwmmmmaaaamaamaaaaaraaaaaaaaaaaaaaaaaaaaaaaaaaaaaaaaaaaa

SEQ ID NO: 2565 - DNA, 672 bp, Canis familiaris
gcctcctcctcctgctgggcgctgtcctaagccccaggagtcccctggctcagcttcttcccactgaaggcagcttgaagttagaagggaacaagatggctgactatgaaaccagtgtccaattttgctggcaatcttataaggagcagatggactctatccccaaggattggtgcgactgggccatgattagcaggccttatagcgacctacagtattgcttggagcattttgcagaagcatttggcctgggcttccccaatcctgggcagaagaggtcatctttgagactcaccagatccactttgccaactgctccctggtgcagcccaccttatcagaccccccagaggatgtactcctggccatgatcatagcccccatctgcctcatccccttcctcgtcacccttgtggtatggaggagtaaagacaatgaagcccaggcctagggtggtatgagcttttcttggaagccattttactccttttccctgctaccaccaggtctctcttcccctccctgcctccttttcttactcccacccccaccacagatccttggactggtggaaatggaaacccagcggtgtcacagcacaagttctgtactcttctaaataaaagtttttttttgtactawmmmmwmmccacaaaaaaaaaaaaaaaaaaa

SEQ ID NO: 2566 - DNA, 832 bp, Canis familiaris
catcgccgcagrcacsagcgcccagagagactcaccagagaacccaccatggcaccctttgcgcccctggcctcctgcatcctgctgttgctgtggstgaccgcccccagcagggcctgtacctgtgccccaccccmcccgcagacagccttstgcaactcccrratcgtcmtcarggccaagttcgtggggaccscagaagtcaaccmgaccgacttaaaccggcgttatgagatcaagatgaccmagatgttcwagggtttcagcgccttggggwatgcctcggacatccgcttcgtygacamcsmygcyctggaragcgtctgcggatacttgcacaggtcccagwascgcagcgaggagtttctggtcgcsggaaacytgcgggacggacacttgcagatcdacacctgcagtttcgtggccccgtggagcagcctgagtaccgctcagcgccggggcttcaccmagacctatgctgctggctgtgaggggtgcacagtgtttacctgttcatccatcccctgcaaactgcagagtgacactcactgcttgtggacggaccasttcctcacaggctctgacaagggtttccagagccgcyacctggcctgcctgccaagagagccagggawatgcacctggcagtccctgcggccccggatggcctaaatcctactccccgtggaagccmaagcctgcacagtgttcaccccacttcccactccygtctttcttyatccvrrmcaatgaaataaagaactaccatccarvmmaaraaawaaaaaaaaaaaaaaaaaaaaaaaaaaaaaaaaaaaaaaaaaaaaaaaaa

SEQ ID NO: 2567 - DNA, 700 bp, Canis familiaris
  misc_feature (174)..(174): n comprises a, c, g, or t, or includes no nucleotide
agcagccctttgcactccaattcgtcatcagggcccaagtttcgtgggggaccgcagaatgtctaccagacccgactttaaccggcgttatggagatcaagatgaccaagatgttcaagggtttcagcgccttggggaatgcctcggacatccgcttcgtcgacaccccccgcnctggagagcgtctgcggatacttgcacaggtcccagaaccgcagcgaggagtttctggtcgccggaaacctgcgggacggacacttgcagatcaacacctgcagtttcgtggccccgtggagcagcctgagtaccgctcagcgccgggggcttcaccacagacctatgctgctggctgtgaggggtgcacagtgtttacctgttcatccatcccctgcmaactgcagagtgacactcactgcttgtggacggaccagttcctcacaggctctgacaagggtttccagagccgccacctggcctgcctgccaagagagccagggatatgcacctggcagtccctgcggccccggatggcctaaatcctactccccgtggaagccmaagcctgcacagtgttcaccccacttcccactcctgtctttctttatccmaaacaatgaaataaagaactaccatcccarmmaaaaaaaaaaaaaaaaaaaaaaaaaaaaaaaaaaaaaaaaaaaaaaaaaaaaaaaaaaaa

SEQ ID NO: 2568 - DNA, 620 bp, Canis familiaris
gtggttcactctcagtgcggcccacatgggcataagatggcctctgctcctacgagtagggtgtcctcgagggccctgcatgggcgggccaccaagcctgggcgctacaggcgctgggaggracaggggcgttctgttggctttgggccaggggccacggcgctccagcctgacacattgcactgaacaagacccaatcactggttgtgagcatacgtgaagggtgtgtcccgtgtcctgcgatgggtcccgtgtcactgtttacatgagctatttgtgtggttacatagccctttatttaaaagagaggagttccttttacgaagttattaaattatatgtttaaaagctaaagaaaaaagagctgcagagtatttataaaactgtctttttaaaaaaaaaaaacaagcaagaacatttgaccgtatatatggacaaggaaggaaagtataatagaaactttgctagtttaacaaaagaaaaaaacaaaaaaaaaatccctttcttgtaaacttatggacaagtctttgtggctgttggagtttagtttttatatacacagagttatcagacgttatttataaaacttagttttaaaaaagacmaaaaaaaaaaaaaaa

SEQ ID NO: 2569 - DNA, 668 bp, Canis familiaris
gatgggggaggagccagtaataagagattgaggtaattttgctggaataaattcaaattcttctgaactcaagctgaggaatttcaccygtaaacctgagtcatacagaaagctgcctggkacatctaaaagcgttttattcctcttgctcatattaagagtctgacccttggggatattatttttaaccytcagttatacgcttttatttttattttcawacaccctattggaattctgcttcatttcatttttcatctcttctagttttctgacacctttaattatcaacctcgttacctatgtttaagtttgcactttaaaaacacgagcacctggcactggacatagttttacttttaaaccacgtgtacataactgaaaatatagtatattgcatactttttaagtgtaaagatatttttatctttatatgaggaaaatcacttgggaaattgctttgtgactcaatctgtaaactgtgtatcccaagacatgtctgttctagtccctcatgcgaatccaattgctggtccmaaagattgctgaaattttatatgcttactgatatattttacacttttttatcttgcatgtcctgtaaaggttacaagcctgcacaataaaaatgtttaacagttaaaaaaaaaaaaaaaaaaaaaaaaaaa

SEQ ID NO: 2570 - DNA, 867 bp, Canis familiaris
tgtctattggtcctctctgttgccatcacccctcttgtcccaccccktkcccaatgaaagccatgtcaaagtaatcactggattgactgcttcacctttgttattcttaatggaaggtataccacagttgtaaagcaataagatttgagatgaacactatggaaattttgctttttgctaaacagtagcaagttgaccataatcaaaaaatgtagaagggttttagttaaaaatgattgcttctttctctacctggacttaaaaaaaaawtaagttgtcatctaatacmagtttatatgtctatatatacagaagtctagatgtctagaaaaatcatgatgttaaacttccactgatggggcaggtaggagataagaatgaattctgaattgttactaaaagtattccatattttttacattgggggcaaggcaggggatggtgttaccttaccttgtttgagggtgtggttttcttttttttgtttgttttgttttttaatttcatcacttgttatctcaagagaccccgagccagtgatccttttatcctgctacagtctttcaggaactttaaaaaaaaaaaaaaraaaaaaaaaaaaaggaccgcccaaacttaaatcactcttgatttctttatttcattctctaatagttcatgttttaaaatatatatgtatctattctgtttcttggataacattttaccaaggatcaaaaaaggaaaagaaaaagaactctagaattcaaatggcaagatctatacaccagagtgaatttcttcttaactgacaatgtttaggttttaagcaaataaagtaccmattaatgtgaaactcgatccaaaaaaaaaaaaaaaaaaaaaaaa

SEQ ID NO: 2571 - DNA, 671 bp, Canis familiaris
taagaattcaatagtggaccccaaagtgacggtggagatccatggtgtgggccgcgacatggccagccgccagactgctgtcgtcaccaataatggtttcaacccgtggtgggacacagagttcgagtttgaggtggccgtgcctgagctcgccctcgtgcgctttgtggtggaggattatgacgcatcctctaagaacgactttattggccagagcaccatccccttgggcagcctcaagcaaggataccgccatgtccacctcttgtcaaagaacggagaccagcacccatctgccaccctctttgtgaaggtgtctctccaggactaggtttgggggttctggttctggcgggggcttccccaagcaggcctggccctctgtccacgtgtagggacagggctggtatagccgctcctgacctctcactcggagctagaggccccacgctgccttcagctctacatattgtctgtgctgctgcctctctaggggtcccaggagctggcctagtccctggaactctcctcaattccgttaggaaaaacactgcagccctctgccctctggcctggccctgggttgagggtttttataaaaaatataaaacttarwmmwrwraaaaaaaaraaaaaaaaaaaaaaaaaaaaaaaaaaaaaaaaaaaaaaaa

SEQ ID NO: 2572 - DNA, 677 bp, Canis familiaris
gctggctgmaargaggtggggcaaagcacaggatcctggcatttgcttaatgaaatgagggcccgtcaatttcctgctgattggaagcatggagaacaggggcwactgagatccaccaggtcttcaaccccagtcccamgtcagtattggctgccttccttctccagccctscctgggcccagggaatttccttataccmaagatgctgacatacagcmaaatccattatactccctcccctcctccccacctcctgctgcaggtgctcccaggggagggaactggtkcagcagaggacctggccacccaccagctggacmatcaacwcatgaaaagcagggtggactgtgtgcttggccttgatctggtgtttgctgctcttccctacctcaccgggcagctggcaacagcatccccatgaaagcaagtcactccctttcagcctggtaaattctatgtgcctgtgggtacmaaagtgcctgaaccmacatgctccagaaaccctaaatgccmtggtctgaggttgatgttcmaaatcaatgccattgaaacagtttgtgtattttgtgtttacctcgtagagcttgtcmaagaagcagcsaaaaataaacacctaacctgtgaaaaaaaaaaaaaaaaaaaaaaaaaaaaaaaaaaaaaaaaaaaaaaaaaaaaa

SEQ ID NO: 2573 - DNA, 1487 bp, Canis familiaris
gcggaacaactcgagcctcgccacctctggtttctcaccgcagcttggacgttggggttttgccagcaccagagcgacgtctcagaccttctcctcccggatcttggcagatcaccccctcagcagggtctgcgcatcgccgccagcatgaagctggttcccgtcgccctcttatacctgggctccctcgccttcttgggcgcggacaccgcacggctagacgtggcgtcagagttccgaaagaagtggaataaatgggctgtaagtcgtggaaagagggaacttcgagtgtccagcagctatcccaccgggctcgctgaagtgaaggccgggccggcccagactcttattcggacccaggacgtgaagggcgcctctcgcaacccccagaccagcggtccggacgccgcccgcatccgagtcaaacgctaccgccagagtatgaacaatttccagggcccgcggagcttcggctgccgcttcggaacgtgcacggtgcagaaactggcgcaccagatctaccagttcacagacaakgacaaggacggcgtcgcccccaggagcaagattagccctcagggctacggccgccggcgccggcgctccctgcccgagcccggccttcgccggactctgttgttcccggagccacggccaggcggggctccggccccccgggcgcatcaggtgctcgccaacctccttaagatgtaggcgcctgtggcagcagcgaactggcgcgcgtgtgcatcccgctggcttccccctgggcggagggcttccccgagccgagcccctctgccgatggaagtcgggcagagaccgggattccgggaggcaccgtcccgcggccagccctggctttgcgcgagccccttctcctcggaggcacggatccctctgtcccaagccggcccaggtgtcccgtggggggcagaggaatgcaagggaggcctgccaggctcacggagaggattaactgagaattaaatgagaattaaatgcttgagaccctcccccctccccccccagggacaggggtctgagtcactgccgtgcctgcccacaaactgatttctcacggggtgtcaccccaccggggcgcaagcctcactattacttgaactttccaraacctagagaggaaaagtgcaatgcgtgttgtatatacagaggtaactatcaatatttaagttcgttgctgtcagaagattttttttgtaacttcaaatatagagatatttttgtacgttatatattgtattaagggcatttaaaaaccattgcattgtccccctccccacttattttaatacgtgaatgtctcagcgaggtgtaacgttgtttttgctgcagagtgtgtgagtgtgcgtgrgagacttattacctcttgtggaagaaggaacaccgtgtctctgcattatctatttacataaaatgggtgatatgcgaaaatagcaaatcaawaawaaacggtctcgatgctg

SEQ ID NO: 2574 - DNA, 632 bp, Canis familiaris
agtatgccttctgtgacggctgataggggagtggcttgcagctgagtgttctgagtcggcctctctgtgtgggtttgtgtatccaaaggtgtttggatacagctgctttgagctccaggataaaagccgacagactgataggaagtttcccccctcactcaggggaacccgttcctcccccacccggaaccctcaggccacccgtccaggaggcgtgacccaggttcagcccaggggcctgtgggtggccactgacacaaggacgtgtctagaccccaggatgcccccaggcccgggcarctatgtcagcgtcctgtttgtcacggtggcacctgtctcatgggcaatttwacaacagtcccaaaagggactgtgagtaattgctgtcacttgttgggggcccgagtggggtgcttcagcccaaccaatgtgtctcccagaactatttttggggtctgacaggtgggcctgggaggaagatgtttacatttttaaaggtacactggtatttatattgcaagcaacattttgtactaaggaaacgttttgtatagttatatgtacagtttattgatattcaataaagtggttaatttatgtattaaaaaaaaaaaaaaaaaaaaaaaaaaaaa

SEQ ID NO: 2575 - DNA, 668 bp, Canis familiaris
cctgaagtcaggaggtgaagtcattcttcgtgctcaagctccgcccatcactatggagttcagtgtgacaagcccaacaaggagttcatgctatgccgctgggaagagaaagaccccaggcggtgtttagaggaaggcaagcttgtcaaccagtgtgctctggacttcttcaggcagataaagcttcactgtgcagagccttttacagactattggacatgcattgattattctggcctgcagttacttcgtcgctgtcgccaacagcaggccaagtttgacgaatgtgtgctggacaaactgggctgggtacgacctgacctgggagagctgtccaaggtcaccaaagtgaaaacagatcggcctttaccggagaatccctatcactcaagaccaagaccagagcccaaccctgagatagagggagagctgaagcctgccaaacatggcagccgcctttttttctggaccatgtaaagattggtccatggccyacgctcagtcacacgcccagacaaccactgatgaaattcccgtgcagtttgcatcrgccgtttgagtgttctttccgggatcacaaactgaacaaaaaagttaatttatgtgacttggcagttattctataccatttcctggccattaaaacttttaaaggaaaaaaaaaaaaa

SEQ ID NO: 2576 - DNA, 598 bp, Canis familiaris
taaaagaatttcactagatcagcmatgaccaacgtatactgcactggaaaactcagcattttctgatctagaaaaaaggctgtctttagtattcagttgttataatgtgtcagaatctatkcattagagtcgatgtgttttgtactagygtcacagcataaaatcatattacacatacttaaggattcagggtctcgttatagaatatcatagctttatgttggatgaaagccactgtgcttgtttattgattggaaactctcttmgtgtcagttgtttggaagccmatgatgtttgccactgaaattcacatccatagaagtatattctgcttycatggaactttgctttaagtgacactatgcacacaagagttcatttctagttcttgatagaactgcacttrtttctcagtattattcttgactttttaagggctgtgctataatgagaatatgttctgtcttactgttgaaatcttatgatatatactttagaattttctaagacagcccttttggatcctgtaaatgtgaattttgatgtaataactgctaataaaattatattgaaacyyttawwraaaaaaaaaaaaaaa

SEQ ID NO: 2577 - DNA, 8705 bp, Canis familiaris
tcggcctcagctgctgggagcatggcctaggccggtggcgctgtcgtgsggccaccttcccarcggaccttcgagatacctgttggccccgcttgcagggaaagatgagtcctaccagacttgtgagggtgctgctggctctggccctcatcttgccagggaaactttgtacaaaagggactgttggaaggtcatcgatggcccgatgtagcctcttcggaggtgacttcatcaacacctttgatgagagcatgtacagctttgcggrrgattgcagttacctcctggctggggactgccaggaacactccrtctcacttatcgggggtttccaaaatggcaaaagagtgagcctctccgtgtatctcggagaatttttcgacattcatttgtttgtcaatggtaccatgctgcaggggacccaaagcatctccatgccctacgcctccaatgggctgtatctagaggccgaggctggctactacaagctgtccagtgaggcctacggctttgtggccagaattgatggcaatggcaactttcaagtcctgctgtcagacagatacttcaacaagacctgtgggctgtgtggcaactttaatatctttgctgaggatgacttcaggactcaagaagggacgttgacttcggacccctatgactttgccaactcctgggccctgagcagtggggaacaacggtgcaaacgggtgtcccctcccagcagcccatgcaatgtctcctctgatgaagtgcagcaggtcctgtgggagcagtgccagctcctgaagagtgcctcggtgtttgcccgctgccacccgctggtggaccctgagccttttgtcgccctgtgtgaaaggactctgtgcacctgtgtccaggggatggagtgcccttgtgsggtcctcctggagtacgcccgggcctgtgcccagcaggggrttgtcttgtacggctggaccgaccacagcgtctgccgaccagcatgccctgctggcatggagtacaaggagtgcgtgtccccttgcaccagaacttgccagagccttcatgtcaaagaagtgtgtcaggagcaatgtgtagatggctgcagctgccccgagggccagctcctggatgaaggccactgcgtgggaagtgctgagtgttcctgtgtgcatgctgggcaacggtaccctccgggcgcctccctcttacaggactgccacacctgcatttgccgaaatagcctgtggatctgcagcaatgaagaatgcccaggcgagtgtctggtcacaggacagtcccacttcaagagcttcgacaacaggtacttcaccttcagtgggrtctgccastacctgctggcccaggactgccaggaccacacmttctctgttgtcatagagactgtccagtgtgccgatgacctggatgctgtctgcacccgctcggtcaccgtccgcctgcctggacatcacaacagccttgtgaagctgaagcatgggggaggagtctccatggatggccaggatatccagattcctctcctgcaaggtgacctccgcatccagcacaccgtgatggcctccgtgcgcctcagctacggggaggacctgcagatggattgggacggccggggcaggctgctggtgacgctgtccccggcctacgcggggaagacgtgcggcctgtgcgggaactacaacggcaaccggggggacgacttcgtgacgcccgcaggcctggcggagcccctggtggaggacttcgggaacgcctggaagctgctcggggcctgcgagaacctgcagaagcagcaccgcgatccctgcagcctcaacccgcgccaggccaggtttgcggaggaggcgtgcgcgctgctgacgtcctcgaagttcgagccctgccaccgagcggtgggtcctcagccctacgtgcagaactgccgctacgacgtctgctcctgctccgacggcagagactgtctttgcagcgccgtggccaactacgccgcagcctgtgcccggaggggcgtgcacatcgcgtggcgggagcccggcttctgtgcgctgagctgcccccagggccaggtgtacctgcagtgtgggaccccctgcaacatgacctgtcgctccctctcttacccggaggaggactgcaatgaggtctgcttggaaggctgcttctgccccccagggctgtacctggatgagaggggagattgtgtgcccaaggctcagtgtccctgttactatgatggtgagatctttcagcccgaagacatcttctcagaccatcacaccatgtgctactgtgaggatggcttcatgcactgtaccacaagtggaggcctgggaagcctgctgcccaacccggtgctcagcagcccccggtctcaccgcagcaaaaggagyctgtcctgtcggccccccatggtcaagttggtgtgtcccgctgataacccgagggctgaaggactggagtgtgccaaaacctgccagaactatgacctgcagtgcatgagcacaggctgtgtctccggctgcctctgcccgcagggcatggtccggcatgaaaacaggtgtgtggcgctggaaagatgtccctgcttccaccaaggccaagagtacgccccaggagaaaccgtgaaaattgactgcaacacttgtgtctgtcgggaccggaagtggaactgcacagaccatgtgtgtgatgccacttgctctgccatcggcatggcgcactacctcaccttcgacggactcaagtacctgttccctggggagtgccagtatgttctggtgcaggattactgtggcagtaaccctgggaccttccggatcctggtggggaacgaggggtgcagctacccctcagtgaaatgcaagaagcgggtcaccatcctggtggaaggaggagagattgaactgtttgatggggaggtgaatgtgaagaaacccatgaaggatgagactcactttgaggtggtagagtctggtcagtacgtcattctgctgctgggcaaggcactctctgtggtctgggaccaccgcctgagcatctctgtgaccctgaagcggacataccaggagcaggtgtgtgscctgtgtgggaattttgatggcatccagaacaatgatttcaccagcagcagcctccaaatagaagaagaccctgtggacyttgggaattcctggaaagtgaacccgcagtgtgccgacaccaagaaagtaccactggactcmtcycctgccgtctgccacaacaacatcatgaagcagacgatggtggattcctcctgcaggatcctcaccagtgatattttccaggactgcaacaggctggtggaccctgagccattcctggacatttgcatctacgacacttgctcctgtgagtccattggggactgcacctgcttctgtgacaccattgctgcttacgcccatgtctgtgcccagcatggcaaggtggtagcctggaggacagccacattctgtccccagaattgcgaggagcggaatctccacgagaatgggtatgagtgtgagtggcgctataacagctgtgcccctgcctgtcccatcacgtgccagcaccccgagccactggcatgccctgtacagtgtgttgaaggttgccatgcgcactgccctccagggaaaatcctggatgagcttttgcagacctgcatcgaccctgaagactgtcctgtgtgtgaggtggctggtcgtcgcttggccccaggaaagaaaatcatcttgaaccccagtgaccctgagcactgccaaatttgtcattgtgatggtgtcaacttcacctgtcaggcctgcagagaacccggaagtcttgtggtgccccccacagaaggccccattggctctaccacctcgtatgtggaggacacgccggagccgcccctccatgacttccactgcagcaggcttctggacctggttttcctgctggatggctcctccaagctgtctgaggacgagtttgaagtgctgaaggtctttgtggtgggtatgatggagcatctgcacatctcccagaagcggatccgcgtggctgtggtggagtaccacgacggctcccacgcctacatcgagctcaaggaccggaagcgaccctcagagctgcggcgcatcaccagccaggtgaagtaygcgggcagcgaggtggcctccaccagtgaggtcttaaagtacacgctgttccagatctttggcaagatcgaccgcccggaagcgtctcgcattgccctgctcctgatggccagccaggagccctcaaggctggcccggaatttggtccgctatgtgcagggcctgaagaagaagaaagtcattgtcatccctgtgggcatcgggccccacgccagccttaagcagatccacctcatagagaagcaggcccctgagaacaaggcctttgtgttcagtggtgtggatgagttggagcagcgaagggatgagattatcaactacctctgtgaccttgcccccgaagcacctgcccctactcagcaccccccaatggcccaggtcacggtgggttcggagctgttgggggtttcatctccaggacccaaaaggaactccatggtcctggatgtggtgtttgtcctggaagggtcagacaaaattggtgaggccaactttaacaaaagcagggagttcatggaggaggtgattcagcggatggacgtgggccaggacaggatccacgtcacagtgctgcagtactcgtacatggtgaccgtggagtacaccttcagcgaggcgcagtccaagggcgaggtcctacagcaggtgcgggatatccgataccggggtggcaacaggaccaacactggactggccctgcaatacctgtccgaacacagcttctcggtcagccagggggaccgggagcaggtacctaacctggtctacatggtcacaggaaaccccgcttctgatgagatcaagcggatgcctggagacatccaggtggtgcccatcggggtgggtccacatgccaatgtgcaggagctggagaagattggctggcccaatgcccccatcctcatccatgactttgagatgctccctcgagaggctcctgatctggtgctacagaggtgctgctctggagaggggctgcagatccccaccctctcccccaccccagattgcagccagcccctggatgtggtcctcctcctggatggctcttccagcattccagcttcttactttgatgaaatgaagagcttcaccaaggctttcatttcaagagctaatatagggccccggctcactcaagtgtcggtgctgcaatatggaagcatcaccactatcgatgtgccttggaatgtagcctatgagaaagtccatttactgagccttgtggacctcatgcagcaggagggaggccccagccaaattggggatgctttgagctttgccgtgcgatatgtcacctcagaagtccatggtgccaggcccggagcctcgaaagcggtggttatcctagtcacagatgtctccgtggattcagtggatgctgcagccgaggccgccagatccaaccgagtgacagtgttccccattggaatcggggatcggtacagtgaggcccagctgagcagcttggcaggcccaaaggctggctccaatatggtaaggctccagcgaattgaagacctccccaccgtggccaccctgggaaattccttcttccacaagctgtgctctgggtttgatagagtttgcgtggatgaggatgggaatgagaagaggcccggggatgtctggaccttgccagaccagtgccacacagtgacttgcctgccagatggccagaccttgctgaagagtcatcgggtcaactgtgaccgggggccaaggccttcgtgccccaatggccagccccctctcagggtagaggagacctgtggctgccgctggacctgtccctgtgtgtgcatgggcagctctacccggcacatcgtgacctttgatgggcagaatttcaagctgactggcagctgttcgtatgtcctatttcaaaacaaggagcaggacctggaggtgattctccataatggtgcctgcagccctggggcgaaggagacctgcatgaaatccattgaggtgaagcatgacggcctctcagttgagctccacagtgacatgcagatgacagtgaatgggagactagtctccatcccatatgtgggtggagacatggaagtcaatgtttatgggaccatcatgtatgaggtcagattcaaccatcttggccacatcttcacattcaccccccaaaacaatgagttccagctgcagctcagccccaggacctttgcttcgaagacatatggtctctgtgggatctgtgatgagaacggagccaatgacttcattctgagggatgggacagtcaccacagactggaaggcactcatccaggaatggaccgtacagcagcttgggaagacatgccagcctgtccctgaggagcagtgtcctgtctccagcagttcccactgccaggtcctcctctcagaattgtttgccgagtgccacaaggtcctcgctccagccaccttttatgccatgtgccagcccgacagttgccacccgaagaaagtgtgtgaggcgattgccttgtatgcccacctctgtcggaccaaaggggtctgtgtggactggaggagggccaatttctgtgctatgtcatgtccaccatccctggtgtacaaccactgtgagcatggctgccctcggctctgtgaaggcaatacaagctcctgtggggaccaaccctcggaaggctgcttctgccccccaaaccaagtcatgctggaaggtagctgtgtccccgaggaggcctgtacccagtgcatcagcgaggatggagtccggcaccagttcctggaaacctgggtcccagcccaccagccttgccagatctgcacgtgcctcagtgggcggaaggtcaactgtacgttgcagccctgccccacagccagagctcccacctgtggcccgtgtgaagtggcccgcctccgccagaacgcagagcagtgctgcccggagtacgagtgtgtgtgtgacctggtgagctgtgacctgcccccggtgcctccctgcgaagatggcctccagatgaccctgaccaatcctggcgagtgcagacccaacttcacctgtgcctgcaggaaggatgaatgcagacgggagtccccgccctcttgtcccccgcaccggacgcyggcccttcggaagactcagtgctgtgatgagtatgagtgtgcatgcaactgtgtcaactccacggtgagctgccygctggggtacctggcctcggctgtcaccaacgactgtggctgcaccacaacaacctgcttccctgacaaggtgtgtgtccaccgaggcaccatctaccctgtgggccagttctgggaggaggcctgtgacgtgtgcacctgcacggacttggaggactctgtgatgggcctgcgtgtggcccagtgctcccagaagccctgtgaggacaactgcctgtcgggcttcacttatgtccttcatgaaggcgagtgctgtggaaggtgtctgccatctgcctgtgaggtggtcatcggttcaccacggggcgacgcccagtctcactggaagaatgttggctctcactgggcctcccctgacaacccctgcctcatcaatgagtgtgtccgagtgaaggaagaggtctttgtgcaacagaggaatgtctcctgcccccagctgaatgtccccacctgccccacgggcttccagctgagctgtaagacctcagagtgttgtcccacctgtcactgcgagcccctggaggcctgcttgctcaatggtaccatcattgggcckgggaaaagtctgatgattgatgtgtgtacaacctgccgctgcaccgtccaggtgggagtcatctctggattcaagctggagtgcaggaagaccacctgtgaggcatgccccctgggttataaggaagagaagaaccaaggtgaatgctgtgggagatgtctgcctatagcttgcaccattcagctaagaggaggacagatcatgacactgaagcgtgatgagactatccaggatggctgtgayagtcacttctgcaaggtcaatgaaagaggagagtacatctgggagaagagagtcacgggttgcccacctttcgatgaacacaagtgtctggctgagggaggraaaatcatgaaaattccaggcacctgctgtgacacatgtgaggagccagaatgcaaggatatcattgccaagctgcagcgtgtcaaagtgggagactgtaagtctgaagaggargtggacattcattactgtgagggtaaatgtgccagcaaagccgtgtactccatccacatggaggatgtgcaggaccagtgctcctgctgctcgcccacccagacggagcccatgcaggtgcccctgcgctgcaccaatggctccctcatctaccatgagatcctcaatgccatgcaatgcaggtgttcccccaggaagtgcagcaagtgaggccactgccctggatgctactgtcgcctgccttacccgacctcactggactggccagagtgctgctcagtcctcctcagtcctcctcctgctctgctcttgtgcttcctgatcccacaataaaggtcaatctttcaccttgmaaaaaaaaaaaaaaaa

SEQ ID NO: 2578 - DNA, 673 bp, Canis familiaris
  misc_feature (22)..(22): n comprises a, c, g, or t, or includes no nucleotide
ttcttgtgccatgatgatgggnctgtgtgaatagagagggcattccaagatgaatatgtggtcagtttgatcagagctccagaagttcctgtaatctgtggagccttctgctatgatgtagttctggataacgagacttgatgagtggatgccaacyaaagagaacctacgttccctcacraaagatgctcgtgctttaatttataaagatcttccatttgaaactctggaagtggaagccaaagtggcattagaaatatttcagcmcmacaagtaccaaatggatttcatagaagagaaggcatctcagaaccctgagagaatagttaagctacaccagatttggtgacttcacttgatgtcgagtcgacgggtcctctcattccmagaactacgtatttgtttccagtatgaagtatcagcacgttcataatcttcaagccaaccacgttgaatcttgtacgaagattccagggtctttctttacctgtacacttaagagcacattttactatatggcataaactattggaaagatctcggaaaatggtaactgaagatcaaactaaacctacagaggaaagtgcatcgacctagtgacttcctaaaatttaaatatgtatcagtaaattaaaataaaagttttctatgaaaaaaaaaaaaaaaaaaaaaa

SEQ ID NO: 2579 - DNA, 1025 bp, Canis familiaris
ttgtgctgaagctgctctacgcctgtcaacctggaaaccagaacacacaagtgacagaagcctgggacaaagttgcccactcgttaattgcacaccaatagaaggtatgttgtcacatcaattgaagcagcatgtcatcgatggagagaaaaccattatccagaatcccacagaccagcagaagaaggaccatgaaaaagctgaatttgaggtacatgaagtatatgctgtggatgttcttgtcagctcaggagagggcaaggccaaggatgcaggacagagaaccaccatttacaaacgagacccttctaaacagtatggcctaaaaatgaaaacttcacgtgccttcttcagtgaggtggagaggcgttttgatgccatgccatttactttaagagcatttgaggatgagaagaaggcccgratgggtktgktggagtgcgccmaacatgaactgctacagccatttaatgttctctatgagaaggagggtgaatttgtagcccagtttaaatttacagtcctgctcatgcccaatggccccatgcggataaccagtggtccctttgagcctgacctctacaagtctgagatggaagtccaggatgcagagctaaaggccctcctccagagttctgcaagtcggaaaacccagaaaaaraaaaaaaagaaggcctccaagactgcagagaatgccaccagtggggaaacattagaagagaatgaagctggggactgaggtgggtcccatctccccagcttgccgctcctgcctcatccccttcccaccacaccccaggctctgtgaagtgcagttcgtcttctccacccaggaccgccagcagagcagggtctccctgcccccatccctgtccccatcccaaccccttccaacaacaaccagctccaactgactctggtcttgggaggccaggcttcccagccaccgaagactactttaaatagaaaagagaaattgataataaaatcaggagtcaaaaaaaaaaaaaaaaaaaaaaaaaaaa

SEQ ID NO: 2580 - DNA, 712 bp, Canis familiaris
tggaagagcggctagggctgacccgagatccggaagcaggccaaccgcatgagcttcggagagatcgaggaagacgcctaccaagaggacctgggcttcagcctgggccatctgggcmaatcaggcagcgggcgggtacggcagacacaggtgaacgaggccaccaaagccaggatctctaagacactgcagcggaccctgcagaagcagagtgtcgtgtatggcgggaagtccaccatccggtgaccgctcctcggggactgcttccagtgtggctttcacccctttgcagggcctagagattgtgaacccacaagcagctgagaagaaggtggctgaagccaaccagaagtatttctccagcatggccgagttcctcaaggtcaagggcgagaaaagcggcatcatgtccacctgaggggctgtaccctgggtggctgcccctgaagctacacaggccctgcccttctgaagggatcaggatcaggatagggctgggaggttctgtcctcagcccagtgccaggactgtccaggaagactcaggaggagacccagtccccacgcacgagatcgctccctattgcaggggggcagagccagtcttcatcatgcctcaccttttttaactaggaaggaagatacttttggaaaaagtacgattaaaaagcacattatcaarwaaaaaaaaaaaaaaaaaaaaaaaaaaaaaa

SEQ ID NO: 2581 - DNA, 698 bp, Canis familiaris
gactctgatgttctctatggcccactccacaccaaacaggcagtgagcatgttttcttgcagcaagtggaagatgcaaagaaagaaggtggcaactgtggtctatggtggcaaggtcatgggatcgccctggcmattacgtagaaccmacagttgtgacaggtctggccccacmatgcgtccmttgcacacacagagacttttgctccgattctttatgtatttaaattcaagaatgaagaagaagtctttgcatggaataatgaagtaaaacmaggactttcaagtagcatctttaccacaggatttgggcagaatcttccgctggcttggaccgaaaggatccgactgtggcattgtaaatgtcmatatcccmacgagtggggctgagatcggaggtgcatttggaggagaaaagcacactggtggtggtcgggagtccgggagtgatgcctggaaacagtacatgagaagatccacttgtactatcaactacagtaaggaccttcctctggctcaaggaatcaagtttcaataaaggtgacggtaaatcagcattacttcaagtcttctaggcattcttgcagttctttgttctgaagaagaagaagaaaattaagatttgccctgaataaatgcaycattttgattaaaaaaaaaaaaaaaaaaaaaaaaaaaaaaaaaaaaaaaaaaaaaaaa

SEQ ID NO: 2582 - DNA, 585 bp, Canis familiaris
gctttttggaagtgcacaaagtgcaaaggcattcatgaaaatctgggtttaatgagctataattacatgaagtgcaatggcgagttgataacctggagtttatcttctaataagttatgctgggagtcgagctgtgacattgtttggatcgcttagggtctgaatgaggataatggatatgctgtgctcccccttcgtgggcctgagtacctgccgtggaagctagggaagggggctgggagactgttggagagggtgaggcatggtggacatcctaactgtgccctgtcctgcctcgcatgccttcctgccctccagtgccttaaagtatgcagacatttagagcctcaatgaatcattcactgtaacactttgctctactgatcctctgtgtgcaaggggctttctctcctttttggccctcctgtggcagagaaaagatgagttagcttgatgaattctaatgctttgcttacagctttgagaaatgcttgttctaataaaaaaaaaaatctgcagtctaawamaaaaaaaaaaaaaaaaaaaaaaaaaaaaaaaaaaaaaaaaaaaaaaaaaaaaaaaaaa

SEQ ID NO: 2583 - DNA, 699 bp, Canis familiaris
ttaccagctagatcaggggatggggaaaacacacacacacacacacacgcacacacacacacacaaaggcaagcccgtggcagggccgtratgacttaaatgtgccatktcccaggttgacgttgccacacttcatagagagttttgcaacaccgcgtactccgccagtctagcratcctcwytawagcagraagatttccactcaaagtgccaacgatgtattcaacaggcagattaatgttgaaaatgcmatcaggtgtggtttggtgctactttaaacmaaaagtcccactgtggtctttcgttcaatattgttcaatttagaattctgtccaacactaatttattttgtcttgagttttactrcmagatgagactgtgggtcctgtatgcccgaattcactaaagccaagggtttgtaaggcacgctgctcctgtaagacttctagcctcctcattggcacatttgcggctcattacaacttataggatagcattcgatgtggatttccactctccatttctcttatgttaaagtgaaagatttaggcactatgtacaattggtaaagaagaaacattttcataagagttataactatatgtaaacrttgtataatggtatggaataaaatgcacattgtaggacattttcwaaaaamaaaaaaaaaaaaaaaaaaaaaaaaaaaaaaaaaaaaa

SEQ ID NO: 2584 - DNA, 630 bp, Canis familiaris
cagttgtccctacctatcgtggtcttccaawtgggctgratgaacttggaaggttaagaaaattagtggaccaaacwwaaggcattgtgggctacgagtagagcatttgattctgtgtttgccaatgcaagattatctgcttcactgtttcttaattcccattgctctgtcctccgctgaatctgttcgatcaaatagatatgcacagggctggtggctgagccacgctccagagtatttcatgtatgaccaagatggaaaatgtcaccccaacaggtagatgagcataaacaaggagacatatgttccactcattcagtcctggagggggaggtgctttacagcccaggggtgtcaatctatgtagaacaaggacactattacctgctagcctttccccatgttatgcggtaaccaccttgctgccttacgtcctctgttccaagtggtggtggcatccaccctgaagtaatccatggttttccttttgaaactgctttgttttactaatttaaactgttttgtactgatgtagccctgagatagtttgtgaaaatgctgtgcactcattcagtggaataaatgttggaaaacagatcttttcatatataaaaaaaawtgaataacaaa

SEQ ID NO: 2585 - DNA, 674 bp, Canis familiaris
tcggctattcgtgggccakgatcctkgatcctcattttcgccgaggtgctcggcctctacggtctcattgttgccctcatcctgtccacraaagtagcccttctccaagcgcaccagccacagaatatgatgtaargaccaccccctcattccaraatgracagcctgacacacatgcacggggcagctgccccccacccccagtagttggtcttgtaaatgcacagtgtcctagtgcccatcgtctgttactccggccttgcccccgccccgtgccgtggacatctgggcccactcattccccatctaggcccccgaccagtgaggatgcaagcccctggccgcccccactcatctgccctagagtgctctgtgtttaaggatgaattagacttgtcatttttctcttcactggatgtttattatttataaagatttgatctgttcatacgtctgtggagcagccctccgtctcccaactatatagtaaccttaggtagtgttgcgttatggggttaccgtttgccctgaggctcggatggaaccactctcgtccagccccggctgtccggggccgcgggccctgagcggagccgtgtccaataaagttctcggttgtgactggaaaaaaaaaaaaaaaaaaaaaaaaaaaaaaaaaaaaaaaaaaaaaaaaa

SEQ ID NO: 2586 - DNA, 634 bp, Canis familiaris
gaaaacagttcattactcaattctgtttctatatagcmaactgartgtcaaagtacccttctgtccacacacacaaaaatctgcatgtattgggtgktggtccttgtcccctaaagatcaagctacacatcagttttacgatataaatacttgtactaccttaatgataaggaagcacttagtggactccttgcagttccatttgctcatgattaatacactgtttgggctggccagtttttcatgcatgcagcttgacaattgagcacagtcaggcatttgtattaaaaacgaaaaatgaaaaaacaaatctaaaacgtactcaactgggttctagttcaatttgttagtagaaattgtcatagctggtttactgaaaacatttaaaattggtttacctcaggatgctgtgcagaaaaatgggtgaaggataaactgtctagatgtagccccacttaggacggccctcccatacttccatgtgccccttccccccacccatggtgacgatgacacacatcctggtggcatgcgtgtgttggtttagcgttgtctgcgttgtactagagcgaaaatgggtgtcaggcttgtcaccattcacacagaaattaaaaaaaaaaaaaaaaaaaaaaaa

SEQ ID NO: 2587 - DNA, 604 bp, Canis familiaris
tattcaaacgtgaaatggtaraccawtctwracgtactcaactgggktctagttccatttgttagtagaaattgtcatagctggtttactggaaacmtttaaaattggtttacctcaggatgctgtgcagaaaaatgggtgaaggataaactgtctagatgtgagccccaccttaggacggccctcccatacttccactgtgccccttccccccacccactggtgacgatgacacacatcctggtggcatgcgtgtgttggtttagcgttgtctgcgttgtaactagagcgaaaatgggtgtcaggcttgtcaccattcacaccagaaatttaaaaaaaaaaaaaaaaaaagggwaaaaaacctttaccmagggagcatctttggactctctgtttttaaaacctcctgaaccatgacttggagccagcagattaggctgtggctgtggacttcagcacaaccatcaacattgctgatcmagaaattaccaatatacgtccattccacagttgtaaatgctagttttttttttttttttttcccaataaaaagacccattaacttaaaaaaaaaaaaaaaaaaaaaaaaaaaaaaaaaaaaaaa

SEQ ID NO: 2588 - DNA, 1688 bp, Canis familiaris
gaagaggatgatcctaaacagagttctgattctggggaccctcatcctgactattatgatgagcccctctggaggtgaagagattgtggctgaccatgttgccwactacggcataaatgtctaccagtcttacggtccctctggccagtwcacccatgaatttgatggcgatgagkwrttctacgtggacctggagaagaaggaaactgtctggcggctgcctgtgtttagcacatttrsaagttttgacccacagggtgcrctgagaaacttggcyakaryaaaacaaaacttgaacatcmtgactaaaagktccaacmaaactgctgctaccaatgaggttcctgaggtgactgtgttttccaagtctcctgtgatgctgggtcagcccaacaccctcatctgtctcgtggacaacatctttcctcctgtgatcaatgtcacrtggttgaagaataggcaytcmgtsacagaaggggtttctgaaaccagcttcytygccaaaggggatcattccttctcaaagatcagttacctcaccttcctaccttctgctgaggatatttatgactgcaaagtrgagcactggggcctggatgagccacttctgaaacactgggaacctgaggttccaacccctatgtcagagctgacagagactgtggtctgtgccctggggttggctgtgggccttgtgggcatcgtgatgggcaccgtcttcattatccaaggcctgcgctcaggtggtacttccagacatcaaggacctttgtgagctgcacctagaaggaaggtgcactgcatgcccacctcccagagcagaagagtggacctgataggccacctagcactatttccttgcccagttcatcatactcctactctctaccaatgcttctctgtcacctcttctctgggactcaagaactatatcctctgagtgctaaccctttaaattctaccccttccttgactgcctgtttttgtttgtttgttttcttttcttttctcaattgtcaactacaatgagatctctgggatatcccaaccagttacctgatccctcattactctgatctagcattcccatggaaataattattttctctttaagagatcctttagatcaatttttcctgtctttcatctcagggctgattaggactttggtccccccttttattataccttcctaatctcactttccatattatgtttcatgcccagcaacaccagaaaatgcaggtataggctgataatattttgatatcttaggtaaggataatggttctctcttcctgttattctcatgtttgggtactgccacactcccccaattcagacaccaagaaaagtaatataagccctctgaccttggtgtaaatttggtatagaagaaatacaaagccaagaaataagttcatacttcttttaacataattttagaaagctatgacagagaaataagttaagataaagaaattttgaatttcaaagtaccaaaagacaaactgttttccaaaactttaaaatttcaatttgtgaagaatgaatgatgataggagaagctttcctctcccatcctcacccatgaaaagataagaattctttaggcaggaaaataaatggaagtcgggtaagagagcattagaataagaccataaagtaagtaactgaggacaggtact

SEQ ID NO: 2589 - DNA, 536 bp, Canis familiaris
atttgtttgcccacagtttgttctgtcacttggttgaataaggttcttttctccctctgttttctgcttcctgctcctcacccctgctgctcagctgaccatgttgccwactacggcataaatgtctaccagtcttacggtccctctggccagtacacccatgaatttgatggcgatgaggagttctacgtggacctggagaagaaggaaactgtctggcggctgcctgtgtttagcacatttagaagttttgacccacagggtgcactgagaaacttggctataryaaaacaaaacttgaacatcmtgactaaaagktccaaccaaactgctgctaccaatgggtatgtgtctaccattctgcctctcttcactgaatctgtccccacatcccagctctctttcccttcctccctagcatagatactcttcactgttttccaagggatatttccccagatcttctcatagtaattactgaaccctcatcctcccccatctgaaaactgaaatattgccatgtaatgcaaggatcc

SEQ ID NO: 2590 - DNA, 638 bp, Canis familiaris
gccatcggagagatctggcccctagcccgaggcggagcccaccccctcggctggggcttcyctggtgctccgggcccagcccmcggagacactgttcctgcccatcgctctgtagcwactcgtcctctcccmccgtcttcctgraaggcccaggcctcttcctctgctttttccgtggkcgggactcgagcggaaggggggctcawgccagctgcccagagccctaggggtgagaagbcggcccccmwgcttctcccagcagagctgcagccccaggacttctgctacaggcttggggcagacacagagacctggatcagatcccagcccccgtcccgccccccggggctgctgaagccccttcctccatggctcccatcgtgggagcgaacgttgttccctggagatgatgactcagaaaatctcccggggaacgggacagctgtcgatgccmcagctccatcctccgcgtggggggagggattgcmacgtgcacgcactgcagtggatcgccctgtcccggatgccccccgagagaggaacagacmgtcggaaataggagagtttctattaaaggtcattcamaccmmaaaaaaaaaaaaaaaaaaaaaaaaaaaaaaaaaaaaaaaaaaaaaaaa

SEQ ID NO: 2591 - DNA, 642 bp, Canis familiaris
gtagtacctctctgtaagggcctggtaaatattcaaatatttaataatagactttttaaagytaaaaggracttagttccttgcatttttgagagccaggactgggctcaggctcttgcgagagaactaaattcagtggaaggagtttgggctttggagccaaacttaggtttgaatctggattctgctacttactggctgtgagtcctcaattccaaatagtaatttcttgaggtgtaaaagaaatttagaaatggaaatggaaaataattagaactgcctgttttgaagatcagagacaacatatgcagaggacctgatatataattgttcaatgcacagttgccataataattataattctaccctaatttagagtttcaggagtgacaaaatgtctttacttttcgtattcacctgacctcccccagaccaataaaggggtaccactctttaaacccaatggtatatctttaaaccagatggtatatgcttgctatccttgcaaatattcatgcccccccaccttttttctataatgcaatgtagaaaatatctctggtttttttaagttgatctgaatgtggacattagagttttagaaacttaccccctatgtcttcaggtaccaagttaagacag

SEQ ID NO: 2592 - DNA, 669 bp, Canis familiaris
tgacacaaggaggacattctgataaaagcattagagttgtgtgaaattctagctaaagaaagggacacctataagaaaggaatattggagatawattggaagatccmttcaaagcaacatagcacagagagtgacccaccaacaaatgtacagcaatracaccatctggaagaactcgatggaatgcttttatttttttaagagactctaatgcaggagtttaaagcgatcattccctttgcctgtggtgcaaaatgtgcattgcacaggtattgctttttaacagaactaagtgtgatgctctttgggtgctgctgctattcagactagtaattgattcttttaaagcmaagtaatttgaggggagggaaaagaaagtcccatgaaggaacttttgtagtattatcaacatttactctaatcccttagcatcagctcctccctaaagagtatatgtgtcaggatttgcagcattaatgaaagcaggtaacttgtatgtaatggatataaggtaacttaaatttgggttcaggaagcagggaatgtaactgttacattagagctgctatgccacactcacagtatcttactatcactgtaaccaactaatgccaaagaatggttttgtaataaaattatagatgtatcctaaaacttgaaaaaaaaaaa

SEQ ID NO: 2593 - DNA, 683 bp, Canis familiaris
tcattcagactggtaatatcttgatttattcaaaaggtcagaaaccacacggtgtctcctcaggagaactggggaaccacgttcytacctgkttaaataaacccaagtatactgtgtgaacccaactatcttttttcaaagcagggtgctcttcctggctgctggcttttatgaaaagaaatgcagtaaaatgtattttgtgaaagatcactccatgctgccagagtcaagtgggatgggagattttgctacatgttcacccaccccvatctacgggraagtaaatattttttaaattaaacmgttctacttagctsccmagatgcttctgaaaatggcattttattacagtttccmactattttttaaaaatacagttaacmttgagtgatttctacawtcatgtgaaaattatttatttattagccagcaccagatgcatgagctaattatctgtgattccttgccttctgtttgcccacagtcaactcattgtttaaaagcttccagaacattcaagctgttggtgtgtaaaaaaaaaaaaaaaaaaaaaaaaatgcattgtattgatttgtactggtagttcgtaaaatttaattaaaacacaggacatgaatggaaggtaacattggacagctaataaaatatgatttgtggatataaaaaaaaaaaaaaaaaaaaaa

SEQ ID NO: 2594 - DNA, 602 bp, Canis familiaris
gagacaataggtgcagacctcttgccaccttggcaagggctgtgtctttatgctgggactactcatcgttccagagaacaaagagccagaggctcaataaaaacatagtttatttagagggctccctttcttggggggcaggggctccctggtggcctcctcacccccaccaagcagtccttcagaggggtctcaggcatcctctattcagaggcactttggggaacaagtgctccccctgtccagctcaatgactgggcagcactctcccaggccttaggacagttggggctaatcccaggccaggcaaaggcataagctggtggggggggggcctccctccccagtgtatatactgtacctgtgtaacattttgtatattctggggatagggcagccccctgtatcatagcagaggttggaactggcaaatggggaggaagttctattaaatatttggggatgaggaaacttatttattgatagcataggacagaggaaggaggcggggacggggttccgcccaggtgactcacaacttctgtttgctttttatttcggaataaatggatttagccataaaaaaaaaaaaaaaaaaaaaa

SEQ ID NO: 2595 - DNA, 747 bp, Canis familiaris
ctattctctatggatttatggagacagtacaacagacgcttaatccagtctggacttagagacagacaagtatcagccatactgagatgtattatcaacacagagcagtcakttatgtagtagacagttgtgaccgagaccgaattggcatttccaaatcagaattagttgccatgttggaggaagaagagttgagaaaagccmttttagtggtgtttgcmaataagcaggacatggaacaggccatgactccctcagagatggcmaattcacttgggttacctgcgttaaaggaccgaaaatggcagatattccaaacttcagcaacccaaggcactggccttgatgaggcmatggaatggttagttgaaacattaaagagcagacagtaattcaatcacttctgcctctgtgaaatgaagctacatcacatattcctttggaagcagttaagtatgcttcatgctactaaatgttaaaactgtgtgattgttggcatatgctgaactgactacmatacttgtaataaatataaaaaataagtatttggttggaagggtagctcacccatgattgaaccmactgaatgttctgtgtaatgtaaaatccttccttgcttttttgtgttaagtatatattctatttgtatgraattcatattcaaatagattcctattaaagaatgtactcttattgaggaaaaaaaaaaaaaaaaaaaaaaaaaaaaaaaaaaaaaaaaaaaaaaaa

SEQ ID NO: 2596 - DNA, 702 bp, Canis familiaris
cgawtctgggagaccgcctkgggggcmaagccacgtcgtgaatcacagccactgtgaccccygacggtgctggcgttagtgctctgtcccccgtgcacgctgattccggggagcgcagrttgtgtccttctccccagagkgcacgtacacgggtcgtggaccatgcagcatccacctgctcgctccgcggcaccctccstacaccgctgcctccagaaggttctcctcggaagctgkcggtgtgtgacggcaacgtcaagaagcatcagaagatgccctttgacgtgttgccgccacaacggatgtggccattagtccatcttgttgctcctcgcgggcgtgtaccgctgtgttctcagtcgccaccrgatgagctgtcctgttgccatgtgctcgctctacacyttgtgtgttcccatggccgccacctgccctgccagcacgagacccaacatgtgtgcacttacggctctcttacaaccgtctgggtctccytttttggaggctgggggacggaggacagattacgggctttctcgcacgcccactgggacccgttcttgtgtgacctggagcagaagtcacatggtgtgtcttttcatgacaggattctcccsccacccgccaccccgctaaaagcaatgtattttgtataacagtttgagctttgtgaacggtcttggatgtcgtttgctcgggccc

SEQ ID NO: 2597 - DNA, 676 bp, Canis familiaris
cctcccccagaggacacgtacacgggtcgtggaccaatgcagcattccacctgcttgctctcctggcacccctccctacaccggctgccttccagaaggttctcctcggaatctgtcggtgtgtgacggcaacgtctagaagcatcagaaagatgcccctttggacgtgttgccgccacaacggatgtggccattagtccatcttgttgctcctcgcgggcgtgtaccgctgtgttctcagtcgccaccrgatgagctgtcctgttgccatgtgctcgctctaccaccttgtgtgttcccatggccgccacctgccctgccagcacgagacccwacatgtgtgcacttacggctctcttacaaccgtctgggtctccttttttggaggctgggggacggaggacagattacgggctttctcgcacgcccactgggacccgttcttgtgtgacctggagcagaagtcacatggtgtgtcttttcatgacaggattctccccccacccgccaccccgctaaaagcaatgtattttgtataacagtttgagctttgtgaacggtcttggatgtcgtttgctcgggcccctttgcggccgctgttcctgagcgacaccactatggagaaataaacgcctctttgcctgtgaaaaaaaaaaaaaaaaaaaaaaaaaaaaaa

SEQ ID NO: 2598 - DNA, 662 bp, Canis familiaris
cgcagccaacttccggccatggcccaccaggagcgcacgttcatcgccatcaagccggacggcgtgcagcgcggcctcgtgggcgacatcgtcaagcgcttcgagcmgaaggggttccgcctcgtggccmtgaagttcctgcgggcctcagaggacctcctgaaggagcactacattgacctgaaggaccgccccttctacccggggctggtgaagtacatgcactccggacctgttgtggccatggtctgggagggactgaatgtggtgaagacaggaagaatgatgcttggggagaccmacccagcagattctaagccaggcaccattcgtggggacttctgcattcaagttggcaggaacatcattcatggtagtgattcagtaaaaagtgcagagaaagaaatcagcctatggtttaagcctgaagagttggttgactacaagtcttgtgcttttgactggatctatgaataaaagatggacacagcattagttccctttggcaccactttatatgttcctggacatagctcttcattccagtgacttggaagtaatagagtcaatctttcttttctaaaacgtacttaacccataaagcctttggaaactggaaaaaaaaaaaaaaaaaaaaaaaaaaaaaaaaaaaaaaaaaaaaa

SEQ ID NO: 2599 - DNA, 691 bp, Canis familiaris
  misc_feature (54)..(54): n comprises a, c, g, or t, or includes no nucleotide
ccggatcggccccagccggctcgcgcgcaccatgcgggcccgcgccccccgcgntgcgtgcgcggctgcggcgctggcctgctcctggcgctkgccccgggkctgccckcagttggagccgggcaggcrccgcgccccgccgagcaggggcccccggtgcggctcttcacggakgaggagctggcccgctacggcggcgaggaggaggaccagcccatctacatggctgtgaaaggagtggtgtttgatgtcacctctggaaaggagttttatggacgaggagccccctataatgccttgactgggaaggactccaccagaggggtggccaagatgtccctggatcctgcagacctcacccatgacactacgggcctgacagccgaggagctgaaatccctggatgacgtcttcaacaaagtrtacaaagccaagtaccccattgtgggctacacagcccggaggattctcaacgaggacggcagccccaacctggacttccagcctgaagaccagccccattttgacacaaaagatgagttttgatgttctatctgcagaagcctgttcctgatatgtgggggtgcgggcagggagacctcatgtgccaaatctgcaaaacaggccacctgagcctctgggctccccggacctgaataaagccgaygttgaacccggraaaaaaagaaaa

SEQ ID NO: 2600 - DNA, 742 bp, Canis familiaris
acaaatgaagaaagagggacactgacaagagaacaccgagaagttaaaatgaaagtcacaaatcaaagtggcaggtggtcacgtccacatccttcccaggcgtcacacgtacttctggtgaggccctgataatccaggacttcactgtcacgaatgctctcacctcacaatgccggtaagttatgctcctcatttcccagctcccaagccttgtacctctagccccggggggtccctctggagttgagatgtaagaccattgaggcctcggcacgaggaccaggctagcaacccatgctgacctcacagagggagccccatcatttcccagagacccgaggatccagtgtgggatccactaacgaaggaagtctccagagacttccctgacacagcatacgtacatctgtcctttgggccacacagcacttctcgcattgctccagcttctgccccggggtgtcctggacacgagccaccgtgttggggtagacaaggaagatgaatgaggagctccttccctcttcccagagattccagactctcattgttctctcgtttttattatagggcttaacatttccctcaaaaaacacaaaaaaaccaaacaaaacacaaaaaaaaaaaacccacttcatttctaatcctttgtctttgtttcaaggaaagccagtttttcctcctaccacattttccggcatcagctttaagaaaaatgcaacatccattgaaaaaaaaaaaa

SEQ ID NO: 2601 - DNA, 605 bp, Canis familiaris
ggttcgagtgaatatctcaaggcaaggagtgcatctattttaagatgctttggagcmagcagctttatcagtcccccatccttagcaatgccttagctgggacacgcagcgaacacttgagagggtggcgagtacagagagtagagataaaatgtctaaagcatcgggaaaggtaaaaaaaaaatctatttttgtacaaatgtaattttatccctcatgtatacttggatgatgggggggtgggacttgttttgtttctgcttctagagatggaggagagttttctcagtgaaggtgcggatgccccgctgcgctgygcagacgtctcccctcgggcaggtgggcccccggcggccaggggtctcctcctcttccgagagattcttaaagccttgctctgttctgcccctgtckccagccggcctccccgagactgtttgactgtgaacttacttccctgcgtgattgttgtctgaacgccgccgccgtgggtgccgggcacagacgaacaatggtgtcagaacgtggaaaggaaaacacagaaaaacgtgagaggagaaacmaaatatgagcgtttaagaataaaaaaaaaaaaaaaaaaaaaa

SEQ ID NO: 2602 - DNA, 620 bp, Canis familiaris
agataagargtttcttgacmaatacatgccccmgttcakgaaacatcttcattatagrataattgatgtgagcmctgttaaagaactgtgcagacgctggtatccagaagaatatgaatttgcacccaagaaggctgcctctcacagggcgcttgatgacmttagcgaaagcatcmaagaacttcagttttaccgaaataacatcttcmagaagaaaacmgatgaaaagaagaggaaaattatagaaaaccggggaaaatgagaagactgtgagttgatggcmgtgctcatgctgtcggcacatagttctcgggaagcagctgctggtagttgcatttggttttctgttttgttcctgctgattgcttggcacagcaccttctttcacttgtgtctccagattattcaaacagacatcacctgaaatatcatttttctcctaacattctgttttcatttatgacacagcagcatctctgtaagtaccaggtcatgtccatccctcggtacatatctgcatttgcttttagaccatttcttttgtttaataataataataataaagctagttctattgaaatgcvaaaaaaaaaaamaaaaaaaaaaaaaaaaaaaaaaaa

SEQ ID NO: 2603 - DNA, 617 bp, Canis familiaris
aggaaggctctagaccacgtgtccaaatgccctgtgtttcagataagcacagggcctctggaaatgtcagccaaggtccgggtgccatttttgcgtcatttgtccccatcagtaagaaggtagcccgggacccccgcttkgacgatctgtcaggagaatataatcctgaggtgtttgacmatacatatgaattcctgaatgacatccgagccmaagagaaagagcttgtgaaaaagcagttgaagaagcaccattcagggcaggagcatgagaaactgcagcagctgcttcagagaatggagcagcaagaaatggcacagcaggaacgcaggaggcaacaggagctgcgcctggcccctgaagcaggagcagagggctcgggcccagcagggccatcggccatacttcctgaagaaatctgagcagcggcaattggtcctagctgagaagttcaaggagctgaaacgcagcaagaggctagagagcttcttgagtcgaaagaggcgccgaaatgcaggcaaggaccggagacatctccctttgagcaaagagtaataaagaactgttctgagctctaaaaaaaaaaaaaaaaaaaaaaaaaaaaaaaaaaaaaaaaa

SEQ ID NO: 2604 - DNA, 658 bp, Canis familiaris
atgcactatttatgtatgcatgtgtttatggatattttaattgcttcccgtttggatgkctgtaggtwaaactgcggcagaakgggcgcctgggtgcctcgttggttaagcattccgacttttgatttgggctcaggtcacgatctcagggttgtgagctcaagcccagtgaaccctgtgttgagctctgctgtgggtgtggagcctgcttaagattctctctctccctgttccctctgccccaccctccctccctggcgactgcccacctctgccctgctggggctttctgagtaaataaataaaattgcaaccatcccccmaatccctaraaacccttctaaaaaaaagaaaagagagagaaaaaaaaaaactgctattggatttggatagcactgttcctattggtattgttcctcttctcttgtccatactggaatctgagtgtaggtgaatgaatgtatgacctcttaaagaataccmaattgtcatggaaaatgattattccttttgtattcccacttgcagtgtatgagagttccagttctctggtatctttgctaatattgggtaaggttaatctttttaagtttaaactctttaagtaaatgtgaagccacttawmwmaaaaaaaaaaaaaaaaaaaaaaaaaaaaaaa

SEQ ID NO: 2605 - DNA, 636 bp, Canis familiaris
accctccagtatggagtggaaccggccctcctaactggttctgacccctctctgttgctgggtcctctgtgtgatggacgacatgtttgacagactgggtgctagagcccctctcgtttgtttcawgttttccttcatgggttgttaatcattagtctgtgtgtgtgtgtggtgtgtggtcccattcccaggttcacctggccacaggtgagcctttcctgctctctttttttaccccagagccagaggagttcacgtttgtgcagtgacaggccagctctccagcactctgtggcctgaaaatctggtctcactaattgctctgtcttacagacacaggtcacctttgggccaggtggcaggaaacaagcccagaaggcaactagaatctccatggggccctggcatcccagggggcacgcmggggacatggggagtgtgcatgggagaaggatttgtctttacagttgagcaatttgttgagtgattgaagtcagaccgctaataggtgtactgtatgtttagrtttcagtattaaatgtttccttttctactgataaatcacaaaataaagaatctcgatcctggaaawmwraaaaaaaaaaaaaaaaaaaaaaaaaaaaaaaaaaaaaaaaa

SEQ ID NO: 2606 - DNA, 668 bp, Canis familiaris
tttgctagaacagagacgtaaggacatggcgtgtgtcscatcagyaccawytcggtaatcacggcactatccatggagcctgaccatttcktcccagacctcacaccgtgactctawacagcccccgttcatcagtcagaattgagagagagagataagctttttttttttcrattcccacttagaaagtggawacagaggaattgcacagaggactgggggatccttgggcataagaggtgcagacaggggwacacagaggcaggcggagtgtcttagtgggggaccacagtgccaatggcaaaggacacttctccaagtgtacctcagacccagccctctccagcccgccactcccagtcgccccaccttctcgtagagctaacatcagagatggtttccaggacttaggaaagcaaccccccctctgccaccccctcaacctggcctgtattgtctattttctagaacactaggcttcttctttagcatagtcccccatgaagccggggccacaatgtctcagccgcctgcagtgacattgctggactccrgaagaccattccacgggagaatgggttccccaggctcacagcgtagagacgttgagcccatggcaactgttttgactgctggcagtgcaaaacagtccaccccacgccactgcc

SEQ ID NO: 2607 - DNA, 621 bp, Canis familiaris
ctagcaaccacawacagacaccatggtgcatctgactgctgaagagaagrgtcttgtctccggcctgtggggcaaggtgaatgtggacgaagttggcggtgaggccctgggcaggctgctgattgtctacccctggactcagaggttctttgactcctttggggacctgtccactcctgatgctgttatgagcaatgctaaagtgaaggcccatggcaagaaggtgctgaactcctttagtgatggcctgaaaaacctggacaacctcaagggcacctttgctaagctcagtgagcttcactgtgacaagctgcacgtggatcccgagaacttcaagctcctgggcaacgtgcttgtgtgtgtgctggctcaccactttggcaaagaattcacccctcaggtgcaggctgcctatcagaaggtggtggctggtgtggccaatgccctggctcacaagtaccattgagatcctggcctgtttcctggtgaccactggaagaccctgtctccctaaattctttcttctgaactgggggaaataatgtccaccatcaagggtatggcttctgcctaataaagaaccttcagctcaaaaaaaaaaaaaaaaaaaaaaaaaaaaaa

SEQ ID NO: 2608 - DNA, 618 bp, Canis familiaris
tgcmggmccagggacgaggatgcgacccctcactcagctgsccactgcgtgggtcmatckgctktgggtggcgagaagctgcaggatgcctactacatctttcaggaaatggctgacaagtgctcatccmccctgctgctgctcaacgggcaggcggcctgccacatggcccagggccgatgggaggctgccgaaggggtgctccaggaggctctggacaaggacagtggccacccagagacactgatcaacctcatcgtcctgtcacagcacctgggcaagccacccgaggtgacmaaccgctacctgtcccagctgaaggacgcacacaggtcccacccctttatcaaggagtaccaggccaaggagaacgactttgaccggctggtgctgcagtatgctcccagcgcctgaggccggctgcaggctggttcccaagcccgggaacagcgaggctgggcatgctgcccccactgccaggcacccatcctcttgtgctcttggttgctctggctagaggtgaaggctcgaggctcagcctgaccagggccccttctgtccaataaatatctccmcctgawmmawrwmaaaaaaaaaaaaaaaaaaaaaaaaaaaaaa

SEQ ID NO: 2609 - DNA, 617 bp, Canis familiaris
cccagtatgatgtgtgtgccatctgcctggatgagtatgaggatggggacaagctgcgagtactgccctgttctcacgcctaccacagccgctggtgtggaccyctggctcacccagacccggaagacctgtcccatctgcaagcagcctgtccatcggggcccgggggatgaggaagaggaggaagagacacaggggccagagggtgatgaggaaggggagctgagggaccagcctgcttcagaacggaccccacttctgggctctagccccccacttccgagtacctttggctccctagctcctacccctcttgttttcccagggtcttcaacagatcccccttcctcccctccatcttcttcagctgccatcctggtctaatgtcccccctcatcccctccccacacctcctgtgacctatttgcacagcccctgagcctctctcgtcttgtgttgagggacaggggatcttctgccccaggttgctcctttttccagccccatccttttgagggggctgggggtgtaaagggcctgaggtcttcacttactcagtaaataaaactgtttttgtgaactaaaaaaaaaaaaaaaaaaaaaaaaaaaaaaaaaag

SEQ ID NO: 2610 - DNA, 681 bp, Canis familiaris
tgttgccccaccccttgkctgaatgccccagaacttcctgggcacttgctgscctgatgcctgacccctgccagtcattcccccatttacccagagggaggmgagatgtgagagagtttgcaktggataatccmataaggggggrggggcaaaggtttatccgtcacaattctactccccagccccttctcctgggcacaagaaacccacagggcaggaccctaagatctggggaaggagggtactgagaacctgtatgtgcccttagatccttctccatcccctctccaacgggggattccaagttaccacccctctctctggcttctaccagggcccaggattcaggcatccttctcctcaacctcaacattttggaaatcttccccttatcgcccctatgccccagcctgggtgcctggaagaggggactagcagaggctgctttgttgcgttttgtttgtgctttgatgccaggaatgctgcctagtatacgtccttaggggggcacacggtggggaagccaggttctccctgtcctccagctgctctgcccccttcctctcttscctgattccaggccttgaaccactcctgtgccgtaataaataaatctttgtaaawaaawaaaaaaaaaaaaaaaaaaaaaaaaaaaaaaaaaaaaaaaaaaaaaaaaaaaaa

SEQ ID NO: 2611 - DNA, 638 bp, Canis familiaris
tgcaggaccttacagcatcttgccccgccccagaccgcaccgggtgcccctcgtgcaacctcagggacgaggtgctcttccccacctgggaggccttatttctcgggctccgagggccacctgaagcccgggcccgcatcttctctttcgacggcagagatgtcctgcagcacccgcctgccccggaagagcgtgtggcacggctccgaccccagcgggckccgcctgaccgacagctactgcgagacgtggcggacggaggccccggcggccaaccgggcaggcgtcgtcgctgctggcgggcaggctgctggagcacggaggccgcgagctgccgccacgccttcgtggtgctctgcatcgagaacagcgtcatgacctccttctccmagtagggccgcgcggcccacggacacggcgggggagggggcgcccgcacggagcatccgccgccccgggggggcctggccgggacgcttgcctgcaccgtcacgtttaatgtaatcctcgagaaataaaaggaagcccaagagtgtattttttaccaagtttaaaacgaaaaaaaaaaaaaaaaaaaaaaaaaraaaaaaaaaaaaaaraaaaaaaaaaaaagaaaaaaaaaaaaaaaaaaaaaaaaa

SEQ ID NO: 2612 - DNA, 668 bp, Canis familiaris
aggccacgcgtcctcgcccgccaaaagcacccgccaaacagccaacctcgtcggcttcaaacacgccagcactaccgcgcggaggtgatagccgtcgtggggcagatctcgcagattccsagctccttccywaatcaggcctccacatcgtagtccacaggccgaccgccaggtggactctggtcttccccctggtggcaggcgcgctcagggtcggcgtgttggtggagcaggaggatgttcgcggcgcgcccgcgcagcattccagcgagttccgggtgctcgacaggtccgtccggctacaggtggtggcgctgctggacgagctcagggtccgtctgccgcccggagagccgctcgtccgcgcagtccgccagcaggtccagatagccacgggagtgcgccgggccatcgggccgcccaaccagcgcgtccgctgaggcggagggggaggtcgcgaaagctcgaggcgtcaacacccagcgctacgtcccgaaggtgcccgcagtagtgggctctcatcaccagcctccagctcctcctcatcagcggccagctcgtgcgccgctacaaactccagtgggactccgtgcctgacgcagtgccgcccccgcggtcacgccgggcwtcggaacstgcctctgcggcgcccccggccctgtaacctc

SEQ ID NO: 2613 - DNA, 594 bp, Canis familiaris
gatcctagatgttggtatgaagstggatgaggggggcaaggarctgcctytggccagggtccsaagtcttcccacaagggggacatggatctgtaataacggcagggaaggaggaktggtgkcaggttgatggtgtggttaccgggggtgtttagttggcctgagggtagtgcctgctggggacatgtggccttgccttcctgccgcaggacatgccaccgggatgcagatgacacctttctggagacatggagggctctttgctcccagcaccccaagggagtgctgcttctgagtgggcagcttccacagatgtggttcccctgggtgggttcaccccagcgattctctgcggcatcttcttaccccacctcctgtcatgactattatcctggggccacccggcaagtcctgagagcagaacccggtgtccctcggtcccaccaaggcatgtactcctctgtctgcaccactcagtgctcactttgcctcctccccactaacatccagactttaaaatacagtaaattagatgtaaactgaaaaaaaaaaaaaaaaaaaaaaaaaaaaaaaaaaaaaaaaaaaaaaaaaaaa

SEQ ID NO: 2614 - DNA, 647 bp, Canis familiaris
tagtacaaggacccagkgcatcaaattcagtttgatgaaggatctgatgastacatgagccmawagaccagtgatgttaaaaaaagtcttaggaaaaatatgctcaaagggaagagacttaatatttttgaccttaaggcagttactgaagagacatctgaaacagagactacaccttcactctgggatatagaatttgctaagcagttagctgcagtaaatgaacagccgcttcagaatggttttgcagaaatgatccagtggacgaaagatgggaagctgtgggagtttccaattaacaatgaagcaggttttgatgatgagggttcggaatttcatgaacatatatttctggatatacacctgaaagattttccaaagcaaggaccaattcgccacttcatggaactggtgacctgtggcctttccaaaaacccatacctgagtgttaaacagaagattgaacacatagagtggtttagaaattattttaatgaaaaacaagacattctaaaagaaaatggcatagagttcaattgaagaccatggaaattgttatttcaagctgttggagatgggtattataactaaataaaataatttactaaaaaaaaaaaaaaaaaaaaaaaaaaaaaaaaaaaaaaaaa

SEQ ID NO: 2615 - DNA, 637 bp, Canis familiaris
ttgagcaaggccgagatcctgagtaactggaacatagttcgtgggcarccaggccaccaactacggcgaggacctgacamgtcaccatgatgagctctgagccccaggccccagggcgcccactacgagccttgtagccccacagggtgacccaaggaggggcccccgtggccaggcccccctccccatctggacctgtagcatgtggacacctctatccaccctgtgtccctctgcccgagctytcagggacacagcaggtcaacttctccmagatactgcagcacccccagcccttcccaccccaccctcaggaggctcagagacccmaagggtaagtgaacatctgtttctcattggcagaatcatccagcccagcccagggctccccccaataccaagctcagcctccaagagcctccactgagcaccccagctccaaatctgagcctcagatcacacagcagagaaacaccccacctcactggcctcagactcgcctgccccccggccctgcccccaggatgcctcctyttctgccagggaggcaataaactccagtgctgrgaaaaaaaaaaaaaraaaaaaaaaaaaaaaaaaaaaaaraaaaaaaaaaaaaaaaaaaaaaaaaaaaaaa

SEQ ID NO: 2616 - DNA, 680 bp, Canis familiaris
tctggctacttcgttcccatggagctggtccactccaagaatctagtctttcccgactccgggaaagagsggagttcttcaagaagagcacgaacaagctgatcgggattctactctgtgcttccacgtccccacatctgcctgagactgagacaccycaggatcaagaacgcagaaacccccagccaaacccacctccaccatgggggctgcgactcggctgttggcgggcatcctcctagctttgctcaccctcacaaccgaaggtggggtcctcaagaaagtcatccggcacaagcgagagagtggagtgaatgtcactctgtccgaggaacaccagccagtggtgtttaaccacgtctacaacatcaagctgcccgtaggttcccagtgctcggtggacctggagtcagccagtggggagaaagagctggccccaccttcagagcccagcgagagcttccaggagcacacggtcgacggggaaaaccaaattgtcttcacacaccgcatcaacatcccccgccgggcctgtggttgcgcggcagctcctgatgtcaaggagcttctgagcagattggaggagctggagaatcttgtgtcttccctgcgggagcagtgcaccacgggagctggctgctgtctccagcctgccgaaggccgcctgacaccaggccctt

SEQ ID NO: 2617 - DNA, 680 bp, Canis familiaris
aatacactgtcaaagccccggttttaactgcacccgtggcttwcaagttgtgcctgccttgcgttatattacttgtggggwacaktgacagcacttygagacccmamcccaagaaggaagctgtactgaaggggtgkccgaggccgctgctcatggtgaagtccctcatcagaaagccagctcagattggtagatyttttagagagtaatccccccagagctttagtggctcagggtggggamggaggggcccgaggtcctccggcgccccagaacccgtagggatcccagctccaaccctggcctggccacatgcctgcaagttggctcccccatgaggggtatgggctgagtggcagccgcgtggggcagggcggcaacaaagcggcctctcagaccagttacctcacccccgacctttacacagcctctkctgagccacgggcctggcctggctgagcacccgcctggttctctggcgggagggagcagttccccaggctgagtggccgtgacttaccatcttctcaaggctgtcgcttgctcagagtgtctatttgctatgctgaatgcagcccaaattactttttacgatttgtgatgccttaccgattggatcttaatcctgtatttaaagttttctaacattgccttaaaaaaaaaaaaaaaaaaaaaaaaaa

SEQ ID NO: 2618 - DNA, 679 bp, Canis familiaris
gccgctccgaagggcaggcccggagccccggggaggatgcccggtycaggagcctcgctcccccaagcccggacccccacctgtggagaasccmaaggcctcatcggaggctcaagcaactccggaagctcccmatgtgcccmawgtgtcctgcccmaagcagtgccgaaggacaggcaccttgcagagcmacttctgttccagcagcctggtggtgaccgcgacagtgaagtccawggttcgaggcccaggggagggcctcactgtcactgtcagtctcattggtgcttacmaaaccggaggcctggacctgccttctccmatcactgacacccccctgaagttctatgtgccttgcaagcagtgccctcccatgaagaaaggagccmgttatctgatgatgggccmagtggaagagaacagaggtcctatccttcctgcagagagcttcgtggttctctaccggcccmaccaggaccagatcctcaccaacctcagcaagcggaagtgcccctcccagcctggaagggctgctgggtcccaggcctgaaacccaggctaccttcctagcctrgagccctagggactcctttcttatcccaaataaatgtttcttgactgaraaaaaaaaaaaaaaaaaaaaaaaaaaaaaaaaaaaaaaaaaaaaaaaaaaaaaaaa

SEQ ID NO: 2619 - DNA, 643 bp, Canis familiaris
aggccttcgggcgggagcgcatggcccgcgaggtgccgcctgcggcacgccaacgagcgcatkcggcgcatctgcatcgacgggggccgggccgtggacgccgcmgccatccaggactcggccatgcagccctggcagccgctgggcgccaagtccatcctgggctacaacctcaagaagagcatcgggcagcggcacgcgcagctctgccgtcgcatgctcacgccggagatccagtacctgatggacctcggcgttaatctgtgggtcactaagctctggaaagctcatccgggactttctgaggtggtgacatcccgccggccgccagtccccctctgcccgctggatcgcagaggaggggcggggcaggggccctcctggtgccaccccgctccggggtgaggtggggctgctgccggggctcgggcggccgggactgggcccctggcacacagagcctgaggtccgtatttgactaattatagctttttaaagagttaaatccccttccctccaaaaaagaatgttctatttcctgcctccccttaaaggggagacttcagaagtaaaggaatttcatgttgtgttttttgttaaaaaaaaaaaaaaaaaaaaaaaaaaaaaaaaaaaaaaaaaaaaa

SEQ ID NO: 2620 - DNA, 658 bp, Canis familiaris
cgggagaaccaccatgtctcttgcgtcttattaaatcatttctcgtcaccggaatacttgatacctcaaacgtgtccgtccaacatcgttttccctgtctcaacggtcccggaccgacggaaatgtccggtctcgtcaccatcaaagggtgtcgtttgagatgtgtcacgtcgagggtgattagtcaacatcggttttcgtttatacgtttcgtccacacgaattgattgttgggatctgtcaaacctaatcttcggtccccggtaacgctggtcgtggtttcccgaggattccaatccacggatgtcccacctgaccmagccccagtcggtcaccacacgtacgggtacggtccggggtcgggacatcggattggatgagtcatatttaactcaaccccaccatgggtacagtatcttgttccgtggacagtgaaaaatggagraaacggaaaggacgtgatttgaagaaaccacgcgtcatctcaccccgaaccgtcggtgtcgtggaccgtgttgacaaacgatgtcgatctcaagaggatgatcggtgtataaaccatgggtattagaccaagacgatcactcctccgtaaggtcaggaataaacttattttatcattcgraaaaaaaaaaaaaaaaaaaaaaaaaaaaaaaaa

SEQ ID NO: 2621 - DNA, 658 bp, Canis familiaris
gccctcttggtggtacagagaacgcagaataatttagtaaagagcagtggccttatgaactatggagtttgcacaggcaggttgtagcaaaagggacagagttgccagggcctggctgcctttacaggccagagcagtggtagtttcccacagcaaactctacacagtgcagctcccactaatcagttgtagccaaaagcaaatatgcaaagcaggtgtgcttaactaacaaccctagacagtttggattagaagccaggggccattgcgaccagcaccaaagggctcctaaggttaggtgcctacagggtggactggktcggggtcagccagtggtgtgcatgcccatgccaggccccagccctgtagcctaacctactcagtataaattgagttggggtggtacccatgtcatagaacaaggcacctgtcactttttacctcytttgcctttcctgcactaaacttctttggtgcgcagtagagtggggcttggcagccacagcacctggcacaactgtttgctacagctagagttctcctactagccacatatttggtacccataatctggttctgctagtgaggaggcattccagtccttatttgaataaaatagtaagcyttttttttttttttttttttttttttttttttt

SEQ ID NO: 2622 - DNA, 635 bp, Canis familiaris
gctaaatgggaatacaagtatgggtatgagattcctgtggacatgctgtgcaaaagaattgctgatatgtyctcaggtctacacacagaatgctgaaatgaggcctctcggttgttgtatgattytyaattggtatagatgaagaacaaggccctcaggtgtacaagtgtgatcctgcaggttactactgtgggtttaaagccactgcagcaggagttaaacaaacggagtcaaccagcttccttgaaaaaaaagtgaagaagamatttgattggacatttgaacagacagtggaaactgcaattacttgcctatcaactgttctatcgattgatttcaaaccttcagaaatagaagttggagtagttacagttgaaaatcctaaattcaggattctttcagaagcagagattgacgctcaccttgttgccctagcagagagagactaaacattgtagttagtttaccaaatccatgacgccacttgcctgtgtctggtagcaacagaccaacatcatggaggcccctggattgaaaaaggaacctctcccactcctcctgccactgtgaagtggttaggactctgtataaataaaaacagtgcttttggaaaawaaaaaaaaaaaaaaaaaaaa

SEQ ID NO: 2623 - DNA, 635 bp, Canis familiaris
gtaaaaagtttgtttaatagtgttaatacccgacagtgtamaaagaarmtgtccaaatctctggctggggagacggtagctgtgaaccttggcttctgtacatcttgcctcgggraaatcggcagttgctgcttccttctgagtaaatttggcgttagataagtgttaacagataaaatatagcggttttatggattggagcggaagtgatgraaaaaaataacagccaggaaaccttaaaagtaacatagattgacagaggtacaggtgaatcatcacagtcttaaacaggctaactactcttgttgaaaagattccagttgggtcaaaaatgactctgaaccgtgaaatgtgatgttcacgtttgtataaaacwaaggattaaaggagtttaaagataatgaaaacctttaagtcatagaaattgaagtaggaagcaacatttgtatcagaatttaagctataacaaagttatacaacacagtgtaggatgtagcatttaagaatctttggtagaataagcgcgttcatatgcagactgttcartatcttgatgtgagtggtaatattttwaaaatagttcattttaggtatttaataaagtaatttctttttttaaaawaaaaaaaaaaaaa

SEQ ID NO: 2624 - DNA, 798 bp, Canis familiaris
cgggaccgaaacaatttaacacggaaacagctatgaccatagggcctaataagtgacactatagaaccagttggtagcacaaaaagcaggctggtacccggtccggattcccgggatgaagaatgttaagatgattgccctttcagtggacagtgttgaagaccatcttgccctggagcaaggatatcaawgcctamaatgggcaggagcccacagraacaktacckttccccatcattgatgataagaatcgggaccttgccatcctgttaggcatkkctggacccggcagagaaggacgaaaagggcatgcctgtgacagctcgtgtggtgtttatttttggtcctgataagaaactgaagctgtctatcctctacccagcgaccactggccggaactttgatgagattctccgagtaattacctccctccagctgacggcagagaagagggttgccaccccggttgattggaaggatggagacagcgtgatggttcttcccaccatccctgaagatgaagccmaaaaactcttccctaaaggagtcttcaccaaagagctcccatctggcaagaagtacctccgctacacaccccagccttagtctctccgaggagtcggtgctggagctgttggcgtagctcagtgagccagaggatccgggctgccagtcatgttctcctacaactgttccgtcaaaacatcctggggtgatcacagctaaggcctttaggttgctctactactggctyattaaatgaaaatggcactaaaaaaaaaaaaaaaaaaaaaaaaa

SEQ ID NO: 2625 - DNA, 664 bp, Canis familiaris
gacaatcgcggttctctagkgcctagraattgagtyttggsmtggtcagcatctggcagtcattgaatgatgtctgcctttccagtcagtgtggccatgggatcccmagtgtcttgttgctttgtggcaggatttttgtgtgacyttttttkktkttaatggaaactatttcttgggctgcagtaaactttctgaagcctcagcattgtgtttctattagccatcaggagggtctccaactagaaatacttgtccctgcttgctcyttcttcctgtcagcgttcagcattcttgtcaagttgcccagcttggagttgtctgtcatgtactagtgtcccattgttatagctagaggagcagaaatctcctgatgcttcatagcttgaggaggtctttttacctactgccttggtaagcagttggggagaacatgggcatcatttctgtgtttgtgagttgtcctggttggataagattgggacttaggtaagattccccttgggacatccttaatgtttattagcttctaactagtgtcgtaagcacagtgccagaaattggagatctcagttctgttcatggctttttattgaccgtaactaataagcttcctaataaatctttgccagacttaaaaaaaaaaaaaaraaaaaaaaaaaaaaaa

SEQ ID NO: 2626 - DNA, 614 bp, Canis familiaris
gcctggcgacatgcccacgtgctcaatggcctggcgggacagctgtggcaccaggaccaggtggcggctggcctagctccccagcgcctctgagracacccccagctgatccctactcccaactctcaggcgacctaaggaagagggcggcaaccaggtcctaaggccgaggcaggaatatcgatggcatcctgagggctggccagaggggcctgtcaggagaatggtgccctgagaagcctcctgtcccagcagcacyttccttgcagaattcatggcagtgagatgggggcacaaggctctgtgggccaggcgactgagggcacgtgggtgccccccggccttctcyctctgccctgggtgtgtgtgtggggtctagactccagaagctgaggaactataggggcagggcccactggcctcaagcttctcccccaactgcctgttacccactccctttctgctgtacccagagatggtgactgggaagagggttgtcccagccgggccttcgatcaagagcctgtattagttgaggtgacaccatctgctgtaccagataaaccccacaaatatcggtgrmwwaaaaaaaaaaaaaaaaaaaaaaaaaaaaa

SEQ ID NO: 2627 - DNA, 615 bp, Canis familiaris
caggraagagatgcttcggaaggwacgagarctggaagaggcgcggaagaagctggcacagattcggcaacagcagtacaagtttccctgccttcagagcttcgggatgagcactagggcagccacttctatttaatgcagacccagcccagagactgtgcctgccactacccaagccttctgggctgtcgggcccaagccgcccaaccccagcactccccmaagtgcctgccmaaccctgggcctggtcctccccagtcccgctgcacatcccctgtcccctccctgactccaagtgccttcatgccctagggccccctaagtgcctgcccctccctagagtattaacgctccaagagtattattaatgctgctgtacctcagtctgaacctgccagggctcctgcccgctccaccctgccagcagcttccagccagtccccacagccttggctctactcctcttttttttgatactgtctaccccaacccccaactacctgtgggggccacggggttgtaagccccmaacaggtcatgctcccaataaaagtgattccgcctgcraaaaaaaaaaaaaaaaaaaaaaaaaaaaaaaaaaaaaaaaaaaaaaaa

SEQ ID NO: 2628 - DNA, 666 bp, Canis familiaris
ctggcctctaagaaccggagagtccctagtgcacacctgcaccaggwscagcaccctcgcaggcgamacagtccgggccccgcagccctcgactcsaaggtaggagaagtacactgccccaagcagcagggctctggctggtgcccccggctgacacacaamaacataacggccatacctgtcgtggacctcggggacaaagmagagcrctgagggttgatcyttgcactcaacaactccytgggcacacccctctgagtctcctctccggtcccagccagcctcgccacctgcccacagtcagccctagtgccccctcagcacaaagtcaagaccgtggtcccaggagtgttcatcttccaccagggtggttaggcagtggacgcccctgtggctcagctggcgcagttgcttcaactgcagcacttggccctgaaagtcgcctccgagtcmaactgcccctgcctgtaggcccgtggcgtggtaccagcccagctgtacagcagactgccaggcagatccccccggcctaccagcagcctcagcccagtgcccctggccagtgtgctcaggctcgggcctgcctggcccacgcccctccctggctagatccagtgttcgcattattctcctgcaggatcactwttttttttttttttttttttt

SEQ ID NO: 2629 - DNA, 666 bp, Canis familiaris
gaccggagattcttggcctctcagggatcacgtgtggacgtggtccwsgtcgtgggagcgtccgctktgtcaggcccggggcgtcgggagctgagsttccatcctcttcatgtgacggggttcgtcgtcccgagaccgaccacgggggccgactgtgtgttkttgtattgccggtatggacagcacctggagcccctgtttcktctcgygactcccaactagraacgtgagttgttgaggracccgtgtggggagactcagaggagaggccagggtcggtcggagcggtggacgggtgtcagtcgggatcacgggggagtcgtgtttcagttctggcaccagggtcctcacaagtagaaggtggtcccaccaatccgtcacctgcggggacaccgagtcgaccgcgtcaacgaagttgacgtcgtgaaccgggactttcagcggaggctcagkttgacggggacggacatccgggcaccgcaccatggtcgggtcgacatgtcgtctgacggtccgtctaggggggccggatggtcgtcggagtcgggtcacggggaccggtcacacgagtccgagcccggacggaccgggtgcggggagggaccgatctaggtcacaagcgtaataagaggacgtcctagtgawaaaaaaaaaaaaaaaaaaaaa

SEQ ID NO: 2630 - DNA, 637 bp, Canis familiaris
aaccatagttactgtgcctctttcgtgaaacagcgggcgaccccaactcttagagcgactaaaatgggtgacaggtagctgggacctaggctctcgtaccmtgaaggttgttttgcttattgtatatttgtgtatgtagtgtaactattttgtacmatagaggactgtaactactattataggttgtacmgattgaaatttagatgtttcmttggctgtctgaagaggtgtggtttgtcttttctatagagatctacgtaaaaaaaaaataaaataaaragaaaaaaaaaaaacgacacgaagaaaacccacacctaaagaaattttaagaatttggcaccactcggtcactttgtgtaatccgaaatcttctagttgctgaatatctcgaagtaaattcctgttcgctgaagtcttttgattgagctgacyygaatactttgaaaaatgacccgttctagctaatgaaatgaatttcgaagtaggggtttctgcatattacctgtatagtagttctatgcatacgtttctgtgcatgttctctacacagttgtaaggtgtcmctgtatttaactgttgcmcttgtcmactttcmataaagcatataaaatgttrawaaaaaaaaaaaaaaaaaaaa

SEQ ID NO: 2631 - DNA, 756 bp, Canis familiaris
cactcgccgttcggcctggtttgccgggagatccggtgctggtctaaccctgccttttgacatagtcctatccgcctgctataagcctggtgaggccgagcagcacggtgaccgccgcccacatccagaagttcacgtttgtgtgcatggccttgtcgctcacgctctgcttcgtgatgttctggactcccgacgtttccgagaaawtcctartagacatcattggagtggacttcgcatttgcagaactgtgtgtggttcccytgcgcatcttctccytcttcccggttccagtcaccgtgagggcccatctcaccgggtggctgatgaccctgaagaagaccttcgtcctggcccccagctccgtgctgcggatcatcgtcctcatcaccagcctcgtggtcctgccctacctgggcgtgcacggggccaccctgggcgtgggctccctcctggcgggctttgtgggagagtccaycatggttgccatagccgcgtgctacgtctatcggaaacagaaaaagaagctggagagcgagccggcggcggagggcgaggactcggccatgacggacatcccgccggcggaggagggcgcggacgtggtggaaatgcggggggacaacgactgagcgcggggcccgcgggcggcgggggcagcgcggccacgtgacccccccccccccgacccgcccgacccggggcmgcggctgcgcctcccctcggacaatctgcggcccrmkgacggcccaagga

SEQ ID NO: 2632 - DNA, 601 bp, Canis familiaris
atggccttgtcgctcaacgctctgcttcgtgatgttctgactcccgacgtttccgagaaaatcctaatagacatcattggagtggacttcgcatttgcagaactgtgtgtggttcccctgcgcatcttctccttcgttcccggttccagtcaccgtgagggcccatctcaccgggtggctgatgaccctgaagwagaccttcgtcctggcccccagctccgtgctgcggatcatcgtcctcatcaccagcctcgtggtcctgccctacctgggcgtgcacggggccacwctgggcgtgggctccctcctggcgggctttgtgggagagtccaccatggttgccatagccgcgtgctacgtctatcggaaacagawaaagaagctggagagcgagccggcggcggagggcgaggactcggccatgacggacatcccgccggcggaggagggcgcggacgtggtggaaatgcggggggacaacgactgagcgcggggcccgcgggcggcgggggcagcgcggccacgtgaccccccccaccccgacccgcccgacccgcccgacccggggccgcggctgcccctcccctcggacaatctgcgc

SEQ ID NO: 2633 - DNA, 623 bp, Canis familiaris
ctggtaaagcttcatttgaatatgtaaattcagtttaggctatgtaaaatttttgctaatgtcatcattctgaaaacaaataaatttacgcaatacattcmarattaccattgtaaaaaagtgtaattgtaaatcttccctaaactctattttctgatgaaagcagacactgtgttcttgaccaaaatagcacatctgtttcaagtttctcagatatttctgtttactcctgttttttgacacttgctgtattataacttacagtatctataatcagtgctaagttgataaagcctaattttctctgattggtctagaaagatggtattttcagttgctaagatactaaattggttttaaaacatcatgtgtataatcaggctgctcacctgaacatttctataattactagatgtattagaaatatttgttgcatttagttaaatcttcaagtttagaatttttttctcgcagaatttataaagacctgtcaaagcatacaattcaacaggcctggggaatgggctgatttacaaaaagtagagatttattaaaaaatatgtttatgttatcgacatctaataaraaaaaaaaaaaaaaaaaaaaaaaaaaaaaaaaaaaaa

SEQ ID NO: 2634 - DNA, 664 bp, Canis familiaris
agaacatttctcaatcaccgggctggtctcggtcgaccaaccccttgttccggagagggagacacccacagatgccagcctctttcccgttccgtttgggggatctgttccacccgggttggcgtttctccatgtctatcctcgtgacaacatactccaggccgtgaccaactttcaccgtcggtatccaaaagacttgaggggatctgacgtcgtgattcaggagcgcaagactcgtaagaacttgtaggactcacgaccgggtgagggtcgtgcgtacagtacgagagtaagggacgtcgggctcctcgtccttgtggacgacactccgatctccgctgtacatttatgacactaaggaccaccaaagaaagtgtccgattccctatcgagggtcattaaactcggttgacgtatcagacttcgtgggttgtcgtcaactgtccgtctcaattactttcgagttgattacaaccaccaaggagtctcgtgatcaagggataactggtcagagggaaattacgactatgtggacaaggatgttcgtcggtcgtggttgtacccggactcctcagacccgacttgtcgagggacggaaatagataggaataaaaaggaaagaattctgaaaaaaaaaaaaaaaaaaaaaaaaaaaaaaaaaaaa

SEQ ID NO: 2635 - DNA, 664 bp, Canis familiaris
tcttgtaaagagttagtggcccgaccagagccagctggttggggaacaaggcctctccctctgtgggtgtctacggtcggagaaagggcaaggcaaaccccctagacaaggtgggcccaaccgcaaagaggtacagataggagcactgttgtatgaggtccggcactggttgaaagtggcagccataggttttctgaactcccctagactgcagcactaagtcctcgcgttctgagcattcttgaacatcctgagtgctggcccactcccagcacgcatgtcatgctctcattccctgcagcccgaggagcaggaacacctgctgtgaggctagaggcgacatgtaaatactgtgattcctggtggtttctttcacaggctaagggatagctcccagtaatttgagccaactgcatagtctgaagcacccaacagcagttgacaggcagagttaatgaaagctcaactaatgttggtggttcctcagagcactagttccctattgaccagtctccctttaatgctgatacacctgttcctacaagcagccagcaccaacatgggcctgaggagtctgggctgaacagctccctgcctttatctatccttatttttcctttcttaagactttttttttttttttttttttttttttttttttttt

SEQ ID NO: 2636 - DNA, 349 bp, Canis familiaris
gatccccccgtccccacagcacatttcttggagatgttaaagtccgagtgctatttcaccaacgggacggagcgggtgcggttcgtggaaagatacatccataaccgggaggagaacgtgcgcttcgacagcgacgtgggggagtaccgggcggtcacggagctcgggcggcccgacgctgagtactggaacccgcagaaggagctcttggagcgggcgcgggccgcggtggacacctactgcagacacaactacggggtgggcgagagcttcacggtgcagcggcgaggtgagcgcagcgggcgcctggtgctgaggtgtgtgacacacagacagacagacagaggct

SEQ ID NO: 2637 - DNA, 656 bp, Canis familiaris
gcctgtcttctctaccccgcgccccttccagcgcgtgagcccagagagagagagaggtggggccgagacytgggctgtgagaccttccktccctccccatagaggagtctccccwagacacagtgcgggctcagmcctgcttcggggctcctgaggccggccgggcctgctggctggacagacccctcctctgttcttgctgcatccctcacctcctgcccgtttatttaagccccccaaagatgccccttctccatcccgaaacacagaacctgacacagacctacttgctgtgggtgctgccaggggtgggggtcagcacctggtcccccatctcctgagcagccgaggcgtgaggctggctttggtcttgcccacttgtcctccagcccagctccgagcacatgtagccactgagatttgctctcacctcaggggtgggctccttccccttcagtgccaggaaccaccacccacccccagcctcctgcagccttgacctctcaggatagaccccaggccttggagctcagagggtcacscctgcacccacccctccatctgctccttccctagtgctttgaggtttkgtggttagaagctgcagctggcctaaggaagaaaataaaaaagaacactttgmawraaaaaaaaaa

SEQ ID NO: 2638 - DNA, 638 bp, Canis familiaris
gtctaaaggggtctgttttgggaagacatttcctgttattacctgagaagatctaccccagggagaatccgagacatcttgcctactttcctgcctagctctcctgtatcccatttcgttgcatacctgttcctttttggggagttgtttatgccatgatgttctggtatttatgtaacaggactatgactaagtatattgctctatgttcattctggttaagggaatattgagggtaggccaccagattacctgggctgggggtagagagatggcaacaaaaactgtaggatgatgaactttttaattatgatttaattatcacatgattatagatggctgttttatgttcagaggtatacttacatatcagatataccccaaagagatactcacattgtgttgaaaagtcaagctatgactggaatgaaccatgtattcccttgtcttttactttatttctgtgacatttatgtctcatgtaatttgcattacattggtgggttgttctagtactgtatttggctttttctttaatagattgatatttcatatactataattgtaaatattttgatacaaatgtttataactctagggatataaaaatagattctgattcccttcaaaaaaaaaaa

SEQ ID NO: 2639 - DNA, 635 bp, Canis familiaris
cgaactacattattatgggccaagtgggtgaaratgggcgaggcmaaatcatgcccaacagctttatcatgatgttcaagaccmagaatcagaagctcctggatgccytgraaaacmagcmatgttaacmgtgaactgtgtcmatataagctgccttctgtcgttgcctttgaaagatttctatttttctcmgtagaaaaawaawacmachaccaatcttacmatatccaatcttgagcattcagaaagatttactcttcacacgatgtaggtacgagagctcggctctcgctgatggaagttccggggctgcgcggagaggagcagacmggtgattgagagcctgcaagcttggtacggccacaggagacggaatgtatcgagtgttggcagtttggaagcagtttattcatacatctctgtgaaagggtatttacagacmagttgtgtgaagatgtaaaaaagagattttataagtgcmatatttatagtgatatttgttttaccttccagcgtttgctctggggtattacagtcttctcttgcatttttttttaagtccatgctttaataaaatatttttaaacgawwaraaaaaaaaaaaaaaaaaaaaaaaaaaaaaaaaaaaaaaaaaa

SEQ ID NO: 2640 - DNA, 635 bp, Canis familiaris
tgactggraccagcacaaggagctggagaaatgccggggcgtcttccctgagaacttcacagagcgggttcagtgagggccacggctggtgcagctctctgggcgtgtgaagaacaccttttcccggaamaatgtgtgttttggtttttttttttttttgatttttgtttttaaactgtttgaaaagcacaagggraactgagaggagaggcctaagccaccgaggtgttctcccmaagattaggtggttttccmaagagcctggtttcagcaagtccagtggaatcaccagtgttcctgaagctgctgtgtcccctagttaggttctggccacccaccctgcgccccgcatgtgtgcctggccacagggcggggctaggggctgccaagccaccttgcttgcctgaagctttggccgagcagcctgggtgagggtcctctctcctggcagctgctgtgggtggggttgggtctctccagagagctcagggcccagacatcagcccggcctggccccaccctgcagaccgtctgtgtgccgtttgaaaataaatcttagtgttccacagcaaaatgaaacmaactggcgaaammaaaaaaaaaaaaaaaaaaaaaaaaaaaaaaaaaaaaaaaaa

SEQ ID NO: 2641 - DNA, 637 bp, Canis familiaris
caagcatcagttacgagaggcctgcgctgcacytggttgccctgaacacgccattktctggggacatccgagctgattttcagtgcttccagcaggccagggctgcggggctgttgtccacctaccgagcattcttatcctcccatctgcaagacctctccacggtggtgaggaaagcagagagatacagccttccmatagtgaacctcaagggccaagtacttttcaacaattgggactcaattttttctggccatggaggacagttcaatgcacaggttccaatatactcctttgatggccgagacgtgatgacggatccttcctggccccagaaggtcgtttggcacggctccagcacccacggagtgcgtcttgtggataagtactgtgaagcgtggcgaaccgctgacatggcagtcacgggactggcctccccactgagcacagggaagattctggaccagaaaacatatagctgcgctaataggctaattgttctgtgtattgaaaacagtttcatgacagatgctaggaagtaatgaccttccmatgattcctaagagttttccagtttttcttatgtgaagagttgacactgaaatctaaaawrwaaaaaaaaaaaaaaaaaaaaaaa

SEQ ID NO: 2642 - DNA, 654 bp, Canis familiaris
gtgtgatttgagctaggtaacatgctcctccctctgcttttggcaagaccagctttgcagtgaccgctsgagtacattagattctctgcacgccccagktactkgttacttcccgtgccamattccttagactatgatcagtgcttttggggggtgctgaggcmmggggattcttttcaacagcctctcacagggaatgcttttcatcctctcccttttgtggccgcccagcaggcacaacagatctctccacataggggctgtcagtcaggggcagtgagaattctcaatgcmcaagcgatsggaatgatctttgtattctcaactagcagggtctggcagggaaggagaggagtgtggaaaccccagccaggtctgtcttccgaggggtagcagtggctaaaatcggagttctcctctgtccctcaattgtgaatgggccttgctgtcttcactagaaaaacttaatggcatatgttaatgatgtgttaaaactgtccccccaactttttcattagattggcgggatatcttggctttgtcacacagttaaagactgaacgtgacgttctttgttaaaaatgamwwrmarrawwaaaaaaaaaaaaaaaaaaaaaaaaaaaaaaaaaaaaaaaaaaaaaaaaaaaaaaaaaa

SEQ ID NO: 2643 - DNA, 661 bp, Canis familiaris
atggccgacgtcaagttctccttccaatgcctgggcgcatgtatgcacctgcctgggtggcccctgaagctctgcagaagaagcctgaagatacamacagacgctcagcagatatgtggagttttgcagtgcttctgtgggaactggtgacgagggaggtaccctttgctgacctctccaacatggagattggaatgaaggtggcactggaaggccttcggcctactatcccacccaggcatttccccccatgtgtgtaagctcatgaagatctgcatgaatgaagaccctgctaagcggcccacagtttgacatgattgtgcctatcctggagaagatgcaggacaagtagagctggaaagcccttgcctaaactccagaggtgtcaggacacggttaggggagtgtgtctccccmaagcagcaggcctctggttgcctcccctgcctccagtcatggtactaccccagccatggggcccatcccctgcccccatccctaccmctgcagcccccmaaggggctaggctcagagctttgtcacttgccacacggtatctcccagcatgggagggaccagccctgcctgtcacaataaagtttattatgaaaaaaaaaaaaaaaaaaaaaaaaaaaaaaaaaaaaaaaaaaaaaaaaaaaaa

SEQ ID NO: 2644 - DNA, 654 bp, Canis familiaris
ttctagaattttagattagggactgtyctactgtgaataaaggttctggctccgttagcccagcctttgcttccgcctgcttgggtctgggatctcaagcagcrctgttttgttgtgaacattgtgctctgcacaccgcgtttgtttttwaaaagccgtctcttcaacaatccaggggttccktgacctcatttacttcctgtctccactctmgtcttaagtcgtgacatttgcccttagcagtgtcagtggcctttatctccggctgtggcacctgctctttgcctytggaagktaaaccctgtctggaacccccacctggatccatctctggatcttgggayccaaggtgggaccttctgaacgatgagcttgactttagcagtgctggtgctgctgagcatggactgagcacctaggacttgcagaggccacactgcatgggccctgctttgggttccctggggcgtgctgcaggaactccggaggacaggaaagagccggcatcgcagcatcctacactgtctatcgtgctgtgtcatttcagggaggagaaactgataaactacttgccttctagagatctttgtgaaaaattaaaaaaaaaaaatagctcmaaaaaaaaaaaaaaaaaaaaaaaaaaaaaaaaaaaaa

SEQ ID NO: 2645 - DNA, 638 bp, Canis familiaris
gtccccagagcctgtgccatgcccagcagaggacaggtagcctcctggaaccactcacccaacgctgtctgcctgcactgttcctggcaccacctggagggccacggtcacccacagttctggctgcccatgacctgcatcatggtctgcggggtagcctctgtccacttgcatactcaggtgtcctccctgcagtgtttctgttttccttctagccaaccattttgcctgttttcctgttcaaaatgtatgtgatagtttttgtgaagctgaaacccctgggtcctggagggaaattggcccacagtggagagggaccgtctgacctctgatagtccctgcttctcctgacactagcttcacagaatagccagctcctgtaccccagcccagagtcctgtcctgtaccccaggacaaggtgggccaaggggctgtctggaccaaaggtggaaggggccctaggtggctgctctggcccaggcatgagtacctcggtgttccctgtccctctcttagtatctcaccagctctgtcttagctttgtacctgttgacgtgtttctgagagtctagggtctgcacctttgtatataataaatgcaaacatttgggaaaaaaaaaaaaaaaaaaaaaaaaaa

SEQ ID NO: 2646 - DNA, 874 bp, Canis familiaris
atgagagactggctcaagaatattctcagcaactctatgagcaaaagcctgaacatgctggaatctaaatgaaaagcaaagaaataaagtcaagaaaatttacctggatgaaaagaggctcttggctgggggaccattccattgaccttctcttaagggactttaagaaaaactaccacatgtatgtatatcctgtgcactggcagtttggtgaacttgaccaacatcctatggacagagtcttgactcattctgagcttgctcctttacgagcttctctggtgcccatggracactgcatwactcgcttctttgaggagtgtgaccccracaaggataagcacatcaccctggaggagtggggccmctgctttggaattaaagaagaagacatagwcgaaaatctcctgttttgaattaagatttgaaagaattcmaacattccagcatcctcctccatttctgaccactcctgaaaatatatgcagccacaatacttgtagatttatatttagcmaaatgtttgcatgtctgagaagacmatgagagtaattgcttgctaacagtgtatgcaccmagcatttaacattagctttgaaaataaaactttaaaattaaaymaagtcaacatatgcmaaawactgtgtgctctttgtgaacmagagttttaactcatccctctctgcatccatttatgaaatactaattataaaacttgaagaaaacactacattcattttgttcataatatcatgtacacttcaagaaaatggaataatgttattttgtttttaatgtgcattattttcagtatcttaatgtcctaataaaaatctaaatctaamwmmaaaaaaaaaaaaaaaaaaaaaaaaaa

SEQ ID NO: 2647 - DNA, 637 bp, Canis familiaris
gggcctggagttgaattgtagtcaatctgcatgcgaccataggcttggcccccagascctgctgcatggccttagcagtgcccaaatgggcaggaggtcycccacaaagctggagaatgccaggtgggkccgggctttcctacagaggccyggctgcagggctcggccatgcctctgtgtctcaactctgcagcgaytgtaccctgtttttcccttccttccccaggaggggcttgacacactgcctgaatggaagccagacaggcttatggttcaccccctcacacccccacttccctgagggrcactagcctccccagggttcacctgtgtacaagatttagatgaagctcaaggctgacatttcagggcagttctcaggattgccatttccttctatgcctatgggtttaactttatattttttaaatcacaactttgatacaaaagcatttttacctatttggagatgccaatcttacttttgaatttagcttactaacttgtatctgggaacaacatgtgttactttggttcctatggaaatggggcagtgtgaaattaccccatacctgacatcttgggtcccaaataaacagtgttggaattcaaaaaaaaaaaaaaaaaaaaaaaaaaa

SEQ ID NO: 2648 - DNA, 619 bp, Canis familiaris
gatgaatgtctgtgataatctcggagaccacctgagttgggaacgtgtacgtcargtttcgccgagaggaagackcgggaaaaggccgtgattgacttgaacaaccgctggtttaatgggcagccaatccacgctgagctctccccggtgactgacttccgagaggcgtgctgccgccagtacgagatgggggagtgcacgcggggcggtttctgcaacttcatgcacctgaagcccatttccagggagctgcggcgggagctgtacgggcgccggcgcaagaagcatagatcgaggtcccggtctcgggagcgtcgctctcggtctagagaccgtggtcgtggcggcggcggtggtggcggcggcggcggtgggggacgggagcgtgacaggaggcggtcgagagaccgtgaaagatctgggcgattctgagccatgccgtttttaccgtatgtctgctagacagtgttgtagttgattgaccaaaccagttcataacgggaattttttttaaaaaacaacaaaaaaaaacmaagatgggtttctgaataaaatttgtagtgatacagtaaaaaaaaaaaaaaaaaaaaaaaaaaaaaaaaaaaaaaaaaaaaaaaaa

SEQ ID NO: 2649 - DNA, 629 bp, Canis familiaris
caccttagccagccctggctctccctagtggagatscagtctgaggacatccggtgatcctggtacggagcactcgatacagactttgtatctktwaatcagtgtagccgccgcggccgtgtgcttctgctgctctggagccggagcagtaccacttgcgtgccatctgtccccctggcgtcgagattcaagactgaatctcccctacgggacagcagccctacatccgccccccaccttcccgtgctgtgtcctgtccactactctgacagtgcccgtggcacacggccacgagtggggagacatgagcctaaaatttaacccaactgcagaccctgagagtcctttcggaggaagcctgtgtgcggtgttttaaccttataaaatggatgagcgcgaaggggaaaraaaccccttgtaagcaggtaaacgtagaagcttcttttgtatcccaggtgtggcttcttcaacggaccaagctgcgatgcagtattgatttgacagggcctgcacttcagtgtctgtctcgaacggctccacatgatttctgtactgcaaaataaagccmaamytctggaaaccmaraaaaaaaaaaaaaaaaaaaaaaaaaaaaaaaaaaaaaaaaaaaa

SEQ ID NO: 2650 - DNA, 685 bp, Canis familiaris
agaaggcttaaagcattctacarggggktgctcctctctggatgagacagataccatacaccatgatgaratttgcctgctttgaacgtactgktgaagcattatataagtttgtggttcccaagccccgaagtgaatgttcaaaggcagagcmactggttgtaacawttgtagcaggttatatagctggagtcttctgtgcmattgtttctcatcctgctgattctgtggtatctgtgttgaataaagagaaaggtascagtgcttctcaagtccttcagagactcggatttaaaggtgtatggaagggactctttgctcgtatcatcatgattggcmctctgactgcactacagtggttcatctatgactctgtgawggtctacttcaggctccctcgcccacctccacckgaaatgccmgagtctctgaagaagaagcttgggttaactcagtagattgatcmaagcacaatgtggactgaatctgcttgttgatcagtgttgagaaaagtgcmagaggaacttttatatatttgacagtgtaggaaattgtctattcctggtataattactgtagtattcttgcctaaggcmagagtttcmaacccmctggtgaaataaacccmactattaatgaaaawaaaaawaaawaaaaawaawaaaaaaaaaaaaaaaaaaaaaaa

SEQ ID NO: 2651 - DNA, 701 bp, Canis familiaris
actcgtggacatgtattcgssggcgacagcgcgtgtacggscycgcgaccacgsccssyttctgcycccgcbttctgcsttccacgwcggcwacttctcgctgstcatccgcgcggtggagtatsycgacgaggggctgtacacctgtracctgcaccaccattactgccacctctacgagascctkgccgtccgcctggagktcacggacwacccccaggaggctggcgcgcactgggacggcgagaaggaggtgctggtggtagaacgcggcgcgcccgcgctgctaacctgcgtgaaccgggagcacgtctggaccgaccggcatctggaggaggcgcagcaggtcgtgcactgggaccgacagccgcccggtgtgccgcacgaccgcgctgaccgcctgctggacctgtatgcctcgggtgagcgccgggcctacgggccgcccttcctgcgcgaccgcgtgkcggtgggggtggacgcgtttgcacgyggcgacttctccctgcgcatcgacccgttggagcccgctgatgagggcacctactcctgccacctgcaccaccactactgcggcctgcacgagcgccgcatctttcacctgagggtcaccgagccagtcgctgagccgcccccgcgggactcgccgggcaacggttccagccacagcggcgcccccggcccagattccamcytgccgc

SEQ ID NO: 2652 - DNA, 698 bp, Canis familiaris
ctaccagaagaaaaagttgtgcttcaaagaaaacgccgaccaaggtgacaccagcacgaaaaaccagcagagcaccaacgccgagcaaccagttcagtggactcttctggaaaaataaaagcttggccacaaatgcgactctgtgacaatccccgcaggaggacgagtctggcctgctgcgtcctcccgacaaacgcaggcaccagggcagagccagccacgccgggatccagccccatcctgtccatgcctttgttcacgctgagactctttcttttgaccttgacatgcgttgtgcctgtttgcaccacgctgggtagatgagggatactcgtgccgcgggttgcatcccgaggggaatggcgctcacgctatccgtggccgttaggcgtttccccgtggggtgtgaaaggccgatcgtccatcacagtcagcccatcaatccaacgctgaccccacaaagttcccccacccggaactctgggtcgtgtgaccaacaacgtgtgaattaaacacaaccgtcccctggcattgacccttggatacagtgacataagccttcarttagtgtcctcagaacctccttcattgggtaagattttttttcacaccacactaataaaaaaataaaaaaccmarwamwwwwwamttaaaaaaaaaaaaaaaaaaaaaaaaaaaaaaaaaaaaaaaaaaaaaaa

SEQ ID NO: 2653 - DNA, 605 bp, Canis familiaris
agagcaccacgccgagcaaccagttcagtggactcttctgggaaaataaaagcttggccacaaatgcgactctggacaatccccgcaggaggacgagtctggcctgctgcgtcctcccgacawacgcaggcascagggcagagccagccackccgggatccagccccatcctgtccawgcctttgttcacgctgagactctttcttttgaccttgacatgcgttgtgcctgtttgcaccacgctgggtagatgagggatactcgtgccgcgggttgcatcccgaggggaatggcgctcacgctatccgtggccgttaggcgtttccccgtggggtgtgaaaggccgatcgtccatcacagtcagcccatcaatccaacgctgaccccacaaagttcccccacccggractctgggtcgtgtgaccrasmacgtgtgaattawacacaaccgtcccctggcattgacccttggatacagtgacataagccttcarttagtgtcctcagaacctccttcattgggtaagattttttttcacaccacactaataaaaaaataawaaaccmwawaaaraaararaaaaaaaaaaaaaaaaaaaaaaaaa

SEQ ID NO: 2654 - DNA, 654 bp, Canis familiaris
tgacaccagcacggtatacccagcagagcacctacgccgagcaaaccagttcagtggactcttctggaaaatgaaagcttggccacaaagtgcgactctgtgacaatccccgcaggaggacgagtcttggcctgcttgcgtccctcccgactgacgcaggcaccaagggcagagccagccacgccgggatccagccccactccatgctccatgccgcctgttcacgcttgagactatcttcttttgacgacgacaagcgtttgtgccgcgttggcaccaccactggtgtagaagatggaagagaatacgtcgccccggcgtgtgtcatcatcgcacggagggagtaatggctctcacgatatccgtgccctataggcgtttccccgtggggtgtgaaagcccgtatctgtccatcacagtcagcccatcaatccaacgctgaccccacaaagttcccccacccggaactctgggtcgtgtgaccaacaacgtgtgaattaaacacaaccgtcccctggcattgacccttggatacagtgacataagccttcarttagtgtcctcagaacctccttcattgggtaagattttttttcacaccacactaataaaaaaataaaaaaccmaaaaaaaaaaaaaaaaaaaaaaaaaaaa

SEQ ID NO: 2655 - DNA, 702 bp, Canis familiaris
atcggatgcccgacattgcgaactcaatagatttcttcttctattcattggattcgtctgtgtcctatggagttttttcatgsctagagtattcatgagaatgaaactgccgggctacctgatgggttaaaaaatgccttttgacacagaaatccgtggatattggatttgctcctgttaatgaagttttaaaggctgtaccmatcctctgatgtgaaatatggrraaawgagtgmagcagcagaawagaagcatctcgtgagaaataggratcatattaaagcttgaactagaatgtcttcttggtatcaaagagacmaatttctcacagtatttctcctgctggcctgtactgacacaccmatgatgtttagtggcatttttttcttagtttttcatttcttaaagmawatatactcccatttccacmactataatattgaataaagtgattatttcttatagcccccttaacattttgtggagataacatttctgactttcaaaaattaatgtaaaatcaggaagcgagatcccctaagctgagaactctgatcagctttacctatggtgctttgcctttaaacagtgtgacagtacattattcagatatgtgtgagactgtttctgcacaataagatgtatgaaaggagcagaaataaataatttttctaattaaaaaaaaaaaaaaaaaaaaaaaaa

SEQ ID NO: 2656 - DNA, 733 bp, Canis familiaris
gtttcatcagctgtgcctttgcctgcttctcaatgacatctgtcattcatcccaaacttgcattcaggcatgccactcaggtagctcttcatcaccacccggcckgacacatgggcactcagcacctgcccctgtggggacatgaggaggttcacactttccagcacatccraaaagagctcattccggcgatacttgatgccctcccgccgccagccaatctgcccagtcacctggctggtgatctgggattgctcttcttttgtctgatgctggctcttgataccctgctgagtgatgaaggttttcagtgctcctgtctctgaattctgtggatagccaaagtccaggatctcatccagtagctcatatatgagcacaaaattgttcttgatgttctcctcgctgatcttgccaaagtaggcagccattacatcacacatcttatagaggaattcgaagaccatggcagcattgacattttgcttggtgacagctgccaaccagatgttggaccgcttaacatggaagaaactggtgcgagcgatgttggtgacggggctgcgcacctgctgccgggcgtggataacattgactcgaaaggcatccactgcattcctcccgatgtcatctcggtagacccgggagatgagcacctcccccttgtgattatagatgaataagcctccmatcatggcggcagctcagtctccaaggcccatcgctctgagaa

SEQ ID NO: 2657 - DNA, 682 bp, Canis familiaris
gatggaaaaggaaatcacgccctcgaggggctcatcatccaagtcctcatcaaggcagctaagtgagagcttcaagagcaaagagtttgtgtccagtgatgagagttcttccggagagaacrrgagcmmaaagaagagaaggcggagtgaggactctgaagaagaggagctggccagcaccccccccagctcagaagactcggcatcaggatctgatgagtagagaggaagarrattctctctccttgggcttgccckgtcacaacctgcagtctctccacccgtgttttggtaccagtttctcatgaaatgcagcccttggattttgtgccatcttgacaagctctcctggtgacacgcacttcaccggggcagcaggggaggtgtcctcctctctactgcttctcaaggatggctcttgataacttggggagagattgggtggggcagtgcagtgcagggtggaatcctgagcctgctcctgcgaccttagggatacggctgctgcttctcctgttcaggttgctgcagcaggggtcaggtgagggcaggccatagctcctaacggggcctatttctacttttattttgtatttctggtctgtgaaaaatccaacatttaataaagggaactgactttggaaawaaaaatataaacaaaaaaaaaaaaaaaaaaaaaaaa

SEQ ID NO: 2658 - DNA, 786 bp, Canis familiaris
  misc_feature (122)..(122): n comprises a, c, g, or t, or includes no nucleotide
gatgtaattcaggcaggaaaagaatacgtggaacacactgtgaaagagagaaaaaaccattaaagaaggaaggaaaaccctaccaatgtggaggaggatgaccctgagctgttcaaacaacnagtatataaacacgaccatgaaactttttgctgagctggaaattaaaaggaaagagagagaagccaagagatgcacgaaaggaagcgacmaagggaagaagaaattgaagctcaagaaaaagcccaacgagaaagggagtggcagaaaaacttcgaggaaagtcgagatggccgtgtggacagctggcgaaacttccacagcaaatacacaaggggaagaaagagaagaaaaatcggaccttcctgagaccacccaaagtaaaaatggagcagcgtgagtgaccacctggggtcacagccacagaaccttttcccaactgtctcccctcctgctttgaaggactcattctttcctcccatttccaccccaacatagagtagtagttgctttttagtccattttgttttcaatacaatttaatatcgatcagagtaattcttttgtacattgaaatgaggggctcagtttaaaacgaaaccttccccaccccctactcttagaccaaccaggattggaaggtgccaccactggtgttgccttctcttcccacagcctgtaacttaatgttttgtacttcactgaattgtgatggttagaaacttcgtgtatagtttgtggaaatcatcccaattaaacatattgcttaaaaaaaaaaaaaaaaaa

SEQ ID NO: 2659 - DNA, 610 bp, Canis familiaris
tgggaataactggttcttcsyacgttccgtcctcctcctcctcctcttctggatgctcaccaactcsktgtcctgcccctgttttttgttttgttgttcttaaacctttctttgttcccctaaatttaatgctgcttggatttttgtcttgtttataaatacaaattraaatcctcccagaagcatcaaggagtaggagcagcccgcactgtggggttgttgccgaccttcagaacggcttgccaggcccatccacctgttccttctaacccgggttttactctttgtgaacactatgactgacgccctgggtcgccagcccaagccctgcctgtaaaggccaagagtaaaaccaagctattcccaacctcccaggtcagcatcctgggctctgtgtcctccytgcgagaggaaagatgggttttgtgagcacagagctgtggagatcagaatgagtgaaggcagtcaggtgggtttcactgctgccttttcttccctctgaatgtgagaacaccgaaccccgccactgctcctggctctctgcctggaaatgggctaataaatccttttccctcttgaaaaaaaaaaraaaaaaaaaaaaaaaaaaaaa

SEQ ID NO: 2660 - DNA, 639 bp, Canis familiaris
tccaacaagagaataggtctctaccgtcactktgatgagaccatcaataggtacaagcagtcgcgggatgtgtccaccctcmacagtggcaagaagagcctggagacagaacacaaggccttgaccaagtgagattgcgtcgctgcagtccaggctgaagacagagggctccgacctgtgtgacaaagtgagcgagatgcagaagctggatgcacaggtcaaggagctggtgctgaagtctgcagtggaagctgagcggctggtggccggcaarctcaagaaagacacgtacattgagaatgagaagctcatctctggaaagcggcaggagttggtcaccaagatcgaccacattctagatgctctgtagcctctgaccgttatcatcagcatgggcccagggcgctgcactttccgatggcagtttgggggtgaaggagggaaggccaccagcaaggccattgaatgctggcatctgtattttataaaaggccttcaaggaagtgaggccaggccctgccataggcaacataagcagcttagtttttgtcttaaaagtattcttttttaaaaaaaaaaaaaattaaatcccgttaaaaacaaaaaaaaaaaaaaaaaaaaaaaaaaaaaaaaaaaaaa

SEQ ID NO: 2661 - DNA, 678 bp, Canis familiaris
aaatctggagagaaagaactgttgtcttgtttaaagttgaatttgtggggcgatgaatgttattgatagaaatatttctcakgtcttaccaaatactttataatatascagagaatttaatttctcagtctgtgcatgtgttagttattactagttgataattatgttctgtctaggtcattatgacatgccattcsaaaaatttattctctttttctgattaatcctcgcaagtgaattatgattggtttcaaaacattccacttaaaagatcctaataagacacataagttgttaagattacagatgtgctcmaatttagtttttctgtgttctaataagaacttttaggcagttttaaggacmgagactaaaaattaaaatagttttatactgatggctcttaccacttatccagaagtaaattaacacttggaagcttttcaaagaagttttggctcttaactttgtttgttacttctttttgattattcgatcatatactaaatgttgaatgtgatccatacctgtgcaattaccactggatgtttaaaaacttgacagtggttgcctgcctaagactgtttgttttaccttatgttaaggaagttgggtattaaaaatgttacatctgcmmaaaaaaaaaaaaaaaaaaaaaaaaaaaaaaaaaaaaaaaaa

SEQ ID NO: 2662 - DNA, 696 bp, Canis familiaris
ccggattaccgggcgccccgccaccacgccgcttgcagggccctggtggccagacccggacgacccgctgaccccgcgctkgcagactggggccgcgctatgcggccaagcagttcgcgcggcacggcgccgcctccggggtggcccccggttctctgtggccgtcrcgggagcakctgcgcgagctggaagctgaggagcgcgaatggtgcccgagcctctgcggccatgcaggagtctgctgcgggtgcagcagctggcggcgggagcagaagcgttcaggccaggggarcagctcattgcaagaaggcgcatggccaagatgccacagatgattgagaactggcggcggcagcagcaggagcgcagggagaaggaacaggcagacaaggagaggcgggcccgactgcaggccgaggcccaggagcgcctgggctaccacgtggacccaaggagtgcccagcttccaggagctgctgcaggacctggagaagcagcagcgcaaacgcctcaaggaggagaaacaaagacagaagaaggaggcacgagctgcggcactggccactgctatggcccaagactctgcagcacccagctcctgagctagcctttcccaataaaacctgccacctgatggccccmrmamwrraraaaaaaaaaaaaaaaaaaaaaaaaaaaaaaaaaaaaaaaaaaaaa

SEQ ID NO: 2663 - DNA, 675 bp, Canis familiaris
gccccataagggacacctttgtgaatgcctctcagagcctgtwtgkcasmagccccrgagtcctgkgraatgacagcawdgtcracgtggagctgatcaacacctgggtggcagagaagaccaaccacaagatcacagaactgctggaaagtctgccctcggacacccgcbttgtcctcctcaatgctgtctacctgagtgccaagtggaagacracatttgatccrvaaagaacctctctggagcccttttacctcaaatcctctgtgataaaagcgttcatgatgaacagcaagwwataccctgtggcccatttcactgactcaactttgaaggccaaggtagggcagctgcagctctctcacratctgagcttggtgatcatggtgccccagagcacgaaacactatctcgaagacctggagcaggctctcagccccattgtcttcaaggccatcatgaagaaactggagatgaccaagttccagcccactctcctgacgctgcctcgcatcaaagtgaagagcaaccaggacatgctgacagtcatggagaaactaaaattctttgactttctttatgacctcaacctgtgtgggctgaccgaagacatagatcttcaggtttctgcgatgcagcaccagaccatgctggagctgacggagtccggggtgg

SEQ ID NO: 2664 - DNA, 649 bp, Canis familiaris
acctctgtccttctatgttctgctaaatcacacctggcctcataagagagaggaagttctgcctttgaggtttgtcttagagaaatgataagcttgaaatgttctccctggcggggacatggggttttgggatcttctgaaaaggcccagaaaaatggctccgttcaaacacagtgttctaggacaattggaatataaatattgtccmaaaatagwacctwaaaagtttagcactgtacacaagtaagtgctaactaaggaagtcccaaaaaaaaggtgctgtcactttaagttctggactgggggggttgtttgtaattgtaaacagcaaagcatttatgtttgtctgtctatttgtaaagcaaccaccttccttactggaaggagaaaaaaaaattgggggtacatgtaaatacttgctgcagcatttaatatgttcaattttatgttaagctttttgttgcatcgtgaacacatttattgttaccaatggacaatgagttcattaagactgttcaacgaggtcagatttttacatctctttcgagcaagaagagacaagattttgtgcatttgtacaaatgttaataatatcactgcaattccaatataataaagcactcaaatgcaaataaaaaaaaaaaaaaaa

SEQ ID NO: 2665 - DNA, 13888 bp, Canis familiaris
ggtcctggaatttgaaatatccaggggcctctacagaatcctggcatcagttactatgttgactcactcagtgttgggatcactcactttccccttacaggactcagattttggaggcaattagcttcatcagagaaaaacgaataggaaaaactgaagtgttattttttaaaaggctgctgaagttggttgatttctcatcattcctaaacctattggagcacttaagttgggagaaaatttaccaagatttttactgctgccttgatacatacttttttttccccaaatgctttggtgggaagaagtagaggactgttatgaaagagaagatgttcaaaagaaaacattcacaaaatgggtaaatgcacagttttctaagtttgggaagcagcacatagagaacctcttcagtgacctacaggatgggagacgcctcctagaccttttggaaggcctgacagggcaaaaactgccaaaagaaaaaggatccacaagagttcatgccctgaacaatgtcaacaaggcactgcgcgtcttgcagaaaaataatgttgatttagtgaacattggaagtactgacatagtagatggaaatcacaaactgactcttggtttgatttggaatataatcctccactggcaggtcaaaaatgtaatgaaaaatatcatggctggattgcaacaaaccaacagtgaaaagattctcctgagctgggtccgacaatcaactcgtaattatccacaggttaatgtcattaacttcaccaccagctggtctgatggcctggctttgaacgctctcatccacagtcataggccagacctgtttgattggaatagtgtggtttgccagcagtcagccacacaacgcctggaacatgcattcaacattgccaaatatcaattaggcatagagaaactgcttgatcctgaagatgttgccaccacttatccagataagaagtccatcttaatgtatatcacatcactcttccaagttttgcctcaacaagtgagcattgaagccatccaggaagtggaaatgttgccaaggccatctcaagttactagagaagaacattttcagatacatcatcaaatgcactattctcaacagatcacagtcagtctagcacagggatatgaacgagccccttcctttcctaagcctcggttcaagagctatgcctacacacaggctgcttatgtcaccacttctgaccccacacggagcccacttccttcacagcatttggaaactcctgaagacaagtcatttggccggtcattgacagagaccgaagcaaacctggacagttatcaaacagctttggaagaagtactctcgtggcttctttcagctgaggatgcactgcaagcccaaggagagatttctaatgatgtcgaagaagtgaaagaacaatttcatactcatgagggatatatgatggacttgacatcccatcagggacgggtcggtaatgttctccaactgggaagtcaactgattggaacagggaaattatcagaagatgaagaaaccgaagtgcaggaacaaatgaatctcctcaattcaagatgggaatgcctcagggtagctagcatggaaaaacaaagcaatttacataaagttctaatggatctccagaatcagcaactgaaagagttaaatgactggctaaccaaaacagaagagagaacaaggaaaatggagaaggagccccttggacctgatattgaagacctaaaacgccaagtacaacaacataaggtgcttcaagaagacttagaacaggaacaagtcagggtcaattccctcactcatatggtggtggtagtcgatgaatctagtggagaccatgcaactgctgctttggaagaacaacttaaggtactgggagatcgatgggcaaacatctgtaggtggacagaagatcgctgggttcttttacaagacatcctcctaaaatggcagcgttttactgaagaacagtgcctttttagtgcatggctttcggagaaggaagatgcagtgaacaagattcacacaactggctttaaggatcaaagtgaagtgttatcaaatcttcagaaactggctgtcttaaaaacagatctggaaaagaagaagcaaaccatggacaaactctgctcactcaaccaagaccttctttcagcgctgaaaaacacagtggtagcccacaagatggaagcatggctggacaactttgcccagcgctgggataatttagtccagaaacttgaaaaaagttcagcacagatttcacaggctgtcaccaccactcagccatcactaacacagacaactgtaatggaaacagtaactatggtgaccacgagggaacacatcttggtaaagcatgcccaagaggaactgccaccaccaccccctcagaagaagaggcagattatcgtggattctgaaattaggaaaaggttggatgtcgatataactgaacttcacagttggattactcgttcagaagctgtgttgcagagtcctgaatttgcaatctatcggaaggaaggcaacttctcagaccttaaagaaaaagtcaatgccatagagcgagaaaaagccgagaagttcagaaaactgcaagatgccagcagatcagctcaggccctggtggaacagatggtgaatgagggtgttaatgctgacagcatcaaacaagcctccgaacaactgaacagccggtggatagagttctgccaattgctaagcgagagacttaactggctggagtatcagaacaacatcatcactttctataatcagctacaacaattggagcagatgacaactactgctgaaaactggttgaaaacccagcctaccaccacatcagagccaacagcaattaaaagccagttaaaaatttgtaaggatgaaatcaaccgactgtcagctcttcagcctcaaatcgagcgattaaaaattcaaagcatagccctgaaagagaaaggacaagggccaatgttcctggatgcagactttgtggcctttacaaatcattttaaccaagtctttgctgatgtgcaggcaagagaaaaagagctacaaacaatttttgacagtttgccacccatgcgctatcaggagactatgagtaccatcctgacatggatccagcagtcagaaaccaaactctctatacctcaggttactgtcactgaatatgacatcatggaacagagactcggagagctacaggctttacaaagctctctgcaagagcaacaaaatggcctaaactatctcagcaccactgtgaaagagatgtcaaagaaagcaccactgtctgatattagtcggaaatatcaatcagaatttgaagagattgagggacgttggaagaagctgtcttcccagctggttgaacattgtcaaaagttggaggagcaaatggctaaacttcgaaaaattcagaatcacataaaaactctgaagaaatggatcactgaagtcgatgttttcctgaaggaggaatggcctgcccttggggattcagaaattctgaaaagacagctgaaacagtgcaggcttttagtcaatgacattcagaccatccagcctagtctcaacagtgtcaatgaaggggctcagaagatgaagaatgaagcagaaccagagtttgctggcagacttgagacagagctccgagaacttaacacccagtgggattacatgtgccgccaggtctatgccaggaaggaagccttaaaaggaggtttggataaaactgtaagtcttcagaaagatctgtcagagatgcatgagtggatgacacaagctgaagaagaatacctagagagagatttcgaatacaagacccctgatgaattacagacagcagttgaagagatgaagagagctaaagaagaggcccagcaaaaagaagcaaaagtgaaactcctaaccgagtccgtcaatagtgtcatagctcaggctccacctgcagcacaagaggccttaaaaaaggaacttgacactctcaccaccaactaccagtggctctgcaccaggctcaatggcaaatgcaagaccttggaagaagtttgggcgtgctggcatgagttattgtcctacttggagaaggcaaacaagtggctaagtgaagtagaagtcaagcttaaaaccactgaaaatatttctgggggagctgaggaaatcgccgaggtgcttgattcgcttgaaaatttgatgcaacattcagaggataacccgaatcagattcgcatattggcacagaccttgacagatggtggagtcatggatgaactgatcaatgaggagcttgagacatttaattctcgttggagagaactccatgaagaggctgtgaggaggcaaaagttgcttgagcagagtatccagtcggcccaggagatagaaaaatccttgcacttaattcaggagtccctctcttccattgacaagcagttggcagcttatattgctgacaaagtggatgcagctcagatgcctcaggaagcccagaaaatccaatcagatttgacaagtcatgagatcagtttagaagaaatgaagaaacataaccagggaaaggagactgcccaaagggtactatcccaaattgatgtggcacagaaaaaattgcaggatgtttccatgaagtttcgattattccagaagccagccaattttgagcagcgcctacaagaaagtaaaatgattttagatgaagtgaagatgcatttacctgcgttggaaacaaagagtgtggaacaggaagtagtacagtcacagttaaatcattgtgtgaacttgtataaaagtctgagtgaagtgaagtctgaagtggaaatggtaataaaaactggacgtcagattgtacagaagaagcagacggaaaacccgaaagagcttgatgaaagagttacagctttgaaattgcattataatgagctgggagcaaaggtgacagaaagaaagcaacagttggaaaaatgcttgaaattgtcccgtaagatgcgaaaggaaatgaatgccctgacagaatggctggcagctacagatatggaactgacaaagagatcggcagttgaaggaatgcctagtaatttggattctgaagttgcctggggaaaggctactcagaaagagattgagaaacagaaggttcacctaaagagtgtcacagaggtaggagaggccttgaaaacggttttgggcaagaaggaaatgttggtggaagataaactgagtcttctgaatagtaactggatagccgtcacttcccgagcagaagagtggttaaaccttttattggaataccagaaacacatggaaacttttgaccagaatgtggattacatcacaaactggatcattcaggctgatgcacttttggatgaatctgagaaaaagaaacctcagcaaaaagaagacatacttaagcgtttaaaggctgaaatgaatgacatacgtccaaaggtggattctacacgtgaccaagcagcaaacctgatggcaaaccgcggcgaccactgcaggaaagtagtagagcccaaaatctcagagctcaaccatcgatttgcagccatttctcacagaattaagactggaaaggcctccattcctttgaaggaattggagcagtttaactcagatatacaaaaattgcttgaaccactggaggctgaaattcagcagggggtgaatctgaaagaggaagacttcaataaagatatgagtgaagacaatgagggtactgtaaaagaattgttgcaaagaggagacaacttacaacaaagaatcacagatgagagaaagcgagaggaaataaagataaaacaacagctgttacagacaaaacataatgctctcaaggatttgaggtctcaaagaagaaaaaaggctctagaaatttctcaccagtggtatcagtacaagaggcaggctgatgatctcctgaaatgcttggatgacattgaaaaaaaattagccagcctacctgaacccagagatgaaaggaaaataaaggaaattgatcgtgaattgcagaagaagaaagaggagctgaatgcagtgcgtaggcaagctgagggcttgtctgaggatggggccgcaatggcagtggagccaactcagatccagctcagcaagcgctggcgggaaattgagagcaaatttgctcagtttcgaagactcaactttgcacaaattcacactgtccatgaagagtcagtggtggcgatgactgaagacatgcctttggaaatttcttatgtgccttctacttacctgactgagatcactcatgtctcacaagccctatcagaagtggaagagcttcttaatgctcccgacctttgtgctcaagattttgaagatctctttaaacaagaggaatccttgaagaacataaaagacagcctgcaacaaatctcaggtcggattgacatcattcacaataaaaagacagcagcattgcacagtgccactcctgcagaaagggcaaagctccaggaagctctctcacggcttgatttccaatgggaaagagttaacaatatgtacaaggaccgacaagggagatttgacagatctgtggaaaaatggcggcggtttcattatgatatgaagatacttaatcaatggctaacagaagctgaacagtttctcaaaaagacacaaattcctgagaattgggaacatgccaaatacaaatggtatcttaaggaactccaggatggcattggacagcggcaaagtgttgtcagggtattgaatgcaactggggaagaaataattcaacagtcctcaaaaacagatgccagtattctccaagaaaaactgggaagcctgaatctgcggtggcaggaggtctgcaaacagctggcagaaagaaaaaagaggctagaggaacagaagaatatcttgtcagaatttcaaagagatgtaaatgaatttgttttatggttggaagaagcggataacgttgctaatattccacttgaacctggaaatgagcagcagctaaaagaaaaacttgaacaagtcaagttactggcagaagagttgcccctgcgccagggaattctaaaacaattaaatgaaactggaggaacagtgcttgtaagtgctcccctaagcccagaagagcaagataaacttgaaaataagctcaagcagacaaatcttcagtggataaaggtttctagaaatctgcctgagaagcaagaagaaattgaggcacacgtaaaagaccttggacagctggaagagcagttaaatcatctgcttctatggctgtctcctattaggaatcagttggaaatttacaatcagccaaatcaaacaggaccatttgacatcaaggaaattgaagtagcagttcaagctaaacagccggatgtggaagggattttgtctaaagggcagcatttgtacaaggaaaaaccagccactcagccagcgaagagaaagctggaagatctcagctctgattggaaggtggtaactcagttgcttcaagagctgcgggcaaagcaacctggcccagctcctggactgaccactgtcagagcccctcccagtcagactgttactctggtgacacaacccgcggttaccaaggaaactgccatctccaaactagaaatgccatcttcattgctgttggaggtacctgcactggcagatttcaaccgagcttggacagaacttaccgactggctgtctctgcttgatcgagttataaaatcacagagggtgatggtgggtgatcttgaagacattaacgagatgatcatcaagcagaaggcaacgctgcaggatttggaacagaggcgcccccagttggaagaactcattaccgctgcccagaatttgaaaaacaagaccagcaatcaagaggctagaacaatcattactgatcgaattgaaagaattcagagtcagtgggatgaagtacaggaacatcttcagaaccggaggctacagttgactgaaatgttaaaggattccacacaatggctggaagctaaagaggaggctgagcaggtgttggggcaggccagagccaagcttgagtcatggaaggaggctccctacacagtagatgcaatccaaaagaaaatcacagaaaccaagcagttggccaaagacctccgccagtggcagataaatgtagatgttgcaaatgatttggcactgaaacttctccgagattattctgcagatgataccagaaaagtacacatgataacagagaacatcaatgcctcttgggcaagcatccataaaagattgagtgagcgagaggctgctctggaagaaacccacagattactgcaacagttccccttggacctggagaagttccttgcctggcttacagaagccgaaacaactgccaacgtcctgcaggatgccacccataaggaaaggcttctagaagattccaagggagtaagagagctgatgaaacaatggcaagacctccaaggagaaatcgaagctcacacagatatctatcacaacctggacgaaaatggccaaaaagtcctgagatccctggaaggttctgacgatgcagccttgttgcaaagacgtttggataacatgaacttcaagtggagcgaacttcggaaaaagtctctcaacattaggtctcacttggaagccagttctgaccagtggaagcgtctgcacctttctcttcaggaacttctggtatggctccagctgaaagatgatgagttaagccggcaggcacccattggaggagactttccagcggtgcagaagcagaatgatgtacacagggccttcaagagggaattgaaaacgaaagaacctgtaatcatgagtactcttgagactgtacgaatatttctgacagagcagcctttagaaggactagagaaactctaccaggagcccagagagctgcctcctgaagagagagcccagaatgtcacacggctcctacgaaagcaagctgaggaggtcaacactcagtgggaaaaactgaacgtgcactctgcagactggcagagaaaaatagacgaggccctcgaaagactccaggagcttcaggaagcaacagatgagctggatctcaaactacgtcaggcagaggtgatcaaaggatcctggcagcctgtgggtgacctcctcattgactctctccaagatcacctcgaaaaagtcaaggcgcttcgaggagaaattacacctctgaaagagaatgtcagctacgtcaatgaccttgctcgccaactcactacgttgggcattcagctgtcaccatataacctcaacactctggaagacctgaacaccagatggaagcttctgcaggtggccattgaggaccgcatcaggcagctgcatgaagcgcacagggactttggaccagcctcccagcacttcctttccacttctgtccagggtccctgggagagagccatctcaccaaacaaagtgccctactatatcaaccacgagacccaaacaacttgctgggaccatcccaaaatgacagagctctaccagtctttagctgacctgaataatgtcaggttctcagcttacaggactgccatgaaactccgaagactgcagaaggccctttgcttggatctcttgagcctatcggctgcatgcgatgccttggaccagcacaacctcaagcaaaatgaccagcccatggatatcctgcaggtcattaactgtctgaccactatttatgatcgcctagagcaagagcacaacaatctggtcaacgtccctctctgcgtggatatgtgtctcaattggctgctgaatgtttatgacacgggacgaacggggaggatccgggtcctgtcttttaaaactggcatcatttctctgtgtaaagcccatttggaagacaagtacagatacctcttcaagcaagtggcaagttcgacaggattttgtgaccagcgcaggctgggcctcctcctgcatgactctatccagatcccaagacagttgggtgaagtcgcatcgttcgggggcagtaacattgagccgagtgtcaggagctgcttccagtttgctaataataagcctgagatcgaagcggccctcttcctagactggatgcgcctggagccccagtccatggtgtggctgcctgtcctgcaccgagtggctgccgcggaaactgccaagcaccaggccaagtgcaacatctgcaaggagtgtcccatcatcggattcaggtacaggagtctaaagcactttaattatgacatctgccaaagttgctttttttctggtcgagttgcaaaaggccataaaatgcactatcccatggtggaatactgcactccgactacatcgggagaagatgtccgtgactttgccaaggtactaaaaaacaaatttcgaaccaaaaggtattttgcgaagcatccccgaatgggctacctgccagtgcagactgtcttagagggggacaacatggaaactcctgtcactctgatcaacttctggccggtagattctgcgcctgcctcgtcccctcagctttcacacgatgatactcattcacgcattgagcattatgctagcaggctaaaaaaaatggaaaacagcaatggatcttatctaaatgatagcatctctcctaatgagagcatagatgatgaacatttgttaatccagcattactggcgaagtttgaaccaggaatcccccctgagccagcctcgtagtcctgcccagatcttgatttccttagagagtgaggaaagaggggagctagagagaatcctagcagatcttgaggggagaaacagaaatctgcaagcagagtatgatcgtctaaagcagcagcatgaacacaaaggcctgtccccactgccatcccctcctgaaatgatgcctacttctccccaaagtccccgggatgctgagctcatcgctgaggccaagctgctgcgtcaacacaaaggccgcctggaagccaggatgcaaatccttgaagaccataacaaacaactggaatcccagttacacaggctcaggcagctgctggagcaaccccaggcagaggccaaggtgaatggtacaacggtgtcttctccttctacctctcttcagaggtcagatagcagtcagcctatgctgctccgggtggtcggcagtcagacttcagaatccatgggcgaggaagacctgctcagccctccccaggacacaagcacagggttagaggaagtgatggagcagctcaaccactccttccctagttccagaggaagaaatacccctgggaagccaatgagagaggacacaatgtaggaagccttttccacttggcagatgatttgggcagagcgatggagtccttagtttcagtcatgacagatgaagaaggggcagaataaatgttttacaactcctgattcccgcatggtttttataatattcatacaacaaagaggattagacagtaagagtttacaagaaaaaaaaaaacaaatctatatttttgtgaagcgtagtggtactatactgtagatttcagtagtttctaagtctgttattgttttgttaacaatggcaggtttcacacgtctatgcaattgtacaaaaaagttataagaaaactacatgtaaaatcttgatagctaaataacttgccatttctttatatggaacgcttttgggttgtttaaaaatttataacagttataaagaaagattgtaaactaaagtgtgctttataaaaaaaaaagttgtttataaaaacccctaaacacacacacacacacacacacacacacacacacacacactttgrggcagcgcattgttttgcatcgttttagtgtgatatccacatgaaattcatggtttttttttttctttyctggcatattaaagataggacttcctctaacaccaccaaatgactacttcatatggctcttttaggaattggtgactgaktggaactggctgtgggtttccgctttatgcatctatatgtctaaaattatgtaaatactgtaggtatatagagaaatagatctgaatttctagagacctttgaaatttcttggtcaaatgatctggccacttgctaatggcaagagattgcttctggtcgtccaggcttacctgcttggtctagaatgaattttccctggagcctgaaaccaggaggcaactaccacactaaaacattgtctggggctccagatgtttctcatttgaaactttccactgacagctacgctattgaatcttttaaaagggacatacgaatgaatacacaggacttactatgtcagagtaatccatgggttgatacattcagcttcccgctgctggcaatgccacgatctacatttaatgatgcttcagtggaagtcacgacatcagaagacatttttaactcccagacagtgaggaggactttctagtagggctggagggctgtggactcccagccaatccctgggagggaggggggtcactcttcaagttaaaggattggatgaatgttcataaccatacatggagatctttgtaattacaacaaaatcacttccctctcctcacagtgaaatagcagtgggcatttgagggggttttgctttcttgctttattgctgctttttttttttttttagaatttttcccctattgcaaggagtttttaaatgccacaagacttcatttaaaataacccttgggaaggtgtgtaagacagcctcatcatggtgtgctcctggtaaatatctacccagaagcccatgaactgtgtttccctacttcacatttctctacaactaattccacacaggtttgtaaggggggaaggtagatggattcacatgttccaaagggtactccaaacccttgctggtgggtgaggaaggttagagatacaaacattgttcaaaaagagaataacccaagaggactaactggtaggaacaagctttactctatcatcttcttggcctttcatttgttttcattcattcattcactagaaatcaccatgtgacctattattttgcaaatctgttacctcttagatcaagtatcattaacttttgcagagtgggttttgtctattattttattaatgacaattaacatccaacatggcttctcatgctatttctacctcactttggttttggggtgttcctaataatcgtgcacacctgatttcacagcttcactacttgtccatcatgtgaacatttttctccattttttcccccactgtcatttccaaaggaaaacccaaagctctaaggtaacagaatgacatgaagatttggttttggtcttgcattttttctcctttatgtgacactggactttttctttccccgcagattttttttttaaccatgatttaaaacaaggggttgtgttacttctactaagcagttttaagtttcattctaaaagcagaggtaaatagcgtgcataattttattttaatcttttcattttatcttttagacattagttctggagtgagtctgtcaaaatatttgaataaaaattgagagctttattgctacgttttaagcataatttggacattattccgtgttctttataaccaccaagtattaaactgtaaatcataatgtaactgaagcataaacatcacgtggcatgttctgtcattgttttcaggtactgggttcttgagtatcataatatattgtgttttaacaccaacactgtaacatttactaattatttttttaaacttcagttttactgcattttcacaacatatcagacttcaccaaatatatgccttactattgtattatattactgctttactgtgtatctcaataaagcacgcagttatgttac

SEQ ID NO: 2666 - DNA, 656 bp, Canis familiaris
atctctctttccaggtcctcactctttcggtcttaggamacmatcagataccttggcccacaccctcaggtctgaaggcctgagcatgggkcagcagaaagagaggaaactgtctggaggggcagggagaacgaagcagcacaggtgctggcccagctctgcccctcctgagggccttgggattgcattggaccatcagctcttgccagtcatgggagccgccaggtggcattgcctcacagatttgaacmaaaacctggctgccaggctggtacctcttcggcacggacctgactgcagaagtggcagcagtgtcgttgccctcggtgaccccggggtgggggggcgtctggcaccgtgagcgttaagaaccttggactatgtcatttcgacagctctttgtcctttcggattataaaaaaacaagttgagagccttgtttagagcttgcacggcccctgtgccagggggtgctgtgcactctaggcatccctcacccagggaatttttttagtagatgtggggacagggtgagctggctgtgcccatcttgaagtcactgagtgaaattttgttttttattctctgagaagatgagtttgtatgttctgcgaataaacacatgaagacgaaaaaaaaaaaaaaaaaaaaaaaaa

SEQ ID NO: 2667 - DNA, 927 bp, Canis familiaris
ggtgaaaaaacctcatcgctaacagcctgggacggtagccytcgggagatccgccgttaccagaagtccaccgagcttctgatccggaagctgccygtgtccagaggttggtgagggagatcgcccaggatttcaaaaccgatctgaggtttcagagcgccgccattggcgcgcttcaggaggccagtgaagcgtacctggtgggtttatttgaagatactaatctgtgtgccatccacgctaagagagtcaccatcakgcccaragacatccagttggctcgccggatacggggagagagagcttaagtgaagscasyttwtatggtgttttgtagtaaattctgtraaatactytggtttaatttgtgacttyttttgtaagaaattgkttataatatgttgcatttgtacttaagtcattccatctttcactcaggatgaatgcgaaaagtgactgttcacagacctcagtgatgtgagcgctgttgctcaggagtgacaagttgctaatatgcagaagggatgggtgatatttcttgcttctcatgatgcatgtttctgtatgttaatgacttgttgggtagctattaaggtactagaattgataaatgtgtacagggtccttttgcmataaaactggttatgacttgawmmaarwrwwwaacmattggggctgttaagtctgaccatacatcactgtgatagaatgtgggctttttcaagggtgaagatacaagtcttaaccmcagtgtaacttacagtttccttaaaaaaaaaaaaaaaaaagtaaacctggcagctatagaatacactatgtgcatttataatagctattttatatattgtagtgtcaacatttttaaattaaatgttttacattcwmmaaaaaaaaaaaaaaaaaaaaaaaaaaaaaaaaaaaaaaaaa

SEQ ID NO: 2668 - DNA, 625 bp, Canis familiaris
tccaccgagcttctgatccggaactgcctttccagaggttggtgagggagatcgcccaggatttcaaaaccgatctgaggtttcagagcgccgccattggcgcgcttcaggaggccagtgaagcgtacctggtgggtttatttgaagatactaatctgtgtgccatccacgctaagagagtcaccatcatgcccaaagacatccagttggctcgccggatacggggagagagagcttaagtgaaggcagtttttatggtgttttgtagtaaattctgtaaaatactttggtttaatttgtgactttttttgtaagaaattgtttataatatgttgcatttgtacttaagtcattccatctttcactcaggatgaatgcgaaaagtgactgttcacagacctcagtgatgtgagcgctgttgctcaggagtgacaagttgctaatatgcagaagggatgggtgatatttcttgcttctcatgatgcatgtttctgtatgttaatgacttgttgggtagctattaaggtactagaattgataaatgtgtacagggtccttttgcaataaaactggttatgacttgawmmaarwrwwaaaaaaaaaaaaaaaaaaaaaaaaaaaaaaa

SEQ ID NO: 2669 - DNA, 637 bp, Canis familiaris
ggtcttccacgcggcacccactcgtsgcygcactccccttgagtggtgccasctgggtggggcccaggscytcatgcggtgaacggttcacacatctggatgttgcaaaggcatttgtgatttggggccattctcmaagaaaaggctggcattctgcacacagaagcataaaatcgaggtgtttgatttcwaagtaaatgtttgttcacaaagaaagctgtgctctctggcatctcttcattggtgcaggggcaccagcccccagccgttgtctatatcctgagtctcctgaccccaggcaaggagggcccagcatgtgtctgctatggttttgaaatgaaataaattattacgtgaaagggactagtcttagccmattctagggcttacagttttgtaccaatgtttttctgctcctgggggtgtagggggcgggtacagaaagccaccaaagagaaaactctggcttatttttgttgaccactcactttccaaccatcttgaaaagccaccatttatccctcattttattgcctgggatgattactgttcaatatttaccaagtagcccaaatccaaataaaagttgtttgtaggtaaaaaaaaaaaaaaaaaaaaaaaaaaaaaaaaaaaaaaa

SEQ ID NO: 2670 - DNA, 692 bp, Canis familiaris
caggaagcctgagragcccccgtgtcccccsrcctgtcccctccgtgttaaggtccccyghaccccccttcccttccgggggkyygctgagcaccrcctcccctcccgtgtgcccctcacagcggagacaatcccacgggactcttcagttagccttcttcacgcccccgaggtctgccagcgacctcgtcgtgtgagggccagacggacggaagccagggtccaggggagttttcagccctaacccctgagtctccccctccccgctgctcggggtcagacctgggttcccrtggcctcgggccacggggctcagcacggacagactcgcaccagcgtctccagcaaacagcaggccatggcgccctcaagcccgcgtcccctgagccccgagaacmaaggtgctatyctgcagacccccccgtctactcggaagcctgggcmctgggccttcrgtggcacaaagcgaggtgttgctttttaaacmaaaawacmaaacmawacaacccmaagctcttcttcctyaggrgagtgattggttctacgttttactgaaaaccctctttatgtgttagttttctgattccttgtgtttgctcactgtgtccacgtcagccacttttcagaataaaggtgttcattcctcaaaaaaaaaaaaaaaaaaaaaaaaaaaaaaaaaaaaaaaaaaaaaa

SEQ ID NO: 2671 - DNA, 695 bp, Canis familiaris
caaggaaagcctgagaagcccccgtgtcccccgccgctgtcccctccgtgttawaggtcccsygarmcccccyktccyttccsggggggtckctgagcaccgcctcccctcccgtgtgcccctcacagcggagacwatcccacgggactcttcagttagccttcttcacgcccccgaggtctgccagcgacctcgtcgtgtgagggccagacggacggaagccagggtccaggggagttttcagccctaacscctgagtctccccctccccgctgctcggggtcagacctgggttcccrtggcctcgggccacggggctcagcacggacagactcgcaccagcgtctccagcaaacagcaggccatggcgccctcaagcccgcgtcccctgagccccgagaacmaaggtgctatcctgcagacccccccgtctactcggaagcctgggccctgggccttcrgtggcacaaagcgaggtgttgctttttaaacmaaaaaacaaaacmaaacaacccaagctcttcttcctyaggrgagtgattggttctacgttttactgaaaaccctctttatgtgttagttttctgattccttgtgtttgctcactgtgtccacgtcagccacttttcagaataaaggtgttcattcctcmaaaaaaaaaaaaaaaaaaaaaaaaaaaaaaaaaaaaaaaaaaa

SEQ ID NO: 2672 - DNA, 666 bp, Canis familiaris
  misc_feature (10)..(10): n comprises a, c, g, or t, or includes no nucleotide
cgcgcaccgnctcctcgttcgtgggcgagttcttcaaccagcagggcacatcttctacctcttcgagccgctgtggcacatcgagcgcaccgtgaccttcgagcccggaggcgccaacgcsgcgggcgcggccactgggtctaccgcgacgtgctcaagcagctgttcctgtgcgacctgtacgtgctggagcaacttcatcagcccgctgcccgaggaccacctgacccagttcatgttccgccgcggctccagccgctcgctgtgcgaggagcccgtgtgcacgcccttcgtcaagaaggtcttcgagaagtaccactgcaagaaccgccgctgcgggccgctcaacgtgacgctggccgccgaggcctgccgccgcaaggaccacatggcgctcaaggccgtgcgcatccggcagctggagttcctgcagccgctggccgaggacccgcggctggacctgcgcgtcatccagctggtgcgggacccgcgcgccgtgctggcctcccgcatggtggccttcgccggcaagtacgagggctggaagaagtggctggccgagggccaggcgcgcctgggcgaggaggaggtgcagcggctgcggggcaactgcgagagcatccggctgtcggccgagctgggcctgcggcagcccgcctggctgcg

SEQ ID NO: 2673 - DNA, 627 bp, Canis familiaris
cttcctattctggraaagagggttcttctccttgtggtgtgtctcttccccctccactctrattcttctgctctgtttgggaagaacgtggaggawaagctgacttctgcccccactgctcttacccctactgtagtggcctttggagatgccccctgcctccccccaccaactctcttgtgtgttggagagaaggggccctcccagcacaaagttgcattcctcccccccctccgccccgccctcgttaatttattctaatttattaactctggcccgcccgatctgagaagggagcactgtgcctctcgccgcagccttgtggtgcggcctgggaggggagagggcttgggtgcggcccagttgaaggttgatcttgctgtttttgtttcttgtttttgtgtttgtgttctctggcatttgctgagagagaaaagaaatgtgagcaaagcagaaggaggtgggaaaatggatccmaaccccagtatgccctaccccaccccacgacctgtcccttagtggtgggaaccccttaccttgcaaagtgaatgtgtccccttccccaacctctagtgtatttcacagaaaacttcccaataaaactgtgttgaaacctgaaaaaaaaaa

SEQ ID NO: 2674 - DNA, 615 bp, Canis familiaris
ttgtcgtgggccgatacccagatcccaatttcgaaagctgtacccctcacgaattaaggacgatcgatgtgtttgacggaagctcagggaagatgatgtatcagctctatgacccagaatcttctggtatcatttcgctcaatgagttcaatcctatgggggacacactggcctctgtgatgggttatcacattctcatttggagccaggaggaagccaggatgcggccatgagagacactaatgaaggtktggsccaagcaagagcttggagccgcctgaggacaaatcctgtaagaagaggcggctgtgtattaaaagggccacaaggtatccaaagtcttagggttggagcagggacactgtggcatgggacactatgggactgggacactggcacgttactgctctggactcagctccagaaacttctccagagttggtgccccaggtgccccaagggcccctgctgtatctagcctggagccaggcttctcttggagcgaaggtactcttatatgtttgatgtgcagtgatggagtgataaggtagtggttttcagtttgtgctcactattgacatggctaataaaaccatacccaactgaaaaaaaaaa

SEQ ID NO: 2675 - DNA, 714 bp, Canis familiaris
ttcccggggatcttggttgcgtgtggttgactgtgatcgccatgtcttctcacaagactttcagaatcaagcgattcctggccaagaracrraagcagaatcgtcctattccccagtggattcggatgaaaactggtaataraatcaggtacaattccaagaggagacactggagaagaaccaaactgggtctgtgaggaagcatcgcacatcatgaaatagcmaacakaattggcacacatatttaagccacatggagatcacatgttcctatcttatcaatatggaaacatccttcctacctggccaatagacatgtcttatcaagagaatgattttctctgttactatgcctctataccagtaggttggttcagtaataaatgtgagacctttcagctgagctgctgttgtgtcctgatttgtgaagtactgaattgcccctcctgtcagatctcacatagcaccgtctgatagaactttctgcagtgatagaaatggcccttgacaacaaagtatttagagtgtggctaggggacgcctgtgtggctctgtctgctaagcgtctgcctttggctcaggtcttgacggggagtcagcgtgtctctctctgctcctccccctgctcatgtgctttctctcaaataaaatcttttttaaaaaaaawaaarwrwrrmwartttgaataaaaaaaaaaaaaaaaaaaaaaaaaaa

SEQ ID NO: 2676 - DNA, 697 bp, Canis familiaris
agacaccttgtcaagcacgtagagacttggacttaggaccagtacggagactgggagaatcgagtggaggagacttgcgggttcatcggtcagtgttctaccaaacacagtgttaagaggaagagtaccgcacggtggaggaggacgggagggggacgtagtagaatgcagawacamaaatatgcatctctcttttttttttgtttgtttgtcaaaagaaaattttaactggaattgtctgatatttaaaagaaacattcgggacctcatcatgatgtgggggctctgctccccactgggtcaggtaagaggcggccttcttggctgctgccatccgaaaccacctaggcattgggttaggcggaggctccggttttccttttgagtcgcgaacgctgtgcgtttgtcagaatgaagtatacaagtcaattgttttgttttgttttgttttgttttttttcctttttatataataattatataacttatgcatttatacactacgagttgatctcggccagccaaagatacacgacaaaagagacaatcaatgatagaatgtggccttgaattttaactctgtatgcttgatgtttacaatatgaagttattagttcttagaatgcagaatgtatgtaataaaacaagcttggcctcgcatggcaaatcagawwwaaaaaaaaaaaaaaaaaaaaaa

SEQ ID NO: 2677 - DNA, 1711 bp, Canis familiaris
aagcttcttgcttcctgtttgttgtctctccttggctttcttgagtaccacacaagaagcatggccgttgaattagtggaagagccctgaaatgtgtgccgaggagggcgacacacctaggaatgacaggcccctgtgagcagaggactttctctccatccattcctggatctcaaagtcactgggagaggtggccttggctgacttgggagctgcctttggcgctttgtggatgtggcttctgtgtgagcctggaggtcatgtgggctttcagcatttcagaacaaagagattctgcatgatcgtttgactttacgaaagtcagtcaacgcatcagtaactggacacagtgcaaaacagaaaaaaaggagttttgaaaacaccttgatgagtacggagtcgcaggtgaggcaagagatcactttgtcagccgaggcaacatgaaatggccttactgcagaaacacatgtcaaggaagtaattcaactcttcgattccgatcagcagttcggcatcgttctaaattgggagagactctgcgttcattctcttgtctttgtagacatggttcacctgcatatgtgctttccgtatcagaaatcatgtacctatcagtactcgataggtccctcttcaacgttggccatcccattccacgtcggaagcctaacaattggccttcatgtttaccagcgttagacatccttaaccctgcgtcgccttcacatgagaagggtcaaccgacacggggttgtgtatgtccaaagttcagataggagcatgggacatacactgtactctagagacagcgcatccgggttccgaacttttctggatgatgcgtgaaaagccaatccagaagactctggaggcaagggcagtcatgacaagcacgcccatgtagttgggaaacagtgctctagagccagtcgaaagtgcatcataaaggaaagcaaaaagagaagtagaaagtgagggagacgttcagaaatggaaaacgcgtctgttgcctacttaagccccacacacgagggaagatgctcagagaagctgaagccgcggttcccacacttgcccagcgcagcaggcccacagcccctgcaggatccccgatggccctgccctgctccttctcggtggccctggtgctgctcagctgccactccctgtgctgtctggcttgccacctgcccgacacccacggcctgcgcaactggagggtcctgacgctcctgggacagatgaggagactctccgccggctcttgtgaccactacaccaatgactttgccttccccaaggagctgtttgatggccagcggctccaggaggcgcaggccctctctgtggtccacgtgatgacccagaaggtcttccacctcttctgcccggacacgtcctctgctccttggaacatgactctcctggaggaactgtgctcggggctctctgagcagctggatgacctggaggcctgtcccctgcaggaggcggggctggccgagacccccctcatgcatgaggactccaccctgaggacctacttccaaaggatctccctctacctgcaagacaggaaccacagcccgtgtgcctgggagatggtccgagcagaaatcgggagatccttcttctcctcgacaatcttgcaagaaagaatcaggaggaggaaatgagacccgcccggatccgtcgacctgcagccaagctt

SEQ ID NO: 2678 - DNA, 3780 bp, Canis familiaris
atggagctggcggcctggtgccgctgggggctccttctcgccctcctgccctccggagccgcgggcacccaagtgtgcaccggcacagacatgaagctccggctcccggccagtcccgagacccacctggatatgctccgccacctgtaccagggctgtcaagtggtacaggggaacctggagctcacttacctgcctgccaatgccagcctgtccttcctgcaggatatccaggaggtgcagggctatgtgctcattgctcacagccaagtgaggcagatcccactgcagaggctacgaattgtgcgaggcacccagctctttgaggacaactacgccctggccgtgctggacaatggagacccgctggagggtggcatccctgcaccaggggcggcccaaggagggctgcgggagctgcagcttcgaagcctcacagagatcctgaagggaggggtcttgattcagcggagcccgcagctctgccaccaggacacgattttatggaaggacgtcttccataagaacaaccagctggccctcacgctgatagacaccaaccgcttttcggcctgcccgccctgttctccagcttgtaaagacgcccactgctggggggccagctccggggactgtcagagcttgacgcggactgtctgtgccgggggctgtgcccgctgcaagggcccacaacccaccgactgctgccacgagcagtgtgctgctggctgcacgggccccaagcactctgactgcctggcctgccttcacttcaaccacagtggcatctgtgagctgcactgcccagccctggtcacctacaacacggacaccttcgaatccatgcccaaccctgagggccgatataccttcggggccagctgtgtgacctcctgtccctacaactacctgtctacggatgtgggatcctgcaccctggtctgtcccctgaacaaccaagaggtgacggctgaggatgggacacagcggtgcgagaaatgcagcaagccctgtgcccgagtgtgctacggtctgggcatggagcacctgcgagaggtgagagcggtcaccagtgcgaacatccaggagtttgccggctgcaagaagatctttggaagcctggcatttttgccagagagctttgatggggacccagcctccaacactgcccccctacagcctgagcagctcagagtgtttgaggctctggaggagatcacaggttacctgtacatctcagcgtggccagacagcctgcctaacctcagtgtcttccagaacctgcgagtaatccggggacgagttctgcatgatggtgcctactcgctgaccctgcaagggctgggcatcagctggctggggctgcgctcgctgcgggaactgggcagtgggctggccctcatccaccgcaacgcccgcctttgcttcgtgcacacggtgccctgggaccagctcttccggaacccccaccaggccctgctccatagtgccaaccggccagaggaggagtgcgtgggcgagggcctggcctgctacccctgtgcccatgggcactgctggggtccagggcccacccagtgcgtcaactgcagccaattcctccggggccaggagtgcgtggaggaatgccgagtactgcaggggctgccccgagagtatgtgaaggacaggtactgtctaccgtgccactcagagtgtcagccccagaatggctcagtgacctgtttcggatcggaggctgaccagtgtgtggcctgcgcccactacaaggaccctcccttctgtgtggctcgctgccccagtggtgtgaaacctgacctgtccttcatgcccatctggaagttcgcagatgaggagggcacttgccagccgtgccccatcaactgcacccactcctgtgcggacctggacgagaagggctgtcccgccgagcagagagccagccctgtgacatccatcattgccgctgtggtgggcattctgctggctgtggtcgtggggctggtcctcggcatcctgatcaagcgaaggcggcagaagatccggaagtacactatgcggaggctgctgcaggaaaccgagctggtggagccgctgacgcctagtggagcgatgcccaaccaggctcagatgcggatcctgaaagagacagagctgaggaaggtgaaggtgcttggatccggagcttttggcacagtctacaagggcatctggatccctgatggggaaaatgtgaaaatcccagtggccatcaaagtgttgagggaaaacacatctcccaaagccaacaaagaaatcttggacgaagcatatgtgatggctggagtgggctccccgtatgtgtcccgcctcctgggcatctgcctgacatccacggtgcagctggtgacacagcttatgccctacggctgcctcttagaccatgtccgagaacaccgtgggcgcctgggctcccaggacttgctgaactggtgtgtgcagattgccaaggggatgagctacttggaggatgtccggctggtgcacagggacctggctgcccggaatgtgctggtcaagagtcccaaccatgtcaagattacagatttcgggctggctcggttgctggacatcgacgagacagagtaccatgcggatgggggcaaggtgcccatcaagtggatggcgctggagtccattcctccgcggcggttcacccaccagagtgatgtgtggagctatggtgtgactgtgtgggaactgatgacttttggggccaaaccttatgatgggatcccagcccgggagatccctgacctgctggagaagggggaacggctgccccagccccccatctgcaccattgatgtctacatgatcatggtcaagtgctggatgatagactctgaatgccgaccccggttccgggagttggtggccgaattctcacgtatggccagggacccccagcgctttgtggtcattcagaatgaagacttgggccccgccagccccttggacagcaccttctaccgttcactactggaagatgatgacatgggggacctggtggatgctgaggagtacctggtaccccagcagggtttcttctgcccagaacctaccccaggggctgggggcactgcccaccgacggcaccgcagctcatccaccaggaatggcggtggtgagctgactctaggactggagccctccgaggaggagccccccaagtctccactggcaccctcagagggcgctggctctgacgtgtttgatggtgacttgggaatgggggcagccaaggggctgcagagccttccctcacaggaccccagccctctccagcggtacagtgaggaccctacggtacccttgccccctgagactgatggtaaggttgcccccctgacctgcagcccccagcctgaatatgtgaaccagccagaagtttggccgcagcccccccttgccctagaaggccctttgcctccttcccgaccggctggtgccactctggaaaggcccaagactctgtcccccaagactctctcccctggcaagaatggggttgtcaaagacgtttttgcctttgggagtgctgtggagaatccggagtacctggcaccccggggcagagctgcccctcagccccaccctcctccagccttcagcccagcctttgacaacctgtattactgggaccaggatccatcagagcggggctctccacccagcacctttgaagggacccctacagcagagaacccggagtacctggggctggacgtgccagtgtga

SEQ ID NO: 2679 - DNA, 2908 bp, Canis familiaris
ggaatctggggccccgagcgactgcgagcgccgggctccgcgggacccggcgaggacgcgcggccgctgtgcctgccccacccgccacacctgggagcggggaggcccgggagaggcggggcgcggccagcggctggctcggggcggacagcgccggcgacagccccgggcctggagcgcagggagggggagggtctcgcggccgagctctcttcttcgggggagggaccccagccggcgtgcacagcggcgggagccagctgccgagtcgccgcccgtgggtcatggagcggggcagccccggcgccggggcggcgcggctgccgcgggaccaggactccgtggaagcgtggctggatgatcaccgggacttcaccttctcttactttgttaagaaagccaccagagaaatggtcaatgcctggttcgctgagagagtccacaccatccctgtgtgtaaagaaggcatcagaggccacgcagaatcttgctcttgctcctcgcagcagagttcccgtgcagacagcagtgcgcctggcacaccaaccaggaaaatctctgcctctgaatttgaccggcctcttagacccattgtcgtcaaagattctgagggtactgtgagcttcctcgctgactcagaaaagaaggaacagatgcctctaacccccccaaggtttgataatgatgaaggggaccagtgctcgagactcttggaattagtgaaagatatttctagtcatttggatgtcacagccttatgtcataaaattttcttgcatattcatggacttatctccgctgatcgctattccctgtttcttgtctgtgaggacagctccaatgacaagtttcttatcagccgcctgtttgatgttgcagaaggttcaacactggaagaagcttcaaataactgtatccgcttagaatggaacaaaggcattgtgggacatgtggcagcacttggtgagcccttgaacatcaaagatgcttatgaggatcctcggttcaatgcagaagttgaccaaattacaggttacaagacacagagtattctttgtatgccaattaagaatcatagggaagaggttgttggtgtagcccaggccatcaacaagaaatcaggaaatggtgggacattcactgaaaaagatgaaaaggactttgctgcttatttggcattttgtggtattgttcttcataatgctcaactctatgagacttcactgctggagaacaagagaaatcaggtgctgcttgaccttgctagcttaatttttgaagaacaacaatcattagaagtaattctaaagaaaatagctgccactattatctctttcatgcaggtgcagaaatgcaccattttcatagtggatgaagattgctccgattctttttctagcgtctttcacatggaatgtgaggaattagaaaaattgccagatacgttaacaagggaacgtgatgcaaacagaatcaattacatgtatgctcagtatgtcaaaaatactatggaaccacttaatatcccagatgtcagtaaggacaaaagatttccctggacaaatgaaaacacaggaaatgtaaaccagcaatgcattagaagtttgctttgtactcctataaaaaatggaaagaagaataaagtgataggggtttgccaacttgttaataagatggaggagaatactggcaaggttaagcctttcaaccgaaatgatgaacagtttctggaggcttttgtcatcttttgcggcttggggatccagaacacacagatgtatgaagcagtggagagagccatggccaagcagatggtcacactggaggttctatcctaccatgcttcagcagcagaggaggaaacaaaagagctccaatccttggcggctgctgtggtaccatctgctcagacgcttaaaattactgacttcagcttcagtgactttgagctgtctgacctagaaacagcactgtgcacaattcggatgttcactgacctcaaccttgtgcagaacttccagatgaaacatgaggttctttgcaggtggattttaagtgttaagaagaattacaggaagaatgttgcctatcataattggagacacgcctttaatacagctcagtgcatgtttgctgctttaaaggccggcaagattcagaacaagctgactgacctggagatacttgccctgctgattgctgctctcagccacgacttggaccaccgtggtgtgaataactcttatatacagcgaagtgaacacccacttgctcaactctactgccattcaatcatggagcatcatcattttgaccagtgcctgatgattctcaatagtccaggcaatcagattctcagtggcctctccattgaagaatataagaccacgctgaaaataatcaagcaagctattttagccacagacctagcattgtacattaagagacgaggagaattttttgaacttataagaaaaaatcaattcaacttggaagatcctcatcaaaaagagttgtttttagcgatgctgatgacagcttgtgacctgtctgccattacaaaaccgtggcctattcaacaacggatagcagaacttgtagcaactgaattttttgaccaaggagacagagagagaaaagaactcaacatagagcctgctgatctaatgaacagggagaagaaaaacaaaatcccaagtatgcaagttgggttcatagatgccatctgcttgcaactatatgaggctctgacccacgtatcagaggactgcttccctttgctggatggctgcagaaagaacaggcaaaaatggcaggccctagcagaacagcaggagaaaacgctgattaatggggaaagcagccaggccaagcggaactgagtggcctatttacgtggagttgaagt

SEQ ID NO: 2680 - DNA, 4232 bp, Canis familiaris
cgggcttcaggggccgcctcacctgggctggtcggcgcccccggcgcccccggcgcgcccggagcccagggcctgcggaggccgcgggggctgcgcccccaacgttctgtgctcgctatgttgccctttggacaccaaagaagagaaatggtcaatgcctggttcgctgagagagtccacaccatccctgtgtgtaaagaaggcatcagaggccacgcagaatcttgctcttgctcctcgcagcagagttcccgtgcagacagcagtgcgcctggcacaccaaccaggaaaatctctgcctctgaatttgaccggcctcttagacccattgtcgtcaaagattctgagggtactgtgagcttcctcgctgactcagaaaagaaggaacagatgcctctaacccccccaaggtttgataatgatgaaggggaccagtgctcgagactcttggaattagtgaaagatatttctagtcatttggatgtcacagccttatgtcataaaattttcttgcatattcatggacttatctccgctgatcgctattccctgtttcttgtctgtgaggacagctccaatgacaagtttcttatcagccgcctgtttgatgttgcagaaggttcaacactggaagaagcttcaaataactgtatccgcttagaatggaacaaaggcattgtgggacatgtggcagcacttggtgagcccttgaacatcaaagatgcttatgaggatcctcggttcaatgcagaagttgaccaaattacaggttacaagacacagagtattctttgtatgccaattaagaatcatagggaagaggttgttggtgtagcccaggccatcaacaagaaatcaggaaatggtgggacattcactgaaaaagatgaaaaggactttgctgcttatttggcattttgtggtattgttcttcataatgctcaactctatgagacttcactgctggagaacaagagaaatcaggtgctgcttgaccttgctagcttaatttttgaagaacaacaatcattagaagtaattctaaagaaaatagctgccactattatctctttcatgcaggtgcagaaatgcaccattttcatagtggatgaagattgctccgattctttttctagcgtctttcacatggaatgtgaggaattagaaaaattgccagatacgttaacaagggaacgtgatgcaaacagaatcaattacatgtatgctcagtatgtcaaaaatactatggaaccacttaatatcccagatgtcagtaaggacaaaagatttccctggacaaatgaaaacacaggaaatgtaaaccagcaatgcattagaagtttgctttgtactcctataaaaaatggaaagaagaataaagtgataggggtttgccaacttgttaataagatggaggagaatactggcaaggttaagcctttcaaccgaaatgatgaacagtttctggaggcttttgtcatcttttgcggcttggggatccagaacacacagatgtatgaagcagtggagagagccatggccaagcagatggtcacactggaggttctatcctaccatgcttcagcagcagaggaggaaacaaaagagctccaatccttggcggctgctgtggtaccatctgctcagacgcttaaaattactgacttcagcttcagtgactttgagctgtctgacctagaaacagcactgtgcacaattcggatgttcactgacctcaaccttgtgcagaacttccagatgaaacatgaggttctttgcaggtggattttaagtgttaagaagaattacaggaagaatgttgcctatcataattggagacacgcctttaatacagctcagtgcatgtttgctgctttaaaggccggcaagattcagaacaagctgactgacctggagatacttgccctgctgattgctgctctcagccacgacttggaccaccgtggtgtgaataactcttatatacagcgaagtgaacacccacttgctcaactctactgccattcaatcatggagcatcatcattttgaccagtgcctgatgattctcaatagtccaggcaatcagattctcagtggcctctccattgaagaatataagaccacgctgaaaataatcaagcaagctattttagccacagacctagcattgtacattaagagacgaggagaattttttgaacttataagaaaaaatcaattcaacttggaagatcctcatcaaaaagagttgtttttagcgatgctgatgacagcttgtgacctgtctgccattacaaaaccgtggcctattcaacaacggatagcagaacttgtagcaactgaattttttgaccaaggagacagagagagaaaagaactcaacatagagcctgctgatctaatgaacagggagaagaaaaacaaaatcccaagtatgcaagttgggttcatagatgccatctgcttgcaactatatgaggctctgacccacgtatcagaggactgcttccctttgctggatggctgcagaaagaacaggcaaaaatggcaggccctagcagaacagcaggagaaaacgctgattaatggggaaagcagccaggccaagcggaactgagtggcctatttacgtggagttgaagtttacagatggtgtatctgcaggatgtctaattttgctatacactgtacagatttagtatatactttgccactgctgtatttttatttttgcacaacttttaagagcacagcatgaaacgtttttaggggactattacatattttctgtatatttgttttatgccactgatctgagattattggcaccacccactcttagcacacagatgagagctctgtgatactttgtgtactgcaaagtgcaagttaagttcttgcactgaggtaggtttttgttgttttgttttttgggttttgggggtttgcttttttgttttttgcttggggattttaaataattggttttgtgttttctgaattaccaatcttctaaagaatgtttggaatcttttcattctcaaaaatagtctaggagcaaattgaatgtattctgtgacatttaaaaccatcatagttagagaaaagtgctggcttagtggattttacggggaaaggatagtatttgtcaacagttgtattaccttaacaaaaaaaagtcaaaactctgcaacaattggaaagtactctaaggcagtactgtaaagaaaaggtattgtttaatcaatttgctgtttttgtttgagagcaggaaggggagaactctttcatttcagtacttacatctatcccagagactaaccgtaagtcatttcagtatacaccgcctgatggaaagcaggggaagccttagaagacaatgatttcatggacttcatggtccctggctttatgagggagggatgggggtgtgatccggaaatggaatggctgtatctgtctcagtgaagagaaatattctgttggaagcctctctgagagtccgtgttttgaatattgaaattcctttttaaaataacttccttatcctttttcttacaaaccatagtttatgagtgaacagtttaggtctcaacagaaaactgaggaaaatatgataattggagcattgacttgaggtgagatacgactgcagataaaaggtaaaatgaatcatcatttttctttgtcagagcaagtatagagaatagttttaactgtataaacagcaaaggactatcctgctattggggtcaaaaattaaagtgagagagcaggaaggtaagaaggcttagccctgaattaaacgtaagagtactgagtttgcaattgagaaactgccctttttttcagttcataggactggtcagctcagtatcacggaagtttgggtgtgtatactaaatgcttaccctgagccatatagttgttgatatttacttctcatagattttaattttagcacatatagaaaatcctaacattgtcttagatttgagcctgtttgagtggattcccattgatcgtgtgtaccctaaataccaatttattcattattggagaagtagatagtgaatctagcaactggttcaggaaaggaaaatctattccaaatatatgctaatgtttggactcagggaaagtaggaagagagctgtttgtgtgatttgttaaccacccgtgccaaaaaaatgtttctgagtttcagtcactaaattgggtggagaattc

SEQ ID NO: 2681 - DNA, 4251 bp, Canis familiaris
caaggctctcattcaaaatggaaggagagataaagagcttccaagacaggcaggaactgaaagaatatgtgacctccaaaccagctctgcaagaaattttaagggggactcttaaaattcccctttaagaagaagttcagtggaacagtccacaaaaacaaggactgaatagatatcatgatgacactaaactcatatctctcaatagtaactctgaatgtgaacgggcttaatgaccccatcaaaaggcgcagggtttcagactggataaaaaagcaggacccatctatttgctgtctacaagagactcattttagacagaaggacacctacagcctgaaaataaaaggttggagaaccatttaccattcgaatggtcctcaaaagaaagcaggggtagccatccttatatcagataaactaaaatttaccccaaagactgtagtgagagatgaagagggacactatatcatacttaaaggatctatccaacaagaggacttaacaatcctcaatatatatgccccgaatgtgggagctgccaaatatataaatcaattattaaccaaagtgaagaaatacttagataataatacacttatacttggtgacttcaatctagctctttctatactcgataggtcttctaagcacaacatctccaaagaaacgagagctttaaatgatacactggaccagatggatttcacagatatctacagaactttacatccaaactcaactgaatacacattcttctcaagtgcacatggaactttctccagaatagaccacatattgggtcaccaatcgggtctgaaccgataccaaaagattgggatcgtcccctgcatattctcagaccataatgccttgaaattagaactaaatcacaacaagaagtttggaaggacctcaaacacgtggaggttaaggaccatcctgctaaaagatgaaagggtcaaccaggaaattaaggaagaattaaaaagattcatggaaactaatgagaatgaagatacaaccgttcaaaatctttgggatgcagcaaaagcagtcctgagggggaaatacatcgcaatacaagcatccattcaaaaactggaaagaactcaaatacaaaagctaaccttacacataaaggagctagagaaaaaacagcaaatggatcctacacccaggagaagaagggagttaataaagattcgagcagaactcaacgaaatcgaaaccagaagaactgtggaacagatcaacagaaccaggagttggttctttgaaagaattaataagatagataaaccattagccagccttcttaaaaagaagagagagaagactcaaattaataaaatcatgaatgagaaaggagagatcactaccaacaccaaggaaatacaaacgattttaaaaacatattatgaacaggtatacgccaataaattaggcaatctagaagaaatggacgcattcctggaaagccacaaactaccaaaactggaacaggaagaaatagaaaacctgcacaggccaataaccagggaggaaattgaagcagtcatcaaaaacctcccaagacacaagagtccagggccagatggcttcccaggggaattttatcaaacgtttaaagaagaaatcatacctattctcctaaagctgtttggaaagatagaaagagatggagtacttccaaattcgttttatgaagccagcatcaccttaattccaaaaccagacaaagaccccaccaaaaaggagaattacagaccaatatccctgatgaacatggatgcaaaaattctcaacaagatactggccaataggatccaacagtacattaagaaaattattcaccatgaccaagtaggatttatccccgggacacaaggctggttcaacacccgtaaaacaatcaatgtgattcatcatatcagcaagagaaaaaccaagaaccatatgatcctctcattagatgcagagaaagcatttgacaaaatacagcatccattcctgatcaaaactcttcagagtgtagggatagagggaacattcctcgacatcttaaaagccatctacgaaaagcccacagcaaatatcattctcaatggggaagcactgggagcctttcccctaagatcaggaacaagacagggatgtccactctcaccactgctattcaacatagtggtggaagtcctagcctcagcaatcagacaacaaaaagactttaggggcattcaatttggcaaagaagaagtcaaactctccctcttcgccgatgagatgatcctctacatagaaaacccaaaagtctccaccccaagattgctacaactcatgcagcattgtggtagcgtggcaggatacatcatcaatgcccagaaatcagtggcatttctatacactaacaatgagactgaagaaagagaaattaaggagtcaatcccatttacaattgcacccaaaagcataagatacctaggaataaacctaaccagggaggtaaaggatctataccctcaaaactatagaacacttctgaaagaaattgaggaagacacaaagagatggaaaaatattccatgctcatggattggcagaattaatattgtgaaaatgtcaatgttgcccagggcaatttacacgtttaatgcaatccctatcaaaataccatggactttcttcaaagagttagaacaaattattttaaaatttgtgtggaatcagaaaaaaccccgaatggccgggggaattttaggaaaaaaaaccatgtctgggggcatctcaatgccagatttcaggttgtactacaaagctgtggtcatcaagacagtgtggtactggcacaaaaacagacacatagatcagtggaacagaatagagaacccagaagtggaccctgaactttatgggcaactaatcttcgataaaggaggaaagactatccattggaagaaagacagtctcttcaataaatggtgctgggaaaattggacatccacctgcaggaggatggaactagacccctctctttcaccctacacaaagatgaactccaaatggatgaaagatctaaatgtgagaccagattccatccaaatcctagaggagaacacaggccacaccctttttgaaatcggccaccgtaacttcttgcaagatacatccacgaaggccaaagaaacaaaagcaaaaatgaactattgggacttcatcaagataagaagcttttgcacagcaaaggatacagtcaacaaaactaaaagacaacctacagaatgggagaagatatttgcaaatgacgtatcagataaagggctagtttccaagatctataaagaacttattaaactcaacaccaaagaaacaaacaatccaatcatgaaatgggccaaagacatgaacagaaatttcacagagggagacatagacatggccaacatgcacatgaggaaatgctttgcatcaattgccatcagggaaatacaaatcaaaaccacaatgagataccacctcacaccagtgagaatggggaaaattaacaaggcaggaaaccacaaatgttggagaggatgcggagaaaagggaacccttttacactgttggtgggaatgtgaactggtgcagccactctggaaaactgtgtggaggttcctcaaacagttaaaaatatacctgccctatgacccagcaattgcactgttggggatttaccccaaagatacaaatgcaatgaaacgccgggacacctgcaccccgatgtttatagcagcaatggccacgatagccaaactgtggaaggagcctcggtgtccaacgaaagatgaatggataaagaagatgtggtttatgtatacaatggaatattactcagctattagcaatgacagatacccaccatttgcttcaacgtggatggaactggagggtattatgctgagtgaagtaagtcagtcggagaaggacaaacattatatgttctcattcatttggggaatataaataatagtgaaagggaatataagggaagggagaagaaatgtgtgggaaatatcagaaagggagacagaacgtaaagactgctaactctgggaaacgaactaggggtggtagaaggggaggagggcggggggtgggagtgaatgggtgacgggcactgggggttattctgtatgttagtaaattgaacaccaataaaaaataaattaaaaaaaaaagatgaaaccacagaaaaaaaaaaaaaaaaaa

SEQ ID NO: 2682 - DNA, 578 bp, Canis familiaris
gacgagtttgagcacaagaggaaggagctggagcaggtgtgtaaccccatcatcaccggactgtaccagggagcgggtggtcctggggctggtggctttggggctcaggctcccaaagggggctctgggtctggccccaccatcgaggaggtggattagagctcttaccttttttgctccagttttctttccaagtcagaggtgatctgaggaccttgctattgcactaggtttctttctgtcttcaattttctactatttcagtttatcctaaagttttattgtaacttggtagtactttgtatttattttttgtgtggtatactagttcagtagagttctttacatttaaattaagttggtactgtaagttctttttttttctctgtgaaatgagtcaacactgccggcctctgtccaattttgctatgtaaacaccagtcgtcctggaatgacctttttggttggttggtggttttttccccccaatttgtatacttgaaaaataaaacattaaaaatatgagtcttattttatctgaggcgggatactggactcttcttggaatgtctgaattc

SEQ ID NO: 2683 - DNA, 233 bp, Canis familiaris
ctgctgtcggcttcttgctcttagtccttggcctcaagatatcctctgaacccactgtctatttgtggccagccctcaggtcctctacactccgggctgggggaagcctccatccttgaagcaggggagtgggagtgagccctgggtcccctgccagagcagattccatcataggtgtcgtcagcgtccttgactagaccatgctctggagctgtggatgcagttgcacgagg

SEQ ID NO: 2684 - DNA, 1323 bp, Canis familiaris
cccagctcactgcaccaacgtccttccctggccgacagctcggctaatgagaaaatggagccagaaaacagtggcagggcaggccttgctctcccgaacccgcagggaccctccagtgcacctgaaattgaactttcagaagtacctctccgtgaaaaccccttactggagaaggctggttcatccccaccgtgccatacgtggctgatgtttctgaagagggagctggaatttctgggggtaacacaaattctgattgccttggtatgtctttgttttggaataattgtctgctccgtgatcaatatttcagaatttaaggaagacattttttcatcatttaaagcaggctacccattctggggagcagtgttttttgctatttctggatttttgccaattatgtctgaaaagaaacatgctacatatctggcgtggggcagcctgggagccaacactgtccagatagctgcgggaataggaatctttatctacggtcaacctgcagacctgcagaggagctcggcttacatccacaactgccagcaagctcccagagacgacttctgctttgtggcttgtttttccacagaaattgtggcaatgatcctgtttctcactattctggggttttgcagtgctgtgtcactgacgatctatggagttggagaattagtccaagggaacaagattgtagaagatcgtctttatgaagaattaaacatatattcaccgatttacagtgagctggaagacaaagcggaggaatcttctcctgttgattcataagaattgtgttcagaacattctcacagaaaagggtctagaataagccaagatctttgttaaaggggctacaggcaaaattttgattcttgtctatgatctgctagttttacactaggatttattctccaaatggtatatgctgcctgttgtttctgttcacctaaaattcccctcccaccacccacttatgggtatgtgatagactcctattttcttgtttctattgctctctggtagcactttatggaagtcacgtgtaatgagcaagcatttattctgtgcctataactgtacaaatagagggaacaagtggaaggggttgagagctgagttaaactttctgttttggaacacctgggtggatccgtcaattaagagtctgactcttgactgcagactcaggtcatgagatcaagccccatgtcaggctcctcactcagtggggagtctgcttgggattctttctctccttctccctctatcccttcttctgctctctgtctcccaatctcataaataaataaatataatttt

SEQ ID NO: 2685 - DNA, 261 bp, Canis familiaris
atgatttctgccgtggtcttgctcctgctccttttggttgaacaagcagccgccctgggagagcctcagctctgctacatcctggatgccatcctgtttctgtacggtatcgtcctcaccctgctctactgtcgactcaagatccaggtgcgaaaggcagctgtaaccagctatgagaaaccagatggcatttacacgggcctgagcacccggaaccaggagacttacgagaccctgaagcatgagaaaccaccccaatag

SEQ ID NO: 2686 - DNA, 1380 bp, Canis familiaris
agcccatggagccctggcctctcctcctgctgcttgggctctgctcagctggcgtcgtcgtgggctctgaacatgagacccgcctggtggcaaagctatttgaagattacaacagtgtggttcggccagtggaagaccaccgccaggccgtggaggtcaccgtgggcctgcagctgatacagctcatcaacgtggatgaagtcaatcagattgtgacaaccaatgtgcggctgaaacagcaatgggtggattacaacctaaaatggaatccagaggactatggtggcgtgaaaaaaattcacattccctcggaaaagatctggcgcccagacctcgttctctataacaatgcagatggtgactttgccattgtcaagttcaccaaagtgctcctggactacacgggccacatcacatggacacctccggccatcttcaaaagctactgtgagatcattgtcacccactttccctttgatgaacagaactgcagcatgaagctgggcacctggacctatgacggctcggtggtggccattaacccggaaagcgaccagcccgacctgagcaacttcatggaaagtggagagtgggtgatcaaggagtcccggggctggaagcactgggtgttttatgcctgctgcccctccaccccctacctggacatcacctaccacttcgtcatgcagcgcctgcctctctacttcatcgtcaacgtcatcattccctgcctgctcttctccttcttaaccggcctggtgttctacctccctacggactcaggagagaagatgactctaagcatctctgtcctgctgtctctaaccgtgttcctcctggtcatcgtggagctgatcccttccacctccagcgccgtgcccttgattgggaagtacatgctgttcaccatggtgtttgtcatcgcgtccatcatcatcaccgtcatcgtcatcaacacacaccaccgctcccccagcacccacgtcatgcccgactgggtacgcaaggtttttatcgacactatcccaaatatcatgttcttctccacaatgaaaagaccatccagagaaaaacaagacaaaaagatttttacggaagacattgacatttctgacatttctgggaagccagggcctccacccatgggtttccactctcccctgatcaaacatcccgaggtaaaaagtgccattgaaggagtcaaatacatcgcagagacgatgaagtcagaccaggagtccaataatgcggctgaggaatggaagtatgttgcaatggtgatggaccacatcctccttggagtcttcatgctcgtctgtatcattggaaccctggctgtgtttgcaggtcgactcattgaattaaatctgcaaggatgac

SEQ ID NO: 2687 - DNA, 1008 bp, Canis familiaris
atggcgcttcgctggggtattgtgtcagccggccttatctccagcgacttcacgaccgtgctgggaacgctgcctcgctccgagcaccaggtagtggctgtagcggcccgcgacctgagccgggcgaaggagtttgcgaggaaacatgacatccccaaagcctacgggtcctatgaggagttggccaaagacccgaatgtggaggtggcctacatcggcacccagcacccccagcacaaggccgcggtgttgctgtgcctggcagcgggcaaggccgtcctgtgcgagaagcccatgggtgtgaacgctgcagaagttcgcgaaatggttgccgaagcccgatcccgaggcctctttcttatggaggccatctggacccgcttctttcctgctatagaggctctgagggctgctctgtcacagggaactctgggggaactccgggtggctcgggcagaatttgggaagaacttcacccacattccccggtccgtagactgggcccaggctggcggtggcctgctcgaccttggcatctactgcatccagttcatctctatggtctttggtgggcagaagccggagaagatttcagccgtgggaaggcgctatgaaacaggtgtggacgacaccgtcactgtgctcctccagtacccaggagggatccatggcagctttacctgcagcatctctgctcagctctctaatatggcctttgtgagcggtaccaagggcataggccagatccttgacccttgctggtgcccaacggagctggtgttgaagggagagcataaggagttcccactgcccccggccccaagcaaggagttcaattttacaaatggagcaggcatggcttatgaggccaagcatgtccgggagtgcctgcgaaagggcctgaaggaaagtcctgtgattcccctggcagaaagtgaactcctggctgacatccttgaagaaataaggaaggccattggagtcaccttcccccaagacacacgctaa

SEQ ID NO: 2688 - DNA, 758 bp, Canis familiaris
tacatacaccccttccacctcctcgtctatagcaagagcagctgtgagcagctggagaaatccaacacggagatgcccaaggacctgaccttcctgccggtcccgattcaggccaagacatcccctgtggatgaggaggcccttcgagaagagctggtgctggtctctgagaggctggagggggaagacaagatgagggccacgaaggtggggatgatgctgaacttcttgggcttccacatgtataggatgctgagcgagtctcagaacgcagccagtgggaccatcctgtccccaacgacgctctttggcaccctggcatctttctacttgggcgcactggaccccacggccagcagactgcaggctttcctaggcgtcccggggaggatcagggctgcacctcccggctggatggccacaaggtcctctctgccctgcagactatccagagccttctggtggcccagggtggggctagtggccagtccacgccgctcctgtccacggtggtgggcctgttcacagcccctggcctgcgcctgaagcagccgtttgtgcgggccctggctccctttgcccccatcaccttcccgcgctctctggacttgtccatggacccagatcttgctgctgagaagatcaacaggttcatgcaggcagtgacagggtggagaatggacagacccatgtcaggaatcagcccagacagcaccctacttttcaacacctacgtcccacttccaaggaaagatgaa

SEQ ID NO: 2689 - DNA, 1923 bp, Canis familiaris
cgcacgatgtggctcttcgatctggtcctgacctccctcgccacttccatggcttgggggtacccgtccttgccacctgtggtggacactgtgcaaggcaaagtcctgggcaagtatgtcagcttagaaggatttgcacagcctgtggccgtcttcctgggagtcccttttgccaagcctcctcttggaccactgaggtttgctccaccacaggctgcagagccatggaacttcgtgaagaataccacctcataccctcctatgtgctcccaggacgcagtgggaggtcaggtgctctcagaactctttaccaacagaaaggacaacattcctctcaagttttctgaagactgcctttacctcaatatttacactcccgctgacttgacaaagaacagcaggctgccggtgatggtgtggatccacggagggggtctggtggtgggcggggcatcaacctatgatgggctggccctctctgcccacgaaaacgtggtggtggtgacaattcagtatcgcctgggcatctggggattcttcagcacaggggatgaacatggccgcggaaactggggtcacttggaccagttggctgcacttcgctgggttcaggagaacattgccaactttggagggaatccaggttctgtgaccatcttcggagagtcggcgggaggtgaaagcgtgtccgttcttgtgctatctcctctggccaagaacctcttccatcgggccatctctgagagtggtgtggccctcactgctgccttggttaagaaagacatgaaggacacagctcagcaaattgctgtctttgctgggtgtaaaagcaccacgtcggctgtccttgttcattgcctgcgccagaagacggaagatgagctcttggaggtttcactgaagttgaaatttttcactcttgatttatttggagaccccagagagagctatcctttcctgcctacggtggttgatggagtgctgctgccaaagatgccccaagagattctggctgaaaagaaattcaactctgttccctacatcatcggaatcaacaagcaggagtttggctggcttcttccaatgatgatgggttacccactctctgaagacaagctggaccagaagacggcctcgtcactcttgtggaagtcctaccccattgctaacatccctgaggaactgactccactggctagtgagaagtatttaggaggaacagatgaccctgtcaaaaagaaagccctgttcttggacatgttaggagatgtggtgtttggtgtcccatccgtgactgtagcccgtcaccacagagatgccggagcccccacctacatgtatgagttccagtatcatccaagcttctcatcggacatgaaaccccagaccgtggttggggaccacggggatgagctcttctcagtcttcggggccccatttttaaaagggggtgcctcagaagaggagataagactcagcaagatgatgatgaaactatgggccaacttcgctcggagcgggaaccccaatggggaagggctgccctcttggcccgcctacgaccagaaggaagggtacctgcagattggaatccccactcagccagcccagaagctgaaaagcaaggaaatggctttctggactgagctcctggccaagcgggcagcagaaaagctgagtcccacagagcacgtcgagctgtgaatgggcggctgcctgcctcggggcctggggagccagacagggctattctacagagggtgtctatgagccaaagagggatcttactgtggaggttgggatggtctggtggaggagggaagaggtctgggagagggaattgtggcttcaatttggggaataaatgttcttttggatcaaaaaaaaaaaaaaaaaaaaaaaaaaaaaaaaaaaaaaaaaaaa

SEQ ID NO: 2690 - DNA, 2714 bp, Canis familiaris
ttcagaggagaaatcaaaacaagattacacgaagcttcaacaacaaaggctaaaatgaagtattcaaccacgaaaatccccccagcaaagatgaacagttcagcagacaaggctttggtaaaatctcctaagctgagaaaatcccaacagaagcctgaaggagtttgccagatgtactttatgcaactgcgttctggccttatcatagaaaagacatcctgttactttaggaaagaaatcaccaaaaggtattcaccaagaacagctgaaaagtgcagaaagcaatgtctggtattcactgcctgtcatcagcagctgaacaaagatttcacctctgatgtccctatgttacagaaatgttttggaagagctaatgttccaagtatccaagaatattctgcttctctgagcacatacaatgatcaatctattactttcgtttttgaggatggaagttatgagatctatgtagaagacttgagaaaaggccaagagaaagataaggtgttattccgttattatgattcccaatccccctcacatgaaacaggtgatgatgttgatggccagacgttattggtaaacctgagtcctacaaaagataaagattttttgctgcatgccaacaacgaggaacattctgtggagctacaaaaatgtgaaaaccaattgccagaccaggccttcttcctccttcataggaagtcttctgaatgtgtttcattcgaatgtaagaacaatcctggagtgtttataggagtaaaggataaccaccttgctttaattaaagtaggagaccaaactaaggattcatatatagagaaaaccatatttaagctctcttaaatttaatgggatgaaaaaagttgtcaatcctgggttgggtagcccagatagctactgctgaagaaagaataagagataaagagatagacaacatttaagggaaataaagagtacttagtatgctatggaatgtttttcttattatgtgtaaaatatatttttataatccttcagttctgttttttattacccttgtctcactacatattcaatagtgtattattaaggagacctcagaaaatatacaacctgacttttactttttctacttgctgtcaagaaagagcttaatatctaattaagctctgctgagacctctggggacaaggaagggccttaatccaagtttcattttagacaaggatttcaaaaagccacatagagacataattttccctggttccaaacaagttcaaacagtagagctgttggtgaaaagacaatcagctctacttagactgaacatttcacaaatggaataaaacaccaaatttgtttgaagattcccaaaatttcagatacttacacatgtaggcagataatataaatatgtgaaatgacagagacaattgaaaaaattaagaaaaataaatcctgtatttgtaaagtaaataattttacctctaattgtttcatttttaaaatgctgatttttatagatggagttaaatttagcaagacattcttacattaggaagtaaaataaattttatctcagacatataattgaaatcattgggaatatctcacaaactaaaacattattttaaagcactgagacacaacataccttaagacatcaaagtaccatgggatccaagtaccatggtgaggccacaagttcccttatctactagaacctagattggacacagcattaacattacaattttaataactggctatcccttatgttcattgtatactgtctttctgactctatgctccagggatctgtaacttgatatacatgtcaccctgcacaaaatttcttataatcctttcttaccatgtgtacaagtgtttttcttgtccaccttcctgattagtctgtttactatggaatatttattgacttttcttccttcatttcttttgaccaactctgttcttgatatacattttgtgccccgtgagcttcattccatatcacctgacctctggacaccaacatatttttctattttgtctctctgatgtagaatttcacataagcctattgatgggaatattttttattaaacatctttgtattttacattactaaggtagtaaaatttattctcaacgatatatgatttttcaactactaaaggaataatttttgcttattttaagtcttaaattctactataactttttcataggcttaacattgacaataagtgataaactagtaacagaatacttatgaaatacaactgtttctgaaagtgttggctttttaattctaatttgttgagatctattggatataatgatggtggaacataagattagaaaggctgagaattactgagtgagggtaaacaattgtaaacaacatagctttcattacattgtcagttttattatgaagacaaaaataaaagcagaatatatatcatcttctctgaaaaacactaaatgttgaccatatgcatctgtatgatatactcgaaatgatttgttttaagtaactaaatatattaattacattaaattctcaagttgtattttttaaaagtatgtgaggccatgatgattttatcataaaataactattctgaaatttttaagtcaaagcaatcttaccttaatccactgatgttggtatctggggtaggtcatttgtctggtgattcaaaactaaataagatattccaaag

SEQ ID NO: 2691 - DNA, 445 bp, Canis familiaris
ccagctgtgacagcattggagcttcttggacacctggacatggaccccggggaatgcacctgcatgtctggaggaatctgtatctgtggagacaattgcaaatgtacaacctgcaactgtaaaacatgtcgaaaaagctgctgtccttgctgcccccccggctgtgccaagtgtgcccagggctgcatctgcaaaggaggctcggacaagtgcagctgctgtgcctgaaccgcatccgtggtgctggggctggcgggggcgggggttgtggatgccacagccccggaaatgtctgtacagtgcattagttgagaaactgaaattattgtaccataggttatgctttttatatatttgctcagaggtggtggtggtgacactcatgtaaagtgcctgaaaaataaagtcttcacttgtggtaaaaaaaaaaaaaaaaaaaaaaaaa

SEQ ID NO: 2692 - DNA, 742 bp, Canis familiaris
catttcaggctcttgggggcagccaaaatgatgtcctttgtctctctgctcctggttagcatcttgttccctgccatccaggcaaagcaatttacaaaatgtgagctgccccaggtgctgaaagacatggatggctttggaggcattgctttgcctgaatggatctgtaccatatttcataccagtggttatgatacacaaaccatagtcaataacaatggtggcacagactatggacttttccagatcagcaataaattttggtgcaaggacgaccagaaccttcagtcaaggaacatctgtgacatctcctgtgacaagttcctggatgatgaccttactgatgacatgatttgtgccaagaagatcctggataaggaaggaattgactactggttggcccataaaccactctgctctgagaagctggagcagtggcgctgtgagaagttgtgagtgcctgctgtcactggtgcttctgcttctgtatgttcctggaatgcctcttccctaaggctacctcagtttgcttctttcttcttccttgaagctgatttgtctctgaatcctgagctctgtggtgacaccactggacacttgaggactattctccagcaatgcatggctggtacactggacttttgacccttgttcagtgccctctgatggcactttcagtacaacaatggatttcatctctgtcttgaataaagggcctgattttgaaaaaaaaaaaaaaaaa

SEQ ID NO: 2693 - DNA, 1196 bp, Canis familiaris
atcatccacttagcttccccttcactttctgtactccaccttggaaaaaaggacttgataaccatgaaggtcttcatcctggcctgccttgtggctcttgctcttgcaagagagaaggaagaactcactctatccaatgagactgtggaaagcctttcaagcagtgaggaatctattacacacatcaacaagcagaaacttgagaattttaaacacgaggagcaacagcaaagagaggatgaacgccagaataaaatccacccccttttccagcaacagcctctagtctctccttatgctgatcccatccactatgctatccttccacagaacatcctgcctctggctcagcctgctgtggtggtgcctttccttcagcctgaaataatggaagtccctaaagttaaggaaaacatctttcctaggcacaaagtaatgccctttcttaaatctccagtgacacccttcttggacagccaaatcctgaatgtggctgatcttgaaaatgtgcattttcctcttcctctatctctgcctctgctccagcctctgatgcaccagatccctcagcctcttcctctgctccagcctctgatgcaccagatccctcagcctcttcctcagactcctatgcttactcctcagtcagtgctgtctatcccacagcccaaagtcttgccttttcctcagcaagtggtgccctacctccagagagatatgcccctacaagcctttctgccataccaggaatctacccaccaggcccaacctgtgactcaaccacttgccccacttgtcaactctgctcttgtttaaaagaattccaaagttaatgtcccctcctcacttttgaattgactgtgactggaaacgtggcatcttttcacttggcatcatgttaccaaaaattaataatttttaaatgaacctacatggaaaaaaatgaaaatttgtttctttatttattttatgtaccattggcattcatcttaatctgaatttggctcataaactctacattttccaaactttaattcaattataccatagaaatttaattttgagttggaaatacacataagcatgggaaaaatatgtatagtttttgcaatcatgtttgttgttatttaaatatctatttcctaaccagtcatttcaataaattaatcctttaggcataaaaaaaaaaaaaaaaa

SEQ ID NO: 2694 - DNA, 1715 bp, Canis familiaris
atggcgagtagagagaagacgagtatcgagggccacatgtttgacgtagtcgtgataggaggcggcatctcaggattgtctgctgccaaactcttagccgaacatgaagttgatgtcttagttttagaagcacgagatagagttggaggaagaacatacaccgtgaggaatgaacatgtcgattacgtagatgttggtggggcttatgtaggaccaactcagaacagaatcttacgactatctaaggagctgggtctagagacttacaaagtgaacgtaaatgagcgtcttgtacagtatgtcaaggggaaaacttacccattccgaggagcctttcctccggtatggaatcctatcgcatatttggattacaacaacctgtggcggacaatggataacatggggaaggagattccagcagatgcaccatgggaggccccacatgccgaggaatgggacaagatgactatgaaggatcttatcgataaaatctgctggacaaagactgctaggaggtttgcatccctctttgtgaatatcaatgtgacctctgagccccacgaggtgtctgcgctctggttcctgtggtatgtgaagcagtgcggaggtaccactcggatattctcggtgaccaatggaggccaggaacggaagtttgtgggaggatccggtcaagtgagtgaacggataatggagcgccttggggacagagtcaagctgaagcgccctgtcacctatgttgaccagtcagatgacaacatcatcatagagacactgaatcatgaactttatgagtgcaaatacgtgattagtgccatccctccaactttgactgccaagatccacttcagaccagagcttccatcagagagaaatcagttaattcagcgtcttccaatgggagctatcatcaagtgtatgatgtattacaaggaggccttttggaagaagaaggattactgtggctgtatgatcattgaagacgaggaagctccaatttcaataaccctggatgacaccaagccagatggatcactgcccgctatcatgggcttcatacttgccagaaaagctgaccgacttgccaagctccataaagaaataaggaagaggaaaatctgtgagctctatgccaaagtgctaggatcccaagaagctttacaacccgtacactatgaagagaagaactggtgcgaggagcagtactccgggggctgctataccgcctacttcccccctgggatcatgactcactacggaagggtgatccgccagccatttggcaggatttactttgctggcactgagacggcaacacactggagcggttatatggaaggagctgtagaggctggggaacggacagctagagaggtcttaaatgctctcgggagggtggcagagaaagacctgaagacccaggaacctgaatcaaaggatgttccagctatggaaatcacccacaccttctgggagaggaacctgccatcggtgacaggcctgctgaagctcattggatttaccacatcagtaactgccctgtggattgtggcgtacaaattcaggctgctgagacgatcctgagtcttcagccccacactctctgcttactcttccccagcaccatcaaaagcaaaatgtcgacaaaggctgtgtcattggaccatctttaaatgcactgatttaaagtttaagtcttagtcagtgtcataagt

SEQ ID NO: 2695 - DNA, 2077 bp, Canis familiaris
  misc_feature (2010)..(2010): n comprises a, c, g, or t, or includes no nucleotide
tggatggtggggccgcaggagctataagtggcccggccagggcccttgcacgggtctctggccatgctactcctcggggtgctgctgctgactgtgctggctggtgcccgcctgctgtggggcaagtggaagctcaggggtctgcacctcccacctcttgtccctggctgcctgcacctgctgcagcccgaccttcccctccacctgctgggtttgacgcagaaactggggcccatctacaggctccgcctggggctgcaagatgtggaggtgctgaattctaagaggaccatcgaggaagccatggtcaggaaatgggtggacttcgccggcagaccgcagacgccatcctacaagctggtgtctctgcaccaccaggacctgtccctgggggactactccctgctgtggaaggctcacaagaaactcacccgctcagccctgctgctgggcatccgcagctccatggagccgctggtggagcagctgacccaggagttctgtgagcgcatgagagcccaggctggcacccctgtggccatccagaaggaattctctttgctcacctgcgccatcatctgtcacctcaccttcggaaacaaggaggacaccttagtacatacctttcatgactgtgttcaagacctgatgagaacctgggagcactggtccatccaaatgttggacatcattccctttctcaggttttttcccaacccaggcctctggaggctgaagcgagccttggagaaccgggaccacatcgtagagaagcagctgaggcagcacaaggagagcatggtggcaggccagtggagggacatgaccgactacatgctccagagggtggggaggctgagagcagaagagggctgtggacagctcctcgaaggacacgtgcacatgtccgtggtggaccttttcattggcggcaccgagaccacggccaccaccctctcctgggccgtggcgttcttgcttcaccaccctgagattcagcagcgactgcaggaagagctggatcgggagctgggtcctggagcttcaggctcccgaatcccgtacagagaccccacacgcctgcccctgctcagcgccaccgttgccgaggtgctgcgcctgcggcccgtcgtgcccctggccctgccgcactgcaccacgcggcccaacagtatctcgggctacgacatccccgagggcatggttgtcatacccaacctgcaaggcgcccacttagacgagacggtctgggagcggccacaggagttccggcccgatcgcttcctggtccccggcgccagccccagagtgctggccttcggctgcggggcgcgtgtgtgcctgggggagccgctggcacgccttgagctcctggtggtgctggcgcagctgctccgggccttcacgctgatgcccgctgcgggcaccctgccctctctgcgaccccgggcccgctgcggcgtcaacctcagcatgcagcctttccaggtgcagctgcagccccggggggcaggagtcctgggacgtggccagcacccatgacaggcaggacacacgacggctgtgtgcttcagtttctccttttatttctcccgtacaaaccccgtccctcccccctgtaaacatggtgctgtgagatcgcagatggagaaggctccctcctccggtggctggatagtgagggtggcccctggctcttctctcagcgcgacccctcagtgctcggcagtcatactggggcgccggagatgtgagctgtggtcagcctccctgggctgctgggggccggtagcttcttggtctgagcttcatttccgtgaagggcacagagaactcgaaacccttccagtagtaccagctcaccccctgggaaaggattgttgagacagagtcagagccagacagacgtcccatctgctccccagcctacaccctgcaccccggcatctggggagatggttcccagaaatcaatcaccctccccccgcacccacttcatgatcctcaacngcaaaggccggaggcttagtttaagctggccctttacatccaataaatcgtactcatgtctccctcg

SEQ ID NO: 2696 - DNA, 408 bp, Canis familiaris
  misc_feature (29)..(29): n comprises a, c, g, or t, or includes no nucleotide
  misc_feature (44)..(44): n comprises a, c, g, or t, or includes no nucleotide
  misc_feature (253)..(253): n comprises a, c, g, or t, or includes no nucleotide
  misc_feature (344)..(344): n comprises a, c, g, or t, or includes no nucleotide
gcatagaggctttgatggacgaaatgganaaaagggtgatacanggtgctcctggattaaagggtgaaaatggcctcccaggtgaaaatggagcccccggacccatgggtccccgaggtgctcctggtgagcgaggacggccaggcctccccggggccgcgggtgctcgaggtaacgatggtgctcgtggaagtgacggacaaccaggccctcccggtccccctggaactgcaggattccccggttcccctgngtgctaagggtgaagttggacccgcggggatctcctgggttcaaacggtccccttggacaaagaggacaaccttggacctcaagggacatntgggtgtccaggcctcctggccccctgggaacaatggtatcctggcggtaaaagtcaatgggtc

SEQ ID NO: 2697 - DNA, 1403 bp, Canis familiaris
catctacccttctctggagattgggacctgagaagaaccatgaagtggctgctgctgatcagcttggtggcactctctgagtgcgctatcgtcaaggttcccctggtcagaaagaagtccttgaggcagaacctgatcgagcatggcctcctaaatgacttcctgaagaaccagagccccaacccagccagcaagtacttcccccaagagcctactgtgttggccactcagtccctaaagaactacatggatatggagtacttcggcaccatcggcatcggcactcctcctcaggagttcaccgtcatctttgacaccggctcttccaacctgtgggtgccctcggtctactgctccagtcctgcctgctccaaccacaaccgcttcaaccctcaggagtcctccacctaccagggcaccaaccggccagtctccatcgcctacggcaccggcagcatgacaggcatcctgggatacgacaccgtccaggttggaggcatcgcagacaccaatcagatctttggcctgagcgagactgagcccggctctttcctgtactatgctcccttcgacggcatcctgggtctggcctaccctcagatttcagcttctggagctacacccgtctttgacaacatgtggaacgaaggtctggtttcccaagaccttttctcggtctacttaagtagcgatgaccagagtggcagcgtggtgatgtttggtggcatcgattcttcttactacagtggaaacctgaactgggtgcccgtttctgtcgagggttattggcagatcaccgtggacagtgttaccatgaacggacaggccatcgcttgcagtgatggctgccaggccattgttgacacaggcacctctctgctggctggaccaaccaatgccattgccaacatccagagctacattggagccagccagaactcatacggccagatggtgatcagctgctcagccatcaacagcctgcctgacatcgtcttcaccatcaacggcatccagtaccctctgcctcccagtgcctacatcctacagagccaacagggctgtgtcagcggcttccagggcatgaacctccccaccgcctccggagagctgtggatcctgggtgatgtcttcatccgccagtactttgccgtgtttgacagggcaaacaaccaggttggcctggctcccgtggcctgagcctgcatctctcctgccacgtcccaggaggagctagccttagctgcccactctagatgtacataattctcccgattgttcttcctatgggattgtggaggaggagtctcgacccaattccctgtcattaccaataacgtagaataaaaacctcacctcctgaaaaaaaaaaaaaaaaaaaaaaaaaaaaaaaaaaaaaaaaa

SEQ ID NO: 2698 - DNA, 474 bp, Canis familiaris
cccctatgtacgtcgtgcattactggtttgccccatgcatataagcatgtacatagtattatatctttgcatataaacataaatcatttatcctacctgacccttatttcctatcaggaaatatttgattgcacgtcacttagtccaataagggcttaatcaccatgcttcaagaaaccatcatcccttgcatgaagtatcccacttgctctgggcccatattcatgtgggggtttctattctgaaactatatctggcatctggttcttacttcaggaccatacttttctaactccaatcctactaatcctctcaaataggacatctcgatggactaatgactaattagcccatgatcacacataactgtggtgtcatgaatttggtatcttttattttttggggggaacttgctatcactcagctatgaccgcaacggccactaactctattatacgcctgcactcaggagat

SEQ ID NO: 2699 - DNA, 1867 bp, Canis familiaris
tctgcataggtaagtttggctgcctaacttagatttgtataatcctacaaattctaacaggactattcctagtccttcacttcacatcagatacagcaacagccttctcatcagttacccgtatctgctgagatgtaaactacagctgaattatctgatatatacatgcaaatggagcctccatattatttattagtttattcaagcctatgggatgaggattatattacagctcctatgtattcatagaaacatgaaacattggaattattcttctatctgtgaccatggccacggcattcataggttacgtcctcccatgaggacaaatatctttataaggagcaactgttatcacaaatttactttcagccatcccttaaatcagaactaacctggtagaatgaatccgaggtggtttcccagttgataaagcaatccaaacatgattcttcacattccattttatcctcccattcattatcgcagccctggctatagtacatctattattcttacacgaatcaggatccttcagggatttcatctgattcagacaaaattccatttcacaattaaagatatcctaggagccttattcctcattctaacattaatatcactagtcctatttaaacctgacctactgggagaatcagataactacatccctgcaaacccagttaaccccccaccacacataaaacctgagtgatatttcctatttgcctacgctatcctatgatccatccttaagaaactaggaggagtacttgctctagtatcctccattttaaccctagcaattatccccttactccacacatccgaacagtgcggagtaatatttcgactactcagtcaatgtctattctgactattaacaccagatttactcacactaacatgaatcggagaacaaccagtagaacacccctttattattatcggtcaaatagcatcaatcctgtacttcacaatcctcctaattctaataccaatcattagtattattgaaaataaccttattaaatgaagagtgttcattgtataattattattttggttttgtaaaccaaagatagagaataatcactctccctaatcactctccctaagactcaaagaagaagcatcagctccaccatcagcacccaaagctgaaattcttttttaaactattccctgatagacaaatcccacccaacaactttcccaatttgtatattgctacaattctactgtgccatgtatgtctaaaatatttaaccgtaactacctattcaaccaatatagaattttttttcaatttttgtcatgcattaatggtttgccccatgcatataagcatgtacatgctattattaatattacataaggacatacattcaaacgcttatccattccaaaataaaatgaatcatgctcctcacccagtccagaagggcttaatcaataagcctcaagaaaccatcaatccttgcacaaagtatccctcttctcactccaggcccatactacatgggggtttctagcctgaaactatacctggcatatggttcttacttcaggaccatataattctttactcctatccttcaaccctctcaaatggaacatctcgatgtccaatcagcccatgatcatacataactgtggtgtcatgcatttggtatcttttaagttttagtgggggggacagatatcactcagctatgaccataaaggtctcgacgcagtcaaataacttgtagctggacttaattaatatcatataccagcatcacataaccataaagtataattcagtcaatggttacaggacatacaaatttatacacacgtacacatacacatacacgtacac

SEQ ID NO: 2700 - DNA, 2375 bp, Canis familiaris
tcacttagtccagtaagggcttaatcaccatgcctcgagaaaccatcaatccttgcgcgaagtgttcttcttctcgctccgggcccatgttatgtgggggtttctatactgaaactatacctggcatcgggttcttacttcagggccatatccttattaactccaatcctactaatcctctcaaatgggacatctcggtggactaatgactaatcagcccatgaccacacataactgtggtgtcatgcatttggtttcttttatttttcgggggggaacttgctattactcagctatgaccacaacggccactaactctaatatgtatctgcactctgggaatatgcccgtcgtggccccgacgcagtcaaataactcgtagctggacttatttattatcatttatcaactccgtggacaattcaaggtgctattcagtcaatggtttcaggacatacagattttaaacacgtacacacgtacacgtgtacacacgtacacacgcacgtatacacgcgagacagtgaattaactaatccaaacctcccttaccccccataaacccatgttatttactatatacttatttatgtcctgccaaaccccaaaaacaggactaagtctatgcaacatccataagcctcgactaaattttatacaagtacatcacaacactagttaattcaacaaaacgactttatatgcctatctcgcaatctatctatagatagggtttccttaacttcactccttctatttaactcacaaaaatccaaacccacacactcactaacatagcaatgcaataccataaatatttgttaatgtagcttaattagtaaagcaaggcactgaaaatgccaagatgagtcataagactccatcaacacaaaggtttggtcctagccttcctattagtccttagtaagcttacacatgcaagcctccacgccctagtgagaatgccctcaaagtcaccaacgatttaaaggagcaggcatcaagcacactttaaagtagcttataacactttgctaagccacaccccccatgggattcagcagtggtaaaaattaagccatgaacgaaagttcgactaagctatactaaagagggctggtaaatttcgtgccagccaccgtggtcatacgattaacccaaactaataggcccacggagtaaagcatgtttaagataatattctactaaagttaaaacttaactaagccgtaaaaagctacagttaccataaaatctgctacgaaagtgactttaaaatttctgattacaagatagctaaaatccaaactgggattagataccccactatgcttagccctaaacataaaccattctataacaaaataattcgccagagaactactagcaacagcttaaaactcaaaggacttggcggtgctttatatccctctagaggagcctgttctataattgataaaccccaataaacctcaccatctcttgctaatgcagtctatatactgccatcttcagcaaacccttaaagtttgctttaagcaaactttagtaagcacaatcatttcgcataaaaaagttaggtcaaggtgtaacttatgagatgggaagaaatgggctacattttctgttccgagaatatctcacaaaagtttttatgaaattaaaagccaaaggaggatttagtagtaaattaagaatagagagcttaattgaatagggccataaagcacacacacaccgccagtcaccctcctcaagtaaaaactgaacccataatcatattagctgtactaaaacacgagaggagacaagttgtaacaaggtaagcacactagaaggtgtgcttggattaaccaaagtgtagctttattaaagcatctggcttacacccagaagatttcatacctcatgaccattttgaacaaaagctagcccaactaaccctaaaccaaaacaccataacactacaatataaaacattcagttaaaccataaaagtataggaaatagaaattctaattggagctattgagatagtaccgtaagggaatgatgaaagacgttttaaaagtacaaaacagcaaagattaccccttttaccttttgcataatgaattagccagaaataacaaagagaacttaagctaagtcccccgaaatcagaggagctacctatgaacaatctagaaggatcaactcatctatgtcgcaaaatagtgagatttataggtagtggtgaaaagcctaacgagcctggtgatagctggttacccataaacagaattttagttcaactttaaatttgcctaaattacctaaaaaattaaaattttaatgtaaatttaaaatatattctaaaaaggtacagcatttta

SEQ ID NO: 2701 - DNA, 2650 bp, Canis familiaris
atgacatgaaaaatcatcattgtatttcaactataagaacattaatgactaacatccgaaaaacccacccattagctaaaattgttaacaactcattcattgatctcccgcaccatcaaatatctcagcttgatgaaacttcgggtccctgcttggagtgtgtctgattctacagattctaacaggtttatttttagccatacattatacatcagatacatcacatcaacagccttctcatcagttactcacatctgtcgagacgtcaactacggttgaatcatctgttatatacatgcaaacggagcctccatattctttatctgcctttttatacacgtaggatgaggactatactatggctcttatgtattcatagacacatgaaatattggaataattctcttatttgcaactatagccacagcattaataggttatgtcctaccatgaagacaaatatccttttgaggagcaactgtcatcacaaacctacactcagcaatcccctacatcgggactaacctgttagaatgaatctgaggtggcttctcagttgacaaagcaaccctaacacgattcttcacattccacttcattctcccattcattatcgcaggactagcaatagtccatttcctatttctacacgaaactggatccaataacccttcaggaatttcatttgactcagacaaaatcccattccacccttactatacaatcaaagatatcctaggagccctactcttagttctagtactaatatcactagttttatttacaccagatctattaggagacccggacaactacatccctgcaaaccccttcaacactcccccacacatcaagcccaaatgatatttcctatttgcctacgccattctacaatcaatccccaacaaactaggaggtgtatttgtcctaatattctctatcctaatcctagcaattattcccttactccacacctccaaacaacacggaataatatttcgtcctcttagtcaatgcctattttgattactaacagctgatctactcacactaacatgaattggagggcaaccagtagaacacccctttattattatcggccaagtagcctccatcctatactttactaccctcttagtcctgctgccaactatcagcattatcaaaaacaatctcctaaaatgaagagtctttatagtatattaattatcttggtcttgtaaaccaaaaatggagactaatcaccctccttaagactcaaggaagaagcaccagctccaccatcagcacccaaatctgaaattcttcttaaactattccctgataataacctcctctattcatatattgcaataaccctactgtgctatgtcagtaagtccaaaaaaattttccctcctacgtaggcgtgcattactggtttgcctcatgcatataaacatgtacatattattattactattgcatatagacatgaattttaattcctacctaactcctatttcctaagggaattactttactgcatgtcacttagtccaataagggcttaatcaccatgacttgagaaaccatcaattctagcatgaagtgtccctcttctcgcgccgggcctattttcatgtgggagtttctagccggaaactatacctggcatctggttcttacttcagggacatgtctcctcttaattccaatcctactaatcctctcaaatgggacatctcaatggactaatgactaatcagcccatgatcacacataactgtggtgtcatccatttggtatctttattttttggggggagaacttggtatcactcagctatgaccgtaacggccagcgactcagtcaagtaacttgtagtcagagaatatgaccgtcagggtcccgacgcagtcaagtaacttgtagctgggcttattcattatcatttatcaactttgctattcagtcaatggttacaggacatacagatttacgtgcacacatacacacgtacacatgtatacacctactgcctatacgcaagacatgaaattaactataccaaaccccgggtaccccccataaacttatattatttacaatatacctatttgtgtccaaccaaacctccaaaacaggactaagtaaatgtaacagtcataagccatgtctaaatttcatacgattatattataaccctagttaatttaacaaaataatttcatacgcctaaatctgcaatctatctatagataggacttccttgactccaccccctccatttaattcacaaaaaaattcaaacccatattctcacaacacaatgtataacaccataaaaacacctgttaatgtagcttaataaataaaacaaggcactaagaatgccaagatgagtcataagactccataaatacaaaggtttcttcttagccttcctattagtccttagtaagcttacaaatgcaattctccacgccccagtgagaatgccctcaaaatcactaacgatttaaaggagcgggtatcaagcacacgctaaagtagctcataacaccttgctaagccacacctccacgggatacagcagtgataaaaattaagcgatgaaaggaaagtttgactaagctatattaaagagggttggtaaatttagggccat

SEQ ID NO: 2702 - DNA, 4131 bp, Canis familiaris
acacatccaaacaatgtggaataatattccgacccctcagtcaatgtttattctgatttctaacagccgatctactcacattaacatgaatcagggggacaaccagtagaacccctttatcattatcggccaaatcgcctccattctatattttaccatcctcttagtcctactaccaactatcagtatcatcgaaaacagtctcctaaaatgaagtctttgtagtatatttattaccttggtcttgtaaaccaaaaatggagactaatcaccctccctaagactcaagaaagaagcaccagctccaccatcagcacccaaagctgaaattattcttaaactattccctgataacaaaccctcctctattcatatattgcaacaactctactgtgctatgtcagtatgtccaaaattcctttttttcccctcccctatgtacgtcgtgcattactggcttgccccatgcatataagcatgtacatattattatattcttacataaagacaagtattgtttatcacacctaacacatatgtcccgtcgggacatgtttgcacatcacttagtccaataagggcttaatcaccatgcctcgagaaatcatcaatccttgggcgaagtatccctcttctcgctctgggcccatacttatgtgggggtttctatactgaaactgtacctggcatctggttcttacctcagggccatactttcattcactccaatcctactaatcctctcaaatgggacgtctcgatggactaatgactaatcagcccatgatcacacataactgtgatgtcatgcatttggtatcttttatttttcgggcgggggggaggggacttgctatcactcagctatgactgcaactgcactaactctaacttacatctgcactcaaggaatatgcccatcgtggccccgactcagtcagataacttgtagctggacttattcattatcatttatcaactccgtgcacaactcaaggtgctattcagtcaatggttttaggacatacagattttacacacatacacacgtatacacgtatgcgcacacacatgagacattaaattaatccaaacccctcttaccccccgtaaactcatgtcatttactatatacttatttatgtcccgccaaacccccaaaacaggactgtctatgcaacatccataagcctcatctaaattttatacaagtacattacagccccagttaattcaacaaaacgactttacatgcctatctcgcagtctatctatagacagggtttccttaactttacccctcctatttattacacaacccatacccacacactctctatcatagtatataatgccataaacatttgttaatgtggcttaattagtaaagcaaggcactgaaaatgccaagatgagtcataagactccacaaacacaaaggtttggtcctagccttcctattagtccttagtgagcttacacatgcaagcctccacgccccagagagaatgcccttaaaatcacgatttaaaggagcgggtatcaagcacacttttaagtagctcataacaccttgctaagccacacccccacgggatacagcagtgataaaaattaagccatgaacgaaagttcgactaagctatactaaagagggttggtaaatttcgtgccagctaccgcggtcatacgattaacccgaactaataggcccacggcgtaaagcgtgtttaagataatacaatactaaagttaaaacttaactaagccgtaaaaagctacagttactataaaatatgctacgaaagtgactttaaaattttctgactacacgatagctaagatccaaactgggattagataccccactatgcttagccctaaacataaatcagtctataacaaaataattcaccagagaactactagcaacagcttaaatctcaaaggacgtggctgtgctttatatccctctagaggagcctgttctataatcgataaaccccgataaacctcaccatctcttgctaatgcagtctatataacgccatcttcagcaaacccttaaaaggaagaatagtaagcacaatcatttcgcataaaaaagttaggtcaaggtgtaacttatgagatgggaagaaatgggctacattttctattccaagaatatctcacgaaagtttttatgaaactaaaaactgaaggaggatttagtagtaaattaagaatagagagcttaattgaatagggccatgaagcacgcacacaccgcccgtcaccctcctcaagtaaaaactaaacccataatcatattaatcatactaaaacacaagaggagacaagttgtaacaaggtaagcataccggaaggtgtgcttggatcaaccaaagtgtagcttaattaaagcatttggcttacacccagaagatttcatactccctgaccactttgaacaaaggctagcccaactaaccccaaaccaaaataccataatgctacaaaataaaacattcagttaaactataaaactataggagatagaaattctaattggagctgtacagatactactgtaagggaatgatgaaagacattttaaatgttacaaaacagcaaagattaccccttttaccttttgcacaatgaattagccagaaataacaacaaagagaacttaagctaagtccccctaaacccagatgagctacctatgaacaatctagaaggatcaactcatctatgtagcaaaatagtgagatttataggtagcggtgaaaagcctaatgagcctggtgatagctggtttcccataaacagaattttagttcaactttaaatttacctaaaaaaaaaataaaattctaatgtaaatttaaaatataatctaaaaaggtatacagctttttagaataaggatacaaccttcattagagagtacatgttaatattaccatagttgggctaaaagcagccatcaattgagaaagcgttcaagctcaacaaacaacatgacttaattccaaccatctttaatcaactcttaatatgccattgggttattctatttaaatataaaagcaataatgctagcatgagtaactagaattatttctccccgcataagcttatatcagaaatggataaaccactgatagttaacaacctgataaaattaacccaaaaataaaatacttatcaattctattgttaactcaacacaggcatgcacccaaggaaagattaaaagaagtaaaaggaactcagcaaacataaaccctgcctgtttaccaagaaacatcatcttcagcatccccaatattggaggcactgcctgcccagtgacatttgttcaatggccgcagtatcctgaccgtgcaaaagtagcatgatcatttgttctctaaataaagacttgtatgaatggctacacgagggtttgattgtctcttacttccaatcagtgaaattgaccttcccatgaagaggtgggaataacataataagacgagaagatcctatggagctttaattaattaacccaaattcatgggcaatatctacttaccaggcataacatttcaccattattgtgggttaacatttaggttggggtgacctcggaatataaaaaaactcccaagtgattaaaatttatttaccagtcaaaatataacatcatttattgatccaatagtttttgatcaacggaacaagttaccctagggatagcagcgcaatcctattcaagagtccatatcaacaatagggtttatgacctcgatgttggatcaggacatcttaatggtgcagcagctattaagggtttgttcaacaattaaagtcctacgtgatctgagttcagaccggagtaatccaggacggtttctatctatttaacaatttctcccagtacgaaaagacagagaaataaggcctaccttacaaaagtgccttaaaactaatagatgaaattaagctcaatctaaccagtttatctcccgcataagcccaagaaaggagggctttgttagggtggcagagcccggtaattgagtaaaacttaaacctttatccccagaggttcaactcctctccctaacatcatgttcttttatgtaagttttctctctt

SEQ ID NO: 2703 - DNA, 4251 bp, Canis familiaris
catcctgattctagcaattatccccttacttcacacatccaaacaacggggaataatattccgactcctcagtcaatgtttattctgattgctaacagccgacctactcacattgacatgaattggagggcaaccagtagagcatcctttcatcattattggtcaaatcgcctccattctatactttactatcctcctaatcctgctaccaactatcagtattatcgaaaacaatctcctaaaatgaagagtctttgtagtatatttattaccttggtcttgtaaaccaaaaatggagactaactaccctccctaagactcaaggaagaagcaccagctccaccatcagcacccaaagctgaaattcttcttaaactattccctgataacaaaccttcctctattcatatattgcaacaactctaccgtgctatgtcagtatgtccaaaattttttcccctcccctatgtacgtcatgcattattggtttgccccatgcatataagcatgtacatattattatatctttacatacaggcatgtattgtctaccacacctaacacatatttcctagcgggatatatttgattgcacatcacttagtccagtaagggcttaatcaccatgcctcgagaaaccatcaatccttgcacgaagtgtccctcttctcactccgggcccatattcatgtgaggtttctatactgaaactatacctggcatctggtacttcagggtcatactctgattcactccaatcctactaatcctctcaaatggaacatcttgatggactaatgactaatcagcccatgatcacacataactgtggtgtcatgcatttggtatcttttattttttgggggagagcttgctatcactcaactatgaccgcaacgccactaactctaatatatgtatctgcactcagggaatatgcccgtcgcggccccgacgcagtcaaataacttgtagctggacttactcattatcatttatcaactccgtgcacaattcaaggtgctattcagtcaatggtttcaggacatatagattttatacacgtacacacatacacacatacgggcacacacgcgagacattaaattaactaatccaaacccccattaccccccataaactcatgttatttactatatacttatttatgtcccgccaaaccccaaaaacagaactaagtctatgcaacatccataagcctcatctaaattttatacaagtacatcacaaccctagttaattcaacaaaacgactttatatgcctatctcgcagtctatctatagatagggtttccttaactttatctcttctatttaatacacaacccatacccacacactcactaacatagcatacaataccataaacatctgttaatgtagcttaattagtaaagcaaggcactgaaaatgccaagatgagtcataagactccataaacacaaaggtttggtcctagccttcctattaatccttagtaaacttacacttgcaagcctccacgccccagtgagaatgcccttaaaatcactaacgatttaaaggagccggtatcaagcacacttttaagtagctcacaacaccttgctaagccacacccccatgggacacagcagtgacaaaaattaagccatgaacgaaagttcgactaagctatactaaacagggttggtaaatttcgtgccagccaccgcggtcatacgattaacccaaactaattggcccacggggtaaagcgtgtttaagataatacaatactaaagttaaaacttaactaagccgtaaaaagctacagttaccataaaatatgctacgaaagtgactttaaaattttctgattacacgatagctaagatccaaactgggattagatgccccactatgcttagccctaaacataaatcattctacaacaaaataattcgccagagaactactagcaacagcttaaaactcaaaggacttggcggttctttatatccctctagaggagcctgttctataattgataaaccccgaaaaacctcaccatctcttgctaatgcagtctatataccaccatcttcagcaaacccttaaaaggaagaatagtaagcacaatcatttcgcataaaaaagttaggtcaaggtgtaacttatgagatgggaagaaatgggctacgttttctattccaagaatatctcacgaaagtttttatgaaactaaaaactgaaggaggatttagtagtaaattaagaacagagagcttaattgaatagggccatgaagcacgcacacagcgcccgtcaccctcctcaagtaaaaactaaacccataatcatattaaccatactaaaacacaagaggagacaagtcataacaaggtaaacataccggaaggtgtgcttggattaaccaaagtgtagcttaattaaagcatctggcttacacccagaagatttcatactccctgaccactttgaacaaaagctagcccaactaaccctaagccaaaatatcgtaactctacaaaataaaacattcagttaaaccataaaagtataggagatagaaattctaattggagctatagagatagtactgtaagggaatgatgaaagatattttaaatgtacaaaacagcaaagattaccccttttaccttttgcataatgaattagccagaaataacaaagagaacttaagctaagtcccctgaaacaagacgagctacctatgaacaatctagaaggatcaactcatctatgtagcaaaatagtgagaagatttataggtagcggtgaaaagcctaacgagcctggtgatagctggttacccataaacagaattttagttcaactttaaatttacctaaaaaaattaaaattttaatgtaaatttaaaatataatctaaagaggtacagctttttacaataaggatacaaccttccttagaaagtacatgttaatatcaccatagttggcctaaaagcagccatcaattgagaaagcgttcaagctcaacaaacaatatgacttaattccaaccgtattcaatcaactcctaatatgccactgggttattctatttaaatatagaagcaataatgctaatatgagtaacaggaattatttctccctgcataagcgtatatcagaaacagataaaccactgatagttaacaacctgataaaactaacccaaaaataaaatacttatcaattccattgttaacccaacacaggtatgcacccaaggaaagattaaaagaagtaaaaggaactcggcaaacataaaccccgcctgtttaccaaaaacatcacctccagcatccccagtattggagacactgcctgcccagtgacatttgttcaacagccgcggtatcctgaccatgcaaaggtagcataatcatttgttctctaaataagaacttgtatgaatgtacacgagggtttgactggctcttacttccaatcagtgaaattgaccttgccgtgaagaggcgggaataacataataagatgagaagaccctatggagctttaatgaattaacccaaattcatgagtaatatatacctactaggcataacatttcaccattgttatgggttgacaatttaggttggggtgacctcggaatataaaaaaacttccaagtgattaaaatgtagacttaccagtcaaaatataatatcatttattgatccaatagtctttgatcaacggaacaagttaccctagggataacagcacaatcctattcaagagttcatatcgacaatagggtttacgacctcaatgttggatcaggacatcctaatggtgcagcagctattaagggttcgtttgttcaacgattaaagtcctgcatgatctgagttcagaccggagtaatccaggttggtttctatctatttaacaatttctcccagtacgaaaggacaagagaaataaggcctaccttacaaaagtgtcttaaaactaatagatgaaattaagctcaatctaaccagtttatctccccataagcccaagaaaggagggctttgttagggtgacagagcctggtaattgtgtaaaacttcaacctttatccccagaggttcgactcctctccctaacatcatgttctttatcaatattatctcagtaattgttccaattctcctcgccgtagcctttcttactcttgttgaatgaaaagtcctaggctatatacaactccgaaaaggccccaatatt

SEQ ID NO: 2704 - DNA, 5712 bp, Canis familiaris
ttctattccatccctattacacaatcaaagacatcttaggagttctacttctatttctagtactgatgtcactagttttattttcaccagacctactaggagacccagataattatactcctgcaaatcccctcaacactcccccacacattaagcctgagtgatacttcctattcgcctatgccatcctacgatccatccccaataaactaggaggagttctcgccctagtattctccatcctaattctagcaattatccccttacttcacacatccaaacaacgtggaataatattccgacccctcagtcaatgtttattctgattgctaacagccgatctactcacattaacatgaatcggagggcaaccagtagagcaccccttcatcattattggccaaatcacctccattctatactttactatcctcttagtcctactaccaactatcagtatcatcgaaaacaatctcctaaaatgaagagtctttgtagtatatttattaccttggtcttgtaagccaaaaatggagactaattaccctccctaagactcaaggaagaagcaccagctccaccatcagcacccaaagctgaaattcttcttaaactattccctgataacaaaccctcctctattcatatattgcaacaactctactgtgctatgtcagtatgtccaaaatttcctttatacccctcccctatgtacatcatacattactgttttgccccatgcatataagcatgtacatattattatacctttacataaagacatgtattgtctaccacacctagcacatatttcctatcaggatatgttcgactgcacgtcacttagtccagtaagggcttaatcaccatgccttgagaaaccatcaatccttgcatgaaatatccctctttttgctcgggcccatattcatgtgggggtttctatactgaaactatatctggcatctggttcttacttcagggccatactttcattcactccaatcttactaattctctcaaatgggacatctcgatggactaatgactaatcagcccatgatcacacgtaactgtggtgttatgcatgtggtatcttttatttgtcgggggggggggaacttgctatcactcaactatgaccgcaacggcactaactctaatatatatctgcactcagggaatatgcccgtcgcggccctgacgcagtcagataacttgtagctggacttattcattatcatttatcaactctgtgcacaattcaaggtgctattcagtcaatggtttcaggaaatacatattttatacgcgtatacacgtacacacgtacacgtacacatgtacgcacagacacccgagacattaaattaatccaaacccccttactccccataaactcatgtcgtttactatatacttatctatgtcccgccaaaccccaaaaacaggactaagtctactcaacatccataagcctcatctaaattttatacatcgcaaccccagttgaattcaacaaaacgactttatatgcctatctcacagtctatctatagataggttttccttaactttaccccttctgtttattacacaacccatacccacacactcactaatatagcatacaatgccataaacatttgttaatgtagcttaattagtaaagcaaggcactgaaaatgccaagatgagtcataagactccataaacacaaaggtttggtcctagccttcctattagtccttagtaagcttacacatgcaagcctccgcgccccagtgagaatgcccttaaaatcactaacgatctaaaggagctggtatcaagcacactcttaggtagctcataacaccttgctaagccacagcctcacgggatacagcagtgataaaaattaagccatggacgaaagttcgactaaggtatcctaaaaagggctggtaaatttcgtgccagccaccgcagtcatacgattgacccaaactaataagcccacggcgtaaagtgtgtttaagataatacaatactaaagtaaaaacttaactaagccgtaaaaagctacagttaccataaaatatgctacgaaagtgactttaaaattttctgtttacacaatagctaagatccaaactgggattaaataccccactatgcttagccgtaaacataaatcattctacaacaaaataattcgccagagaactattagcaacagcttaaaactcaaaggacttggtggtgcttttatatccctctagaggagcctgttctataatcgataaaccccggtaaacctcaccatctcttgctaatacagtgtatataccgccatcttcagcaaacccttaaaaggaagaatagtaagcacaatcatttcgcataaaaaagttaggtcaaggtgtaacttatgagattgaaagaaatgggctacattttctattccaaggatatctcacgaaagtctttatgaaactaaaaacagaatgaggatttagtagttaattaagaatagagagcttaattgaatagggccatgtaagcatgcactcacccgcccatccccctccttcaagtaaaaactaaacccataatcatattagccatactaaaacacaagaggagggatccctgggtggcgcagcggtttggcgcctgtctttggcctagggcgcgatcctggagacccaggatcgattcccacatcgggctcccggtgcatggagcctgcttctccctctgcctgtgtctctgcctctccttctctctctgtgactatcataaataaataaaaattaaaaaaaaaaaaaaataaaacacaagaggagacaagttgtaacaaggtaagcataatggaaggtgtgcttggattaaccaaagtgtagcttaattaaagcatctggcttacacccagaagatttcatactccatgaccactttgaacaaaagctagcccaactaaccctaaaccaaagtaccataactttacaaaataaaacattcagttaaaccataaaagtataggagatagaaattataattggagctatagagatagtaccgtaagggaatgatgaaagacattttaaaagtacaaaacagcaaagattaccccttttaccttttgcataatgaattagccagaaataacttaacaaagagaacttaagctaagtcccctgaaaccagacgagctacctatgaacaatctagaaggatcaactcatctatgtagcaaaatagtgagaagatttataggtagcggtaaaaagcctaacgagcctggtgatagctggttacccataaacagaattttagttcaactttaaatttacctaaaaaaattaaaattctaatgtaaatttaaaatataatctaaaaaggtacagctttttagaataaggatacaaccttcattaaagagtacatgttaatatcaccatagttggcctaaaagcagccatcaattgagaaagcgttcaagctcaacaaacaacatgacttaattccaaccgtatttaatcaactcctaatatgccactgggttattctatttaaatatagaagcaataatgctagtatgagtaacaagaattatttctccctgcataagcttatatcagaaacggataaaccactgatagttaacaacctgataaaattaaccccaaaataaaatacttatcaattctattgctaacccaacacaggtatgcacccaagaaaagattaaagaagtaaaaggaactcggcaaacataaaccccgcctgtttaccaaaaacatcacctccagcatccccagtattggaggcactgcctgcccagtgacatttgttcaacggccgtggtatcctgaccgtgcaaaggtagcataatcatttgttctctaaataaggacttgtatgaatggctacacgaggggttgactgtctcttacttccttattattattattattattattattattattattatttttgtctcttacttccaatcagtgaaattgacttcccgcgaagaggcgggaataacataataagacgagaagaccctatggaactttaattaattaacccaaattcatgggtaatatttacctactagacaaacatttcaccattattatgggttaacaatttaggttggggtgacctcggaatataaaaaaacttccgagtgattaaaatttagacttaccagtcaaaatataatatcatttattgatccaatagtttttgatcaatggaacaagttaccctagggataacagcacaatcctattcaagagtccatatcgacaatagggtttacgaccttgatgttggatcaggacatcctaatggtgcagtagctattaagggttcgtttgttcaacgattaaagtcctacgtgatctgagttcagaccagagtaatccaggtcagtttctatttatttaacaatttctcccagtatgaaaggacaagagaaataaggcccaccttacaaaagtgccttaaaactaatagatgaaattaagctcaatccaaccagtttatctccccataagcccaagaaaggagggctttgttagggtggcacagcccggtaattgcgtaaaacttaaacctttatccccagaggttcaactcctctccctaacatcatgttctttatcaatattatctcattaattgttccaattctcaccgtagcctttcttacccttgttgaacgaaaagtcctaggctatatgcaactccgaaaaggccccaatattgtaggcccatatggtcttcttcaacccatcgccgatgcagtaaaacttttcacaaaggaacccctatgacccctcacatcctctatatctatatttatcctggcacccatccttcccctatcactagccctaaccatatgaatcccccttcccataccttatccacttattaatataaacctaggagtactatttatgctagcaatgtcaagcctcgccgtatactccattctttgattaggatgagcttcaaactccaaatacgccctaatcagagccctccaagctgttgcccagacaatttcatatgaagtcacactagcaattatcctcctttccgtgttactaataaatggatccttcacactatccatacttatcattactcaagaacacatatgactaattttccctgcctgacccctggccataatatgatttatctctaccttagcagaaacaaaccgagcccccttcaacctaaccgaaggggaatctgagctagtttctgggtttaatgtagaatatgcagcaggcccatttgccctattttttctagcagagtacgcaaacattattataataaatattcttacaacaatcttatttttcagcacatttcacaacccactcataccagagctctactctatcaacttcatcattaaaacactcctaaccatttctttcctatgaatctgagcatcataccctcgattctgctacgaccaactaatacacctcctatgaaaaaactttctaccattaaccctagccctgtgtatatgacatgccgccctacccattatcactgcaagcattccaccccaaacataagaaatatgtctgacaaaagagttactttgatagagtaaataatagaggtttaagtcctcttatttctagaataataggctttgaacctaatcctaagaattcccagatc

SEQ ID NO: 2705 - DNA, 3651 bp, Canis familiaris
atgctgctcccccttatcattctgtggccggtagtttttaaatgtagttttgctagtctctcagacccggagaactggaactgtcctgaagtctctccctcaggaaaggggagccctgcttgtgtgggtcctgcacccttcttaattttctcccatggaatcagtatctttaggattgacctggaaggcactaatcatgagcaattggtggcagatgctggtgtatcagtgatcatggattttcattataataaagaaagaatctattgggtagatccagaaagacaacttttgcaaagagtttttctgaatgggacaaggcaagagagagtatgcaatatagagaaaaatgtttcaggaatggcaataaattggataaatgaagaacttatttggtcaaatcaacaggaaggaatcatcacagtaacagatatgaaaggaaacaattcgcgagttctcttaagagccttaaactatcctgcaaatgtagcaattgatccaatagaaaggtttatattttggtcttcagaggtggcagtggctggcagccttcacagagcagatctcaatggtgtggaagagaagattcttttacagacatcagaaagaataacagctgtgtcattggatgtgcttgataaacagcttttttggattcagtacagcagagatggaagcaattctcatatttattcctgtaattatgatggaggttctgtccatcttagcaaacatcttacacagcataatttttttgcaatgtccctttttgggaatcagatcttctattcaacatggaaaaagaagacaatttggatagctaacaaacacagtgggaaggatatggttagaattaacctagattcatcatttgtaccacctggtggaatcaaagtagtgcatccactcttacagcccaaggcagagagtggcacttgggcacctgatcagaaactctgcaaatggaagcaaggtaactgcagaggcagcacgtgtggtcaagattcaaagtcctattcatgcacgtgtgcagagggatatactttaagccaagatggaaaatactgtgaagatgtcaatgaatgtgccttttggaatcatggctgtactcttgggtgtgaaaacatccctggatcttattattgcacatgccctgtaggatttattctgcttcctgatgggaaacggtgtcatcaattaattgcctgtccgagcaatacatctaaatgtagccatgactgtgttctgacatcagatggtcccatatgtttctgtcctgaaggctcagtgcttgaggcagatggaaaaacatgtagtggctgttcatcacctgataatggtggatgtagccagctctgcctccctctcagcccagtatcctgggaatgtggctgctttcctgggtatgacctacaactggacaaacaaagctgtgcagcatcaggaccacaaccatttttgctgtttgccaattctcaagatattcgacacatgcattttgatggaacagattatggaaccctgctcagccagcaaatgggaatggtttttgcccttgatcacgaccctgtggaaaataagatatactttgcccatacagccctgaagtggatagagagagctaacatggatggttcccagcgagaaaggcttattgaggaaggagtggatgtgccagaaggtcttgccatagattggattgaccgtaaattctactggacagacagcggaaaatctcttattgaagggagtgatttaaatggaaaacatcgtgagataatcatcaaggaggacatctctcagccacgaggaattgctgttcatccaatggccaagagattattctggactgatatggggattaatccacgaattgaaagttcttcccttcaaggcattggccgactggttatagctagctctgatctggtctggcccagtggaataacgattgattatgtaactgacaaattgtactggtgtgataccaagctgtctgtgattgagatggccaatctggatggttcaaaacgccaaagacttgcccagaacgatgtaggtcacccatttgctatggccgtgtttgaggatcacgtgtggttctctgattggactatgccatcaataataagagtggacaagaggactggcaaaaacagggtacgtctccgaggcagcatgctgaagccttcatcactggttgtagttcatccattggcaaaaccaggagcacagccctgcttatatcaaaatggaggctgtgaacatatttgcaaagagaggtttggaactgctcaatgtttgtgtcgtgaaggttttgtgaaagccccagatgggaaaatgtgtctggctctgaatggccatcagataccggcagtaggtagtgaagcagatctaagtaatcacgtaacgccaggggatgtcttacccagaagtgaaggatttgaagataacattacagaatctcagcatatgctagtggccgaaatcatggtgtcagatgctgacgactgtgctcctgtgggatgcagtacatgggctgagtgtgtttcagagggagaaaatgccacatgtcagtgtttgaaaggatttactggggatggaaagctatgttttgacatagatgaatgtgagatgggcatcacgatttgccctcctacctcctcaaagtgcgtcaatactgaaggtggttatgtttgtcagtgctcagaaggctaccgaggcgatgggatccactgtctggatattaatgagtgccaactgggcatgcacacctgtggggaaaatgccacctgtacaaatatggagggaaactatacctgcatgtgcgctggcagcctgtctgaacctggacagatatgtgctgactctactccgccttctcatcccatggaggacagtcactattctgtgagaaatggttatcgggaatgcccctcatcctatgacgggtactgcctctataatggtgtgtgtatgtacattgaagcagtcgacagatacgcatgcaactgtgtttttggctacgtcggggagcgatgtcagcaccgagacctgaaatgggaactgcgccacgcgggccagggccggcagcggcaggtcgccgcggtggccgtgggcgtggtcgtgctcgtcctgctgctgctgctcgggctggggggcgcgcactgctacaggactaagaagttgtcatcaaaaaatttaaagaatccttatgaagagccaagcagagagggtagcagtagcaggccttcagacagcgaggctaggatggcctcttttccccaaccttggtttgtggttataaaggaacatcaaaatctcaggaatggaagtcaacctatggccctcaaggatggtgagtcagcagatgttagccaattttcctctccagagccagggtcagtaaaacggacctcatggagaaatgaacaccagttatataaggacacagagcaaggctgctgcactccaccatccagtaatagaggcaccggctctcagtcaatggagcagagcttttctgtcccctcctatgaggcacagcccattgctttgggggttgagaagccacagtctctcctatcagctaaacccttattgcaacaaagggccccagatccaccacaccaaatgaagctgattcagtga

SEQ ID NO: 2706 - DNA, 466 bp, Canis familiaris
atgattcccttgaagatgctgctcctggtcacgctcctcctgggggcttctctgcaggtcacccatgcagctcgaggcaccaacgtgggccgggagtgctgcctagagtacttcaaaggagccattcctatcagcaggctgacaaggtggtacaagacttcaggggagtgtcccaaggatgccatcgtgtttgtaactgtccaaggcaagtccatctgttccgaccccaaggacaagagggtgaagaaggcggtcagatatttacaaagaacctggaagggagggccccaagagtcctgattcctgcctggatcatttggagacctccaccctcagcgtttgctaccccaacctccagctgctggagtccagtggaggcctccaaggacaaaggtgaaccctgtcccctcttctggatggaaccatggcacgaaagagcccattaaagtctgtctctttgtacttt

SEQ ID NO: 2707 - DNA, 1252 bp, Canis familiaris
gggggggggggggcagcactgtccgtgggggtgactttctgaggaaggcgtttcagagaaaagggggtggtgaggtacaaaaaaaaaaaaaaaaaaagccggtgtggtgattcaaaaagagcccacgggtgctttcaatttgacttcattgaagtcttttggacgctagacccagaccttcctaagaaccacaaagaaaccagttctggtacctggaaggggaatggaatgttgtaggttaaatggcatgcatattaattttttttttcccgaagctctttctctcccatcagaaccttatcttggctttggatctcagaagagaaccactaagcagagaccagactcagtgagtgagcaggtgttttggacaatggactggtcgagcccatccctattataaaaatgtctcagagcaaccgggagctggtggttgactttctctcctacaagctttcccagaaaggatacagctggagtcagtttagtgatgtggaagagaacagaactgaggccccagaagggactgaatcagagatggagacccccagtgccatcaatggcaacccatcctggcacttggcagacagccctgcggtgaatggagccactggccacagcagcagcttggatgcccgggaggtgatccccatggcagcggtgaaacaagcgctgagggaggctggggatgagtttgaactgaggtaccggcgggcattcagtgacctgacatcccagcttcacatcaccccagggacagcatatcagagctttgagcaggtagtgaatgaactcttccgggatggggtgaactggggtcgcattgtggcctttttctccttcggtggggcactgtgcgtggagagcgtagacaaggagatgcaggtattggtgagtcggatcgcagcttggatggccacttacctgaatgaccacctagagccttggatccaggagaacggcggctgggatacttttgtggaactctacgggaacaatgcagcagccgagagccggaagggccaggagcgcttcaaccgctggttcctgacaggcatgactgtggctggtgtggttctgctgggctcgctcttcagtcggaaatgaccagacactgaccacccacttaccctcccctccacacttgttccagctctttgaaatagttctgtgtgaaggtgaaagtgcagttcagtaataaaccgtgttgactcagtgaaaaaaaaaaaaaaaaaaaaaaaaaaaaaaaaaa

SEQ ID NO: 2708 - DNA, 7634 bp, Canis familiaris
  misc_feature (3821)..(3824): n comprises a, c, g, or t, or includes no nucleotide
gaattcttcttcaaatctctctgacctcctcttttgctgcatatcagagtaaattcttgtgatttggctaggatgacttggataatctctttaccttgaggtcaactgattagtaacattaattacatccgcaaaatctcttttgtcatataacataatcatggaagtagcatctcatcatatttacagattctacccacactctagggaagaagattatcaaaagtgaaaatcctttggtgccatttcataattccacctaccacaggaggggaagccaggaaaaacatccctgagaaattctgataccttgagctgagatgagaaagatgagcaggagttaattagataaggaaggaaagtttttagagaccatgtgtaaaagtcatataactggcagacataaactcaaaaaaaaatggactcaagaaaggccagtgtgtctacaggggagagaacaagatgcatagggacttgaaataaggtggttagagaggtcaagaggagccagatcacacagccttcagagactgtgaaaagattttctctatccccaaggcaaaggtcagaagagtggcacaatcagatttgtgttctgcacatatcactctggctataaggtggaggatggatgtaaggaggcatctgtaaatggtgggtggaccactgaagaagctaggaaagcagtgcaagaagcaatgggatagtgtcagcgcagatataagcagatggattcaaggaacactcagtggctaaaatcaacaggacttcatgattgattgactacgggagggaggcagttatgttccccaggaagcagagtctaagacagagattactgtggaggatgtttactaaggagtgctcttggagtcaacacctgtgcaagagcaaggatgaaagaaggaccggtgaagggagaagaggagcagtggctcagtccccacaatggccatggtcagacccttgaggcactaagctgagcagtcactggatgcaggatgcttcaggaagggaacatgacctcgcctgaacaggcttttcctcggctcagccaactcccacaggggctggaaggtgcaagctgacttcccgaagcactctctgcagctgcagaataaaatccctcacatttggagaggagtctgggctttttgtcatagcctcctgtccggtggagcataagggagtaaggcagccaggctgattcctaaatttctgactggtgcatcttcgcagatgtacatccaaccatatgtcataatggttggcttacctgtcactttctccccaggagagctggagctactcgggcacagaatgtaagagacagctagtaaacagccctatagttggcacatgctttgctgaataagtgaatgcccatctcctcctatttccactcctctctccctcctacatttcctttactccccgcccccacaccctgccgtcatccaatgtgggaaaagtccagcaggttattctgaggtgccacctgtgctggagctgaacaaacagcaaatcaggctcttctggtccagggcactctgatggggaaggcaaccagtgccaggaggaggggagtgggggggagacaggtgacaacatccccaccgcctcaggcttaaatcctccttataaactccgtgctagctggaacaggtcctctccaaaatatagactggatagggctctctgaattccccagaaactcagacctcatccacagtctaatctgctctttgaccggtgcccccacctccaacagatactgctgggagcccatgagtggaatttcaaggtcatattggagtttccttggaatgaagaatggagggccagcacggctgaaatatagtggaggcaggtcctgcagaggaactgagcccaccacctcaggcttgtgtttgtccccttaagctttgctcccgctgcatcccagggatctggcccctttccggtcccctctcctgggaacctgaccctcccccccatggctgctccacctgcactgggagcaaacagggagggccagtgtgtcggtgagggtgggcgagggtgggcgctgctggagaccatgagagccagccgccccctttcctcttgtgcccagggtgggcgggattggaaccaagccccaccatcagcgccccccctcccccgttcattctaagctgttctcactgctacccaggccggccctgacccccaagtcagactcttcctccgcgcagcctttttgcgagccaagattgcccgaggagaagtgctgcccgccaacacccccgcacacacccccgccccgccccgtccttccccggggcggagggttccttgggagcctgggtgttgcgcccccaagataggaggcggagggtgtgggggcagatgcaggggcagatgcagggccgccccagccccttgcgaagagacttcagggaactatgagcagcgatagtgtcacggtcactggggccactgcggcacaggacagtaacccgcggctgatgccaccgtgttaagtgccacctccacgtcccctgacccaccagggggaaatgccggatcccacggcagccgcgccctaactcctcttaccctctcccccccccgcacctccctctccgccacccctccatccacccgtaacccccaccgctaccctcgccatacacgcgcgcacacacacacgcacgcacacacacgcacacacacgcacacacacgcacactcccaagaattccaccgaggggacggtggcgaaggggagtgggcgggaaggaaatctctaggagaaaaccggggagcccgggagggggcgagcctgaaggccatcggggggcggggagcgcgagtcccgagctgggaggggggcggggagtcacctggcgggacccggcggccgagccggcggggaggcgagcctaggcggggcgcgcagaggaggagcggcggggcaggggccagggctgggggctgggaccaggcggggcgggacgtcccgagccgcggcgcagcaggtggagccgcagcgggacccgcccgggccgagctgagcgggacgggtggctgggcgggggccatggagctgctaaagctgaaccggagcgcgcaggggtccggagccgggccgggggcttccctgtgccgcgcggggggcgccctcctcaacagcagcggtgcgggcaatctcagctgcgagccgcctcgcctccgcggagccgggacacgaggtggtgcctcctaaccctcgcagctcttctcgctgcaccccacaccggtagaggcccccactgcctccccggacgcctacaccatcccctcagtactccctcggtccccaaacagcccccccgacacttctgcccccccccacccccccgcccgtgccctccccagctcattaaaaactccatcacagcttcacaccacctgatgggagccccctcacacccggggctcccggccgcacccaacacagagcccccttctaggcacagacggtcagggggcaaggacctcctcttccctccaggtctctcttccttttaaatccagttcacagagccacaatggggaaggaaagaaaagaaaagaaggcaagactggggaaagaagagggttggaggagggagggagcactctggaaggcttaaatgggaagtcagttataatctcctgtgtcccccaccccaacccccagcctcaccagaagagagcctcaaacctgagttaggctggacatggggggctgctccctagagctgcctgtctccatttcactcctcaaatcctccagcctcccaaggtggaattcnnnngagctcctacagcactttgtataatcctcaacttcactccttatcacactgtgtggcaattatctgtttatatatcaagtttccctctacctgtgagctttcacatggcagagaatttgtcatgttcatctctttgtccccagcgcctagcacaaagggagtcctctgtaaatgtttgttgagtgagaatgaatgtttggagataattaaaatacaaggcagaaaagaaaaagcattctaatagatatgtaaggaacatgcatgggtcagaggaagaggagattagctccaaatgaggtgtctagaaaagccttacaaaagggggggcagttaactgaatcttggagggcagtggtgatttaaggaatttaccagaacaggaaacaagtttgtgatggggggagggtattagtggggctggtgaaagaacattccaggctgagaaatcaatgttagcaagggggggaaggcatgagcatgcttgaagccttcaagaaactgagtcatccagtggcttaagtgggtgcattgcaagaggaggagggaggtggaagaggacagttggcagagaatatggaaaacatgcagagggttgcagacagaacagagcaggtaaaggggttgttgttgttgttgttgttgttgttgttgttgttttagacaagtaggacatgacctcacctgtgtttcaaaaggtaatggggtggtcaacagtgtcaaatgctacagggggaacaagtagaacagtctgagaagagaactttggatttggcagttaaagcttcatgatcttggggagaaatgtccaaatggtgatggaggagatagatagggcactggactgtcatggactgaggggtgaatgagaagatgtaaatagccctttcaagaagtttagctgtaaagagaaacaagaattaggaacaaagcttgaaaagagacagactttctcaagaagaggaggagcaagccaatttccctaagcctcaatgggttagcagcctgaaggagtcaagttcaccagcactgcgtgggaggaggtgctcctgggatgcagagggatctggctggtagtagaggtggggaatgagtgggcttggagggtctggctgagtgggacccagactccctgctgccacctcttccttttcctacccagaattggagctggccattagggtcaccctttatgcagtgatctttctgatgagtgttggaggaaatgtgctcatcatcgtggtcctgggactgagtcgccggctgaggactgtcaccaacgccttcctgctctcactggcagtcagcgacctcctgctggctgtggcttgcatgcccttcaccctcctgcccaatctcatgggcacgttcatctttggcacagtcgtctgtaaggcagtttcctacctcatgggtaggtgagacaccccccccccccccgccttcctatcctaaagtccttggcgtacatggggatctttcccagtggggcctgagaaaatcacactggttgagtgtgtaatacagtttcctaggtgaccccttcctcttcccttgtttaggggtgtctgtgagtgtgtccacactaagccttgtggccatcgccctggagcgatacagcgccatctgccggccgctacaagcacgcgtgtggcagacgcgttcccatgcggctcgtgtgatcatcgccacttggatgctctctggactgctcatggtgccctacccggtgtacaccgccgtacagcccgcaggaggggcccgggcgctgcagtgcgtgcatcgttggcccagtgcgcgtgtccgccaaacctggtgagggtgcccattacctattcctggaattcctttctccatctccatcaggggtttactcccattccccagatcttcctccaattccctttccgcacccaccaccctggaattcccatgtgggctgctccccagttctccagccctttccagccgcacgccaaaaaaaccacttcctcctcaggggcctggtccccagcgctagaaacaagccctggctcttcctccatctgtgatataggtgtgatctgctctgtctccaggtcggtactgctgctcctgcttttgttcttcgtcccaggcgtggttatggctgtggcctacgggctcatctcccgcgagctctacttagggcttcgcttcgacgaggacagcgacagcgaaagccgagtccgaagccaaggagggctgcggggtggggcgggaccaggtgggttagatccagccttgggaaaggcggggcccagagtgggtggaccaggaaaggaacggggggggggggggggggttgggggcggagaggacgcagccggctctgaccaaccagctctgtgctcaggtcctgccccccccaatgggagttgccggccggagggcgggctggctggcgaggacggcgacggctgctacgtgcagcttccgcgctcgcgtcagaccctggagctgtccgcgctgaccgcgcccactcctgggcccggaggtggcccccggccctaccaggccaagctgttggccaagaagcgcgtggtgcggatgctgctggtgatcgtcgtgctttttttcctgtgttggttgccactgtatagtgccaacacgtggcgtgccttcgacagctctggtgcacaccgcgcactttcaggagcgccaatctctttcatccacttgctgagctacgcctcagcctgcgtcaaccccctggtctactgcttcatgcaccgtcgcttccgccaggcctgccttgagacgtgtgcccgctgctgccccaggcctccacgagctcgcccccggccccttccagacgaggaccctcccaccccttccattgcttcactgtccagactgagctacaccaccatcagcacgctagggcctggctgaggggtagggggagagtggaggctgagacgggacacacccattcctacaggcagggacccacccagacacacaagagaggtagatccactgacaaaggagactacaccccaaagcatggactaatcccaaagcacacacaaacacacacatatacacaagtggcttacttgacacaaaagaaacaaaggagactcccacacaggaaataaagcacactgttgatagggaactgagcctggcacatggaaacatggccctgaccttagacacacacacacagcatcctagcagtggactatcatacatagtggaactctaagagaatctgggctgcctctcatatacacatagtaatggcactgattctttagggctctggagctggcacagtactgactcctgagatgctccagagtgcccccagtttgacctcacagtgcccttccccatttcagcactgaaaatattaactagcctaatctcacacctccctgaccaacagcctattttgcactgaaaaggcccttaattcgtttccagttaaatagtatggccctgccctcatccctcacccaaactcaagaaataaaaatgacttggcttccttcctgaacttcctttctggactttttctggggggcaggtgaggggcgcaggattttgtagactcttcccagtcaggtctctcttttcgctgctcactcttgtgcatgacctcctgccaaaaagcccacagtctgaggctcaatggggattgggtattctcctgggttgtcatcctggacccacgtaaaggccagggtcatacacagtagctggggatggggatgggggtgggaagtcagatatccatgattcatcacgattggtcagcacattctcctcaaatagtgtcattgc

SEQ ID NO: 2709 - DNA, 1083 bp, Canis familiaris
atgtctcaggaaaggcccacgttctaccggcaggagctgaataagacaatctgggaggtgcccgagcgttaccagaacctgtccccggtgggctccggcgcctacggctccgtgtgtgctgcttttgacacaaaaactgggttacgtgtggcagtcaagaagctctccagaccatttcagtccatcattcatgccaaaaggacctacagagaactgcggttactgaaacatatgaaacatgaaaatgtgattggtctcttggatgtttttacacctgcaaggtctctggaggaattcaatgatgtgtatctggtgacccatcttatgggagcagatctgaacaacattgtgaaatgtcagaagcttacggatgaccatgttcagttccttatctaccaaattctccgaggtctcaagtatatacattcagctgacataattcacagggacctaaaacctagcaatctagctgtgaatgaagactgtgagctgaagatcctggactttggactggcccgacatacagatgatgaaatgacaggctatgtggctaccaggtggtacagggctcctgagataatgctgaactggatgcattacaaccagacagttgatatttggtcagtgggatgcataatggccgaactgttgactggaagaacgttgtttcctggtacagaccatattgatcagttgaagctcattttaagactcgttggaaccccaggggctgatcttttgaagaaaatctcctcagagtctgcaagaaactacattcagtctttgacccagatgccgaagatgaactttgcaaatgtatttattggtgccaatcccttggctgtcgacttgctggagaagatgcttgtattggactcagacaagagaattacagcagcccaagccctcgcacatgcctactttgctcagtaccatgatccagatgatgaaccagtggctgatccttacgatcagtcctttgaaagcagggacctccttatagatgaatggaaaagcctgacctacgatgaagtcgtcagctttgtgccgccaccccttgaccaagaagagatggagtcctga

SEQ ID NO: 2710 - DNA, 5497 bp, Canis familiaris
cccagcagcgatgaactggcactttttaagaacagccacagtgctgctcatttttctggtggtggtggaaattaacagtgaatttcgaatccaggtaagagattacaacactaaaaatggcaccatcaagtggcattcaatcaggaggcaaaaacgtgaatggatcaagttcgctgcagcctgtcgtgaaggtgaagacaattcaaagaggaacccaatcgccaaaattcattcagattgtgctgcaaaccagcaagttacataccgcatctctggagtaggaattgatcagccaccttatggaatcttcatcatcaatcaaaaaactggtgaaattaatattacatccatagttgatcgagagatcaccccttttttcattatctattgccgggctctgaattcactgggtcaagatttagagaggcctcttgagctcagagtcagggttctggatataaatgacaatcctccagtattttctatgtctactttcgtaggacaaatagaagaaaattctaatgcaaatactctggtgatgagactcaatgctactggtgcagatgaaccaaataacttgaactcaaaaatagccttcaagatcataagacaagaaccttctgattcaccaatgtttattatcaacagaaacactggagaaattcgtacaatgaataattttctagacagagagcaatatagccagtattcccttgctgtgagaggctcagaccgagatggtggggcagatggtatgtcagcagagtgtgagtgcaacattaaaatcctcgacgttaatgataacatcccatacatggaaccgtcttctcatatggttagaattgaagaaaatgctctatctcaaaatttggtcgagattagagtaatcgatttggatgaggagttctcagctaattggatggcagtaattttctttatctccggaaatgagggaggttggtttgacatagaaatgaatgaaaggacaaatgtgggaattttaaaggttattaagcccctagattatgaagctgtgcagaatctgcaacttagtctcggtgtcagaaataaagctgactttcaccattcaattatgtctcaatataaagtcacagcaactgcaatctctgtgactgtgttaaatgtaattgaaggttcagtgtttcgtccaggttcaaagacatatgtagtaaggagtgacatgggacagaattataaagtgggagactttgtagctactgacctggacacaggtctagcttcaacaactgttagatatgtaatgggaaataatccagctaacctactaaatgttgactcaaaaacaggcgtaattactttgagaaataaagttaccatggaacaatatgaaatgcttaatggaaaataccaaggaacaattctatctatagatgatgctcttcaaagaacttgtactggaacaattaatattgaccttcaaggttctgggtgggaaaaagattctgaaaaagttaccagttcacaaaacagtggaagttctactggagatagcagtggaggtacaggtggaggtggcagagaaaatcctagcgaaggtgataccactacaaacacaggtggcaaaacttccactgactatgaagacggtgaaacccagacacagagcaacaacaaccatcaggaattaggtagtaataatctgtcagataatgtccattttggtcctgctggcatcggactactcatcatgggattcttagtcctaggattggtcccatttttgttgatgtgctgtgactgtggaggtgctcctggtgcaggagctggctttgagcctgtccctgaatgttcagatggagcaattcactcatgggcagtagaaggaccacagccacttcccacagatgcgaccacggtctgtgtaccaccaataccatctaataatgcaaatgtaattgaatgcattgacacatccggggtttacacaaatgagtatggtggcagagaaatgcaagatctgggaggaggagaaagaacaacaggatttgaactaacagaaggagttaaaacgtcaggagtacctgaaatatgtcaagaatattctggaacattaagaagaaattctatgagagaatgtagagaaggaggtctgaatatgaacttcatggaaagctacttctgtcagaaagcatatgcttatgcagatgaagatgaaggacgtccatccaatgactgtttgctcatttatgatattgaaggtgtaggttctcctgctggctccgtgggttgttgtagcttcattggagaagatttggatgacagctttttggacacactggggcctaaatttaagaagttggcagatatcagcctgggaaaagaagttgaacctgatccctcttggccacctgagagcactgaaccgatttgccctcagcagggaacagagcccatcattggtggacacccacccatctccccacatttcggtactaccacagtcatttctgagaatacctacccctcaggacctggtgtacaacatcctatgcctattcctgatcctctgggctatggtaatgtcactgtgaccgagtcttacaccacctctggcactctgaagcccactgtccatgttcatgataatcgacatgcatcaaacgtagtggtgacagagagggttgttggcccaatctctggcactgatttgcatggaatgttagagatgcctgacttgagagatgggtcaaatgttatagtgacagaaagggtaatagcaccaagctcaagtctacccacctctttgactatgcctgatcccagagaatcatcaaatgtggtagtgacagaaagagtaatccgaccagcttctggcatgatgggcaatctaagtatacaccctgagttatcaaatgcccaaaatgtgattgtgacagagagggttgtttctggctctggcataagtggtattagtggcctagttggcagtgcaatgggagtaagtggtggtggcatggcaatgaacagcctgggaggaggtggtggcctgagtagcagcatggggggcacagccaccatcggtcatgtgaggagctcctctgaccatcactttagccagacccttggatctgcctcccctagtactgcccgaagccgaatcacaaagtacagtacagtacaatatactaagtagccaggatcccagtacatttgttctcagtaatggtgatttagattccattcccaccaccaaaaaactaatgatgtgtttgatgatgtgcaggtaggtgctaaaaaactgtggaacaaaggtcagaaaccacaatgagaaagatggaaacagtgctattgggcaagagctctccctagcatttgtaaacttttttcttatattaatacttatggaatcatgacagtgaagtaaaacttgagacagggtcttctttgcttctgtgtggcctgtcatatatctccagcacagggaataaattaaactcagtcatgcaaaaccactggccttaagatggctatcagcacaactctccttactctgttttgatttgccatgtagctcaggcaatattaaaaaaggactaaacatgtaacatgagctcacatatgtaggaagaatttgaaatatgtgctaagcacctggtcagtttcacagataataggaataaaaatccaaccatgtattcagaccatgatgaaccattaaagaaaacaaaatctggctacacaatccagttcacaagccatcaagcactcctaccttaataattgcactagataaaataaacctcaaatgaggaacaatttcctgggaggaaatttccacaagggaatggcaataggggagattcatttggggaaaactggaaatgtctgaacctgaatcttgagatggggcctcagctaaaattcacatggagtccaggagttttctgattctagtttgtgttttgtggtagatgtgaggttgcagaatatcacactcgttcttcttatcactgtggctcttacctaaaggcagaaagcttgccaagtatacttctctgactgaagcaagtaacacctgacatggttgtcatccctaatggtaaattaccttccaaggaagcagatggataccactttgtattttcagatgtgtgtttagtaagtgttattcacctacatccagctctctattatacatctcttaagttaaaataatttacttaagctgagctgtgaaaaaactctgcagtatggttaagctttggggggatttttttaaggggatctaaaaaaagtttttagaacatgtaaaatgtttaatgggaaaagttagttctgtaaagtaatgctgtactattagttttaattgagtttagtacttttaaaaacaacactctgctgctattttaaagaggtcaaccaaaaccttttaacagagttgatgatattgtgttaacttatgtgaaattgtactagacaatcccatatccttactctatctcactccctaactaaattttctcactagaataaatcttatattccttatttaatttgttgataaaactcttggcttatataatattccaatttatagatagttcccaaattatatagtatgatatatttttctagcttcaaaatttagcaatatactatttatgataagccatttctgtgtgtttgctatatagtaatacctggtttaaaaaatctctaaatagaaccaaagcattcttagacagggataaacttgctatggcaagatagagaattttttttctcatttctaaattcagtgttgatatgagctcactaaagtgaaactagatatgacaaaattgttcaaggactattccctgttgattactcaaatttcccaaggtattacaaaatccaagaatagtcaacttccaacacttttcaaagggagctaaggagtgaactattttatcagagctattttgctctatgttatagtagatgatgtcaatattttcaaagccacaatatacatcttattttacatctgtagtctatgtgaaattttgatagtctgtagcatgtcaaaatgcagaggtgtaaataaagtcatttacagggactcttttatttctttctcccatttggggaggggggagcttccattaatgatggataatctttccagaaataaagtcaagatgtatttattgaaatatgcttgattatgctggatccaggagtttgaaggaataaaaataattactagttaattaattcaagggaatggtatctgaccaaaagtagcttctgtgtcactttgatttctcatcagaagtgttttttaaagactctggatatcttccaaaaaaattttttagattgtctaacaaatgccagagtgaccatctttaataactgttgttatgaagatccattagtaaaaaaccatggaagatataaaaaatgacagtattagttgtcaatttttctaggaagatactttcaaataaattttttgtcaggattacaa

SEQ ID NO: 2711 - DNA, 658 bp, Canis familiaris
gtcctgggttgaagccctacattgggatctctgctcagtggggagctgcttctcctgctccttttgctgctcactctactgattctctcattctctctccaagaaattaataaatacccttaacaagttttggtaaaatatcaaggaaaattctgattgctgtttggatccagaagcaaaaccttgatacctctacagagcacttaaggagacaaaagggattttggctgaggagtgactctcagagtccagaatctcatagatctcttgatttccattgagagggctcattcgaggacttcctgtgatgaggcaactgagtcaaatggagcaccagatggagtccctaacccgaaactggtccctaaccctaacctgaacacaaaccccaacttgatccctaatacctaatctaacatgaaccttgaccctaaccctaatatgagccataatacaaaccagacccaaactcaaaacccaaccctaatccaaactctaacctgaactttagtcaaaccctaacctaaaacctaatctgacccaaacctgaaaaagaaaccataaacctaaacctaaccctaaaccctaatccttaaccctaactagaacaagtgccctattctgaaccccaagtctaacactaacccgaacccaggac

SEQ ID NO: 2712 - DNA, 989 bp, Canis familiaris
gtcctgggttctccattgtgttccactgatctgtgtggcaacttttgtgccagtaccatatccttttgatgatgactacagctttataatatagtttgaaaactggaattgtgatgcctccaggattggtttccttttttaacactcctccggctatgtcagggtgttttctggttccatgcaaattttagggttgtttgttccaggtctgtgaaaaatgtccatgggattgcattgaatgtgtagattgctttcggtagtacagacatttttacaatatttgtccttcagatccatgaacatggaatctttttccatttccttgtgtcatcttcaatttctttcattagtgctttatagttttcagagtacagatcgtctacctctttggttaggtttgtccctaggtgtcttatgggttttggtgcaattgtaagtggaactgatttcttggtttctctctctgctgcctcattattggggtatagaaatgcaacagactctataccttgattttgttatcccgcaactttactgaactcaggtattaattgtgggaattgtttggaggagtcttttaggttttctacatagagtatcatgccacctgtgaatagtggaggtttgacttcttccttgatgatttggaagtcttttatttctttgtgttttgttgttgttgtgactatgacttctggtcctacattaaataactgtggtgagagtggacattcctgtcttattcctgaccatagaggaaaagctcttggtttctccccaccgaggatgacattagctgtgagtctttcctaaacggcctttatgatgatgcggtatgttccctctatccccactttctagagggttttttttatcaagaatagatgcatctactgagggaaccatatagtccttatcctatcttttattaaagtggcgtatcatgttgatcgattttgaaatattgaaccaaccctgcaacccaggac

SEQ ID NO: 2713 - DNA, 1149 bp, Canis familiaris
atgaattcaacatcattttcccaggttgaaaaccattcaatcttctgtaatttttcagagaattcccagtttttggcttttgaaagtgatgattgtcacctgcccttggccatgatatttacattagctcttgcttacggagctgtaataattcttggggtcactggaaacctggccttgatcatgatcatcttgaaacaaaaggagatgagaaatgttaccaatatcctgattgtgaacctttccttctcagacttgcttgttgccatcatgtgtcttcccttcacatttgtctacaccttaatggaccactgggtttttggtgaggcgatgtgcaaattgaatccttttgtgcaatgtgtttcaatcaccgtgtccattttctctctggttctcattgctgtggagcgccatcagctgatcatcaacccacgagggtggagaccaaataacagacatgcttacgtaggtattgcggtcatttgggtccttgctgtggtttcgtctctacctttcctcatctatcaagtattgaccgatgagccgttccagaatgtaacacttgacgcgttcaaggacaaatacgtgtgctttgataaatttccatcggactcccataggttgtcctatacaactctcctcttgatgctgcagtattttggtccactctgttttatatttatttgctacttcaagatatatatacgcttgaaaaggagaaacaacatgatggacaagatgagagacaataagtacaggtccagtgaaaccaaaagaatcaacatcatgctgttgtccatcgtggtagcgttcgccgtgtgctggttgcctctcaccatcttcaacactgtgtttgactggaatcatcagattatcgccacgtgcaaccataacctgttattcctgctgtgccaccttacggccatgatatccacttgtgtcaaccccatattttacggatttctgaacaaaaatttccagagagacttgcagttcttctttaacttttgtgatttccggtctcgggatgatgactatgagacgatagccatgtctaccatgcacacagatgtttctaagacttctttgaaacaagcaagcccagtcgcatttaagaaaatcaacaatgatgataatgaaaaaatctga

SEQ ID NO: 2714 - DNA, 274 bp, Canis familiaris
  misc_feature (48)..(48): n comprises a, c, g, or t, or includes no nucleotide
  misc_feature (85)..(85): n comprises a, c, g, or t, or includes no nucleotide
  misc_feature (140)..(140): n comprises a, c, g, or t, or includes no nucleotide
  misc_feature (184)..(184): n comprises a, c, g, or t, or includes no nucleotide
atttatgtcccgccaaaccccaaaaacaggactaagtgcatacaatantcacaagctttatttaaattatatacaaatgtattgntactctagttaacttaacacaacagtcttacacgcatttggtctcgtagtctatntatagatagcattccccctttttttttcctctcatatctactcngtattttatttattacgcacactacaatttcagtataagttaatgtagcttaattaataaagcaaggcactgaaaatgccaagatgagtc

SEQ ID NO: 2715 - DNA, 271 bp, Canis familiaris
  misc_feature (2)..(2): n comprises a, c, g, or t, or includes no nucleotide
  misc_feature (15)..(15): n comprises a, c, g, or t, or includes no nucleotide
  misc_feature (89)..(89): n comprises a, c, g, or t, or includes no nucleotide
anttatgtcccgccnaaccccaaaacaggactaagtgcatacaatactcacaagctttatttaaattatatacaaatgtattgctactntagttaacttaacacaacagtcttacacgcatttggtctcgtagtctatctatagatagcattccctttttttttcctctcatatttactatgtattttatttattacgcacactacaatttcagtataagttaatgtagcttaactaataaagcaaggcactgaaaatgccaagatgagtc

SEQ ID NO: 2716 - DNA, 1356 bp, Canis familiaris
ctggggccgtgggaggagggtgtgggccaagggctcggggagaccctagatgccaggttaaggactttgaactggagattataggaagcttttgaaaattaagtatgggggaaggaggcaggaagtatctttccagaatattaacctatggcagtgtgcacaatgcattgaaggatatgaatctggcaacgaattaatgtcagacaataatcaaatgtcataatcactgtgtggcctgcctcttgagctaacatgaaaatgatcattatatggataacttgtgtccctgctgtctcctctattctcaactgattgctggtttctatttattcaccccgtattatttactactgttgttttaattgtgtgcttgtccctctgttcagcaccaaaagccttctgcttcatatagttatttatatgtgttatctccaccattgtcgcagctccctgaggaatccaaattttcatgtttgagtctgtatcctagagcatgcccaaactaagattactggagcctaggagatctctatcaaagacactcagccacccctgcctcctatttcctgaaattggcttccagggtggaatctattattaaataaataaggtattaaccaaatcaaacaacttttaatgacccagaaaaataattcaattcacagaaaaaagtcaagagaagagcagacatctcagcaacacagcttgcagcagagttggtgaatgctggtaatgctgtgctttcgcagttaattttgcaagattcccatgcagtttcctggagaagatggacccttgtcctccagaagtttgttttttttgttttttgttttttgttttttacgtgtgctcatggatgagcaaaagaactagaggtcatcattccttcattcagtatgtataattgaacctcactgcgtcagtgtgtgtggggaggcagatgtgccaactcagccagtgtgaataggggtcctgcaaaggttggttcagagacagtgtgtagggaagagccatcagttatgctgtgggggaagtgcaggggtcctggaagtcttcctagaggagatcagtttcgaacgaggcctttgagaataagaaagtctagtggaatggaataaagggaagaacattttaggctggggacactaaagggacaaaggtagaggggctcaggtttttttgtttgtttgtttgctttgttttcgtttttttagcagggctgctattggcattttggccaggactgtgataggacactgcccactccttagttacactgcaaggggtttatgtcccttctctacctaacaccctatgtgacaaccagagcctttcaaacatttctaacggccccag

SEQ ID NO: 2717 - DNA, 714 bp, Canis familiaris
aatgccgcagggagtgggttttttgttttgttttttaatttttttttatttttgcagggagtgttaagtagtctcgtagccacgttgaaaagtacaaagagggatccctgggtggcgcagcggtttggcgcctgcctttggtccagggcgcgattctggagatccgggatcgaatcccacatcgggctcccggtgcatggagcctgcttctccctctgcctgtgtctctgcctctctctctctcttgtgtgactatcataaataaattaaaaaaaaattaaaaaaaaaaaagtacaaagtgggacgcccaggggggctcagccagttaagcgcccgactcttggttttggctccggtcctgatctcagggttgtgggatcgagccccacgtcgggctccacactgagcgaggagtctgccttggggactctctccctctgcccctgctcgtgcacgctcttgctctctcgtaaataaatctttttgttgttgttgttgttgttgtttaagtgcaaaggaaaagctaaggttgattctttaacgtggtaaatatacgtgacataaaataaaataaataaaataaaataaaataaaataaaataaaataaaataaaataaaataaaataaaataaaataaaataaaataaaatatatatacgtgacataaaatttatcggcctaaaccgtttttatgtgtacggttctgcggcatt

SEQ ID NO: 2718 - DNA, 572 bp, Canis familiaris
ggacatgggcctccccaccgtgcctggcctgctgctgccactggtgctcctggctctgttgttggaaatataccccataagcgttactgcacttgttcctcacccccggaacagggtgaagagagctattctgtgtccccagggaaaatatattcaccctcaagacgattccatttgctgtacgaagtgccacaaagggacctacctgtacaatgactgtccaggcccagggctggacacagactgcagggaatgtgaaaacggaacttttacagcttcagagaaccacctcagacaatgtcttagctgctccaaatgccgaaaagaaatgaaccaggtggagatttctccttgtactgtgtaccgggacacggtgtgtggctgcaggaagaaccagtaccggttttattggagtgaaacccttttccagtgcaataactgcagcctctgcctcaatggcacggtgcagatctcctgccaagagaagcagaacaccatatgcacctgccacgcggggttctttctaagagagcatgaatgcgtctcttgtgtgaactgtaagaaaaacacag

SEQ ID NO: 2719 - DNA, 1047 bp, Canis familiaris
gagtcactcgcagaagctgcataattgtccttacaacatatatctaaatctgtcaccctcatataaagagaatagaatagtggctgacagggcactgggaggtctgagaaatgaaaatgtcgtccacgtggcatcaagtttcagttacatcgatgaaaaatttctagaggttgtttgtacccccaatggcctatacagaatatttgttttgtgcacttggaaactcttattatgagagtgggatcacctgttaagtgttattaaacacacacacacacccacactcacccaccacccgcaccagcagtccttaaaaaacattggagaaaaggtggttatatgtccactactcctgaataatggggaaaggtatccttaggtatttggcctttggccaaaccccccaattcgttcccattaaatacgtgccatctttatctatcaattatgccccagttaaatttgttgaaatatgactgaatcgggaaaattaaccttattccatgttgaaaaattgggctatgagggcatttccttttaaaagggattttcccccggcccccctgtcccccttatctgggttcttttttaaattaggcctttttaaattttttattttggaaggttattccttgtccaaccatccgccaaaatattttttaaaaacttttcattaaatttcttgggatttaggattttaagtgtagcactcctatctttcaaccttctggaggtcaccctaacctaggaaggaaggcagggataacatttattttcctgcgtgaagtgacataatttcctaagccatatattaaaattttctctcagatttttggttggattttatgtcaggcttccatttgtactctgaactgtttgtatgcctctattgtgttatattaatctatgtgtctcaccctacatcagtagtacatttgatttttaatttttttatttctaatttctattaacaatggctctgtggcaagttgtgttctctatgaccagcaattgccctctctttaacctttttacaacgagtgactc

SEQ ID NO: 2720 - DNA, 1041 bp, Canis familiaris
gagtcactcgcagaagctgcataattgtccttacaatatatatctaaatttgtcaacctcatacaaagagaatagaatagtggctgacagggactgggaggtctgagaaatgaagaatgtgtgtcaatgggcataaagtttcagttacatagatgaaaaatttctagaggtgtgttgtacaacaaatggcctatagagaatattgttttgtgcacttgaaactcttattaagagagtggatcacatgttaagtgttattaacacacacacacacacacacacacacacacacacaccacacacagtagctaaaaaacattgagagatgttgtttatgtccattactctgaatatgtggaaagtatcttaggtatttgcatatgggctaaacccctccaatgctccccattaaatatgtgccactttttatatatccattatgcccccgttaaagttgttaaaataatgaatgaatccggaaaatttaacctttttaaattttgaaaaattggtctattgaggcatttccttaaaaaaggaattaatcctcggccccctggcccctttaacggggtccttttttaaaattagtcatattagacattttattttggaaagttattcctgtcccaaccatcaccaaaaatatttttataaacttttcattagatttcttgggatttaggatttgaaggtagcactcctatcttttcaacccttgtggaggtcaccctaacctaggaaggaaggcagggacaacatttattttccctgtgtgaagtgacataatttcctaagccatatattaaaattttctctcagatttttggttggattttacgtcaggcttccatttgtactctgaactgtttgtatgcctctattgtgttatattaatctatgtgtctcaccctacatcagtagtacattgtatttttactttttttatttctaatttctattaacaatggctctgtggcaagttgtgttctctatgaccagcaattgccctctctttgacctttttacaacgagtgactc

SEQ ID NO: 2721 - DNA, 1679 bp, Canis familiaris
catggatccagttgtggttctggtgctttgtctctcctgttgccttctcctttcactctggaaacagagctcgaggaaggggaagctcccacctggccccacacctctcccttttattggaaatatcctacagttagataaggacatcaacaaatccttaagtaatctctcaaaagcctatggccctgtattcactctgtattttggcatgaaacccactgttgtactgcatgggtatgacgcagtgaaggaaaccctgattgatctgggagaagagttttctgcaagaggacgtttcccaatagccgaaaaagttagtggaggacacggaatcattttcaccagtggaaacagatggaaggagatgcgacgctttgccctcacgaccctgcgaaatttggggatggggaagagtgaccttgagagccgagttcaagaggaagcctgctaccttgtagaagagttgagaaaaaccaatgccttaccatgtgatcccacttttgtcttgggctgtgcttcctgcaatgtgatctgctccattattttccagaatcgttttgactatacagatcagactttaattggtttcttggaaaaacttaatgaaaacttcaggattttgagctccccatggatccaggcctacaatagtttccctgctctccttcattatctcccaggaagccataacacaatatttaaaaattttgctttcataaaaagttacattttggagaaaataaaagaacaccaagaatccttcgatgttaacaatcctcgggatttcattgattatttcctgataaaaatggaacaggaaaagcacaaccagccattggaatttactttcgaaaacttgaaaactattgccactgatttgtttggagctgggacagagacaacaagcacaaccctacgatatggtctcctgctcctgctgaaacatccagaagtcacagtgaaagtccaggaagagattgaccgtgtaattggcagacaccagagccctcacatgcaggacaggagtcgcatgccctacacgaatgcggtactgcatgagattcagagatacattgaccttgtcccaaacagcctgcctcatgcagtgacctgtgacgttaaatttagaaactatgtcatccccaagggcacaactatattaatatcactgtcttctgtgctatctgatgaaaaagaattccccagaccagagatatttgaccctgcccacttcctggatgatagcggcaacttcaagaagagtgactacttcatggctttctcagcaggaaaacgaatttgtgtgggagaaggactggcccgcatggagctgtttttattcctgaccaccattttacaaaaatttaccctgaaacctctggtcgatccaaaggacattgataccaccccacttgccagtgggtttggccatgtcccacccacctaccagctctgcttcattcccgtgtgaggaaaggcagaccacctgcctgctgttgtgctattgtctgtagatcctcttcctctggggtatcattcatctccctctcactactggggwtgctttccccgaccttatctcatatttccccattccttccattcccagtgaacatccaacctccattaaaggaaagtctccagaatttctttgcaaaaaaaaaaaaaaaaaaaaaaaa

SEQ ID NO: 2722 - DNA, 160 bp, Canis familiaris
gtacccatcattgcaatagcaggagttgttgaaatgaaaatgttgtctggacaagcactgaaagataagaaagagctagaaggagctgggaagattgctacagaagccatcgaaaacttccgaactgttgtttctttgactcaggagcagaagtttcaac

SEQ ID NO: 2723 - DNA, 2219 bp, Canis familiaris
cttggagaaaacatcaggaggagaaagagagaggggggtttcttcaaagttgtttccagtccctaccagttctcagagaaggtggcgatggtatggatgtaaccaagaaaaacaagagagatggctctgaagtcactgaaagaattatcacggagacagtatccacaagacttacatccttaccaccaaaagggggaaccagcaacggctatgctaaaacaggctctcttagtggagggagccggctggagaagcacagcctgacacatggcagcagtggctacataaactcaagtggaagcacacgaggcaatgcctccacctccagttacaggagggctcattcccctgcctccactctgcccaactcaccaggctccacctttgaagggaaaattcacatcacccgccatggaacatacgaagggagctccagtggcaactcttctccagagtatcctcggaaggagttcgcatcttcttcaaccagaggaaggagccaaacacgagagagcgaaatccgagttcgactgcagagtgcatccccatctacccgatggacagaattggatgatgttaagcgtttgctgaaagggagccgatcagcaagtgtgagtcccacccgggattcctccaacacactacccatccccaagaaaggcacggtagagaccaaaatggtgacagcaagctcccagtcggtgtctggcacctatgatgccaccatcttggatgccaaccttccctcccacatgtggtcttccaccttgccggcagggtcctccatggggacctatcacaacaacgtgacaacccagagctcatccctcctcaacaccaacgcctattctgcaggatcagtcttcggagttccaaataacatgacgtcaggctcttccacactgcaccccggggtcagcacctgctcctcagtgtttggcatgcagaacaacctggcacccagctcgtccaccctgtcccacagcacggccaccgcctccacagcatatggtatgaagaaaaacctgccccagagccctgccgttgtgagcactggtgtgtccacctctgcagcctgcaccacaaatgtccagaatgaggatctcttgcacaaggactgtaaattcctgatcctggagaaagacaacacaccagccaagaaggagatggagctgctgatcatgaccaaggacagcgggaaggtcttcactgcctcccctgccagcatcgctgcaacttctttttcagatgacaccctcaaaaaagaaaagcaagctgcctacactgctgacacctgcctggtatcagacgccaatggagacgtgaagactgtgtccaccaagggaaaggctgcctctgcagaaatgcacaactacaaccatcgtggtggtggcagtggtggtggtggcggtggtggcggcggtggcggtggtggcccatggggagcagcgccagcctggtgcccctgtggctcctgctgcagctggtggaagtggctactgggcctgttgctcacctggctgctgctcctggggctactctttggcctcattgctctggctgaggaggtgagggcgctgaaggcacgggtggcagagctggagcagagccggagcaacgtgctgcttttcaaggaggagatgcaacgggccaacaaggactggctgcagggggaagcgcccagcgtggaagcaggggaggccaaactagggcttgacggccaccagcaggaggagctctggctgttcgtgaggaacaggttgatggccgagcaagaaaacggaaatctccgaggaagccctggccctaaaggtgacatgggaagtcaaggccctaaaggagaccgagggctccccgggactccaggcatccctggggtcttgggccacccgggtccacaaggaccaaagggacaaaaaggcagtgtgggagaaccaggcatggagggacccatgggccaaaaagggcgagaaggccccatgggacctcgtggtgaaccagggcctcctggatttggagagaaaggggacagaggggctgctggtgaacccggtgttcagggcccacctggcgtcccaggatctgtgggtcccaaaggttctggcggttctccaggcccacggggtcccccaggccctatgggtccacaagggctccgaggtgaagttggactccctggtatcaaaggtgacaaaggacctctgggatcaccaggaccc

SEQ ID NO: 2724 - DNA, 233 bp, Canis familiaris
agtgtgagtctttcaacgtgaccggcgaactgtactggaccaaggtgaaagtcaactttgacaacgtgggcgccgggtacctacctcttctgcaggtggcaacatttaaaggctggatggacattatgtacgcagctgtggactccagggggtttgaaaagcagccccagtgggaatataacctctacatgtacatctacttcgtcattttcatcatcttcgggtctatcttc

SEQ ID NO: 2725 - DNA, 1557 bp, Canis familiaris
agaatagggcagatcagtacttattataagggtcagcactggattattagagacctggtgttaatcatctatgtgactttgggcaaattgctggaccattctgggctgcatttttctaaaaggagtttagactagatgctttctgggttatgagacaatgatgaatgagtcatatggtgagccaccatttaaaataagctaccccactactcatcaagtctaaccagagccccaatgtaactttgacccaagtcccttcagctgtatgatgaaattgcttctcttcaagagaaaaaaaaaaaaaaatgcctggggccggaaagcacatgcatttttctaaagcaccctgtggcttggttggagaggacactaccattaacagaagggccttttatcacagttgccactccattgtcagtgaccaaattgtcccatttgtctccatcaaaagcactgcagccacactggattttaaaggacctcatgaagggcttctctctgctcagcctgatggctcttttctggcaattgaaatgcaaagttcttttctatcaaatggctacataaggacaggaaaaacctattagaatgtgctcagagcacaactgtgatcttgaatgttttcagatgctccttttctcttctttaaaaaaaaaacaaccttttttttttcttacagccattaaataataatagctcatgggcaaaattattgggactataaaacttgttgttatgtgctatgactaaccatacaacatctttttctcatttaccacctgactgcttccaaacatgttcatccccctatccattctccatcaaagcctcctcctttggaaacctcccttgagtccatcaggcagatgtgagtactttttgtagggatgaattatacttgaggccaggacccatgatttctctcctgccattctcaatatctcataaaatgcctggtgcaaggtaggcattgaatacatatttggtgaacagatgttgaaaggatgcttcaaaaaatcaattacagctgtaagtagtagattaaatgaggtataagttatgagaatatatatttttaaataatggttattgatgggtctgtagccaaacaataattatactgatgaccatttttttctttagactttatgaaatatgtgacttgaacagactctgagctgggagagggggacatatatatttctctgagctgggagagggggacatatatatttcttgacaatccaaacacgtttgtatcagagcttacgttgagtcttaacccagttcataccaccaatgaaaggatcaatcagcaagcatctacaagaatagccatcagtgccctgatctagtgcccatctagtgccctagatctgagaaagatggaatgagccacagtcaagttacatgcccaacctggaaagaagtggcatggtgtggaagagtgaagtttgagttctgaatgactcgtgttaaaataaatctatacaaggaattaaattaagaatatcactcttctcaaactctgaccagatagttctgtggccctattct

SEQ ID NO: 2726 - DNA, 1472 bp, Canis familiaris
accaatcaatcctgaagttactgaacaatggagaaaaaagacaggtctggatatctacgaaggatatggacagactgaaacggtctaggatctcattgaaaagacagggctggacttagttggatgaataaaacctgtaaataaatataaataattggtaaataatttttaaaataagtgtttattatatgcttatgattgagggataggaggtaaatgattgattagaatagttaaaaaaaaaagttgaggggacagcctggggtggttcagcggtttagtgctgccttcagctccgggcgtgatcctagagacccacaggtgtggatgagtcccacatcgggctccctgtatgaaagcccgcttctccctctgcctgtgtctctgcctctctttctctctctcataaataaataaataaaatctcaaaaaaaaaaagttgggggagacccctggggggcccaggggttgggggcccccctttggttcggaaaaggtccccccaatttcagggtcaagtcccaagcagggggcccggttttccctttgcctttatttttgccttttttttagggagaaataaattaaatccggaaaaaaaaaaagttgggagggaagctagttgcaaaaaagttctgtaacagacacagtagttcacgcattcattgagaaaaaccactatagagctgatcaaagtgagagcattaaaatatattttaagtgaaagaatgttagatctatagaaagattctcctataactctcttagggctgcctcaaaaatggagaatgctgagttccttgttacttgaaatattaagagttcactagatgactccttggcgaatatactcttaaaaaagggttatttaaggagctcgtagaaataagaataagaagaaatcctaggggaaatgaataaactactaataaaagtgtaaggaagaggaggcatacaatggagcagataaaggaaaagctgaaagaaatttttcatagcgtgtctttttataatgcttctatttttaaaccataagaatgtagtacctggtcaaaaattaaaatatcaaaaataaaattgacagatgcattaaatagaaacaacataacaagtatcatgctaatatgggtacaaatattttcataaatatgaatattttagtaattatcaatttattaagtgttataactttaagtatttgattagcatctatctttacactccacaagagcagaaaatttgttttattttgagccttggtcatcatgagttctcaataaatatttgttgaatgaatgcatggtggatgaataaatgaattttaagtttcttataacgttacttgactctttctccttctgtttttttttcttttctctctctctctctctctctctctttttttcctctttctccttctgaactaggtgctgatctgtggaaattttaagggaatgaaaattaagcctggt

SEQ ID NO: 2727 - DNA, 248 bp, Canis familiaris
caacaagcgcatcaacgccatggcagaagacggggaccccttcgcaaagctcattgtggaaacggatacctttgggagccgggttcgagtccggggagctgagactggcctctacatctgcatgaataagaaggggaagctgattgccaagagcaacggcaagggcaaggactgcgtgttcacggagatcgagctggagaacaactacacggcgctgcagaacgccaagtacgagggctggtacatgg

SEQ ID NO: 2728 - DNA, 792 bp, Canis familiaris
atggtgaaaagccacataggcagctggatcctagttctctttgtggccatgtggagtgacgttggcctctgcaagaagcgaccaaaacctggaggaggatggaacactggggggagccgatacccgggacagggaagtcctggaggcaaccgctatccacctcagggagggggtggctggggtcagccccatggaggtggctggggccaacctcatggaggtggctggggtcagccccatggtggtggctggggacagccacatggtggtggaggctggggtcaaggtggtacccacagtcagtggaacaagcccagtaaaccaaaaaccaacatgaagcatgtggcaggagctgctgcagctggagcagtggtagggggcctcggtggctacttgctgggaagtgccatgagcaggcctcttatacattttggcaatgactgtgaggaccgttactatcgtgaaaacatgtaccgttaccccaaccaagtgtactacaggtcagtggatcagtataataaccagagcacctttgtgcatgactgtgtcaacatcacagtcaagcaacacacagtcaccaccaccaagggggagaacttcaccgaaactgacatcaagatgatggagcgagttgtggagcaaatgtgcatcacccagtaccagagagaatccgaggcttattaccaaagaggggcaagtgtgatcctcttctcctcccctcctgtgatcctcctcgtctctttcctcatttttctcatagtaggataggggcaaccttcctgttttcattat

SEQ ID NO: 2729 - DNA, 153 bp, Canis familiaris
tcgccgctgtccttcggtgtcacggccaggatgtccggcaaccaggaccaaagggacagaaaggagaacccggagacatcaaggatatcgtaggacccaaaggacctcctgggcctcagggacctgcaggtgaacaaggacccagaggtgatc

SEQ ID NO: 2730 - DNA, 473 bp, Canis familiaris
gatggcgcttgacaagatcgcctttgtgcccttcagctacctggttgaccagtggcgctggagggtatttgatggaagcatcaccaaggagaactacaaccaggagtggtggaacctcaggtgctagaatgctcctgtgggggcctggggtggagggtgtctccatgggtgtctgcatgtgtgagtgttcaggtcactgtctgtacacgtagtgcatgtttgtgtgtgtgtgtgtgtgtgtgtgtgtgtgtgtgtgtgtatgtaagtgatgaggtgcacagggggtgattgtgcagagaggcacaacacaccagagtctggggtgttctgtgtagctccaggggcaaggactaccctttacttaaaaaacaccaactcctcctgacttgattctccccaaaccctcccttcaattttcctttccccttggcaggctgaagtaccagggcctctgccccccagtggcccgttct

SEQ ID NO: 2731 - DNA, 525 bp, Canis familiaris
atgaagaccctgctcctcaccatcggcttcagcctcattgcgatcctgcaggcccaggataccccagccttgggaaaggacactgtggctgtgtcagggaaatggtatctgaaggccatgacagcagaccaggaggtgcctgagaagcctgactcagtgactcccatgatcctcaaagcccagaaggggggcaacctggaagccaagatcaccatgctgacaaatggtcagtgccagaacatcacggtggtcctgcacaaaacctctgagcctggcaaatacacggcatacgagggccagcgtgtcgtgttcatccagccgtccccggtgagggaccactacattctctactgcgagggcgagctccatgggaggcagatccgaatggccaagcttctgggaagggatcctgagcagagccaagaggccttggaggattttcgggaattctcaagagccaaaggattgaaccaggagattttggaactcgcgcagagcgaaacctgctctccaggaggacagtag

SEQ ID NO: 2732 - DNA, 791 bp, Canis familiaris
agagctggacccgtgtgtgtgctggccaatgagccctggagggtccggctccagagtaccctcttggcacagggccgagtccatcgggacagatgaacctagaggactccactgccctcccatccacggggccgggtcaccagactctgcaagtctccagctgtcgccaaacccagacagaaggtgctgtggacatgcagctcctactgctgaccgtgggcctggcactgatctgtggcctccaggctcaggagggaaaccatgaggagccccagggaggcctagaggagctgtctgggaggtggcactccgttgccctggcctccaacaagtccgatctgatcaaaccctgggggcacttcagggttttcatccacagcatgagcgcaaaggacggcaacctgcacggggatatccttataccgcaggacggccagtgcgagaaagtctccctcactgcgttcaagactgccaccagcaacaaatttgacctggagtactggggacacaatgacctgtacctggcagaggtagaccccaagagctacctgattctctacatgatcaaccagtacaacgatgacaccagcctggtggctcacttgatggtccgggacctcagcaggcagcaggacttcctgccggcattcgaatctgtatgtgaagacatcggtctgcacaaggaccagattgtggttctgagcgatgacgatcgctgccagggttccagagactagggcctcagccacgcagagagccaagcagcaggatctcacctgcctgagtacggt

SEQ ID NO: 2733 - DNA, 327 bp, Canis familiaris
tggaggagagccgcgcgcagctgggcttcctgcagctgcataactggatcgacaacaggtgtgcacgcctccgcggccccccccgcctctgcccccgcagcccctcaggctggcacagcagccctcctcctgccacgagcctgcggttccccatgcgttacattcctgatgggcctctcactcagcctccacctccccccggggtccatgcatcacctgccgccgccccttcctccgggaaggcacctggtcttactgtgcccccttcacgcgcgcaggagccgcgccgtgttcgtggagctcacgcgctacagcccagccgtgggg

SEQ ID NO: 2734 - DNA, 1344 bp, Canis familiaris
atggacgaggaatacgatgtgatcgtgctggggaccggcctcaccgaatgtatcttgtcgggcatcatgtccgtgaacggcaagaaagtgctgcatatggaccggaacccctactatgggggtgagagctcctccatcacacccctggaagagctctataagcgttttcaattgctggaggggccccctgaggcaatgggcaggggccgagactggaacgttgacctgatcccgaagttcctcatggccaatgggcagctggtaaagatgctgctgtatacagaggtgacgcgctacctggacttcaaggtggtggagggcagcttcatctacaaggggggaaagatctataaagtgccatccactgagaccgaagccttggcttccaatctgatgggcatgtttgagaaacgccgtttccgcaagttcctggtatttgtggcaaactttgatgaaaatgaccccaagaccttcgagggtgttgacccccagagcaccagcatgcgtgacgtctaccggaagtttgacttgggccaggatgtcatcgacttcactggccatgccctggccctctaccgcactgatgactacctggaccagccctgtcttgagaccatcaaccgcatcaagttgtacagtgagtccctggctcggtatggaaagagtccttatttgtacccactctacggccttggtgagctgccccagggctttgcaagattgagtgccatctacggagggacatacatgctgaacaaacctgtggatgacatcatcatggagaatggcaaggtggtgggtgtgaagtctgagggagaggtggcccgctgcaagcagctgatctgtgaccccagctacattccggaccgagtgcggaaggccggtcaggttatccgcatcatctgtatcctcagccaccccatcaagaacaccaatgatgccaactcctgccaaatcattatcccccagaaccaagttaacaggaagtcagacatctacgtgtgcatgatctcctacgcacacaacgtggctgcacagggcaagtacatcgccattgccagcaccacagtggagacagctgagccggagaaggaggttgagcctgccctggagctcctggagcccattgaccagaagtttgtggccatcagtgacttatacgagcccattgatgacggttctgagagccaggtgttctgttcctgctcctatgatgccaccacacacttcgagacaacctgcaatgacatcaaagacatctacaagcgcatggcaggctccgcctttgactttgagaacatgaagcgcaaacagaatgacgtgtttggagaagctgaccagtga

SEQ ID NO: 2735 - DNA, 1338 bp, Canis familiaris
atgaacgaggagtacgacgtgatcgtgctgggcaccggcctgacggaatgtatcctgtcaggtataatgacggtgaatgggaagaaagttcttcacatggatagaaacccatattatggaggagaaagtgcatctataacacctctggaagatttatacaaaagatttaagataccaggagcaccaccagcctcgatgggaagagggagagactggaacttggacctgatccctaagttcctcatggccaatggtcagcttgtgaagatgctgctttatacagaggtcactcgttatctggatttcaaagtgactgaagggagctttgtctacaagggaggaaaaatctacaaggttccttccactgaagcagaagccctggcatctagcttaatgggactgtttgaaaaacgtcgcttcagaaaattcctagtgtatgttgccaactttgatgaaaaagatcccagaacttttgagggcatcgatcctaagaagactgccatcggagaggtgtacaagaaatttgacttgggacaagatgtcatagactttactggccatgccctggcactttacaggaccgatgactatttagatcagccatgttgtgaaaccattaataggattaaactttacagcgagtctctggcaagatatggcaaaagcccgtacctctacccactgtatggccttggggagctgccgcagggatttgcaaggctaagtgctatttatggtggcacctacatgctcaataaacccattgaagaaatcattgtgcaaaatggcaaagtgattggtgtgaaatctgaaggagaggttgctcgctgcaagcagctcatctgtgaccccagctacgtcaaagaccgggtagagaaggtgggccaggtcatcagggttatctgcattctcagccaccccatcaagaacaccaatgacgccaactcctgccagatcatcatcccccagaaccaggtcaatcggaagtcagacatctacgtgtgcatgatttcctctgcacacaatgtggccgcgcaagggaagtacatcgccatagtgagcacgacggcggagaccaaggaacctgagaaggaaatcagaccagctttggagcttctggaaccaattgaacagaaatttgttagcatcagcgacctccttgtacccaaagacctggggacggaaagccagatctttatttcccgcacgtacgatgctacaactcactttgagaccacctgtgacgatattaaaaacatctacaagaggatgaccggctccgagtttgactttgaggaaatgaagcgcaagaagaacgacatctacggggaagactag

SEQ ID NO: 2736 - DNA, 884 bp, Canis familiaris
cgaaggctatgaaagcggattcatgatgatgaagaactgcatgggtaagtgtgtgaccatctgatcctattacacaggtaataagggattccccgaagctttgatgactcagagcctccctcccagcttctccctgcccaccccccaacccccctgcatgggtctcctgaccagtgtgtctggaatcagtctgtggcagagggagactgacgtgtggaaagcatgagggacttcttgccatgggttggcgggtggcctaggacattagttatgggtcccagagaagtgagtttaacacctggaagagacaccccagggaagagaaacgattcgagcattagctatattcaaagtgacattatagggtttctatccaatatttctagaaaaagagcttgattaagctggctgcattagattaggttccctagagagaagcctgagaaggggatttttttttttttttttttaaagagaacctgtagagaagtgaaggaaggaagttagggcaggggaaaaggcctcttagccttaacctgatcccactgagcgctctggaatgtgaatggtatcaaacaattgtcctgcttttaggcaaaaccagactgcatactcccttgtctgccacgggcagctgccaacatttgagggggatgtaattctcacctctcaagcatttctgaatgaggtggacagcagttctccaagaagggagcctgtgaggcctagcagccaggactcccagcgaccctgatgcactgaggagtgccctggcttggggtcctgagcaggacaccaccaccatcttcaacttgggtcattgtcattttgcagatatcgatgtgtgtcagagagatcctctcctgtgccggggtggcgtttgc

SEQ ID NO: 2737 - DNA, 2850 bp, Canis familiaris
gcttgggcccaacgggacccagccacagatcgccaactgcagcatttatgatttctttgtatggctccattattactctgttagggatactttattaggtaggttttttccttagccgagggtatattattatcatttggggctgcgggggaatgggtggggaagtaatttcaggcaggttaattaacaagagagcaacctcagggagggttaggcttatgaaagtcataggatgatcaaatgctgcctgaagctacaatgaaacactttctaccagtatgttggctgacttttgggaaaatgttttctccggtagtttgtgttttgggttcaaagtctaaactctcctttatgaagctgttaatcctcaaaggcaagagttggtgaagcagaggcaaattccttttgattctagaagaaaacatgtcaaaatctggccacagaagccttctctgacattagtcctcagattagaggaattaactggacatgcgctaaagcacatgaagcttctttgagcagaattagagtgtttgtgtagaaagtgcattttattaaactcacgtgtgttggtctttagacttttgagtcatttatggtgtccataatatggtgcatcgctgctgggatcctcgggttttttttggagttgtactgtcaaggaagagcataaactactccagcgggatccctgggtggcgcggcggtttggcgcctgcctttggcccagggcgcgatcctggagacccgggatcgagtcccacgtcgggctcccggtgcatggagcctgcttctccctctgcctgtgtttctgcctctctctctctctcactgtgtgcctatcataaataaaaaataaaataaaataaaataaaaataaaaaactactccagcaatggagaggcaatgtagagttcctcctgaattagccccttggactgttagagggaatactcgggagcatggtgccctgcctttctagatcctagaaattgggggcctgtgtaagacttggaatgggggggatgtttgttaagaacttcattaatctagtaggaccagttatgccctcagatatttcttagtcagtggatgccacagatgctgcttcactccagggagatgtgaatccattcctggttctgcttggtgcagttctttttttcttaaaatttaaaaagattttatttatttattcatgagagacacacacagagaggcagagacataggtagagggagaagcaggctccccatgggcagcctgatgggggacgatcccaggactgcaggatcatgacctgagccaaagttagacactcaaccactgagccaccgaggcataccttcctttttctttcttttcttttcttttcttttcttttcttttcttttcttttcttttcttttcttttcttttcttttcttttcttttcttttcttttcttttcttttcttttctttctttcttttcttttcttttctttctttctttctttctttctttctttctttctttctttctttctttcttttttttctttcttttcttggtgcagttctgaagctttggctgtacctattatctccacctttggggccccttgttggggtcagggtgaattgaggcatccagctccctttgaatagtcagattctcactagaattatctgtccttgagtttatcactggttccccgtcgcttgatgtcacctcattagtttgttttggaatattaagctttgttctgaattaaaacatttaaaaaggacagactacatagccatgagcagcaatagcatttctttcctcagtgtgagtcctttaaaatcttgcctctcaggtaagcatctgtctttctttatcaatagataaggaggctcttctggctataaacctttatagctttcctgtcatcacttggagaaatttttgctttatgagaggatagtatctcaagagagaaagaagactatagtttctggtcatacctaggaattaaatttatattcgtgtctgttcagctctctgaagttattataggtactttgaaaaagaactaaagttagcgaaagtttctacataaccatcaaaagctgttatgaaagcggaagaaggatggaacaggcagtaagggggtcattaaattgcccaaagcttttcactaaaactggcagttccagtggccagccaaattggtttgaatatatttttctctcttctagtcttggcgaccatgcttgtcagctagtggttgtaactgattgatggctgaggctaatccatagaagttctttttggtgacataaatgcctgaattaggatgaaatgtagttgaagttgctttattattaattaatccctctcttataaatgtgtgcatttgtaaggaataagttagaaaatgtctttggaaatataattcactgaggtcttgatgatcgaatccttcggatatgcttatttcatcttgctgtaatgttacttaaaaaattaaatatttggcagggactctcaaagctaaaagtgacctgaatgtttctagatctctgttgacaatcaaacttttgagagatggagaatttatcctagaagtgttagttgcttctgaaattgttttattgttgttgttgctttcagagagataaattaaaaaaaacaatttttttttcaattaaaacagcatggacttatggctctgcaggcacatcccactggcataagatttcacatttaaaattccatgatctttaatgtttcccaactgttttaggaccagggcgcccatacaaggccatagacttctcacaccaaggtcctgcctttgttacctggcaccggtaccatttg

SEQ ID NO: 2738 - DNA, 712 bp, Canis familiaris
taggacagtctaccgatgatgattctgttcctcttgtccattgtgtccgcctcctgtgtgcgtcatttttgctgactggggagaaaaatggtatgtatagcagagcaagtacagagctgagggaagtgcctaggtctcaaggtcaacttggtgactggtgcctcatcaccgcagcagagggagggagtagagtctggggtgagcggtggtccttttcactgatgggagaaggagggagtgatgagggagctgggttcctgggtcttgttttgtttatgtggaaactagatgtctgtcactttgaaggtcactttgctgccttccttgcagttttggttccagacagggacgtgcgggtcagtgtgaaggcactggcactcagctgtgttggagctgctgtggcccttcatcctgaatctttcttcagcaaactttataaagtacctcttgacaccatggaataccctggtatgttacaagttcacagtctattcctcatgtttaaccattgctttgaaaactatttcagatcatcttggctattttagtttagagtaatattttttgagttaatttgtggcatttttgaactgtgttgtagctgtatataaagcacataaatcgtaatgttttttgttttttggactccctgtagatgcaatgtttagtttaaacacacatgatgaaacaatagaaatgtgggaacataaga

SEQ ID NO: 2739 - DNA, 324 bp, Canis familiaris
aatgctcacccaggccccttccctccttctgctggaggccaatccacaggccacccaccagccccaacacaccaccatcaccaccagcaacagcagcagcagccgccgccgcagtcgcagcagcgaccgcagcagcagcagcagcagcagcagcagcagcagcagcagcaacagcatcatgggagctctgggccccctccccctggagcatatcctcaccccctggagagcagtagctcccatcatgcccatccctatgccatgtctccctccctggggtctctgaggccctacccgccagggccagcacacctgcccccacct

SEQ ID NO: 2740 - DNA, 1117 bp, Canis familiaris
tctctctcggggctccctgggggggttccatcaagcccatgctggtcttggcctcaggtgagagggcctcagaccacctatgtcaatgagaggactggggttgggggaatgaagctgaccacgggcctgtcctcactcctgcttctgcttacggtgccaggctgagggtattatttaccatccctaaggcatggcccctgtcactggcccctgagagccgcaagcccggcccgacctggtgactcctgccagaaatctgttttggtgacaaaaggaaagtaaacagagaggaaatgaacccaagcaatctgacacatgggcctaggtatgttccttgtggtcccagggcctgcccacttagcttttagctgccatctacttccaggagcttctaggtgttttccagggatctgcctatggaggacagatgtgcccaagccagggccagatcctaaaagcccctttgcccttccctgagaagtggcacagctaccacctgttgagcactaagtgtaggctgggcagagccagactccaccttcctcccaggagcgtacagtccctgagggaaacactcatcagactacatcaataaatgccaaacacagacacagtctaccttcatccttcccaaggacacagctctgacccctgtcacatagctctgggtcacaggggccagcagacacctggctgagggagaaccaccagcaccatctacacacacacacacacacacacacacacacagccatcttcaggaaaccagcccctagaggctctttagctctgctccacagacatgccctcagggcttcccatttaataagcacacattgaacacctactgaatgccaggcctgctcagagtctgtggcttgtaatcagtgtttggattgcgcaggggcaagcttgagcatccagctgagactggggtgggaggcatgttgtgggccagaggcagccagacctggctccctgacccccctgcctcttgttcacaggtgacaaccagggcatcccgatcatgtccagcatcaagctgagagaggaacagcgtataacgacgacctccccctggatgtttccttccagagaggcatggcccgaagaccat

SEQ ID NO: 2741 - DNA, 819 bp, Canis familiaris
gctcccaggtgggtgtatcacctcaccagcgcctggatgatctttgtggtcatcgcttccgttttcacgaacgggctggtgctagtagccaccatgaggttcaagaagttgcgtcaccccctgaactggatcctggtgaacttggcaatcgccgacctcgcagagaccatcattgccagcaccatcagcgttgtgaaccagatctatggctactttgtgctgggccaccctctgtgtgtcgtggagggctacactgtctccttgtgcgggatcacggggctctggtccctggccatcatttcctgggagaggtggctggtagtctgcaagccctttggcaacgtgagatttgacgccaagctagccatcgcgggcattgccttctcctggatctgggctgcggtgtggacggccccgccgatctttggctggggcaggtactggccccatggcctgaagacttcgtgtggcccggacgtgttcagtggcagctcgtaccctggggtgcagtcctacatgatcgtcctcatgaccacgtgctgcatcaacccactcagcgtcatcatactgtgctacctccaagtgtggctggccatccgagcggtggcaaagcagcagaaagaatctgagtccacccagaaggccgagaaggaggtgacccgcatggtggtagtcatggtcctcgcttactgcctctgctgggggccctacaccttctttgcgtgcttcgccgctgcccaccctggctacgccttccaccctctggtggccgccctgccagcctactttgccaaaagtgccactatctacaaccccatt

SEQ ID NO: 2742 - DNA, 925 bp, Canis familiaris
gatccctgggaggattacttttcaactcagatttaagcattctcttccagttggtccaaggcatgctcaaagaaacaggtgcaacctgtagatgtggcctcttcccttctgggggatggataatatgccacagcctgttcgctctcggcaggcactccaatttaccatggggataatcttggattgcctccctaattccttgggatggatagtcggtgccaaggagagtgttactagccattcctggccgagtcctctcctgtaccccagctctcccatatccatgtacacacacacacacacacacacacacacacatgcatccatgtgttcatattcacaatgatggttcatacaaaactttggaatatctaccccacatcatcagacactatggcaaaaggggacctagagcatccactcgtcaacctgatgacctaccctcaatggagcaaagaattcaatcagaagaacaagaaagtgtagacagccacccaacatcaagttctttgtcttgtattcacgaaaactaactttacacttaagtaaaatgctcagcaatttctacatttctcggacctctcagcagccagagtgtctaccaaaatataagtgcaagaggctacatgggattacagacagctagtgtatgaagggataatgtcaggtgctcatcttgcctttcctacttgctcttttgtgatacctagaacaatgatatgaagggtggagctacagccacctttctggaccaagaagattgggaagactagaaccatggaaccattgccaacccccaggtatttctggacttttacttcatgttgaaagtgaatacacttcagtcattgtacacacttacatctgtgtgcttcatgttctgttattaagagatggatgtagctcataactattacagaagatc

SEQ ID NO: 2743 - DNA, 1775 bp, Canis familiaris
ccaagtgtcacagcctcagcaagcaccgggatgagtccccccagtccctcacagggacagtaaagacgtctccagaatccacaatcaagccagctgcgcccccactggcctgcccacggcatgtgaggatcaaaaactggggcaacgggatgaccttccaagacacacttcaccacaaggccaaaggggatctcgcttgcaagtccaagtcttgtctgggagccatcatgaaccccaaaagtttgaccagagaacccagggacaagccaacccccccagacgagcttctacctcaagccattgaatttgtcaaccagtattacagctccttcaaagaggcaaaaatagaggaacatctggccagggtggaagcagtaacaaaggagatagaaacaacaggaacctatcagctgacgggggatgagctcatcttcgccaccaagcaggcctggcgcaacgctccccgctgcatcgggaggatccagtggtccaacctccaggtctttgatgcccggagctgttccactgccaaggaaatgtttgagcacatctgcaggcacctgcgttatgccagcaacaatggcaacatcaggtcggccatcaccgtgttcccccaacgaactgatgggaagcatgacttccgagtctggaacgcccagctcatccgctatgctggctaccagatgcccgatggcaccatcctgggggaccctgccagtgtggagttcacccagctgtgcatcgacctgggctggaagcccaagtacggccgctttgatgtggtgcctctggtgctgcaggctgatggccaagaccctgagttcttcgaaatcccacctgaccttgtgctcgaggtacccatggaacatcccaagtatgagtggttccgggagctggagctgaagtggtacgccctgcctgcagtggccaacatgctgcttgaggtgggtggccttgagttcccagggtgccccttcaacggctggtacatgggcacggagattggggtccgggacttctgtgatgttcagcgctacaacatcctggaggaagtgggcagaaggatgggcctggaaacacacaagctggcctcactctggaaggaccgggctgtcattgagatcaatgtcgctgtactccacagtttccagaagcaaaatgtgaccatcatggatcaccactcagctgcagagtccttcatgaagtacatgcagagcgagtaccgctcccgagggggctgccctgccgactggatttggctggtccccccaatttctgggagcatcactcctgtgttccaccaggagatgttaaattatgtcctgtcccctttctactactaccaggtggaggcctggaaaacccacgtgtggcaggatgagaagcggagaccccagaggagaaagattcaacttaaagtcttggttaaagctgtgctttttgcctccatgctgatgcgcaagaccatggcatcccgagtcagagtcacaatcctctttgcgacagagacgggaaagtcagaaacgctagcccgggacctaggggccttgttcagctgcgccttccaccccaaggttctctgcatggacgagtacaagctgagccacctggaggaggagcagctactgttggtggtgaccagcacgtttgggaacggagactcccctggcaatggagagaaactaaaaaaatctctcttcatgctgaaagagcttaccaacaagttcaggtatgccgtgtttggcctcggctccagcatgtaccctcagttctgt

SEQ ID NO: 2744 - DNA, 459 bp, Canis familiaris
cggttctgtcagccctctcctcagcatctcccagaaccaggggccactggatgggatctcagcctctggtcccaggcttagccttcccctccacctgcatccctagtgcctcaacctggccttcctgctggtggacgtgtggttcagcttcctgcccagcatctacctcgtcttcctgatcattctgtatgaggggctcctcggaggtgctgcctatgtgaacaccttccacaacattgccctggaggttagtaccagctgggcaagggctgcggggtggggggaatggggcggcgtctaggattgaagcctcacccctgctttctgccctccccagacaagtgaccagcaccgggaatttgccatggcagctgcctgtatctccgacactttgggaatctccctgtcagggctcctggccctgcctctgcacgacttcctttgtcacctgtcttgaca

SEQ ID NO: 2745 - DNA, 1452 bp, Canis familiaris
caaacttgagttacttttgagcgtggatactggcgaagaggctgcgggcggtattagcgtttgcagcgacttggctcgggcagctgacccaagtgtcctgtcttccttcctctgcttgtctctaggctctgaaactgcggacggccaccggacgcttctggagcaggtagcagcatgcagccgcctccaagtctgtgcggacgcgccctggttgcgctggttcttgcctgcggcctgtcgcggatctggggagaggagagaggcttcccgcctgacagggccactccgcttttgcaaaccgcagagataatgacgccacccactaagaccttatggcccaagggttccaacgccagtctggcgcggtcgttggcacctgcggaggtgcctaaaggagacaggacggcaggatctccgccacgcaccatctcccctcccccgtgcgaaggatccatcgagatcaaggagactttcaagtatatcaacacggtggtgtcctgtctagtgttcgtgctgggcatcatcggaaactccacactgctgagaatcatttacaagaacaagtgcatgcgaaacggccctaatatcttgatagccagcctggctctgggagacctgctgcacatcatcattgacatccccatcactgtctacaagctgcttgctgaggactggccctttggagttgagatgtgtaagctggtgcctttcatacagaaggcctccgtgggaatcactgtgttgagtctatgcgctctaagtatcgacagatatcgagccgttgcctcttggagtcgaattaaaggaattggggttccaaaatggacagcagtagaaattgttttaatttgggtggtctccgtggttctggctgtccctgaggccgtgggttttgatatgataaccattgactacaaaggacgttacctgcgaatctgcttgcttcatcctacccagaaaacagccttcatgcagttttacaagacagctaaagattggtggctatttagtttctatttctgcttgccattggccatcactgcctttttttataccctgatgacctgtgaaatgttgagaaagaagagtggcatgcagattgctttaaatgaccacttaaagcagagacgggaagttgccaaaacagtcttttgcctggtccttgtctttgccctgtgctggcttccccttcacctcagcaggattttgaagctcactatttatgatcagaatgatcccaatagatgtgaacttttgagctttttgttggtgttggattatatcggcatcaatatggcctccctgaattcctgcattaatcctatagctctgtatttggtgagcaaaagattcaaaaactgctttaagtcatgcttatgctgctggtgccagtcatttgaagaaaaacagtccttagaggaaaagcagtcatgcttaaagttcaaagctaat

SEQ ID NO: 2746 - DNA, 264 bp, Canis familiaris
tctcattgtccagcacacgtctttcaaggagatgaagaacaactccatggctaactacaccaccttatctcctgacatcatggaccacagcatttctgccttcatgaggaaaggtgagtacccatgcaggatggccatctggggaggcaaacatgaaaacggaggcaagagttggcctgggccatctggggcctgctctgcagccgggacctgcagccaccttctcctccacccacaggcatctcgggggactggaagaccacc

SEQ ID NO: 2747 - DNA, 402 bp, Canis familiaris
gttcatggtagaaccaattcagggtgaggcgggcgtcgtcgttccggatcccggctacctgatgggtgtgcgagagctctgcacccagcaccaggtcgcccaccttccatctgcctgccttgcttagggctggtcgggttggagcaaagatgacatcacctttccaccagggggagacttcattctgagagcctcagaactttctagtacactttatcagcagcctgcacagaagctgactttttgctagccctggaaactggccaagacagggccgggtagagctgcagacttcctggccccaactgtggttctttcctctccactcctgcagcctctgctgtgatccttctcagaaccttgcttatttatccatctgttctcttcccttccaccaagcta

SEQ ID NO: 2748 - DNA, 2749 bp, Canis familiaris
gagctcactctgctataaacattaaaaaaaattttaataaatagctcctccagaattacagaagagatttaaaaattggaatttgcaggtgtgttgatttaagaaaatgtaatatgtatataaacaaaaaatcggaggaaaacaggaaaatgatgcctcgtttttccaaagaattttttttccagttctattcttatagataaactgttttaggaagttcaaataccattccattccatttactaaaattttatttgtatagtaaatttcatgaaaacaattgctgcattaagtgaggcaatcttttttagaaactttatgaccttaaatgttaaacaaaatgcacttattttcaagaaagcatcattaactagaatgccatgattaggaatctgtgattaatttcatttttactgtaaagttaacttttgatattgtctccactttttaaaattttattaagcttttatggtagtaaaaaaagattttatggtagtttaacacagcagttaaataaaaaatcttaaatactgaaatttgtaaattgtaactattcttggggtaatatatcagtttaaacattataattattgttcataaatatattgttaaagctctacctgaaaaaacacaaattaaatacatgtatcagttcttacatgctaatgataaaactaattttttaaactgaaaacattagcctggtttcctcacacacacatcctttcccatataaatatatgaagacagagaacaaaataaaacagtgaaagatataaaacttgattctgtgaaaatatttaattgctgtattgttataagctaacagtatgaaactgcaagtattaaagcaacagcagcgacaatacaatgaaagttatttgactaagccaataatattctcactcattaaaattccatatatctattttagttcttcaacattatcaccatcagtacacaattatttctaagcctgaagattcatgaatctttaaagggagctttctaccaccccaaactttttttttttttcatttatctcccatacacttttaaaaattacaagcaaaaaaatgtggcacaaagtgttaatgacctttccatactcaaagtaagataagtgacatcctaaaaggttgggtggtgataagactatggctaaccaatcataacttcagaattcctggttgacatcataagacctccctagaacacttttcctcctacacctacttcaattgttgccataagtctggtaacagagtcagaaaactttctaactaaacaccgataagacttcatacaactcacaatactttatattgtaatcatcacaagagccaagggtgagaaatagattcattaatttggtaaattcttgtttttcagaattcaaaattactaaactttttcaagagttaacctagttttgttaatttcagttcaaagttaataaaatgtgtgatatgacaaaaactttaatttctaaataaatgcctgtttggtgacagtaagaacaagacttaactttgaaataataagggtcgcatcatctttgaccttggttagtgatttgtcattttaatttgactttcatttttgcttctgaaaagtggattttttccaattaaaatatctttcaattatgtaactatatttggtggtaatggagatcttattccttcaagcaaaaacaatggctacatcttgttatctgttactgtgctgaaaaacagggtagggactgggcttctatttacatctgtgatactatgaacagtcgtgtgattgtacaacacgcacactgctggcatgattattccaatattatcagtatgattctttacaataaatatttaacagaactttttaaaatataaaacaaactaattttaaaatgcatttgaagactttttccctctctatagagtccactcaacttttaacacttctaaaaataattccaagatttaataaattcaattacttacatgaaatcaagcttggaaattttaaaacatccattaaaaacacatgtaaaattctttgtttaaagttagagaatactaatttggcacttttaaaaaataaagacacattattttggcagaacattcctaaatatctcattttagtgaatctgataaaatgtttattccgcctattaatgaatatactgttaccaagttactatcctccgtggtttctcattatcctctcctgcatttttaagggggagggggggaacgatggagaaggaaacttttcaaatgcccagagatgaagatgatacattttatgacttctgtctgaattccacttactcttgatgtctacaatcctcagtttaatatacaaaatgtatcttcattcttaaatctctatcagtcaggacatagagaatcacatcaattttatctcatttctattttcatatgtatgtcaaaataaaatttatctctggaattctaagctcctatgatattaactctattgctttttacagaaaaggactttgtaatttccacaacagctttccttaagacatgtgaaaacatttctaatttttgcctaccactgagatactgtaaccacttctcaatatctttatattcataaaatgtatttcctttggtatcacatgaaagtcacttggtgcaggtgttttatacacatatttatgcatttttactcaaatacctatcaaattacattctcacacttgaaatgggatattcatgagtgt

SEQ ID NO: 2749 - DNA, 1895 bp, Canis familiaris
gtcttagaattactaaagttgggcacttggcaggccttcctgataatcctgtcctgatgatgttgatatcagtaactataatattaatagtaaatatattattcatatgtgccagacagagggttaaaatattttacatgcattattttctgaggacttacaaaaaactcacacaagctgcagaatcctgtctgggagcaggtctctgggacaggatggcccaggagctcagcgagaaggagctactgaagatggaggtggaacagctgaagaaggaagtgaagaacccaagagctctgatttccaagacaggaaaggaaatcaaggattatgtggaggctgaagcaggaaacgaccctctcctcaaaggcatccctgaagacaagaatcccttcaaggaaaaaggtggttgtatgataagctgatggccctggagcccctccccccggacatctgtccctgctcagcccccctgctctgcaccaggaaccgagcttcccggggacacccagggacccagggaatcatccccttctttcagccacagccatggcatgagtagacccctggcccatgccctgggatccactccccactcctaccttcggctctcctctactccacctgctgggtcaccactggccccactcagaggacagcttccctgcctcagcagctggcaccttgagtggtgggattcaaagagccccgagaccccagatggcaatccttagagacatttactcctccccgaagctgggccattctttccctctgcactcttcctaggacccagtctcttattcagaatagtttgggttgaggcccagagttggggggtccttttgtccctcatctgcaggtccaatcctgtggtcatcctctaaagtcacttagatcaccccagagggcctgaggcaaaagagtctataaagtcacaatgtcatgattgatttaatattatggagtgtctgttccttgctgggtactaggacgagaagagtggcaacacaaacatggctcgtgtcatattgtttagcagagaaaaatatggagcaaaataagtgccactctctggagaggaccatccaggtggtgtggagcctggggcgaggtccctgtgaattgctgcaggccagtgggccatggggtggaactaggcagacagaggcccaagaggaagatggaatgaagacttaaagcacccagtgagctcagctaaggactctgttctgcactggttgcaaggggaagcctaggagggggtgaagcagccaagggacagacgggatttgaccagcgggagggaggccagatcctgctaaggagggcgctggttcctgggccttgttagcaagcagattatagtcttacagaacctcagaagtgatgtgggagcagaaggcaagctaaggacaaagcactagctgacaccccaccactctcaggtgggatgtgtgtgacattcctcaggcactcctggctgccctaaagctaagggatcgaaaaaccaattgttaatttatagagtttacagtcctgcaagacaaaatgtcttagtgatttaccaggggaaaaataacccttctggaagttaggttattgataacctaacttccagaaggaaactcccaactgtcttactgttaatgctttcctagagggaaaaaccatctgaacttgatgatggcaaggcgtctagtatcttgtaggccctctttagcatacaaaaattcttttgaaaacctccctttttccttacccccagctcccaagtatataatctgtcacctttcacgaccccctgaagttgggcacctggcagctctttctgcctacgggtcctgtccccgtgtttgaataaaaccattttgcaccaaaaaaaaaaaaaaaaa

SEQ ID NO: 2750 - DNA, 1518 bp, Canis familiaris
ctccgcgatggggctggagaccgagaaggccgacgtccagctctgcatggacgacgacgcctacagccaccacagcgccgtggacttcggcgacctggagcagctggcggactcgggctcggaccgcgacccccgccgcctcaactcgcacctccaggtgggcttcgaggacgtgatcgcggacgccgtgtctacgcactcctttgacaaagtgtggatttgcagccatgccctgtttgaggtcagcaagtacgtgatctacaagttcctgacgttgctcctggcgatgcccatggccttcgcggcaggggttctcttcgccaccctcagctgcctgcacatctggattataatgcctttcgtgaagacctgcctcatggtcctgccttcggtgcagaccatatggaagagtgtaacagatgctgtcattgccccgttgtgttcaagtgtaggacgcagcttctcttctgtcagcttgcaagtgagtcacgactgagcacttggaccccagggctggagagctggatactgtaatacttctttgttgttataatgcaaaagcactactgttctgttctaagcatccccaactgttctaattaagaaaacatttttaagatgggcaaccacatttggaaatgttgattggcagatcttctcaaataatgctcttctaattcatagtcaaggatttcgtatctaactttagagccagaataatacagtaggttggcaacacttaattttaaaggcaagtctttactttagtacaaaagtacatattttataacgatgaatttataaagatcgagggacgtttcccaaacactataatagttttgtgcacaactgcttgtaaaaaatatggaatttctttttttttttttttttactctgaaagcaatgctttttaaattacctttgcagataaagtcatgggaatacttacaggaaaaatatacaaagatcctagaaattacagtgacaaaagcatgccgtggtaataggagctatcaaatatagttgtacagtttatcgtataactataaaatcacaagactgattgacttttaacataataaaatctatgtagtcaaatgagtggtaatgttttaaggtaatgatcatgggactctcaaggatgctacagaggcacttttgaagtctcttttgtagctattttcaaaaggataggagtttcatagtttaatcattcatttactttgggccccaatagtattccagttcagacatcctttatatttaccagtcttggcaacttggaaaagttaaacttatcttcatcgaatgaagatttgtcatctatgtagatgttcaaaggaatgtttattcaggttctgataataaatctgagaatttgagcactttcacactttttaagatgtgtgaaattatagtgaaccacgtatatcatagacatcttctgtatatgcctctcatwttgggataatgagatttttaaacaacagtgactcataacattgdaataggacacat

SEQ ID NO: 2751 - DNA, 721 bp, Canis familiaris
cattgcttatagagcgatacccgggatctcctggaagctatgctgctcgccagcacataatgcagagaattcagagacttcaagccgactgggtcttggaaatagacaccttcttgagtcagacaccctatggataccggtctttctcaaacatcatcagcaccctcaatcccactgctaaacgacacttggtcctcgcctgtcactacgactccaagtattttcacccttgggacaacagggtgtttgtgggagccactgattcagccgtgccatgtgcaatgttgttggaacttgcccgtgccttagacaagcaactcctttccttggagaaaattccagactccaagccagatctctcactccagctaattttctttgatggggaagaggctcttcttcattggtctcttcgtgattctctgtatggatctcggcacttagctcccaagatggcatcaaccccacacccacctggagcgaaagacaccaaccaactgcacggcatggatttattggtcttgttggatttaattggagcgcccaacccaacatttcccaattttttcccaaaatctgccagatggtttaatagacttgaagcgattgaacaagaactccacaaattaggtttactcaaggattactctttggagaggtgctatttccagaatcatagttatggaggggtgattcaggatgaccatattccatttttaag

SEQ ID NO: 2752 - DNA, 3792 bp, Canis familiaris
aacggctggcggcgggagccggtggacggcaggatgaggctgccgctcctggtggctccgctctgcgccgggatcctggcaggggcactccgagtgcgggcccagcagagggagagagtgacctgcacacgcctttatgctgctgacatcgtgttcctacttgatggctcttcatccatcggccgtggcaacttccgtgaagtgcgaggtttcctggagggattggtgtggcccttctctggggcggccagtgcacagggtgtgcgcttcgctgccgtgcagtacagtgatgatccacggacagagtttggcctcggtgcacttggctcagggggtgatgtgatccgagccattcgtgagctcagctacaagggtggcaacacgcgcacaggggctgcaattctccatgtggccgaccatgtcttcctgcctcagctggcccgcccaggggtccccaaggtctgcatcctcatcacagatgggaagtcccaggacctggtggacacagctgcccagcggctcaaggggcagggcgtcaagctgtttgctgtgggaatcaagaatgctgaccccgaggagctgaagcgagtcgcctcacagcccaccagtgatttcttcttctttgtcaacgacttcagtatcctgaggacactgttgccccttgtttcccggagagtgtgtaccacagctggtggtgtgcctgtgaccctgcctgctgatgacttgacctctggtccacgagacctggtgctgtctgaagcaggcagtcaatccctgagagtacagtggacagcggccagtggcccagtgaccggctacaaggtccagtacactcctctgacagggctgggacagccactgccaagcgagcggcgggaggtgagcgtcccagcaggtgagaccagcacacagcttcagggtctccggccactgactgagtaccaagtgactgtgatagccctctacgccaatagcatcggggaggctgtgagggggacagctcggaccactgccctggaggggccggaactgaccatccagaatactacaacccacagcctcctggtggcttggcggagtgtaccaggtgccgctggctaccatatgacatggcgggtcctcagtggcggtgtcacacagcagcaggagctgggccctgggcaggggtcagtgctgctacgtgacctggagcctggcacagactacgaggtgactgtgagcagcctgcttggccggagcatcgggtctgcttcctccctgactgcccgcactgacacttctgttgaacagaccctgcgcccggtcatcctgggccccacatccattctcgtttcctggaacttggtgcttgaggcccgtggctaccggctggaatggcggcgtgagagtggcttgggggtgccacagaaggtggtgctgccctctgacgtgacccgctaccagctggatgggctgcaaccgggcactgagtaccgcctcacgctctacaccctgctggagggccgcgaggtggccacacctgcaactgtggtccccactgggccagagctgcccgtgggccctgtgacagacctgcaggcaaccgagctgcctgggcagcgagtgcgggtgtcctggagcccagttcccggggccaccgagtaccgcatcactgtgcgaagcgcccagggggttgaaaggaccctggtgcttcctggaagtcagacagcctttgacttggatgatgtccgggccggactaagctacactgtgcgggtgtctgctcgagtgggtacccgcgagggtggcgctagcatcctcactgtccggcgggaactggaagccccacttgccatcccagggctacgagtggtggcctcagatgcaacacgggtgagggtggcctggggacctgttcctggagccagtggatttcggattagctggaggacagatggtggtccagagtccagccagacattgcccccagaatccacggccacagatatcctggggctaaggcctggaacctcctaccaggtggctgtgtcagcactgcgagggagagaggagagtccccctgtggtcatcgtggctcaaaccgacccactgggcccagtaaggactgtccatgtgacgcagaccagcagctcatctgtcaccatcgcctggaacagggttcctggtgccacaggatacagggtttcctggcattcagcacatggcccagaaaaatcccagttggtttctggagaggccacagtggctgagctggatgggctagagccagatactgagtacagggtgcatgtgcgggcccatgtagctggtgtggatgggacccccgcctctgtggttgtgaggacagaccctgcgcccgtgggcagtgtttcgaagctgcagatcctcaatgcttccagtgacgttctgcgggtcacctgggtgggggtcactggagccacagcctacagactggcctggggccgcagcgagggtggccccacgagacagcagatgctccccggaaacacagactccgcagaaatgcggggtctggaaggaggagtcagctactctgtgcgagtgactgcacttgtcggggaccgggagggcgcgccggtctccatcgtcgtcaccacgccgcctgaggctccgccagccctggagactcttcgcgtagtgcagcgaggggagcactcgctgaggctgcgctggcggccggtgccaggggcgcggggcttccgtctgcggtggcgacccgagggtggccaggagcagtcccgggtcctggggcctgagctcagcagctatgaactggatgggctagaaccagcaaccctataccgcatgtggctgagcgttttggggccggctggagaagggccccccatggaagtgactgcacacactgagtcactccgtgtcccaagttctgaactgcgtgtggtggacacttcagttgactcagtgactctggcttggaccccagtgtctagagtatccagctacatcctgtcctggcggccacttggacgccctggccaagacatccctggggcctcacagacacttccagggatctcgggctcccagcaggtgacagggctagagcctggcatctcttataccttctctctgacacccatccgggagggtgtacggggtcctgaagcctctctcacacagaaaccagtgtgtccccatggcctgatggatgtggtgttcctgctgcacaccactcaggacaacgctcatcgtgcagaggctgtaaagcgagccctggagcgtctggtgtctgcacttgggcctcttgggccacaggcagtccaggttggcctcctatcctacagtcatcggccctccccactgttcccgctgaatagctcctacaatcctgatgtcatcctgcagaagatccacagcatcccctatgtggacccaagtgggaacaacctgggcactgcagtggttactgctcacagacacctattagcaccggatgctcctgggcgccgccagcacataccagggataatggttttgctagtagatgagtccttgagaggtgacatcttcaaccctatccgtgaggcccaggctgctgggctcaaagtgatgatattgggccaggccggagctgacccagaacagttgcgtcgcttggtgccaggcatggatcctgtccagactttctttgctgtggatgatggatcaagcttggaccgggcagtcagtggcttggcaacatccctgtgtcagattggctccaccattcagccacagccagagccatgcacagtgcattgtccaaag

SEQ ID NO: 2753 - DNA, 267 bp, Canis familiaris
gatttcgtgttccagtgtaaggccgagtgctatttcaccaacgggacggagcgggtgcggtttctggctaaatacatctataaccgggaggagttcgtgcgcttcgacagcgacgtgggggagttccgggcggtcacggagctcgggcggccctcggctgagtactggaacgggcagaaggagctcttggagcaagagcgggcaacggtggacacggtgtgcagacacaactacgggagggaagagctcaccacgttgcagcggcga

SEQ ID NO: 2754 - DNA, 2836 bp, Canis familiaris
cgccatttaatttcacaactaaccaccttgcatgttagggattagcagccactttatctgtcagtagggatggagggaaagcagtccagatttattatttttatttttgaaaatgttataaatagtagcatgtgtaatgcagcgacctataatttaaaaatgcttcattttatcgattaatatcaacagaataactttcctagaatgattgctattatttcttcagactctgaaaagtaaactgactcacgtgttcatgcaaactaataaggtggccaagctgagatccgaatccaagacttggaatccagggatctttccatgctggtaccaagggaggacttttctccatggggagacttgctgtgtagtctcacatctcattgtcttttcttgtctgttattcccgtccagtggaaccgacagtgaccatcttcccgtccaagacagaggttctgaaccaccacaatctgctggtctgctcagtgacagatttctatccaggccagatcaaagtccggtggtttcggaatgaccaggagcagacagctggtgtcgtgtccactccacttattaggaatggggactggaccttccagatccttgtgatgctggagatgactccccagcgaggagatgtctacacttgccatgtggagcacgccagcctccagagccccatcacagtgcagtggcgtaaggagaagtttgtttcctgtcatgatgagccccacagacagagggcagagcttcctctagcccatcccattctatttgttatcttggatgtcactactgaggtggaaatcacaggagattagagtacctcttgtcccacggcaggggcatcaggagaatcttgatctcgtggtctttctagatactagagagatcattctccataccttggccccacaacgcagccctgtagctctgaagggtttactgccctggctggtgactggggccttggtgtttgaggttatggatgtgtctggaggagcaggtttcagcctccctccttccccccacatacccactgtgcaaggatctaatggtgggtccttccctctcctaggggtggtcaagttcacccagtacctccaccttctgtacctcagactagacttcaggcttcccaaagggagcctgtggggtgtggggacaactctgactctcaggctctgctccccaggggcacagtctgaatctgcccagagcaagatgctgagtggcattggtggcttcgtgctggggctgatcttccttgggcttggccttatcatccgtcacaggagccagaaaggtaaggcattctggggaaatgagggagatgggctatgcctgagaccttttgtttggggggtgggggggggggttggctctgtctctagattagctctttccttctgactctgaaaggaaagaggctgggctggtggtggaaagagagggaaccacctagggggagactctggaatctgatttattggttgaaaaggagccctaccacagaggtaacaggtggagcatattctagggcttccttatagttcatcattggctccctggctcctttctgaaagtttctttctgtaagagggtcagagcatctgcttcccttccttctagtgacagtgtcattgattttgggggattttagcttagggcagttaaggtcttggagtggttgagtggggagaaagtaaaattcaattaagttgcttatctcacctccatttggggtgagggagaaggtggctatttatgagaccttttttttttctgtatcacttccttttgtaggatctcgggggtctccaccggcaggtactatttctgctctgattcagtggggttgcagggacgggtgaaagggggaagagcatgaggtgagtgtacctgggcacaatggtctcagttcatggcctattccctgctacagagatcaagagttaggggggaagattgcccagtttgtgtaggcagatccagagttgttccctggaatcaagccataacgttggtgctatctgtctgtgaaactcggaaccagagccacatcttgggtgttagacaccaggatgatgcccactttgtgttatgtgttggtggctgctgcctgtgtgaatttacatgtgaaaggccactagtggtgcaaagatggtgagttattatgtttactaaaaagattgatacgtttttatatccccttaaaggacaagagctgctccactgcctcccacacatctgtgtgcagctggagtgccatgttctcttaagttggtttcacctttacagaaatattgggggaggtgatgactgcctgccctggccctcagttttctctggtgctgcagtggccctgagaggaggggagagggctcatctgtcacagtctcctctgctgatcactctcttttctacagggctcctgcactgatgcctgaggataccggggattccatcctttgtagtgtccgtctgtccctgcccagaattcccagctgcctgacagactgtcccccacatagatcagagtcctacatgactctgaggactcttgaggatctgggtgtgattctgcttcctgcattgacctgtgtgctccctgctacaggatctactcaggccccaagggattttcctgtttccattcttccttcacagattgtgcaagagaagcacattgaagccatttacctgaagatagagattttatcataattaaatgtgattatgagttctctgtaccctgagtcttcttaactgggtggaggcaggaaaccagtgcagaatgaaagggtcatattgctccttgaagggagaccggagg

SEQ ID NO: 2755 - DNA, 3154 bp, Canis familiaris
gagctcagagtctatcgcagccaccgcgatgagaggcgctcgcggcgcctgggattttctctgcgtcctgctcctgctgctgctgctcggcgtccggacaggctcttctcaaccatctgtgagtccaggggaaccgtctctcccatccatccatccagcaaaatcagagttaatagtcagtgtcggcgacgagcttaggctgtcctgcaccgacccaggatttgtcaagtggacttttgagaccctgggtcaactgaatgagaacacacacaacgaatggatcacagagaaggcagaggctggccacacgggcaattacacgtgcaccaacagagatggcttgagcaggtccatttatgtgtttgtcagagatcctgcaaagcttttcctcgttgaccttcccttgtatgggaaagaaggcaatgatacgctggtccgctgccctctgacggacccagaagtgaccaattactccctcagggggtgcgaggggaagcctcttcccaaggacttgacgttcgtcgctgatcccaaagctggcatcacgatcagaaacgtgaagcgcgagtatcatcggctctgcttgcactgctctgcggaccagaagggcaggacggtgctgtccaagaaattcaccctgaaagtgagggcagccatcagagctgtaccagttgtgtcagtatccaaaacaagctctctcctgaaggaaggggaagccttctctgtgatgtgctttataaaagatgtgtctagtttcgtggactcgatgtggataaaggagaacagccagcagactaatgcacagacacagagtaatagctggcatcatggtgacttcaattttgaacgtcaggaaaagttgattatcagctcagcaagagttaatgattctggagtgttcatgtgttacgccaataatacttttggatcagcaaatgtcacaacaaccttggaagtagtagataaaggattcattaatatcttccccatgatgagtactacaatatttgtaaatgatggacagaatgtggatctgattgttgaatatgaggcatatcccaaaccggagcaccagcagtggatctatatgaacagaaccttcactgataaatgggaagattatcccaagtctgacaatgaaagtaatatcagatatgtgagtgaacttcatctaaccagattaaaagggaacgaaggaggcacttacacatttcaagtgtccaattccgatgtcaattcttcggtgacatttaatgtttatgtgaacacaaaaccagaaatcctgactcatgaaagtctcacgaatggcatgctccagtgtgtggttgcaggattcccagagcccgcagtaggttggtatttctgtccaggagctgagcagagatgttctgtccctattgggccaatggatgtgcagatgcaaaactcgtctctgtcaccgtctggaaaactagtggttcagagttccatcgattatagtgccttcaagcacaatggcacagtcgagtgtagggcttacaacaatgtaggcaggagttctgccttttttaactttgcatttaaagaacaaatccatccccacaccctgttcacacctttgctgattggctttgtgatcgcagctggaatgatgtgcattatcgtgatgattcttacctacaagtatctacagaaacccatgtatgaagtacagtggaaggttgttgaggagatcaatggaaacaattatgtttacatagacccaacacagcttccttacgatcacaaatgggagtttcccagaaacaggctgagctttgggaaaactttgggtgctggtgccttcgggaaagtggttgaagccaccgcatatggcctgattaagtcggatgcggccatgactgttgccgttaagatgctcaaaccaagtgcccatttaaccgaacgagaagccctaatgtctgagctcaaagtcttgagttacctcggtaatcatatgaatattgtgaatcttcttggagcgtgcaccgttggagggcccaccttggtcattacagaatattgttgctatggtgatcttttgaattttttgcgaaggaaacgtgattcatttatttgctcaaagcaggaagatcacggagaagtggcactttataagaaccttctgcattcaaaggagtcttcctgcagtgacagtactaatgaatacatggacatgaaacccggcgtttcttacgttgtgccaaccaaggcagacaaaaggagatctgcgagaataggctcatacatagaaagggatgtgactcctgccatcatggaagatgatgagttggctctagatctagaggacttgctgagcttttcttaccaggtggccaagggtatggcattcctggcctcgaagaattgtattcacagagacttggctgctagaaatatcctccttactcatggtcgaatcacaaagatttgtgattttggtctagccagagacatcaagaatgattctaattatgtggtcaaaggaaacgctcggctacctgtgaagtggatggcccctgagagcattttcaactgtgtgtacacatttgaaagtgatgtctggtcctatgggatttttctgtgggagctcttctctttaggaagcagcccctaccctgggatgccagtcgattcaaagttctacaagatgatcaaggaagggttccggatgctcagccctgagcatgcacctgctgaaatgtatgacatcatgaagacgtgctgggatgctgatcccctgaaaaggccgacgttcaagcagatcgtgcagctaattgagaagcagatttcagatagcaccaatcatatttattccaacctcgcgaactgcagccccaacccagagcgccccgtggtggaccattccgtgcggatcaattccgtgggcagcagcgcgtcttccacccagcctctgctggtacacgaagatgtgtgaagcaggaggagtgccgggggtctccccaacaagagcgatccctgttcttttggttcctatactggttattctgtcctccttcggcttgcatcctattccagggtagcggacacccctctgtccctccctctttacgagcacaccctaattagtggccagtgacttttgtcatcagccaccatcctattgcaaaggttc

SEQ ID NO: 2756 - DNA, 532 bp, Canis familiaris
ttctggctctggatcaactctacagatcccgctggacagctccagtggctagtgggggagcttcaggctgctgaggatcgaggagacaaggtgagggaaggcagtgagaacatgatggagtatgcactgacagaggttggaggagaagcaggcccttcatgaccagactcctatctggagccagagaaacttggtcttctggagtttccaacaacagtgttccctggttgttcggctcctggtccccctttgaagccctttcattcactcccccttctctggccagcaatgctggccattgtaggagatgagttccacctcttcctggccaggctgtctggacccctccttgtcctgatacccttcctcttatttctttttaaaatttgaagctctaattggctttattgaaaaattcatgaatcaggcagcttcccatctagcaaatagaaggcattctattctccctgataaccttccttaactctccctgcaggtacatataattggccacattcccccagggcactgc

SEQ ID NO: 2757 - DNA, 4317 bp, Canis familiaris
ctaagtcggagtatcttcttcccaaattcccttctcggtggaggttgcgaaggaaagcccgaggtgacgatggatcctgaaggaggccgtaaggggagtgcagagaagaacttctggaaaatgggcaaaaaaagtaaaaaagagaagaaagaaaagaaaccaactgtcagcacgtttgcaatgtttcgctattcaaattggcttgataggttgtatatgttggtggggacaatggctgccatcatccatggagctgcactccctctcatgatgctggtttttggaaacatgacagatagctttgcaaatgcaggaatttcaagaaacaaaacttttccagttataattaatgaaagtattacgaacaatacacaacatttcatcaaccatctggaggaggaaatgaccacgtatgcctattattacagtgggatcggtgctggcgtgctggtggctgcttacatccaggtttcattctggtgcctggcagcaggaagacagatactcaaaattagaaaacaattttttcatgctatcatgcgacaggagattggctggtttgacgtgcatgacgttggggagcttaacacccggctcacagacgatgtctccaaaatcaatgaaggaattggcgacaaagttggaatgttctttcaatcaatagcaacatttttcaccggttttatagtggggtttacacctggttggaagctaacccttgtgattttggccatcagccctgttcttggactttcagccgccatctgggcaaagatactatcttcatttactgataaagaactcttggcctatgcaaaagctggagcagtagctgaagaagtcttagcagcaatcagaactgtgattgcctttggaggacaaaagaaagaacttgaaaggtacaacaaaaatttagaagaagctaaaagaattgggataaagaaagctatcacggccaacatttctattggtgccgctttcttattgatctatgcatcatatgctctggctttctggtatgggacctccttggtcctctccagtgaatatactattggacaggtactcactgtcttcttttctgtattaattggggcttttagtattggacaggcatccccaagcattgaagcatttgcaaacgcaagaggagcagcttatgaaatcttcaagataattgacaataaaccaagcattgacagctattcgaagagtggacataaaccagataatattaagggaaatttggaattcaaaaatgttcacttcagttacccttctcgaaaagaagttaagatcttaaagggtctcaacctgaaggttcagagtgggcagacagtggcgctggttgggaacagtggctgcgggaagagcacgaccgtgcagctgatgcagaggctctatgaccccacagatggcatggtctgtattgatggacaggacattaggaccataaatgtaaggcatcttcgggaaattactggtgtggtgagtcaggagcctgtgttgtttgccaccacgatagctgaaaacattcgctatggccgcgaaaatgtcaccatggatgagattgagaaagctgttaaggaagccaatgcctatgattttatcatgaaactacctaataaatttgacactctggttggagagagaggggcccggctgagtggtggacagaaacagagaatcgccattgctcgggccctggttcgcaaccccaagattcttctgctggatgaggcaacgtcagctctggacactgaaagtgaagcagtggttcaggtggccctggataaggccagaaaaggccggactaccattgtgatagctcatcgtttgtctacagttcgtaatgccgatgtcattgctggttttgatgatggagtcattgtggagaaaggaaatcatgatgaactcatgaaagagaagggcatttacttcaaacttgtcacaatgcagacaagaggaaatgaaattgagttagaaaatgccactggtgaatccaaaagtgaaagtgatgccttggaaatgtctccaaaagattcagggtccagtttaataaaaagaagatcaactcgcaggagtatacatgcaccacaaggccaagacagaaagcttggtacaaaagaggacttgaatgagaatgttccttcagtttccttctggaggattctgaagctgaactcaactgaatggccttattttgtggttggtatattttgtgctattataaacggaggcctgcaaccagcattttcaataatattttcaaggattatagggatctttacccgagatgaggatcctgaaacaaaacgacagaatagtaacatgttttctgtattgtttctagtccttggaattatttcttttattacatttttcctccagggcttcacatttggcaaagctggggagatcctcactaagcggcttcgatacatggttttcagatccatgctgagacaggatgtcagctggtttgatgaccctaaaaacaccactggagcattgacaaccaggcttgccaatgatgcggctcaagttaaaggggctataggttccaggcttgctgtcattacccagaatatagcaaatcttgggacaggcattattatatccttaatctatggttggcaattaacacttttactcttagcaattgtacccatcattgcaatagcaggagttgttgaaatgaaaatgttgtctggacaagcactgaaagataagaaagagctagaaggagctgggaagattgctacagaagccatcgaaaacttccgaactgttgtttctttgactcgggagcagaagtttgaatacatgtatgcacagagtttgcaagtaccatacagaaactctttgaggaaagcacacatcttcggggtctcattttctatcacccaggcaatgatgtatttttcctatgctggctgtttccggtttggtgcctacttggtggcaaatgagttcatgaactttcaggatgttcttttggtattctcagctattgtctttggtgccatggcagtggggcaggtcagttcatttgctcctgactatgccaaagccaaagtatcagcagcccacgtcatcatgatcattgaaaaaagccctctgattgacagctacagccctcacggcctcaagccaaatacgttggaaggaaatgtgacatttaatgaggtcgtgttcaactatcccactcgaccagacatccccgtgctccaggggctgagcctcgaggtgaagaagggccagacgctggccctcgtaggtagcagtggctgtgggaagagcacagttgttcagctcctagagcgcttctatgaccccttggctggttcagtgctaattgatggcaaagagataaagcacctgaatgtccagtggctccgagcacacctgggcatcgtgtctcaggagcccatcctgtttgactgcagcattgccgagaacattgcctatggagacaacagccgggtcgtatcacatgaagagattatgcaggcagccaaggaggccaacatacaccacttcatcgagacactccctgagaaatacaacaccagagtaggagacaaaggaacccagctctctggtggccagaaacagcgcattgccatagctcgcgctcttgttagacagcctcatattttgcttttggatgaagctacatcagctctggatacagaaagtgaaaaggttgtccaagaagccctggacaaagccagagaaggccgcacctgcattgtgatcgcccaccgcttgtccaccatccagaatgcagatttaatagtggtgtttcagaatggcaaagtcaaggagcatggcacacatcaacagctgctggctcagaaaggcatctatttttccatgatcagtgtccaggctggagcaaagcgctagtgaactgtggccatatgagctgttaaatattttttaatatttgtgttaaaacatggcatttaatcaaagttaaaaggtgagcacttactggaaaaactatgtagaactacctgtttaacatttcttgctgcaactgaagatcattccaccaagttcagagtcttcagattttataattaaaggaaccaaaagaaacattatctgatggaataaaatattggtgttaattgcattataaaattatagagtaattcaaagtagattttgttaataaattgtataatttttgtttatattttatttgtaacttactgctttgctgaaagattatagaagtggtaaaaagtactgaatgtttgaataaagtgctagctataataaaactaaacttttatatgaaaaaaa

SEQ ID NO: 2758 - DNA, 1524 bp, Canis familiaris
tcgccgttggctacaggatcaaaagcttgacagggtgtgtgtgagatcccagcctcaaaaactacatctacggactagtcatgactgcatggttaggggcctcctacgttttgcctattctgctagtcagctttgtgcagacaaatgccaagcctgagaagacaaagatggattgctataaagatgtgaaaggaaccatctatgaatatgaagccctcactctcaatggaaatgaacgcattcagttcaagcagtatccgcgcaagcatgttctttttgtcaatgtggccacctattgtggtctgacagctcagtatcctgaactgaattcacttcaggaggagctgaagccccttggcctggttgtattgggctttccctgcaaccaatttgggaagcagggaccaggagagaactcagagattcttccgggcctgaagtacgtccggccaggcagaggctatgtccctaacttccagctctttgagaaaggggatgtgaatggtgaaaaagaacagaaagtcttcaccttcttgaagctctcctgccctcacccctcagaggttctaggctccttcagacacatctcctgggatcctgtaaaggtccacgatatccgctggaactttgagaagttcctggtggggcctgatggggtccctgtcctgcgctggttccaccggactcccatcagcactgtcaaggaagacatcctggtctacctgaaacagctcaaaatgaaataggaaggcaggagcaaccctgcttctcatcagaagacggttttaaaaaaattccagatttcacgacattcttctaaatggcctgcccttgaccaaagcatgctgtaccgccagagttcccactctctaccaagcagttatatattcagaagactactgctatttctccttgcaagtccgtatgtggaagaagaacaaagaatggaacctctaaatccttagacctctaatataaataaatttaatcggtcctgtccatcaaagaaaatctagcgttccatgaggatggttcagtctgccacaacatcctgaaaaagaacgttccagacagaatgttcccccttctctttccactcaaaagtgtagaaataacagtgggatggtagccatacagccgagtttccaccttataacacctgccctccaccgtgacaaacacgtattgtcagtttccaagtcttttgagaccagtggttcatccatgaaacttaccctcccatacacacagtgtcctgtcattctggcttatgagctctaaggtggagtgagagcaggagactgccttgccaaggatagaaggacatctccatggtagtggacccggagcctctctatcatttagatcctacagaaacttccctgctgtctgacttgtagtgcactcaggtcatgacacctggacaatgcatcctttgaaggatgggctttctcttgtccatcctagattcttcagcttcagaaccagctctgcattgtctccaataaaatgttttctacagca

SEQ ID NO: 2759 - DNA, 716 bp, Canis familiaris
ggactgcttatggccctggttagctggagcatggattatgtcagtgccaaaagccttcagggtaggtttacctccgcccttcaccctcagcctctccccacacagtggcagctgtttctcgagttcctacctaggatgagtggggtgcatctggggaggagggtgttgcccagaggagatctggcccaggatgagaccagacccagacccagatccatttctcctgccccttcacctgctcccagccaagctgagggcacccctctaacccggtggccaattttcccagggtttttctggtttgggctctgaccaccccaaggcccaggtactcagtttcggggcaaaccgggacaaccctgacagggtgcctgcttgagtggggttggcagcactggcgcagactctacaaatggtgggaacatgggcaggtcacgtcacctcctacaactcaggttccctgtgtgcaatgagaacagtaccatcttgtgaggtcgcccgggattgcaagggcatgaggacgctcacagcaccaggacgtgctgtggctgttggggtgggggtggggggcagtgacatcccaaccacactgggactgagcctacgcccctgtctctacagcctacaagtggagctactaccagatgcagcccaacctgcctctgcagtacctggtctgggtcaccttcccgctaactctcatccttttcagcgcc

SEQ ID NO: 2760 - DNA, 888 bp, Canis familiaris
atggccaaagttcctgacctctttgaagacctgaagaactgttacagtgaaaatgaagaatacagttctgaaattgaccatctctctctgaatcagaaatccttctatgatatgagctgtgacccacttcatgaggactgcatgtctctgagtacctctgaaatctcaaagacatcccagcttaccttcaaggaaaatgtggtagtggtggcagccaatgggaagattctaaagaagagacggttgagtttaagtcaattcatcaccgatgatgacctggaaggcattgccaatgacacagaagaagtaatcatgaagcccagatcagtagcatacaacttccataacaatgaaaaatacaactatataaggatcatcaaatcccaattcatcctgaatgacaacctcaatcaaagtatagttcgacaaacaggaggaaattacctcatgactgctgcattacagaatttggatgatgcagtgaagtttgacatgggagcttacacatcagaagattctaaacttcctgtgactctaagaatatcaaaaactcgactctttgtgagtgcccaaaatgaagatgaacctgtattgctaaaggagatgcctgagacacccaaaactatcagagatgagacaaaccttcttttcttttgggagcgtcatggcagtaagcactacttcaaatcagttgcccagcccaagttgttcattgccacacaggaacgaaaactggtgcacatggcaagagggcaaccctctatcactgactttcggttactggaaacccagccttgactctggagtctataacttgtgatgtgttgacagtccacgtgtactatgtacatggaggagtccaatcctttactcatagtcacttgctga

SEQ ID NO: 2761 - DNA, 1473 bp, Canis familiaris
tcatctgctctcctgggtgagtcctacaggtgaaaggcccagactcctggccaggatttaagcttccctccaatatggaatacattaactgggataattacagcctggaggatctcttcggtgatattgataattatacttacaacacggagatgcccataattccagcagactctgccccatgcaggccagaatctctggacatcaacaagtatgctgtggttgtcatctatgtcctggtctttgtgctgaacctgctgggaaactccctagtcataatggttgtcttatacagtcgggtcagtcactctgtcaccgacgtctatctgctgaacctggccatagctgacctgctcttcgccctgaccttgcctatctgggctgtctccaaggtaaagggctggatctttggcacacccctgtgcaagatcgtctcgctcctgaaggaagtcaacttctacagtggtattctcctactggctagcatcagcatggaccgctacctggccattgtccatgccacccgcaggctgacccagaagaagcactgggtcaagttcatatgcttaggcatctgggccctgtccctcatcctgtccctgcccatcttcgtcttccgcagggccatcaatcccccctactccagcccagtctgctacgaagacatgggtaccaatacaacaaaattgcggatagtgatgcgggccctgccccagacctttggcttcatcgtgcccctgatgatcatgctgttctgctatgggctcaccctgcgcacgctgtttgaggcccacatggggcagaagcaccgggccatgcgggtcatctttgctgtcgtgctcgtcttcctgctctgctggctgccctacaacctggtcgcagacaccctcatgaggctccaggccatcgaggagacctgtcagcgccgcaatgacattggccgtgccctggatgccaccgagattctgggcttcttccacagctgccttaatcccctcatctatgccttcattggccagaagtttcgccatggactcctcaagatcatggccttccatgggctcatcagcaaggagtacctgcccaaggacagcaggccttcctttgttggctcttcttcagcgaacacttctactactttctaagcaccccctgccccggttgcagtccctcagggctctccctcgccatcagcatcccgttccaaacctcatgtccactggctgttcacagtctctgtgtcaaggcagctcccagctgtggttccaggggagttgctggggccacgtccttttcaggcccattgtatggtttagggagcctgccctgctgccccaccccttactatagctacagtgtcagctgctagagctcactgagcccacagcactctgttctctgaggcagctaaagatgtttaaaagacatccttttaaatgaaaaaaaaaaaaaaaaaaaaaaaaaaaaaaaaaa

SEQ ID NO: 2762 - DNA, 378 bp, Canis familiaris
gacctggagacggacgacttcgagatcgtggtcatcctggagggcatggtggaggccacggccatgaccacgcaggcccgcagctcctacctggccaacgagatcctgtggggccatcgcttcgagcctgtcctcttcgaggagaagaaccagtacaagatcgactactcccacttccacaagacctacgaggtgccctccacgacccgctgtagcgccaaggacctggtggagaacaaattcctgctgcccagtgccaactccttctgttatgagaacgagctagccttcctgagccgcgatgaggaagacgaggccgatggaggccaggatggccgtagcccccaggctcggcatgactttgacagactccaggct

SEQ ID NO: 2763 - DNA, 280 bp, Canis familiaris
atcatcatctacgccatcatcggcttggagcccttcatggggaaaatgcataagacctgctacaaccaggaaggcatagcagatgttccagcagaagatgatccttacccttgtgctctggaaacaggccacgggcggcagtgccagaatgggactgtgtgcaagcccgggtgggatgggcccaagcatggcatcaccaactttgacaattttgccttcgcactgttgacggtattccagtgcactaacatggagggctggactgacgtactatactgga

SEQ ID NO: 2764 - DNA, 1372 bp, Canis familiaris
aactctaagatggatttagaactccaggatttttataacaagacacttgccacagagaacaatacggctgccactcggaattctgatttcccagtctgggatgactataaaagcagtgtagatgatttacagtattttctgattggactttatacatttgtaagtcttctcggttttatggggaatctacttattttaatggctctcatgagaaagcgtaatcagaagacgatggtaaacttcctcataggaaatttggccttctctgatattttggttgtgctgttttgctcaccttttacactgacctctgtcctgctggatcagtggatgtttggcaaagtcatgtgtcacattatgccttttcttcaatgtgtgtcagttctggtttcaactttaattctaatatcaattgccattgtcaggtatcatatgatcaagcatcctatatctaataatttaacagcaaaccatggctacttcctgattgctactgtctggacactaggttttgcgatttgttctccccttccagtgtttcacagtctggtggaacttcaggaaacatttgactccgcattgctgagcagcaggtatttatgtgttgagtcgtggccatctgattcgtacagaatcgcttttactatctctttattgctagtccagtatattcttcccttggtgtgtctaactgtgagccataccagtgtctgcaggagtataagctgcgggttgtccaacaaagaaaacaaactggaagaaaacgagatgatcaacttaactcttcaaccattcaaaaagagtgggcctcaggtgaaactttccagcagccataaatggagctattcattcatcagaaaacacaggagaaggtacagcaagaagacggcgtgtgtcttacctgctccagcaagacctcctcaagagaaccactcaagaatgcttccagaaaactttggttctgtaagaagtcagcattcttcatccagtaagttcataccgggggtccccacctgctttgaggtgaaacctgaagaaaactcggatgttcatgacatgagagtaaaccgttctatcatgagaatcaaaaagagatcccgaagtgttttctatagactaaccatactgatactagtgtttgccgttagctggatgccactacaccttttccatgtggtaactgattttaatgacaacctcatttcaaacaggcatttcaaattggtgtattgcatttgtcatttgttaggcatgatgtcctgttgtcttaatcctattctgtatggttttctcaataatgggatcaaagctgatttaatttcccttatacagtgtcttcatatgtcataattcttcatgtttaccaaggaga

SEQ ID NO: 2765 - DNA, 849 bp, Canis familiaris
gctggaacgcacagaagaacgggctgagctctcagaaaggtaagtaggcctggtgccggtctgctgtgtgtgggatgctacaatgcagtgactaaacagcatgaccttctggcagctgcccatttacctgtttcagctccgggctccttctgtgctcatctgccgtggatgagctgcgagtacttaacacggagggcttgtgtggggtgtctgtatgaatgcgtgtaccactgcatgccttacctgcacactgattttgagaatggccttgtgcatttcctgtgtccactaacagccaagttcgacagctggaagaacaattaataataatggatcagaccttgaaagcatatatggctgcaaaggataaggtactgatggctcatgtgtggttttaggtttaactgcaatgcagacgtctttcagcttccagtgtctactggttcgtttggtataacgacaccctctgctgtcttctatcttgctttaagtgctttctttgggtcctttatactcctttgtttttccttcataaatgctctttggtgcagccgaaaaagaagccaaattatcacactttcagaattgttggattttgtcaccctgcctttccgctgttgcagggttggggggacagtgtccttggcaaaattgagcattttactacctgacgatttggctactttaaggcagccctttgttctctaggactcagttctcactttttcccatccctctcctttttctctcctccttccttgggcttgtctcccatcctttctgcctctgatcgaaaacattagcaaatgtgccgagcttgaagaagaattgaaaactgtgacgaacaac

SEQ ID NO: 2766 - DNA, 4740 bp, Canis familiaris
gcgcactccgggatgggcaaggtgagtccccagatggggtgtgtttgtgtgtgtgtgtttgtaaatggtgcatgctcctggcatcgtgcatatgtatgtccacatatattgcgtattcgatgctcactagtcattctgtatgactgtgtgacctggggcgtctttatcgatttgttatttttcccctcacattcttagattgttggcccgattgtctgtcatgcattcaaccaattttgtgtgtcctgttattttgttcatgtatccagcactgtgtctgtgtattatcatgcctctgtgttgaacacacactgtgtaagcttttatgttcaagggtcctggggtcctgtgtgcttcccacccacctgattttggctctgtgtatgtaggaagccgactcggaatttgtacgtttgtgtctattctcctgtatgctctcatattgtgtataccactgactttgtgtctgggtgctcgtatgcatagactatacatacacacacacaatttttccacagctttactgagatataaatcacccaccatactgcttacccatttaaagcggagaagtctgccatttcttagtatgttcaaggttgcatatacccctctgtgtgtctgtggtgcatgtgtgaagacccggagacccgggattatgcaggcttgggtcctaggcgtatccacacaactgttgtgtactcagcccagccgtgtcatctgtgtgcatgcccccgccaaaggcactcccactgccctcacagctgccctgtcctcatctggccctgacgacccctgccccactcctacaggtcaaagtagacaaccagcatgacttccaggacatagcgagtgtcgtggcactgaccaagacatatgccactgccgaacccttcattgatgccaaatacgacgtgcgcgtccagaagattgggcagaactacaaagcctacatgtgagtgcagagaccaaggcctgggttggggtcccccgcctcatgtggcctgggctcccctgagcttctgtcatctctcctcttcgcccccaggaggacgtcagtgtcaggaaactggaagaccaacaccggctctgcaatgctcgagcagattgccatgtcggacaggtggcggtggcccaggccctgagggaggggaagaaggggggtggggatgtgtggccaccccagcaaggcgctgacaggctgccttgccccatgtctcggcaggtacaagctgtgggtggatacgtgctcagagattttcgggggactggacatctgcgcagtggaagcactgcacggcaaggatggaagggatcacatcattgaggtgagagcacccagaaagcggcgggggtacagagggaggagcaggcgcgtggcagcaacactccacaaactgtgaggctctccatggcccagaaggttgctttactaatgccctcagtaaactgtaaagtaccttataaaataggaagtgctgggtgaacagcaaagtataaacagctttataaagctattaaaaaaaaagttctgtaaaccaggaggccgctgttatcaaagcaaaccgctttcaaagttctaaagttctttgtagacagtggtgcccctgggaaatagtaaagcaatttataaactgtaaagtaccttgaaaatacagagtgcttggtgaatggtcatgctttatacatggtaaggcattttgtaaacattggtgcccgggcaaagcattttctaaagtctaaacatgccatatatcccctggtcccttgaaaaggacgggagctttgtaaactataagccacgaagttctttgtaaatggcagcgtacctagcaaactataaagcagggattggcagatgtttcctgtcaagggccagacagtgcacgttttaggctttgtgggccatatagtctctgttgcagctgctctgcaaaagcagccaaagacattttttaaaaaaaaaaaggcatggctgtgttaccctaaaactgtacagacaacagaaatttaaatttcatatattttcacgtggcgtgaaatcttcttttggtttttttcctaacaattaaaaaaaaatgtaaagcccatcccttagctcaggggccatccaaaaacaggtgttgggccagatttggccctcgggccctaattcctcaaactgttctcagctgtagaccccccaccccaccacgagccgtaggggcctcagaaacgacaagccttcctcacactgccaaaactggtggttctcatttccttggcagcagccatgcaattctccaacttaaggcactttgtcactgtcacccctgcaggcacttccctcctctgtcctcactgggtccctttcttcccacccccttcaggtggtgggctcctccatgccactcatcggggaccaccaagacgaatacaagcagctcatcgtggagcttgtggttaacaagatggcccaggccctgcccaggcagcagcagcgggatgcctcccccggcaggggctcccacagccaggtcaggcccctggtgctgggtgagggccgagccaccccaggaggctggtggcggcaggcaggcccctggtcccgctgccggagctgatcagcagcaggctaagggcaccgccttacgcacatgtggccgcagtcaccaattgttttaaaaactgctaagagagcccctacgctgacttccctgagtgccccccagccctcccctgggagccagtcccccaccccacagcctgacatcgcctcagttctcagccacagaggtggcaacacccagcacatggggagcccgtgtcatttggattggctggtgctccagccgccagccgctaactatttttaacctctcctgctccgctcctctgccgcagactccgtccccaggggccctgcccttgggccgccagacctcccagcagccctcagggcctcctgctcagcaacgacccccaccacagggtaagtgaggggccagcttcccaggcctctaactgtactggcatctagcaccccccgccagccacctctcacgtgtatgctctttctgtccctcaggtggccctccacagccaggcccaggcccccaacgccagggacccccgttgcagcagcgcccgcccccacagggccagcagcacctttcaggccttggacccccagctggcagtcccctaccccagcgcctaccaagtcccacatcagcgcctcagcagcctgtgtcccaggcccagccactgagccaggctcaaggccgccaatcccggccggtggcaggaggacccggggcacctccagcagcccgcccacctgcctccccatctccccagcgccaagcgggccccccgcaggctactcgtcagacatccgtctctggtcaggctccgccgaaggcctccggagccccaccgagtggtcagcagcgccagggcccaccccagaaacccccaggccctgccggccccacacgccaggccagccaggcgggtcccatgccccgtactgggccacccaccacgcagcagccacggcccagtggcccaggccctgccggacgacccgccaagccacagctggcccagaaacccagccaggatgtgccgtcacctgccactgccgggggacccccgcacccccagctcaagtaagaggaccccacggcagccctggccttgctgctcacaaaacaggctcctacaccaggagagtggccccagctcccagtctcctcggacccaggtcccacgcaggagtcccaagagcttgatctccagtctgggcagacccctcctccaagctgtctaccccaccccccactgccccaattcacagaggctcctgccctccatctaagatttgtgccagaatcccagagaaacctttatagttcagaatcctcctagtaggcccctgggaaagcaccctcccacacccctcttggccgcaccttgctgaccctccgtgagcacctccctgccgctctggaaccttcctagcaaaacgcacccttctcctgcccaaatggactcctcccggcccaattcacagtcctcctgtcacttcacactcttcccagctgtcctcatgctttcccttacagcctaggctccattctgggccaccccagtctcctcccaaaccattacaccgtcccctctacctcttctggtccactccaggcctccccctaccttagctcaaaagtcctccctgccatatccaactgcttcctcttggacttgccccccaccgcacgccatcttgtcttgggccctgtcctaggtacagaccctaccatgctccctctgggactcctcacccacactggaaagctccctgcccatcttcacctgcacatccgactcctcctaatctagcctagaatgtgaagagagaggttctgcctaggactcttcccactaaggccaggcttcatccaagtcctcccagcctggcccagggctcccccactccacctgagaatccattagggtccacgcctgtgatggtgggtgggagggtcacaggcacagccccaggactagtggggcagggctgggccgggcctggggtaacattgtgtttctctccccttcctcccttcctcccctccccttcctcccatgcctccaccttgtctctctctagcaaatcccagtctctgaccaatgccttcaaccttccagagccagccccgcccaggcccagccttagccaggacgaggtgaaag

SEQ ID NO: 2767 - DNA, 218 bp, Canis familiaris
tagatgagcagatgtttgagcagaactgcatggagagctcgatgcagaactacccatccacaagaagtccttcgctgtccagtcacccgggcctcacgaccacctgctgctcccgtcgtagcaagaagaccacacacctgcccaactccaacctgccagccactcgcctgcgcagcatgcaagagctcagcaccatccacatccagggcagtgagcag

SEQ ID NO: 2768 - DNA, 1955 bp, Canis familiaris
cttcatagttctggtgatatgtctttcttgtttgatttctttctttctgtggaatcaaaatcgtgccaaagggaagctgccacctggccccactcctctcccaatcattggaaatattctacagataaatactaagaatgtcagcaaatccctaagcaagctagcagagaattatggccctgtgttcactgtgtattttggcatgaagcctaccgtggtgttgtacgggtatgaagcggtgaaggaagctctaattgatcggagtgaagagttttcaggcagaggccatttcccattgttggactggaccatacagggattaggaattgttttcagcaacggagaaaaatggaagcaaacccggcgtttttccctgacagttttgcggaatatggggatgggaaagaagactgttgaagacagaattcaagaagaggccttgtatctagtggaagcattaaaaaaaaccaacgcatctccctgtgatcctactttccttctgggctgtgctccctgcaatgtgatttgctccattattttccagaatcgttttgagtatgatgataaagattttttaaccttgttagagtattttcatgaaaaccttctaatttcaagcacctcctggatacagctctacaatgctttccctcttttaatacattaccttccaggaagtcatcatgtgttatttaaaaacattgctaaccaatttaagtttatttcggaaaaaataaaagaacacgaagaatctctaaactttagtaaccctcgggactttattgactacttcctgatcaaaatagaaaaggaaaaacacaacaaacagtctgaatttaccatggacaacttgatcattaccatatgggatgtgtttagtgcgggaacagagacaacgagcaccaccctgagatacggactattggtgctattaaagcacccagatgtcacagctaaagtccaggaagagattcatcgtgtagttggcagacatcggagcccctgcatgcaagataggagctgcatgccctacacagatgctgtggtacatgagatccagagatacattgatcttgtccccaacaatctgccccattcagtgactcaggacatcaagtttagagaataccttattcccaagggcacaaccatattaacatctctgacttctgtcctgcatgatgagaaaggattccccaacccagatcagtttgatcctggccacttcctggatgaaaatggcagctttaagaagagtgactacttcatggccttctcagcagggaagagagtttgtgttggagaaggcctggcccgcatggagctgtttttgctactgaccaatattttacagcatttcaccttgaaacctctggttgatccaaaggacattgacaccaccccaattgccaatgggttgggtgctacaccaccttcctataagctctgttttgttccagtctgaagaaaggccaggccgccagattgcaaagccacactgacctcacctgaacaagccagatgcttttctgtcttatgtgtcagccaccatccacctctcctttcacatcaggaaggacattcctgaccctttcttttcattgtctttatccttaagattcagttcaaatttccctgtatgaaacaaaattcttttttgtaatccagtcctaagatttcatgctgtatctcatatgcagtgtataccaatggtgtaaactttattgtcatattttcttccattaaaaattaaaaattgggacgcctgggtggctcagcagtttagagcctgccttcggccccagggcctgatcctggagtcctggaattaagtcccatatcgggctccctgcatggagcctgcttctccctctgcctgtatctctgcctctctctgtgtgtgtgtctctcatgaataaataaaatctttaaaaacaaaaaaaaaaaaaaaaaaa

SEQ ID NO: 2769 - DNA, 176 bp, Canis familiaris
gccttcattcagacccagcagctgcacgcggccatggctgacacgttcttggaacacatgtgccgcctggacatcgactccccacccatcacggcccggaacactggcatcatctgtaccattggaccagcttcccgatcggtggagacgttgaaggagatgattaagtctggaat

SEQ ID NO: 2770 - DNA, 157 bp, Canis familiaris
gctggtggaggctgacgaggcgggcagtgtgtacgcaggtgtcctcagctacggggtgggcttcctcctcttcatcctggtggtggcagctgtgacactgtgccgtctgcgcagtcccccgaagaagggcctgggctcgcctaccgtgcacaagctc

SEQ ID NO: 2771 - DNA, 377 bp, Canis familiaris
aactctgcctcctccgatgaggaagacatcggctctgagacaagagccatctattcgatcgtgctcaagctgcccggtcacagcaccatcctcaatgccaccaaattaccctcagcagacaacctgcaggtgcctgatgaggagctggggctgggagacttggacaggaaaggcagcaagctgcaggcccagaagagcctagacgatggaggcagtttccagaagagcttctccaagcttcccatccaattagagtcagccgtggacccgaccaagatgtctgaggtcaactcctcagcagggaagaccacggccactctacctctgtccttcaaggaagccaccctggccaagagatttgctctcaagaccagaag

SEQ ID NO: 2772 - DNA, 807 bp, Canis familiaris
atggagccatgtttgctgatgtggggaatccttacattcatcacagtatctggctacacgacagacctctgtgatgatgacccaccaaacctcaaacacgccacattcaaagctctcacatacaagacaggcacggtgttaaattgtgattgtgagaggggcttccgcagaataagcagctacatgcattgtacaggaaactctagccatgcttcctgggaaaacaaatgtcggtgcaaaagtgtatccccagagaacagaaaaggaaaagttaccactaaacctgaggaacagaagggagaaaaccccacagaaatgcagagccaaacgccgcccatggacgaagttgaccttgtaggtcactgcagggagcctcctccctgggaacatgaaaactccaagagaatttaccactttgtagtggggcagacacttcactaccagtgcatgcagggattcacagccctccacagaggtcctgccaagagcatctgcaaaaccatctttgggaagaccagatggacgcagcccccgctcaagtgcataagtgaaagtcagtttccagatgacgaagagcttcaagcaagcactgatgctcctgctgggagggacacttcgtctcccttcataacgacaagtactccagatttccacaaacacacagaagtggctacaaccatggagtcattcatattcacgaccgagtaccagatagcagtggcgagctgcgtcctcctgctgatcagcatcgtcctgctgagtgggctcacctggcagcggagaaggaggaagagtagaacaatctag

SEQ ID NO: 2773 - DNA, 1960 bp, Canis familiaris
gcggcgggaagccggcggctcggtcgcggccgggggcgcgggggacccagcgggctgggcggcccgggcgccgggcggagccacccccgggggtgcgcgcggcgggtggagccgcgccggaggcaaatgaagataaaacaatgtctaccaacctaaaatacctttccttgggaattttagtctttcagactaccagtttggttctaacaatgcgttattctaggactttaaaagaggagggacctcgttatctatcttctacagcagtggttgttgctgaacttttgaaaataatggcctgcattttattagtctacaaagacagcaaatgtagtctaagagcactgaatcgaatactacatgatgaaatacttaataaacctatggaaacgcttaaacttgctattccatcagggatatatactcttcagaataatttactctatgtggcactgtcaaatctggatgcagctacgtatcaggttacatatcaattgaaaattcttacaacagcattattttctgtgtctatgcttagtaaaaaattaggtgtgtaccagtggctctccctggtaattttgatgacaggagttgcttttgtacagtggccctcagattctcaagagcttgattctaaggaactgtcagctggctctcagtttgtaggcctcatggcagtactcacagcatgtttttcaagtggttttgctggggtttactttgagaaaatcttaaaagaaaccaaacaatcagtgtggataagaaacattcaacttggtttctttgggagtatatttggattaatgggtgtgtacatttatgatggagaattggtgtccaagaatggattttttcagggatataaccgactgacttggatagttgttattcttcaggcacttggaggccttgtaatagctgctgttattaaatatgcagacaatattttaaaaggatttgcaacctctttatccataatattatcaacactgatatcctatttttggctacaagattttgtgccaaccagtgtctttttccttggagccatccttgtaataacagctactttcctatatggttatgatcccaaacctacaggcaatcctactaaagcatagtcgtatactatctttaactggtttttcacaatggtgcactaggaatctcaacattaatcttgcatagaggacttctacagattctaagaagatatcatcatgctgaatctcatcatattgttcaaatggtttgaaaatataaaagtttaaggataaaatatatgtatatgttaacgaaatacctattacatctagatatcaaagcttgaaagtatttccagggattagaataattattggagaaaacttgaaatctgagtttaaaaagattttaccttttgattgctgcagaaatgttctatgcactctttgcaagagcacacaacaaatatcagataccaatttttgcaagttagatctatttaaccttattaaatttttttatctttttctgtacagaaatatcaaattacatggaatattcaaagtttgaaaattataattgcctattaagctgtgaatagaagtatgatttgaataacattttcatgtatctgagatttttatatttatacaaaagattactaaagaaaggattgctaaatgttatttgttcaactacataaaatgataaggttacgttctgggtctaatttgtgagaaaataaattcatatttaaattcaatgtagggaaatacatctatttctccatctacattttaagatcttttagtgctttgaaactgctgaaagcaatccagttgctcctgtgctagatagtagccagattttgcactaatggagttttgtctttaatctcttaattgcatttcttttctgtaaatcagataaatccttaatatttctttaaattaagcttctgtatgtggtaatttcc

SEQ ID NO: 2774 - DNA, 1440 bp, Canis familiaris
  misc_feature (399)..(399): n comprises a, c, g, or t, or includes no nucleotide
cattgtttgaccggaccccgactggagagatgaagatcacctatgggcagtgtggagacgtactgcgggcactgggccagaaccccaccaatgccgaggtgctgcgtgtcctgggcaagcccaagcctgaaggtcagcatgggcctcgtggctcggcctcctggtgtctgccctgaggcccctggggctcttcctcttcccctgctttagcccttcaagaccagaccccatccccagcttaccccttctctccttgctagaattatttggaagtccctgtgaggttgaagccctagttgagcaggagcaacattctgttgcttcagtgtcttcctctgacatcctgggttgtagggatgtgaggtggggatctgcccacacccccacgcccagtatctncagttgacgtgttagcacactgaagtgccctgtgaccactatgacttgtatcatgaatactttgtttctaaggatggttagagcactgaagatcacaaattatttgttcaagtttaaagcagactcaagatgagctctgtaatgttgcctctttcattcatctgcatttggcaggttttggtaagtttcaaaagtggtgcaagggaacgtgtcccatttgtgaatgtcatctgtcacatgtggtagtacattaacagctgctctaacacacatgtccttctgagagaggtaggcagggataggcagacagggcaggaccccctggccaggggaagccatctcttgaggcttcctgggcccccatattgatctcctgccctttccttgattttggccccttctccagtatggggtgaaggacgtgggcaggagagggcccgaggaccagcaggccttcttagaggtaaaggatgtctgagcacttccattttttggagattcttgtgttgttatataagaaagaatttccaacatttgtggtttttaaaaattaaacctttttaacatactataatatgggaaaagtgggcttgtcacaaaagaattgcaaatttataacaattattgatttcattgttgctccaagcaatgtggtctagtccggagacccagaagaggaattatgccaaattctttttgtagtcctatcagtttacctctgtgacatgtgtgttacatggtgcatgtggggcccgattctgtgatcctttgggcccctccaggcctgctgctgccaccccagctcccccacgtcacccaccacctggagcttaggggtccaggtggagtcctgatggtttttcccctctgccctggtcctggtctggcagagctggggtgaggcctcttgctgaccccctgttccccttgagcttctgctcatatcacattctttttccttcctacctaaagagatgaatgccaagatgctggactttgagacgttcctgccaatcttgcagcacatttcccgcaacaagg

SEQ ID NO: 2775 - DNA, 1539 bp, Canis familiaris
gacacacctgccaactgcacccacccggagctgctgggcacgtgggtcttccaggtgggccccgcggggtcccgcagcgtcaactgctcggtgatgggaccaccagaaaaaaaagtagtggtgcatcttgagaagttggacacggcgtatgataattttggcaatacgggccattttaccatcatttacaatcaaggctttgagattgtgttgaacgactacaagtggtttgccttttttaagtataaagaagagggtcacaaggtcaccagttactgcaacgagaccatgactggatgggtgcacgatgtgctgggccgcaactgggcttgtttcactggaaccaagatgggaactacctctgaaaaagcgaaggtgaacacaaaacacattgagaggctccaggaaaacaattctaataggctctacaaatacaactatgagtttgtgaaagcgatcaataccattcagaagtcttggactgcaaccagatacatagaatatgagactctcaccttgagagacatgatgacgagagttggtggccggaaaatcccaaggcctaaacccacaccactgactgctgaaatacatgaagagatttcacgtttgccaacatcatgggactggagaaatgttcgtggtaccaattttgttagtcctgttcgaaaccaagcatcttgtggaagctgctacgcatttgcgtctacagctatgttggaagcaagaatccgtatactaaccaacaatactcagactccaattttgagtcctcaggagattgtctcttgcagccagtatgctcaaggctgtgaaggtggcttcccgtacctcatcgcaggaaaatatgcccaagattttgggctggtggaagaggcctgcttcccctacgcaggctctgattctccatgcaaaccaaatgactgcttccgttactactcctctgagtactactatgtgggaggtttctatggggcctgcaatgaagccctgatgaagcttgagctggtccgtcacgggcccatggcagttgcttttgaagtctatgatgacttcttccactaccagaagggaatctattaccacactggcctgagagaccctttcaacccctttgaactgactaatcatgctgttttgctggtgggctatggtactgactcagcctctgggatggattactggattgtgaaaaacagctggggctctaggtggggtgaagatggttacttccggatccgcagaggaacggatgaatgtgcaattgaaagcatagcagtggcagccacaccaattcctaaattgtaggatatgggtcctggcatttcctgttgaccaccattagtcacgaaaggggatcaatttattcagaccgaaaacttttatagcagcaatttcagattacagatagattcctatgaagatttttgcctttaaaattaaaattgtctttgatttaaatatacctttccattaaccactggcctactttatagctatgtagtaataaaatgcaggattctgttcattaaaaaaaaa

SEQ ID NO: 2776 - DNA, 1174 bp, Canis familiaris
ggtaccggtgactgcaatggaggagtcgcagtcagagctcaatatcgacccccctctgagccaggagacattttcagaattgtggaacctgcttcctgaaaacaatgttctgtcttcggagctgtgcccagcagtggatgagctgctgctcccagagagcgtcgtgaactggctagacgaagactcagatgatgctcccaggatgccagccacttctgcccccacagcccctggaccggccccctcgtggcccctatcatcctctgtcccttccccgaagacctaccctggcacctatgggttccgtttggggttcctgcattccgggacagccaagtctgttacttggacgtactcccctctcctcaacaagttgttttgccagctggcgaagacctgccccgtgcagctgtgggtcagctccccacccccacccaatacctgcgtccgcgctatggccatctataagaagtcggagttcgtgaccgaggttgtgcggcgctgcccccaccatgaacgctgctctgacagtagtgacggtcttgcccctcctcagcatctcatccgagtggaaggaaatttgcgggccaagtacctggacgacagaaacacttttcgacacagtgtggtggtgccttatgagccacccgaggttggctctgactataccaccatccactacaactacatgtgtaacagttcctgcatgggaggcatgaaccggcggcccatcctcactatcatcaccctggaagactccagtggaaacgtgctgggacgcaacagctttgaggtacgcgtttgtgcctgtcccgggagagaccgccggactgaggaggagaatttccacaagaagggggagccttgtcctgagccaccccccgggagtaccaagcgagcactgcctcccagcaccagctcctctcccccgcaaaagaagaagccactagatggagaatatttcacccttcagatccgtgggcgtgaacgctatgagatgttcaggaatctgaatgaagccttggagctgaaggatgcccagagtggaaaggagccagggggaagcagggctcactccagccacctgaaggcaaagaaggggcaatctacctctcgccataaaaaactgatgttcaagagagaagggcttgactcagactgaggttaaggatcc

SEQ ID NO: 2777 - DNA, 1589 bp, Canis familiaris
aggcctggaaagcggagcctgagccgccatgagcagcaagaagatagaaacgtacgtctaacctgagcaacttgccctccatggaagaggtgggaaggtgggctgagggtcgaggggtccaaagagactagagggttggggtccgggctgggaaagcgacttgctctgtcaggaagctggactctctctggctggtcattgctgagctgacacttgtacagaccgggagagggcaaatgtgaggcgggcctggaggacagacagggcctgctggtggcaccatgagctgagcgagacacctgagagcgaggaccctgctctgctccctgctgggaccatggtctggcagggcccccagagaaggctgctgggctctctcaatggcacctccccagccacccctcacttcgagctggctgccaaccagaccgggccccggtgcctggaggtgtccattcccaacgggctgttcctcagcctggggctggtgagcgttgtggaaaatgtgctggtggtggccgccattgccaagaaccgcaacctgcactcgcccatgtattacttcatcggttgcctggctgtgtccgacctgctggtgagcgtgacgaatgtgctggagacggccgtcatgctgctggtggaggcaggcgccttggctgcgcaggctgctgtggtgcagcagctggacgacatcattgacgtgctcatctgtggttccatggtatccagcctctgcttcctgggcgccatcgccgtggaccgctacctctccatcttctacgcgctgcgataccacagcatcgtcacactcccgcgggcgtggcgggccatctccgctatctgggtggctagcgtcctctccagcacgctcttcattgcctactacaatcacacggccgtcctgctttgtcttgtcagcttctttgtagccatgctggtgctcatggcagtgctgtacgtccacatgcttgcccgcgcccgccagcacgcccgaggtattgcccggctccgtaagcggcagcactccgtccaccagggctttggcctcaagggcgctgccacactcactatcctgctgggcattttctttctctgctggggccccttcttcttgcacctctcactcatggtcctctgccctcaacaccccatctgtggctgcgtctttcagaacttcaacctcttcctcaccctcatcatctgcaactccatcattgaccccttcatctacgccttccgcagccaggagctccgaaagactctccaagaggtagtgctatgttcctggtgaggctgcaggcttgaggccagggtgctggccagaggggggtggtgattgatacccatgtgactggggcagtcacttgcagaaaaggacagatgagctgatctgtggtgtggtggatgcatggaccctctggggccagagaaaggaataaacaaaaatctccaggagttgctgtggagaatggagcaggctgaggagatggtggggccacagacacgagagccaggtccgggactactggacaagcatctctggctgctcctggagagttccttctccacccagggaccaggcaaggcct

SEQ ID NO: 2778 - DNA, 361 bp, Canis familiaris
tgcagctggtggagtctgggggagacctggtgaagcctggaggatccctgagactgtactgtgtggcctctggattcaccttcagtagttatgccatgagctgggtccgccaggctccagggaaggggctacagtgggtcgcatacattaccaatgatggtactaccacatactacgcagacgctgtgaagggccggttcaccatatccagagacaacgccaggaacacactgtatctgcagatggacagcctgagatccgaggacacagccgtattttactgtgcgaaagatccgtggactaactccagaggacgctttgactattggggccagggaaccctggtcaccgtctcctcaga

SEQ ID NO: 2779 - DNA, 247 bp, Canis familiaris
ggaaggggctgcagtgggtcgcatggattaggtatgatggaagtagaacatactacgcagacgctgtgaagggccgattcaccatcgtcagagacaacgccaagaacacactatatcttcagatgaacagcctgagtgccgaggacacggccgtttatttatgtgcgaaggatccctcgacatatatatggaccgaggcccgttttgactactggggccagggaaccctggtcaccgtctcctcaga

SEQ ID NO: 2780 - DNA, 231 bp, Canis familiaris
gctgcagtgggtcgcaggcattaggtatgatggaagtaggatatactacgcagacgctgtgaagggccgattcaccatctccagagacaacgccaagaacacacagtatctgcagatgaacagcctgagagccgaggacacggccgtatattactgtgcgaaggactcgttcaacagtgggggtggtacggactactggggccatggcacctcactctttgtgtcctcaga

SEQ ID NO: 2781 - DNA, 349 bp, Canis familiaris
tgcagttggtggagtctgggggagacctggtgaagcctgggggatccctgagactctcctgtgtggcttctggactcaccatcagtgactatggcatggactgggtccgccaggctccagggaaggggctgcagtgggtcgcatccattggcggtggtggtggtatcacattctatgcagatgctgtgaggggccggttcaccatctcctgagacaacgccaagaacacgctgtatcttcagatgaacagcctgagagccgaggacacggccatatattactgtacgcatactcactacggtagctacaaggactggggccaggggaccctggtcaccgtctcctcaga

SEQ ID NO: 2782 - DNA, 135 bp, Canis familiaris
ttatttgcagatgaacagcctgagagcggaggacacggccatgtattactgtgcacccccccattcgggacatatggatacgccctccgctttcggttactggggccagggcaccctggtcactgtctcctcaga

SEQ ID NO: 2783 - DNA, 891 bp, Canis familiaris
ggaccatggtgtttctctccggaaatgcctccgacagttccaactgcacccacccgccggcaccggtgaacatatccaaggccattctgctcggggtgatcttggggggcctcatcatttttggtgtgctgggcaacatcctggtgatcctctccgtggcctgccaccggcatctgcactcggtcactcactactacatcgtcaacctggcggtggccgacctcctgctcacctccaccgtgctgcccttctcggctatcttcgagatcctgggctactgggcctttggcagggtcttctgcaatatctgggcggcggtggacgtcctgtgctgcaccgcgtccatcatgggactctgcatcatctccatcgaccgctacataggtgtgagctacccgctgcgctaccccaccatcgtcacccagaagaggggtctcatggctctgctctgtgtctgggcgctgtccctcgtcatctccatcgggcctctctttggctggaggcagccggcccccgaggacgagaccatctgtcagatcaccgaggagccgggctacgtgctcttctcggcgctgggctccttctacgtgccactgaccatcatcctggtcatgtactgccgggtctacgtggtggccaagagggagagcaggggcctcaagtctggcctcaagactgacaagtcggactcggagcaggtgacgctccgcatccatcggaagaacgccccagtaggaggcaccggggtgtccagcgccaagaacaagacgcacttctcggtgaggctcctcaagttctcccgggagaagaaagcggccaaaacgctgggcatcgtggtcggctgcttcgtcctctgctggctgccttttttcttagtgatgcccattgggt

SEQ ID NO: 2784 - DNA, 1860 bp, Canis familiaris
ggtttagggctgtgcggcaatgcgggcccagcttctctagcaccggagcctagccaggcgccagcacccccgtccccaaccggagcagcaccagaccacagccccccgctaacccggcccccagacggacccaggtttcctcgagtaaagaactgggaagtgggcagcatcacctacgacaccctcagtgcccaggctcagcaggatgggccctgtacctcaagacgctgcttgggatccctggtgtttccaaggaagttacagagccggcccacccagggcccttcacccactgagcagctattgggtcaagcccgggacttcatcaatcagtactataactccatcaaaaggagtggctcccaggctcatgagcagcggcttcaggaagtggaggctgaggtggcagccacaggcacctaccagctccgggagagcgagctggtgtttggggccaagcaggcctggcgcaatgctccccgctgtgtgggccggatccagtggggaaagctgcaggtatttgatgctcgggactgcaggactgcacaggaaatgttcacctacatctgtaaccacattaaatacgcaacaaatagcggcaatcttcgttcggccatcacagtgttcccccagcgtgcctcaggccgcggagactttcgaatttggaacagccagctggtgcgctatgcgggctacaggcagcaggatggctctgtgcggggggacccagccaacgtggagatcactgagctctgcatccagcatggctggactccaggaaacggccgctttgatgtgctgcccctactgctccaggccccagatgaacccccagaactctttgctctgccccccgagctggttctcgaggtgcccctggagcaccccacgctggagtggtttgcggccctgggcctgcgctggtatgccctcccagcggtgagcaacatgctgctggaaattggggggctggagttccctgcggcccccttcagcggctggtacatgagcactgagattggcacgcggaacctgtgtgaccctcatcgatacaacatcctggaggatgtggctgtctgcatggacttggataccaggaccacctcatccctgtggaaagacaaggcagcagtggaaatcaacttggctgtgctgcacagttaccagctggccaaagtgaccatcgtggaccaccatgctgccacagcctccttcatgaagcacctggagaacgagcagaaggccagggggggttgccctgctgactgggcctggatcgtgccccccatctctggcagcctcacccctgttttccatcaggagatggtcaactatgtcctgtccccggccttccgctatcagacagacccgtggaaggggagtgcatccaagggtgccggcgtcaccaggaagaaaacctttaaggaagtggccaatgcggtgaagatctctgcctcactcatgggcactgtgatggcaaagcgagtgaaggcgacaatcctctatggctccgagactggccgggcccagagctatgcacagcagctggggagactcttccggaaggctttcgacccccgggtcctgtgcatggatgagtatgacgtggtgtcccttgagcatgagacgctggtgttggttggtgaccagcacattttgggaatggtgatcccccagagaatggagagagtttttgcggcagccctgatggagatgtcgggtccctacaacagctcccctcggccagaacagcacaagagttacaaaatccgcttcaacagtgtctcctgctcagacccactggtgtcctcctggaggcggaagagaaaggagtccagtaacacagacagtgctgggcac

SEQ ID NO: 2785 - DNA, 1157 bp, Canis familiaris
gacagcaagtcacacaaaccactgccccttggcgtggagaatgaccgagtcttcagtgacctgtgggggaagggccatgtacctgtcgtcctcaacaacccgtattcagagaaggagcagccccctgcctcgggaaaacagtctcccacaaagaatggaagcccctccaagtgcccccgcttcctcaaggtcaagaactgggagacggatgtggttctcactgacaccctccaccttaagagcacattggaaacgggatgcaccgagcacatctgtatgggctccatcatgctcccttctcagcaaataccgaaggcctgaagacgtccgcacaaaagaacagctctttcctctcgccaaagagttcattgatcagtactactcgtcaattaaaagatctggctccaaagcccacacagagaggctggaagaggtgaacaaagagatcgaaaccacaggcacctaccagctcaaagacacggagctcatctatggggcaaagcacgcctggcggaatgcctcccgctgcgtcggcaggatccagtggtccaagctgcaggtgttcgatgcccgtgactgcaccacagctcatgggatgttcaactacatctgcaaccacatcaagtatgccaccaacaaagggaacctccggtctgccatcaccatatttccccagaggactgacggcaagcacgatttccgagtctggaactctcagctcatccgctatgccggctacaagcagcccgacggttccatcctaagggacccagccaacgtggaattcacagagatttgcacacagcagggctggaaacccccaagaggccgcttcgatgtcctgccactcttgctccaggccaacggcaacgaccccgagctcttccagattcctccagagctggtgttggaagtacccattaggcaccccaagtttgagtggttcaaggatctgggcctgaagtggtacggcctccccgctgtgtccaacatgctgctggagatcggcggcctggagttcagcgcctgtcccttcagcggctggtacatgggcacagagattggcgtccgcgactactgtgacaactctcgatacaacatcctggaggaagtggccaagaagatgaacttggacatgaggaagacatcctccctgt

SEQ ID NO: 2786 - DNA, 1456 bp, Canis familiaris
gaatcttagaaaatggagctgtacgctatacaacttttgaatatcccaacacgatcagttttgcttgtaacactgggtaaggacgtctagccaacagatacagaacattctgtgcctttaagctaaacatcaagacatattttatttttagccttcaggctggacttgctgaatacaaatcaattatagtcctgtttttaatctataccacagtggtattggggttagggaaaccataacaactcgtgaaatgtgaagttgctactgcattaaaacttttttctcccaattaattacttatctgaggaggtacactggaatgattaaaactggataataattcctaatcatctctgggacaaagcttggcatgaaggttaagatactttaggaattggactgggctttagttatgaacctaatttgattgactgacctgggagtctccagaaggagttttgcttttgtttttttttaatttattcaagacacagaaagagagagagagagagaggcagagacacaggcagagggagaagcaggctccctgcaggaagcctgacacaggactccatcctggatctccaggatcacaacctggactgaagacggtactaaagcactgagccacctgggcttcccctagaagggagttctttggtgaaggttggcgtgtggtggtataaaacatacttctgttaatcctcacacaatgcaggacagcattcccagcaagaaagcatgtacagcgggtcatatatagcttatgtgccttatgagcaaaggcactgccagtgacattgtcaatagcacgtcgtctgtatcctagggcaaaatttcactgagacttcttgctcggaattggaaattaagaaatactatgtgttaaagagaattggactcctttcatctgaaacatcaattaatttgtgggtctgatgacaaagtaccttgaaacaattcgcttcgaggagacagtgttttcagtggaaatatactgcattgtttttacccatttatgtcagtagactgaatcgtttcagaaaatggatagcagccatgactcatttgattcacttttgtgatccctgaagaagagacagacgcttctttgctccacataagaagctgttaatttggcctgctgattggaaagagggatttggggttttggcttctatgctcatagctatggaaacttctcattcttctgtgagacctctgcagccctgggttgggaaatttgatgagccttaaatgagtgctgagcaactcaggaaaacagcattacaaaatagggggaaagtcggtagcattaatctgaagcaatgctcagtggagaagacatttgaaatgccatcaatggattcttttactgcttgatggttccattttcccttttcaggttttatctaaatggaagtagctctgctaaatgcaccgaggaaggaaaatg

SEQ ID NO: 2787 - DNA, 805 bp, Canis familiaris
gcagccagctccccaaagcgctcagggtcctgtggacggctcaccccggctgcgatggctgcaagccctcggaactctgtgctcctggccttcgccttgctctgcctgccctggcctcaggaggtgggcgccttcccggccatgcccttgtccagcctgtttgccaacgccgtgctccgggcccagcacctgcaccaactggctgccgacacctacaaagagtttgagcgggcgtacatccccgagggacagaggtactccatccagaacgcgcaggccgccttctgcttctcggagaccatcccggcccccacgggcaaggacgaggcccagcagcgatccgacgtggagctgctccgcttctccctgctgctcatccagtcgtggctcgggcccgtgcagtttctcagcagggtcttcaccaacagcctggtgttcggcacctcagaccgagtctacgagaagctcaaggacctggaggaaggcatccaagccctgatgcgggagctggaagatggcagtccccgggccgggcagatcctgaagcagacctacgacaagtttgacacgaacctgcgcagtgacgatgcgctgcttaagaactacgggctgctctcctgcttcaagaaagacctgcataaggccgagacgtacctgcgggtcatgaagtgtcgccgcttcgtggaaagcagctgtgccttctagttgctgggcatctctgtcaccccctccccagagcctccccaaccctggggagtgccgctccagggtccactgtgctttcctaataaagttaagttgcatc

SEQ ID NO: 2788 - DNA, 1444 bp, Canis familiaris
gcgtggcctcccatggacaccaagacacagagcctgcccatcacccacacccagccccacagcaactcccggccccaaggccacacctgcagccagtgcacctgcagctcccactgccaaacctgcagccagagctgcagccagagccggagctccagccagagcccaactggccaccacagctcgtctggccatcagagccagagcccgcaccccaccctgccaccgaggcaccaaaaacacaccaggcactcccaccactgtccccctcggcccaccacccattcctgcagctatcccaagaacagaaagaacttcgaaggaaaggtgaacaagaggaaggtggtcaagaggagccagcaggtgtataaaacaaagaggcggaactcaggtatctttcaagcaggtgggaaggggccgcaaggtcctcccttgcccaggtgagggggagcagcccacctgcagtagtgagacaaaggctgcgtgagcctgcgagccaaagcacagaggagccataggccagggtgaccagggagccgtacagatgatgcactgatggaccagttcttgaaatgaattggagcaggttgattgggagggtggacacactacggattagcttagatggaagcatggatgggtggatgagaggctggatgggtaagtcattagaagattggttggtagaaggatgggtgacagatgggttaggtggttggttgaggcagcagaggaaagcgggagggagggttgaaatgatctattgaccgactggaaagcagaatggatgttgcatggtgagtaaactggattgatgtgctcgtagggtaacaaagcagtcctttgaaccaatggttgatcagattagttggctgtggtaggagggatgtggttggtgaatgggtgctgaattggttggacatagttgggacagctgaaggtaggaggatcgatgagaggatggctgaactggttaaacgatgattggataggtgggtggacgatcagattagtggatgatggttaacctcgatggatgaatgcaatggatggatgcacaggtgtttggacagaatgaatgggcagcctggacctagtttaatgaagtcatgatggataaatggatggactaggtgaattcatggatgggtgggtgataaatgggacaaatggatagattcgcaggagaccctttagatcctgcccgtctaagaagctctatctccacaccacatatttagttacaaatgggttcaaaccccaaagaaggaagcgagtgcatgaagcattttgctactaaaagtccctgtcccattcccatcccttagggcggaaatagaactgagaaggcaccccatggcttgttcctgtgttggtttcacccaagtaagaagggccatcacgcgtggaaggctagaaggaagtccacctttgtgcaggaaca

SEQ ID NO: 2789 - DNA, 417 bp, Canis familiaris
atgggtctcacctcccaactgattccaactctggtctgcttactagcactcaccagcacctttgtccacggacataacttcaatattactattaaagagatcatcaaaatgttgaacatcctcacagcgagaaacgatgagtacagctatctgaccatctctccagtgtttggagatgccgtgggtatttctgagactgagaagaacatcacagcttccagagaagttcggtggttgtacgacaaggagcagagtaagattgctctgcagcgcgttctgtccagggatttgggaagcttggtcagagggagtggggctgcccaacaagtcatccctcgtacaattggaagtgactgtctcttgctctctctcattctccgccaagactctgtgtcactgagggattccgcaagctga

SEQ ID NO: 2790 - DNA, 187 bp, Canis familiaris
ccctccactcttcccatttgtgctctctttgtttctctcaaataaataaatctttcaaaaaaattttttttctacgaggaattttagtaatcgtgtccgtgtgtgtgtgtgtgtgtgtgtgtgtgtatttatagagaaagagtgtgcagtggtgaagggggaaggaaaacgggaaagagaatcatta

SEQ ID NO: 2791 - DNA, 1181 bp, Canis familiaris
catcctgagcgagtactacatcctcactgcggctcactgtctccagcaagccaagaaattcacggtgagggtaggtaagtggcgcctcagctcctccgaggccctgcagtgccctctgtcacttccttattttcagagctgccagcttggaactggtagttgacaccctgggaccctgaggggcagaagtgtggggtggtcttccctagtgccacaaggcccccctcagtgtcccttcctccaggtaggcctccagagctcctcttcaacagcctgggcacggagcacagcctgtcacgtcttgtcgtttgtccttcaccagcacaagccacaagtacaaccacacatgtgatctttagttttctagttacattaaattttccatgatacattttttaagtttacagatgaaattaattttagtaatatatcttcatccaatatatccaaaatactattatttcaatgtgtaatcaatggtaaaagtatcaatgagacattttgaatttgcattttcattctccgtctgagaattgaccctcagcacatcccagttcatgccggcggccgtggggtcagagcaggcgcccctgcttcatcgcaggctcagggaatgtcagcctgacctgctgttcacagtgatgaggtgtgcctggtggtggctgccctgggctgacaccaaaggctgtttttgttgaccttgtgatgctttccttgtttttttagattttctatgaccatatcccattttttcctacaaacaccacctgtcgcaggtgaacgggacacagacaaggaggagggcaacgaggtggcacacgaggtggaaatgatcatcaagcacaacaagtttgtcagggagacatacgactttgacatcgcggtcatcaagctgaagacgcccatcaccttccgcatgaacgtggcgcccgcctgcctgccgcagaaggactgggccgagtccacactcatgacgcagaagacaggcattgtaagcggcttcgggaaaacccacgagaagggccgcccgtccaccaccctcaagatgatggaggtgccgtatgtggacaggaacacgtgcaagctgtccagcagtttcagcatcacccagaacatgttctgtgccggctatgactcgaagcccgaagacggctgtcagggggacagcgggggcccccatg

SEQ ID NO: 2792 - DNA, 2550 bp, Canis familiaris
gcggccgcgtcgacggcgtctctcctcttggccctccaccatgggcagtatctccaataactcggggtcggaggactgcgagtctcgggagtggctcccctccggcgagagcccggccatcagctccgcgatgttctcggccggggtgctggggaacctcatcgcgctggcgctgctggcgcgccgctggcggggggacgcgggccgccgcgcaggacgcgggaactccatctccttgttccacgtgctggtgacagagctggtgttcaccgacctgctcgggacctgcctcatcagccccgtggtgctggcttcctacgctcggaaccagaccctgatggcactggagcctgagaggcgcgcgtgcacctacttcgccttcgccatgaccttcttcagcctggccacgatgctcatgctcttcgccatggccctggagcgctacctgtccatcgggcgcccctacttctaccagcgccatgtgacgcgccgaggcggcctggccgtgctgcccaccatctacacggtctctctgctcttttgctccctgccgctgctgggctacgggcagtacgtccagtactgccccgggacgtggtgcttcatccggcacggccggaccgcgtacctgcagctgtacgccaccctgctgctgcttctcatcgtcgcggtgctcgcctgcaacttcagcgtcatcctcaacctcatccgcatgcaccgtcggagcgggaggagtcgctgcggaccctccttgggcagctgccgggacggctctgggacccgcaggagaggggaaagggtgtccgtggcagaggagacggaccacctcattctcctggctattatgaccatcaccttcgccatctgctccttgcctttcacaatttttgcatatatgaatgaaacctcttcacgaagagaaaaatgggacctccaagctcttagatttttatcgatcaattcaataattgatccttgggtctttgccatctttaggcctcctgttctgagactaatgcgttcagtcctctgttgtcgggtttcattaagagcacaagatgcaacacagacttcctgttctatacagtcaaacgccagtagattgacctttgtcgacactagttagaagtgcttcattagccagactctggaagatcattttgaaatggcttcttggtgaaatgaaaaaagtaagtttataaaccaaatgaagccacctaataagacagagtaaacaaacatttcagcagtggtttgggctacagaggtgctgagaaggcgtttcatggaaagggtcagaaggatccataaaacctacctgcaatgagcaggttagttggtctttagatgaaaaagaccagttttcagatccagtttccttttgatttaagctttcctgttgagtgagaaagtatgtggttttgtgatttgtttaaagccctaaatagttactgtattttctattttaatcttctatgctactgctgttataaacatgcagtgtatagtcagacaaggacagaacttcatgtgtatcttctaggaagatgatacatggaagcaactaagactggtgtcctgtgattgctcaacaactctttggccaatgaatttggaaatcacaggcactttgtaccatcatatttgtgtatgtgggtggactctctggtcactatggtattatgggtggagcagtaggctcagctggttaacatcaccttttcaatagtcctccagaagctttgtgtcaacgtattaggttatttattttataatgcccattatgttaagagtaatcaagaacacttttggaattttcttctcaacaagaaataataggttattaagaaagttttaaattctgattgatactcttcattctgtttccagggaggggctatgtggctatgtctaaagctaaatattagaataaaaactgaaaaatctggtcaattctcaataaaccatgaaactcttctattgttcctgttgagactatgactaacgtatacttgataagatgactgtattgtagcaaaattcatgcatctacatttttatccaggaagcatggtttgactcattctatataggaaatcatacaacagtgagtcatatcttaatatgtttctaaatctaaatgtttggcatggtataaacctgacatcaaaatatttcagtgaatttgcactgtttaatcatcttagttactgtacaaactcatctgaaatgtcacgaaaataaactatgaaacaaaaatttcaaaatggaatagtatttgataaatttccccaaataacaatttctagagcatagtattttttaatgagataaaagtggagaacttgtatttattttggcagatttttaaagtgtggttgcatttagatgttaaaatatttagtatagtacttggtatttagaggatattttttccttatagtatgatcttcaaaagagtagaaccaccttatttatttatttatttattttacagtgagtgttattacaggatagctattatttaaaaaaaaaaaaaaaaaaaaaaaa

SEQ ID NO: 2793 - DNA, 317 bp, Canis familiaris
tggaacttggacttgggcaccgagacaccactggagggtgacttcgtgtgggagcgtgtgcggggccttggcctgcccaagctctaccttcccacggggccccggcgaggccgggatgagttgggaggaggcaggcggcctggcacctcacctgctctgctgcaggggacagcagaggaagaccatgtggacctgtcactgtcttgtacccttgtgcctcgctcaggggagcaggctgaagggtccccaggtggacctggagactctcagggtcgaaaacggcggcagaccagccttacagatttctaccactcaac

SEQ ID NO: 2794 - DNA, 304 bp, Canis familiaris
  misc_feature (291)..(291): n comprises a, c, g, or t, or includes no nucleotide
agatctgcagaaacgccacacaaggaagggccttcaagaacagactcccttttcctgccaactataggaccccaaggcagcagtgagtactagcacctggggacagcttgtgttccagttccctgagaatgctgcttcctccagacgaaaactacagtgtcatgtgctgtcctaaaggggtttcctaaaggatccctttcctacagatggcagaaaacaaaagtaaagtcttccttgttcattgggtgaggtttggtagccaggcatactctagacagtagaaaaacaccnttctgcaagatct

SEQ ID NO: 2795 - DNA, 134 bp, Canis familiaris
gaagggacatctgaccaggttggatcaagaaatttacagaagttaccaggtttatagtaactcctcatgataaaagtcctgaagacatttcccccaagcccacaatttttcttccttcgattgctgaaataaaa

SEQ ID NO: 2796 - DNA, 407 bp, Canis familiaris
ttccacaaggaggatacagcccccaagaggctcctctacctagacatgtccaggtcgtatgtgcagagggatatattcgtgaaagcagacaaagtcaacgccaagaaaggcaggaacagttacagctgtaacctgttgttgcagaaactggagaagggtgatgagggcgtgtactactgcgctgcctgggaagcgttactggagtagttggagcaaaaaagtgtttggtcctggcacaattctcagggttacagataaaagtcctgaagacatttcccccaagcccacaatttttcttccttcgattgctgaaataaaagcccatcaggttggaacgtatatttgtcttcttgaggatattattcctgatatttttaagatagattggaaagaaaagaacagcaaaa

SEQ ID NO: 2797 - DNA, 409 bp, Canis familiaris
ttccacaaggaggatacagcccccaagaggctcctctacctagacatgtccaggtcgtatgtgcagagggatatattcgtgaaagcagacaaagtcaacgccaagaaaggcaggaacagttacagctgtaacctgttgttgcagaaactggagaagagtgatgagggcgtgtactactgcgctgcctgggaagccctcagacacggctggtacaacaaagtgcttggtcctggcacaattctcagggttacagataaaagtgccaatgaagacactgcccccaagcccacagtttttcttccttcgatttctgaaataaaaatccataaggctggaacatatctttgtcttctcgaggatttttttcctgaaattatcaaggtagattggaaagaaaagaatgaccaaa

SEQ ID NO: 2798 - DNA, 3570 bp, Canis familiaris
  misc_feature (515)..(515): n comprises a, c, g, or t, or includes no nucleotide
  misc_feature (541)..(541): n comprises a, c, g, or t, or includes no nucleotide
  misc_feature (558)..(558): n comprises a, c, g, or t, or includes no nucleotide
  misc_feature (563)..(563): n comprises a, c, g, or t, or includes no nucleotide
  misc_feature (583)..(583): n comprises a, c, g, or t, or includes no nucleotide
  misc_feature (602)..(602): n comprises a, c, g, or t, or includes no nucleotide
  misc_feature (613)..(613): n comprises a, c, g, or t, or includes no nucleotide
  misc_feature (659)..(659): n comprises a, c, g, or t, or includes no nucleotide
  misc_feature (775)..(775): n comprises a, c, g, or t, or includes no nucleotide
  misc_feature (1239)..(1239): n comprises a, c, g, or t, or includes no nucleotide
  misc_feature (1301)..(1301): n comprises a, c, g, or t, or includes no nucleotide
  misc_feature (2203)..(2203): n comprises a, c, g, or t, or includes no nucleotide
  misc_feature (2205)..(2205): n comprises a, c, g, or t, or includes no nucleotide
  misc_feature (2209)..(2209): n comprises a, c, g, or t, or includes no nucleotide
  misc_feature (2216)..(2216): n comprises a, c, g, or t, or includes no nucleotide
  misc_feature (2218)..(2218): n comprises a, c, g, or t, or includes no nucleotide
  misc_feature (2227)..(2227): n comprises a, c, g, or t, or includes no nucleotide
  misc_feature (2230)..(2230): n comprises a, c, g, or t, or includes no nucleotide
  misc_feature (2264)..(2264): n comprises a, c, g, or t, or includes no nucleotide
  misc_feature (2275)..(2275): n comprises a, c, g, or t, or includes no nucleotide
  misc_feature (2277)..(2277): n comprises a, c, g, or t, or includes no nucleotide
  misc_feature (2279)..(2279): n comprises a, c, g, or t, or includes no nucleotide
  misc_feature (2285)..(2285): n comprises a, c, g, or t, or includes no nucleotide
  misc_feature (2291)..(2291): n comprises a, c, g, or t, or includes no nucleotide
  misc_feature (2295)..(2295): n comprises a, c, g, or t, or includes no nucleotide
  misc_feature (2304)..(2304): n comprises a, c, g, or t, or includes no nucleotide
  misc_feature (2314)..(2314): n comprises a, c, g, or t, or includes no nucleotide
  misc_feature (2943)..(2943): n comprises a, c, g, or t, or includes no nucleotide
  misc_feature (2965)..(2965): n comprises a, c, g, or t, or includes no nucleotide
catcgccgcagacccagcgcccagagagactcaccagaggtaggctggggcccccccgcaccccgcagggcctgagctttcctgccagccccctggttgctcagtctggtcggcgggtaccagaaccccgggccgggcaaggagaggggggtgggagggtgctggaactgctcccccaattcccacactccacactccttggaaccccgacatctacccccggctcctctgaacccatgagcccctaatatcgcagctgccttccaggaggccaactccccaaccctccagactcctaaatccccaacaccacaactttctctgctcccagatccctctcgggcacccgcccctaagtccccaaactctctgagcccccacctcctcccagttcttcagcttctctccactcctccaacctcaatatgcacaaccccgaacccccaaattcctccagctcccggaaccccaagtcttcaaccccagctttttgacccaccttccaaatttttagnatccctaaatcctgcaaatcctttgntgccttatttttcaaanaccanatttttatagccccccaatnacccaggccctgaaattgntcaagctccanaaatcctagggtttcccaacccccagccccctcaggtttgctgggntcccaaatccccaatgccctcccttaagatttccacagtttccaacccctcaagccctgagtccagtggcttaacccccttccaagctgggtggggggcagggcgctgcccacttntgcccctaaggaccactgaccgctcctccccatcccgcagaacccaccatggcaccctttgcgcccctggcctcctgcatcctgctgttgctgtgggtgaccgcccccagcagggcctgtacctgtgccccaccccacccgcagacagccttgtgcaactcccaaatcggtgagtgtaccccactctgcccacacactctgtgctttggtttccccttagtccagcgggttcacaaaggtgactccgtctaaaaaagttccacctggccctgtgctgactctgctttagcacacttgcaccctcgtgctccttgatcactccaggcccaatcgcacctcagggcctttgcattggctgcagcctctacctggtacaccccaggtatccacatcggtggcgggctcaaatgtcaggatggccttcccccaccaccctgttcaaaattttcacccctgtgccctantattcctgaccccccagctctaaaattcctcatcacactgaagaccttgtaacattccatanactgatttatttcgcttgtgtggagtctcctcctggctagaatatgagctctacgaggcagggcttctgtgttttgttcaccgttttgttcctaacccccagaacagtgcctggcacgcggcgggctccgaaatatttgttgagcgaacaaacacacgatgaatacatgggagaggcttaaggcagcgggcgcctggcagagagtagtcactcaaaatacggattcatcagttaacctgcgtgcacatcgcttagcgtgccgtgggccattccagccatccccccaccgaagtgtgtgcttcgcgagtgatccttctattttactggctcctgcagtccatttgactcgtctccccccctctcccccacccccgcccgcagtcatcagggccaagttcgtggggaccgcagaagtcaaccagaccgacttaaaccggcgttatgagatcaagatgacgtatccctcctgccctttccccagcgctccctaactcttccttcccggcccaataagcctgaaagccgacggagtcagctgcgacgtggggacgctagagggcttcagggaagagcgcggggtgggagaccgtgtcagtaaaagggactcttccccccgcccggcgacagcaagatgttcaagggtttcagcgccttggggaatgcctcggacatccgcttcgtcgacacccccgccctggaaagcgtctgcggatacttgcacaggtcccagaaccgcagcgaggagtttctgggtgaggccccgccccctcggccggtgccacgccggcccggccccccgacgcgccgaggccccgaggggctggtcgcgttgaaatgcggaccgcccccgatttcagcctatcagaaagccgggggctttgcccagccggggggggggtctntncccnaggggcncnaatcagganccnccctgcctccctgtccccgccccgcccctccccnacccccggccnancnaatcanctgccntctnttcccctcnccccccgccnagtcgccggaaacctgcgggacggacacttgcagatcaacacctgcagtttcgtggccccgtggagcagcctgagtaccgctcagcgccggggcttcaccaagacctatgctgctggctgtgaggtgagtgccggggccctgcccgccgcctgcacagccatcctccggctcttccccaagccgtggcttgttgctcgctccctctggccttgccttgtccgtctggctgctccccacgccctagggctgtccctgatctctcttgctgttccccacccccaccccccaaacctgagactgttccctggaaattcgggctgcttcctttccctctaaatccctccttgtgactattttctagtccccctgcctattcctgaccccgccccccctgcgcagggattgtttcttggttccctaaaatgttctccaataacccaaagtgttgatcccccaacccactgactcttccccagcatatctgattcttgctccagggctctgaccgcctcacacacaagggtgtgttacgttgctcttctgactattccaaggctgtctccccgtggccctgaaatgtcctctgatcccagtgacactgtccgagccccacggctctgttgctacncctaaggccctccactggccanctgttctctattactgccacttggtccctatcctatgggagaattcccctggagacctaactccccccacccccacccccatgactgttccccaactactattccaggaaactgatcagttcgctggattacagtcaccttgccaagcccaatgactgttcctcccatgggaggggctgttcttgagtatttccccaggttgggcagcaccaggtctccctagcagttcaatattggaaaccgaggaggggaaagttctgtggggtacaggaggcaggggcagggggagaagccctcagagatgtgcctcccttccccgcctctaggggtgcacagtgtttacctgttcatccatcccctgcaaactgcagagtgacactcactgcttgtggacggaccacttcctcacaggctctgacaagggtttccagagccgccacctggcctgcctgccaagagagccagggatatgcacctggcagtccctgcggccccggatggcctaaatcctactccccgtggaagccaaagcctgcacagtgttcaccccacttcccactcccgtctttctttatccaaaacaatgaaataaagaactaccatcc

SEQ ID NO: 2799 - DNA, 273 bp, Canis familiaris
agatctgtcctcagggcagtagttaatagcatccacctgacacaactagtttgcatttccctggaggagaatcatttgcattgttattgatataatttagagagttgcaaaataacacaaacacaatgaaaggtggagataactcagaagtgggtgctgaacctttggcctttttcaaagccttttgtccatttcaagcaaacttttgtcgatttcaaagccttatacagagtttgtttttccttgatggatctgggtgggatggagagatct

SEQ ID NO: 2800 - DNA, 223 bp, Canis familiaris
agatctcagaaacccttccttcctcttttttttttggtcttgtttagggtaggagttcgtaaaaggacagtgaagaaaaaggattcagcttttggaaaggaggtaactgggttctacaaggacgatttgggtcttcatcgtagaaggtgatggccgtttgggttcacctaagctaacatttggtagacacagaatacggaaaagagtaaggttctccagatct

SEQ ID NO: 2801 - DNA, 297 bp, Canis familiaris
agatctgacaaccagcctacagagacagctggccttttttctcgagtcatcagtgggccccgtccgcctgggctgggctaaccatttgcaccgttgattgatctcatttgtaaaggagaaaagcatgcttgttagggcgtgttaggctgtttgtaggctgccagcagcagaaccctgtcagcagccgctcaacagaggagaacaattgctcttccaataagaaatctagagaccaaagtatatggatgccttgtgccataagagagtcaccaggggcccaggcctttccccagatct

SEQ ID NO: 2802 - DNA, 252 bp, Canis familiaris
agatctagaaacaacatagaggaaaaaaagacttatgtaacactataaactgtaggagttcatttaagtgattctaagagaacacaaagcaatacattgtttatggctatctgtatgtaataaaacacacatttatggatactctgttaattaggatttttttaatgcaagtaacagaaactccagcccctgccttcttttttactggcctctgtcttaagcaattctaaactgtcctaagagcaaagatct

SEQ ID NO: 2803 - DNA, 381 bp, Canis familiaris
agatctcactgacccacgacacccgtttgccttccagggccagagctatgagagccaaccccgtagtaacatcattccgaacccggcaaggcggggaaacatccacgtaataagtaaggaagcagacagataaatacgagccggaaagcctgacatgagcccccagggatgtgccttaacagcgaccccgggtgacacggaggcgtcccacagggagggctttagaaaccacggtcctggagaaacagggatggaaaagcacaaaaggctgagtccactttggaggctgcctttaatgaaatgatgtatcggaagaggcaagcgtccgcaatgcttaaatataccttataaggttggctttttaggtcactccctagatct

SEQ ID NO: 2804 - DNA, 381 bp, Canis familiaris
atcggactcctctgtggtgtggccttttgtttcctgggagtaggccttttgaacgcacaagtgactcaaaccccgagacaactcatcaaaaaagtgggagcgaaagttttgttgaaatgttcacagaatatggaccatgaaagaatgttctggtatcgacaagacccaggtctggggttgcggctgctctactggtcctataatattgacagtgttgagacaggagacatcccttatgggtacagtgtctcgaggaagaagaaggatgccttccccttgattctggagtctgctcgcatcaaccagacatctgtgtacttctgcgccagcagcccgtttagccaaaatacccagtacttcggggcgggcacccggctgcta

SEQ ID NO: 2805 - DNA, 408 bp, Canis familiaris
acggtgaagggctagcacctaaagatgctgacttgcctgctactcctcctgggacaaggctctgtgtttggagctcttgtctctcaaaagccgcgcagggacatctgtcaacgtgggacctccattaccatccactgtgaggtcgatacccaagtcaccttgatgttctggtaccgtcagctcccaggacagagcttgatactgattgcaaccgcaaaccagggtgcagaggccacctacgaaagtggatttaccagggagaagtttcccatcagccgccgaaccctaatgttctccactctgactgtgagcaacctgagcctcgaagacaccagctcttacttctgcagcatttggtacggggagggggagcagcactttgggccagggacccggctcaccgtccta

SEQ ID NO: 2806 - DNA, 408 bp, Canis familiaris
gctgaaatggccaccggcgtcttctttggcatggctctttgtgtcctgtggacaggatacatggatgctggaattatccagagcccaagatacaaggtcacagggacaggaaagagggtgactctgagatgtcaccagacagacaactatgactatatgtactggtatcgacatgacctgggacatgggccgaggctgatctattattcaaatggtattaacagcactgaaaaaggagacctctccaatggatacacagtctctagatcaaacaagatggatttccccctcctactggactctgttacctcctcccagacatctgtgtacttctgtgccgacacgagggatcctgttgcagtaaattatgattttaactttggcccagggaccaagctgacagtcgta

SEQ ID NO: 2807 - DNA, 462 bp, Canis familiaris
gctgcaggattcggcacgaggcgtggtcatatctatcttgagagaggtatggtatgaggccatcacctgaagatgctgatgcttctgctgctcctggggcccagctctggactcggtgccctcgtcttccaggcgcccagcacaatgatctgtaagagcggagccaccgtgcagatccagtgtcaaacagtggaccttcaagccacaaccgtgttttggtatcgccagctcccgaagcagggccttacccttatggtgacctctaacgtgggcaacagtgctacacacgagcaggggttccctgcagccaagttccctgttaaccacccaaacctcacgttttcctccctgatggtgacgagttcaggtcctggagacagcggcctctacttctgtggtgttcgggcgtatggtgggaactcgcccctctactttggaacaggcaccaggctcaccgtgaca

SEQ ID NO: 2808 - DNA, 438 bp, Canis familiaris
cacgaggagcggggaggctatcagcttcccagggctgccatgggctccaggcttctctgctgtgtggccctttgtctcctgggagccggccccgtggagtctgaggtcatccaaactccaagacacatgatcaaagcaagaggacagacagtgaccctgagatgttcccttatctctggacacctatctgtgtactggtaccaacaggccctgggccagggtccccggtttctcattcagtattacaatagggaagagagagacaaaggagacatcccggcaagattctcagtgcagcagttcagtaactacagctcccagctggagatgaactccctggagccaggagactcagccctatatctctgtgccagcagcttagatgcgttcgacgcggggcagctgtacttcggggccggttccaagctggccgtgctg

SEQ ID NO: 2809 - DNA, 1153 bp, Canis familiaris
cgtctgtgtggtgagcttgtcttctgctacatgtaggagcaggactgtggcccctcaccggctggtgtctcctcgggtccacagtgttagcaaccagggcagaagctatctggaggaaaccccaaagcagcactcttgctattaaatgtgtaccccaatttatgtcttaagccaccaaaatatctttgactagtaagaggtatggtaggcttggtgaaaggaaaagctacaaagtgttccttgttaccctgcctcctaaaaacatcaatagccaatactcgcatagcacctcccacgtttaaggctccagtccagattcttctcactcacttaatcccctcaacaatcccaccaggtggatactgtcattatccccatattacaagtgagaagggggacccaggacccctctgtccttgcctaggatcacaaagctaacctagcagagaagttgtgactcaaatgtagatttgtggatctagttatttgaccttgggcctgcgtttttcaagtgcgaaatggggtgatgatatttagcttcctgtggttgtcctggaggtgaagtgtgtaaatttatgtaaagcaccaggtgtactcgaagtgttcagtgaaaggcatctgcaggtattataccattgggtacagtggtctttgcctcaggggaaagacgttcatccttccatttgaggtgaattcctatttatgatttttaccatcttctctaagcatggtgaactctcagaacaaatcctcctttagtgtacatcttgcccttattggatcctctactgttttcaagtggatttggagttgaaaaaagatttgaataataaccaaatggcttcaaggttaaataactagtgtgtgtaagcgttaacattttttaaagaaaactgataacccaataggaaaaatggaagagatccccagaaatagtcttacagagctgctttcttcccacagacattaataggcattgagttagtagcacttcccagcagcactgacagactcaaggtgttggcatcagtagataattgaaagggggatacatggggctatgtgtcagggtcactagccaggtatgtctgatactgacatttcttttttcccaggtatacctcaagaggaatgactgtttatgccattttcc

SEQ ID NO: 2810 - DNA, 390 bp, Canis familiaris
ggcggtggcttggtggccgacgaactcaacaagaacatggaaggggcggcggcggcggcggcggcggcggcagcggcggcggcggccggggccgggggggggggcttcccccacccggcggccgcggccgcggggggcaacttctcggtggcggcggcggcggcggcggcggcggcggcggcagccaaccaggggcgcaacctgatggcgcatccggcgcccctggcgcccggcgccgcggccgcctacaacagcgcgcccggggaggcgcccccgtcggccgccgccgccgccgccgccgccgccgccgctgcagccgccgcggccgcgtcgtcctcgggagggcccggcccggcgggcccggcgggcgccgaggccgccaagcagtgc

SEQ ID NO: 2811 - DNA, 464 bp, Canis familiaris
aagaaggacaagaaggagcctgtggctaaccaagacccagtttctccaagtctggtacaagggaggatagtgaagccaaacaacaacaatatgcctggcagtgatgatggcctggagcacaacaaaatccagaatggcaaagcccccagagatgctgtgaccgaaaactgtgtccagggagaggagaaagagagctccaacgattccacctcagtcagtgccgtagcctctaatgtgagagatgatgaagtaacccaggatgagaacaccgtctccacttccctgggccattccaaagatgagaactctaagcaaacatgcatcaaaattgtcaccaagacccaaaaaggtgactcgtgtaccccaaccaataccaccgtggaactagttggttctgcaggtcagaacggagatgaaaaacagaacattgtagctcgcaagattgtgaagatgactaagcagcc

SEQ ID NO: 2812 - DNA, 3702 bp, Canis familiaris
  misc_feature (1278)..(1279): n comprises a, c, g, or t, or includes no nucleotide
  misc_feature (3509)..(3509): n comprises a, c, g, or t, or includes no nucleotide
ggtgacggtgacgtcctatctctcctcttctccgtattaggtcatgggaaagcatagctggagggcctgcctgaatcacagatgacaggcttgagaccagagacacgcacatgcgtctgcagacacccagcacgagggttcggagaagggaggcacagccccgatggtgggaggggagggggcccacagccacctgggagctggctggcggccagcagtgatgaaagctcaggggaatggaaacagaggagcgatcctgttgtaatcgctacgcccacttggcggcctataaaggacgcgggcgagccccggcagcagcacgcaccttgggtctccctcctcaccagccctctcgctctgtgcctgcctgctgcccgctgctgccaccatgaccaccactatccgccagttcacctcctccagctccatcaagggctcctcggggctggggggcggctcgtcccgcacctcctgccggctgtctggcagcctgggtgccggctcctgcaggctggggtctgctgggggcctgggcagtgtcctggggggcagtggctattctagctgctacaacttcggctctggcagtgcttacggtggcagctttggaggtgttgatgggctgctggcgggcggggagaaggccaccatgcagaacctcaatgaccgcctggcctcctacctggacaaggtgcgcgccctggaggaggccaataccgagctggaggtgaagatccgcgactggtaccagaagcaggccccggggcctgcccgcgactacagccactactaccagactattgaggacctgaagaacaaggtagggcctgctggtggggcagggcctgtagggcgtatgacttttccttctccatctcctccccttgactgtggcccagagtcagcctggatggctgtcacagggtctcagggagtcttggtctcagggagcccaccttggagccactgtgtggcatgttcccctttgaggggcagcagctggaccagggaaaagcaggcctcgtggaactgctttgagccttggtttccccattgtggggcttactgccaccacctcaggtaattggataagatgcgtggatgcatgtagagtctgggctccgggggctgctggatacgtgggtacttctcttcttgaagcaaggggggtattttgggccatggtggggtgaaggcagctagtgagttcctgatggcacctgctggaggaggaggtggagagagggggcgggacctcggaaattcctctgtgtgccnnatttggtgatttttctggcttccccatccctcccactgcccccctcaagaataggactcagcaaacctctaagggcagagctgcctgctggagtctggggttgaggcctagccagggtcatgacttctgatttggaactcttctttggtgaggggtcctctagggccccttctgagggagcctcttaggcaccatctccccaactgtaaaatgaggggattgtttacctctcctccactttttgggattctgggacatctactgccccagggaccattcttgtctccctcgttgggcactcccgtctgtccacctgttctgattgagggcaaaccccagcaagggggtccatgtggggggaggcagggtccgggaggaggagaggcaagttttcgcctatcagactcctgctggccccgcctctgccaataattgctgcccagtaaaggtgagaggctgggcaggaaagaagccttcctggagaaggcagccacatcctggcctccgggcaagaagatccatctcataaccctggtcccggctgagctcctccccaccaatgaccttaccactctcctgttctccccagatcctcacggccactgtggacaatgccaatatcctgctgcagatcgacaatgcccgcctggctgctgatgacttccgtaccaagtgagccctagccagtgggctggggggaactggggcatccctcctcacactaggaccacagttgctgtgggaagggtcaggagctgggggtggaggagtccacctcttagtcacagatgtggcaaatgcagtaaattctgaaggtcactgggcttaggcagggagaaggaggagagagaggcagggggcataagagagagaagcaggaagccaagagtggtggtggggctttgccttacatggtcctatggccctggggctacagtttggttccactccacccctttgcccctatcaaccctcacaagctcttagagccttggccaggacatggacctgcaccaccaagcatcaagactaagtctctggttccttttgcaggtttgagacggagcaggctctgcgggtgagcgtggaggctgacaccaacggcctgcgcagggtgctggatgagctgaccctgtccagagctgacctggagatgcagattgagaacctcaaggaggagctggcttacctgcggaagaaccatgaggaggtgaggtggtagggcagcaggtcatagaggctgcagggggtcacaggactctggggctttgccaagcctgagaccatgggaagagcacagagcaggtgctccagggctgttgccttatggggctgccctgtctgcggagccatgatccccatgtaaggtagcctcctccaagtaccatcttgcttacctgcttctggggatcctcccagcgtctgcagaggcctcttctgcccatcctggcctccctcatgaggacaagggataggtgaggaggtctctttgcttcaactcaagcctttgaacctggaccctatgtgggaatttgggaattagaggggatattttaagggtacaggcctaaaaattagattttatctttggagaacccttggtctaatggaggagacatagaatctgtcctcagggaacccccagtctgatggtagggacagagcccatacagagcagatgaacaagagtcagcaggaggggcagagggtagaggataggcagaatgaaggagagctccttgggaggggtctggagagcttgcctgggaaggtttggaagtaagagatcaggacaggccgagtgcccacacccacaaccctctccccccacaggagatgaatgccctgcgaggccaggtgggtggtgagatcaacgtggagatggatgcagcccccggtgtggacctgagccgcatcctgtctgagatgcgtgaccagtacgagaaaatggcagagaagaaccgcaaggacgccgaggactggttcttcagcaaggtagaggctgcagcaggccagaggcctctcccagggggtggggagcaaagaccgagtcctggcttatgcctagtacctggcatcttggggtgctctatcctcagtgagccacatggatcccaggggaccagggtcacccattgcatcaataggctaggagcttggccagagttgggatctaggggtgggaggagagccccccgcaggaataaagaccccaagagcttccaacttntcacgaggtcaggaactggcagcaggggactggttgatatcttggctggtcctcaagttgcctattttaggaccttctacttggagggactaaagataaagcttcacatcatttcaaaggtttctctcatttctggaagtgggatggccggtgagaaggcactgctcctacagtcaagtttgggaaggggccc

SEQ ID NO: 2813 - DNA, 469 bp, Canis familiaris
agatcttctctgggtgccgatcaagttcacagaattttagcttccattagagtttacacacatacacacacacacagactttctcaatgaattttatttattgctgagagacacagagagaggcagagacacaggcagagggagaagcaggctccatgcagggagcccgacgcgggactcaatcccaggactccaggatcatgccctgggctgaaggcggcgctaaaccgctgggccactggggctgcccagctgcaatctggtttttggggggttttgggggtttttttgcaatccgttttaaacaagaattttcaacctgtgtcagggctaggttttctttctttgcgagctgagttggaagggaaagagacacgtcagaatggttacttccacgcggagccatgaacgtcagaggaggatgtcacttctaaccctgggacagcacaaggacaagccataaggactc

SEQ ID NO: 2814 - DNA, 422 bp, Canis familiaris
  misc_feature (321)..(322): n comprises a, c, g, or t, or includes no nucleotide
ggatcttcttagcccagctttcccccatgacgtggcaaaatgggtttagtctctccatctatcagaactcagtagcacacggtagtggagggagggaagtggtataccagttgagaacctgttccttgggtctcagaaatgagccatgaggcaagggctggagaaaagttggttttgtctgtctctcaactgctttagtctccttgctcttctgctcatcttcgttcactgtcatcttgccattccagactcaacattgttaggtcccaggtaaaaaaaaaaaaaaaaaaaaaactcatcatattcatacccctgaggaanncactccatttccatcccttgggtcaccgtcttcaaggcctaactagaaccattatagtgtgactgagctgttactccagtgccactgcattccctgacag

SEQ ID NO: 2815 - DNA, 410 bp, Canis familiaris
ggatcttactagaatgtggctgagactggccggctggcctaccacctttcctcttgaaggcttgccattgaaatcgagcttttatttccttgctgctcattgtagagaagcacgatcaacccttccacgtccctgttccctctaggcctcagatgtgagggatgcgattggacaaccattatgacatcggtctgcacatccggaggactggccttccttctgtccaaggcaaaaatccagacatgatctcatcagagccactccctggagggaatcgggagacataggactgtttcatcccattttcagattgtgaaactgagggaatgagaggagcttaataagggtgaggcagtgaccttgctatagagctgaccttgctccaccagagtggctgtcacccggtacag

SEQ ID NO: 2816 - DNA, 275 bp, Canis familiaris
ggatcttccaagtagttgaatacatcttgcagtcaggattcctagtttctgtttgggctcttggtatgagagcctgccttgacgagaggactcttctcttgttacgactgcctaactggatccattgtttctattaatccttcttacagcacacagagctatatttctttaatgaaaatcacatcatgtcatgcctccccttcaaccctgctgatcccccatcatgcctgaattcagtccctttccatgacttacaaggtctgttgatgagatcc

SEQ ID NO: 2817 - DNA, 409 bp, Canis familiaris
  misc_feature (403)..(403): n comprises a, c, g, or t, or includes no nucleotide
agatcttttgtcattcatcatgtggcccttttaggggacttcagctttcctcagccgtaaaacagtaagattaaaatggagcctacccaattttaaccttcttagttttgagatcatctaccttttccctgtctcttcagcctctcccactctcctgtgtctttttccaatattgacattcaacatgatctcattattgtcatcttaaactaaggaaaccctttctgggccaccagccctttcttctgcttcccacctaaacttcttcaaaaagttatctacagttattcgctcttcaactaaccgcattctcctttcctttccatccccactgctgcaccaaaataatttaaagctaaactcaccaatgagctcatgatgccaggtctaatgggcacatgtnagatct

SEQ ID NO: 2818 - DNA, 299 bp, Canis familiaris
agatcttgggcaaatcaaagtgctggtgagagcaacgataaaaaaaaatgaaactatcaaatgacaaactggagccctgcagacctgctaccggaagactcttccaccagggtttcttcaccaggggaacaaaaggcaccgtgtgcgcctctccccacggccgccgcgcatacccggggtcaataaatagtgtgagtccctagtaattgtttttaaaggccgcagagtgtggtgcccgagttctagaacaacaggaaaaaaaataaagcgcacagaagcttctcaggcaccgcagatct

SEQ ID NO: 2819 - DNA, 274 bp, Canis familiaris
agatcttgtaagacccaacggggagaagcaactcaactaagggtttatctttaggatttttggtgaatgagaaatataggatatgccatttattttaaaagcaaagacgaagaaacatgaaattattctgcaagtatagtaggtgaaaataggcttcatttatacattatgcacatttcagggaaagaagtgatgggatgttaggaagagaagatatgaaattaacatggtgccacatgccctgaagacagcatgcctttctctgggaagatct

SEQ ID NO: 2820 - DNA, 299 bp, Canis familiaris
agatctcactgtcgcttcaccaccttcaatgtccccattccagaacctggtgggtctccaactatggctcctcccgggttgtcctgtgatggttggaacattacacccctgccaaggctattttaggacctcctccttctccagggtagcctctgagggtctctctgcagtgcttttgtacctacactctagccttcttcctccccagaaaccatcgcttggcttggtggtgccaggagcgaagagaaccaagttccatacccgattgataaagaggccctgggggatgctccagatct

SEQ ID NO: 2821 - DNA, 448 bp, Canis familiaris
  misc_feature (320)..(320): n comprises a, c, g, or t, or includes no nucleotide
agatctctctcccctcagacccaccatggcggctcccatagctctccagcctcctccgtcagacactgtgctggccctctctcaatgattccctctcccctcacagctgtgtctctttccttgcccctctgcccatctcttttcccagaataaccttctgacctttccttttgcatccctgtccccattaagcaaaagtatgctcctatgatatgtggaggaagagaaaagaaggtataagtaattcttctccccagcaccactgcctagcctggaccccatggctttgctgtaactgtaagaggcctgcatcgagtgcntgtggacacacatcacagagagtgtagctgtgcttgcagtcttgaaaagcttcccagaggaagtgacatttgcgctagggtggaaggatggaaaggagttttccaaacaaagcaatatgccaagatct

SEQ ID NO: 2822 - DNA, 360 bp, Canis familiaris
acatctcggtcctactcatgctcaatacagtgactcccaaggatcgacaaagtattgaaaagccttctcttggtggatatgcttgcctgtgtcaaccattcatgtaagtcagtggatagttattgaatgtttagtatgtatcagcactgttttggtcttggggataaaaaacaaacacatgtgtgagcaaagcaaacaaaatcattgggaagactagcgtgcatcttcctaatagagggttaagggcttgtatggagtgtcaagtttctctcctgacagaatggtcttgccaaattccatatcatctggaaagtctaccctcttgcccattccaactatcgcctgttcttgcccagatcc

SEQ ID NO: 2823 - DNA, 366 bp, Canis familiaris
  misc_feature (313)..(313): n comprises a, c, g, or t, or includes no nucleotide
tctcctaccatacctgggtgggtaaaaggccaagggccatcaatgaagccaatataagctgagaggcctatggagaggattccatgggtgaatgttaccagccggcagctccactcatagcttcggtgcttattcaggcggtagaaagaaatgtagagtgagggccagccccccaagctgcacagcacctgcggacacagagctaatgccatcctatgtgaaaagaccaaaaccagaaaaacaaagtatgtaccctaagaaaacagcattgagtcaatttgcatatgatcttcatttctactctagaatagtncaaaaacattgcctacactgaaacgcttctcattacctacacagccaagatct

SEQ ID NO: 2824 - DNA, 429 bp, Canis familiaris
  misc_feature (8)..(8): n comprises a, c, g, or t, or includes no nucleotide
ctcaactngctgagccacccaggcgtcccttgcaagggatctctgaagagagccttccgcccagtgtgaatgccatccctgccctgtttcttgtcccaggttaactggagtactcctctccttgttcacatctagtgagcaatgttttccatgtggttggagaaaagcggactggtctcttgctcaagatgtaaggaaggtgacagattagtgaaagaggataaagggctgcatttgggaagtaactatctccccggtcctcaccttgtctcacagtgggtccaggaatgtggttgtcttccctaactgtgccctcaaaccatctaggaagaagtgggaactccaacagtgaaagtcaacagttactagaagcatgacctggagaggcaggaatgctatggctggggttgagatggatcatctagatct

SEQ ID NO: 2825 - DNA, 241 bp, Canis familiaris
  misc_feature (81)..(81): n comprises a, c, g, or t, or includes no nucleotide
acaaatattcaacacagcttgctgagcatgcagtgtgagtcagacatcaagccagggctgggaatataatggtgaacatgncatgggctttgccttggaagagcagagcgtctgagggaggagataatacgcaatcgcagtacaccaggtgtgaggaagggcacctaacctcggccaggaagatacctgcttgtgtaactattccacaagtctgagctccataaagctaggaaccagatct

SEQ ID NO: 2826 - DNA, 279 bp, Canis familiaris
gagcttgaagttcccccgtaacaccctgtaaaggcttcccaccaaactcggaatacaatccaagctctgcaatagcctgtatgtggtcaagcccctgactatcacatgccgtctgcccttgcccactccactccagccacactggcctactcttgcccgccccaggacctttgtgcatgctattctctccacttggattgaccttcttccgctattcatgcaaccagctttctctcatctttgaatctctaaccaatagacctaccttcagagagatct

SEQ ID NO: 2827 - DNA, 321 bp, Canis familiaris
taactcatcaggtatgcccagtcatgtcaagaagcagatattgggtagaaggcggaaaaacctgaactgagactacatcataatataatatcataatcaaaatttgtgatgccttcaggaatctagaaacttaaatgctaaatgcactttaacttttaattggaggttaaggacgatttagataaggttaccgctcgtatctctcatcaaaaatggatttttcattaggtcttctgctatctgcttgctgaatcactgatcctcgcccatcccacagttctaacacacagatgaagccaatcctcctcttgagatagatcc

SEQ ID NO: 2828 - DNA, 788 bp, Canis familiaris
cagcatgatcgaaacatacagccaaactgctccccgatctgtggccactggaccacccgtcagtatgaaaatttttatgtatttgcttactgtttttctcatcacccagatgattggatcggcactctttgctgtatatcttcacagaagattggacaagatagaagatgaaaggaatctttatgaagattttgtgttcatgaaaacgttacagaaatgcaacaaaggggaggggtccttgtccttactgaactgtgaggaaattaaaagccaatttgaagcctttctcaaggagataatgctaaacaacgaaatgaagaaagaagaaaacattgcaatgcaaaaaggtgatcaggatcctcgaattgcagcccatgtcataagtgaggctagtagtaacccagcgtccgttctgcggtgggcgccaaaagggtactacaccataagcagcaacctggtgagcctcgagaatgggaaacagttggccgtgaaaagacaaggactctattacgtctatgcccaagtcaccttctgctccaatcgggcagcttcgagtcaagctccgttcgtcgccagcctatgcctccattccccgagtggaacggagagagtcttactccgcgccgcgagctcccgcggctcgtccaaaccttgcggccaacagtccatccacttgggaggagtatttgaattgcatccaggtgcttcggtgttcgtcaacgtgactgatccaagccaagtgagccacgggaccggcttcacgtcttttggcttactcaaactctgaa

SEQ ID NO: 2829 - DNA, 1498 bp, Canis familiaris
tcgacatttctcctcctccctaagggagcagggaaaacatcagttttgtctggtctcaattatgcatttccattccttaatataaatgtgtgctgttttgattttttcctttgaatatctgcctggttgcctcatataatatgagtaaaataaattctttaacatgtgttcactttttatcttgggagtcacaatttgactttttttttttttttggaaaattacattttaacagtactaatgatgtaggaaggaaatgttggagttctgagccgatggccaagaaagagttcttgcaaagtcttcagtacaaatgggtggtcttattaaagcacaaagacaggacccatggacaaaaagagctgtattgggattgtgaggagcaactgattatatactctcaagttgggagggggttagggatagtttaagtctctaaggaattttggaaggaaggtttccaggcccttgagggggctagctattgttagggaaagatcctttattacagtcttagtaaaacctcaatcacggagacccttcagatatgcatcagtgggccatatgcttggaggatgattgctaacatctattttggggggtagagataaaggaagtttccaagggaatttttatatgtccaagtagactcataggatcctgggggtttgggctaaggttgccatttgcccctagcaaagtattaacattgaggcaggtgagttcctagaggaatgccactctgcctgtttggaagacttgtcaatgggctataggcagtaaggaaatttctctttttcttttgcctttgtttcccaccccagaaggagcaaagaaaaacagcttctgttgctgctgctgctgcttcttcttctttcttctttcttctttcttcttttcttttggtgtaatgccaaaataccacagatcagcaactatacatttaagaggaaaataaattggaagggtggtgtgtgtgtgtgagtgtgtgtgtgtgtgtgtgtgtgtgtatgtatgtacgtgagtgtgatgtggaagtagaatgagaaataagttttaattattagtaggcctatcctttagatgggacagttgggaaagctgccctggagggttatgggagtgctgctttgtaaagagaactagggcatacctagcctacacacattaaatgagttttgtctcaggcttgtattcttctaggctatcaaatgaagtaataagcttataaataagacttatttttgttttttaaaaggcttaacaagttatggattgaaattttcaattaagggagaaggtcacggatatgaaattgagaaataaacaagatagacaaatgacttgggtagcgtagcatttactggtttgtcagttaggttttttaaaaaaaatatttatttatgtgagagagagagagagagagagagaaagtcagggacacaggcagagggagaggcaggctctgtgcaaggagctgcaaggatgtgggactcga

SEQ ID NO: 2830 - DNA, 891 bp, Canis familiaris
tctcatcatggcctcacttcccggggtcatggccattgggcctggtgagcctgcctccctgggccccacgttcaccaacacgggtgcctccaccctggtcattggtaagttggtgggcatggggggacacctgggtgggagggctcatgaggcttccacagaatccagaagctggaggagccactgggactcatttattcactcatttattcatatacttattgagtgcttgcactgtgccaggcactatgctacatcagcgatacacaagtgaaccaaacacaccaaaatctcaatgactcaagtggggaggtagacagaaaacataatacagacattagataatatcttggaaagcaaaatgtctatgggaaaactaagtggggaaagagggagtcaaaattttgtagattatacagtttttttttttacttttttaagcccaagaagactttatttgggggtaccattatgcagaggctgaatatataagacagggagctgctgggagaggagcccagagttaagccgcagggcctttgcactgctgtggaaccccagggccatgggatcctagtttgacagcccctgcccatatgatgtgttagaggctcagagtggtggagtgacttgtcaagaccatgtaagttagtgacaggtcctagtgtgaaggggtctcctggttccctgttcccttcccaacaggaggcctggctgactcctgttcctccttctccaggcctggcctccactcaggcccagagcgtgccagtcatcaacagcatgggcagcagcctgaccaccctgcagccagtccagttctcccagccactgcacccttcctaccagcagccactcatgtctcccatgcagagccatgtggcccagagc

SEQ ID NO: 2831 - DNA, 994 bp, Canis familiaris
tcctctggctgaccattgagctagccatcgtgggctcggacatgcaggaggtcatcggcacggccatcgcgttcagcctgctgtcagccggccggtattgccccaggggccccagcgctggcgtccagggccttgtacctcccagtccctttcaccttgcaggctcctcccacttagagctgctgtgctgtgttgccggtggcaagcatctgagacaggctgaaattgtagagtgacttgtggaaagtcacagagatgcaagtggccacacaggcttcaggactgcagcccccagctcagggcctcgggggtcatgcctccccacctgcttggcccttcctagcgttttgtgccatttccccatatccagcgcccctgtccattggctgcctggggccagttgggtccctgcttccaggaggccagactccacagtgtcgtccccccaccccccgccccagggtgggagtccgggatccctggcccaggctgggctgaccctcgtccctccggtttcagaatcccactctggggtggcgtcctcatcaccatcgtggacaccttcttcttcctcttccttgacaactacggtgggtgtgcccctcacctcggagggccctgggttgggggagccagtgaacctaaaaaccacactctgctggacccagagagggagagcaaggctccgggccccctggctctggctgcgcggccttgagcaagttccttgggcttctgtttcttcgtctacaccacggggatgctcctagcacagatgctggggctgtggccaggatgcacgcaggaatatatgttcagcgcttggcaccgagccgggcacaaagcgctagagatattggccactaaccggctcgtgctacaatttttgttgttgttgctactgtgacctttttgcttccccctagggttgcggaagctggaagcctttttcggaatccttattacaatcatggccttgaccttcggctatgag

SEQ ID NO: 2832 - DNA, 684 bp, Canis familiaris
tacaccgtcgccgtccgcaacacccgccttgtgggccaggaggtggcagctctcatcctgtggctggaggtaaggcccaccctcccgccttccctccccgcctctcccttctcctaagactaagtgaattaagctgatctccaaagcatcccagacaggagaaccattctgctaagctcataggaatgggaggacatggggtggggatgggatattggggctctctcagatgccttgcctgaacccctattttgcagaactatcttccctccctctcccccatccactatctcttttatgcccactcccttggatgagctaagggatctaaacacacccatacaccatcaaacccatagaaatgaacaggatcactgcacagggtgttaacatcctagtaaatggcacgcaagcggggggcagcatcaccgggaagggtcccaggtagctgggccagaaaggcgggtgctagcaaagtatggagccagtgtgggtcaggaggatgaattaagcacctcacttgccactcggcacaaagaataaggtgggagcccagaacaagctggacccacacaaggcttctatctggcaactcttgcctcgaaccatattgcctctgtcttccaggaatctgcccaattttctcgaagcaatgttcatctaattgggtatagcctgggcgca

SEQ ID NO: 2833 - DNA, 470 bp, Canis familiaris
  misc_feature (450)..(450): n comprises a, c, g, or t, or includes no nucleotide
cacaagaagaaagatagactggtgaacgagcaacttgccatctactcttacctgcacatcggcctcatacaagccgtgggaggttttgttgtgtatttcactgtgtatgcacaagaggggtttaaacccagtattctcattaacctccgggtggaatgggaagacagcaacgtgaatgacttggaagacagctatggacaacagtggacatggtaccagaggaaatacttagaatggacgggctatacggctttctttgttggcatcatggtccagcaaatagcagatctaatcatcaggaaaaccaggaggaactccatyttccagcagggtctcttcagaaataaagtcatctgggtgggaattgcctcacagatcatcattgcattaatcctgtcctatggaattggaagtatcacagccctgaatttcacaatgctccsgccccantactggtttgtggccgcaca

SEQ ID NO: 2834 - DNA, 141 bp, Canis familiaris
atgagccggagggagggaagtctggaagatccacaggctgactcttccatctcaccccttccccacttggaggccaagatccatcagacacacagcctcgcccgcctcctcaccaaatatgctgagcagctgctccaggaa

SEQ ID NO: 2835 - DNA, 8249 bp, Canis familiaris
aagcttgaggctggacttttgtctggaaaccttgacctgcccagattgccccctgtgttcctccagccttccacgtctccccatcccctccccactatcaaagcagggtacgaagattctgctgagaatcagggtccacccaccccctcctgctctgcctcagacctgctgtgtgaccctgagccagagcctccccctctctgggcttcagcaatctcaaagcgcttctccctccagggccgggtttggctccacactggaggggaagtaccgaacccaggatctctgagatttgtgaagcagcaggtgggactctttccagtgggcacttaagagccagggactgtggcatcccaaatacccagattaaactcctgaactctatttcctaactgggaggggccgcaggtaagcaactctacccctctgtgcctgggtcacaacagtacactgggagcagacaggcaggttctcaaggcttagagcttctgctcagtatcaccgttatcatttcaacaatcccaagacccagtttcttcagggagtttcgctgaaccaggcagttctcagaaatcaggaagaaagtaggagctctggagttaaacattctgggtttgaatctcttgccatcggatcccaggcaagtcccttaacctctttgagtattattttcctcttttataaagtgaagattttcctcccttaaccttcaaacaccgtttcgaggattacaaatctcatattcaaaggcttagtacaggagctggtatttggtcattgttaaatacagggcatctattattatttttattttattcctgagagacacataggcagagagagaagcaggctccctgcggggaccccgatgcgggactcgatcccacccgggatcaggacccgaaccaaaggcggacgctcaaccactgagccacccaggcgcccagcatctattattactattaatgattcttcacgcacacattcgttctgtctacaggtaggattataacgcgggaaggagaggttaccaaccccgtcagcagggacgcttcatcctgaatttcgctctctacccgctccgaacctgcatacctcccccgaacgccgggctgcggggccagcgggttccaagacacacatcctttgtccagccgggaaaactgaagctgaaactcagagcgggaaaacacttcccgagtcagggccgaaagcctccaagagcctcggggctccacccccacctccactttcacctggagcagcaaaacccctcccactccgctcgagactcagtttccccacctacgtgactcacgccacgctagccagggtctcttcctggggatctgaccttcctcttgagcgggggcgctgcacccccgggagaactgagggggcccgccagaggtgaggggtacccgcttctcggggtcttccccaggctagtttcagagcctaataatactcagcccccggggcggggcggtactgcgcaggcgcgggcgggttccgcaggcgcgcggggtgagcgcgcgagcgagcgagggattccctctgacgtaattgctaggataccaaacaaacactcagccgcgccggccgagctccttatatggctaattgcgtcacaggaacttctgggaggcggggccgggatcccctcccgccgagggctctggaacgtagcccccgcgacccccagggtcgcgaaggtgatgcaggtggacagaccgaggccagggcagacctcttgccggacggcgcggggctgcgttcggcggggccagagattttaggaagtttgtggagcttgggtagggtgacgtaagcagagaggcgggccccgggcatataaatacaggctggcggctttgggcttcattcataaaactgagagctacggcctcggcggggacaggcggagctgggacttggggacttgattgttgtggttcttcttgggggctgtgaagttcagcttttttttttttccggcgagaaagttttgggggctggattcttctagataattctacattttattttggaggagcgacttactctttttgtcttctttattactcccctccccccgtgggacccgctggacgcgtggaggagaccgcacccgaagcagattctgtacggcaagacagcgctttcagcctctgggggagcgatccccccccacgcccctgggtcctacggagcctggactttcgaggcacagcggcatcttgtgggggcctgggcaccgcagaggaattgcacagaaactttgccattgttggagcgggacgctgccctcatcccgagttttctcggacagcgcgctttggggacgcgctcggctcaccccggactcgcacctttcttttccacccggccatagccttggcttcccggcgacctcagcgtggtcacagggccccccctgtgcccagggaaatgtttcaagctttccccggagactacgactccggctcccggtgcagctcctcaccctccgccgagtctcagtatctgtcttcggtggactccttcggcagtccacccaccgccgccgcctcccaggtaagttctggagggttgggctgctgctttacgggttttatttcatttatttttaaatcggggtggagcgagcaatcccccctccccaaataaagacgcaccgaaactcaggatctgagaagagacaggctcaccgcacactttgcaaactgcagagtcgggacgcgtttgcaattggtggtgtgcgcggctcgcagggagggaacgcggaggggtaagcttggggtggggagaatgctccgttcagtgcaacgtgtatgcgtggcagggctgagaacttttagctcgctccggactgctcccgactcagtccccaacctgaagctagagcagttaggcaggtgggcgaaaccccagggaagctgccagtgacctcctcccccttccttctccatcggagcgcctactccggcatcgggctgccctcgatcccgccggcaagctggcctcgaaccctcgcttggaagcgcagcctccgcctcctgcgcggagacgtaacgggggacccgtgcgtaacggctgacgcgctggaatcctccgtctgacgcggggcacgcacggcgcgcggcgcccccttcgtccgccccgcccctgacgtcccggagcgttctattttggaacgccggggccacgttgctaagggagggggcagcccggcgctccgattggccgccgcggcgcggggtttggccaatcaactttcccttcctatttgtagggtgcaagttcccttccccctcccctccgtcccggaactcgtggttcctcggactggggtctctgttacgggcctctagagaccgagtgatgggattcctgtcgcaacaggagcgaccctctgcgatccaatggatccacgaggaccttgcggggatcaggactctccgatctcaggggcggcgggcgtccgtgcgccggggtctctttgggaaacatgggtgcccgtcaccctcctcccagggcacacacagacacagccccaatccccctgctccggacgcccgatccctccgctgtgtccgaagaggggactagaaacgctaaccctgggggaaccagccaggtggtctccaggagccccgccccctctgggtttccagggctctgattggccagtgagccagcccatccctcaccacgcccccgggagagtagttaagcctgccgagcagttctaggattccatttgggggtgggggtagttgagcgccgctggggctgggggggctcgggacctgctccattcgttccccgtggcaggctgagggaacccgggtcgtcacttttctctacctgtccgtccaccgtaacctgtcacttgtcggcctcactccgtggagagacaattacttgaaacgttgttctaaactcctaggccagtcccccaacacccctttaactaagaaccacccccctcccctgcacggaggtctcatggaccttccagtctctcgtccccccggctcagaggagtgtgtgtatgtgtgtgagtgtggaggaaggcttggcctaaggcctctccctctccctccccttgcctctggggtgggggtggggtgttgtggctgtgtgtgtggctgtaactccttcccgggggttctgtcacccggctgtgtccagcctcctccccacccccccacctaagagtcaccaacccggggtgtgattcaccacccgctggaaccgtgcaacctttccccgaagaagaaggaggaggtagaagccagttgagcagaaatcctctcattaaccactgcgtcacggtgtagtggaagggtgggtgttgtggctttttgcctgtgacacacacatccacacccgctcgccctgtgctcactcacggggtcggtgtgtgtatgtgtgttgggtgtgtgtgtgtcggtgtctctgtttgtgtgtctacgcctgtgtgtgtatgtgtcaccccgtaggagtgcgccggtctcggggaaatgcccggttccttcgtgcccacggtcaccgcgatcacaaccagccaggacctccagtggctcgtgcaacccaccctcatctcttccatggcccagtcccaggggcaaccactggcctcccagcccccggctgtcgacccctacgacatgccaggaaccagttactccacgccgggcatgagtggctacagcagtggcggagctagtggcagcggtgggccttccaccagcggaaccaccagtggacctgggcctgcccgccccgcccgagcccggcttaggagaccccgagaggagacggtgagtaaggcgcacccgaacttggggctgggagtgggaagcaagagaggtgggaactttctcactcatggggtgaggggccagcaaggctttagtgccacagaaaccttgcccacagtcagtgaggaccagaggggtcctcttctgcccttgggccttctggaagaagaggaggtttggaatggatggaggcagtcatcatgtccccaaacctcatggcctctgtctcccctattcagctgactccggaggaggaggagaagagaagggttcgccgggaacgaaacaaactggcagcagctaagtgtaggaatcgtcggagggagctgactgaccggctccaggcggtgagcatggtccctggggcagggtgagggtacactgacccaaggtggggggctccccatccactaccccttgccacctgcgcctttggcctggctcactgccacaggttcctctcaaggaactaggtacgggtgtggccagacagggtaaaacacccccccctcgccccgcacacacagcccctcatgtactccctgccctgcctgccctggcttatgacctttaagagaggtcctgtcctctctcctccctttcgggcttgggcaagccataacccatttttggactcagtttctccatctctttcaatccctcgtggaaccttcctggttcctcctagttttggcattccggaaagtctgggaaacaaaatgcttttctcctaggtcagtttcttgtcacatgcacccatgcttctcagaccatgggcaggtgggcaggtggcatctgccaccgctcccttcccttttttacaattcacctcggtctgggagctgtgcctgcagggtgacccgctgccctttgaggaaatcagggcagagggggtgggatcctctccttccctgtgccacctggcctcttccctgggagacggggagggaaggataacggagaagaggaggtggcattaaaatcatgtaacgattgctcattcgttcaacaaacctccgagtgcctcttgcaaccagagccccccatgtctaccgttctcagttcccactgaacatatgggaaaatgggctcctcggaggcaagacccttgtcccaagtcccatccatagcacaccggacccccatatcaggaggtctctcctctccatgtggagctgccttccagcccccggggcctccgcagcacgtctaagggagctgctttccgccgacccaccttctctggtcactcaccgcctttttctccttccctcctctccacgactgcgcctcaggagacagatcagttggaggaagaaaaggcagagctggagtcggagatcgctgagctccaaaaggagaaggagcgtctggagtttgtgctggtggcccacaaaccgggctgcaagattccctacgaagaggggccgggtcctggcccgctggcggaggtgagagatttgccggggtcagcatccactaaggaagatggtttcagctggctgctgccgcccccgccagcaccgcccctgcccttccagaccagccaagacgcagcccccaacctgacagcttctctctttacacacagtgaagttcaagtcctcggcgaccccttccctgttgttaacccttcgtacacttcctcgtttgtcctcacctgcccggaggtctccgcgttcgccggcacccaacgccccagcggcagtgaccagcccaccgaccccctgaactcgccctcccttcttgctctgtgaactctttagacacaaaacaagggagagagatttggaagaggaggaggatgagagagaggggaagagacaaagcgggtgtgtggccttcctgcctctcctgtctgactctctgcgaccactgtcatcggacaggaggacctccttgtgttttgtgccgcctcttgtttctgtggccggtgaggcagaacgtggtgactttgggggcaggggttggggagggaatggaccccctccccccagctgcctgttggccctttcacctcaacccaacctctggggatgggaggggagagggtggggggagggtgtctcgctttgggcggagggaaaggggtactggtggtgagctgcggggtggactggagtcttcccagagaggcccgacaaggaaacgccacagaccactgccccacgatgttgcccacgcccacccttcagggggtaaccaggccggttctccctgcttcccggaccttagcttatttatctgacatttccacgtggttagatcctcctctgaattgagcctccctttaagggaagttgatgcaccctatgataatctccttccctgccacccagacttagtctgaaatgtgaacctccctccctgctgtccagcctctccctcccagcaaaagtggctctgaatttctggtctcctaaggatcccccatcacaaccaccgtccaattcagcccccagtcctcctttctgattacagtgttaccccaagcctcccagcctggctcagccttccctcctggccttccttgctgggcctctctgattcaggcagcaggggggcgctgtgatgcccgtcctgctggagtgctttatactgtgaaccgggttggccggattgtggggtggggagtggggggcgggggagggaagcccagtgggacagaacccttgctgggggcggggagagaattgtgttccccacgcctcaaagcctttccttggtctcccctcctcccagccgcctccttcctcccctcaacagtgagttagttagactccaggggtgacagtatcaagagtgggggtgacagttatccacccgcgtggcctctgtcctcaggaccccgcacccccagccctggccttcttctctaaggcctgtccccctaccccggcctaggacgcccacttctccctcctcgtggcacccctacatcctttctagaaagagactaatgggaggttgccagggggcccagtatttttttccggagaagatttaaaggctgaggccttgtccccacccccaaccccccaaccccaatattttcggactggcaaactcaaaggggctggacttccacagtcccagcttcctagccccccaggcccccagccccagattcttggtttgggctccccatccctactctccccgtgcttcacctcatgggaattctaccgtgaggctgattggtattttttttttttaattttaacttcgggtgggccacgccgccttctgtgctgcatgggaaacattccacgtgccccgtccccgcgccccccgtccccgtggctatttatccctttcctggtttccgaaaggcacttatatctattatgtataaataaatatattatatatgggtgtgcgtgtgcgcgtgcgcgtgagtgtgtgtgagcgcttctgcag

SEQ ID NO: 2836 - DNA, 147 bp, Canis familiaris
atggctgacgtttatgcgaccaacgactccacggcgtctcaggacgtggccaaccgcttcgcccgcaaaggggcgctgaggcagaaaaacgtgcacgaggtgaaggaccacaaattcatcgcccgcatcttcaagcagcccaccttc

SEQ ID NO: 2837 - DNA, 445 bp, Canis familiaris
cctacgagaggaaggatggcaagtttgtcttcttcaaaggagacaagcactgggtgtttgatgaagcttctctggaacctggctaccccaagcacatcaaggagctgggccgaggactgcctactgacaaaatcgatgctgctctcttctggatgcccaatggaaagacctacttcttccggggaaacaagtattaccgtttcaacgaggaactcagggcagtggacagcgagtaccccaaaaacatcaaggtctgggaaggaatccctgagtctcccagagggtcattcatgggcagtgatgaagtcttcacttacttctacaaggggaacaaatactggaaattcaacaaccagaagctgaaggtagagccaggctaccccaagtcagccctgcgggactggatgggctgcccctcatcggggagccggccagatgaggggac

SEQ ID NO: 2838 - DNA, 2937 bp, Canis familiaris
atgagaggcgctcgcggcgcctgggattttctctgcgtcctgctcctgctgctgctgctcggcgtccagacaggctcttctcaaccatctgtgagtccaggggaaccgtctctcccatccatccatccagcaaaatcagagttaatagtcagtgtcggcgacgagcttaggctgtcctgcaccgacccaggatttgtcaagtggacttttgagaccctgggtcaactgaatgagaacacacacaacgaatggatcacagagaaggcagaggctggccacacgggcaattacacgtgcaccaacagagatggcttgagcaggtccatttatgtgtttgtcagagatcctgcaaagcttttcctcgttgaccttcccttgtatgggaaagaaggcaatgatacgctggtccgctgccctctgacggacccagaagtgaccaattactccctcagggggtgcgaggggaagcctcttcccaaggacttgacgttcgtcgctgatcccaaagctggcatcacgatcagaaacgtgaagcgcgagtatcatcggctctgcttgcactgctctgcggaccagaagggcaggacggtgctgtccaagaaattcaccctgaaagtgagggcagccatcagagctgtaccagttgtgtcagtatccaaaacaagctctctcctgaaggaaggggaagccttctctgtgatgtgctttataaaagatgtgtctagtttcgtggactcgatgtggataaaggaaaacagccagactaatgcacagacacagagtaatagctggcatcatggtgacttcaattttgaacgtcaggaaaagttgattatcagctcagcaagagttaatgattctggagtgttcatgtgttacgccaataatacttttggatcagcaaatgtcacaacaaccttggaagtagtagataaaggattcattaatatcttccccatgatgagtactacaatatttgtaaatgatggagagaatgtggatctgattgttgaatatgaggcatatcccaaaccggagcaccagcagtggatctatatgaacagaaccttcactgataaatgggaagattatcccaagtctgacaatgaaagtaatatcagatatgtgagtgaacttcatctaaccagattaaaagggaacgaaggaggcacttacacatttcaagtgtccaattccgatgtcaattcttcggtgacatttaatgtttatgtgaacacaaaaccagaaatcctgactcatgaaagtctcacgaatggcatgctccagtgtgtggttgcaggattcccagagcccgcagtagattggtatttctgtccaggagctgagcagagatgttctgtccctattgggccaatggatgtgcagatgcaaaactcgtctctgtcaccgtctggaaaactagtggttcagagttccatcgattatagtgccttcaagcacaatggcacagtcgagtgtagggcttacaacaatgtaggcaggagttctgccttttttaactttgcatttaaaggtaacagcaaagaacaaatccatccccacaccctgttcacacctttgctgattggctttgtgatcgcagctggaatgatgtgcattatcgtgatgattcttacctacaagtatctacagaaacccatgtatgaagtacagtggaaggttgttgaggagatcaatggaaacaattatgtttacatagacccaacacagcttccttacgatcacaaatgggagtttcccagaaacaggctgagctttgggaaaactttgggtgctggtgccttcgggaaagtggttgaagccactgcatatggcctgattaagtcggatgcggccatgactgttgccgttaagatgctcaaaccaagtgcccatttaaccgaacgagaagccctaatgtctgagctcaaagtcttgagttacctcggtaatcatatgaatattgtgaatcttcttggagcgtgcaccgttggagggcccaccttggtcattactgaatattgttgctatggtgatcttttgaattttttgcgaaggaaacgtgattcatttatttgctcaaagcaggaagatcacggagaagtggcactttataagaaccttctgcattcaaaggagtcttcctgcagtgacagtactaatgaatacatggacatgaaacccggcgattcttacgttgtgccaaccaaggcagacaaaaggagatctcgcagaataggctcatacatagaaagggatgtgactcctgccatcatggaagatgatgagttggctctagatctagaggacttgctgagcttttcttaccaggtggccaagggtatggcattcctggcctcgaagaattgtattcacagagacttggctgctagaaatatcctccttactcatggtcgaatcacaaagatttgtgattttggtctagccagagacatcaagaatgattctaattatgtggtcaaaggaaacgctcggctacctgtgaagtggatggcccctgagagcattttcaactgtgtgtacacatttgaaagtgatgtctggtcctatgggatttttctgtgggagctcttctctttaggaagcagcccctaccctgggatgccagtcgattcaaagttctacaagatgatcaaggaaggcttccggatgctcagccctgagcatgcacctgctgaaatgtatgacatcatgaagacgtgctgggatgctgatcccctgaaaaggccgacgtccaagcagatcgtgcagctaattgagaagcagatttcagatagcaccaatcatatttattccaacctcgcgaactgcagccccaacccagagcgccccgtggtggaccattccgtgcggatcaattccgtgggcagcagcgcgtcttccacccagcctctgctggtgcacgacgatgtctga

SEQ ID NO: 2839 - DNA, 276 bp, Canis familiaris
ggtctcacaccatccagtggacttcgggctgcgacgtggggccggacgggcgcctcctccgcgggtatgaccagttcgcctacgacggcgccgattacatcgccctgaacgaggacctgcgctcctacaccgcggcggacgcggcggcgcagatcacccggcgcaagtgggaagcggcaggtgtagcagagcacgataggaactacctggagacgacgtgcgtggagtggctgcggaggtacctggagatggggaaggagacgctgctgcgcgcag

SEQ ID NO: 2840 - DNA, 423 bp, Canis familiaris
ccaagtgacaagccagtagctcatgttgtaggtaagagctctgcagaggcaactgggtgggggatggggaagcacatcggctattgagggataggatttgggggctgaccccaggctgagggtaaacagaccttagagatggtatgagagggactcactggccttgaggcggatactcagaatctcatggccagatggtatgtgggaaggcagaggggacaggaaccggatgtggggggggggggggcaaaacccgagggccaggatttggaaattggaactgacaggggtcacactgactcacccctctccccttctcttcttccctccagcaaaccccgaagctgaggggcagctccagtggctgacccgacgtgccaatgccctcctggccaacggcgtggagctgacagacaaccaact

SEQ ID NO: 2841 - DNA, 548 bp, Canis familiaris
cccttcacagacacgcggtggttcggtgaggcctggtccctggggcctgttcagttctgtaccagcaaagccaagggcgggagggaagtacagggactggcactggcctgggcggggcctcttgctaggaaatctcttcaagtccttgggaagcaggtgctgctgtcctccacttacaaacaaggaggccaaagcttgatatgctgtgacgtgaggtagcccagctcctaaatggcaggactgggggccctctcgtgcactctttggtcagaaggggggcttccatgcttctagattccgtctcctgggcatctggaagaggagtctctctagttcatgtggtcccttctcctggcacctctgggtgttccactctgctcctgatccaccatcaaactagaggccttggtcctccttccagctgttttgtgactgagccctgggagtggcctcagcctcaggagggcaaagccacccttccctggcacaaggataaggaacaagggctctgatggtgtaaattacggggttccctgaggtccggcttc

SEQ ID NO: 2842 - DNA, 363 bp, Canis familiaris
agaagaggtgtagcagaatttgagagagagagagagagacatcagtccacagtgacacacacacatactttccttgttacactgatctctctctctctccctctgtgactctttgagaacagggactgtgtctgactcattcttgcagccccagggccttgaacagggcttgacacaaaggaatgctgaaggaatgcttctcgaatgcaaactccatgtcccggatgctgcctttggcttctggaagccttggagcccagcacgggatgctcggcactgagagctggcttcatgcttcactgggggacatggcagtggtataaggacaggtaccagggatcgtaccagccactatccctactc

SEQ ID NO: 2843 - DNA, 118 bp, Canis familiaris
cgcatcgagatcgcccacacgctctgcttgtccgagcgccaggtcaagatctggtttcagaaccggaggatgaagtggaagaaagatcacaaattgcccaacaccaagatgcgatctt

SEQ ID NO: 2844 - DNA, 722 bp, Canis familiaris
ggcactgtgggggtaccagagcactcataccgctcccgaaccaatttcaccagcaagtacaacatcaaggtcctctacttatccggcttcaccaccaaggacgaggggacatacacatgtgaactccggctctctggccagcctcccatcacctccagcaagaacgtcactgtgctcagaggtgaggcaagctctcaacaaggccaagtgagctgggagagggaggtgagggtggctagggacagcagcagtacccttgagccgggctggagaggagaggagccctaatacctctctccccctccccccagctcgctgcctggcaccctggggagccactgccttctgtgtgtatggaggggaaggctaaggggacagtgaggcaggaggagtggcgtagcagacacttctaccatgactgggcagatcacctgggctccccaatcctcctcctccccacctgggaaacaaggatgacactacctgcctcacccataatagttttcttttgaagatgcttggtaaagattgatgtatttgttcaagagcccgggaacctgccaatgggaaagatagttggttctactagagcaaacgggcggtggttccagctaagacatcacgaccgccagcctgcccgagggaatgtgccctaactcaaggcctgtgcctgtctgaatgctggcccctcttcatcccgaccctgccctcctcccaatctc

SEQ ID NO: 2845 - DNA, 438 bp, Canis familiaris
gaagaagatcagagagtaagttcttttctctttgggtgtgtgaatcacaaataagaatatttccccagacatctttattgaatgtttcccaacttgaggaaacaggtaaagtgtcaggaagcagaggactctattcccatatttccagtgaatgaaagcagattcttagacattttctaaagatcttgtaacactgaagaatgattacgctgagtcattacataacattaaaacataggttatttttgtgtgtttatctgaaggtgatagaacttgtacagaaatacggtccgaaacgttggtctgttattgccaagcacttaaaggggagaattggaaaacaatgtagggagaggtggcataaccacttgaatccagaagttaagaaaacctcctggacagaagaggaagacagaatcatttaccaggcacacaagc

SEQ ID NO: 2846 - DNA, 359 bp, Canis familiaris
caagaagtatgtacccggtgttatgcaaagctggggactggttgagacaaaactggggacagtatcaagaggccctgggaccccagcttttctaaggtttaagtggtatcttttggaaatctctgtatttagggctttcttgcttttgctgctcctgcatggcaggatgggtttgcaatgttcttgtccagaggctaggcctggttcttgatgccttccattcttccagggtggtagagtcaaagaagaaggctgtgcagaggctggaggagcagttaatgaagctcgaggttcaggccacagaccgagaagagaataaacaaattgctttgggaacctccaaactcaattatctggac

SEQ ID NO: 2847 - DNA, 196 bp, Canis familiaris
acgtagaaaatgacatgtactgtcttttcataggctgaccttgcagtcaccacctcctgaaaacggctcaaaacaaaaaatgatctaagggttgaaacaagataagatcaaattgatgtcatagtaattacatgaaggaccattcaatcactggatggaatttactgttgatccctggacttagatgcaggtggga

SEQ ID NO: 2848 - DNA, 370 bp, Canis familiaris
catggggtcaacaaacatgaggatgccgatgtgagttgtagccgctgggtcgctgtgagggctgttcctcaccattgccttctccatggcccctgaagcaatcgggggtgactcagagcagtccagcaaagtgcaggaaaccactgcctgatggggcttgcgcttgggcccgagagacggctgagagggtgagccttgcatggcctcgctctagaaggaagtgcaccaggatgggggctgggggttcactctgccatgcactcccctagatccgagggaagggctttgactggccgctgctggtgaaggacttcaacctgttgcgctggctgggcgccaatgccttccgtaccagccactatccctactc

SEQ ID NO: 2849 - DNA, 2830 bp, Canis familiaris
gtgctttgtcctagccacactctctgaggtggctgacaaaaagggacagcagaaccagcttcctcaagttatacataacatctacacatcccctgctttgacttaaatactgctggtaatgaacatcagctagatcttccagcgagtaaaaggaagttggaaaggggattgcctctggtatatcacccaaagaaaagctgagcaacttgccattattttggagacagcaagaaaggaacatctcagaactggggcctcatcctttgacgttttgttttgttttgttctaacacaagaaaaaaaaaaaagaggagttatccttcagcagcagaagccatggattacacagcgaagtggagaacaccaccactcaaacacccatatctcaaggtctctcagctcttggtgctagctagtctcttttacttctgttcaggcatcatccaggtgaacaagacagtgaaagaagtagcagtactgtcctgtgattacaacatttccactacagaactgatgaaagttcgaatctattggcaaaaggatgatgaagtggtgctggctgtcacatctggacaaacgaaagtgtggtccaagtatgagaatcgcacctttgctgacttcaccaataacctctccatcgtgattatggctctgcgcctgtcagacaatggcaaatacacctgtatcgttcaaaagactgaaaaaaggtcttacaaagtgaaacacatgacttcggtgatgttattggtcagagctgacttccctgtccctagtataactgaccttggaaatccatcccatgacatcaaaaggataatgtgttcaacctctggaggttttccaaagcctcacctctcctggtgggaaaatgaagaagaattgaatgctgccaacacaacagtttcccaagacccggacactgagttgtacactattagtagtgaactggatttcaatataacaagcaaccatagctttgtgtgtcttgtcaagtatggagacttaacagtatcacagatcttcaactggcaaaaatcagtcgagccacaccctcccaataaccagcaacagctctgggtcatcctgatcttagtagtaagtggtgtgattgctgtgatcactgccattacaggaggctgcctagcccacagatctgctgcaagatggagacagagaaataggaacaaagaggacatggacctggaaaagatgtcccctataaacataggatctgcccaagcatctgtatgagcagaacatctggaggtcccacctccatcttagattgacctcatctttgaatttcctcagatggccaggattatcccaccttgcacttcatgcatctgttctctaggagcctgttcatttcagtggccctgcagaaagtgaccagaggaatatggtggggacataagtagctctctggtagccttggtcaaagaattgttcaggcctgggaagagacattcggaaaatacttgtctcattaatgacaaggacatcaaggcctagggggtgacctgaatgataaaggtctgagctagaacccagatttcctgtctcgggtgctcttttccatcagtagtccggctctgtgctattaactggtgtgtacaggtgtacacaccagtcaaaatgcttctggaaaaagagtatgtccaatgtcaggtcaacttcagagacttcatctgatgcaacactagaaggttttgtgttgctgtcaaaagcaatctgatgctaatgtgtggtagtatgatggtatatataccaatatgagaatgatggaaaaattactggggtttactcagtatctcatctttcattgtgttctcctctgttgctttcccacttctccatcaggttctggagaaagtagatctatccaaaactaatatctgctgacatgtaagatgaatgacttatatacctcaaagcgatagtcacgttggagagggataggttggtttagagagtcacatcctactggttcatattggactgataatctccttaatggctttatgctagtttaaactcatttataaaacatgagaaagttctcatttaaaatgagataggttttaattgtatattactaaacagatattactaaacagtagctgtccttagaatttgattgaggtaatgaaaatagcattccatagggtttccctagattcctcaagttgctcttcctccttggtatttctgatccttctgacatcagcagagaattaaaaataaagaagtggccaactgccgttcctgtgtcacttactcatgattcctttctctgaagttgtcttccataactcagtggacctggaggtagacctgactggaggaatcagacattctcatttgaaaatttgacgttggacagcaagttggccaagtttctcacatgtagctgggtttacaatgtttaattttggcagctatcaagggaccagattatgctatatagtctaaggagcagaagtacagttttaaatggttgccctcagaacaaaatcactgaaagaaataaaagttggagactgacctgaactcaaagcaaagaaacaaaaaaaatgggaactgctgcatttaattaaaattaataatccttagacatgctcaaaaggagacctcaagaagtaatcacaaaataggacacatctaggagacagcttatttatacttaaaataaattatattacattacttattacatttgataaatgtgttggtactattttccaaagaattatacttttattgatatttttgtgatatgaataaaattatttttaaaaccaaaaaaaaaaaaaaaaaaaaaaaaaaa

SEQ ID NO: 2850 - DNA, 1897 bp, Canis familiaris
ccaagatgtatctcagatgcactatggaactgaataacattctctttgtgatgaccctcctgctctatggtgctgcttccatgaagagtcaagcatatttcaacaagactggagaactgccatgccattttacaaattctcaaaacataagcctggatgagttggtagtgttttggcaggaccaggataagctggttctgtacgagctatacagaggcaaagagaaccctcaaaatgttcatcgcaagtataagggccgcacaagctttgacaaagacaattggaccctgagactccataatattcagatcaaggacaagggcttgtatcaatgtttcgttcatcataaagggcccaaaggactcgttcccatgcaccagatgaattctgacctatcagtgcttgctaacttcagtcaacctgaaataatggtaacttctaatagaacagaaaattctggcatcataaatttgacctgctcatccatacaaggttacccagaacccaaggagatgtattttttggtaaaaaccgagaattcaagtactaagtatgatactgtcatgaagaaatctcaaaataatgtcacagaactctacaacgtttctatcagcttgtccttctcagtccctgaagcaagcaatgtgagcatcttctgtgtcctgcaacttgagtcaatgaagcttccctccctaccttataatatagatgcacatacgaaacccacccctgatggagaccacatcctctggattgcggctctgcttgtaatgttggtcattttgtgtgggatggtgttctttctaacactaaggaaaaggaagaagaagcagcctggcccctctcatgaatgtgaaaccaacaaagtggagagaaaagaaagtgagcagaccaaggaaagagtacggtaccatgaaacggaaagatctgatgaagcccagtgtgttaacatttcgaagacagcttcaggcgacaacagtactacacagttttaattaaagagtaaagtccatccattgtttatatgccttccctttcaaattttggcttgcctttttctcgtccattaatattattattgccactaataataagaggctttccagggctccctctaaatgagagagcctccctataatgccagttctgctccctacaccaggagcagattttaactgcttcttttcatctcagagcacacttgtgggccatgctcacctgactggctcctggctcaggaataatgtttaagactaacacctcctgtttcagattcagccttcttttcttaattttatacattgtgttttatgtagaactcccaattactggactaatggcttttatctatgcttaattctaagatagtgcctcattccatcttgtatatttgtgactacctctgcagtctgggtgggagttttgtatgttatggctttatagtgttgctttaatattttgagacataaagagatgtgtactataataatgtaattactatgccctgagaaaattctacccactgctgaggagctcttgctcctctgtgagggtcagtacgaaaatggtggcttggtgtgctgacaacaatgagcagaccaactcaaaatttggaagattaggaatgatggagatagaaccagctctgagtcctggagccacttctatctgggctgctgctaatctgaggaagatccacctgcctaacaagctatggataagccttagcagggagctctttgtgaagcaggaaagcactatgcactgtgaaccctacttctcttcttgaaaaaaatggctgagatgatggctcagggcaactgttcaagagccaactgagagatcacaatacttaaaagagaaaaaagaaaaaagaaaaaaaaaaaaaaaaaaaaaa

SEQ ID NO: 2851 - DNA, 1795 bp, Canis familiaris
gccaagatgtatctcagatgcactatggaactgaataacattctctttgtgatgaccctcctgctctatggtgctgcttccatgaagagtcaagcatatttcaacaagactggagaactgccatgccattttacaaattctcaaaacataagcctggatgagttggtagtgttttggcaggaccaggataagctggttctgtacgagctatacagaggcaaagagaaccctcaaaatgttcatcgcaagtataagggccgcacaagctttgacaaagacaattggaccctgagactccataatattcagatcaaggacaagggcttgtatcaatgtttcgttcatcataaagggcccaaaggactcgttcccatgcaccagatgaattctgacctatcagtgcttgctaacttcagtcaacctgaaataatggtaacttctaatagaacagaaaattctggcatcataaatttgacctgctcatccatacaaggttacccagaacccaaggagatgtattttttggtaaaaaccgagaattcaagtactaagtatgatactgtcatgaagaaatctcaaaataatgtcacagaactctacaacgtttctatcagcttgtccttctcagtccctgaagcaagcaatgtgagcatcttctgtgtcctgcaacttgagtcaatgaagcttccctccctaccttataatatagaaaccaacaaagtggagagaaaagaaagtgagcagaccaaggaaagagtacggtaccatgaaacggaaagatctgatgaagcccagtgtgttaacatttcgaagacagcttcaggcgacaacagtactacacagttttaattaaagagtaaagtccatccattgtttatatgccttccctttcaaattttggcttgcctttttctcgtccattaatattattattgccactaataataagaggctttccagggctccctctaaatgagagagcctccctataatgccagttctgctccctacaccaggagcagattttaactgcttcttttcatctcagagcacacttgtgggccatgctcacctgactggctcctggctcaggaataatgtttaagactaacacctcctgtttcagattcagccttcttttcttaattttatacattgtgttttatgtagaactcccaattactggactaatggcttttatctatgcttaattctaagatagtgcctcattccatcttgtatatttgtgactacctctgcagtctgggtgggagttttgtatgttatggctttatagtgttgctttaatattttgagacataaagagatgtgtactataataatgtaattactatgccctgagaaaattctacccactgctgaggagctcttgctcctctgtgagggtcagtacgaaaatggtggcttggtgtgctgacaacaatgagcagaccaactcaaaatttggaagattaggaatgatggagatagaaccagctctgagtcctggagccacttctatctgggctgctgctaatctgaggaagatccacctgcctaacaagctatggataagccttagcagggagctctttgtgaagcaggaaagcactatgcactgtgaaccctacttctcttcttgaaaaaaatggctgagatgatggctcagggcaactgttcaagagccaactgagagatcacaatacttaaaagagaaaaaagaaaaaagaaaaaaaaaaaaaaaaaaaaaaaaaaaaaaaaaaaaaaaaaaaaaaaaaaaaaaaaaaaaaaaaaa

SEQ ID NO: 2852 - DNA, 916 bp, Canis familiaris
ccaagagccagctgcttagcttaaccaactgagctacccagcagccccaagaaaagaatatttctaaagttatcttcttaggatctcttttatgccaacttaattcggcaaatgcaaaagttcaaaatttctttttcacttttgatatctgacattggatattagttgcccataaatatgtgtctgatcaaagagttccgcaagaaaaatgctagcagctgcctagtggagggctgagcagagaaagaagtgaaaaaaatactctctacagttgtgttaatataaaaggcatagaatacggtagctggaaacacgttagagctgacactgttcttttccctcagcagtcgagccacaccctcccaataaccagcaacagctctgggtcatcctgatcttagtagtaagtggtgtgattgctgtgatcactgccattacaggaggctgcctagcccacagtaagtactatcatgctatcattctgacctcaatttctggaagcccaaattctattggtatgtgtcagcacttctctgaggttttagtgtcttctttacttgtctcaccaagttctactcattcactggacaggcatttcaaggacacctactatgtgttcagttctctcctaggcaccagagtgactaacaatgactcaatgcccccaagacacattctactttagtccatttcccccccccccaactttatattttcttggaagcgctggggcttgcaaactaatttgaaaacacttctgatgcaaagtggtattctaatatttgattttcaagtgaaggaaagtcagaacgacaagatttgaggtcaagaatcattttcttgaaggaaggtaagatgcactgatgacactgagaaattacatggccacaagtgattttaccaattctcaattcct

SEQ ID NO: 2853 - DNA, 1578 bp, Canis familiaris
cccggttagatgttgaccttatttgggagttttgcttgagaatcggtaggttgggcttcgggtgatggtcagcggagcgggtttgaggcaaggtgctgggcggagaaatgagtattttagaagcaaaaatcacagcaccagagtctagataattttctgaacgcttacactttccaacttccctccgtacgcatcgccccccgtcccccccccccccccttttttctgtaagcgctgtaattttacgcttctgctatgttcagggcattgaactgcgatgatcacggtgcagcggtacaacaaaatgccttcggctttccgaggaagtcttccgaccgttggacggacaattcaacctcgaattatcggtgtgaaagcggaggaaacggtagagacagcggccgcaatcgcgtcagacgacccatgaacgcattcttggtgtggtctcgcgatcaaaggcgcaagatggctctagagaatccccaaatgcaaaactcagagatcagcaagcagctggggtaccagtggaaaatgcttacagaagccgaaaaatggccattcttcgaggaggcgcagagactacaggccatgcaccgagagaaatacccggactataaataccgacctcgtcggaaggccacggcacagaaaagtcacaaattgctacctgcagcctcctcctccatgctatgcaagcaggtgcacgtagatgagaggttctaccccttcacctacacggacagctgtagtagggctgcacacacacgaatggaggaccagttaagctgctcacaacccatgagcacagccaggtcgctgctgcaacaggagtaccacagcagctccgcaagcctccgtgacagtccggaaaccttggccgcacagatgtccgctgacgcttctttttactctaagtaacagctgggactttctgacgcttattttccttagtgatttctttactctggctaacgaaacgtcctattcatactgattttgctattatttcattcaaaatgagcgttggaaacttgcttaacatataaagaattacaaagtatgcaattgactcaggctgggtttatggctgcttaacttgaggagagagcacgttgatactttctgaaactcctggacttccaagaccacttgtttttcttttaaccaaacaactgttatatctaattatagttgctccatagactgagctttaaataagtgaaataataggtgcaagaatatactaataatctgataatcgtcctcataggtaccacaattttcactctttatttttaaaatacttcctttattcatgagagacacccagaaagaggcagagacgtaggcagcgggacaagcaggctccctgcgggggggagaccggtgggggactcgctgtcaggaacccctcccccccacccccccatggggccctgagccaaagtcccacgctctacccctgaagcccccgggtggaccttcactctttattttaaataaatattatttattattatattattatattatattacattatttaaataaatattataaataaatatttttatcaca

SEQ ID NO: 2854 - DNA, 1059 bp, Canis familiaris
ccgtctgcgaggctccgccgggccagcgtgggagagccgcgggcggcggccgccgcatcatgtcagccaaggacgagagggccagggagatcctgaagggcttcaaactaaattggatgaacctccgggatgctgagacaggaaagatactgtggcaaggaacagaagacttgtctgtccctggagtggagcatgaagcccgtgttcccaagaaaatcctcaagtgcaaggcagtgtctcgagaattgaacttctcttcagcagagcaaatggaaaaattccgcctggaacaaaaagtttacttcaaagggcaatgcctagaagaatggttcttcgagtttggctttgtgatccctaactccacaaacacctggcaatccctgatagaggcagcgcctgagtcccagatgatgcccgccagtgtgctaactgggaatgttatcatagagacaaaattttttgacgacgatcttctcgtaagcacatccagagtgagacttttctacgtttgagagaagaatgtgtgtgcatttcaagaatttgggttttgggggggaaaggaggaaactgtttacttttttcctccacacatttgattattgacacttcgacccctaattccctatacaaaacccacttgcggccaccaggggaccagttctgtatagataaccagatggctgtttccttccaagccgccatcttccactgaccagactaaactcccaaccccagaccaggccagagggtgagccttgactccttcccagggtgacacagggacaaacgcttaccacgagagccaatgctgttcctgcccccttcatgcctcctccttgggccctacaggcaacacatcttcctttggcccctggttttggaaaaaatcatattcctgacttctgtttagtttttttcctgcaatttctatttcatacattctcatacatttaccttgtaaaatagactgatattattattacataatgaattaaaacatatgaattaaaatattcctacagtcttctaaaaaaaaaaaaaaaaaaaaaaaaaaaaaaa

SEQ ID NO: 2855 - DNA, 959 bp, Canis familiaris
atggcgctcctgctgcgcttcgtcctcctgtgcggagtcgcggatttcaccagaagtttgagtatcactactcctgaacagatgattgaaaaggccaaaggggaaactgcttatttgccatgcaaatttacccttagtccagaagaccagggaccgctggacatcgagtggctgctgtcaccagctgataatcagaaggtggaccaagtgattattttatattctggagacaaaatttatgacgactactatcaagatctgaaaggacgagtacattttacaagcaatgatctcaaatctggtgatgcatccataaatgtaaccaatttacggttgtcagatattggcacataccagtgcaaagtgaaaaaagctcctggtgttggaaataagaagattcagctgacagttcttgttaagccttcaggtataagatgttacgttgatggatcagaagaaattggaaatgactttaaactaaaatgtgaaccaaaagaaggttcacttccattacaatatgaatggcaaaaattgtccaattcacagaaaacgcccccctcgtggtcaacagatatgacttcacctgttatatctataaaaaatgcctctactgagtactctgggacatacatctgtacagtaacaaaccgagtaggctctgatcagtgccagctacgcctgaatgttgttccaccttcaaatagagctggaacaatcgcaggagctgttgtaggaattttgcttgctctagtgctcattgggtttatcgtcttttgctgtcgtaaaaagcgcagagaagaaaaatatgaaaaggaagttcatcatgatatcagggaagatgtgccgcctctaaagagccgtacatccactgctagaagctacatcggcagcaatcattcatccctgggatccatgtctccttccaacatggaaggatattccaagactcagtataacca

SEQ ID NO: 2856 - DNA, 181 bp, Canis familiaris
cggccgggcgggtcactgggcgtccacccggaaggacagcagcttctcggaatgcatgttgttcagggtccgcaggtccggcagcttgagcagcagcttggtgaagcgggaagtctccgagggccggttcttcagcaccagaacccgaagagcccgcagcagcgtctcctggagctgctcc

SEQ ID NO: 2857 - DNA, 185 bp, Canis familiaris
cttacagcttgggacaaaccgaagcactgtccagaccaagaacaagactggaagctagtaggaatgtctgaagcctgcctacataggaagaaccatgcggagaggcgtagcacgttgaaaaatgaacagtcgtcaccacatctcattcaggccacttggactagctcgatatttccatctggacc

SEQ ID NO: 2858 - DNA, 135 bp, Canis familiaris
ctgtgccaattttcaacatatatatgccaattggccagggcagtgaatcagccttatacctgtagttaccctggaaacatgctgaaaagcaaggactctgacttggacatggccctgaaatcaatacagccaacc

SEQ ID NO: 2859 - DNA, 333 bp, Canis familiaris
aagcttattcagtggattaagaaatcattcaaaatatgacctgcagttaagaagctgggtttttttctagttatttattactttattacttttctgtcattctagtcgattgcatctgcagacatggatttcaaccagctggaggcattcttgactgctcaaaccaaaaagcaaggtgggatcacatctgaccaagctgctgtcatttccaaattttggaagaaccataagacaaaaattcgagagagcctcatgaaccagagccgttgggacagtgggcttcggggcctgagttggagaagtgacgggaaaatcacaagtcaaggcattcag

SEQ ID NO: 2860 - DNA, 4239 bp, Canis familiaris
ccgtctgcgaggctccgccgggccagcgtgggagagccgcgggcggcggccgccgcatcatgtcagccaaggacgagagggccagggagatcctgaagggcttcaaactaaattggatgaacctccgggatgctgagacaggaaagatactgtggcaaggaacagaagacttgtctgtccctggagtggagcatgaaggtattctccaaccctttgtttgccagggctctaattcgttagcatggtctaagcatcagggagctaaattaatgtggaccccaatggggggcaaacccctgtgggcacagcatgtgttgttgaaattcctagttcttttcctgccttttcttctctcacttcccaaaacctactttgtgctgaaattttagcattataatatacccagaaatataaactaagctctcaactttttttcctaacgcaaatttgcacttttatctctctgaaataaaagaaaatctaagaggttaaaaccaacagaacatagtaaagaaggtgcccattcagcccttcccttgatgagagcagctagggaaagcccatgaatgcactacatctggtgtttcttaaagatctttcaggcagatgcacttgaccaactggggacctctgcctttaattaaaaagtataattctggggcacctgagtgcctcagttgattgtgttccaggctcctgggatcaagcctggcatggggttgccttcttcttcctctactccctgctggaatctctctctctcactatctctgtagctatctctgtgactttcatttagaatggcttcaatatttctttttctttaccagcccgtgttcccaagaaaatcctcaagtgcaaggcagtgtctcgagaattgaacttctcttcagcagagcaaatggaaaaattccgcctggaacaaaaagtttacttcaaagggcaatgcctagaaggtattctgtggcctagtgcctggaagccacacttagggtgacaggggaaaaaggcaagacccagtaaactaaagcactgctttggtaacactcattttgcaactcagtttgtgctgtgattcctacaccctgcgagactgggggccccaccaaaaataaaacaaaactggcaatgacaaggggctttgagcccaacaaaagggtttctgacactggtgggcctggggttggtgcctgctttatacctggcgaattataacatggtcacaaggaagctgctgctgagggcctgcacagtgctctccatacagcctcctatggctctgactggcaagtccactgcagtgagtttccactgtgaactgtaagagtgcacatatgtgtcttagagctgaaactccaagtaagaggcctattctgttcttctgtttatcacatacatatagcctgcttctaagaaagcgttgcttatactatatccacccagtggcctagttctttagaccctagagcatagggaacgaatctctggtgtggtccaaaagacagcctgaagggcctttcatgatctttcttatgcctctgaccccggaaggttatgatggcttcatttgtggggggtggactaggagccctgagactgtctcaccagctttaccttcttccttcagaatggttcttcgagtttggctttgtgatccctaactccacaaacacctggcaatccctgatagaggcagcgcctgagtcccagatgatgcccgccagtgtgctaacgtgagtgagcagaccacagggattgtggagtatgtctagaagcaggagtccctggcagggctgttcagcaggcaatccaggctgaaaataagagtaaagagtatccaagggtattcgagcttacaggttactgacttctgtcatgtgaaaaggatagtgtgatcaagtggaaaaaataaactttagtttagacctttagactaaattcctgattaaccctgactagatgtgcaatcttgaacaatgtttacctctctggccttatttttctcctctctaaacatagaattaataattctatctcacagaggtatagtgaggataaaccaagatgatgtggaaggaaatgggcatgtactctctctgaaatctaggcttatttgcagactttcctaattaccaaacttctaatactctgtactttttcttgaatggcctttaatggcatctggcaaagttctaattttgttttagaggataatgtttggttatagtttttcagaaactaccttaccgttttaatatttatgcttcctgctcaaaaaatagtttgtcctttatacaaaaacactatcagtaatggcccaccttccattttctctagggaaagggtattagactttcaaaggttttagtactagtgtgtaataatgagttattcacacaggtaattgtgtaatgttgggttgtccctttaaacagatccttggtgaaagccatgctgaacataaaaagaatctatttactttataagtctttaatatatttttaattacaacagtaagtatttttatattctgttagccaattaaatcttgagtttcttatgtacctattttataattaattaccagcaaaaatgtctctgctggctattaattaccttgggaaagtcaagggagtatatagaagggcattttttatattttattaagccatcatttgactctcccttggccaggcccaatttctttcaggtctaaaaccagtaagtctatgataacatatttaggctatttaagtcatatatcatattttactttttggaacccaaaaatagtacctttgttgcccttaacttggttcaagagttgtttggtttcaaaacattgagataccccccaagaaaagtgaaattccattttatgcaatacaagtgagtcatttggggttgtttggctgtaagtcatagatatgactccagcagatacaacagagctaaagcagggagaggggggcaggagggatggtgcttagacccgggcagctccacagatacagatggcaggggtccatgcatggatgatttccttcaggagcagccataggaaggatcctgctttgaggagagggtttgattggcccaaattatatcctgtgcccacccttttgccagatgaaggagaggttacttgactgacacatggactggagatggggtgggtccccaaaagaagagcagagtgctattacccaaagtgatgagaataaatgcggaaagaccaacccacagctggcccccagaataggtattgtagggaaagatacccctcctgaggactgcaggtttccatgtatatcaaaagtcagtcatatgaaaaaaaaaaatgtttaagtcctatctataagcacccctgtgtgcagagcattctgctgagggttttacatatatcaaggattaagacatactcttctgttttctgaacttgaggagaaaacaatcacaaagttaaatgtcacattagacttctaaccccatttagacatagatttagtgtccgtccccaagccagggttctaagtgggtgcatgtccctgggcccagcaaagccaaattgaaaccactttgtgcaaatgaaatctgttgcctaacacactcactcttttgccctctcttcttacttatagtgggaatgttatcatagagacaaaattttttgacgacgatcttctcgtaagcacatccagagtgagacttttctacgtttgagagaagaatgtgtgtgcatttcaagaatttgggttttgggggggaaaggaggaaactgtttacttttttcctccacacatttgattattgacacttcgacccctaattccctatacaaaacccacttgcggccaccaggggaccagttctgtatagataaccagatggctgtttccttccaagccgccatcttccactgaccagactaaactcccaaccccagaccaggccagagggtgagccttgactccttcccagggtgacacagggacaaacgcttaccacgagagccaatgctgttcctgcccccttcatgcctcctccttgggccctacaggcaacacatcttcctttggcccctggttttggaaaaaatcatattcctgacttctgtttagtttttttcctgcaatttctatttcatacattctcatacatttaccttgtaaaatagactgatattattattacataatgaattaaaacatatgaattaaaatattcctacagtcttct

SEQ ID NO: 2861 - DNA, 5483 bp, Canis familiaris
cgcgtggtgtggcggtggaacatagggttcatgtgatctgtcacatgacagtggatctccagaaaggcaaaatgagactccgaacctggtgagaaatgagggggctccgggaggaggggattatgtttgttggagggtggggatacactggcagtccggctcccgctgaaacccgcctgctgcctctgcagcctcctagggctccttgctctctgtgtcgccagcaaatgcagttacagcccggagccagaccagcagcggacgtgagttgactcagcacagactgcctgccccctcccctgggccctgtcctgtgcccactgccttggctccagcctccttcaccccattaccagctcctggtaccccctccgtagtcttattcccaggttcccaggctcagtctccaagcattcacctcctgtgagtcatatctgcctctgggatcctaccccaggtctcagcccctgatcctgaaccttccatgactgatacttcccatcccccccactaacaaaggccatgttcctgacctctgaccctgcaggctgcccccaggctgggtgtccctgggccgtgtagattctgaggaagagctgagtctcacctttgccctgagacagcagaacgtggaaagattgtccaagctggtacaggctgtgtcggatcctggctctcctcattatggtgcctatcgggagaaggactggggctgggatgtgggatgcagtggagggactcagggctgggctgagtgtgggatggtgcacataatgtcagggtcatgctcttcgtgcctggggaggcggtgatatagggaagttgaatagcagtggttagtggctctcgttgaagtttctgaatttaaaaaaaagtgaactagaaataaactgtccaaaattcactcaaattcttttccccaaaacttttcacctgtgtttatcaggctagtaacctgaaagttaggagcccaggctgtgtgatcaaatctgaattcaaattctgactctactccttatcagctaccagacagatggagaagtggtagtgtcgagtacagacaggtgctcatcagctcaattccttcgccaccctcagtccaacccacgcccatgtcctcctccagtcagactctagggctgtcatttccagttctgaagctctgaaagagcctttggagtcatccactctttaccattgcttgttaccgccaactcatttgtttattcttgcatccagactgctgcccaggcccctcaggggtccgtagtctcatctgctccacctcactccccaccctgctccctactctactccaaaacagtgttctgctccagtggtcatgctggacagtgtccctccctggcacgaagcccttcatggttggggggggggggagtctcagattcaccccggagctgtgtgcatggcactgtgcaggaaagtagtgactcactgtcatgtttaggttaaaatcaacaagtatgaaaactggaactgaattagatgtcatcttataattggttctgaaagttttgaaaacttttactggaaataaacttaatatggaaaattttaatttcttaacttcatgtgttgtttatgatcatgaaaatacacgctttgatgcagtatttgcaatgttctggcctttaaggtaaatcggtatttctggccatggcattccaagtctcctcagccttttctttccctggcccccaaatgtagcttgcacctgcatagcctgcctttttgctagaaagttcccacatatcccttgagaccctgttccaggttctctgggaagtcccaatgtctcctggttgaggtccaaaatgggcaacctggaaaagcaagatcctctactgaatccctgcaggaaaatacctgaccctagaggatgtggctgaactggtccggccatcaccactgaccttccgcacagtccaaaaatggctctcagcagctggagcccggaactgccactcggtgaccacacaagactttctgacttgctggctgagtgtccggtgagagggagtgattgccccatggagggtaccaatcatcccatcagggagacaagtcactccaatgggagatggctgatagctggcgggagcttgtgggtgagagctaacacacggggagacgaggatgagcagtgatgctcaggtggcctcagctctggtctgtactgctctctgacctctgttctctgatctctgacctccagacaggcagaactgctcctctctggggctgagtttcatcgctatgtggggggacctacagagatccatgttataaggtccctacgtccataccagctcccgaaggccttggcccctcatgtggactttggtaacaaccaatggggttggtgagggttgaagcagacagagtcaggggctggaaaaatttaggtgccgtggggggcttggggtgggatcaatggtaaagtgggaattggagtctaaaagatctcctcctcaagcctgacctctccccacagtgggcgggctgcaccgcttcccccccacatcatccctgaggcaacgccctgagccacaagtgtcagggactgttggcctgcacctgggggtgaccccatctgtgatccgtcagcgatacaacttgacagcacaagatgtgggctctggcacaaccaacaacagccaagcctgtgcccaggtgagccaggcagagaattccagggtcctaacaccctacatgtctccccaggttgggcttgctctctgactcctcccctgggttctcaccctctaactggaacaacatcccctgccctgactttggggctgcatcctctgacccatgatatctgctctgattccttttgtagttcctggagcagtatttccatgcatcagacctggctgaattcatgcgcctctttggtgggaactttgcacaccaggcatcggtagcccgtgtagttggacagcagggccggggccgggctgggatcgaggccagtctagatgtggagtacctgatgagtgccggtgccaacatctccacctgggtctacagtagccctggtactgccaagggggactggtgggtggggaaaggggtggtggtgagtggtgatcactgctcccgcaagggaatcccatgagctagacagagatcctgacaacgtccttgtgttccttcccttcccctaaatccaggccggcatgagtcacaggagcccttcctgcagtggctcctgctgctcagtaatgagtcagccctgccacatgtgcacactgtgagctatggagatgacgaggactccctcagcagcgcctacatccagcgggtcaacactgagttcatgaaggcagccgctcggggtctgaccctgctctttgcctcaggtgacctcccactctaaacttagacccttctggaatccaggcattttgaccccacagagacccttgtgatctctgacttataatctgaactcaccagggacccggatctgacctctaaactctgagctcttgcagcaatgactgtttaatttcttctctgacatccgaacccacatctcaagctctgacccattgatctgaatgctaaacttgctctttctctcaggtgacagtggggctgggtgttggtctgtctctagaagacaccagttccgtcccagcttccctgcctccaggtaagcactccagcccacctcttacctgtgaccgccaatctttcatctatgacctcatgatctggaacctttgccttgaccccaccaggtgctcctgtagcttaagacctcagtttaactggctctggttgctgcattcccctcttcttcctataaatctaggtcccatggcctctaagtagaacaaagttcccagtattcctcttccttagttcccaggcatcagagtagaagatttggtgaatgttctatagagaaaagtatgcactgtcacctcaggcccacgccttgagggcttcgtcttccccatgtacctgcttccccacagagtccagcccctctagcaagacctagcccatactcccccatctccacatattttggaggtccccttgagaccaccacaatctgaatgctgttttctgctctcagcccctatgtcaccacggtgggaggcacatccttccagaatccatttcgagtcacaactgagattgttgactatatcagtggtggcggcttcagcaatgtgttcccacagccttcataccaggtatgtatgtgtatttatggggatagatggtaggagggatcctcagttaagcagaccatactcactcaacaacacctttcaggaggaagctgtggtccagttcctgagctccagtccccacctaccaccatctagttatttcaatgccagtggccgtgcctatccagacgtggctgcactctccgatggctactgggtggtcagtaacagcgtgcccattccatgggtgtctggcacctcggtaagaatcagcctggctccaaaccccctctcaggaactatcctcatcctctactaagaccttgcacccagaacccctgcctcctctaagacctctgatccttttaaacatccgtccctgtccctgaggggagcctgagtggctcagcggtttagcgccaccttcggcccaggttgtgatcctagaggcctgggatcccacgtcgggctccctgcatgaagcctgcttctccctctgcctgtctctgcctctctctctctctcactctgygtctttcatgaataaataaaatcttaaaaaaaaatccatcccccaaatccaatcactttgaacccctaacctctacttacactcttactcttgcaggcttctactccagtgtttggtgggatcctatccctgataaatgaacatagactcctcagtggcctccctcctcttggctttctcaacccaaggctctaccagcagcgtggggcaggactctttgatgtgagtatggaagggaaaggaaggtgtggacattttcatgaatatggggagtgcaaacatgaacttgaggggagttctgatggggtcctgaaatatgaatacagggggctttagtctgtaagtactggtacagacaggcagccccagatctgatgcccaccttctccctaggtaacccgtggctgccatgaatcctgtctgaatgaagaggtgcagggtcaggggttctgctctggccctggctgggatcctgtgacaggctggggaacacccaacttcccagctctgctgaaggcactaatcaaaccttgaccctttcctgcctggacactgaactggtcccctgccccatagctggtggcttggtctctaattctgcactgtcggaaggcctgttgaaccctcaaccatagactgcaacagacagcttatttccctaaccctgaaatgctgtgagctgacttgactcctaaccctaccctgctccatcatgctcaggtcttcctactccg

SEQ ID NO: 2862 - DNA, 1728 bp, Canis familiaris
tgcaagtctgatcaagcttgctggccgaggaacaaagtggaccccatggccaaccacagattcagttccgtgtccgaggaggagaaaccctgctgcggcatttccagaaaggcccagatctgtctctgcgtcctttttattctcctgattgtggtgggcatcgcggtgccggtcgggatcctgatgtggcgccagccgcccaagcacaaggagtggaaggggccgggcaccactgcccatttttacgagatcctcctgggacggtgctacacgtacactcaagtcgtgcgacctgagcagcgacatacagactgccaaaagatagggaaggcattcacaagtgcatttctttcgaaggacccttgtggcagtacagaacaggactatcggccactaatggaactgacaactcaaattgtaccttgtgacaagaccgtcttttggagcaaatcaagtgagctggcgcatgactacacgcgggtccagcgggatatgtacaccctggaggatacactgttgggttacatggcggatggcctcaagtggtgtggagacacaagctcttctgaaatgaactatcaatcttgtccacactggagggaagactgcagcaataactctgtttccgtattctggaacacagtgtccaaaaggtttgcagaagatgcctgtggtgtggtccatgtggtgctcaatgggtccatcagtaacacctttgatgagaaaagcacttttggacgtgtggaagtctttaatttgcatccagagaaggttcatactctaaaggcctgggtgatgcataacatcgaaagtgtccccagtgactcatgctcaagttcctccgtgaataatctgaaacagattctcaagacaaggaatattatatttatctgccagaataactacaggcctgtcaggcttcttcagtgtgtgaaaaatcctgagcactcatcctgcaaatataacttatgagccattcagcgtggtcgttttggatctttgagccttgtatacatcagcatgcgtgactcaggagacatgctgctgggaagctgaggacttggggggcatcttctgtcatcctgccaacactagagctggaagtacttcccccaaagatttaaaataacttatattattgacatagttttttattttgatttcctaatactcatgaaaaaattatggtataaaattagaatgaagattttatattaagttatttcattttcattttcataggtgcttttatgttgtttatatgttggtagcatcctttctgtggagagtgaccataccaaacctctcttattggtgtagattattaagagaaacgttttgaagaaattttacatttctgaatgagtgaccttgtctcaggatatatttttgtaccctttctacaaaaatagttaaatataaatgccatggttatgggtcatgttgggaaaagaattcttgtaggatataaactacccatgtactttacctccccctcttccaatagtcctatgaggttggtactgttatctcctgtttgttagatgagaaatggaagttcagagaggatatgtaatttgcctaaagtcatttatttagttcaaggtagaggctggatttcaactcagctctatctgactccaaagtatatgtgctctctttctaggcctgtaataccagctgacatgctttatgttctcttccaataaatgcatgttggattatatt

SEQ ID NO: 2863 - DNA, 536 bp, Canis familiaris
  misc_feature (204)..(204): n comprises a, c, g, or t, or includes no nucleotide
tgtccatctctgacgggctgttcctcagcctggggctggtgagcgttgtggaaaatgtgctggtggtggccgccattgccaagaaccgcaacctgcactcgcccatgtattacttcatcggttgcctggctgtgtccgacctgctggtgagcgtgagcaatgtgctggagacggccgtcatgctgctggtggcggcaggcgccntggctgctcaggctgctgtggtgcagcagctggacgacatcattgacgtgctcatctgtggttccatggtatccagcctctgcttcctgggcgccattgccgtggaccgctacctctccatcttctacgcgctgcgataccacagcatccgtcacactccagcgggcgttggcggggcccatctcccgctatcctgggttggctagcgtcctcctcccagcacgctccttccattgccctactacaatccacacggcccgtcccctgctttgtccttgttccacttccctttgttacccatgcctgggttgctccaatggcaattgctgtat

SEQ ID NO: 2864 - DNA, 3551 bp, Canis familiaris
aaacaggtccttggatatcacctacatgctgagatgccaggccaggccctgctcctggcctgcatttgcacccccctccccacggtagggttctgaggaagggtcttgggaggaatgcatttgcttcttaccctgcctgctcccaggaggggatttaacaggacaaaagaacttggtcctcgggaatacgagctcttggccccagtccctggaccctccaactgagcaccttccctcatccggcttgtgatcctcccctggcgaagggggctctggtgaccaagcaatgattggatgggcccccaggggcgaggagcaggtcactcctccaaggctgggggagaaggaggtggtgtgggattgcaagctgggaaagtaggtagctgagagcaaagggagaggactacatctctgagacagggtacaggagacagggcagtcagtgggaagtttgaggcccaaagagggaaacacggtccaggtgaggcagagagaatgcaatgatactcaagcgaaggaaggagagactagaaaaaaattagaaaccaggacacaaagtgagaaaaaccaagatatatatctatatctacgtccacacagagagccagaggtataatcagagggaggagtgagatccacaggtgtaaaggggaactgcaggaccagagaaatagtgacccagacttggacacgagagagtggctggtctgtggcgtttgttagccatggaagcggaagggaggagtgagcggggtaagcaaaagaaggggcgactttgcggcagcctctggcctgacagctaccccgctgctgggaccctgacctccacagtaggtgagtgaatcgccggggtggtcctgaggaggcagcaggtattgaggggggctggagttgcacatgtaagtcctgtggggcagtggttccccaggaagaaagagaggaggggaaataaacaacagaattcgagaattctgaaaccttgggcatcttagaaagcaaagcacggggagggacagctcccttgctttgcagccaggacccgaggccttggcatggacgggctgcccaacagcatccgagggggctgtggtggggtggaggtaaagctgaaatctggcttctcattccggagctcatatttggccctgtgcaccacctcctctgaggtgggcaagctggagaggccagggctttggatcccaggagagcagaggtgcccccaagcagactgcgggcgctgggtgggagccacacccttggtccccatggggatgggtgctcaactccagacatctccttttctcagtcagtgccttccaggtgtttccattcggcccgtattctctcctgccctgctggctctcagactaattagtgtgggggcttagtgagcctgtggggagcagaggcgaggctttcccacgagctcaggttcctgcagcctggtggccgggccagcgctgggagaggggagaagatgaaatgtatgtgaggggcgggtatgtctgagcggaagagggaggaatgtttcatcttcccaggtggagggcaggggaggattgcagccatagagagaaggtgtaagttgaatgggagcctcaagagccaggaagaagtaaggggacgggggtgatcttcagagacctggttggtactgttagtgggtcaaagcaaaagaagccccatgggttgaggcccaggtgggtagtacataggttcttagaggtgtaaggctcacaatgggtgcccactgacaggaatgttccatgggtgtgggcatatagtgaagcgaggcggacagcagaagtgcccagagtgtgaagtgagtctgtacaatgtatgtgtgagcagagagcccaggttaggatgcttcgaggtgaagaagggtttctggtcgggacagagggtatgagcagcagggttgggggggggagcaccgaggagaatgttgggggtcccagcatacatagtccaggagggacaactggatccactttgtgcaatgtctgccctcccctccatcctcagatgtgagccctcagcccagcaagaacctttctggtgtaggcgtgcggagaccaaggctttccccccaaggaggacagaggggtcgcctgcactcccggcgccgccaccgcaccaccttcaacccagggcagttggaacagctggagacagcctttgggaggaatcagtaccccgacatttgggcccgagagggccttgcccgggacacaggcctcagcgaggccagaatccaggtgatgccccaggatccccctcttcttctgggaagaaatacccattttctgcatgggaactactggggtgtaaattctcatagacatcgtaaccctaacctaaacattccccagcacacagcctccaccaacggtcaacacaacatcgggaatgtcacttgaatttaacctgagctctaacctgatctaacttgaatttcagcatcctgccctcaaccttaacggtgatatgaattccgacagaaatgcagtcttaattgtttgcatgcatgtgtaaccttgtccctaaccatggccttgaaacccagctagcctgatgctccttccatcaggacccatagatgtagttaatctgaggtataaaccctaccctaaatccagctccatctatacccattaaaatcccctacagtcttaatctctaataaccctaggggacatttcatatcctctgtggagggaaaatgccattttgtcacaattatctctttcttactggaatttgacatttcttactcccgagatttgtagtagggtaaattttgacacaagttgggggtgatggtgagggtaggaggccagctcagctatacttttgggaagaactttccttcctctgcagtgcaagagagacttatgctcagcatctgaaccttctgtcatcagaggggagggggccctgatgtgacatggccacctgttggagagagaggctctgatgtggctcttatcccccttcctcaggtctggttccagaaccgcagagctaagcagaggaagcaagaacggtcgctgctccagccactggcccatctgtctcctgccaccttctctggtttcttgcctgagtcccctgcatgcccctactcctacccaacaccacctccacccatgacctgcttccctcacccctacaaccatgcccttccttctcagccctccaccggtggttcctttgctcgaccccaccagtctgaagactggtaccccaccttgcacccaccccccactggtcatctgccctgtcccccacccccaaccatgcttcccctcagccttgagccaccaaagtcctggaactaaggtctggacaggagctgctgagataatctccgagcctgtggccctggtgaaatgcagagaaatctgggtggcatctcttatttctaagggtcaagtagaaatttgtggaggagcagctcagagattaggaatttaaaaatggaaaatcatgctgaagaaggccccctgaggtgattagttgagggaatgtagggaggtgaacctact

SEQ ID NO: 2865 - DNA, 284 bp, Canis familiaris
ttggcagattgtctgtagccgattggaggagtacaatagccgtcaggctttatgtgatggaactccagagggaccattactgcgcaatcccggaaaccatgacaaagccaggaccccaaggctcccctcctctgctgatgtggaattttgcctaagtctgacacaatatgaatcggattccatggataaagctgccaatttcagctttaggaatacactggaaggatttgctagtccacttactgggatagcagatgcctctcaaagcagcatgcacaatgcct

SEQ ID NO: 2866 - DNA, 600 bp, Canis familiaris
atgaactttctgctctcctgggtgcattggagccttgccttgctgctctacctccaccatgccaagtggtcccaggctgcgcctatggcaggaggagagcacaaaccccacgaagtggtgaagttcatggacgtctaccagcgcagctactgccgtcccattgagaccctggtggacatcttccaggagtaccctgacgagatcgagtacatcttcaagccatcctgcgtgcccctgatgcggtgtgggggctgctgtaatgatgagggcctagagtgcgtgcccactgaggagttcaacatcaccatgcagattatgcggatcaaacctcatcaaggccagcacataggggagatgagtttcctgcagcatagcaaatgtgaatgcagaccaaagaaagatagagcaaggcaagaaaatccctgtgggccttgctcagagcggagaaagcatttgtttgtacaagatccgcagacgtgtaaatgttcctgcaaaaacacagactcgcgttgcaaggcgaggcagcttgagttaaacgaacgtacttgcagatgtgacaagcccaggcggtgagccgggctggaagaaggaggctccctc

SEQ ID NO: 2867 - DNA, 654 bp, Canis familiaris
atgaactttctgctctcctgggtgcattggagccttgccttgctgctctacctccaccatgccaagtggtcccaggctgcgcctatggcaggaggagagcacaaaccccacgaagtggtgaagttcatggacgtctaccagcgcagctactgccgtcccattgagaccctggtggacatcttccaggagtaccctgacgagatcgagtacatcttcaagccatcctgcgtgcccctgatgcggtgtgggggctgctgtaatgatgagggcctagagtgcgtgcccactgaggagttcaacatcaccatgcagattatgcggatcaaacctcatcaaggccagcacataggggagatgagtttcctgcagcatagcaaatgtgaatgcagaccaaagaaagatagagcaaggcaagaaaaaaaatcagttcgaggaaaggggaaggggcaaaaacgaaagcgcaagaaatcccgtccctgtgggccttgctcagagcggagaaagcatttgtttgtacaagatccgcagacgtgtaaatgttcctgcaaaaacacagactcgcgttgcaaggcgaggcagcttgagttaaacgaacgtacttgcagatgtgacaagcccaggcggtgagccgggctggaagaaggaggctccctc

SEQ ID NO: 2868 - DNA, 1946 bp, Canis familiaris
gtcctacaggtatggatctctggcagctgctgttgaccttggcagtggcaggctcaggcagtgctttttctgggagtgaagccacaccaactatccttggcagcgcatcccagagtctacaaagagttaatccaggcctagggacaaattcttctgagaagcctaagttcaccaagtgccgttcacctgaactagagactttttcatgccactggacagatggggttcgtcatggtctaaagaacgcaggatccgtacagctgttctatattagaaggagcacgcaagaatggactcaagagtggaaagaatgccccgattatgtctctgccggagaaaacagctgttactttaattcatcttatacctccatttggataccctactgtatcaagctaaccagcaatggtggtacggtggatcaaaagtgtttctctgttgaggaaatagtgcaaccagacccacccatcggcctcaactggactttactgaacatcagtttaacgggaatccatgcagatatccaagtgagatgggaaccaccacccaatgcggatgttcagaagggatggatagtcctcaagtatgaactacaatacaaagaagtgaatgagtcccagtggaaaatgatggaccctgtatcggcaacatcagttccagtttactcgttgagactggataaagaatatgaagtgcgtgtgagatctagacaacgaaactctgaaaaatatggcgagttcagtgaggcgctctatgtaacacttcctcaaatgagtccatttgcatgtgaagaagacttccagtttccatggttcttaattattatctttggaatatttgggctaacgatgatattatttttattcatattttctaaacaacaaaggattaagatgctgattcttcccccggttccagttccaaagattaaaggaattgatccagatctcctcaaggaaggaaaattagaagaggtgaatacaatcttagccattcatgacaactataaacctgaattctacaacgatgactcttgggttgaattcattgagctggatattgatgacctagatgaaaagaccgaaggatcagacacagacagacttctaagcaacgaccatgagaaatcacttaacatccttggggcaaaggatgatgactctggacgtaccagctgttatgaacctgacattctggagactgattttaatgccagtgatgtgtgtgatggtacttcagaggttgctcagccacagaggttaaaaggggaagtagatctcttgtgccttgaccagaagaatcaaaataactcaccttctactgatactacccctaccactcagcagcccagcattatcctggcgaaggaaaacaaaccaagaccacttctaattagtggaactgagtcaactcagcaagctgcccatactcagctaagtaacccgagttcactggcaaacattgacttttatgcccaggtaagcgacattactctagcggggagtgtagtcctttccccaggccaaaagaataaggcagggatatctccatgtgacatgcctccagaagtggcctcactctgccaagctaacttcatcatggacaatgcctacttctgtgaggcagatgccaaaaagtgcatcactgtggcccctcacgtcgaggctgaatcacgtgtagagccaagctttaaccaggaagacatttacatcaccacagaaagccttaccactaccgctggccagtctgggacaactgagagggctgtgagttctgagatgcctgtcccagactatacctccattcacatcatccagtctccgcggggccttgtgctcaatgcaactgccttgcccttgcctgacaaagagtttctctcatcatgtggctacgtgagcacagaccaactgaacaaaatcatgccgtagcctttctttggtttccca

SEQ ID NO: 2869 - DNA, 1215 bp, Canis familiaris
atggccgacaaggtcctgaaggacaagagaaggctgtttgtccggtcagtagacatggggaccatcaatggtttgctggatgaactctttgagaaaagagtgctgaaccacgaggagatggagcgagtgcggtgtgcacactctacagttatggatcaggcccgagttctgattgactccgtccttcggaaagggccaaatgcatgccagatttttatttctaatatttgcaatgaggacattcacctggcacagacgctggggctctcctcaggttcaccatctggaaatgatcataccaaactagactctcaagtagaagttccttctttaccagccttcgtggaaaacatgcctgggccaaccattcctgactcagaagaatctacagatactctcaagctttgtcctcctgaaacatttgtgaaaatgtataaagagaaggctgaagagatctacccaataaaggagagaaaggatcgtactcgtctggctctcatcatatgcaatatagagtttgatcatctttctaccagggatggagctgaacttgacattgcaggaatggagagtctgctggagggcctgggctacagtgtagttgtgaaacggaaactcactgctaagggtatggaatcagtgctacgggaatttgctgcccgcccagagcataagtcctcagacagcacattcttggtgttaatgtctcacggcatcctgaatggaatctgtgggaccgcacacagcgtggaaaatccagatgtactagcttatgacaccatcttccagattttcaacaaccgtcactgcctcaacctcaaggacaaaccgaaggtcatcatcatccaggcctgcagaggtgaaaatcctggggaactgtgggtcagcgactctccaaaagcctcgacagacagctggacacatcaacctctgatgctccagagtgatgccattcacaaggtccacgtggagaaggacttcattgctttctgctcctcaaccccacataatgtgtcctggagacatatcacgaagggatctcttttcattgcacaactcatcacatgcttccaaaaatattcctggtgctgtcacctagaaggagtattccggaaggtacaacaatcatttgaaaaaccagatgtgaaagcccagatgccgaccattgaacgagtatccatgacaagatatttctatctcttcccaggacattaa

SEQ ID NO: 2870 - DNA, 4902 bp, Canis familiaris
ttcgaggctacgcttctgcagatgttcgggctgcgccgccgcccgcagcctagcaagagcgccgtcatcccagattacatgcgggatctttaccggctccagtctggggaggaggaggaggaagagcagatccacagcatcggtctggagtaccctgagcgccccgccagtagggccaacaccgtgaggagcttccaccacgaaggtcagtccctgcggagagtccaggtgggggagggccagtagggctggttagtggggggcagtgttagccctgggggagaagagttcaggttacatcaaagccccaaatcctggcggccccgggcaaacagagctgcttacctccaagagctgaggctgaatttattttttggagacagaggggaagggttccggggaaggagaatgacaccactcagacgtgggctagcccttgtggtgtgtttttgctatatcaaagccttttctgccaggttttctgcccgttttttttcaaagcacctactgaatttaatattacagctgtgtgtttgtcaggtttattcaataggggccttgtaatccgatctgaatgtttcctagcggatgtttcttttccaaagtaaatctgagttattaatccaccagcatcattactgtgttggaatttattttcccctctgtaacatgatcaacaaggcatgctctgtgtttccaagatcgctggggaaatgtttagtaacatactcgaaagtggaagaagagggagagggtggtagtgtgcatgtttcctcctgcctctgctctgttgcccacccccccccccttttctttataaccacttgtaaagaaaactgtacacaaagccaagagagctttaaaaggggagtctgatggtggtggagtaaggagttgacacatggaaattattagacatataaaggaggttgggagatactttctgtctttggtgcttgccgaatgctggctaagctttgctggtttgctagctgcccgtttatctgctccttcaaatgaaaagataggctcatttccccaaataggcttccactaaggaaacagaatttactgctcatcacccaaagcttcttgactgaagctgtttcttgactttctgatcccagaagttaatgtgccttttttttttttcttttccctttttcttttcctcctccactgcgcctagaacatttggagaacatcccagggaccagcgaaaactctgcttttcgtttcctctttaacctcagcagcatcccagagaacgaggtgatctcctctgcagagcttcgactcttccgggagcaggtgaaccaggaccctgactgggagcagggcttccaccgaataaacatttatgaggttatgaagcccccggcagaagtggtgcctgggcacctcatcacaagactactggacacaagactggtccaccacaatgtgacacggtgggaaacttttgatgtgagccctgcggtccttcgctggacccgggagaagcagccaaactacgggctggccattgaggtgactcacctccatcagacacggacccaccagggccagcacgtcaggattagccgatcgttacctcaagggagtggggattgggcccagctccggcccctcctggtcacttttggccacgatggccgcggacatgccttgacccgacgccagagggccaagcgtagccccaagcatcatgcacagcgggcccgcaagaagaataagaactgccggcgccactcgctctatgtggacttcagcgacgtcggctggaatgactggattgtggccccgccaggctaccaggccttctactgccacggggattgcccctttccactggccgaccacctcaactcaaccaaccacgccattgtgcagaccctggtcaactctgtcaactccagcatccccaaagcctgttgtgtccccaccgaactgagtgccatctccatgctgtacctggatgagtatgacaaggtggtactgaaaaattatcaggagatggtagtagagggatgtgggtgtcgctgagatcaggcagcccttggggacacacatgttcccatccactcacccacacactacacagactgcttccttatagctggacttttatctttaaaaaaaaaaaaaaaaaaaaaaggaaaaaaaacctaaacattcaccttgaccttatttatgactttacgtgcaaatgttttgaccatattgatcatatattttgacaaaatatatttataactacatattaaaagaaaaaataaaatgagtcattattttaaaggtaaactgtccttttctctttaatccttttttcttctgcccccatctcttttgaatgagattttttttttttttttttttcctgttgaggaggggctggggacaggatggaagtcagagggtggtaactggaggtggttaagttggaggggcaggaagtaaactgatggtagagagatggtaattgccaggatgaattgttttccatttctatttaatgttaacaaggacgcagcatcctctcccatctggatgacacatgccttggagaaacagtgggatgaaaggagtaggccagattaaagactcagttttgggctccttgtacatcttctgtttttgctcacctgttagaggtgcgtcccagctgagcctgatggatagagtctcagctctagggaataattcccactgcagcttttatgataccctaaagggtctccagttattacaggcatgaaagttgtattttcaaaccaaaactaatttgcacatgtgtgtttgtgtgtatgtgtgttttaacaaggtgggtggggggtgatgtgggttttattcagcagaacaaataacacaccttacatttgaaaaaagtttggtggccaccgttttaatataccaagtggtggaattcgccagtgtttcttgactatcccctgtctcctattccccacatgaaggccttcatggagttcaaaatcctaacagattgggctgggtggcaatgggatcagacactgaaggatcaaaatttctaagtaggcacgtgaaagcattgtcctctatgcagtatcaagtcaaatgccagctccccgttccctagagctgggcagaaagtaatagatagccagtggatgtgctgttctgagccagggtttcttcaaggagaaagctcaaattttggccaaaaaggaaaatgctaatgagtggaatatccctcagttaggggctgccagtaaggcagagaactggctttcaggaatgatgtggatctagaagctaagggcaccagaggaagagacctttgcttttccttactggccactagcaactaaattaagccttggaatgttagcctgcttaggttcatttcttaccatgtgtactttttcctacctaggcatgggtaggcttgaggcaaatgctgcgtctttgtaaagtctgtgtgaggtgggctgataggagcgcatttctccttccatgaaggtgtaggtaccagtgggagtgtgtgtgtgtgtgtgtgcacccccttcattcatgtacacagctcttccatgtgctcttgggggtggggtaggtgaagcaggattcatttttgtttttaattactgaagtcctacaatcctccaaaaggagcagcttagtggaaaccaataaaaatagaagtggagcggttgccaaagccccagctccccggagagcgcaggtggagagaggagatcagagccccaggcaaaggcagcaagactccacagttcctccaaaactccctgcaaagagggataattctccccctctcctagccccccaggtcgctgcccctttgattaatggtatggaggtcgaataaatcatttaggggaagcccattacgggttcccctcaggcggcctcgatttgttttgcccgatttccagcaactttctgaaatgtccgtgttattggaaaggaagccgcagatctctagccacttggacaaattatcagagggcgaatcctaagcctggtgaccgccgggctcgggtcactttctagcaaccaccctgccccccctcctccccccccccccccagacaccaccacccgctccttctactggcttattttcaggaatggataatgttgtttatttgttcagccaaatatttggtctggggaatttaccgtgaaattctgtgaattgcatatacctagttaacaaaatagtcctaatgccacaaatgctagcatgaaaaacaacgagctatggccagctttaactctttaaattctgcgtgacggcgcagtccgaggcccggggagacaaggactcgagcgtgtgtggaggtgatcgaatttaggtttcagcgttgtatttgggactgacgctcgaccgagggctttagggctgcagctgcaggcggaggcgcggcaccgctgtgggatcaagcccccccccccgcccccgcccccatctctctttccctctagagaaatgttccctgtgcttaaagagagccggggagggagaatcgctctcgaggagttcagcaaagtcgtgaccacatcagaggagctgccgggtcgatgcccgccccgcctttacactggaaccggcttctaggagcttcagaaactcgagggcaagggcgcgggggcccgggacgcagcacgcactcccggccttcgccgcacagcgcgcccagacccgccgggacccgcgggctcggcgttcggtccggaccgcgctccgttccgcagcccgttgccgccgggcagcgccgccccgagagggccccgagagggccccgggcggccgcggcgcgggcggaccccggcatcgcccgcctcggaccgacgtcaggccccgggcgccaggccccgccccgcgcctgctcccggagctcc

SEQ ID NO: 2871 - DNA, 262 bp, Canis familiaris
ccatattctgaggaatctccgaaaaccgggggagactggatataagattcccaggggaggcttatttgaatatgtaacagcagccaactactttggggaggtggttgagtggtgtggctacggcctggccagctggtccattcaaggcggggcttccgctctcttcaccttctgcattttactcacccgggcacagcagcatcaccggtggtaccttgagaaatttgaagagtatccaaagttcagaaaaattataattcca

SEQ ID NO: 2872 - DNA, 428 bp, Canis familiaris
atttatttactcattgctcactagagggaggccttttccagttgtgttcgtggtcagaggatttatcttctgcgcaggaaatggacttctccaaggctactatctgatttactgcgctgagtaccctgctgagtggtacatggacgtacggtttagcctgggtatcttcttatttattttgggaatgggaatcaacattcatagtgactatatattgcgccagctcaggaagcctggagaagtcagctataggattccacaaggtggcttgtttacgtatgtttctggagccaatttcctcggtgagatcattgaatggatcggctatgccctggctacttggtccctcccagcacttgcatttgcgtttttctcactttgcttcctggggctgcgagcttttcaccaccataggttctacctcaaga

SEQ ID NO: 2873 - DNA, 11282 bp, Canis familiaris
ctttctctgaaattccacacttggctggagtggcttccctcttaccaacaccctaggagggttgctgcggagcatgtcctcaccttttctttggagtttgattattttgttgacatttgctgaatcaaatggcgaagctggaggatttgaactgcagagacaaaaaagaagtatcgacttccaacagcctcgaatggctacagagaggggaaatttagtgtttcttgttgggtctgctcaaaacattgaatttagaactggatccctgggaaaaataaaattaaatgaggaagaccttggtgaatgcttacatcagatccagaaaaacaaagaggatattacagatttaaaaaggagtgcagtcaatgtgcctcaaaatatttcaagtcaaatccatcagcttaattctaagcttgtggatctggagagaaaatttcaaagcttacagcagacagttgacaaaaaggtttgcagtagcaacccctgccaaaatgggggaacctgcctcaatctccatgattcctttttctgtatctgtccctcacaatggaagggccctctgtgctcagttgatgtgaatgaatgtcagatttactcaggaacacccttgggctgccagaatggagccacatgtgaaaatacagcagggagttacagttgtctctgctcacctgagacacacggcccccagtgtgcatcaaaatatgatgactgtgaagggggctccaaggcactgtgtgtccatggcatctgtgaggatctagtccgagtgaaggctgatgagcccaagtacaactgcatctgcgatgctgggtggacatccccactgaatagctcagcctgcgtgctggacatagacgagtgcaatctccagcatgcaccatgttcacctcttgtgcagtgcttcaacacacaaggttctttctactgtggggcctgcccgacaggctggcaaggaaatggatatagttgccaagatatcgatgaatgcaagataaataatggcggttgttctgtggtcccacctgtcatgtgtgtgaatacacttgggtcttaccactgtcaagcgtgtccaccagggtaccaaggcgatggcagagtgtgcacagtcatcgatatctgctcagtcaataatggaggctgccacccagaagcatcatgctcctcagttctaggttcgttacctctctgcacttgtctcccggggtatactggaaatggttatgggccaaatggatgcgcgcaactcagtgatacttgcctgagccacccctgtttaaatggccagtgcattgaaacagtctctggttatctttgtaagtgtgaatcaggttgggctggcatcaactgtacagaaaatataaatgagtgtctcagcaacccctgctttaatggaggaacttgtgttgatggtgttaatgcctttagttgtgaatgcacacgtttctggactggattcctctgtcagattccccaacaagtttgtggagggtccctctcggggatggatggaagcttcagctatatgagccctgatgttggttatgtccatgatgtcaactgcttctgggttatccgaactgaagatagaaaggtattgcgtatcactttcacctttttccagttagaatcagtgaacaattgtccacatgagtttcttcagattcatgatggagattcctctgcagcacttcaacttggaagattctgtggctctgttctccctcatgaacttctcagtagtaacaatgctctctattttcatctctattctgaacatttcagaagtgggagaggttttacaataagatgggaaacacagcaaccagagtgtggaggtatactgatgggtacttatggttctattaagtctccgggatatcctggaaactatcctccaggaagagattgtgtctggcaagttgtaaccagtcctgacctcttgataacgtttacttttgggaccttgagtctggagcaccatgatgactgcagcaaagattatcttgagattcgagatggtcctttgtatcaggaccccagtcttgggaaattctgcaccactctctctgtcccaccactccagactacaggtccctttgccagagttcatttccattctgacaaccagattaatgaccaaggcttccacatcacctacttaacatcgccttcggatttgcattgtggaggaaactacacagacccagagggtcttctgtcttctgacttgtctggacctttcactcacaacagacaatgcatctatattataaagcagcccctgggagaacaaatacaggtcaacttcacccatgtggagctggaaggccagagcagctgttctcagagtcacattgaggtccgagatgataaaatcttacttggaaaagtatgtgacaatgaaaccctccctcacattaaatccattaggaaccatatatggatcaggcttaaaatagatgcttctcttgtaagagctagtttcagagctgtttatcaagttgcttgtggaggagaattaactggagaaggagtcattcgctcacctttttatcctaacgtgtatccaggagaaagaatctgcaggtggaccattcaccagccccaaagccaagtagttattctcaacttcactgcctttggaattgaaagttctgcccactgtgatacagattatattgagattggtagcagttccattttgggttctcctgaaaataaaaaatattgtggcacagacatacctttgtttataacatctgtgtacaattttctttatgtcatattcgtgaaaagttcttctactgaaaatcatggtttcatggctaaattcagtgctgcagatttggcatgtggagaaattcttacagagtcaacaggaatcattcaaagtcctggccatccaaatatctaccctcatgggatcaactgtacctggcatatattagtccaacctggccacctaattcatttgatattcaggaaatttcatctggagtttcattacaattgcacaaatgactatttggaagtttatgacactggttctaatacatatcttgggagatattgtgggaaatcaatcccaccctctcttaccagtagtaccaactcattaaagcttatatttgtggctgactctgacctcgcttatgaaggctttttaataaactatgaagcaactgatgcatcatcagcatgcatggaagactacacagaaaactctgggacttttacttctccaaacttccccaataattaccccaacaattggaaatgcatttataggatcacagtggaaaccagccaacagattgcattacacttcacaaatttcgctttggaggaggccattggtggacagtgtgtagcagattttgtggaaatcagagatggaggctatgaaacttcaccacccctgggaacatactgtggctcaattccacctccaagaatcatctctcacagtaacaaactatggttacaatttacaagtgacttcctgggctcagggcctggattctcagcttactgggatggatcattaacaggttgtgggggtaatatcacgactcccactggcgtgttcacgtctcccagctatccaatgccctattaccacagctctgaatgctattggttgttgaaagccagccacggcagcccatttgaactggaatttgaagactttcacttggagcatcacccaaactgcactttagattatctggctgtatatgatggcccaagtaccagctctcacttgctaagtcagctttgtgggaatgaaaaaccgcctgtcatccgttctactggagacagcatgtttttaaaattcaggacagatgaagatcaacaaggaggtggcttcttagccaaataccaacagacatgtaggaatgtagtaattgtaaaccgaaactatggcatcctagagagtatacattatccaaatccctattctgacaatcagcgttgcaactggaccatccaggcaacaactggcaacacggtgaattacacatttttggcatttgaattggaaaatcacataaactgctctacagactatttagagctctatgacggccccaggcggatgggacgctactgtggagcagatatgccgcctacagggagcaccacaggctccaagcttcaagtgctcttctacactgatggtgttggtcaccaggagaaaggatttcaaatgcagtggttcattcatggttgtggtggtgaattgtctgggaccacaggatccttcagcagccctggataccctaacacatatccacccaacaaggagtgtatctggtacattaccacagcccctggaagtagcattcagctcaccatccatgactttgatgtagagtatcatgcaagatgcaactttgacgtcctggaggtttatggaggtcctgatttccactctccccgaataacccagttgtgctcccaaagatcatctgagaatcccatgcaagtctccagcaccggaaatgagctagccatccgctttaagaccgacagctctataaacgggagaggcttcaatgcctcatggcaggcagtccccggaggttgtggcgggattttccaggctcccaatggagagattcattctccaaattaccccagtccatataggggtaacactgactgctcctgggtcattcgggtagaaagaaatcaccgtattctcttgaacttcactgattttgaccttgaacctcaggactcctgtattacggcatatgatggtttaagctccacaactacccgccttgccagtgtgtgtggaagacagcagttgactaaccccatcacctcttcaggaaacagcctctttttgcgatttcaatctggtccttccagacagggcaggggcttccgagctcagttcaaccaagtctgcggaggccacatcctcaccaactcatttgatactatatcctctccattgttccctgccaagtatccaaacaatcagaactgcagctgggtaattcaagctcaacctccatttaaccacattaccctctcctttgaccactttggacttgaaagcagcacaacgtgtacacaggactttttagaaattttggatggcgattatgatgatgctcccctccgaggccgctactgtgggcactccatgccgcatcccatcacttccttcagcagcgctctgacgctgaggttcgtctctgattctagagtgaattctgatggtttccatgctacctatgctgcatcatcatcagcttgtggtggaaccttccacatggctgaaggcatcttcaacagccctggctacccggaagtttatccctctaatgtggaatgtgtctggaacattgtcagttcccctggcaaccggctccagctgtcttttataactttccagttggaggattctcaggactgtagcagagattttgtggaggtccgtgaaggaaacgccactggtcacttggtggggcgatactgtggaaacgttctccctctcaattattcatccattgttgggcatatcctgtggatcagatttgtctcagatggctcaggcagtggcacaggcttccaagccacatttactaaaatatttggcaatgataatattgtgggaactcatgggaaaattgcctctcccttatggcctgggcgttacccccacaactccaattaccaatggatagtaaatgtgaatgcaactcaagttatccatggtagaatcttggagatagacattgaaggagcacagagctgctattatgacaaattaagggtttatgatggccttggcattcattcccgcctaattggaacttattgtggtacccagaccacatcctttagctcctctagaaattctttgacatttcagttttcctctgactcttcaatcacagggaaaggattccttctggagtggtttgcagtgaatgcctctggtggacctttacctactattgctacaggtgcttgtggtggcttcctgaggacaggagatgcgccagtctttctcttctccccaggctggccagaaagctacagtaacagcgctgactgtacgtggcttattcaggccccagattctactgtggaactcaacatcctttccctggacattgaagcgcagagaacatgtgactatgacaaacttgtgatcagagacggagatagcaacctggccccacagctagcagttctctgtggcagagagatccctggacccatccggtctactggagagtacatgttcatccggttcacctcagacttcagcataaccggagccggttttaatgcatcctttcacaaaagttgtggtggatatttacatgcagacagagggattatcacatctcctcagtatccagagacctacagtcccaacctcaactgctcttggcacgtcctggttcagagtgggctgaccattgctgtgcattttgaacagcccttccagattccaagtggagattcttcttgcagccagggagattacttggtgctgaaaaatggacctgatatctattctccacccttgggaccctatggaagaaatggtcatttttgtggcagtcgtccttcatccactctgttcacctcagataaccaaatgtttgttcagtttatttctgatggtagtaatggagggcaaggatttaagatcaaatatgaggcaaagagtttagcctgtgggggcaatatctacatccatgatgtgaattctgcgggatatgtgacctcccctggccaccctaacaattacccccagcatgctgattgtaattggctcatagctgctcctcctggaaagctcataagggtgcagtttgaagatcaattcaatattgaagaaacacccaactgtgtatccaattaccttgagttgcgtgatggggttgattcaaatgcaccattacttgccaagctctgtgggagatctttgcccagcagtcagttgtcctcaggagaggtgatgtatttgaggttccgatctgacaacagctccactcaggttgggttcaagatcaagtatgcaatagcccagtgtgggggaagagtgacagggcaaagtggtatcattgaaagcagcggatatccaacacttccatatagagacaactcattctgtgagtggcatctcaagggtccctcaggacactatctcaccatccattttgaagattttcaccttcagaattcctctggctgtgaaaaagactttgtggagatctgggaaaatcatacctctggaaatttattgggcagatactgtggaaacaccattcctgacagcatagacacttctagcaatgtcgctttggtcaggtttgtcacagatggttctgttactgcctcaggatttagactacggtttgaatccagcatggaagcatgtggtggggagctacagggccctactggaacgtttacttctcccaactacccaaacccaaatcctcatggccgggtctgtgagtggaggatcatggtgcaggaaggaaggaggatcactctgacttttaacaacctaaggctggaagctcatccatcctgctacagtgagcatgtgacaatattcaatggcattagaaataactcacctcagctagagaaactgtgtggtagtgtgaacgcaagcagtgagatcaaatcttcaggaaatacaatgaaagtcgtgtttttcactgatggatccaggccatttggaggcttcagtgctacctacacatccagtgaagatgcagtatgtggtgggtcccttacgcatttccctgaaggaaactttacttctcctggttataatggagtcagtaattactcaagaaacttaaactgtgaatggactctcagcaatccaaatcagggaaattcatctatttacattcattttgaagatttttacctggaaagtcaccaagactgtcagtttgatgtccttgagttccgagtgggtaatgctgatgggcctctgatgtggagactgtgtggaccttcaaaacctatagtgccactggttataccttatcctgaggtatggatacactttgtcaccaatgaacatgtagaacatgttggattccatgcagagtattcttttacagactgtggtggaatacagttgggtgagagtggagtgattgcaagccccaactatccagcctcttatgacagcttgacccattgttcctggttgttggaagcaccacaaggctttaccatcactctgacatttagtgactttgatattgaagaccatgcaacctgtgcttgggattctgtctctgtcaggaatggaggttctcctggatcacccatcataggacaatactgtgggacttcaaaccccaggacaatccagtctggttccaaccagctagtggtgatttttaactcggaccattctgtgcaaaatggtggattttatgctacatggaacacacagactttaggttgtgggggaatacttcattcagataatggtacaatcagatcccctcactggcctcagaattttcctgagaatagcagatgttcctggacagtcattactcacgaaagtaagcagttggagatcagctttgacaacaacttccgaatccccagtggtgatggacagtgtcagaacagctttgtgaaggtgtgggcagggactgaggaagtcgccgagtccctgttagccacgggttgtgggaacgtggctcctggctccatcctcacaccaagaaacgtgttcatagccgtgttccagtctcaggaaaccccagcccagggcttctctgcatcctttgtgagccgatgtggaggtaatttcacgaacccttcaggttacatcctttctccaaactacccaaggcaatatgacaacaacatgaattgcacctacatcatagaggctgatcctctgtccgtggtcctcttgacttttgagtctttccatttggaagctcgctcagctataactggaagctgtgccaatgatggtgttcacattatcaggggttccaacttgtcttctacgccttttgccaccgtgtgtggcaatgagatcctgtcacctgtcaccatcctaggtccagtgctgctcaacttctactcaaatgcacacacaacagacctcggattcaaatttaactacaagataacctcctgtggcggtgtatttaacgtctccactggggtcataaagagccctgcctattcatattcggactaccccaacaacatatactgtctgtacaccattgttggtagagacgacagagtggttcagctcaagtttagtgattttgatgtggttccttccaccttctgctcccaagactacctggcaatttatgatggttcaaacatcagtgatccccttcttggtaaattctgtggttccaaccttccaccaaatattaagagcagcaatcatagtatgcttctggtatttaagaccgattcatttcagacggcaagaggttggaaaataactttccagcagacactggggcctcagcaaggatgtggtggttatctgacaggttcagataatacctttgcctctcctgattctgactccaatggaagatatgacaagaatttaaactgtgtatggttcataattgcaccagtaaacaaactaattaaacttaccttcaatacatttgctctggaggcacaaagtgctatgcaaagatgcatatatgattatgtaaagttatatgatggggatagtgaaaatgccaacttggctggaacattctgcggttccactgtacctgctccctttatctcttctggcaacttcctgacggttcaatttgtcagtgatgtaactttagaaagggaaggatttaatgctacatacactactgtggacatgccttgtggtggaacatataatgcaacttggaccccacagagtatttcatcacccaattcatcaaacccagaggtcccactgtccatgtgtatgtggttccttgaagctcctccacatcagcaggtcaagatcacagtgtgggccctggagctgcactcacaagactgtgaccagaattacttagagtttcgggactcacctgagagtaatggaagtccaggacctcagatctgtggcagaaatgcttcggctacaccaacgttctattcttctaggagtacggcaattgtcatcttcaagtccgaagtcctcaacagaaactctagagtgggttttacctatcagattgcaggttgtaacagagaatataataaggcttttggcaatctgaagagtcccggatggccagataattatgacaataacttggattgcactgttattctcacagccccacagaaccatactatttctctattttttcattcatttggcattgaggactcaagtgaatgcacacatgacttcttggaggtaagaaatggaagtgatagcagttcaccattatttggcacatactgtggaactctgttgccagatcctatcttctctcgaaacaacaaactatacctacggtttaagaccgatagcgcaacttccaatcgtgggtatgaaattgtctggacctcatcaccctctggctgtggtggaaccctttatggagacagtggttccttcaccagccccggctatcccggcacttaccccaacaacactgactgtgaatgggccatcatcgctcctgctggaagacctgtcaccgtcaccttttactttatcagcatcgatgatcccggagactgtgtccagaactatctcatactctacgatggaccggatgctaattctccatcctttggaccatactgtggggcagacaccaacatagctccctttgtggcctcttcacatcgtgtcttcataaaatttcacgcagagtatgcagtgtatccatcagcaatccgattaacctgggacagctgagtagcgctgtgtgtcggctctgggcagggaccatcagacatgccatcccgctacggctttctgcctgggtcactgggaaggatctgaactttttttttttcaccaaagtatgtgtggaatcaatgtctgcacatttaaaaaaaatatagaatgtagcttctttactcctggctatgagtgtcatccttctaacacttggagctgaaatttgtaaaaactccttaatgagttggaaatgattatgacacatgtgatgtaaattgtcaaaaatggtgaaataggagtatgattttccctgtgaatgtcaagtgaggggtaataaacataattgaatggtaaaaaaaaa

SEQ ID NO: 2874 - DNA, 5138 bp, Canis familiaris
cccaggagctcacagcacagcctgttccttccaactgatccgccggcctgacccccacccaggcgcacctcaatcttatcctccaccgctgttcaaaggagtccagccaacacaaatctacgtatttgtttgtctgcctgtctgcctctcccagtctctgcctattccagtctcttaacttcctttctttcttgcaatttctcttagtctctgtggtctcaaatccatgaggatcagacccctgtagacccaaatacccagctcatagcctttctctgccacccccccaccacaatggcttagaactacaaaccccagcttgcacaactgcctgagggacctgaagagtgctggtatgcaccatctgcactctgggaattgtagtttccctatctccacactttaatacagccccaacatcttcccagtgggcagtccctgctcagcattgactgctgggtctatctgcagacctaccacccccagggaagcatgcgtcactggatgacagggtgggtgtggaggccctggatggcagcttcctgctcttttgtgtccccccacttgagtcatggggggcgggggttccaggaaattggggctgggaggggaagggtgccctaatgccagattcaaggacaaagggtcactgcatccttgctggacctgtatccccgagagctccaaagcactcaatggtgggggtacaaaaacacttagctgtcgacagagtggtgaaggagagcacctggagggacccacgaggtacctgtggtcactaggagtctgggaatcattccctgacactgacacagtgttcacctcccacccaacccctcagagcaaggccaacaagggcaccgtggaagtcccccactctggccagacatcacacaaggacctctctgactcggattgtccacgtggccaactccatccctaccccctacctccaaccgccccccccacacacacacacccctgctctggtgctcctcctccaggcctccaagaacacctggcttcccacttatcagtcttagtcctcagagcggaacccaggcgtccggccccccaccctctgggcgggcatggagccgaggctttagagcctcccagcctgccttgttcctgtcccattgtgtatgggataggggcggggcaagggccagcactagagaaccccctcccaccaccctctccccttcctaaggaaaaggcctgggctccactcactcagagtgccagaactggggcgaggctgaacatgggcaacttgaagagtgtgggccaggagcccgggcccccttgtggcctggggctgggcctgggcctggggctatgtggcaagcagggccctgcctccccgacctcagagcccagccgggcaccggccctggcgcccccaccctcgcccccaccagcaccagaccacagcagccccccactcacccggcctccagatgggcccaagttccctcgtgtgaagaactgggaggtggggagcatcacctatgacaccttgagtgcccagtcacagcaggatgggccctgcaccccaagacgctgtctaggctctctggtatttccacggaaactacagagccggccctcccagaaccctgcaccccctgagcagctgctgagccaggccagggacttcatcagccagtactacagctccatcaagaggagtggctcccaggcccatgagcagaggcttcaagaggtggaagctgaggtagcagccacaggcacctatcagcttcgggaaagcgagctggtgttcggggccaagcaggcctggcgaaacgctcctcgctgcgtgggccggatccagtgggggaagctgcaggtgtttgatgcccgggattgcagctctgcccaggagatgttcacctacatctgcaaccacatcaagtatgccaccaaccggggcaacctccgctcggccatcacagtgttcccccagcgtgcctcaggccgcggagactttcgaatttggaacagccagctggtgcgctatgcgggctacaggcagcaggatggctctgtgcggggggacccagccaacgtggagatcactgagctctgcatccagcatggctggactccaggaaacggccgctttgatgtgctgcccctactgctccaggccccagatgaacccccagaactctttgctctgccccccgagctggttctcgaggtgcccctggagcaccccacgctggagtggtttgcggccctgggcctgcgctggtatgccctcccagcggtgagcaacatgctgctggaaattggggggctggagttccctgcggcccccttcagcggctggtacatgagcactgagattggcacgcggaacctgtgtgaccctcatcgatacaacatcctggaggatgtggctgtctgcatggacttggataccaggaccacctcatccctgtggaaagacaaggcagcagtggaaatcaacttggctgtgctgcacagttaccagctggccaaagtgaccatcgtggaccaccatgctgccacagcctccttcatgaagcacctggagaacgagcagaaggccagagggggttgccctgctgactgggcctggatcgtgccccccatctctggcagcctcacccctgttttccatcaggagatggtcaactatgtcctgtccccggccttccgctatcagacagacccgtggaaggggagtgcatccaagggtgccggcgtcaccaggaagaaaacctttaaggaagtggccaatgcggtgaagatctctgcctcactcatgggcactgtgatggcaaagcgagtgaaggcgacaatcctctatggctccgagactggccgggcccagagctatgcacagcagctggggagactcttccggaaggctttcgacccccgggtcctgtgcatggatgagtatgacgtggtgtcccttgagcatgagacgctggtgttggtggtgaccagcacatttgggaatggtgatcccccagagaatggagagagttttgcggcagccctgatggagatgtccgggtcctacaacagctcccctcggccagaacagcacaagagttacaaaatccgcttcaacagtgtctcctgctcagacccactggtgtcctcctggaggcggaagagaaaagagtccagaaacacagacagtgctggggcactgggtaccctcaggttctgtgtgttcgggctgggctcccgggcatacccccacttttgtgcctttgctcgtgcggtggacacacggctggaagagctgggtggggagcggctgctgcagctgggccaaggagatgagctgtgtggccaggaggaggccttcggaggctgggcccaggccgccttccaggcctcctgggagaccttctgcgtgggagaggatgccaaggctgccgcccgggacatattcagccccaaacggacctggaaacgccagaggtaccggctgagcgcccaggctgagggcctccagctgctgccaggactgatccatgtgcacaggaggaagatggtccaggctactgtcctcgcagtggaaaacctgcaaagcagcaagtccacccgggccacaatcctggtgcgcctggacactggaagccaggaggcgctgcagtaccagccaggggaccacattggcatctgcccgcccaaccggcctggccttgtggaggcgctgctgagccgggtggaggatccaccgccaccaggagagccagtggcagtggagcagctggagaagggcagccccggtggcccaccccccagctgggttcgggaccctcgcctgcccccatgcacactgcgccaggctctcaccttcttcctggacatcacttccccgcccagccctcaactccttcgactgctcagcaccctggctgaagagtccagtgaacagcaggagctagagagcctcagccaggacccccggcgctacgaggaatggaagtggttccgctgccccacactgctggaggtactggaacagttcccatcggtggcactgcccgcccccctgctcctcacccagctgcccctgctccagccccggtactactcggtcagctcagcacccagtgcccacccaggagagatccacctcacagtagctgtgctggcatacaggacacaggatggactgggcccccttcattatggagtctgctccacatggctaagccaacttaaggccggagatcctgtaccctgcttcatcaggggggctccctccttccggctgccacctgatcccagtctgccttgcatcttagtgggtcctggtacgggtattgccccctttcggggtttctggcaggggcggctgcacgacatttacagcaaagggctgcagcccgctcccatgactctggtgttcggctgccgatgctcccagctcgaccacctttaccgcgacgaggtgcaggatgcccagcagcgcggagtttttgggcgcgtcctcaccgccttctcgcgggagcccgacagccctaagacgtacgtgcaggacatcctgcggacggagctggctgctgaggtgcaccgcgtgctgtgcctcgagcggggccacatgtttgtgtgcggcgacgtcaccatggcaaccagcgtcctgcagacggtgcagcgaatcctggcgacggagggcgacatggagctggacgaggccggcgacgtcatcggcgtgctgcgggatcagcaacgctatcacgaggacattttcgggctcacactgcgcacccaggaggtgacaagccgcatacgcacccagagcttctccttgcaggagcggcatctgcggggcgcggtgccctgggcgttggacccgcccggcccagacaccgtcggcccctgagagcgctcgttttccatcccagttccaagagaggggccgtcagtccactctggctctgcccctctcctgcgggcgttaccagccacttgtcccctcccgaggtgccttcccgtctctgtccagagtctgccctaagtcgccttcttcccaggaatgagtgaaatgtccttcctcgccccaggtcccgacgccccctggagcaggggtattccagggcctactgtcaccccttttgtgttccttaggtgaattt

SEQ ID NO: 2875 - DNA, 2108 bp, Canis familiaris
ctcgtgccgtgaagttgtatgaccttgctcaggtaaatttaagttgaactttgctttttctactccataaaagtggattagggcttctgaatgtggaaagcggagaattcaaagtgtcaggcaataaagaaaggactttagtcctgttacctttccttgaatggattagctatccagaacaacctattgctctgtcacagaagagtgtttcagagctttcctgcctagaattgaatttagagatactagcatgttcaattgccaaacccatcctgacaggtatctctcttcttagctcttgagcctagtgggcctctaggcaagatgtccctgcctattgggatgtaccgccgggccttcagctatgatgatgccctcgaggaccctacacccatgactcctcctccatcggacatgggcagcatcccctggaagccagtgattccagaacgcaagtatcagcaccttgccaaggtatctgattccactgactgcttctggcaagcccaacctcttcgtttttcttcctctgctccagaagccttccatggctcctgacacccatagaattgggcaattaccaatccctgtatgtttttagtgcctcagctggagttggtgggcctttttattcttgtgaattcaaactagaatggccatgtcttttcctacctgagactcttctgtgtcatcccccctgtcccgtgatccaaccatgcaaattatttaagatttcttcagtgggtatcttatgcttccaagtctttgtgtcacactgctcattgcctgagatgtttactcgtgccgaattcggcacgagcggcacgagtacggtcgaacagtttttcaggaatatatatcaatacctgtttccttttgatgaggataatgaaaaagatctccctgtcggtgaaaagttcattgaggaggatgcacaagtagctcaaatagagaatgtgttcaaccagctgactgtggatgtgagatttctctttaacagaagtcttaatgtcttcaaacagatgcagcaagaatttgaccagacttttcaatcatatttcatgtcagatacagacttaatgcagcctaactttcttccagctttatctaaagagccaaggaaaaaagcagatcctgtgcaaagttgggatattcccagcttcttccagctgttttataacttcagtctctctatttatcacagtatcagcacaacaatcaccaagacgctgaatgcaatagaggatttaccaaaacaagacaatgattctaaccatggaagcctgagttcaaagacattgcctgtgcagcacagaggaccgtatggagaatttggccagaatttgtcagaatgtttccagtttcatgccagatgccaaaaatgtcaggattacctgtgggaagactgtcccgatgtacctgaactacacacaaaagtagatgaggccctcgaattggtcaacatatcccatcagcaatatgcccaggttctccagatgacccagcaccacctggaggacaccacatatctgatggagaagatgagagaggaatttggctgggtggctgacctggcaaaccaggccccaggagctgagaacatctttgattccacaaagatggttccaaacatacatgaagggaatttttccaaacaagacgaaacgatgatagacttaagcattctgtcttcccctaacttcacactcaagatccctcttgaagaaagtgctgagacttctaacttcattagctacatgctggagaaagctgtgcagcattttaagaaacattttaaaacttggtaagacctgaggcatcctatacctgccaagtagaattacctcttcgggtacctctgagatctgaaaatcccaaatgtataagataatgtaataaatgaaatagcaggaaagtatgtcagttacatattatgaattactgttaattttcttatgttgaatggcagtttcatagctattggaattgagttaaagtaaaatccctttttaagaaaatcacatgtacacattactaaattctatggtaggttagtagttctatgtatattaaataaatataaaattaccaaaaaaaaaaaaaaaaaa

SEQ ID NO: 2876 - DNA, 2412 bp, Canis familiaris
gcccttcgaattatcacccccaccgaatagcccctggcaccttcccggttcaggcgcaggctccccgcaccgccctcggcatgggggaacccgaggaggtgatgcccggttcaggtgctgtgtttacatttgggaaaactcaatttgctgaaaatattcccagcaaattttggtttagaaatgatgtacctacatttctttcatgtggagatgagcatactgctgttgttacaggaaataataaactttacatgtttggcagtaacaactggggccagttgggattaggatcaaaatcaactgttagcaagccaacgtgtgtcaaagctttaaaacctgaaaaagtgaaatttgcggcctgtggaaggaaccacaccctagtttcaacagaaggaggcaaagtatatgcagctggaggaaataatgaaggacagctgggacttggtgacactgaagagagaagcacttttcatctaattagtttttttacttcccagcgtaagattaagcagctttctgctggatctaatacttcagctgcactaactgaggatggagagcttttcatgtggggtgataattctgaagggcaaattggtttagaaaatgtaaccaatgtgtgtgtccctcaacaagtgactgttggaaaacctatctcctggatctcttgtggatattaccattcagcttttgtaacaacagagggacaactgtacacatttggagaaccggagtgtggaaagttaggtcttcccaatcagctgctggtcaaccacagaatgccccagccggtacctggaattcccgggaaggtggtccaagtagcttgtggtggagggcacacagtggttcttacagagaaagccgtgtatacctttgggctgggacagtttggtcagctgggtcttggcacttttctttttgaaacctcagtgcccaaagccattgagcatattaaggatcagaaaataagttttattgcctgtggagaaaatcacacagctctgataacagatatgggtctcatgtatacttttggagatggtcgacatggaaaattaggacttggactggagaattctaccaatcagttcattcccactctgtgctctaattttttgaggtttatagttcaattggtgtcttgtggtggatgtcacacactagtttttgccactccacgacttggtgggacagaagaaatggagttaaaagaaataaacaaatcttgcttctctgcagcaacttctctgtccctcagcaatctgagctcaggaattgtactgcatcaaactctatcagcacgtgtgcggcggagagagagggaaaaatcacctgattcttttcaaatgacacgaacactacctccaattgatgggattcctatgccacctgtttgcttttcccccagtccaattcctttctatatggctgcaagtaattggtcagggaaaatgacacctgaaaaggagggcctcacgcagccagaaccagattattttcgagataacatggccaaagggaaagaaacagataattcttcggcaacagattcagaaagccttggagaaactaccgatgtcttaaacatgacacatatgatgagcctgaattccaatgacaagtccctaaaattatcaccaattgataaacaaaaggatcatgagttttcagaagatgaagaaccagaggatatggctgaggaacttgatgaagatctggaaagcaagaagaatgttccagcagatgtggccagtgacaactcccttaaaaaggacgagacaaccaaacaagaaaaacgagctatttgtgaatacaatgaaaatccaaaaggaaacatgcattatcatgcaaagagcagttcttcagaagtcctgaatgatagtgaatcaacaccaaataaagatgtgaaaaaatcaaagaagattttcctctttaaaaggatgtcattgatgagtcagaaaagtatgcagagtaataatgagccactcccagagataaaaccaataggagatcaaatagcttttaaaggcaataagaaagatgccaaccagaaccacatggggcaaaaccatcaggatacttcacccccagatatggagagaagatcaaaatcttgtacaatactataaatatatatttatgtttccgtggtcaccaagcacattgtattttatacttgaaaaacattttgacttctgaaagaaagttcctgataacaaacttttaaagatataataatatgttttatttgatttgaatattatgaccagtcttggtatttatttatgctaatatttttgacgagcaatttcaaaataagtgtatctcaaactctccttcaagtgttgtggccttaactgttcagtgttggaataaaaaatatatttttataaaaaaaaaaaaaaaaaa

SEQ ID NO: 2877 - DNA, 1838 bp, Canis familiaris
  misc_feature (1779)..(1779): n comprises a, c, g, or t, or includes no nucleotide
gcccttcgaattatcacccccaccgaatagcccctggcaccttcccggttcaggcgcaggctccccgcaccgccctcggcatgggggaacccgaggaggtgatgcccggttcaggtgctgtgtttacatttgggaaaactcaatttgctgaaaatattcccagcaaattttggtttagaaatgatgtacctacatttctttcatgtggagatgagcatactgctgttgttacaggaaataataaactttacatgtttggcagtaacaactggggccagttgggattaggatcaaaatcaactgttagcaagccaacgtgtgtcaaagctttaaaacctgaaaaagtgaaatttgcggcctgtggaaggaaccacaccctagtttcaacagaaggaggcaaagtatatgcagctggaggaaataatgaaggacagctgggacttggtgacactgaagagagaagcacttttcatctaattagtttttttacttcccagcgtaagattaagcagctttctgctggatctaatacttcagctgcactaactgaggatggagagcttttcatgtggggtgataattctgaagggcaaattggtttagaaaatgtaaccaatgtgtgtgtccctcaacaagtgactgttggaaaacctatctcctggatctcttgtggatattaccattcagcttttgtaacaacagagggacaactgtacacatttggagaaccggagtgtggaaagttaggtcttcccaatcagctgctggtcaaccacagaatgccccagccggtacctggaattcccgggaaggtggtccaagtagcttgtggtggagggcacacagtggttcttacagagaaagccgtgtatacctttgggctgggacagtttggtcagctgggtcttggcacttttctttttgaaacctcagtgcccaaagccattgagcatattaaggatcagaaaataagttttattgcctgtggagaaaatcacacagctctgataacagatatgggtctcatgtatacttttggagatggtcgacatggaaaattaggacttggactggagaattctaccaatcagttcattcccactctgtgctctaattttttgaggtttatagttcaattggtgtcttgtggtggatgtcacacactagtttttgccactccacgacttggtgggacagaagaaatggagttaaaagaaataaacaaatcttgcttctctgcagcaacttctctgtccctcagcaatctgagctcaggaattgtactgcatcaaactctatcagcacgtgtgcggcggagagagagggtatagagttgtggccagttctatatcattgcattgcaaagaaaatgggaaataaaactcattttcttttttaatcaaagaagagtctttaaagatagatttactaaataaaatggttagagttgcaggcttacaaacttaaagcaaattcagagttaagctgttaaacacacaaatgagaaaattaaaatgatcatggataaccttgacttaacagaatggacacaaggatacaaagcatccttttagaggcctatctaggcacttcatattgaatgctgaattgttttcttaactctagatggattgacttttactttgctttttatcttttagttacaccttatgggcccgtggaaggttatacactagaaacaatgaaatgtggggaaacaagagaaataaagactttagtttgagatagggaatgttctttcttcatttaaaattaaangttctcattcttttaaaattattattttcaatgacttcttattttttaaaaaaaaaaaa

SEQ ID NO: 2878 - DNA, 2834 bp, Canis familiaris
gcccttcgaattatcacccccaccgaatagcccctggcaccttcccggttcaggcgcaggctccccgcaccgccctcggcatgggggaacccgaggaggtgatgcccggttcaggtgctgtgtttacatttgggaaaactcaatttgctgaaaatattcccagcaaattttggtttagaaatgatgtacctacatttctttcatgtggagatgagcatactgctgttgttacaggaaataataaactttacatgtttggcagtaacaactggggccagttgggattaggatcaaaatcaactgttagcaagccaacgtgtgtcaaagctttaaaacctgaaaaagtgaaatttgcggcctgtggaaggaaccacaccctagtttcaacagaaggaggcaaagtatatgcagctggaggaaataatgaaggacagctgggacttggtgacactgaagagagaagcacttttcatctaattagtttttttacttcccagcgtaagattaagcagctttctgctggatctaatacttcagctgcactaactgaggatggagagcttttcatgtggggtgataattctgaagggcaaattggtttagaaaatgtaaccaatgtgtgtgtccctcaacaagtgactgttggaaaacctatctcctggatctcttgtggatattaccattcagcttttgtaacaacagagggacaactgtacacatttggagaaccggagtgtggaaagttaggtcttcccaatcagctgctggtcaaccacagaatgccccagccggtacctggaattcccgggaaggtggtccaagtagcttgtggtggagggcacacagtggttcttacagagaaagccgtgtatacctttgggctgggacagtttggtcagctgggtcttggcacttttctttttgaaacctcagtgcccaaagccattgagcatattaaggatcagaaaataagttttattgcctgtggagaaaatcacacagctctgataacagatatgggtctcatgtatacttttggagatggtcgacatggaaaattaggacttggactggagaattctaccaatcagttcattcccactctgtgctctaattttttgaggtttatagttcaattggtgtcttgtggtggatgtcacacactagtttttgccactccacgacttggtgggacagaagaaatggagttaaaagaaataaacaaatcttgcttctctgcagcaacttctctgtccctcagcaatctgagctcaggaattgtactgcatcaaactctatcagcacgtgtgcggcggagagagagggaaaaatcacctgattcttttcaaatgacacgaacactacctccaattgatgggattcctatgccacctgtttgcttttcccccagtccaattcctttctatatggctgcaagtaattggtcagggaaaatgacacctgaaaaggagggcctcacgcagccagaaccagattattttcgagataacatggccaaagggaaagaaacagataattcttcggcaacagattcagaaagccttggagaaactaccgatgtcttaaacatgacacatatgatgagcctgaattccaatgacaagtccctaaaattatcaccaattgataaacaaaagaaacaagaaacaattgagaaactgaagcagcatacagctcactttggaaatgatgatagtaaaggatgtgcaagtgaagagatgtccaaaacagtgaaagaggggaaagcatataaacaacttttggcaaaaggaatatacatgacgcaagcagctatgactatggaagcattttcagatgaggacataggtaatgactcaggccagcctgggcctcgggctgacacccacgcagagggtgtgcaaagaaagatatttagttgtgaaagtaagcatggtctctatccacctgactttaaggcgatagcaaaggaaagtgatggaggccaaagtcagaaggatccagaagcagaagaaacagtctctgagaaggaaaacgagctggcggaaatggcaggtctgcaggctaggagacaaagtgaagagaatttaagaaatattaatatgttctttgacgacttaccaaatagagacatgaatattgaggatgaagaaagtaaagattttgttaaggacagtaggaggaacaaacaagatgtgatctttgacagtgaaagagaatctatagaggagccagacagttacttggaaggtgaaagcgaaagtcagcaaggtaccactgatggcttcgagcagcctgagtcagtagaatttagtagtggagagaaagaggatgatgatgaagtggaaactgaccaaaacttgtggtatagcagaaaatttatcgaacaaggacacaaggaagagaccgaacacatactgtccaaattcatggcaaaatatgattttaagtgtgaccacttgtcagagattccagaggagcaggaaggagcagaggattcagaaggaagtggaatagaggagcaagaggtagaggcaaatgagaatgtggaggtgcctgcaggaaaagaggagaaggaaatagagatcctgtcagacgacctgacagacagagcagaggtgagtgaaggcaagggaaaggcaggaggtggaggtgagggaatccagcgggagggtgattcaggagtggaacagaggcaaagtgaggaggggcaagaggaggaagacaagagaggaggagaaatggagggcctggctaagggagagaaaaacctagaagaggaggaggcccaggaacaaagggagagggaacaaggccatcggaaaaaaaaaaaa

SEQ ID NO: 2879 - DNA, 221 bp, Canis familiaris
aatgggcctctcttctatgcgtggctccaggcacggtggtctcgggaccccggtcggggctgcatcacttcccttccttcctacaggttcaatcagtacatcgtgtgcctggcccatcatgtcatagccatgtggttcattagatgccgcctgcccttccggaaggattttgttccttatatcactaaggtaggccagcagacaccaaaccccttattagg

SEQ ID NO: 2880 - DNA, 1761 bp, Canis familiaris
atgggccaaggggacgagagcgagcgcatcgtgatcaacgtgggcggcacgcgccaccagacgtaccgctcgacgctgcgcacgctgcccggcacgcggctggcctggctggcggagccggacgcccacagccacttcgactatgacccgcgcgccgacgagttcttcttcgaccgccaccccggcgtcttcgcgcacatcctgaactactaccgcaccggcaagctgcactgcccggccgacgtgtgcgggccgctctacgaggaggagctggccttctggggcatcgacgagaccgacgtggagccctgctgctggatgacctaccgccagcaccgcgacgccgaggaggcgctcgacagcttcgggggcgcgcccctagacaacagcgccgacgacgcggacgccgacgggcccggggactcgggcgacggggaggacgagctggagatgaccaagcgcctggcgctcagcgaccccccggacggccggcccggcggcttctggcgccgctggcagccgcgcatctgggcgctcttcgaggacccctactcctcccgctacgcgcggtatgtggcctttgcctccctcttcttcatcctggtctccatcaccaccttctgcctggagacccacgagcgcttcaaccctattgtgaacaagaccgagatcgagaacgttcggaatgacacgcaagtgcgctactaccgggaagcggagacggaggccttcctcacctacatcgagggcgtctgcgtggtctggtttaccttcgagtttctcatgcgtgtcgtcttctgccccaacaagatagagttcatcaagaactcgctcaacatcattgactttgtggccatcctccccttctacctggaggcgggcctaagcgggctgtcctctaaggctgccaaggacgtcctgggcttcctgcgcgtcgtccgctttgtgcgcatcctgcgcatcttcaagctgacccgccacttcgtgggcctgcgggttctgggccacaccctccgtgccagcaccaatgagttcttgctgcttatcatcttcctggccctgggcgtcctgatcttcgccaccatgatctactatgccgagaggataggggcccagcccaatgaccccagcgccagtgagcacacccactttaagaacatccccattggcttctggtgggccgtggtcaccatgacgacgctgggctacggagacatgtacccgcagacgtggtccggcatgctggtgggagcactgtgtgcgctggcgggcgtgctgaccatcgccatgcctgtgcccgtcatcgtgaacaattttgggatgtattactccttagccatggctaagcagaaactaccaaagaaaaaaaagaagcatattccacggccaccgcagctgggatctcccaattattgtaaatctgtcgtaaactctccacaccacagtactcagagtgacacatgcccgctggcccaggaagaaattttagaaattaacagagcagattccaaactgaatggggaggtggcgaaggccgcgctggcgaacgaagactgcccccacatagaccaggccctcactcctgatgagggcctgccctttactcgctcgggcacccgcgagagatacggaccctgcttcctcttatcaaccggggagtacgcgtgcccgcctggtggaggaatgagaaaggatctttgcaaagaaagccctgtcattgctaagtatatgccgacagaggctgtgagagtgacttgacca

SEQ ID NO: 2881 - DNA, 251 bp, Canis familiaris
aggacgggtactcgctggaagagtgcctcgagttcattgccatcatctacggcaacacgctgcagtccatcctcgccatcgtgcgcgccatgaccacgctcaacatccagtacggagactctgcccgccaggtgtgcagggaggccgactgagcagggcctctggggactcgaggcgcgagacccggctcagggccacggtcgccaccaattcccaccctgccctcaggacgatgcccggaagctgatgca

SEQ ID NO: 2882 - DNA, 1013 bp, Canis familiaris
atctgaccataggcatgaggggcctccggccgagatgatagtgctggcgccagcctggagcccaactgcctccctgttgctgctgctgctgctcagccccggcctccgcgggacccccgactgctccttcagccacagccccatctcctccaccttcgcggtcaccatccgcaagctgtctgattacctgcttcaggactatccagtcactgtcgcctccaacctgcaggacgacgagctctgcggggcgttctggcgcctggtcctggcccagcgctggatggtgcggctccaggctgtggctggatcccaaatgcaaatcctgctggaggctgtcaacacggagatacactttgtcaccttctgtgccttccagcccctccccagctgtcttcgcttcgtccagaccaacatctcccacctcctgcaggacacctcccagcagctggccgccctgaagccctggatcacccgcaggaatttctccgggtgcctggagctgcagtgtcagcccgactcctctacattggtgcccccaaggagccccggggccctggaggccactgccttgccagcccctcaggcacctcggctgctcctcctgctgctgctgcccgtggctctcctgctgatgtccactgcctggtgcctgcattggcgaaggaggcggcggcggaggtcaccctaccctggggagcagaggacactgaggcccagcgagcggagccatctgcccgaggacacagagctgggacctggagggagtcagctagagactggtcccttcctcgaccacgcagccccgctcgctccctccccaggatcaaggcaacgcccgcccccaacgcccccaaagccagccccagccccacctctccccctctgtacaaagtccttgcccccaagaaattgtatataaatcatccttttctaccaaaaaaaaaaaaaaaaaaaaaaaaaaaaaaaaaaaaaaaaaaaaaaaaaaaaaaaaaaaaaaaaaaaaaaaaaaaaaa

SEQ ID NO: 2883 - DNA, 476 bp, Canis familiaris
cccaagcttatggattgctacagaaaatatgcggctgtcattctggccgcattgtctgtgtttctgcatattctccattcctttcctgatggagagtttacaatgcagggttgcccagaatgcaagctaaaggaaaacaaatacttctccaagttgggtgccccaatttatcaatgcatgggctgctgcttctccagagcatatcccactccagcaaggtccaagaagacaatgttggtcccaaagaacatcacctcagaagccacatgctgtgtggccaaagcttttaccaaggccacagtgatgggaaatgccaaagtggagaatcacacggagtgccactgcagtacttgttattatcacaaatcttaaatattttgcaaagagcacgttgatgattgctgatttcctggaatgaaaattaattttttcagtgtttatggctttgtgagataaaaccctcctttaagcttggg

SEQ ID NO: 2884 - DNA, 4717 bp, Canis familiaris
ggccttggggacaggcaagaggacaggcttaaggagctgtattggggggtggacaggggcaagcaggccgaggcctggcccagggagggaacatgcagccatcccagtccctgcggcgtgggggcgagcagagctggtggggtagtgctccccagtaccagtacatgccttttgaacactgcaccagctacggactgccctccgagaatggagcccttcaacacaggctccacagggatgcaggcctccgcgccaacacccgccccacacagatctatggccattacaaacagcaattctcagacaaggagcaggacacagggatgtccaagaagatgggctccagtgaaagcatggacagcaaggatgaggatcactattctaaatgtcaaggctgtgtccgccgcctgggacacgtggtgagaagaaagttaggagaagactggatctttctggtgctcctgggactgcttatggccctggttagctggagcatggattatgtcagtgccaaaagccttcaggcctacaagtggagctactaccagatgcagcccaacctgcctctgcagtacctggtctgggtcaccttcccgctaactctcatcctcttcagcgccgtcttttgccacctcatctctccccaggctgttggctctgggatccctgaaatgaagacaatactccgtggagtcatcctgaaggaatatctcaccctcaaggcctttgtggccaaggttgtggccctgactgcggggctgggcagtggcattcctgtggggaaggagggccctttcgtccacattgccagcatctgtgctgcggtcctcagcaagtttatgtccatgttctgtggggtctatgagcagccatactattacactgacatgctgacggtgggctgtgctgtaggagttggctgttgttttgggacgccacttggaggagtgttgttcagcatcgaggtcacctctacatactttgctgtgcggaactactggcgaggattctttgcagccacgttcagtgcctttgttttccgcgtgctggccgtgtggaacaaggacgctgtcaccatcactgctctcttcagaaccaatttccgaatggatttcccctttgacctgcaggaactcccagccttcgccatcatcgggatttgctgtggcttcctgggagccgtgtttgtgtacctgcatcgccaagtcatgctcggtgtccgaaagcacaaggccctcagccaatttctggcgaagcaccgcctgctgtatcctggaatagttaccttcatcattgcctcattcacctttccgccaggaataggccaattcatggctggagagttgatgcctcgtgaagccatcagcaccctattcgacaataacacatgggtaaagcatgtgggtgaccctgaaagcctgggccggtcagctgtgtggatccacccacgggtcaacgtgatcatcatcatcttcctcttctttatcatgaagttctggatgtccatcgtggccaccactatgcctataccctgcggaggcttcatgcctgtgtttgtgctaggagctgcatttgggaggctggtaggagagatcatggccatgctattccctgatggtatcctatttgatgacatcatctacaagatcctacctggaggctatgcggtaattggggcagcagcgctgaccggtgcagtatcccacacagtctccacagctgtgatttgcttcgaattaacgggtcagattgcccacatcctgcccatgatggtggctgtcatcttggccaacatggtggctcagagcctgcagccctccctctatgacagcatcatccaggtcaagaagctaccctacttgcctgaccttggttggaaccagctcagcaaatttaccatatttgttgaggacatcatggttcgtgatgtgaagtttgtttcagctacttgcacatacggggaattgcgaaccctgctccagaccaccacagtcaagactttaccactggttgattctaaagattctatgatcctgctgggctccgtggagcgctcagagctacagtccctcctgcagcgccacttgggccctgagcggaggctgcgggtggcccaggacatggccaggaagttgtctgagctgccctacgatgggaagggacaccaaggcatctcacccgagggccgaagggagtcctttgcctttgtggatgaggatgaagatgaggacctctctgggaagcccgagctgcctcctcttcctcctcctcaccccttaccatctgccccattgtcctctgaagagtccaatgggcccctgcccagccacaaacagcagccagaagcaccggagcctgcagatcaaagaccctctgtctttcggtccctgctgcgctgcttacttggcagacctcgccccacgaagaagaaaacaacccaggagtcaatggatttagtggacaacatgtcacctgaagagatcgaggcctgggaacaggagcagctgagccagcctgtctgttttgactactgctgcatcgaccaatcccccttccagctggtggagcagacgtccctgcacaagacccacacgctcttctcgctccttggcctccaccttgcctatgtgaccagcatggggaagctcaggggcgtgctggcattggaggagctgcagaaggccatcgaggggcacaccaagtctggggtgcagctccgccctcccctggccagcttccggagcacgacttccactcggaagaatccgggaggcccaccccctcccaccgaggcctggagtctgcctgaggatggaactggggctcctgcctccccagagccccccgcaccctccccctccccagctcccttgctctctgaggctccagccaaagtggagggtgagctggaggagctggagctgggagagagtccagggctggaggaggagctcgctgacatcctgcagggcccaagtctgcgatccacggatgaggaggacgaggacgagctgattctttgacggcctccaggatctcctcttaaagaccgttccggggcccaggccagaggctggacttgtgtgtcaggggtatgtcctgaagttggagacctcacaccatcgccctggccccttctgggaatcttaaaatgtgatagtgatagtctgctatttaggccctgtgccccccatctggacaggcaggaggttctggccccagtgaaggacctgatactccacagggcttcccgagtccccctggtctgtgagtgggagacaccctgcctctgccggcctcggcctcccctcagcccccacagtcccttggtcttcttgttccggcaccttcctagcaccttcctggctttgccccgtgtccgccagtctccacggggggaggcccacagtgactgtggcctggggggagatgggagaaactcatggcctcgtgggctgatggcccgggatacactcaggaataatccacacgccactctcagagcccccaacctcgttctcccacttacagccgctccctgatatttgcctcctcctcctccatcctggctcccactacctgccgccaggcaagggccagtcccctagctcccctggccgggatataggcagcccgcaagagaaaaggtctctgtgcaggaagcaggtgtcttgctgcccagcgttcatgcctccttcaggcacaaatccgccccatctcacaccaggcatggcttcctcgccctccaggtcccagggcactcctgggaactaaccctcacctccccacggtcctccctgatctatcctgcccaagggtcaggtgtgccctccagctgctggggccagggcttctcccaccaagaccgaggctcagggcagccaggccactgggtctctcagccaccagccctactgagactagttctttgtgttcgtcttctagaggtggacagatgggggttcaaagtcaacatggcaggcccctttgatgcttcccatgctcggaagtcagaggccctcctccccaaatcagcgacaggatgcctgccgctggcctgcctttcctatgaggtggtcccaggtgctctgagcccccagaagccctcatttccacacccacggctcccctgctccctccttttgtgctccgtccagttgtgtagttttaccccctgtctgacatcctcctgcctcccctcccctatgcccaggctccatcatcccccaaataagacactcatagtcagaggtgccaccacattctgtttagtaccattgaacacagcctgtcgccctccaacatgacatcccttccacctccccaggccgagagagagagggtgcagcctggagagggggactggcagtgggcatttgagcccatgtccatgtgtatataatctataatatttatatatatatatttatatataattctctctgtaatatatgtcatagaatctctcttgggcctggggtgggaatgtcgcattaagaaaacatgctaagactggccataaaaatggatatttcccagacctggaagacagagtatgggacgtggaggtgagggcaaagagaaggtcatacgctcattcaccaagagcccctcccaagcacaagggtaagaagggaggcgtagggggaggagggccagtggaaggggaggaatgggaaatttggatttttctttaataaagtgatttgaaaacgag

SEQ ID NO: 2885 - DNA, 1805 bp, Canis familiaris
tgagcccgaggtggctttcccctgcgggtgtccctgctgcagcctccagggccgggtccctagttccccagccgcctgtcttcccggtgcaaaatcgtctgcaaagaccgagaagccgccgccgcagaagttgcccggcgcaagactccggaggcattggctcaggaacttttcacgtcattttctgctctggagcctctcgtcgcgcctccgcgccgcctttcgcaccgcaaatcacagtgctcatggggcaggcggagagcggctcgcggcgctgagcggagccggactcgagcccgtgatgtccggcaccaaactggaggactcccccccttgtcgcaactggtcatctgctccggagctgaatgaaactcaagagccctttttaaaccccaccgactatgacgacgaggaattcctgcggtacctgtggagggaatacctacacccgaaagaatatgagtgggtcctgatcgctggctacatcatcgtgttcgtggtggctctcgtgggcaacgtcctggtttgtgtggctgtgtggaagaaccaccacatgaggacggtaaccaactacttcatagtcaacctttctttagctgatgtgcttgtgaccattacctgccttccagccacattggttgtggacatcactgagacctggttctttggacaatccctctgtaaagttattccttatttacagactgtgtcagtgtccgtgtctgtcctcacactgagctgcattgccttggatcgatggtatgcaatctgtcaccctttgatgtttaagagcacagccaagagggccaggaacagcattgtcatcatctggattgtctcctgcattataatgattcctcaggccatcgtcatggagtgcagcaccatgctccctggcttagccaataaaaccactctctttacagtgtgtgatgaacgctggggtggtgaaatttaccccaagatgtatcacatctgtttctttctggtgacatacatggcaccactgtgtcttatggtattggcttatctgcaaatatttcgtaaactctggtgtcgccagatccctggaacatcatctgtagttcagagaaaatggaagcccctgcagcctgcttcacagcctcgagggccaggacagcagaccaagtccaggattagcgctgtggccgctgaaataaagcagatccgagccagacggaaaacagcccggatgctaatggttgtacttttggtgtttgcaatttgctacttaccaattagcatcctcaacgtgctaaagagagtatttgggatgtttacccacacggaagacagagagaccgtatatgcctggtttacattttcacactggcttgtatatgctaatagtgctgcgaacccaattatttataattttctcagtggaaagtttagagaggaatttaaagctgcattttcttgctgttgccttggagttcaccatcgccaggaggaccggctcacccggggccggacgagtacagagagtcggaagtctctgaccacccagatcagcaatttcgacaacgtatcaaaactctcagagcaagttgtgctcaccagcataagcacactcccagcagccaatggagcagggccacttcaaaactggtagaacattcattcatatgacagggatatctgaggaaaactactcttttctaaaaatctctgtgtacacaaactttattaccctaatgatctgaagctaaaattacgttgtggaccttttttgttttttaatctattgctttttggaaataaaaaaaaagtcagtttaaaat

SEQ ID NO: 2886 - DNA, 2119 bp, Canis familiaris
gaattctaaagtattcctcaaagtgccacttgacgggaacttttcgcctgccttttcctttctccaaccaccatgactgagatcactgctgaaggaaatgcatctactaccacaactgtgatcgacagcaaaaatggatctgtgcccaaatcccctggaaaagtgctgaagaggacagtcacagaagacatagtgacaacattcagctccccagcagcctggcttctggtcattgctctgatcatcacatggtcagctgttgccgttgttatgtttgacctagtggattacaaaaacttttcagcgagctctctttccaagattggctcagatcctctaaaacttgtacatgatgctgtggaagaaaccacggactgggtctatggcttcttttctttgctgtctgacatcatctcgtctgacggtgatgaagatgatgatgatggggatgaggacactgataaaggagaaatagaggagcctcccttgaaacaaaaagaaatacacaaagaaaaggctgaaaaggaggagaaacctgaaaggaaaatactagccaaagttgcacacagagaaaaagaaaaagtaaaagaaaaagaaaaatctgaaaagaaagcaactcacaaggaaaaaattgagaaaaaagaaaaaccagaaacaaagacaatggcaaaagaagagaggaaagccaagactgaagagaagatcaaaaaggaagtgaaaggtggaaaacaagagaaagtgaagccaacagctgcaaaagtcaaagaagtacagaaaacaccacctaaggccaaagagaaggaggggaaagagactgcggctgtggccaagcatgaacagaaaggtaaacattcagaggaggtggccggaggttctaagagaacactgggcaagaagcagatacagtgaaattaaaaactcaaaaagaccgagatcagacttcaagtgggaataaaaatactggtataagtgaatacacttgaaaggaaacgcaatatttgggaattaaaattcatttatagagagtctaaaatgtgttcacatatctaaagacgcattctgaagtacttttagaagaggatttgagttagttatctgaagttatttgaaggttgaggataaatgttaaattcttgaggcacgagatttctattaagaggtagaaaagcaattttatgtttcctattctttggaggacagcagtccaggaaaaatgacaatttttcaagggagggtttttaaagggcatatgttcaaaccatatagtacaagtaccataaaaactatccgtacattcctgttgctctctgcaagagcacataacttagaatgcgcattgaattattaaattcagttaatttaatgaacagggaagatacaggaaaaagaactctcaagtttccttgctggcttccactgactaaatttatgactttagaaatctccatatctgacactgtgcatccctacttcacagaaatagagcatttaatatggaggtggagtataaattttaaatgctttatggaaaggtgccatagagacacaaaagggtggagttttcagagggcagctgagggctcatctcatatctctgcttctcattgaatctcttcttcctgttgtctatccccggcaccacgcgctacactgtcctaaggcttcccattaagaacgtggaatctactatgtaggaactatttctacaaatctttcttaagggtgttacaaaatagaactttcctttactctggtagtcttgaataattatatttgaggactaaaactgagggatggtttctatgagattttcattaaaaattttgaaaactttactactgagtaacctatttggatggtgaaactgaagataattttcaccatcagaagacacaagacatgaaatttgaaatccatactttttttttagattccacatgtaagtgagatcatgtggtatttgtctttgcaatcctctcttgtattttttctttgaatcacttttttcccttgaattcacaagtcatatttataaatttcgatttgacaaaggatgtatatttttgagactatattttaaaaaggaaaggaaggaaaaaaaaaaactcgtgccgaattc

SEQ ID NO: 2887 - DNA, 2349 bp, Canis familiaris
gaattcggcacgaggttgtttccagggggagaactctgcagagaagagacggagttcaacaggacaacaaagggccagcagaaacagccaggaaaacgaagagccctcaggtttttcacccagagccccctaatcagagttctcgaattctaaagtattcctcaaagtgccacttgacgggaacttttcgcctgccttttccttctccaaccaccatgactgagatcactgctgaaggaaatgcatctactaccacaactgtgatcgacagcaaaaatggatctgtgcccaaatcccctggaaaagtgctgaagaggacagtcacagaagacatagtgacaacattcagctccccagcagcctggcttctggtcattgctctgatcatcacatggtcagctgttgccgttgttatgtttgacctagtggattacaaaaacttttcagcgagctctctttccaagattggctcagatcctctaaaacttgtacatgatgctgtggaagaaaccacggactgggtctatggcttcttttctttgctgtctgacatcatctcgtctgacggtgatgaagatgatgatgatggggatgaggacactgataaaggagaaatagaggagcctcccttgaaacaaaaagaaatacacaaagaaaaggctgaaaaggaggagaaacctgaaaggaaaatactagccaaagttgcacacagagaaaaagaaaaagtaaaagaaaaagaaaaatctgaaaagaaagcaactcacaaggaaaaaattgagaaaaaagaaaaaccagaaacaaagacaatggcaaaagaagagaggaaagccaagactgaagagaagatcaaaaaggaagtgaaaggtggaaaacaagagaaagtgaagccaacagctgcaaaagtcaaagaagtacagaaaacaccacctaaggccaaagagaaggaggggaaagagactgcggctgtggccaagcatgaacagaaagatcagtatgcattctgtcgatatatgattgacatgtttgtccatggggatttaagaccaggacaaagcccagccttaccacctccattaccaacagtacaagcttccagacccactccggcatcacctactcttgaaggaaaagaagaggaggaaaagaagaaagctgagaagaaagtaacttctgaaacaaaaaagaaagaaaaagaagatgtcaaaaagaagtcggacaaggacactgccattgatgtggaaaaaaaagagccagggaaagctcctgaaaccaaacaagggactataaaagttgtggcacaagcagcggctaaaaaagatgaaaagaaggaagattccaagaaaacaaaaacacctgtagaagaacatcccaagggaaaaaaacaggaaaagaaagaaaaatacgtggaaccagcaaagtcgtcaaagaaggaacattcagctccaagtgaaaaacaagtaaaagcaaaaactgaacgagccaaagaagagactagtgctgcctcaactaaaaaagctgtacctggaaagaaggaagagaaaacaaccaagacagtggagcaagaaattagaaaagaaaagtccgggaagacttctacagcttcgaaggacaaagagcctgaaattaaaaaagatgaaaagatgcccaaagcagacaaagaagtcaagcctaagcctccacagtcacaagtaaagaaagaagagaaatcagagtcacaagttaaaaaagaagcaaaaccagaacaagacatagcaaaaccagaaaagactgtttctcatgggaaaccagaagaaaaagttgtcaagcaggtaaaagctacagaaaaagcagctatagaaaaaacagtcaagcccaaaccagcaaaaaaagctgaacatcaagaaaaagaatctccaactataaaaacagacaaacccaaaccaacctcaaaggaaacaccagaagtcacagaatcagggaagaagaaaattgaaaaatctgaaaaagaaagtaaagaaaaagcagaaatgaaacatcttaaagaagaaaaagtctcaacaagaaaagaaagtcttcaatcacacaacgtgacaaaagcagaaaaacctgcaagagtatcaagagaagatttggaagatgtatcagcttcaaagaaagctaaagaagaagctgaagatgtgtcttccacaaagaggcaaaaaagccccatcagtttcttccagtgtgtctacttggatggatacaatggctacggatttcagtttcctgtcactcccgcataccgtcctggagagagctctggccaaccaagttctccaggacagaagcaacaaggacaatagaccccctacgcacacacctgtcctcgag

SEQ ID NO: 2888 - DNA, 3649 bp, Canis familiaris
gaattcggcacgaggcagaaacagccaggaaaacgaagagccctcaggtttttcacccagagccccctaatcagagttctcgaattctaaagtattcctcaaagtgccacttgacgggaacttttcgcctgccttttccttctccaaccaccatgactgagatcactgctgaaggaaatgcatctactaccacaactgtgatcgacagcaaaaatggatctgtgcccaaatcccctggaaaagtgctgaagaggacagtcacagaagacatagtgacaacattcagctccccagcagcctggcttctggtcattgctctgatcatcacatggtcagctgttgccgttgttatgtttgacctagtggattacaaaaacttttcagcgagctctctttccaagattggctcagatcctctaaaacttgtacatgatgctgtggaagaaaccacggactgggtctatggcttcttttctttgctgtctgacatcatctcgtctgacggtgatgaagatgatgatgatggggatgaggacactgataaaggagaaatagaggagcctcccttgaaacaaaaagaaatacacaaagaaaaggctgaaaaggaggagaaacctgaaaggaaaatactagccaaagttgcacacagagaaaaagaaaaagtaaaagaaaaagaaaaatctgaaaagaaagcaactcacaaggaaaaaattgagaaaaaagaaaaaccagaaacaaagacaatggcaaaagaagagaggaaagccaagactgaagagaagatcaaaaaggaagtgaaaggtggaaaacaagagaaagtgaagccaacagctgcaaaagtcaaagaagtacagaaaacaccacctaaggccaaagagaaggaggggaaagagactgcggctgtggccaagcatgaacagaaagatcagtatgcattctgtcgatatatgattgacatgtttgtccatggggatttaagaccaggacaaagcccagccttaccacctccattaccaacagtacaagcttccagacccactccggcatcacctactcttgaaggaaaagaagaggaggaaaagaagaaagctgagaagaaagtaacttctgaaacaaaaaagaaagaaaaagaagatgtcaaaaagaagtcggacaaggacactgccattgatgtggaaaaaaaagagccagggaaagctcctgaaaccaaacaagggactataaaagttgtggcacaagcagcggctaaaaaagatgaaaagaaggaagattccaagaaaacaaaaacacctgtagaagaacatcccaagggaaaaaaacaggaaaagaaagaaaaatacgtggaaccagcaaagtcgtcaaagaaggaacattcagctccaagtgaaaaacaagtaaaagcaaaaactgaacgagccaaagaagagactagtgctgcctcaactaaaaaagctgtacctggaaagaaggaagagaaaacaaccaagacagtggagcaagaaattagaaaagaaaagtccgggaagacttctacagcttcgaaggacaaagagcctattaagggaaaagaagtgaaagttccaggttccctaaaggaaaaagagcctgaaattaaaaaagatgaaaagatgcccaaagcagacaaagaagtcaagcctaagcctccacagtcacaagtaaagaaagaagagaaatcagagtcacaagttaaaaaagaagcaaaaccagaacaagacatagcaaaaccagaaaagactgtttctcatgggaaaccaggtattttgcaggtggtacctgtagtattaaattgtcttttcttggtccagtttcagcaggatgaagagcttaatgtcgaatctaaagttttcaggatgattcatgtcttaagtcatccaacttctagaacatctccaattttagtcatctccacaacgtgtaggacttgacctgtcaagtgtctgaggacttgacctgtcaagtgtcacctgcagctagtctatcccttcccaacagagacagcttaatcttattttaaaaccacgtttcctcaaactgtaagatcgcaggagtctgaaacaatgaaatctgctttttatgtattagatggaggatgtccatctattaggagatcttagcattcgggtgaatgggctctatggttgttttattctgtcctgtttgaggcaaagtcatctttggaaaacttataattcagaatggctcattcaaacacaatcattttaaattccacccaccccaagaaaaggaaatcaacatttcaccctgcttcccttcctccttcctccttccatctttgcctcactttttttgtttttcattcctggagataatagaggtaagcctgtatgttctgctcataaaaagacatacagaatttaccaacacaaatttatcaattggatttttttattcaagaataaaaacgtttaagtttttataaagatatttaattatttgagagagtgggggtagggaaaaggcaagcagaccctgctctgtgtgcagagctggaggtgagggactggctgtcatgaccctgagatcatgacctgagccaaaatcaagagtcagctgcctaactgagtcacccaggagccccaaaaataaaaacttttaagttgtcatttatgctaattaaatatgagtttaattttgagacagtcccatgcctcagttattgtgtccttcattccagactgacttgtttacccaaagctatgaacatggttagggaagaattttcaataagttagaaacatagtttctctaagcctatcttagcaaacatttttgcttacactttcagactttttactgtagaaaaactgtttaaaatgggtttcaggccatttgatttcctttgcctatgttttaaagtatatgagacaccaacaggaatatgaaaagcagaccaggagcatgaggagccaagaatagctgtctgtattctaaggttctaagcagaaccttagaaataacttttagaacctcctcattaatgaataataaaaccctattattttcttgattgtcccaaatgtcagtcattttgagccgaaatacagagtgagactttagtctctgagagtacaataagcatactgtcctctagccataccttccttttattttagggataatgttcatactctaaattctgcttcccagggaaactttctaattgactcattcccgctgttgaattattgacaaggtcaattttacataggatcatcgtcctaatctctctacgttgacccaaatctctttgactatatctataaaaccatatagaggacagaagacatcccctacatgtattcctcttgcccttccccaactttgcaccataaaaaacttgtgttgcaagactaatcttgggttctcagggaggaatcttgcacaagaaaaataaaaaattgtttcttcctgctctagttcaattacttaaaaagaacacgtgtcttataaaacaacccctgtgtagataaatacagtgaaatacagtgaaggcaaggggtagatgtgtattggcaggtcagggaataattccaattggcaaaaattttagggcaggagagttgcaaaggatgtctgcagctggacacattttcctcgtgccgaattc

SEQ ID NO: 2889 - DNA, 2834 bp, Canis familiaris
ctggccagctccaagcacgggtgcgagagatttgggtgcttcccgggaagaggcgggaagagaatgccaacaacatgcccaagcaggtggaagtacgaatgcacgacagccatctcagctcagaggagccgaagcaccgacatctaggcctgcgtctgtgtgacaagctggggaagaacctcctgctcacattgactgtgttcggtgtcatcctgggggcagtatgtggagggcttcttcgcttggcatctcctctccaccccgatgtggtcatgttgatagccttcccaggggatatactcatgaggatgctaaaaatgctcattctccctctcatcatctccagcttaatcacagggttgtcgggcctggatgctaaagccagtgggcgcttaggcacaagagccatggtgtattacatgtccacaaccataattgccgcggtgttgggggtcatcctggtcttggctatccacccagggaaccccaaactcaagaagcagctgggacctgggaagaagaatgatgaagtgtccagcctggatgccttcctggatcttattcgaaatctctttcctgaaaacctggtccaagcctgttttcaacagattcaaacggtgaccaagaaagtcctggtggctcctccatcagatgaggacagcaatgccaccaatgctgtcatctccttattgaacgagactgtgacggaggcccctgaagaagtgaaggtggttatcaagaagggcctggagttcaaggatggcatgaatgtcttaggtctgatagggtttttcattgcttttggcatcgccatggggaagatgggagagcaggccaagctgatggtggagttcttcaacattttgaatgagattgtaatgaagttagtgatcatgatcatgtggtactctcccctgggtattgcctgcctaatttgtggaaagatcattgcaatcaaggacttagaagtggttgctaggcaactggggatgtacatgatcacggtgattgtgggcctcatcatccatgggggcatctttctccccttgatttactttctagtcaccaggaaaaaccctttctcctttttcgctggcattttccaagcttggatcactgccctgggtaccgcttccagtgccggaactttgcctgtcactttccgttgcctggaagaaaatctggggattgataagcgcgtgaccagatttgtcctcccagtgggagcaaccatcaacatggacggcacagccctttatgaagcagtggccgccatctttattgcccaaatgaacggtgttatcctggacggaggccagattgtgactgtgagcctcacggccacgctggcgagcgtcggtgcggccagtatccccagcgcaggcctcgtcaccatgctcctcatcctgacggctgtgggcctgccaacggaggacatcagcctgctggtggctgtggactggctgctggacaggatgagaacttcagtcaatgtggtgggggactcatttggggctgggattgtctatcacctctccaagtctgagctggatactattgactcccagcatcgagtgcatgaagatattgaaatgaccaagactcagtccatttatgatgtgaagaaccttagggaaagcaactctaatcaatgtgtctatgccgcacacaactctgtcatagtagatgagtgcaaggtaactctggcagccaacggaaagtcagccgactgtggtgttgaagaagaaccttggaaacgtgaaaaataagaatatgactctcagcaaagttttgaacaaactccccagcgtgtcttatggtaaaagagaatataaacaagctgtctttaaaaaaggaaaaaaaaatgcatctatttctgtgtttacttaatctgctagctgaggcttcgaggatctgttgtgagtcagtgataggcgcgttgctgtgtccttgccaagtgatgctttgtaactgcctcattttctcacctgtattattctttgaagggaggctgctggaggaatcagtttgaattgaagacacattcttgccagcttccctgtgctctctaaatgcagagccttgaatgctcttatcccaggggacatgactaaagcaatgtggtacactccgaggacttgggataacgagcagacactcagtgtgtgattccttccagtgttctccatgtttctgctttgttatgcacaagagattctgtttgaagcctctagaagtaattcccctgaaatgtctcgtagagtttgcccatgtgttgattaaaagcaaattccctgtcttcaggaactctgagaatctatcttccgtgtactctttaaatatttcaaagagatttgtagtgggaactgtgatcttcgaggcagctgattacggaacccactgagtttctgctctatcctatccagtctggggaaataattattgaaatttcaaagtatgtttcataatttgctctccatttgataacagattaggatgtaattggcatatacagaggctgctgtacctgttgacaaacataagagagcacagtcaacgttaactttaaccaggttcaaatattcaaatttgtttgtgtttggtttgtattcacctggcatagggacatcaagtgagattatttgatctatgctttactttctttgtttcagctgtaaaattctaatttggatttctaacaaaaaagacatttgtaatccccacattctttcaatcccagactcattaaccgagaaggccccatcatttttactctcctcacccatagaggacagttatgttggctgtgcctcttttaataccacctcttgatt

SEQ ID NO: 2890 - DNA, 1868 bp, Canis familiaris
ttgcagttgaggctcccgatagacgatgagcagccacgggaacagcctgttcctgcgggagagtggccagcggctgggccgggtgggctggctgcagcggctgcaggagagtctgcagcagagagcgctgcgcactcgcctgcgcctgcagaccatgactcgggagcacgtgctgcgcttcctgcgccggaacgccttcatcctgctgaccgtcagtgctgtggtcattggggtcagtctggcctttgccctgcgaccgtaccagcttacctaccgccagatcaagtacttctcttttcctggagaacttctcatgaggatgctgcagatgctggtgttgccactcattgtctccagcctggtcacaggtatggcatccctggataacaaggcaacagggcggatggggatgcgggcagctgtgtactacatggtgaccacggtcattgctgtcttcattggcatcctcatggtcaccatcatccatcctgggaagggctccaaggaggggctgcaccgcgagggccgtattgagaccatacccacagccgatgccttcatggacctggtcagaaatatgtttccgcccaacctggtggaggcctgcttcaaacagttcaagacgcagtatagcacgaggttggtaaccaggaccatagtgagaacagagaacggatccgagctgggcacttccatgcctcctccatcttcaatggacaatggaaccagcctcctggaaaatgtcacctgggccttgggcaccctgcaggaggtgctgagcttcgaggagactgtgcctgttcctggctcagccaatggcatcaatgccctgggccttgttgtcttctctgtggcctttgggctggtcattggtggcgtgaaacacaagggccgagtcctgcgggatttctttgacagcctcaatgaggctattatgaggatggtgggcatcattatctggtatgcacctgtgggcatcctgttcctgatcgctgggaagatcctagagatggaggatatggctgtcctggggggtcagctgggcatgtacaccctgactgtcattgtgggcttgttcctccatgccggtggtgtcctgcccctcatctacttcctcatcacccaccggaatcctttccccttcatcgggggtgtactgcaggccctcatcactgccatgggcacgtcttccagctctgcaacactgcccatcaccttccgctgcctggaggagggcctgggtgtggaccgacgcatcaccaggttcgtgctgcctgtgggggccactgtcaatatggacgggactgccttgtatgaggccctggccgccatcttcattgcccaagtcaacaactatgaactcaacctgggccagatcacgaccatcagtatcacagcgacagcagccagcgttggggctgctggcatcccccaggcaggtctggtcaccatggtcattgtgctcacatcggtcggcctgcccactgaagacatcacactgatcatagctgtggactggttccttgaccgacttcgtacaatgaccaatgtcctgggggactctattggagcagccgtcattgagcatttgtctcagcgagagctggagctgcaggaggccgagctcaccctccccagcctggggaaaccctacaagccactcatggcacaagagaagggggcgtccaggggacggggaggcaatgagagtgccatgtgaggggcccccagctctgctgcccagagaggagggaacggggctggggggagggggaggtcctagggaagacccactgcctgaatgactgcactgaacacacatgttctgtctagcttgtttggtggaaactgagataaaggagcaggaa

SEQ ID NO: 2891 - DNA, 2177 bp, Canis familiaris
ggcgcccgcccgccgcccgcccggcccccggctgcctcccttcctccctccctctctttctcccttgcgctcgctcgctcgctcgccctcggcgcatgggccccgcgccgggccccggggcctcgggccgcctggcctccggggtcccctaggcccgggcgtgggcggggcagcccggcctgacgcagcctctgtaccccaccaccaccaccaccagggccggcggcggcggctgccccgagggacggggccctaggcggtggcgatgggggccgtccggatcgcgcccggcctggcgctgctgctctgctgcccggtgctcagctccgcgtacgcgctggtggatgcagatgacgtcatgaccaaagaggagcagatcttcctgctgcaccgcgcccaggcccagtgccagaagcggctcaaagaagtcctgcagaggccagctgacataatggaatcagacaaaggatgggcttctgcatccacatcagggaagcctaagaaagagaaggcatctgggaagctctaccctgagtccgaggaggacaaggaggtgcccactggcagcaggcaccgagggcgcccctgcctgcccgagtgggaccacatcctttgctggccgctgggggcaccaggtgaggtggtggctgtgccctgtcccgactacatttatgacttcaatcacaaaggccatgcctaccgtcgctgtgaccgcaatggcagctgggagctggtgcctggacacaaccggacgtgggccaactacagcgagtgtgtcaagttcctgaccaacgagactcgtgaacgggaggtgtttgaccgcctgggcatgatctacaccgtgggctactccgtgtcgctggcctccctcaccgtggccgtgctcatcctggcctacttcaggcggctgcactgcacacgcaactacatccacatgcacctgttcctgtccttcatgcttcgcgccgtgagcatcttcgtcaaggacgcggtgctctactcgggcgccacgctcgacgaggccgagcgcctcacggaggaagagctgcgcgccatcgcccaggcacccccgccgcccaccgccgccgccggctacgcgggctgcagggtagctgtgaccttcttcctttatttcctggccaccaactactactggattctggtggaggggctgtacctgcatagtctcatcttcatggccttcttctcagagaagaagtacctgtggggcttcacggtcttcggctggggtctgcccgccgtcttcgtggctgtgtgggtcagcgtgagagccaccctggccaacaccgggtgctgggacttgagctccgggaacaagaagtggatcatccaggtgcccatcctggcctctattgtgctcaacttcatcttgttcatcaacatcgtccgggtgctcgccaccaagctgcgggagaccaatgccggccggtgtgacacgcggcagcagtaccggaagctgctcaaatccacactggtgctcatgccgctctttggcgtccactacatcgtcttcatggccacgccgtacaccgaggtctcagggacgctctggcaagtccagatgcactacgagatgctcttcaactccttccagggattttttgtcgccatcatatactgtttctgcaatggcgaggtacaggccgagatcaagaaatcctggagccgctggacactggccctggacttcaagcgcaaggcccgaagtgggagcagcagttacagctacggcccgatggtgtctcacacgagcgtgaccaacgtaggcccccgcgcgggacttggcctgcccctcagcccccgcctgctgcccgccgctgccgccaccaccaccgccaccaccaacggccaccccccgatcccgggccacaccaagccaggggccccgaccctcccggccacaccacctgccacggctgctcccaaggacgatgggttcctcaacggctcctgctcggggctggacgaggaggcctccgcgccggagcggcctcccgccctgctgcaggaggagtgggagacggtcatgtgatcggggacctgtgccagggttggactcgtggacataagggccgacagacggaccaagagacaggcggttggacagttgcccactcagggctggggctgggaagacaaaacaaaaaaaaaaaaaa

SEQ ID NO: 2892 - DNA, 1898 bp, Canis familiaris
atgaagacacagatacagaaggcggggcctacactgatcaagaactagatgaaactcttaatgatgaggttgggactccaccggagtctgccattacacggtcctctgagcctgtaagagaggactcctctggaatgcatcatgaaaaccaaacatatcctccttattcaccacaagcgcacgcacaaccaattcatagaatagactcccctggatttaaaacagcttctcaacaggtaagcagcaagcattcaacgtttgtagttagaggtgcattaattaagttttagaatgtggtgattgagttgaagaatatattattttgtcctttcttcagattaagaattaatctttaatttcaatttgagaataccgaggacttaattctaaactttgtgtgttcgtcttacacagcagtatactgaatattttttttaaataaggatgtgaggttatagttttgttattcagcacactaaaatgtatgtctaccagcccctataaatggaagtgggaagttagcaataaagagaagcactatatttaaaatattttaaacacttcacagaaagcagaagcctcatctccagtcccttacctttcgcccgaaacaaacccagcatcatcaacctctgctgttaaccataatgtaactttaactaatgtcagactggaggggcctaccccagctccttctacttcttactcaccacaagctgattctttaagaacaccaagcactgaggcagctcacataatgctaagagatcaagagccatcattgccgtcgcatgtagagccagcaaaggtacctgtgctgcagtgttgccttcatttgtcgctctccatcagtctagcacacaatcatttttgctttgccctttgagtgttccttttgcttttttactgtgggcttacacaccatagtgcttttgaatcaattatgaatcatttcagttttgtagtttgcatggcctctggtggtataatgatcatttgaaaataggccttttaattgggatttgtgcttaatgtttgtattacttttattttttggctttcagtattttccagaattccttatagtatgtagttgtgacttaccataaacatttttgtgttttgtaaattatggtgtctataaattttctttatgatttttatttttggtgtccaaatcaagtggaatcagtagtcagtgtattgcttttgtactaaattttaataattatctttaactcacttttcatttagaacatgctaaaacataaaagcccccctaggtgcattattaaattttgagctttcacttcaactagctttcttactaatctctttcttgtcttgggaataaatggtaggacgtgccattttcatatatcaaattcttctatttttgtctattaaaatagactagaattgaaacaagcctttgtactgaaccgtgaattttttacacaggtgtatagaaaagatccctatcctgaggaaatgatgagacagaaccatgttttgaaacagccagctgttggtcacccagggcagaggccagacaaagagcctaatctgagctatgaatcccaacccccatatgtagaaaaacaggccaacagagacctcgagcagcccacatacagatacgactcctcaagctatacagaccagttttctcgaaactatgatcatcgtctccgctatgaagagcgcattcccacatatgaagagcagtggtcatattacgatgacaaacagccctaccagcctcggccttctcttgataatcagcaccctcgggaccttgactccagacagcatccagaagagtcctcagaaagagggtcttacccacgttttgaagagccagcccctctgtcctatgacagcagaccacgctatga

SEQ ID NO: 2893 - DNA, 771 bp, Canis familiaris
gtacgtgccctggaactttcacgaaccccagccgggacagtaccagttttctggggagcaggatgtggaatattttattaagctggcccatgagctgggactgctggtcatcctgaggccgggaccctatatctgtgcagagtgggacatggtgagtatggctgggccaggttccacctggctggtgcccctgacaggggtgggctgatgggcagggatctgggggacagtaagctagagcagtttaaataagtctctaattccagataacactgagcctgtgactgtagcctgcacaggtgacctttaccctaggacgtgcctcagcagagaggaaccggtgagggtcagaaggcctgtgtccttctctctgtgctcactcacatagctcactttccccgttgtaaaaagcagttcatggtatgggctgtctgcctcatggggtagttgtgaagttaattggaatgatctttgtaaaggctctgattcttcaaacattgcattcatgtgaagtcatctgactttcagtgtgttataatttcttatctccttgaaagttataaaccagaaagcccagttcgaatacccctcctccatgaagctttcctcctttttcctcactgctgagagtaagtcctttcccccacccccaccctgagaccttaaaatgactcctgtcttcttcttttcgcccaccacccccattgtagggaggattacctgcttggctattattaaaagaatctattattctccgttcttctgatccag

SEQ ID NO: 2894 - DNA, 1119 bp, Canis familiaris
atgagcgaggcgggcgaggccaccggcaccaccagcagcagcagcagcagcctcccgcaggctccggcggaggcggcccccgcggcgccccaggaccccgcgcccaagagcccggggggcagcggcgcgccccaggccgcggccccgccgcccgccgcgctcgccgcgggaaaccccggtggggacgcggcccccgcagccacgggcaccgcggcccccgcctcttcggcccccgccggcggtgaggacgcggagaagaaagttctcgccaccaaagtccttggcactgtcaaatggttcaacgtcagaaatggatatggatttataaatcgaaatgacaccaaagaagatgtatttgtacatcacactgccatcaagaagaataacccacggaaatacctgcgcagtgtaggagatggagaaactgtagaatttgatgtggttgaaggagagaagggtgcagaagcagccaatgtgactggaccagacggagttcctgtagaagggagccgttacgctgctgatcggcgtcgatacagacgtggttactatggcagacgccgtggacctccccgtaattacgctggggaggaggaggaggaagggagcggcagcagtgaaggatttgacccccctgccactgacgggcagttctctggggcccggagtcagctgcgccgcccccagtatcgccctcagtaccggaggcggttcccgccttaccacgtgggacagacctttgaccgtcgctcacgggtctttccccatcccaacagaatgcaggccggtgagattggagagatgaaggagggagtcccagaggggacacagctgcagggaccggttcatcgaaatccaacttaccgcccaaggtaccggagaggccctcctcgcccccgacctgccccagctgttggtgaggctgaagataaagagaaccaacaagcagccaatggtccaaaccagccatctgctcgccgtggataccggcgcccatacaactatcggcgtcgcccccgcccccctaatgctccttcacaagatggcaaagagaccaaggcacctgaagttccatctgagaaccccgctccagccaccgagcagagcagtgctgagtaa

SEQ ID NO: 2895 - DNA, 3338 bp, Canis familiaris
gaattccacctgctttgtcttcccccgcggcttccagcttctatattgcccacaccccctcctccctgcccgctccctcctccccgcagacgggggaggaggagaggggagtcccggtcgtcatgacggagcggacgggaaaggatgcccgggctccccacgtggcgggaggcgcgccctcccccgcgccggccgcagagcccgagtcccgacgtcgagacggcggccgcctccgggcgagtcagacctcggacgccccgcgggtcgccgcagccgcagccgcagccgcagccgcagcctcagccgcgccctccgcgccctcggaccggctgctcttctcccggcgcggccagggcgcggaccctggcgggaaggcgcaggacgcgcagccgcggccggacgtggcccgggcggatccgagactcgaagccgcgagcggggcgggagccgacagccccgggcccccgcgccaggaccgagggccgctgcacggcgctccgagcacagcgctgcgccccgccggcccggggcagggccgcagctctccggcctgggagccccgcagcccgcggtgcccgtctggccccgagccgcccgaagatccccggggcgcccgcagcagccagggcgcggcgtgcccgctcatgagccggccggagggcaaggctggcgacggctgcgggacggcaggtgcccacaaggggccgcccaggggcctgtccccgtcccggcagccgctgcccctgtgccccggggcccacgcctggcccggggccgcggggaaagccgccacgcagcccgctgcgctgggcgtggaggacgagggcggcttcgcggccgagggctccccgggcccgctcctcaagggcaagccccggccccccgcgggcccggcggccgcagccggcgccgctcccgctgcgccggggacggcccccgggggcaccgccccggtccccaaggaggactcccgcctccccgcgcccaagggctccctggccgagcaggacgcgccggcgcccgggtgctccccgctggccaccacgatgatggactttatccacgtgcccattctgcccctcggctcggccttcctggcggcgcgcacccggcagctgctggaagcggagacctacgacgccggcgccttcgctccgccgcggggctcgccctccgcgccctgcgccccgctggcggccggcgacttccccgactgtgcgtacccgtccgacgccgagcccaaggacgacgcgttcccgctctacggcgacttccagccgccggccctgaagatcaaggaggaggaggagggcgccgaggcggctgcgcgctccccgcggccgtacctggcggcggggcctcactcctgcgtcttcgcggacgcgccgccggcgctgccggcgctgcccccgctccccccgcgagcgccgtcgtccaggcccggggaaggcgcgcccgcggccgccgcggccgccggctgctccgcgtcgtcggcgtcctcgccggggcccgccctggagtgcgtcctgtacaaggcggagggcgcgccgccgccgcagggcccgttcgccgccgcgccctgcagggttccgggcgccggcgcctgcctgctgccccgggacggcgcggccgccgctgcctcggcgggggccgcgggggccagccccgcgctctaccagccgctcggcctcggcgcccttccgcagctcggctaccaggcggccgtgctcaaggagggcttgccgcaggtgtaccagccgtacctcaactacctgaggcctgattcagatgccagccagagcccacagtacagcttcgagtcattacctcagaagatttgtttaatctgtggggatgaagcatcaggctgtcattatggtgtcctaacttgtgggagctgtaaggtcttctttaaaagggcaatggaagggcagcataactatttatgtgctggaagaaatgactgcattgttgataaaatccgcagaaaaaactgcccagcatgtcgccttagaaagtgctgtcaggctggcatggtccttggaggtcgaaaatttaaaaagttcaataaagtcagagttatgagaacattggatgctgttgctctcccacaacctgtgggcattccaaatgaaagccaagctctaagccaaagaatatctttttcaccaagtcaagatatacagttaattcccccattgattaacctgctaatgagcattgaaccagatgtgatctatgcaggacatgacaacaccaaacctgatacctccagttctttgctgacgagtcttaatcaactaggcgagagacaacttctttcagtagtcaagtggtctaaatcattgccaggttttcgaaatttacacattgatgaccaaataactctcatccagtattcttggatgagcttaatggtgtttggactaggatggagatcttacaaacatgtcagtgggcagatgctatattttgcacctgatctaatactaaatgaacagaggatgaaggaatcatcattctattcattatgcctcaccatgtggcagatcccacaggagtttgtcaagcttcaagttagccaggaagagttcctgtgtatgaaagtattgctacttcttaatacaattcctttggaaggactaagaagtcaaaaccagtttgaagagatgagatcaagctacattagagagctcatcaaagcaattggcttgaggcaaaaaggagttgtctctagctcacagcgtttctaccaactcacaaaacttcttgataacttgcatgatcttgtcaaacagcttcatctgtactgcttgaatacatttatccagtcccgggcactgagtgttgagtttccagaaatgatgtctgaagttattgccgcacagttacccaagatcttggcagggatggtgaaacctctgctctttcataaaaagtgaatgccatttttatctttaacaattaaattttgtggtatgtctgtttctcttttggtcaggattgtgaggtcttgggattttacaattttcttctcaaagccttacatttataacatatcacattgtgttaatttcagaaaaaaatgtgaagttttgttttctgtataatgcataattagaattttaaggtgtttctgtgtgcccatatattctttaacagttcacaagattaaaaaagtactaaaattgtttgccaaagtaaacttagtcttttccatgctatttcatatcatttaagtgaagatttttaacttttgcatctaaccaatcttctactctagaggaaaaaaaatcttatatgtaaaaataaaaagttattttatgttcctcctaggt

SEQ ID NO: 2896 - DNA, 1798 bp, Canis familiaris
ggtgaagaagaagatgaggaggaggaggaagaagaagagagtgaagaaggtggtggggaggaagaagaatcagaagaggaagaggaagagaaacaggaaaatgaatcccaccaccaggcaacaagtaaagaatacattgccgttggagattttactgctcagcaagctggggatcttacatttaagaaaagggaaattctccttataattgaaaaaaaacctgatggttggtggatagctaagaatgctaaaggaaacaaaggtctcattcccagaacctacgtggagccctataataaagaagaaggtcaagacacaagtgaagaagaagacagtgaagaagatgtagaagtgggagaccaaacagcaggaggggaagaagttaaacaaagaactgattctcactggagcgctgtccaaaaagctatctcagagcagataaacactgttgatgtgttaaccacaatgggagctattcctgcaggattcaggccttccacactcttccagcttctggaggaagggaatcagtttcgagcaagttacttcttacaaccagagctcactccttcacaactagccttcagagatctaatgtgggatgctaaaacaggcactattagatcaagaccaagtcgtgtttcattcattctgaccctctggagctgtaaaatgattcctcttccaggaacgagcatccaggttctcagtagacatgtacgcctctgtatatttgatggtaacaaggttctgagcaacattcatacagtcagagccacatggcaatctaaaaagcccaaaacatggaccttttctccccaggttactggcatcttgccctgcttgcttgatggtgattgttttatcagatccaattcttcatccccagatcttggaatattatttgaacttggaatttcttatattcgcaattcaactggtgaaagaggagaattaagttgtggctgggtgtttcttaaactttttgatgccagtggaattcctattccagcaaaaacatatgaactattcttgaatggtggcaccccttatgaaaaaggtgttgaagtggacccttcggtatccagaagagcatatgggagtgttttccatcagatgatgacaatgagaaggcagcctcaactcctagtaaagctgagatctttgaacaggagatcaagagacttgctgagtttactgccagaaacattaattggaagtatgtgtaccattcatttgttgatattttatcgccaaattcttggagatgtactcctgaaagacaggacgagcatgcaaagtgctgatttaattagtaacccagtgttggccaccttccccaagctcttggagcagcctgacatgatggatgcactcaggagttcctgggctgagaaagaaagcacattaaaaagatcagagaagagagacaaagagttcctgaaggccatgtttctcctggtttaccacgactgtgtggtccctcttctgcattccacactcctgcccccattcaggtgggcagaagaagagacagaggctgcccggtggaaagtaattgctgacttccttaagcaaaaccaagaaaatgggggtgccctccaagctctgctgtcaccagatggagtccatgaaccttttgacatttcagagcagacctatgacttgttgggtgaaataagaaagaatgtagcctgaagtggtggtctttgaccctcaagcttcccactgaatctgatggaccctccttgatgacctgaataaaatgacagaaccaaagtaaaaaaaaaaaaaaaaa

SEQ ID NO: 2897 - DNA, 3103 bp, Canis familiaris
gcgagagcagagctgggaagccgcggccgggagggggaagatgaacgcaaccaggtgttcgaaagcttgccactgtgaccccagttccggaagcctggcagccaccgagccccggctgtgacagggcagaggcttgcccggcccgcgccgaggccgggttgaggcgtgtcttggaagtctgcgtcttgaccctgggggcctccgcggccgcccccgccgcggccaccgcagacccagcctcgaactccatccaaggccgcgcgtgcccagggccaccgccatgtccactcccggggccaatgcgtccgcctcctccacccccgaccgtccgaacagcccggtgaccatcccggcggtgatgttcatcttcggggtagtgggcaacctggtggccatcgtggtgctgtgcaagtcgcgcaaggagcagaaggagacgaccttctacacgttggtgtgcgggctggccgtcaccgacctgctgggcacgttgctggtgagtccggtgaccatcgccacgtacatgaagggccagtggccgggaggcgaggccctctgcgagtacagcaccttcatcctgctcttcttcagcctgtccggcctcagcatcatctgtgccatgagtatcgagcgctacctggccatcaaccacgcctacttctacagccactacgtggacaagcggctggcgggcctcacgctcgtcgcggtctatgcgtccaacgtgctcttctgcgcgctgcccaacatgggcctgggcagctcgcggctgcagtacccggacacctggtgcttcatcgactggaccaccaacgtgacggcgcacgccgccttctcctacatgtacgcgggcttcagctccttcctcattctggccacggtgctgtgcaacgtgctggtgtgcggcgcgctgctccgcatgcaccgccagttcatgcgccgcacgtcgctgggcacggagcagcaccccgcggcgggcgcgctcgcggtgccctccgcgctctgccgcagccacccggccgccgccgccccctcccccgcgctgccgcgcctcagcgactttcgccgccgccggagtttccgcgggatagcgggcgccgagatccagatggtcatcctgctcatcgccacctccctggtggtgctcatctgctccatcccgctcgtggtacgggtgttcatcaaccagttatatcagccacgtttggtgaaagaaatcagcaaaaacccagacttgcaggccatccgaattgctgctgtgaaccctatcctggacccctggatatacatccttctgcggaagaccgtgctcagcaaagcaatagagaagattaaatgcctcttctgccgcatcggcgggtcccgcagagaccgctcgggacagcactgctcagagagcagaaggacatcctctgccatgtccggccactctcgctccttcctctcccgggagctgaaggagaccagcagcacatctcagaccctcctctacatgcccgacctcagcgaaaacgggcttggaggcaggaatctgcttcccggtgtccctggcatgggcctgccccaggcagacaccacctccctgaggactttgcgaatatccgagacctcggactcctcccaggggcaggattcagagagtgttttattggtggacgaggttggtggaagcagccaccagtctggccctggcccaaaggggaactctctgcaagtcacttttcccaatgaaacactgaacttatcagagaaatgtatatagtagctaaggaaggaaatacagcactatttctggaagcatataaaatcctgtgcaatagacacataaatgaggtgtttggctgtgctcagaagggctgttttgtccttcaactcacattaaagaacatctgggctctctagcacttttcaaacaatcaagttgattcatacgggaacccatggtctgaagcgcattggttgtcacttcactatgacacaggatttctgtcaccacttgatggctgggaaggcctaccctcagtttttctacttgataggaggatggcataagttttgctattttcataacatccagagctttttatctggcacacagcagcaggccaggtacagaagggctctattccaataaactatgaggactgatcttgtgatttaagtgtctcactaaagcatgaaatgtgaattttattgttgtaaatatgacttaaggtatttaaagtattttcttctctgtgagaaggtttattgttaatacaaggtataataaaattatggtaaccctcttcttcccagtataaccagctgaagttgcagatgttagatttttttcataaacaaggtcaggccaaaatgtggaaaatatacaatgagactcatagctataaaacagatataaatttttaaaagaaagagtttagtattataaaaggaataaagcaaaatactattttaagacatgaagactataatccaaaatattaaagttctttccaagctatgtattataatacatagtgaaaaatttttagtgatgctacatgtattcagaaaactgtgatttcaggagaagctaaccgctggtaaatattttctactttcctccccactgatactttttaaaatatgacaaattttaaaaagtcttaaataacccataattgaagtgtgtaatataaaagaagtctaagcaacttgttttccctcttaaactgttcatagttttactttcctaaggaatgatctagaatatcctttaaaatgtaagaggaagaaggcacattgccccatgaaggcctttatgatgagatgtggaagtatcacagatgccataggagtttaacaacattaggaaattggacacatgaggataaccttctagcagttttgtgtaacacccagtgatgctgtacacatttgaaggacctttctcaaggaactactaagcatgttttgttgcttaaagtgtttttgtgaattgcttggttgtaattaaattctgagcctggtagttgatacagttttaagaagcagttgtaccaactgaaattattttggagattataataaataaatacactcagtctgagttccatataaaaaa

SEQ ID NO: 2898 - DNA, 1053 bp, Canis familiaris
  misc_feature (77)..(77): n comprises a, c, g, or t, or includes no nucleotide
  misc_feature (370)..(370): n comprises a, c, g, or t, or includes no nucleotide
  misc_feature (536)..(537): n comprises a, c, g, or t, or includes no nucleotide
  misc_feature (759)..(759): n comprises a, c, g, or t, or includes no nucleotide
  misc_feature (764)..(764): n comprises a, c, g, or t, or includes no nucleotide
  misc_feature (772)..(772): n comprises a, c, g, or t, or includes no nucleotide
  misc_feature (777)..(777): n comprises a, c, g, or t, or includes no nucleotide
  misc_feature (791)..(791): n comprises a, c, g, or t, or includes no nucleotide
  misc_feature (835)..(837): n comprises a, c, g, or t, or includes no nucleotide
  misc_feature (847)..(847): n comprises a, c, g, or t, or includes no nucleotide
  misc_feature (919)..(919): n comprises a, c, g, or t, or includes no nucleotide
  misc_feature (1012)..(1012): n comprises a, c, g, or t, or includes no nucleotide
  misc_feature (1020)..(1022): n comprises a, c, g, or t, or includes no nucleotide
ggcacgagtaacactttattattattattattttttatcttagaaggaattcaccaaaggcttcatattatgctatngcatctttaattataaaaataagcaaataaaataacttgcatctgtcattaccatgatatgtttcataacctttatatgcacatggagcttaaaaactgtaatttaacaataaataatgacatataccagatatgctcactgtttattccagtactcagccaaaaacctaaatatcatttaaattataaatacataatgcaaatataatggcacaaaaatgtctaaagtgcaaccaaatcacaataggagaatcatgcaaactggtctaggtcagcccccgaatcactctgtncagcaaacacaagacgaagctttggaagtttaaaagggagttggagggagtgggatgggatggggaaaagagaagcaaaaaactagcaacatcgtgagaactgcttctttccatatgtgtagatatatgtattacagatacatatagaagaattactgtggggagnnaaggggggtaccacggtttgaagagatcacagcaaaaaaaaaaaaaaaaagagaaagagagagagaatctactggactgaagwaagacagaattttgctaggaatactcgtgaactacttgtcgcattggggtcctggcttcgtgggtttgcgaaatggacacgacacacaaacttgagtagcttttctggttcggagaagtcagccttgcctggggtgggngtggngtaccagnaaggnaagggtgggggggngtggagagtcaacttagcgtatggtctacctgatttccaagagnnnaaggcagtgnccatatgtttggggacctggggatgggacagttctgagtataaaaatgctcttaacaatctgatgtcagcangcttagaggctgtgtggagacaggcagcagctcctgtgcttgctgctgctgctgctgggtctgctgtgattgctcttggtccttgagcagcangttactgnnnttaaaggctttatggtaaagttgtactcgtg

SEQ ID NO: 2899 - DNA, 395 bp, Canis familiaris
ttcgccgccgccgccgccgcccgccatccaccagccatgccgaagcacgagttctccgtggacatgacctgtgaaggatgctctaacgcggtcagtcgggtgctcaacaagctgggaggagttgagtttgacattgacctgcccaacaagaaggtctgcatcaactctgagcacagcgtggacattctgctggagaccctggagaaaacaggaaaggccgtttcctacctcggccccaagtagtgagggcctggaccctgagcccatgatggaccaaagggagcaggtgggtgaggccccagcccttggacagaatatttcattagctaatgcaaatcatgagttcagggaatcctcacagccccctgagaatacgcagagcactgtgttatgtc

SEQ ID NO: 2900 - DNA, 2326 bp, Canis familiaris
cctgctgctcaccctggagggtctgctctttctctgggccgcgtcctgccaggagtgcaccaagtacaaagtgagcacgtgccgggactgtgtggagtcggggcccggctgcgcctggtgccagaagctgaacttcactgggctaggggagcccgactccgttcgctgtgacacccgagagcagctgctgctgaaaggatgtgcggctgacgacatcatggaccctcagagcctggccgagatccaggaggacaagaagggcggccggcagcagctgtccccgcagaaagtgacgctctacctgagaccaggtcaggcggctgccttcaatgtgaccttccggcgggccaagggctaccccatcgacctgtactacctgatggatctgtcctactccatgctggacgacctcatcaacgtcaagaagctggggggcgacctgctgcgggcgctcaacgaaatcaccgagtccggccgcatcggcttcgggtctttcgtggacaagacggtgctccccttcgtcaacacgcaccccgagaagctgaagaacccgtgccccaacaaggagaaggagtgccaggcgccgttcgccttcagacacgtgctgaagctcacgaacaactccaacaagttccagacggaggtcgggaagcagctgatttcggggaacctggacgcgcccgagggcgggctggatgccatgatgcaggtcgccgcgtgcccggagcaaatcggctggcgcaacgtcactcggctgctggtgttcgccacggacgacggcttccactttgcgggcgacgggaagctgggtgccatcctgacccccaatgacggccgctgccacctggaggacaacatgtacaagaggagcaatgaatttgactacccgtcggtgggccagctggcacacaaactggccgaaagcaacatccagcccatcttcgcggtgaccaagagaatggtgacgacctatgagaagctcaccgaggtcatccccaagtcagcggtcggggagctgtcggacgattccagcaacgtggtccagctcatcaagaacgcctacaacaaactgtcctccagggtcttcctggaccacagcctggcccccagcaccctcaaggtcacctatgactccttctgcagtaacggggtgtcgcaggtggaccagcccagaggggactgcgacggcgtccagatcaacgtcccgatcaccttccaggtgaaggtcacggccacggagtgcatccaggagcagtcgtttataatccgggcactgggcttcacggacacggtgaccgtgcacgtcatcccccagtgcgagtgccagtgccgggacgtgggccaggaccacggcctctgcagyggcaagggctccctggagtgtggcatctgcaggtgtgaggctggctacatcgggaagaactgcgagtgcctgacgcacggccgcagcagccaggagctggagggcagctgtcggagggacaacagctctctcatctgctcggggctgggggactgcctctgcgggcagtgcgtgtgccacaggagcgacgttcccaacaagaacatcttcgggcgctactgcgagtgtgacaatgtcaactgcgagcgctatgacgggcaggtgtgcgggggtaaagttcggggctcctgcaactgcggcaagtgccagtgcgagcagaactacgagggctcggcgtgccagtgcgtgaagtccacccagggctgcctgagcacggagggcatcgagtgcaacgggcgcggccgctgtcgctgtaacgtgtgcgagtgcgacgggggctaccagccgccgctgtgcggggactgcctgggctgcccgtcgccctgtggccggtacatcacctgtgcccagtgcctgaagttcaagcagggcccctcggggaggaactgcagcgtggagtgtgggaacgtgggcctgctgagcaaacccccggagaaggggcgcaggtgcaaggagcgggatctggagggctgctggatcacctacacgctgcggcagcgggccggctgggacagctatgaaatccacgtggacgacagccgggagtgtgtggggggcccccaaatcgcccccatcgtgggcggcaccgtgtcgggagtcgtgctcatcggcatcctcctgctggccatctggaaggctctgacccacctgagtgacctccgcgagttcaagcgattcgagaaggagaagctcaggtcccagtggaacaacgacaacccccttttcaagagcgccaccaccacagtcatgaaccccaggtttgctgagagttagggcgctcggcggagacggcgctggctgagc

SEQ ID NO: 2901 - DNA, 972 bp, Canis familiaris
gaggctgatgaaaagaagcagctccacgttttagagaaactgagggagagcgagcgaaaggcagatgcgcttcaggataaaattgagaaccttgaacgagaactgcagatgtcagaggagaaccaagagctggtgattcttgatgctgagaattccaaagcagaggtggagaccctaaaaacacaaatggaattgactaccaaaagcctgaaagatttagaatccgaccttgtcacggtaaggttcgaaaaagaaaatctgataaaacagctacaagacaaacaaggtcaagtgtctgaattagatacattgctctcctcattcaaaggtcagttagaagaaaaggagagagaaaaaatagagatgaaagaagaatctagagctgccttggagatgctccgaacacagttgaaagagttaaatgaggaaatagcagcattgtgtcatgaccaagaaatccagaaggtcaaggaacagagtctggaccccttggtgcaggaaatacatcagctgagaaacaacactgaaaagctgaaagcccgcctagaagctgatgaaaaggagcagctccgggtcttaggaaaactgaaggaaactgaacatcaggcccgcttgcttaaggatagagtggagagccttgagagagaactagagatatcagggaaaaaccaagagtgcgtggttcttgaggccgagaattccaaagcagaggtagggactctaaaagtaaaaatagaagagatggcccaaaatcttagagatttggaattagatcttgtccacataaggtcagaaaaagagaatatgataaaagaattacaaaaagagcaagaacgggtatctgagttagaactcttaaattcttcctttgaaaatctcttgcaagaaaaagagcaagaaaaagtacagatgagtgaagaatctaaaactgcagtggggatgcttcagacacaattaaaagagctaaatgag

SEQ ID NO: 2902 - DNA, 888 bp, Canis familiaris
gtggattctgagtttcgatacaccctcttcccgattgtttacagcatcatctttgtgctgggggtagttgccaacagctatgtgctgtgggtctttgcctgcctgtacccttccaagaaactcaatgagataaagatcttcatggtgaacctcaccatggctgacctgctcttcttggtgaccctgcccctgtggatcatctactaccacaaccagggcaactggattctccccagtttcctctgcaacctggctggctgcttcttcttcatcaacacctactgctcagtggccttcctggctgtcatcacttacaaccgcttccaggcagtgacccggcccatcaagacagctcaggccaccacccgcaagcgtggtttcttggtgtccctggtcatctgggtggccattgtggctgctgcatcctatttcttcatcctggactccaccaacgtagtgcccagcaagtccggctcgggcaacatcacacgctgctttgagcattatgagaagggcagcgtgcctgtcctcattgtccacgtattcatcgtgttcggattattcatagtattcctcatcatcttcttctgcaacgtggtcatcatccgcaggctgctcatgcagccggtgcagctgcagcacaacgcggaagtcaagcgccgggctctgtggatggtgtgcaccgtcctggccgtgttcatcgtatgcttcgtgccccaccacctagtgcagctgccctggaccctggccgagctgggcttccagagcagcagcttccaccagggtatcaacgatgcccatcaggtcactctctgccttcttagcaccaattgtgtcttagaccccatcatatactgtttcctcaccaagaagttccgcaagcacctc

SEQ ID NO: 2903 - DNA, 1455 bp, Canis familiaris
cctccacgctatgagttcctctggggccccagagcttatgctgagaccagcaagatgaaagtcctagagtttgtggccaagatccacgatacagtccccactgccttcccagtctggtatgaagaggctctgaaagatgaagaagagcgagcccgagccagagttgtagccaaggcttgcactgctgctgtggccagtgcacgtggcaaggccatggccagcagcttctcctgccccaattactgagtcatctgtctgcccatctgcctgctgcccttgtcaaaagtcaccatgccgcggggtcagaagagtaagctccgtgcctgtaagaagcgccgccaggttcgagaagagctgcaggatctggtgggtgctcaggccactgcagcagtgggagaagttttccactccccttcctctctttgtttcaagagttcacctgctgctgggtcatatagcgtttcccagggtcctcagggagccatatccaccagcactactgctgcatctgtttcacacacaagatcaaatgaaagtgctgacaaccaagtggaggaaagaccaagatcctcccaggctcagcccaccgctgagccgttccccagaggcccgctagatgagaaggtagttaaattggtgcattacctgctgtacaagtatcaaatgaaagagctcattagtaaggcaggaatgctgagaaatgtaattcaaatgtataggaatcactttcatgagatcctcaagagagcctctgagcacttggagctggtttttggccttgacttgaaggaagtggatcccaaccggcacatctatgtccttgtgaacaaattggaactaagttatgatgcaatgctgagtgatgatgaaggggttcccaagactggcctgttgatgactattctgggtgtgatcttcacaaagggcaactgtgccgctgaggagcaagtctggcaagtattgaatgtgattgggttatatgcggggatggagcacttcatttttggggagcccaggaagctcatcaccgaggatttggtgaaagaagagtacctggagtacaggcaggtggccaacagtgatcctccacgctatgagttcctgtggggccccagagcctatgccgaaaccagcaagatgaaagtcctggagtttttagccaaggttcattataccgtccctagtgccttcccagcctggtatgaagaagctttgcaagatgaggaagaaagagcacaagctagagctgcagccagggctcacactgcagccatggccagtgcacgtgccagggccatgaccagtgcacattctaagggcataaccaatgagcactccagggccatgaccaatgtgcattccagggccatagccagtgtgcgctccaaggccacgcagacaattcctcccacccctaataaagtctgagcccaactttttaaaaaaaaaaaaaaa

SEQ ID NO: 2904 - DNA, 2947 bp, Canis familiaris
cgttactcacttcccaccaaattcttttgggtgaaggcgctcctgaaccaccctccctggaggagccagccggtcggggtgggccgcgcgcacccgggcctggaagagctcctgttttctggccagacctgtggtcgttccagtgagactcactgcacattttctcaagggtcttctcatcccctaatgtgtaatccttcaacatggacctgctgctttagctaagacatgaccagcaatgaacagtagtaagatatgtgctgattagaaggctcacagcgcagtgtggaggataagacagtgccttacaaaaatggggtttgggagtgacctgaagaattcacatgaagctgtgctaaaattgcaagactgggaattacggttactggaaacagtgaagaaatttatggccctgagaataaaaagtgataaagaatatgcatctactttacagaacctttgtaatcaagttgataaggaaagtactgttcaaatgaattatgtcagcaatgtatccaagtcttggctacttatgattcagcaaacagaacaacttagcagaatcatgaagacacatgcagaggacctaaattctggacccttacacaggctcaccatgatgatcaaagacaagcagcaggtgaagaaaagttttataggtgttcatcagcagatagaggcggaaatgatcaaggttacaaagacagaattagagaaattaaaatccagctatagacagttaataaaagaaatgaattctgccaaagagaaatataaagaagctttagctaaagggaaagaaaccgaaaaggccaaggaacgatatgacaaagcgacaatgaaacttcatgtattgcataatcagtatgtattggcactgaaaggggcacagcttcatcagaatcagtattatgacaccacacttcctttgcttctggactctcttcagaagatgcaagaagaaatgataaaagcactaaaaggtatatttgatgaatacagccagataaccagtctcgttacagaggaaatagtgaatgtccataaagagattcaaatgtcagttgaacagatagaccctagcacagaatataataatttcatagatgttcacagaacaacggctgctaaagagcaagaaattgagtttgatacttccttactagaagaaaatgaaaatcttcaggcaaatgaaattatgtggaataatttaacagcagaaagtttgcaagtaatgttgaaaactttagcagaggaacttatacagacacagcagatgcttgtaaacaaggaggaggctgtcctggagctagagaagagaattgaggagtcctctaagacctgtgaaaagaagtctgatattgtgcttctgctaagccaaaaacagacactagaagagctgaaacagtcagtccagcagctgagatgcactgaggcaaagtttacagcacagaaagaattactagagcaaaaagtacaagaaaatgaagggaaagagccacctccagtagtgaattatgaagaagatgcacgatcagttacatctatggaaagaaaggagaggctatccaaatttgagtccatccgtcattcaattgctggaataattaggtctccaaagtctgcactgggctcttcaacattctctgatacgatccccataagtgagaagcccttggcagaacaggactggtaccacggtgcaattcccagaatagaagcgcaagatctattaaaacaacaaggagacttcttggtgcgagagagtcatgggaaacctggtgaatatgtcctttctgtatattctgatggacaaaggagacactttatcatacaatttgttgataatctatatcgatttgaaggcactggtttttcaaacattcctcaacttatagatcatcactatacaacaaaacaggtcatcactaagaagtcaggtgtagttctgctgaatcctattcctaaggataagaaatgggttctcaatcacgaagatgtcacattgggagaattactgggcaaggggaattttggtgaagtatataagggcatattaaaggataaaactgctgttgctgttaaaacatgtaaagaagatcttcctcaggaactgaaaataaaatttttacaagaagccaaaattctcaagcaatacgatcatcccaatattgtcaaacttataggcgtttgcacacaaagacagcctatctacatcattatggaactggttccaggaggtgatttcctgtcctttctgagaaagaagaaggatgaaataaaactcaaacaattagtgaagttttcattagatgctgcttctggtatgtcctatctcgagagtaaaaactgtatacacagggatctggctgcaagaaactgcctggtaggtgaaaataacgttctgaaaatcagtgactttggaatgtctcgtcaagaggatggtggagtgtattcatcttctggcttaaagcagattcccattaaatggacagcaccagaagctcttaattatgggagatacagttctgagagcgacgtgtggagcttcggcatcctcctctgggagaccttcagcttaggagtgtgcccctaccccggaatgacaaatcagcaggcgacggagcaagtggaaagagggtaccgaatatcagccccccagcattgcccagaggacatttttaaaattatgatgaagtgttgggattataaacctgaaaaccgccccaagttcagtgaacttcagaaagagctcacggtcatcaagaagaaagtcacacagtgacggagcagtgccaaccgcctccgggacctgggcgtctggcagagtgacatcgttctccccgctaacaatgagtttataccacattacctgcaacagtcttctaaggtgatttttgttattaactgttttgttttgttttgtttttaagtatgtgccactcac

SEQ ID NO: 2905 - DNA, 2352 bp, Canis familiaris
agaagcccagcgtttcagcccgcctgtccaccgttgttattgcaggaagggacagcgaagggacaaggctgcgcgacatggccaaggggacggaccggagaggctccggggcgctgaggatgcaggcgtgccggaccaacaacggctttgtgcagaacgagggcctcccggccagcgagcccgagcccgagcccgagcccgagcccgagcccgagcgggcgcggggcccggccagctcgcctccctgcccgggcggggccgcggggctggggctggggctggggctggggctggggctgggggccgcggggccgtacgcaggcatgcccaaggaggtgctgttccagttctcgcgccgggcccgctaccgggcgccccgggaggccctcttctggctcaccgtggcttcggtgctcgcgctcacgggcgccaccatcgccatcatcgccgtgtcgcccaggtgcctggactggtggcaggcggggcccgtgtaccggatctacccgaggtctttcagggacagcgacgcggatgggaacggagacctgaaaggtattcaagagaaactggactacatcacaactttaaatataaaaaccatttggattacttcattttacaaatcatcccttaaagatttccgatatggtatcgaagacttccgagacattgatcctatttttggaacaatgaaagattttgagaatctgcttgcagccatacacgataaaggtttaaaattaataatcgatttcataccaaaccacaccagtgataaacatgcttggtttcaactgagtcggaatcggacagggaaatatactgattattatatctggcatgactgcacccatgaaaatggcacaaccataccacccaacaactggttaagtgtgtacggaaactccagctggcactttgacgaagtacgaaaccagtgttattttcaccagtttttgagagaacagcctgacttaaatttctacaatcttgatgttcaaaaagaaataaaagaaattatacagttctggctcacaaagggtgttgatggttttagtttcgatgctgttaaatttcttctagaagcagaacatctgagagatgaagctcaagtgaacaaggctcaaataccggacacggtcacacactactgggagctataccatgacttcaccaccacgcaagttggaatgcatgacattgtccggagtttccgccagacaatggaccagtacagcagggagcctgggagatacaggttcatggggactgaagcctatggagagagcattgacaggaccatgatgtactatggattgccttttattcaagaagcagactttcccttcaacgattatctcagtaagctaaatactccttctgggaacagtgtgtttgaggttatcacatcctggatggaaaacatgccagaaggaaaatggcctaactggatgatcggtggaccagacaatgcccggctaacttctcgttttggggaagaatatgtcaacatcatgaacatgcttgttttcacactccctggaactcccataacttactatggggaagaaataggaatgagaaatattttagtcacaaatttcaatgaaagctatgatgttaatactcttctctcaaagtcaccaatgcagtgggacaatagctcaaatgctggtttttctgaagccaatcacacctggttacccaccagttcagattaccatactgtgaatgttgatgtccaaaagactcagtccagatcagcattgaagttatatcaagaattaagtttgcttcatgccaatgacctgctcctcagcaggggctggttttgctatttgaggaatgacagccactctgttgtatatgcaagagagctggatggcatcgatagagtctttcttgtggttctgaattttggagaattatcactggtaaatctccaggaaatgatttccaacattcccgcaagaatgagaataaggttaagtactaattctgctgacgatcgcaatacagttgatacgaatgccattttactggataaaggagaaggcctcatccttgaatacaacacgaacgatctccttcatcaccaaacagctttcaaagacagatgttttgtttccaatcgggcatgctattccagtgtattaaacatactgcacagcttgtgttaggcacctctatgaaagagatgaagacactggcattctgttttattacaagcatttgcagtaacttcatgtatagcatgctgctgggtaaaaacagcttgaatgcaaaggttcccaaatgttttttaaaaataataaaattatcacttgcagaacttgaaaaaaaaaaaaaaaa

SEQ ID NO: 2906 - DNA, 716 bp, Canis familiaris
cgccgctgccgctcaccgacgccttcctgctgcgcttcctgcgcgcccgggacttcgacctggagctggcctggcggttgctgaaaaactattataagtggagagcagaatgtccagaaataagcgcagatctatgtcccagaagtattcttggtcttctgaaggctggttaccttggagtcctgagagccagagatcccactggcagcaaagttcttatttacagaattgcacaatgggacccaaaagttttcacagcttatgatgtttttcgtgtaagtctaatcacatccgagcttattgtacaggaggtagaaacgcaacggaatggtatcaaggctgtctttgatctagaaggctggcagttttctcatgcttttcaaattaccccatctgtagccaagaagattgctgctgttcttacagattccttcccattaaaagttcgtggtatccatttgataaatgagccgataattttccatgctgtcttttccatgattaaaccattcctgactgaaaaaattaaggaacggattcacatgcatgggaacaattacaaacaaagcttacttcagcatttcccagacattcttcctctggaatatggtggagctgaattctccatggaggacatttgtcaggagtggacaaattttataatgaagtctgaaaattatctcagcagcatttcacagatcagcgaatgagaaaaa

SEQ ID NO: 2907 - DNA, 1523 bp, Canis familiaris
acaccaatgtggaggggagacgcgcggtttacccgccgggtctgcgggggccgcagctgcaggtggggtgcgaacctgtgttcagcggttcccgaagcgccacggctagtgcaggcggcccactctctgaccccctgcctggaaccccggccagcccccgccggcctcctctccacctcccctgggctgctcgggactttggaaagcagaaatggccaaactcctccaaccttcacccaagttcttgcctgaagagtggcacatcgctaacaagaaccagtaccacagagcagaggcccaaaggtcccggtccgaacgcctggtggcagaaagccagaggcttgtggatgagattgaaaagaccacaagaaagtctcagagcgatgtaaacaagaaactagaacagagactcgaggaagtcaggttctggaagaaggagctggatgacaagctggagcagctagtgtgcaccacagaggacctgctcacttatcagactaggctgcagaacgccctggagagcctgaaggagcccctgcacatcacccagatgtgcctggaatacagggacaagcgcattggcatcgacctggtgcatgatgaggtggaacaggagctgctgaaggaggctgaggtcatccacggggtcatggccctgctgacccgcaccatggatgaggtgactgagcagatcaggctgaaccgctccgccaagtacaacctagagaaggatttgaaggacaagtttgtggccttgaccatcgacgatgtttgcttctccctcaacaacaactccccaggcatctactactcggacagtgttgtgagagttgagccacactccgtgagtctggaggactggctggacttctccaacaccaatgtggagaaggcgaacaggcagagaaacaactccctggcgctgaaggccctggtggaccggatcctgtcccagacagctgacgacctgcgcaggcagtgtgacatggtggacacggcattccagatggggctgaaggagaccaaggccgccagggaccagctggctgcccacctggccaaggtcatggaagagatcgcatgccaggagaagaacatgacggttctggagaaggccatccttgatcaagaggggcctgccaaggtggctcacacgcgcctggagacccgaacacgcaggcccaacgtagagctgtgccgcgatgtcgcacagtaccggctggtcaaggaagtcggagagattgcccagaatgtcggaaggctgaaggaggccctggcacaggcgcaggtggagctgaagggcctgaaccgccggcaactggcgctgcaggaggaagtccaggtcaaggagaacaccatctacatcgaccgagtgctctgcacccacatgaggaagtccaatcccctgcgggatgggggcgaccaaggccagtgggccagggcctgcgccccgacaccatctgctgaggatggcacttcacacactgattaaaccctggtcaccgtcaaaaaaaaaaaaaaaa

SEQ ID NO: 2908 - DNA, 1092 bp, Canis familiaris
gtggatccttttttacctggtgcacctgataattgtcgagggtgttaaaataatcgaagccacagactgtctcctccaatatctcctggatgcggctctacaaacacagtgccctgtttataatcaagagacaatacggtgctctctggacatcacccaaggggacagccccactagaaactgtgttctctagttaatgtcacaggggcagctgaagaaacatctggcaaggaggaagccagatgaaagagactcctgggcttatgattaacttattggaagttgagcttggtccctagcactcacgttctcatcttgcctgtcatgacctggggtttgaacacaaagatgtgtcaatcttccaacatctggcagctggtttctgccctggaagtgtatattcctctaattttcccctctacacacacacacacacacacacacatacacacacagatacacacacaatgatgggtaaagggtctcactccactcagctgtgatggtagtgtggtctgctcaccagtgagctgccccaagttgccttgctgtacctgttgatgtctcctgacacataacaagaagcttcagagaagagggtcgagcaggcgtacaatgacatgaaaatcctcattctggacttttctgcacccagagcacctgaaagaaggaaaccagcaacagagcaacctgttctcttaaccatgttgagttaaatgagctggaaagcaggaggttctagaatgcagggtcctggttacctgagttctaaagcagttgtggatgtcaccaaggaagtgacgtcactttttcaagattccagcatctggggctcttctttcagtcagacctatccagaaccccttcttgcagatgactgcttacccctgtcgtctccttaactgcctcatcagccaacaaggccattgccataactctctgttaattccagtaaggtcctaacttttaggagacagagctgaatccagacctttagttttctgcttggcttctcagttctgtgttgtatctaactcacgatgtctgtcatataggtccctgtttcccaattagcacagtggtagaatcaga

SEQ ID NO: 2909 - DNA, 1221 bp, Canis familiaris
gatgcccatcaacatccacaagccaattactggcaaggcgaatttccattgcataattctgttgaagaccattttgcagatgtggcacctgtcggctgctaccctgccaatgcgttccaattgttcgatatgattggtaatgtttgggaatggacctcttctgtatatcaaggtgcgcatgatcaacatatgggaaattatacggatctgcgtcagcaaagcatcgcagcaacccaatatgtgattaaaggtggttctttcttatgtgcttcaagttattgctctcgttatcgaaatagtagtcgttatccgcaagagtttgatttggctgcaacccatgtggggtttagaacagtattacgcacccatcaataagacaaagataagctaaaatctaaagatatggcgaatttatacacttaaatatgaattcgcttactttaaaaaagaaaggttgaaaagaacaaagcaacacttaaccactttcgctaaaaatcagtgcttatacacgtttacgtttttcaatcatcttgccaaataccaaccccaattcaaacaacatccacattggaattgccaacatgatcatcgaaatagcatctggtggcgtgacaaacattgcaataaaaaaacagcccacaataataaagcgtcttttttccaccagtgtttgcgtgctgaccaaaccgattaaaatcagtaccagtgtaataattggaatttcaaaagtgaccccaaacaccaaaaagagttttaaacagaaacttaagtaactgttaatgtccgtcattggcgcaacggtatcaggtgaaacactgataaaaaaatgcagaatcgaaggcaaggcaataaaataggcaaaggcaattcctgaataaaacaagcaaatactgctcaataacaatgggaatgccagattcttttctttttcatacaacgcaggtttaataaatgcccaaatctgataaataatgaaaggcatcgccaacatcagcgcaataaagaaattcagtttaaaaggtgccataaatgttgcagttacatctgtagcaatcatggtcgaactggcaggtaattgggcacgtaatggttcagataacattgaataagttctgtttgcaaatggcagcaaacagaaaaaaagcacaatcaataccccgataattttaaacaaatstgacgcaacagcatcaaatgtcgggtgatcggcattgcttcaag

SEQ ID NO: 2910 - DNA, 738 bp, Canis familiaris
gtgatcacgggtggaaagtcggtggaggatgcccaggaggccagcctggcactcacccagaagggtgtcaaagtgtttgccgtgggtgtgaagaacatcgactcagaggaggttgggaaaatagcgtccaacagtgctacagcgttccgagtggggaacgtccaggagctgtctgaattgagtgagcaagttctggaaactctgcacgatgcaatgcatgaaaccttatgtccgggtgtgaccgatatttccaaagtctgtaatctggatgtgattctggggtttgacggatcaagggatcagaatgtctttgtgacccagaagggccttgagtccaagatggatgccatcttgaatagaatcagccagatgcaaagaatcagctgcagcggcagccagatgcccaccgtgcgggtgtcggtggtggccaacacaccctcaggtcccgtggaagcctttgactttgccgagtaccagccagaactgtttgagaagttccggaacatgcgcaaccagcacccctatgtcctcactgcagacacactgaaggtctatcagaacaagttcagacagtcttcagcagacaatgtaaaggtggtcattcattttacggatggagtggatggaaatctggctgatttacaaaaggcatctgaggaactccgacaagaaggtgtccaggctcttatcctcgtgggccttgaacgtgtagccaacttggagcagctgatgcagttg

SEQ ID NO: 2911 - DNA, 306 bp, Canis familiaris
gtgagctgtcctgccagctataccagaggtcaggagacatggggctgggcgtgcccttcaacatcgccagctacgccctgctcacctacatgatcgcacacatcacaggcctgaaggtgggctgctctcaggcaagaacggctgctgcagccgaaagcactgagcgcttagattatttaatgtggaaagactgactgcagagaagtcagtgtctgattagttttaaaatgtgacgttagaaatctagttggtcacctggcaagcttccaggaagctatcctgtctttgtcgtttgtataacaaaca

SEQ ID NO: 2912 - DNA, 512 bp, Canis familiaris
catcgcctttatggaatgtacccttgcaactttgtctcctttctacgctctcactacagtatgaaggagaacttggacacttttgaagaagtggtcagggtaagtgaagactgctcatctaatacttgccatactgtgtgcacaggctacacttgggtcttgtgttcagtgggagacagattttgaaaagcagctcagcttcccccacccccagtcctaggcagccactgatctgctttctgcctttgcagatgtgcctctcctgatgagcatttcacagacatggggtcttctgtgactgggttctttcatttggtggaatttttcagggttcatccatgctgtagcaagtgtcaagagtccattcccttttattgtcaagtaatccattgtgtggagacaccacagaacttaagccttttataatttgtcaacccaaacttttctagccaatgatggagcatgtgcgaattcacccggaattagtgactggatccaaggaccatgaactg

SEQ ID NO: 2913 - DNA, 217 bp, Canis familiaris
ctttttcaagttgggtttctgagtcctgccacattcacggtgtacgaataccacaggccaggtaatccctccgactctcttcaggggccttcctcacagcagtcattgcatcgctcctttcgggagaagctcacttacatcccccatgtcttcagccccccagaatcaaccactccacctttggtctcatcacattttcgagagagctccgttatac

SEQ ID NO: 2914 - DNA, 236 bp, Canis familiaris
caaccatcatctacaaaaaacacaaattagtgagctggtgacatttggaattaaacctataaaatatgctttgttttaagtatatcaaaaatttaaaacttactaatgcttcattttgtagatacacaaaattatctgatcctgccaattggctaaaaatagatcctgtgaacgggcaaataacaacaattgccgttttggacagagaatcaccaaatgtgaaaaacaacatatat

SEQ ID NO: 2915 - DNA, 340 bp, Canis familiaris
gaagagctatgagctgcccgatggccaagtcatcactattggcaacgagcgctttcgctgccctgagacactattccagccctcctttatcggtgagtggtagggcctggggcagaggtacagcctttccctggaaatctaggggtggcccagagcaaaatctattatcatcaagaaggattaaggagcccttgagttaaaagaagtcatagcttagggtcccacacagctcagcctcacatcctggtgactcagtaaagggagggccatactgttctgtcgctgtgatacgacaaagatgacacactgacttcatgtcaaaataaaggatgtgtctgtg

SEQ ID NO: 2916 - DNA, 341 bp, Canis familiaris
attcttcgacacagtgccacatggctttgaaacccacactttacaggaacacaacttggctaattacctgtgagtgtaccagtcttggactcttcagactcttctggtgcccactaccctgtgcccatcaatgcctccttctaagcaagcttgagaaacaaaagagagatgtgacttccgtttctttataccgtcgtgctcaggctttgagagaaagacccacactagtggtcctcctgtcccaggaggaggttgacaaaggaaagaacttgcagccctttgtgtgaatgagaccttctagaacatgaactggaaaggtggaaaagaataagtggaatcga

SEQ ID NO: 2917 - DNA, 185 bp, Canis familiaris
gagctaccccattgtgcctttcctgggcccaactgccccaacctgccaactgcctgatttgtccctttgttcttccctggtcaggatttgacacagtcacaactgccatctcctggagcctcctgtacttggtgacaaaccccaatgtacagaaaaagatccagaaggagctgggtaggtggtac

SEQ ID NO: 2918 - DNA, 200 bp, Canis familiaris
gtaaatccccatggatcccctgctgtctgatactgggccttcctcaggtccatttaccccatcagggctggtgggagggacatgtatgggaggcaaggggatgtctgcggtcctgagcctgactgggcttccttcctccccagcaccacaagagacacgagtctgagtggcttttacatccccaagggacgttgcgtctt

SEQ ID NO: 2919 - DNA, 218 bp, Canis familiaris
tcctcagtcaacggcaactgtgtctgtcacagtcattgatgtgaatgaaaacccttattttgccccaaatcccaagatcattcgccaagaagaaggccttcatgctgggaccatgttgacaacgttcactgctcaggacccagatcgatatatgcagcaaaatattaggtatcaaacgccatgtgtagctttaaaaaatatactctatgtttatgctg

SEQ ID NO: 2920 - DNA, 984 bp, Canis familiaris
atggcaagcgcctctcctgaacagaatcaaaatcactgctcagctgtaaacaacagcaacatgctgatgcagggcaacctccccaccctgaccttatctgggaagatccgagtgacagttactttcttcctttttcttctctctacaatttttaatgcttctttcttgttgaaacttcagaagtggactcaaaagaaagagaaagggaagaagctctcgagaatgaaagtgcttttaaaacatctgaccttggccaacctgttggagaccctgattgtcatgccactggatggaatgtggaacattacagtccaatggtatgctggagagttcctctgcaaagtcctcagctatctgaagcttttctccatgtatgccccagccttcatgatggtagtgatcagcctggaccgctccctggccatcacgaggcctctagctatgaaaaacaatggcaagctcggacagtccatgattggcctggcctggctcctcagtggtatctttgctggaccacagttgtacatcttcaggatgatccacttagcagatagctctggacagacagagggtttcccccaatgtgtaacacactgcagttttccacaatggtggcatcaagccttttataacttcttcaccttcagctgcctcttcatcatccctcttttcatcacgttaatctgcaatgcaaaaatcatatttactctgacacgagtccttcatcaggatccccatgaattacaactgaatcagtccaagaataatataccaagagctcggctgaggaccttgaaaatgacagttgcatttgccacttcgtttactgtgtgctggactccctactatgttctaggaatttggtactggtttgatcctgaaatgttaaacagggtgtcagatccagtaaatcacttcttctttctttttgctcttttaaatccatgctttgatccacttatatatggatatttctctctgtaa

SEQ ID NO: 2921 - DNA, 612 bp, Canis familiaris
ggatgaacctgcctttatggacgatggcggctttaacttacggcctggcatggagacctccatcagcatgaggaaggaagccctggacagacttggaggcaactatggtgactgcaccaagaatggcagcgaagtccctgtggagaacctctatcgttccaagtacacacagcaggtgtgtatccgctcctgcttccaggagaacatgatcaaacagtgtggctgtgcctacatcttctacccattgcccaagaatgcggagttctgtgactacaggaagcataattcctggggttactgttactataagctccaggatgccttttcctcagaccacctgggctgtttcaccaagtgcaggaaaccatgtagtgtggccagctaccagctctctgccggttattcacgatggccctcagtgacatcccaggactggatcttccagatgctatcccgacagaacaattacaccatcaacaacaaaagaaacggagtcgccaaactcaacatcttcttcaaggagctgaaatacaaaaccaattcggagtctccctctgtcacgatggtcaccctcctgtccaacctgggcagccagtggagcctgtggttcgg

SEQ ID NO: 2922 - DNA, 272 bp, Canis familiaris
tggtacacaaagaaccaaacaaaagtccttattcttccttcactttagacatcgatatttttctctcccaccccaagtcttttgtccagagaatagtccttaccactgattttgtgtgtgtgtgtgtgtgtgtgtgtgtgtgtgtgtgtgagagagagagagagagagagagagagagaaagagaaagagaaagagaaagagaattgtagtccaggctgctgctcctcgttttcattctaactgatagttctgatatctttctgcctgctta

SEQ ID NO: 2923 - DNA, 328 bp, Canis familiaris
ccacgtcaggctccctgcatggagcctgcttctccctctgcctgtgtctctgccccgctctctctctctctctctctctctctgtgtgtgtgtgtgtgtgtctatgaataaataaataaattatctttaaaaaaataaaaaagaaaaaaaatctgttacttggagaaagcgccatgttgaagtctcctacatccagtgtattattatctgagtatgtctttactttggttattaattgatatactgggcagctcccacattagtggcataaatattcatgattgttaggtcttctcgtttgataggccctttaaacatgatatatttc

SEQ ID NO: 2924 - DNA, 696 bp, Canis familiaris
acaccctgggccaaaggcagcactaaaccgctgagccacccgggctgcccacacctctggttttttagctgcttccacaacagtgggctccggaagagctggacacttatctcttgctcagcacagcttcactgtgcttaaatcagcactgacacagattgggcacttcgtacactcgtgctgctagtaaacccccactgaaacaagggacatagaatgtggtcccaggaggcaccaaatccctgaggtcccagcggctctgcttgttagaactgacgggtactcctgtttctcaaaatgcaaagcactagccttcagaatctgctcctgaccaactcaaaagccatcttgtcacaaagtatatgaacacacacacacacacacacacacacacccctacacccactcactctttctcaccactctggattactattttaggaatagctcctgtatttatatcgtagctcctgcagcttcttccagatgttgtcaccaaccatcggccaggtatgtttcatcagacacagagtattcaacacagaacatctcatacaattatctaaactttttaaaaaaagattttatttatttattcatgagagacacacagagagaggcagagacataggcagagggagaagcaggctccatgcagggaccctgatgcaggactcgatcccaggactccaggat

SEQ ID NO: 2925 - DNA, 296 bp, Canis familiaris
atctagccacacatggacccctgcatagagctttctgctcagcagagaatctgctgctccctctccctgtgccattccccctgcttatgctttctgtcaaataaataaagtattttttaaaaaagaagaacactaatttgaaaagagatatgcaccctcatgtttatagcagcattttttacaacctaaatgtccttggattgatgaatgtataaagaagatgtggaatacacacacacacacacacacacacacacacacacacacaccggaatattaaccatgaaaaggaatga

SEQ ID NO: 2926 - DNA, 3809 bp, Canis familiaris
ggctgcagcggctgcgccagaccttggctccgtagcccaccgcagctggaggcgttgctggcggtccatgctcgcagaggaggtgtgcagatgggagtgacgtccacatggagatacggaagaggacgggggattggcaccgcgcggccatggtcagctgggcccgcttcgtctgcctggccgcggtcaccatggcaaccttgtccctggcccggccctccttcaatttagtggaggacaccacgttagagccggaaggggcgccttactggaccaacacagaaaagatggaaaagcgtctgcacgctgtccctgcggccaatactgtcaagtttcgctgtccagctggggggaatccaacaccaactatgaggtggctgaagaacggaaaggagtttaagcaggaacatcgcattggaggctataaggtacgaaaccagcactggagccttattatggagagcgtggtcccatccgacaaaggaaattacacctgtgtggtagagaatgagtatggctccattaatcacacgtaccacctcgacgtcgtcgagcgatcgccacaccggcccatcctccaagctgggctgccggcaaatcgctccaccgtggtcggaggcgatgtggagtttgtctgcaaagtttacagcgatgcccagccccacattcagtggatcaaacacgtagaaaagaacgggagcaaatacgggcccgatgggttgccgtacctcaaggttctcaagcactcgggaataaatagttccaatgcagaagtgctggctctgttcaatgtgactgaggaggatgctggggagtatatatgtaaggtctccaattatatagggcaggccaaccagtctgcctggctcactgtcctgccaaaacagcaagctcctgtaagagaaaaggagattacggcttccccagactacctggagatagccatttactgcataggggtcttcctaattgcctgtatggtggtgacagtcatcctgtgccgaatgaagaccacaaccaagaagccagacttcagcagccagccagctgtgcacaagctgaccaagcgcatccccttgcggagacaggtaacagtgtctgctgagtccagctcctctatgaactccaacactccgctggtgaggataaccacgcgcctctcctcaacagcagacacccccatgctggcaggggtctccgagtatgaactgccggaagatccaaagtgggagtttcccagagataagctgacgctgggcaaacctctgggggaaggttgctttgggcaagtggtcatggccgaagcggtgggaattgacaaagagaagcccaaggaagcagtcacggtggcggtgaagatgttgaaagacgatgccacagagaaagatctttctgatctagtgtcagagatggagatgatgaagatgattggaaaacacaaaaatatcataaatctccttggagcctgtactcaggatggcccactctacgtcattgtggagtatgcctcgaaaggcaacctccgtgaatacctccgagcccggaggccgcctgggatggagtattcctatgacattaaccgcgttcctgaggagcagatgacctttaaggacttggtgtcgtgtacctaccagctggcgagaggcatggagtacttggcttcccagaaatgtattcatcgggatttagcagccagaaatgttttggtaacagaaaacaatgtgatgaaaatagcagactttggactggccagagatatcaacaatatagactattacaaaaagaccacaaatgggcgacttccggtcaagtggatggctccagaagcccttttcgatcgagtgtacacccatcagagtgacgtttggtccttcggggtgttaatgtgggagatcttcacgctggggggctcaccatacccagggattccggtggaggaactatttaagctgctcaaggaggggcacaggatggacaagccagcaaactgcaccaatgaactgtatatgatgatgagggactgttggcatgctgtgccctcacagaggccgacgttcaagcagttggtagaggacttggatcggattctcactctcacaaccaatgaggaatacttggacctcagtcagcctctcgaacagtattcacctagttatcctgacacaaggagttcgtgttcttcaggagacgattctgttttctctccagaccccatgccttacgaaccatgccttcctcagtatccacatgtaaacggcagtgttaaaacatgaatgagcttgtccttctgtccccacacgggacagcaccagggacctagccacactgagcaacggggccaggcctccaaggccggttgcgtccgcttgtatatatggatcagaggagtaaataattggaaaagtaatcggcacacgtgtaaagaatttatacggttggaaacttataatcttcaccaggagaagaagaatgtttctggggcaatggactgccatgggccaccacgcgcccatgacccgctgtgggtactggctgtggaccagctggactcaaggcaaacctactttcttgccttccttgtgaattttgtaataattggagaaaatatatgtcagcacacacttacagagcacaattgcagtatataggtgctggatgtatgtaaaatatattcaaattatgtataaatatatattatatatttacaaggaattattttttgtattgattttaaatggatgtcccagtgcacctagaaaatcggtctctcttttgtttttaatagctatttgctaaatgctgttcttacacagaatttcttaattttcaccgagcaggggtggaaaagtacttttgctttcagggaaaaaaaaatggtataacgttaatttattaatgaattggtaatatacaaaacaattaatcatttatagtttttgttttgtttttattttgtaatttaagcggcatttctatgcaggcagcacatcggactagttaatctgttgcttggacttaactagttgtcagattctttgaaaagagaaatatttacagaatatgactaatttgggggaaaatgaagttttgatttatttgtttaaactctgctgtcagatgattgttcttctgccaccaaaatgccagtagtaaacaaacccatcgataggaaagtattttgttttgctgtgcagctctgtcattgggcccatggagcgcggaactggacttcccaagacaaatggtaccagcgttctcttaaaaagatgccttaatccattcctcgagggtggaccttagttgagatgatagcagactgtactcccctccggcagctggccttctgccctgagttgcacgttaatcagattagcctgtattctcttcagtggattttgataatggcttccagattcattggcgttagggaagccttttagaatcttcacgtgtcatcgtcgaaattgaaacactgagttgttctgctgatggttttggagatacttccatctttttaagggtttgcttctgtctaattctggcaggacctcaccaaaagatcgggcctcgtaccaacgtcagacacgatgtcgccgtgttgtgcgttctgtatttaaagtattgtgttttgcttcggaaacacctactcactttgctatagccatgcaacatgaacgcagattacactgattctacttgttacgaaattggagaaagtatttaataaaacctgttaatttttatactgacaataaaaatgtttctacagatattaatgttaacaagacaaaataaatgtcacgcagctt

SEQ ID NO: 2927 - DNA, 1325 bp, Canis familiaris
tggcgcgcgtcatggctgcttcgagcccgccccgggccggggagctgctggccgaggcccgcagagctttccgggaggagttcggggccgagcccgagctggcggtgtcggcgccgggccgggtcaacctgatcggggagcacacggactacaaccagggcctggtgctgcccatggcgctggagctggtgaccgtgctggtgggcagccctcgggcagatggccttgtctccctcctcaccacctctgaggatgctgatgaacccaggcggctgcagtttccactgcctacagcccagcgatcactggagcctgggaccccccgctgggccaactatgtcaagggagtgattcagcactacccagctgcccccctccctggcttcagtgcagtggtggtcagctcagtgcccctggggggtgggctgtccagctccgcatccctggaagtggccacgtacaccttcctgcagcagctctgcccagactcagggtcagtagctgcccgggctcaggtgtgtcagcaggccgagcacagcttcgcaggggtgccctgtggtatcatggaccagctcatcgcactgctcgggcaggaaggccacgcgctgctcattgactgcaggtccctggagacaagcctggtgccactgtcagagcctaagttggctgtgctcatcaccaactccaatgtgcgccactccctgggctccagtgagtaccctctgcggcggcgccagtgtgaagaagtagcccgggcattgggcaaggaaagccttcgggaggtgcagctggaggagctggaggcgggcagagagctggtgagcaaggaaggcttccggcgggcacggcacgtggtaggtgagatccggcgcacggcccaggcggcagctgccttgtgccgcggagactacagagccttcggtcgcctcatggtagagagtcaccactcgctcagggatgactacgaggtgagctgtcctgagctggaccagctcgtggaggctgcgctttcagcacctggggtttacggcagccgcatgactggtggtggctttggcggctgcactgtgaccctgctggaagcctccttcacttcccaggtcatgcagcacatacaggagcagtacagtggtaccgccaccttctacctctctcaggcagccgatggtgccaaggtgctgcactggtgaggcactcctccaggatggcacccgctgggcagggggcctgccaggcagcaagtcacgaagctccggggctctggcatctgccctcacatctgggtgctcaataaacttgtgcctcccaaaaaaaaaaaaaaaaaa

SEQ ID NO: 2928 - DNA, 500 bp, Canis familiaris
atgccgagatggagcttcgccgaggccagatcctctggttccggggcctgaaccgtatccagactcagatcgacgtaattaacacattccagacgggagcctcttttaagggagtcctaaagcgacagaccatggggcagcatcttgatgtaaaacatgttcctagctcatcctatgtaacagttgcgccagttacatctccccccaccacttctgttcctgctgctgtctcatctcctactctgggcaatcaaagtggtgaaagcgttccatagttccctccatgaaagcattcagaaacccaagaaccaaaactccatccacaacttcatgacccaccctgaattcgccatagatgaggaggtgccacgaacaccactcctggatgagcatgaggaggaaaatcttgaagtcctaaggctgggactagggtgctcctgttggatggtgaggtcactccgtatgccaacaaaaacaacaatgccgtggactgccaccaa

SEQ ID NO: 2929 - DNA, 320 bp, Canis familiaris
atgccgagatggagcttcgccgaggccagatcctctggttccggggcctgaaccgtatccagactcagatcaaagtggtgaaagcgttccatagttccctccatgaaagcattcagaaacccaagaaccaaaactccatccacaacttcatgacccaccctgaattcgccatagatgaggaggtgccacgaacaccactcctggatgagcatgaggaggaaaatcttgaagttcctaaggctgggactagggtgctcctgctggatggtgaggtcactccgtatgccaacaaaaacaacaatgccgtggactgccaccaa

SEQ ID NO: 2930 - DNA, 1850 bp, Canis familiaris
tggggggggccgagccgccgccatgcgccgccgaggccgggcctgcgggctgctgctgctgctgctcgccctggggctgtgccggccgctcggggcgcgcccccggaacgtgctgctgatcgtcgcggacgacggaggcttcgagagcggcgcctacaacaacacggccattagcaccccgcacctggacgccttggcccgccgcagcctggtcttccgcaatgccttcacgaccgtcagcagctgctctcctagccgagccagcctgctcaccggcctgccccagcatcagaacgggatgtatggcctgcaccaggacgtccaccacttcaactccttcgacggagtgcggagcctgccgctgctgcttggccgggccggcgtgcgcacaggcatcatcgggaagaagcacgtggggcccgagtcggtgtacccgtttgagtttgcgcacacggaggagaacagctctgtcctccaggtggggcggaacatcaccaggatcaagctgttggtccggaagttcctgcagacccaggacgacaggcccttcttcctgtacgtcgccttccatgacccccaccgctgtgggcactcccagccccagttcgggaccttctgcgagaagtttggcaatggggagagcggcatggggcggatcccagactggaccccccagacctatgaccctctggacgtgctggtgccttacttcgtccccgacacgcctgcggcacgagctgacctagctgctcagtacaccaccatcggccgcatggaccaaggggttgggcttgtgctccaggagctgcgtggagcaggtgtcctgaatgacaccctggtgatcttcacatccgacaacggaatccccttccccagcggcaggaccaacctgtactggccgggcactgctgagcccttgctcatctcgtccccagagcacaggaaacgttggggccaagtcagcgaggcctacgtgagcctcttagatctcacgcccaccatcctggattggttctccatcccttacccgagctacgccatctttggctcaaagactgtccagctcactggccggtctctcctgccagcgctggaggcagagcccctctggagcaccgtctttggcagccagagccaccacgaggtcaccatggcctaccccatgcgctccgtgcaccaccagggcttctgccttgtgcacaacctgaacttcaaaatgccctttcccatcgaccaggacttctacgtctcgcccacctttcaggacctcctgaatcgcaccgtggccggccacccgacaggctggtataaggatctccgtcattactactaccgggagcgttgggagctttacgacaggagccaggacccccacgagacccggaacctggccgctgacccatactatgccccggttctggagctgcttcagacccaactggccaagtggcagtgggagacccatgacccctgggtgtgtgctcccgatggtgtcctggaagagaagctctccccccagtgccggccactccacaatgagctgtgacagttcctgggggcacgagggaggcctcctcaggcctggtccccaccttttcagctgctgtgggaggatgggccatagtggcccacctgaggagggctctccctgctgctggggtcattcctgccactgcctgggagggagagtggggcaggtaccccggccctccctccccccgtgctagaggacactgctgttcctgtgtccaagccatgtctcagcctaggaattccaggggggcctggagcagggtgggatccccagcccgtgacctgtgaggatggttgaggatggtctgggcaggggc

SEQ ID NO: 2931 - DNA, 176 bp, Canis familiaris
gggtgtctgggtggctcagtggttgatttagcagtgctaaatctgcttagttcttagtatctgccttagttcaggtcctgattctgggattctgggatggagtcctgcatctggctcactgctgagagcctgcttctccctttgcctatgtctctgcctctctgtgtctcttatga

SEQ ID NO: 2932 - DNA, 577 bp, Canis familiaris
aataataaacacaaaggtcgcagcacatttacggataaacagagtttaagattatattaacatcctttttctttttgaaaacacattgtcagaaactcaaatgcaaataaaaatcacaaacacaaagaaaaagaaaattcaagaaaaataataaaatattccctcataatcataaacttctgaattcaagaaaaataataaaatattccctcataatcataaacttctgaattaatctgtcccctttctgggcttctataacacattacataggtttcttattactttctccttgtctaattatgtataaaaattttaaatagccatggcctaaggcatcgagattccaaaaagtaaggctgaaggctgcctgggtggctcagaagtttagtgccaccttcagcctaaggtgtaatcctggagaccaggatggagtcccacgtcgggctccctgcatggagcctgcttctccctctgcctgtgtctctgcctctctctctctctctctctctctctctctctctctctctctcgtataaataaattttttaaaaaatttttaaaaaagacaaaaagt

SEQ ID NO: 2933 - DNA, 5703 bp, Canis familiaris
ggggcgcagagctgcggagccaggcggcggggagcgggcgtcgggggccccgctgcgagccgggagggagacaagccgcactccggggccagggacgccgcggccgcaggtttatccccacagcttggcctgaaagctcactgcatgcttttaccagctggggtccaggatcctgaagacacagtgctggaagaggtaaccaaggtccagaccagataagtgacctgcctaagaccacattcgtggactagcagcagcccagtgtcctggcccctgagcaagactctgtccaaggaatatatacttctggaagctgggccaaagcaaggtttttcagaagggtctccattttagggtgttctaacacctgagccctattatattcatcatgggcttctgcctggctctgacatggacattcctggttgggtcatggacatccatgggagctcagaaacccatttcctgggaggtgcagcgatttgatgggtggtacaacaacctcatggagcacaagtggggcagcaaaggctctcggctccagcgcctggttccagccagctatgcagatggtgtgtaccagcccttgggagaacctcacctgcctaaccccagagaccttagcaacgctgccatgaggggccctgcagggcaggcctccctgcgaaaccgaacagtgctaggagtcttctttggctaccacgtgctctcggacctggtgagcgtggagacacccggctgcccagccgagttcctcaacatccgcatcccgcccggggacccggtgttcgaccccaacgggcgcggggacgtggtcctccccttccagaggagccgctgggaccccgagagcggacagagccccagtaacccccgggacctgaccaacgccgtgacgggctggctggacggcagcgccatctacggctcctcgcactcctggagcgacgcgctgcggagcttctccggggggcagctggcgtcggggcccgaccccgccttcccccggaacgcgcaaccgcccctgctcatgtggagcgcgcccgaccccgccagcggccagcgcgggcccgggggcctgtacgccttcggggcggagcgagggaaccgcgaccccttcctgcaggcgctgggcctgctgtggttccgctaccacaacctgtgcgcgcagcggctggcccgccagcacccgcactggggggacgaggagctgttccagcacgcgcgcaagagggtcattgccacctaccagaacattgctctctatgagtggctgcccagcttcctgcagcaagcaccagtgaagtatgcaggatataaccctttcctggaccccagcatctccccagagttcctggtggcctctgagcagttcttctccaccatggtgcctcctggcatttacatgagaaatgccagttgtcacttccaagaggtcatcaataggaactcaagtatctccagagctctccgggtctgcaatagctactggagtcgaaagcatccaaacctacgaagagctgaagatgtggacgcgctactgctaggcatggcctcccagatcgctgagcgagaggaccatgtggtggttgaggatgtgctagatttctggcctgggtccctgaagttttcccgtacagaccacgtggctggctgtctacagaggggccgcgatctgggcctgccctcttataccaaggccagggcagcactgggtctgcctcccattaccagatggcaggacatcaaccctgcactctcccagaacaaccacaccgtgctggaggccacagctgccctgtacaaccaggacctatcccagctagagctgctccccggggggctcctggagagccatggggaccccggacccctcttcagtgccatcgtcctcaaccagtttgtgaggctgcgggatggcgaccgctactggtttgagaataccaggaatgggctgttctctgaggaagaaatcgcagagatcagaaatacttccctacgggatgttctagtggctgtcaccaacatgaaccctagtaccctgcagcccaatgtcttcttctggcatatgggagacccctgcccacagccaagacagctcagcactcagggcttgccagcctgtgctccctccaccatgcaggactattttgaaggcagtggatttggctttggagtcaccattgggactctctgctgcttccccctcgtgagcctgcttagtgcctggattgttgcccggctccgaaagaaaaatttcaagaagctccagggccaggaccgcaaaagcgtcatgtctgagaagctcgttgggggcatggaagcattggaatggcagggccacaaggagccttgtcggcctgtgctcgtgcacctgcagcctgggcagatctgtgtggtggatggcaggctgtctgtgctccgcaccatccagctacggcccccccagcaggtcaacctcatcctatctggcaaccgcggacgccgggccctgctgctcaagatccccaaggagtatgacctggtgctgctgtttaacctggaggaagagcggcaggtgctggtggaaaaccttcggggggccctgaaggagagcggactgaagttccaggagtgggagctgcgggagcaggaactgatgaggacagctgtgacacgacagcagaggagccatctcctggagacctttttcaggcaccttttctcccaggtgctggacatcgaccaggcagatgcagggaccctgcctctggactcatcccagaaggtacaggaggccctgacttgcgagctgagcagagctgagtttgccgagtccctgggccttaagccccaggacatgtttgtggagtccatgttctctctggctgacaaagatggcaatggctacctgtccttccgggagtttctggacatcctggtggtcttcatgaaaggttctcctgaggagaagtctcgccttatgttccgcatgtatgactttgatgggaatggtctcatttccaaggatgagttcatcaggatgctgaggtccttcatcgagatctccaacaactgtctgtccaaggctcagctgactgaggtggtagagtccatgttccgggagtcaggcttccaggacaaggaggaactgacgtgggaggacttccacttcatgctgcgggatcatgacagtgagctccgattcacgcagctctgcgtcagaggggtggaagtacctgaagtcatcaaagacctatgccggcgagcctcctacattagccaggaaaagatctgtccctcccccagagtgagtgctcgctgtccccacagcaacactgaggtggagtggacaccacagagactgcagtgccccgtggacacagaccctccccaggagattcgtcggaggtttggcaagaaggtaacatcattccagcccctgctgttcacggaggctcaacgggagaagttccaacgcagccgccgccaccagaccttgcagcagttcaagcgcttcatcgagaactaccgacgccacattggctgtgtggctgtgttctatgccatcactgggggccttttcctggagcgggcctactactatgcctttggggctcaccacatgggcatcacggacaccacccgtgtgggcatcatcctgtcccggggcacagccgccagcatctccttcatgttctcctacatcctgctcaccatgtgccgcaacctcatcaccttcctgcgagagaccttcctcaaccgctatgtgcccttcgacgccgctgtggacttccatcggctcattgcctccactgccatcgtcctcacagtcttacacagtgcgggccacgtggtgaatgtgtacctgttctccatcagcccactcagcgtcctctcctgcctcttccctggacttttccacaatgatggatctgagtttccccagaaatattattggtggttctttcagactgtgccaggcctcacgggggtcatgctgctcctggtcctggccatcatgtatgtcttcgcctcccaccacttccgtcgccacagcttccggggcttctggctgacccaccacctctacatcctgctctacgtgctgctcatcatccatggcagctttggcctcatccagctgccccgtttccacatcttcttcctggtcccggcactaatctatgtgggggacaagctggtgagcctgagccggaagaaggtggagatcagcgtggtgaaggcagagttgctgccctcaggcgtgacccacctgcagttccagcggccccaaggctttgaatataagtcgggacagtgggtgcagattgcctgcctggctctgggcaccactgagtaccaccccttcacactgacttctgcaccccatgaggacacactcagcctgcacatccgggcagcagggccttggaccactcgtctcagggagatctactcacctccaacaggagatggctgtgccaaatacccaaagctgtaccttgatggaccatttggagagggtcaccaggagtggcataagtttgaggtatcagtgctggtgggagggggcattggggtcaccccctttgcctccatcctcaaagacctggtcttcaagtcatcagtcagctgccaagtgttctgtaagaagatctacttcatctgggtgacacgaacccagcggcagtttgagtggctggctgacatcatccgggaggtagaggagaatgactgtcaggacctggtgtctgtgcacatctacatcacccagctggctgagaagtttgacctcaggaccaccatgttgtacatttgtgagcggcacttccagaaggtgctgaaccggagcctgttcacgggcctacgctccatcacccacttcggccgccctcccttcgagccattcttcaagtccctgcaggaggtccacccacaggtccggaagattggggtgtttagctgtggcccccctggcatgaccaagaatgtggaaaaggcctgtcagctcatcaataggcaggaccggactcacttctcccaccattatgagaacttctaggcctcctgtccaagggctcttcccactgtcccactgagcaggtctggacccgcaccttactctgtacttcctgtttctggcttcctcagccttctccccattcctagctcccaactttggtccgagtgaccatggtcagtcaccccatatgggttcagagacccccaagttcagactgtctcagcctggagaaatgggaggcactgtctgggaaatagcaggtaggagagctattattactttggggcaaagggacacctcttcttccaaactaagaaaaaccctcaaaagactggagctgacatgtgtcagctgtgtgcatgtgtacaggggactgtgagcctaagggtgaagtgggagcacagatgctggcattttggaacctctccccccaagcctcccccttctctaggctccccactgtcaaaagggctggcaaatgccttgggcggggcagaggctagacctgcagagagaaatttacaggaaccccttcagcctcctagtctaacagcacaattgatctcctctcccgggttcttaaacgtgtactgtagtcagaatctggcctgatatctctttgtagtgctctcaggccttctctccctactgcagtagtctcctttataaataaaccacttttctgccaaaaaaaaaaa

SEQ ID NO: 2934 - DNA, 5204 bp, Canis familiaris
ccgggggcctgtacgccttcggggcggagcgagggaaccgcgaccccttcctgcaggcgctgggcctgctgtggttccgctaccacaacctgtgcgcgcagcggctggcccgccagcacccgcactggggggacgaggagctgttccagcacgcgcgcaagagggtcattgccacctaccagaacattgctctctatgagtggctgcccagcttcctgcagaaaacactcccaaaatatacagggtatcatcctttcttggaccccagcatctccccagagttcctggtggcctctgagcagttcttctccaccatggtgccccctggcgtctacatgagaaatgccagttgtcatttccagatggtcctgaccaaggatttgggcagctccccagctctcagggtctgcaacagctactggcttcgggagaacgccaacctgaacagtgcccaggcggtggatcagctcctgctgggaatggcctcccagatttcagagctagaggacaggatagtggttgaagatttgagggactactggcctggctctggcaagttctcccgcacagactatgtggccagcagtatccaacgtggccgagatatggggctgcccagctatacccaagccctgatggctttggggttggagattcccaggaattggagtcatatcaaccccaatgtggacgcccaggtgctggaggccacagctgccctgtacaaccaggacctgaccaggctggagctgctccctggggggcttctggagagccatggggaccccgggtccctcttcagtgccatcatcctcgaccagtttgtgaggctgcgggatggtgaccgctattggtttgagaacaccagaaatgggctattctccaaagaggaaattgcggaaataaaaaacaccactttttgggacgtgctggtggctgttactaacgtgaaccacagtgctctgcaacccaatgtttttatctggcatgacggtgccccctgccctcagcctcggcagctcacaactcaaggcttgccccaatgtgtgcccctaaccgtgtttgactactttgagggcagcggtcctggttttggcatcaccattgtggccctctgctgtcttccgttagtgagcctgcttatctctggggtggtggcccatttccgaggccgagagcgcaaaaggctacagaagaaaggcaaagagagtgtgaagaaagaagcagccaaagacggtgtgccagcgatggagtggccaggccccagggagaaaagctatcccatcaccatccagctgctcccagacaggcgactgcaggtcctggacagaaagctgtctgtgctccgcactgtccagctgcagcccccccagcaggtcaacctcatactgtccagcaaccgtggatgccataccctgctactcaagatccccaaggagtatgacctggtgctgctgtttaactctgaggaagagcggggcacctttgtgcagcatctgcaggacttctgtgtgcagtggtctctgggccttgacgtggctgagatgagagagaatgagctgttcagaagagctgtgaccaagcagcagcggggccgaatcctggagatcttcttcagatacctgtttgcccaggtgctggacatcgaccaggcagatgcagggaccctgcccctgaactcatcacagaaggtgcgggaggccctgacttgcgagctgagcagagctgagtttgccgagtccctgggccttaagccccaggacatgtttgtggagtccatgttctctctggctgacaaagatggcaacggctacctgtccttccgggagtttctggacatcctggtggtctttatgaaaggctccccagaggacaagtctcgcctgatgttcaccatgtatgaccttgatgcaaacggcttcctctccaaggatgagtttttcaccatgatgcggtccttcatcgagatctccaacaactgcctgtccaaggctcagctgactgaggtggtagagtccatgttccgggagtcaggcttccaggacaaggaggaactgacgtgggaggacttccacttcatgctgcgggatcatgacagtgagctccgccgtacgcagctctgcgtcagaggtgttggagacatctttaaaccaaacatcagctgccgagtctcattcatcactcgaactcctgggaaacgctcctgttcccaggacttggagttctctgcctcagaagccccagagctgggaggccctgggctgaagaagaggtttggaaaaaaggtggtggggcccacaccccggctgtacacggaggcactgaaggagaagatgcagcgtggcctcctggctcagaagctgcggcagtacaagcgcttcgtggagaactaccggcggcacatcgtatgcgttgtggtcttctcagccatctgtgccggcctgtttgcagagcgtgcctactattatgcctttgcctcgccaccctcgggcatcgcagagactacctttgtgggcatcatcctgtcccggggcacagccgccagcatctccttcatgttctcctacatcctgctcaccatgtgccgcaatctcatcaccttcctgcgagagaccttcctcaaccgctacgtgcccttcgatgccgctgtggacttccatcgctggatcgccatggctgctgttgtcctggccattttgcacagtgctggccatgcagtcaatgtcttcatcttctcagtcagtcccctcagcctgctggcctgcatcttccccaacatcttcatgaatgatgggtcccagcttccccaaaagttctactggtggttcttccaaacagtcccaggcatgacaggggtgctcttgctcctggttctggccatcatgtatgtcttcgcctcccaccacttccggcgccgcagcttccggggcttctggctgacccaccacctttacattgtgctctacgtgctgctcatcatccatggcagctttggcctgatccagctgccacgtttctacatctacttcctggtcccggcactaatctatgtgggggacaagctggtgagcctgagccggaagaaggtggagatcagcgtggtgaaggcagagctgctgccctcaggagtgactcacctgcagttccagcgaccccaaggctttgagtataagtcaggacagtgggtgcggatcgcctgcctggctctgggaaccaatgagtaccaccccttcacactgacttctgcaccccatgaggacacactcagcctgcacatccgggcagtggggccctggaccactcgcctcagggagacctactcacttccaaagggtgacggctgtgccagatacccaaagctgtaccttgatggaccatttggggagggccatcaggaatggcataagtttgaggtgtcagtactggtgggagggggcattggggtcaccccctttgcctctatcctcaaagacctggtcttcaagtcatccttgggcagccaaatgctctgtaaaaagatctacttcatctgggtgacacgaacccagcggcagtttgagtggctggctgacatcatccgggaggtagaggagaatgaccaccaggacctggtgtccgtgcacatctatatcacccagctggctgagaagtttgacctcaggaccaccatgctgtacatctgtgagcggcacttccagaaggtgctgaaccggagtctgttcacgggcctgcgctccatcacccactttggccgacctccctttgagccattcttcaagtccctgcaggaggtccacccacaggtaccgaagattggggtgttcagctgtggcccatccaggaatgaccaagaatgtagagaaggcctgtcagctcatcaacaggctggaccaggcccacttcggtgcaccacttatgagaacttctgagaacttcctggttcctgttttccctctgtggaccagccctaccagcagtttctttgtcagaatctttctcaggcctcagctgggaagctagaagagcccctccctcctggccccatctgtcctatgctctgagaaggtggagaagacccctctagctaaagtcacagcaggttatggcaaacaaaagtaggatggggacagtccctgccttgtaacatctgtagaggtgaagagatataatagtgtctgcctccgatcagtccccatatctctgctttccttgcacaaagttgatgtattgctttggtattggactcagcatttgagggctaagtgagaatctcctcagagcctagctcagaagccatgatgcttggaacctagaccgtcaaactgcctctgttcagtctctgaggtcttgtccttccaactccacccctgcccccttcttattcttaaagggtcaggaacactgaaaaataaccagagaacaaagatggctccctagtcctgatgtttctgcagtcaaccagcaatgcctgataccatgaccttttgatggatcctctctgagtctgtggggcagccccttggctctgagactaagggagtccagcctgtctgccagacacccaaaattccctctcagtttcctacttccacagaagccaggtgaccagctgtcccggtttgcccagggcactcccagttctaccactaagagtctcttatcctaggaaacatctgaatcccaggcaactcagacaaagttagtgacctcacacaggaggcagcctgggatgtcatctccatactcagctctttaagacactttcttttccttctgcaactgaccctttcctaaaaatctgagctttaatttttttaaatttaagtataatttgcatgcagcaaagtgtgcaaatcgtaaagttacatgtccatgtgtcaacattacctaagtcacgatatagagcatttccaacagtctcccccaaccagtagaagcaaccactgatgtgatttctgtcaccctggattaggtttggccatactgaatgtattctttggaaactggcttctttcactcagcacaatatctttgtgattcatccatgttgttgtgtgtatcagtggtatattcattttcattgccaaattgtattccattatagaaatgtaccaaagtgtttatccattcttctgttgatggacatttgggttgtttctagtttttggtaattctgaataaagcttcaatgaacaaaaaaaaaa

SEQ ID NO: 2935 - DNA, 1554 bp, Canis familiaris
caattgatggtgatcttaaattctgcaagtgatcaaccttctgaaaatttaatttcttattttaataactgcacagtcaatccaaaggaaagtatcctgaaaagagtgaaggatgttggatacatctttaaagagaaatttgctaaagctgtgggacagggatgtatggaaattggatcacagcgatacaaacttggagtccgattgtattatcgagtaatggaatccatgcttaaatcagaagaagaacgattatccattcaaaattttagcaaactcctgaatgacgacatctttcatatgtctttgttggcatgtgctcttgaggttgtaatggctacatatagcagaagtacatctcagaatcttgatactggaacagatttgtccttcccatggattctgaatgtacttaatttaaaagcctttgatttttacaaagtgattgaaagttttatcaaagcagaagccaacttgaccagagaaatgataaaacatttagaacgatgtgaacatcgaatcatggaatcacttgcatggctctctgattcacctttatttgatctgattaaacaagccaaagaccgagaaggaccagctgatcaccttgaatctgcttgtactctcaaccttcctctccagagtaatcacactgcagcagatatgtatctttctcctgtaagatccccaaagaaaaaaggatcaactatacgtgtaaattctactgtaaacacagaggcacaagcaacctcagccttccagactcagaagccattgaaatctacctccctttcacttttttacaaaaaagagtaccgactagcttatcttcgactaaatacgctgtgtgcacgcctcctatctgaccacccagaactagaacacatcatctggaccctttttcagcacacactgcaaaatgagtatgaactcatgagagacaggcatttggatcagattatgatgtgttccatgtatggcatatgcaaagtgaagaatatagaccttaaattcaaaatcattgtaacagcatataaggatcttcctcatgctgttcaggagacattcaaacgtgttttgatcagagaagaggagtatgattccattatagtattctataattcggtcttcatgcagagactgaaaacaaatattttacagtatgcttctaccaggccccctaccttgtcaccaatacctcacattcctcgaagcccttacaagttttctagttcacctttgcggattcctggagggaacatctacatatcacccctgaagaatccatataaaatttcagaaggtgtgccaacgccaacaaaaatgactccaagatcaagaatcttagtgtcaattggtgaatcatttgggacttctgagaagttccagaaaataaatcagatggtgtgtaacagcgaccgtgtgctcaaaagaagtgctgaaggcagcaaccctcctaaaccattgaaaaaactacgctttgatatcgaaggtacagatgaagcagatggaagtaaacatctcccaggggagtctaaatttcaacagaaactg

SEQ ID NO: 2936 - DNA, 534 bp, Canis familiaris
atgctgcgctggttcttgtcccacctgctaggtgtctggctgctactaagccaacttcccagagagatcccagccacggatgacaagaaacttaaggcatgtggtcgtgattatgtccgcctacagattgaggtctgcggctccatctggtgggggagaaaggctggccagctgcgggaacgtcggcagatatccgaacccctggcagaagttgtgccatcctccatcatcaatgatccagaaatcttaagtttgatgttgcaatccattcccggtatgccacaggaactgaggatagcaacacggtctgggaaggagaagttattaagagagctacactttgtactggaagattccaatcttaacttggaagaaatgaagaaaacttttcttaacacacaatttgaagctgaagacaaaagcctttcaaaattagataaacatccccgaaaaaagagagataactacataaaaatgagtgataaatgttgtaatgtaggttgtaccagaagagagcttgctagccgatgctga

SEQ ID NO: 2937 - DNA, 393 bp, Canis familiaris
  misc_feature (8)..(8): n comprises a, c, g, or t, or includes no nucleotide
  misc_feature (37)..(37): n comprises a, c, g, or t, or includes no nucleotide
  misc_feature (97)..(97): n comprises a, c, g, or t, or includes no nucleotide
ttctaganttcggcacgagacagcatggagccttcgnctgactggctggccacggccgcggcccggggtcgggtagagaaggtgcgggcgctgctgnaggcgggggcgctgcccaacgcaccgaatagttacggtcggaggccgatccaggtcatgatgatgggcagcgcccgagtggcggagctgctgctgctccacggcgcggagcccaactgtgccgaccccgtcaccctcacccgccctgtgcacgacgcggcccgggagggcttcctggacacgctggtggtgctgcaccgggccggggcgcggctggacgtgcgcgatgcctggggccgtctgcccgtggacctggctgaggagctgggccatcgcgatgtcgcacggtacctcgcg

SEQ ID NO: 2938 - DNA, 2686 bp, Canis familiaris
cacgagtggtcaccgggcgtgagagaacggctctgtgattcagtccagctagtcagcgctacgtcgtcaagttaaaaggaagttgtgttggaggctgcattgataaaggaagaagatggttaattcacaaggaaaaatcactgactcgaatcctgtacccaatcatgtgttactaaacggacttactgataaggcagagaaaaatcagggaatagggaacagcctgtgtagccaatatgaggagaaggtacgcccatgcatcgacctcatcgactccttgcgggcgctgggtgtggagcaggacctggccctgccggccattgctgtcattggggaccagagctcgggcaagagctctgtgctggaggctctgtcaggagttgcccttccaagaggcagtggtattgttacaagatgtcctctggtgctgaagctgaagaagctcataaatgaggatgagtggagaggcaaagtcagttaccaggatactgagatggagatttcagacccttcagaggtggaagtggaaatcaataaagcccaggatgccattgccggggaaggacaggggatcagtcatgagctaatcagcctggaggtcagctctcctcatgtcccggatctgaccctgatagacctccctggcatcaccagggtggctgtgggcaatcagccagctgacatcggacgccagaccaagcaactcattaggaagtacatccttaagcaggagacgatcaacttggtggtggtcccctgcaacgtggacattgccaccacggaggcactgagcatggctcaggaggtggaccctgatggagacaggaccataggaatcttgacaaagcctgacctggtggacagagggactgaaggcaaggtggtggacgtggcacaaaacctcgtctgtcacctgaagaagggctacatgatcgtcaagtgccggggccagcaggacatccaggaccaagtgagcctggccgaggctctgcagaaggagaaagacttctttgaggaccacccacatttcagggttcttctggaggaaggaagggccacagtccccaacctggcggagaaactgacctctgagctcatcacgcacatctgtaaaaccctgcctctgttagaaaatcagataaaggagaatcatgagaaaataacagaggagttacaaaagtacggctcagatgtgcccgaagacgagcacgagaaaatgtttttcctgatagataaactgaatgcctttaaccaagacatcagctccttaatccaaggggaggagtccgtgggggaggacgagagccggctgttcaccaaaatccgaaatgagttccacaaatggagcgctgtgattgaaaagaagttccaaagaggttacaaagctatatataaacaaatggagaaatttgaaaatcggtatcgtggcagagagctgccaggatttgtaaattacaagacgttcgaaattattataaaacaacaaatcaaagaactggaagagccagctgttgatatgctgcacacgataactgatatggtccaggttgccttcggagatatttcaaaagcaaattttgatgaatttttcaacctctacagaactaccaagtccaaaatcgaagacattaaattcgagctagagaaagaagctgagaagtccatccgacttcacttccaaatggagcagatcgtctactgccaggaccacgtctatcagcgggccctgcagagggtcagggagaaggattcggacgaggagaagaagaagaagaccagcagcatgagccatgacgaggtttcttccgtcaacatctccttgtctgaaatcttggagcacctgttggcctaccgccaggaggccaccaaccgcatctccagccacatccccttgatcatccagtacttcatcctgcaagtgtacggccagaagctgcagaacggcatgctgcagctgctccaggacaaggacacctacagctggctcctgaaggagcgcagtgacaccagcgacaagaggaagttcctgaaggagcggctggcgcggctggcccaggctcggcgccgcttagccaaattccctggttaaggccggctccctgtcccgcctgcatctccagggcacgtctgcagggagcagcacccgccctctctccccaaacccacatcgcagatactcgaggagttagtagccagtcttcccggtcaccatccatgcttgtccctgagtgggcaaggacctcctaagaagacgcaggtcatgattaagatcgagacttagggattgagtcccacgtcgggctccctgcacggagcctgcttctctctctgccagtgtccctgcctctctctctgtgtctctcatgaataaataaatgaaaaaaatcttaaaaaaaaaaaaaaaaagaacgagattcagattgggggtggacgccgccgccctcctggttaggagaaatgattttctgccctcggggttgttccccttaaaccctctccatcttccaccaggggaccagtgcatgcaaagcattgtagaaggattagttcctgcttttgtgcaacttctttcatgcacctgttttgggagcattagcgccacgtgtgggtgctcttagaagctgtatttcactgatttgtaataaacttgtttatccccggaaaaaaaaaaaaaaaaaaaaaaaaa

SEQ ID NO: 2939 - DNA, 3036 bp, Canis familiaris
ccacgaggttgcagagagctcgccgagaagacttggaggtgctgagcaagggggagcgctcccaccggctcggactacgtgaccactcatgtctaaggcccacggttctcggccatatcggaggcacaatgtggttattccccgacagcaaccagaaaaagaaatgaattttgtccagcagcagccgccgccatctgacgcggcagcaaggcaaatgatgtatcccccaaactgtcaggtgggagtgcaggatccggtttatctcgccaaggagttcaatttgctgacactgaacccccagcaactagaaggaagcaggcaccaacagatggcaaagggccccgagaagagcctgtacagccagtatgagcagaaggtgcgcccctgcatcgacctcgttgactccctgcgggcgctgggcgtggagcaggacctggccctgccggccatcgccgtcatcggggaccagagctcgggcaagagctccgtgctggaggcgctgtcgggggtcgccctccccaggggcagcggaatcgtgacccggtgcccgctggtgctgaagctgaagagggatccgcacaaggcgtggagggggaggatcagctaccgcaagacggagctgcagttccaggacccctcccaggtggagaaggagatccgccaagctcagaacatcatagctgggcagggacttggcatcagccatgagctcatcagtcttgagatcacctcccctgaggtccccgatctgaccctcattgacctccccggcatcaccagggtggctgtgggaaatcagccccaggacatcggagtgcagatcaaggcactcatcaagaattacatccagaagcaagagacgatcaacctggtggtggtcccctgcaacgtggacattgccaccacggaggcgctgagcatggctcaggaggtggaccccaatggagacaggaccataggagtcctgaccaaaccagatctagtggacaggggcaccgaaaagaccgtggtgaacgtggcgcagaacctcacataccatctccagaagggctacatgatagtgaggtgccggggccaggaggagatcacaaaccagctgagtctggccgaggcaaccgagaaggaaaggatgttcttccaaacacatccgtatttcagagctctcctggaggaaggaaaggccacggtgccctgtctggcggaaagacttaccaaggagctcatcttgcacatcaataaatcgctcccgttgttagaaaagcaaataagggagagccaccagagggcgacagacgagctgcaccagtgtggagacagcatccccagcaatgaagccgataagatgttctttttgatcgagaaaatcaagttgtttaatcaggacattgacaagctaatagagggagaagaaatcgtaaagaagaatgagactcgcttatacaacaaaatccgggaggagtttgaacactgggcgctcgtgctcacggccaatacccaaaaagttaaaaatatcgtttctgaagaagtctcagtatacgaaaagcagtatcgcggcaaagaacttcttggatttgtcaactacaagacatttgagaccatagtgcaccaatacatcgaacagctggtggagcccgcgctcaccatgctccggaagactattgaaattgtctggcaagctttcaccgacacagccaagaaacattttagcgtattttccaacctcagtcaaacaatccagaacaagattgaagacataaaaacgaggcaggcagaaaccgcagaaaatctgatccgacttcagttcagaatggagcagctggtttactgtcaagaccagatttacagcgtggttctgaggaaggtccggaaggaggttttcaacccagcgggaaaggctgcgcaggatcttcagttgaaatttcctttcccgaaagatctgccttcgatgtcatccaatgatgagatcggggtgcacctgaatgcgtatttcttggaaaccagcaaacgcctcgccaaccagatcccattcataattcagtattttgtgctccaagagaacggcagttgcttgcagaaagccatgatgcagatactacaggagagagagcagtactcctggctgcttcaggagcacgccgacacctctgccaagaggagattcctcaaggagaaaatttaccggctggctcaggcgcggcgcgcactctacatgttcttcagttaaagggggcaggtccatggaggggcagcaatgctttggggggggcggtttcttatgtgccttccctgtgaaggggacaagaagtggcttttcatgtggaaccaggctttcctgctctcgccggtgtccattttcattgtactgtgctcagcaccagagtttgtatctgaagtccgcactcacttggggctgtcacctctgacctccccgaagaggtggctctgagtccttgagccttctcaaatactgctctcattctttgttagattgtaggaccccagaggggtggggagtcaggatcctactgttctttggcatttccaggatcttgcatggcacctggtacacaggagccccttaataaatggtatctcgctgaacaaatgaatgatggagacgggcgctatggcttaaattcagactttggaggtatgaggcagtgtcacctgcttcccactgttgactgtcatcgtgtttccagcccccaggagaaatgagcctgagtgataccggttttaatgtgtaccgttcccctggctgcagggagctcccattgctatgttaagtcttgaagagacgtttaataaggaagaacattttttttttttaaatgggcacctggctgcagttggtgaagcatctatctttggctcaggtcatgatcctggggtcctgggatcgagtcctgcatcaagctccctgctcagtggggagtctgcttctccttctgcctgctgctccccctacttgtgctctctctctctctcaaataaataaaatcattaaaaaaaaacaaacaaataaaatgatgagct

SEQ ID NO: 2940 - DNA, 1812 bp, Canis familiaris
acgcggggagagaaaagtgaaggtcctttcagaagctggtggtaacatcactggggagatactgcaaaattagtgtaacagcaggaacatgaagccatcactcttggtgtttactgtgtatctgctatggctgaaagattgtcactgtgcacctacttggaaggacaaaactgatatgcatggaaacctgaagggtttttctgaggctggagacatagatgtagatgaagaggtgaagaaagctttgattggtatgaagcagatgaaaatcatgatggaaagaagagaggaggaacataccaatctgatgaaaaccctgaagaaatgcaaagaagaaaagcaggaagccctgaaactcatgaatgaagttcaggaacatctggaagaagaagaaagtctatgccaggtgtctttgacagattcctgggatgaatgcaagtcctgcctggagagtaactgcatgagatttcacacaacctgccaacctagttggtcctctatgaaaaatacggtcgaacagtttttcaggaatatatatcaatacctgtttccttttgatgaggataatgaaaaagatctccctgtcggtgaaaagttcattgaggaggatgcacaagtagctcaaatagagaatgtgttcaaccagctgactgtggatgtgagatttctctttaacagaagtcttaatgtcttcaaacagatgcagcaagaatttgaccagacttttcaatcatatttcatgtcagatacagacttaatgcagcctaactttcttccagctttatctaaagagccaaggaaaaaagcagatcctgtgcaaagttgggatattcccagcttcttccagctgttttataacttcagtctctctatttatcacagtatcagcacaacaatcaccaagacgctgaatgcaatagaggatttaccaaaacaagacaatgattctaaccatggaagcctgagttcaaagacattgcctgtgcagcacagaggaccgtatggagaatttggccagaatttgtcagaatgtttccagtttcatgccagatgccaaaaatgtcaggattacctgtgggaagactgtcccgatgtacctgaactacacacaaaagtagatgaggccctcgaattggtcaacatatcccatcagcaatatgcccaggttctccagatgacccagcaccacctggaggacaccacatatctgatggagaagatgagagaggaatttggctgggtggctgacctggcaaaccaggccccaggagctgagaacatctttgattccacaaagatggttccaaacatacatgaagggaatttttccaaacaagacgaaacgatgatagacttaagcattctgtcttcccctaacttcacactcaagatccctcttgaagaaagtgctgagacttctaacttcattagctacatgctggagaaagctgtgcagcattttaagaaacattttaaaacttggtaagacctgaggcatcctatacctgccaagtagaattacctcttcgggtacctctgagatctgaaaatcccaaatgtataagataatgtaataaatgaaatagcaggaaagtatgtcagttacatattatgaattactgttaattttcttatgttgaatggcagtttcatagctattggaattgagttaaagtaaaatccctttttaagaaaatcacatgtacacattactaaattctatggtaggttagtagttctatgtatattaaataaatataaaattaccaacgtgaaaaaaaaaaaaaaaaaaaaaaaaaaaaaaaaaaaaaa

SEQ ID NO: 2941 - DNA, 1302 bp, Canis familiaris
ctacgacctgcctgctcttccctcgctcctcctgcattggctctgggctccatggcgctctggttgactgtggtcattgctctcacctgcctcggtggccttgcctccccgagccctgtgactccctccccaaccctcaaggagctcattgaggagctggtcaacatcacccagaatcaggcatccctctgcaacggcagcatggtgtggagcgtcaacctgaccgccggcatgtactgcgcagctctagaatctctgatcaatgtctccgactgcagcgccatccaaaggacccagaggatgctgaaagcactgtgctctcaaaagcccgcggcagggcagatttccagtgaacgcagccgagacaccaaaattgaagtgatccagttggtgaaaaacctgctcacctatgtaaggggagtttatcgccatggaaatttcagatgaagcatgaaaacttagcatccttatctgtagacccagacctgaccacttaagttccagattcatttttctttccgacgtcacaaatttcttagggaggtgggggggggggagaaccatttcctcagctgggacctcagcctgcaccgcctgcctccatggagctgagcccagccacccctgccttggtgcatggggcccagccgggtggccctcctccgtctgcacttcatcaacgctgagggaaagcactgcatcccatgactgtcccctcctcagagcaaagtgcagcattacagtggaggcagatatgtgtgggagggggtcttgctgtacctgggagtggcacagacatgtttcttcttagccttatttattattgtgtgttatttaaacaagtgtctttgtttgtgctggggacagggagtggcttggagctgggggcccagtgactcgggtttagagagtccctgggaataagcactgtgtgtaaaattctgctacctcactgggatcctggggccgacacaggggacaggagaaagggtcagagatgctgctcttgtctgccactcagcagctggccctcagccaagcagtaatttattgtttttccttgtatttaaagttaagaaataaaatatgttatcaaagagttaataatatatagaagagtagcctaaaaggctgcatttggtgtgtgtggccaggccggggcgggtgggggggagggtgttgtcactgaatgtgctctttcactgactttgtcaaactggaagccagaaataaagatggtgacaagagaaaaaaaaaaaaaaaaaaaaaaaaaaaaaaaaaaaaaaaaaaaaaaaaaaaaaa

SEQ ID NO: 2942 - DNA, 1759 bp, Canis familiaris
atgtcatcgaggccttttgagagtccacctccgtatagacctgatgaattgaggctgaggctgccaggaattggacatgaccctgggcgggccactgcagttgtcgtatctgaaggcaccggtctcaagtcacacaagcagaagggttgacatcattgttctaaactgcttggatccccttcccaaggattacaatttaactggtgtggagtgctccccatggggattttacacatttctcagcaaacccaatcattatgcaccgagcaatgatgtgtacggtggggacatgcacgtccgacccatgctctctcagccggcgtattctttctacccagaagatgaaattcttcacttctacaaatggacctctcctccaggagtaattcggattctgtccatgcttgtcattgtgatgtgcatcgccatatttggctgtgtcgcgtccacgctcgcctgggatagaggctatggaactggcttaatgggtggtagcataggctacccttacggaagtggcttcgggagctacgggactggctacggctacgggtttggctacggctacggctacggcggctacacggatcccagagcagcaaagggcttcctcctggccatggtggccttttgttttatcgctgcattggtgatatttgttaccagcgttataaggtctgacatatccagaaccagaaggtactacttgactgtaataatactgagtgccttcctgggcgtcatgatgttcattgctacaattgtctatataatgggagtcaatccaactgcccaggcttctgggtctttatacagttcacagatatatgccatgtgcaaccagttctatgcatctacagctaccggactctacatggatcagtatttgtatcactactgtgtggtggatccccaagaggcaattgccattgtcctgggattcatggtgattgtggcttttgctttaataattttctttgctgtgaaaactcgaagaaagatggaccggtatgacaagtcgaatatattgtgggacaaggaacatatttatgatgaacaaccccccaatgttgaagagtgggttaaaaacgtttctgcaggcacacaagacatgcctcctcccccttctgactatgtggagagagtggacagtcccatggcgtactcttccaatggtaaagtgaatgacaagcggttgtatccagagtcttcctataaatcaacaccggtccccgaagtggtgcaggagctgcccgccacctcccctgcggatgacttcaggcagcctcgctacagcagcagcgggcacttggagccaccttcgaagagggccccctcgaaaggaagaacgggaaggcccaagaggctggagcaggaccactatgagacagactacacgacgggcggcgagtcgtgtgacgagctggaggaggactggatcagggaatatccacctatcacttcagatcaacaaagacaactctacaagagaaattttgacactggcctgcaggaatacaagagcttacaagcagaacttgatgagatcaataaagaactctctcgcctggataaagaattggatgactatagagaagaaagtgaagagtacatggctgctgctgatgagtacaatagactgaagcaagttaagggatctccagattacaaaaataagaggaattattgcaagcagttgaagagcaaattgtcccacatcaagaagatggttggagactatgatagacagaaaacatag

SEQ ID NO: 2943 - DNA, 602 bp, Canis familiaris
ggcgctggatccgcacacagcagcactactacgagaagtgccccaagagggtttattacctctctttggaattttatatgggccgaacgttacagaacaccatgataaaccttggcctgcagaatgcctgtgacgaggccatttaccagcttgggttggatatggaggagttggaagaaattgaagaagatgctgggcttggcaatggtggtcttgggaggcttgccgcttgcttcttggattccatggcaaccctgggacttgcagcctatggatatggcatccgatacgaatatggaatcttcaatcagaagatccgagatggatggcagatagaagaggcagatgattggctcagacatggaaacccctgggagaaggcccggcctgagttcatgctgcccgtgcacttctatgggaaagtggagcacaccaacactgggaccaagtggatcgacacccaggtggtcctggccctgccatatgataccccggtgcctgggtatatgaataacaccgtcaataccatgcgcctctggtccgctcgggcgccaaacgactttaacctcagagactttaacgttggagactacattcaggct

SEQ ID NO: 2944 - DNA, 734 bp, Canis familiaris
ttggaagatggctgatagaagggagtccttacgtggtgctatttgacataggctattcggcttggaacctggacaggtggaagggtgacctctgggaagcatgcagtgtcggcatcccttatcatgaccgagaagccaacgatatgctaatatttggatctttaactgcctggttcttaaaagaggtgacagatcatgcagatgggaaacatgtcattgcccaattccatgaatggcaggcaggaactgggctgatcctttctcgagctcggaaacttcccattgctacaatatttaccactcatgcaacactgcttgggaggtatctctgtgcagcaaacattgatttctacaaccatcttgataagtttaacatagacaaagaggctggggaaaggcagatttaccaccggtattgcatggagcgggcctctgtccattgtgctcatgtactcaccacagtatctgaaataactgcaatagaagcagaacatatgctaaagaggaagcctgatgtagttactccaaatggcttgagtgttaagaaattttcggcagtacatgagtttcaaaatctacatgccatgtacaaggccaggatccaagattttgttcgaggtcatttctacggtcatctggactttgatcttgaaaagactttgttccttttcattgctgggagatatgagttttcaaacaaaggtgctgacatcttcctagaatccttatccagg

SEQ ID NO: 2945 - DNA, 210 bp, Canis familiaris
ggatccctgggtggcgcagcggtttggcgcctgcctttggcccagggcgcgatcctggagacccgggatcgaatcccacgtcgggctcccggtgcatggggcctgcttctcctcggcctgtgtctctgcctctctctctctctctgtgactatcataaaaaaaaaaaaaaaaaaaaaaaaaaaaaaaaaaaaaagaaaaaccaggactgg

SEQ ID NO: 2946 - DNA, 2277 bp, Canis familiaris
gataaaaattcttccgatccgctgctctcatcggggtgtaggcacagtctcggggcataaaagacaggacactgtgtcggatgcttcagaacgccacaaaggaccaggacgagacagactacaccctgccagcctgaacatgagcagcttccccatcctgcaccttctcttgctcctgcttggatgccaagtcccacaggcacaggggaggcctttttcgacagacctgcctaagcaatacttcacaatgatcaatgaaattatggagatgttaaacaagtcaccctcgccttcagaagtaagtaactgggataggttggcagagggtagggaggggctgacagaggcctcacggctctctctccctctgcccccacaggaacccttggactcaaatgagaaagagaccttgctggtaagcactcagcccacacttgggcacctggatcccaatccacttcccatttgggtggcttagggcaggtcaccctaccttgcctagcctcagtgtttcaactgcaaacggggttaacagtgtgtatctcagtggggttgctatgagaattatgtggcaccagtgaatagagtcactggaccagtgtcaggtgctaacaagcattcaaaacattttcccagctgggtctataatgaggaaaatttttttttttaaattacaaatgaaaaggcagctctaggtgaacaacttaaaggtcttaactcctcattttttagtaggggcaacctacaatttcccccaagaactttcctgccttccttttccttaagacactgaattctgtttctcacactgactagccctgggcattaccatttacacttacttttcctagtttcagttggcttccatggttatctcacctttgtttgcatggcattccttaggtccaacaagaggctgaatctctcctgagtttattggccatgtgtatcccccatttgtaggcatgcacagttcacaggctgcacccacatcctgctggggttggcctctctgtgattttcttccagatttctaggagcccttcattcagtcaaggcattaatcctgttatctggtctcttagctgcaaatactcccctggccagccctctaccttttgtagatcttcttttggacaatgctttttccccccaagggcagaaagatccacccaggcccttgtagcttacctggagccaggggtttggggtcaagggaaataggccttgtttggggtatacactcacctataggcctgtgccattaggggtatctcagggacccacctggggcaggagggggactagcagaggactgtccaagggtgtcactgaaagcagacttgaaaaactggggatgacttcagccatgttagaaggctgaaccctgacattttcccacgtgttttcttggtttccttaggaagatacccttctgaggccaaacctggatgtattcttgaatgcttccagcaaattccacaaaaatggattgctaatctggaataatcttaaggtgggtaaagctgttgagggttttgaggatccctgtgttaccctgatcagcctctggggaggctgctctttttccaggtgagtctctgactacctgctttggtttcttcccacaggaattcctgccactcctgcccactcccacacccagggtaagctgatccccaagatgccccaagatgcacgtggtacgctcagccatgacctgactcctagcctgtcatctaccttccaccctaatatcaccttccttgtttcttcacagggagaaccaatctctatcatggagaataattggggtgatttccaaaggaaattgaaaaaatatctggaagcccttgataactttctgaatttcaagaacaaaccctgagtcctagaattctcagtctgaggccttctcatcatggggccttggatgtcagatacagcagaacacctgaagactctgggatgtctctcatctctccagtccaggactggagggatttcattttctcctgtggagtcagatgaattgtccattatctaattactgaaacgtgctgcctccatttggcctttcatgactatattctcatttttatcctatttatttatttatgtatgtttttatttattaccatatgcaatgggaagtatatttattttagcaaaagagtctatgtcctgttccttctaaacaagactcaagagggggacatggggcttgttcatttgtacctcaggttttaaattgatttctacatctgagaaaataaa

SEQ ID NO: 2947 - DNA, 1338 bp, Canis familiaris
gaggaggagaacccagctttctggacccgccaggcggcccaggccttggacgccgctaagaagctgcagcccatccagacagctgttaagaacctcattctctttttgggggatgggatgggggtgcccacagtgacggccactcggatcctcaaagggcaaattaatgacaatctgggacctgagacacccctggccatggaccaatttccatacctggctctgtccaagacctacaacgtggacagacaggtgccagatagcgcaggcacagccacggcctacctgtgcggggtcaaggccaactaccagaccattggtgtgagcgcggccgcccgctttaaccagtgcaacacgacacgtggcaatgaggtcatctccgtgatgaaccgggccaaaaaagcagggaagtccgtgggggtggtgaccaccacgagagtgcagcatgcctcgccagccggcacctacgcacacgtagtaaaccgcaactggtactcggacgccaacatgcctgccaaggcgctggaggacggatgccaggacatcgcccagcagctcatctccaacatggaaattgatgtgatcctgggcggaggccgaaagtacatgtttcccaaggggactccggatcctgagtatccaactgacgccaaacagaacggaatccggttggacgggcggaacctggtgcaggaatggcaggccaagtaccagggtgcccggtatgtgtggaatcgcacggcgctcattcaggcatcccaggacgcctctgtgacacacctcatgggcctctttgagccaggagacaccaaatatgatgtccaccgagacggaatccaggacccatccctgatggagatgacagaggcggccctgaggctgctgagcaggaaccccaagggcttctacctctttgtggaaggaggccgcatcgaccacggtcatcacgacggcacagcttacctggccctgacggaggccgtcatgttcgattccgccattgacaaggcgggccagctcacgagcgagagggacacactgaccctggtcaccgccgaccactcctacgtgttctccttcgggggctacaccctgcgagggagctccatcttcgggctggcccccagcatggccaaagacaacaagacctacacctccatcctgtatggcaacggccccggcttcgcgctcagcggggtcccccggcccaacgtctccgacgccgagagcagggaccccgcatacaagccgcaggccgcggtgcccctggactccgagacccacggcggcgaggacgtggcggtgttcgcgcgcggcccgcaggcgcacctggtgcac

SEQ ID NO: 2948 - DNA, 482 bp, Canis familiaris
tgctttcccgccgtgcaccaagcccgcgcacgccgagcccgcgcgccttacgttgggcccggcccccagccggtgcctcagctgcacgcatgcgcgcgctcctgggcccgcggggagaaagagggcgggaccgtggggccaagcccgcggggggaggggcggtgtcggtcacgtgacgcggtttcactgtttacacgcggagcggtcggagctttcggcctcagtcaggcgctcggcaccgtttcggtttcacttccggtgagggggccctcggagcgggcggtgagccgacggcgagcgcgggtggcggcggtgacggcggcgccgctgccggggggcgtgcgagagcgcggcggcggcggcggcggcggcggcggcggcggcggctgggcctcctgcgcccgcagcccacctctcgggggcgggctcccggcgcgagcagggctttcgagaagaggagctggtggtggaagtgcggggct

SEQ ID NO: 2949 - DNA, 1778 bp, Canis familiaris
ccttgcagcacgatagaccaggataagcttctacattctctccctggatttctggagtggtttccaggaagaagttaaacttttacctttaaatggatgaccatgtcacaatcaggaagaaacatctccaaagacccatctttagactaagatgcttagtgaagcagctggagagaggtgatgttaacgtcgtagacttaaagaagaatattgaatatgcagcatctgtattggaagctgtttacattgacgaaacaagaagactgctggatactgaagatgagctcagtgacattcagacagactcagtcccatcagaagtacgggactggttggcgtccaccttcacgcggaaaatggggatgatgaaaaagaaatctgaggaaaaacccaaatttcgaagcattgtgcatgctgttcaagctggaatttttgtggaaaggatgtacagaaagtcctatcacatggttggtttggtatatccagaagctgtcatagtaacgttaaaggacgttgataaatggtcttttgacgtatttgccttaaatgaagcaagtggagaacacagtctgaagtttatgatttatgaactgtttaccagatatgatcttatcaatcgtttcaagattcctgtttcttgcctaatttcctttgcagaagctttagaagttggttacagcaagtacaaaaatccttatcacaatttgattcatgcagctgatgtcacgcaaactgtgcactacataatgcttcatacaggtatcatgcactggctcactgaactggaaattttagcaatggtctttgccgctgccattcatgattatgagcatacaggaactacaaacaactttcatattcagacaaggtcagatgttgcccttttgtataatgatcgctctgtcctagagaatcaccatgtgagtgcagcttatcgacttatgcaagaagaagaaatgaatgttttgataaatttatccaaagatgactggagggatcttcggaacctagtgattgaaatggttttatctacagacatgtcaggtcacttccagcaaattaaaaatataagaaacagtttgcagcagcctgaagggattgacaaagccaaaactatgtccctgattcttcatgcagcagacatcagccacccggccaagtcctggcagctgcactaccggtggaccatggccctgatggaggagtttttcctacagggagataaagaagccgagttaggacttccattttctccactttgtgatcggaagtcaacgatggtggcccagtcacaaataggtttcattgatttcatagtagagccaacattttctcttctgacagactcgacagagaaaattattattcctcttatagaggaagcctcaaaaacagacacttcttcctatggggcaagcagacgatcaaatatgaaaggcaccatgaacgatggaacctattccccagactactcccttgcaagcgtggacctaaagagcttcaaaaacaacctggtggacatcatccagcagaacaaagagaggtggaaagagttggctgctcaaggtgaaccagatcttcataagaactcagaagatctagtaaacgctgaagaaaaacatgtggatacacattcataggtttgaaataccttacaggcttctgtcattttaaacatgagaggtaattttattttttagacaagaaacctaatttctgaagtgaatggttcgtagaatatcattagagacaaagctatctcattgcagtgtcctcct

SEQ ID NO: 2950 - DNA, 2453 bp, Canis familiaris
gcgtgatggatggtcctcgttcagatgtgggccgctggggcgggaacccctggcagccccctaccacaccttcgccagagccagagccagagccagagccagagagacggtctcgtcgaggaggccgttccttctgggctcgctgctgtggctgctgctcctgccgaaacagggcagatgatgactggggacctgagccccaccgagaccgagggtctggctctgggaggcgaagacccgactcccggggctcagattcccgccggcctggctcccgggccagcggtgtgaacgcagctggagatggcaccatccgagagggcatgctggtggtgactggtgtggatctgctgagttcgcggtcagaccagaatcgccgagagcaccacacagatgagtttgaatacgatgagttgattatacgccgtgggcagccttttcacatggttctgcacttctctcgcccctatgaatcctctgatcgcgtcgccctggagctgcttattggaaacaaccctgaggtgggaaagggcacccacgtgatcatcccagtgggcaaggggggcagtggaggctggaaagcccaggtgaccaaggccagtgggcagaatctgaacctccgagtccacacctcccccaatgccatcatcggcaagtttcagttcactgtccgcacacactcagaggctggcgagttccagctgccttttgacccccacaacgagatctacatcctctttaatccttggtgcccagaggacatcgtgtacgtggaccatgaggactggcgacaggagtacgtgcttaatgagtctgggagaatctactacgggactgaagcacagattggtgagcggacctggaactatgggcagtttgatcatggggtgctggatgcttgcctgtacattctggaccggcggggcatgccatatggaggccgtggggaccctgtcagtgtctcccgggtcatctctgccatggtgaactccttggatgacaatggggtcctgattggaaactggtctggtgattactctcgaggcaccaacccttcagcgtgggtgggcagcgtggagatcctactcagctacctccgcactggctattctgtcccctatggccagtgctgggtcttcgccggtgtgaccaccacagtgctgcgttgcctgggcctggctacccgcactgtcaccaacttcaactcggcacatgacacagacacatccctcaccatggacatctactttgacgagaacatgaagcccctggagcacctgaaccatgattctgtttggaacttccacgtgtggaatgactgctggatgaagaggccagacctgccctctggctttgacgggtggcaagtggtagacgccacgccccaggagaccagcagcgggatcttctgctgtggcccctgctctgtggaatccatcaagaatggcctagtctacatgaagtatgacacacccttcatttttgccgaggtcaacagtgacaaagtttactggcagcgacaggacgatggcagcttcaagatcgtgtatgtggaagagaaggccattggcacgctcattgtcacaaaagctgttggatccaacatgcaggacgatgtcacccacatctataaacacccagaaggctcagaagcagagcgcaaggcggtggagacagcagctgcgcatggcagcaaacccaacgtgtacaccaaccgcgactcggctgaggatgtggccctgcaggtggaggcccaagacgcagtgatggggcaggacctgacagtctccgtagtgctgaccaatcgcggcagcagcacccgcactgtgaagctgcatctctacctctcagtcaccttctacactggtgttacagggcctgtcttcaaggagagcaagaaggaagtggtgctcgcgccaggggccacggaacgcgtgtccatgcctgtggcctacaaggaataccggccccaaatcgtagaccaggggtccatgctgctcaatgtctcaggccacgtcaaggagaatggacaggtgctggccaaacagcataccttccgtctgcgcaccccagatctctccctcacattattgggggcagctgtggttggccaggagtgcgaagtacagattgtcttcaagaaccccttgcctgtcaccctcaccaatgtcgtcttccggcttgagggctccgggctacagagacccaagatcctcaatgtgggggacattgggggcaacgagacagtgacactacaccagaagtttgtgcctgtgcggccaggcccccgccagctcatcgccagcttggacagcccacagctctcccaggtgcatggtgtcatccaggtggacgtggctccagcccctgggggtgggggcttcttttcaaatgctggaggcaatagtcccttgggggagaccatccctatggcatctcgaggtggggcttag

SEQ ID NO: 2951 - DNA, 503 bp, Canis familiaris
ctgagtttaaaaggcacccagcacgtcatgcaagcaggccagacactgtatctcaaatgtagaggggaagcagcccattcatggtctttgcctgaaacagtgagaaaggaaagcaaaaggctgagcattactaaatctgcctgtggaaggaatggcaaacagttctgcagtactttgaccttgaacatggctcaggcaaaccacactggcttctatagctgcaaatatctatctatacctgcttcaaagaagaagaaaacagaatctacaatctatatatttattaatgatacaggtagacctttcttagagatgcacagtgaaatacccgaaattatatatatgactgaaggaaggcagatcgtcatcccctgccgggtcacgtcacctaacatcactgttactttaaaaaagtttccacttgataccctgatccctgatgggaagcgaataacctgggacagtaggaagggttttataatagcaaatgcaacgtacaaaga

SEQ ID NO: 2952 - DNA, 1974 bp, Canis familiaris
tccccagcccccaccccagcacctgacatgagtctctgcgggcccctcaacctgagcctggccggggaggcgaccccgtgtgcggagcccggggctcccaacgcgtcggcttggccgccgtccggccgggcgagcgcgtcgccggcgctgcccatcttctccatgaccctgggcgccgtgtccaacgtgctggcgctggcgctgctggcgcaggccgcggggcgcctgcgccgccgccgctcggccgccaccttcctgctgttcgtcgccagcctcctggccactgacctggcgggccacgtcatcccgggggcgctggtgctgcgcctgtacgcggcgggccgctcgccggccggaggcgcctgccacttcctgggcggctgcatggtcttcttcggcctgtgcccgctgctgctcggctgcggcatggccgtggagcgctgcgtgggcgtcacgcggccgctgctgcacgcggcgcgcgtctcggcggcccgcgcgcgcctggccctggccgtgctggccgcgctggccttggcggtggcgctgctgccgctggcgcgcgtgggccgctacgagctgcagtacccgggcacgtggtgcttcatcggcctgcgcccggcgggcggctggcgccaggcgctgctcgccggcctcttcgccggcctcggcctggccgcgctgctcgccgcgctcgtgtgcaacacgctcagcggcctggccttgctgcgcgcccgctggcgccgccgccgctctcgacggcgtcctcaggcctgcggccccgacggccgccgtcactggggggcgcgcgcgccccgctcggcctccgcctcgtcctcctcgtccgtcgcttcggtccccggcggttccccgggccggggctccgcgcgcagagcccgcgcccacgatgtggagatggtgggccagctcgtgggcatcatggtggtgtcgtgcatctgctggagcccgctgctggtgaggggcgcacacgcccctcgggccaggctccttccggccccctccttggcccctcccacccctgccctccgggggtacctgggttctcgctcccttccccgccctccggcccccctcggacatcccaccccctccgcttacccggcccggggcctccgtagggccgcctacccaggcgagcctcctcccggacgcgcggtgcccgaaccccttccagcagcacgcgcccggcttctcttctcccccgggccccctgtgcttcgggacacccggcgcttctctccttttctgttcgagcccccgagcaccgcgacctttgcttctgccacgcccccttcggcccgctccgtagcccttccgcacggagactcccatctccccagcctgtgagcctctgctcctgctcacggctcccttccccttcggccgcgcgctcatccatcccagccccgcccctggccagtccccttctccctacacctgccccaccgctcacaccggcttctcccgcaggtgttagtggtgctggctgtcgggggctggggctccagctccctgcagcggccgctgtttttggctgtgcgcctcgcttcatggaaccagatcctggacccctgggtgtacatcctgctgcgccaggcggtgctgcgccaactgcttcgcctcctgcccccgaggcccggcgccaagggcagcccggcggggctggccctaaccaggagcgcctgggaggccagctcgctgcgcagctccaggcacagcagcctcagccacctctaggcgagccaggagtcccagaggccaagtcagcccaccccgggcccaggaccgcagcgcggagccttcgggggaataaagccgttttgcggacctgcgcggggcctgtgtcgggtgggggccgcagcacccctgtgaccgcgcgggggcgacagatgcgccgcgtgagcctccggggtgtgcagttccaggactttccacgcggaagcgcggaagcgcgga

SEQ ID NO: 2953 - DNA, 1314 bp, Canis familiaris
caggtagcagcatgcagcctctgctaagctggtgccgacgcgcgctggtggcgctgatcctcgcctgcagtggggcgggggtccagggagaagagagaggattcccgccggccagggccactgtgccactttgggggcccggagagatcacgacgcctcccactgaggcttcctggtccaagggtcccaacgccagcgtgccgtggtcttctgcacctccgcagatgcctaagggagggagaacagccggaggcccgccacgcaccctcacccctcccccctgcgaaaaatccatcgagatcaaggagactttcaagtatatcaacacggtggtgtcctgtctagtgttcgtgctgggcatcatcgggaactccacactgctgagaatcatttacaagaacaagtgcatgcgaaacggccctaatatcttgatagccagcctggctctgggagacctgctgcacatcatcattgacatccccatcactgtctacaagctgcttgctgaggactggccctttggagtggagatgtgtaagctggtgcctttcatacagaaggcctccgtgggaatcactgtgttgagtctatgcgctctaagtatcgacagatatcgagccgttgcctcttggagtcgaattaaaggaattggggttccaaaatggacagcagtagaaattgttttaatttgggtggtctccgtggttctggctgtccctgaggccgtgggttttgatatgataaccattgactacaaaggacgttacctgcgaatctgcttgcttcatcctacccagaaaacagccttcatgcagttttacaagacagctaaagattggtggctatttagtttctatttctgcttgccattggccatcactgcctttttttataccctgatgacctgtgaaatgttgagaaagaagagtggcatgcagattgctttaaatgaccacttaaagcagagacgggaagttgccaaaacagtcttttgcctggtccttgtctttgccctgtgctggcttccccttcacctcagcaggattttgaagctcactatttatgatcagaatgatcccaatagatgtgaacttttgagcttcttgttggtgttggattatatcggcatcaatatggcctccctgaattcctgcattaatcctatagctctgtatttggtgagcaaaagattcaaaaactgctttaagtcatgcttatgctgctggtgccagtcatttgaagaaaaacagtccttagaggaaaagcagtcatgcttaaagttcaaagctaatgatcacggatatgacaacttcc

SEQ ID NO: 2954 - DNA, 1284 bp, Canis familiaris
  misc_feature (1260)..(1260): n comprises a, c, g, or t, or includes no nucleotide
atgggcagygtgmgaaccaaccgctacagcatcgtctcttccgaagaggacgggatgaagttggccaccatggcggttgccaacggctttgggaacgggaagagtaaggtccacacccgacagcagtgcaggagccgcttcgtgaagaaggacggccactgcaacgtccagttcatcaacgtgggggagaagggacagcggtacctcgcagacatctttaccacatgcgtggacattcgctggcggtggatgctggtcatcttctgcctggcgttcgtgctctcctggctgttctttggctgtgtgttttggttgatagctctgctccatggcgatctggatgcatctaaagagagcaaggcttgcgtgtccgaggtcaacagcttcacggcggccttcctcttctccatcgagacccagacgaccataggctacggcttccgctgtgtcacagacgaatgcccagttgccgtgttcatggtggtcttccagtccatcgtgggctgcatcatcgatgccttcatcatcggcgcggtcatggcgaagatggccaagccaaagaagaggaacgagactctggtcttcagtcacaacgctgtgatcgccatgagagatggcaagctgtgtttgatgtggcgggtgggcaaccttcggaagagccacttggtggaggcccacgtgagggcccagctgctcaaatcccgaatcacttccgagggggagtacatccccctggatcaaatagatatcaacgttgggttcgacagcgggattgaccggatatttctggtgtcccccatcaccatagtccacgagatagatgaagacagtcctttatatgacttgagcaaacaggacatcgacaatgcagactttgaaatcgttgtcatactggagggcatggtggaggccacggccatgaccacccagtgccgtagctcctatctggcgaatgagatcctctggggccaccgctacgagcctgtcctcttcgaggagaagcactactacaaagtggactactcaaggttccacaagacctacgaagtgcccaacacgcccctctgtagtgccagagacttagccgaaaagaaatacatcctctcaaatgctaactccttttgctacgaaaacgaagttgccctcacaagcaaagaggaagatgacagtgaaaatggagttccagaaagcacgagtacggacacgccccctgacctagaccttcacaaccaggcaagcgtacctctagagcccaggccnttrmgrcgrgartcrgagatatga

SEQ ID NO: 2955 - DNA, 163 bp, Canis familiaris
cctaccatggcaagtgccaggctgatggttttgttgttgttgttgttgttgtttgtttttgtttttgttttgagagtgagggtatggagagaatcttaagaatcttaagcagcctccacaacccgtgagagcctggcgtggggctccatctcacaaccgtgaa

SEQ ID NO: 2956 - DNA, 219 bp, Canis familiaris
tgacccttctacaactcgggtttgaacactacaggtccacttacatgtttgttgttgttgttgttgttgttgttgttttgagttccgttctacttccttatatttaaataaccaaagccattgccttggcacaagaaggaagctggactggagtgtgtaagaggtggcagtggtgtggcctaactaggaagtagaggagggaagcagtgactggtcaca

SEQ ID NO: 2957 - DNA, 232 bp, Canis familiaris
tcagctggttaatgataggtggaaaaacagaacccgagggtgtgactttagattctagcctctttaattgcttcttcttttaattgatattctcatagtagacacaggaaacaacaacaacaacaacaacaacaacaaaaagtcactttctttcaaggcacttccaactttatatgacaaaatgttttctggctgacatttatctgtttagcgtctcagagcaaaggaatat

SEQ ID NO: 2958 - DNA, 337 bp, Canis familiaris
tccccatctcactcaggtatggtgatcatacagttgtaaaccataacccatagtcacatactttcagtcaaatatggaggataagctaaatccaacaacaacaataaacaacaacaacaacaataaagtacaaactgactagtgtcacaaaaaactaattaagtaagtgaaaggtaattttggatatgggcataatcaagttttttaaatatatatatatatatatatatatatatatatatatatatatatatatatattgtatttaggaataggsgsagggaactaggattagaaggcatttacataatgaatagcttcacaatgagccttcggt

SEQ ID NO: 2959 - DNA, 190 bp, Canis familiaris
attcagtatcagctaaagggcctagagcctgaaacagcttaccaggtggacatttttgcagagaacaacatagggtcaagcaacccaaccttttctcatgaactgatgaccctttctaaatctcaagcaccagcggaccttggaggtgggaagatgctgctcatagccatccttgggtctgctggaatga

SEQ ID NO: 2960 - DNA, 1961 bp, Canis familiaris
tgccccccccaccattgtcccaggccagcgccccagccaaggcctcctttgtgctcccagattcctgggtgcaaggtggcctcattagtgccgggagaccgccccatctccagggagcaggcagacagacaaggggggtaccaggggcacagtgatggcactcccgcttctgagagccttggcggccattctttgggcccaacctggagacggtccccctgcaggaggctaatcttagatttgcctttgtctggccccagagaggacgcaagtacccgcctgtcccccaccacctcagagcactataaaccccaggcccttgatcgggggtcacagtcaacggcctcaaagttcctggctattccgaccactgcagacaacacccttcctggctaccccactctgagctccagacgccatgaaccctccctctacaaaggtaaagccccagggatagaaggggtgactcatcctaccagccaggcaatggaaatgcttgctcaaggggctggaaagaaagctgaggtgtctctgcccttggtcttttcccatgtgggatccgaggcaggagactgatggggtgaagcctccgcggagagcctggggtagcactagatccatggccttctcctgagagctcatgcatcaggcgcggtgcttgcacctggtcttttgtgtcttcctcctgcggcctgcgctatagggattaatacccctttacaagggaggaagttgtggcccctaagaggtttggaaacaggcccgaagccacagagtgcagtttccctggcaagggagcaggcaaacaagacaatttggaacctgctagcccttgacgtgcacgtgtttgtccgaggagagtctatacagggcctctgtttccctgagtgaacaaacttctggtgcaaacacgcacccggttttcaggcgctttaatgggggcacaagggactaagggtccccagaaaagagggattcactgcccaggggatctcaaaacgcctcctggaggagatgctgtgctggggcttgagagatgagcaggtaaaggagccagagaggaggcctccagcagaggcagcagcgcgcagaggcagcagcgcgcagagggcggggacctagcggactgagaggtgggagcgcaggcggcgggggcggagccaggtgggcggggcccgggccgggggtctgcagcctggcgcggccggaggacccctagcgtctggcccggtgtctccctaggtcccctgggccgccgtgactctgctgctgctcctcttgttgccgcccgcgctgctgtcgcccggggcggccgcgcagcccttgcccgactgctgccgccagaagacgtgctcctgccgcctctacgagctgctgcacggcgcgggcaaccacgcggccggcatcctcacgctgggcaagcggcggcccggacccccgggcctccagggccggctgcagcgcctcctgcaggccagcggcaaccatgcggccggcatcctgaccatgggccgccgcgcaggcgcagagccagcgccgcgcccctgtcccgggcgcagatgtcccgtggtggccgtcccctctgcagcgcctggagggcggtcgggagtctgagctgacgctcgcgccgcgtcctggccctgccctctcctcgctgcccgccggatgtcagcccccgacaaaaggtcaataaagacgagtctcttggtgtggctggtctctgttctgcgtggtcgcattccgtctgcagggggcgggagagtcgaactataaagagctcgcggcctgaaagcctggctctggggcacctccgccctggcgtcttccaactggaaacacagagcaaggaactgtgtgaggccccgtggtacggagacaaccgcacaggcgcatggtcggagggaagaatgggggacagacgtatctcgcaatgctctagtaaccattctgtatctcggcct

SEQ ID NO: 2961 - DNA, 816 bp, Canis familiaris
ttgttcctgcttcaacagtgcttggacggaacccggcgctcgttcccctccccggcccgccgctcagagccagccctcggccaccctccacgcagcgctctcggaccgccccgaggcctccgccgccgccgccccagcgccgcgcagccgccgccgccgccgcctctcctcagcctccgccatgacgaccgcgtccccctcgcaggtgcgccagaactaccaccaggactccgaggccgccatcaaccgccagatcaacctggagctctacgcgtcttacgtctacttgtccatgtcttattactttgatcgcgatgatgtggctttgaagaactttgccaaatattttctccaccaatctcatgaggagagggaacatgctgagaaactgatgaagctgcagaaccaacgaggtggtcgaatcttccttcaggatattaagaaaccagaccgtgacgattgggagaatgggctgaatgcaatggagtgtgcattacacttggaaaagagcgtgaatcagtcactactggaactgcacaaactggccactgataaaaatgacccccacttgtgtgacttcattgagactcattacctgaacgagcaggtgaaatccatcaaagaattgggtgaccatgtaaccaacctgcgcaagatgggggctcccgaatctggcatggcagagtatctctttgacaagcacaccctgggaaacagtgataatgagagctaaccttagctgcttccataccgcagggtgacttcctggcaccgagcatgcatgcatgttggggtatcctttaccttttctataaa

SEQ ID NO: 2962 - DNA, 436 bp, Canis familiaris
catgactttggccctttataggaagaatgtgctgatatctggcatggaggaaaggggaaggtggttgtgaataagaattctggagccagcattctttcttgccccaactgggagggtctctgcttcctccccacacaccctacttccttttcctgcaggagttgagtttgacattgacctgcccaacaagaaggtctgcatcaactctgagcacagcgtggacattctgctggagaccctggagaaaacaggaaaggccgtttcctacctcggccccaagtagtgagggcctggaccctgagcccatgatggaccaaagggagcaggtgggtgaggccccagcccttggacagaatatttcattagctaatgcaaatcatgagttcagggaatcctcacagccccctgagaatacgcagagcactgtgttatgtct

SEQ ID NO: 2963 - DNA, 395 bp, Canis familiaris
gggtacaaggtgagaaggtccgtgccgccgccactgccaccaccaccagccatccccacagtcatgccgaagcacgagttctctgtggacatgacctgtgaaggatgctctaacacggtcagtcgggtgctcaacaagctgggaggagttgagtttgacattgacctgcccaacaagaaggtctgcatcaactctgaacacagcgtggacatcctcctgctggagaccctggagaaaacaggaaagactgtttcctacctcagccccaagtagtgagggcctggtcccttgggcccatgatggaccaaagggagcaggacactgatcttctcctgccttccaaatagacgtggggcctggcagtcttgctcagcgatggcagttcctgacagaga

SEQ ID NO: 2964 - DNA, 416 bp, Canis familiaris
tgaatgaacaagagaataatacacacacttaggacattaaaaactattattagaaggtcgccgctatagccactaccaccaccaccagccatccacagtcatgccgaagcacaagttctctgtggacatgtgaaggatgctctaacgcagtcagtcgggtgctcaacaagttgggaggaggtgggtttgacattgacctgtccaacaagaaggtctgcatcaactcttgagcacagcatggacattctgctggaaaccctggagaaaacaggaaaggccgtttcctaccttggccccaagtagtgagggcctggacccctgggcccatgatggaccaaaggaagcaggacgctgatcctctcctgccttccagacagacctggagcctggcagtcctgctcaggatggcagttcct

SEQ ID NO: 2965 - DNA, 396 bp, Canis familiaris
gccgagccagcgctccgatcctgagcctgccgaagtgtcgaagtgtcgccgccaccgccaccaccaccaccaccaccaccacccgccatccacagtcatgccgaagcacgagttctctgtggacatgacctgtgaaggatgctctaacgcggtcagtcgggtgctcaacaagctgggaggagttgagtttgacactgacctgcccaacaagaaggtctccatcaactctgagcacagcgtggacattctactggggaccctggagaaaacaggaaaggccgtttcctatctcggccccaagtagtgagggcctggacccctgagcccatgatggaccaaagggagcaggatgctgatcctctcctgccttctagagagacctgggggcctggcagt

SEQ ID NO: 2966 - DNA, 397 bp, Canis familiaris
gagcataaggatgtggtttagatacttgaagaaaaatagcagaagagaacgaagatgtgactcgtgccgccaccacatccacagtcatgctgatgcacgagttctctgtggacacaacttgtgaaagcagctctaaagtggtccgccaggtgctcaacaagctgggaggagaggagtctgacattgacctgcccaacaagaaggtttgcttcaattctgagcacaacatggacactctgctggagaacttggagaaaacaggataggctgtttcctacctcagccccaagtagcaagggcctggaaacctgggcccaggatggaccaaagggggcaggatgctgatcttttcttgccttccaaacagtcctggggcccaacagtcctgctcagcgat

SEQ ID NO: 2967 - DNA, 340 bp, Canis familiaris
acacacacatccattccacctggttttataaataaaactgtaggccgccaccaccaccaccagcacccgccatccacagtcatgccatagcacgagttctctgtggatgtgacctgtgaaggatgctctaacgcggtcagtcgggtgctcaacaaaccaggaggagttgagtttgacattgacctgcccaagaagaaggtctgcatcaactctgagcacagcgtggacattctgctggagaccctggagaaaacaggaaaggccgtttcctacttcggccccaagtagtgagggcctggacccctgagcccatgatggaccaaagggagcaggacgctga

SEQ ID NO: 2968 - DNA, 9832 bp, Canis familiaris
actctagaagtcatgatcacttcacagcttctccctgctcttactcttggtaagtcagtgtcatttgttagaccagagtttctcatccttgacactactggtatttcagacagaatatctgctcctcacagggagctggtgcattgtaggatgtttagcagcatctctggcctctctacacaatgtgttccagcctgggccaggggcaattgacctctttgtctctcagcttcctaatgtataaagtgttgatcatagatagcctatttcccagaggcattgtgaggagccagcatcacagagagggcatcagacggtgcttaatggtgtgtattaagtgctcaagaagcttagttactctgattattattctaccgtagtggacatactgatggattatggtggatgagcgcagggaggctcaaccactaaaggtaggtgtagtttatggtagtttctcatctgtaccccattcttactttgggaaaggtgcccccgatttgagacattccaaaggccactgtatgatgccaataagattgtaaaaagcccagttaatacagtcaaaccatagcagtgctaaccttcccatgcctttcatcctttcccctttagtgcttctcctatttaaagagggtggagcctggtcatacaatgcctccacagaagccatgacttttgacgaggctagtacttactgtcagcaaaggtacacacatcttgtcgcgattcaaaaccaggaagagattaaatacctgaactccatgttcagctatacaccaacttactactggattggaatcaggaaggtcaacaagaagtggacctggatagggacccagaagctactgaccgaagaagccaagaactgggctcctggtgaaccaaacaataagcaaaacgatgaagactgtgtggagatctacatcaagagggacaaggactcggggaagtggaatgacgagagatgtgacaaaaagaagcttgccttatgttacacaggtatgggctgctgtgggagagaggttcaggctgtgggcatcttgacaagttgttgacagcatgaaaaatctggtctctactatggtaattttctgttctaaaaaatacaattttaaagcattctatttggtacattatatctttttggcttctttgtgtgaatgtaggaaagcatgtaggcaagaaagcatatgtgtacacatatgcatatatgtacgtcaatacatatatagtattatatatatatggtatatgtatgtgtatagtgtatacacatacgacacacttaactcatttatgtctaggaggagaactatctatcaaatttatgataaaggcaattatttattcgtgatgccagtgacagctatacccctgatatctctacattaacctcaaggtttaagatagctgagccctggcgttatgtgaagcacttcagttaaaatccctggcagtccctataattggtgacacctctgtcacacactgctgatcctaagtccaagggaaagcataacaagcacaatgatgatcctccacatcatggattgtgttttctgcagctgcctgtacccctacatcctgcagcggccatggtgagtgtgtggagactgtcaacaactacacatgcaagtgccaccctggcttcagaggtctcaggtgtgagcaaggtaagtcctcgtttcacccattccttcacttgagttggtagcactatcctgtgtcctagatgactttggtatcaggtgtgcatgtcttcccttccctgggacatgtagtgtcacgtggtgcgtaagagccaaggccatcatgccttggcttcaaaaccactattacttacagcacctggactgggtagttaaactccctgagtgccagctgtctcactgtaaaatgagggtggtaataatagtatgaaccccaatagttaggtctatgtgaatgaatgcatagtgcctggcacataggaggcatttgataaattgtagttacagtttccaggactttcttattttatgctgggtgatagagagcagatctgacgtggtttctcctttcagttgtgacctgtcaagcccaggaggcccctgagcacggaagcctggtttgcactcaccctctggggaccttcagctacaattcttcctgctttgtcagctgtgacaagggttacctcccaagcagcacggaagccacacagtgcacttccacaggggaatggagcgcttctcctccagcctgcaatggtaaacctctctccaaatgcacacacagcattctctaactcatccctgttgccttggtttttgatccaacttacaacattttcaaaactccagggaaagttctttttgttattgtttttaataagacttcttctcccagccagcttgtgtggccaatagggcacctgcttgggttgagagagttttttattccatgtttgagatgggtgcttctgaggctctggtggtgtgtaagggaatgcctttagcagtggcaccacactttgagaaatcttcatgacttctctccccctgcccagcctctctcaatgcagtacataaattgaagaccatggtagttcagcagttctgacagcgttttttggttggtatggatgtatgtatgtatcctcaggcttatctttctaagctggagatggaaactttttgtctccaggtcctgctgggctgacataaatgaatgtgttgtgtatgtcagtattcttgctgtcaccattagtcataaatcctgatctagaatctgtttatttttctttgtttttgccttaaaatagatcagagacatgatgaggtatgttaacacaggccagagaccactcagcatagtcaaagtataaatcaatcagggaagaagaaggtattaggaaaaagcataaaagctttattgtgtctgtgcatgcttccaagaattaacctaggactttgggatctgctgttcgaaggctgcttccttgccctgttataaacttcaactcaataggaagtgaacgtatcattcttctgtaaaattcatgatgctttctcaatcctcagtggttgagtgcagtgctttgacaaatccatgccatggagtcatggactgtctccaaagctctggaaacttcccatggaacatgacatgtacctttgagtgtgaagaaggatttgaactaatgggacccaagcgcctccagtgtacctcatccgggaactgggacaacaggaagccaacatgtaaaggtagaatggctccatagcaagatttactgtaaacattttttttctcaacttgtactttaaatggtcagacttgctaatgtccatgattacctatgttacagctgtgacatgtggtgccatcggccatcctcagaatgggtctgtgagctgtagccattcccctgctggtgagttctccgtcagatcctcctgcaatttcacctgcaacgaaggcttcctgatgcaagggccagcccaaattgaatgtactgcacaaggacaatggagtcagcaagtcccagtttgtaaaggtaagcccaagagctcctcctttacacatccccttcctgagagggcagcgatcttcagacatgggcagttaagatgagactagatgcctactttgactagagtgatcagatgtgatgggcaacattcatcttctattttgagtttcatacaagagaaccaaagcttacctggggagaggattgtatatactgagagtgcatgctttgcaggtttcttgactgtgccgagcgaatagagctttgtagacattgctatggagtgggcagagagcttgatctgaggggagatcacatgagaagatttgcggtgggattgtgagaacatgactggatttgccgcctcttgatacttttctactgcgcctgctcataattagcagtgatgagaatgcaccaagtgtggtgtcatacataaagacacccttaatacatgcctaagtgctaaaacttaattcattttcaagcaagagcagtgatgttgaaagcaagctatcacaaactggtattcttacagccagaaattggtacacaatcatttctaggggtcagaagccacaagaccaaagccaaaactgcaaagcagacacaccccatgtgctgcctcctcacctgcctcatattttggcatcatccattagcatccaggacccataagttggtctctgactatgtaaaatctctctcttgactgtaacttctctcaaatgtcagaacagtgctcaggatccactggttctcctcaaaggctgtccttcaccgaggaccattatcaatgaaggggctggcactcaaagaaaacagtcatcttcccggttgtccagggatcaatgaagagccttggtatctctgagcattgcttgtccaaaatgaatggattcattcatcaaatcccaaggactcgccagttccactgcaatcttctctgaccatcattctgatgtctcagcttctcagtgcaaggccttgtccagcccagagagaggctacatgagctgtcttcctggtgcttctggaagtttccaaagtgggtccagctgtgagttcttctgtgagaagggatttgtgttgaagggatccaaaacactccagtgtggcctcacaggcaaatgggacagtgaagagcccacatgtgaaggtaagggtttttgctttaatattgagataaaaactattgaagagctcaggatttgattatgtgagacacctgctgctgcctgatacagacttttaatgggctaactcatgtcttccagctgtgaaatgtgatgctgtccagcagccccaggacggcttggtgaggtgtgcccattcctctactggagagttcacctacaagtcctcctgtgccttcagctgtgaggaaggctttgaattacatgggtcagctcagcttgagtgcacatctcagggacggtggtcacaggaggtcccctcttgccaaggtaggactgagtttagactttaaggagttaggtcaaatactttgtatgtatctgaagcagtatttgcccacggggcttgatcctaattccctacatgctgaaaactaagtgcttgtatgttatgtttactgatgacttttcagtcagttttagccattttcccaggagatttttgttaacatctacctatgtgctcatcatttgcagtggtgcaatgttcaagtctggcagtttccggaaagatgaacataagctgcagtggggagcctgtgtttggtgctgtatgtgcgtttgcatgtcctgaaggatggacactcaatggctctgcagctctgatgtgtgacgccacgggacactggtctgggatgctgcctacctgtgaaggtgaagccctgattggcactggttgtctgggggactggaaagaagaaggggaaagcaatgaaccattcattaaatcagaaaggttcccaaggttaataagctggagaatatttaattttgtggtgatacagaggaaactgaagaggtggcaagtgacaaggggtacgggtaacagaatgggtaacattctgacaagtggaaaaaggggagataccggtcaaagaagggaaaccaagtaagggagagagcacccatgcagtattgaccgaggagcagtgggttctggcagataagagctctcatggcagtggcgggttatcgtctggcacgggtggtttgggctgacctcagaggcctttagtacctaccatgcctcctccttatgtattgaagttgatggctaatcaatgtgcaaaggaaagggcaaatggccaaagcagaaagactttaagttcagttccttctcatgacagttcttcctccactgtttgcctagctcccacggagtccagcattcccttggcagttggactcactgctggggggacctccctcctgacagtagcctcatttctcctctggctcctgaaacgcctgcggaagagaggtaagggagcttgtgagtgtatcccacccaaaatgtttttgaaaaatgtcttttcccccctcactgatgaatcctgttttctcttgcacatttaaatagtaattagactcgagttgctagataaacactaataaactgccattaattgagccatggtcttagagaaagggtgtatagtacaactcaaagtggggaagagttttagggaaaaataaaagttaacagtggacaactctaagggatgctgttcaccgggattctgtgggttcccctgggagctgtgcagtcagacttatgtagttagtgctcccagggaatggctaaacatttccaaaatatttatttgggaaacaggcttaaatgtgggggatctcctgggggcttatgcgaaacatatctagccacacttatgagtggtttggcttacagaatatttattatttttcgagttaaattctgacatttataaaatgggaaatcgcacataaaatctagatttgggacttctcatgaaaaactggcaggtgaacttgacaagctgaggctacagctatccgctgagcccttaggatgagcgtgtgctttgcatgtcaccaagatgtgtttgcgctctgattattacagggtccccaaaggaatggtgttccctggtgaatagagccatattgtttctgaatttgatatgttcttaaaagtcttttagtccaaattaatggttttctttttcttgcagcaaagaaatttgttcctgccaggtgagttgtatccttgtctgaagcatgccattgactattctgtacatttttttatctgtttgtgttggaaaacagtgtttgacttagtgttctcatgtattccacagcagttgccagagccttcaatcagacggatcctatcacatgcctttgtagttattttaagtccaaaggaatgaggtaagatttgaaatcacatacgattttgagagaacgtatctgtccttcgtgttcagttgctccttgaattctccaaacctgcctattttctgaggcagagtattaccatcttcacagtgttttatggaaagctgtttcatttctttgtagaaggaggggaaagcagcacggatctggcctttacatagtgatttcccttgtgaaagttaataagaataatgatagctaacacttatgtgatatttactattttctacgtactgccctaaggtaggaattgtgttgagagagggactgttgctttatttctgatcatatagatggaagaatatgaggcacagacattttacataacttgcctgaagtttcagggctagtgagccagagttcagaccgaggtagtctagatctagaactgtgtttttggccactctgctcagctttgtgggagtgtggaagaatcaagttctccctgagtagattctgtgaaccaatagactttatatttttaggcagttttagatttacagaaaaagagagcaaaaactagaattccaacataccccccggcggctccaatttcttctgttattaacaactcaagctagtgtggcatttggtcaccaattgatggcccaatcacttgatccattattattaactaaagtccacagtttagttagaattcttctgggttttgtatattcccacaggttttgacaagtgtataatgccatgtatccacttgttatagtatcatacagaatagattagttgccctaacagaataggattttgttgttcaaatttggaactccccagtgacagtgaacacagtggtttgtgctagaaggtgaactctgttgttgctattgatgcagaatattaagtgtcctgatggcatgcacccttcctttgccaggaacaccggtacctccagggagctagaacaatactctgatgatggtagagacagagagcactcctctggtacctggcacttctcacctcccacaacctgccacctttacagctgagagcatggcccccatgaggagttcaacgttccaaactccagtgggtgaggccagcctgccaccagcaagactcagctttctctttcctcttctcggcatctggaaaatgttggctgatggagggaaaacatgttctcttccaggcaaaagtgaagagactcaggctctgaatctccgaatcctgttctaactctcttccctgctcacgtgtgagactcagcagagaaacagtatttgtgatatattctttctttgctcctcactgtgtctcaactactgattacacggttgctgtcactggatgaaataattgccaaggagtttaggggaaacaacttggtcaaagtattctatcaccaacatgcaaaaaaatattttaaatgcccacaggcgagtacatggggaaatcctgcttaatactttgtgcaaggattgctaaacacagtcctaatcccttttacccctgtgggattcagtgcattttaaagtgttcttagagattttaaagtgttcttttatttgcattggctaaagtacaattttccctaattcttaattcagtgtaagtgtttagagactttaaaatatatgcatgttagagctatgatagggtaaaagttacttatcagggatctttgtttatgaagggactctaatgttatatctgtagtaaattcattttaaaaggggcaaatgctgtccccagtattacgtgaatcagtgtaaagttgtgaatgtttttactatagttgcttttaaaaacatgaatagtggggcacctgggtggctcagtcagttaagtatctgactcttgacctcagctcaggtcttagtctcagggtcatgagttcaagctcttcattgggctccatgctggatgtggagcctactttaaaaaaaataaaaatatgagtagtatcaggaaagtagaacctgcatggcatatatttgtacactgtcagctattttttcagaggtatgtggttttccatgatgaaaaacttccgtgaggccatttatgtattatgtaaacataaatgcaaaccagttaaggtacacttttatgaatatctttgttgaaaaaaacatatagaaatatggatgtactttgcattcttacaaagatgcttgtcaggtgcaatgtgtcaatatataattcttgaatattacataaaattttaaattcatggtaggaactcactgtgtaaaagatttgcccagtggatttttttaaaaagtgaagacttttaatatttattccctaattgagttattttgtttattaggatgttcatgaagaaaggaaagtctgtatgagtgtttatatttatgtataaaggagtttaaaattcctaaggaatctccaagattcaactgatcattgacagtgagaaattcttggcccgtccatcaccagaacttcttgctccatcttgcaaatgatgtgagaatcaaaactgtcccacactttcactaatttagcatgtattgaaaaataaaagtttcagattaagtgctggctgcatgttggcaaaggcaaagcaaaagtaaacagaagaggctaaggtcagaacgtcagagattttgacagggcaaaagaactctgggaaataaagctacctatggaataggtacctatggaatacctatgtatcattttctctgaaattgctcaaatattgtaaatatgaatatttgtatatactgcaatggaaatattgtctggaatgtaagtgtggtctgtgtttgggtttgataaagtattttaaattatgattttaaaatattttatagcttttaaagtatgtatttatttaggcttatgccatacctattttgtatttgacatggcagtgcaaagtttgataataaaaatgtttgtattt

SEQ ID NO: 2969 - DNA, 1306 bp, Canis familiaris
aaacgatggtgctactggtgctgctgggccccctgtgagtacggcctctggacctcagtacctgggactggggagggctctcagagtcagctcttggggtgggccccgttgctcagagtcccaggacctctgctgtcccagggtgtgacttgcagctgccacctgccttcttgcttacacttccatgctgttcgcagggtcccactggccccgctggtcctcctggcttccccggtgctgttggtgctaaggtgagcaccctacccacgcctgcccccaccaccctcctctgagcgcaacactcacaggctgagggaggggtatctccctactctccaaaccagagggacccagagaagcctgtttccccaacacctttgtcctggaatccccttctctgacctgggagtcctgatccttggtctcccatccttgccctccacacgccccacaaccctgacatccaaacgtgagattgggctcctgacatgtcctttttttttcccatccagggtgaagctggtccccaaggagcccgtggctctgaaggtccccagggcgtgcgtggtgagcccggcccccctggccctgctggtgctgccggccctgccgtgagtgtcacttcctccttcccccagggctgctccccagttccgagtccttgcctgtcactcatccacctctctatctgtgccacagggaaaccccggtgctgatggacagcctggtgctaaaggtgctaacgtaagtaccctgcaggttgcagagctgccccccaggacccccttccacgtgccctccaccccctgggctcaacttgttctgcctcccacagggcgctcctggcattgctggtgctcccggcttccccggtgcccgaggcccctctggaccccagggccccagcggtcctcctggtcccaagggtaacagcgtaagtatcactgtatcacctgtgccctgccccacatgcctgctccagtgtggccctcacctgagcagcaggaggatccagaccagctgagtaccctccaacccactcatcctctcttgctccatcttgcagggtgaacctggtgctcccggaaacaaaggagacactggtgccaagggagagcccgtaagtcctcctgcggctcagcctatctgccctggggaccccttgagggagatcctgggaggatgggagcctgggtgccgggtcagcctctcactgcaggccgccccccggctctctgccctctctagggccccactggtattcaaggtccccctggccctgctggggaagaaggaaagcgaggag

SEQ ID NO: 2970 - DNA, 1522 bp, Canis familiaris
tggtgaacctggtcaaactgtgagtacatttttgccctttatggtaaatttcttcttcaagaagtttattaatataatcttaatgaaatgactggtctcctatcttcttagggtccagcgggtgctcgtggtccacctgggcctcctggcaaggctggtgaggatgtaagtatttacttataagcatttccaaaatgccatttaaacactcctgcctcaacaagaatttctggattcaaatgaagtattctgccaaaagctgaatgtgcctgacataactctccccatatggaaaatgttattttaatgaaatttcaatttgttttgtatttaaggaaattcgttgttaattaaatatatatttggacccatatctttattgaatgcctttttcctatattttaaaaaccaagatgttctgacttccagctgatggcttagcaagaaaaagcttaccctatgatgctttcatgttttagggtcaccctggaaaacctggacgacccggtgagagaggagttgttggaccacaggtaagctttctatcccagtggatccagtccaggtatcagaggcatcttgcatgcaagatggttggtaaaaccgggatgggtctaaatgaccacctagatgtttgaccacctgtacccctcaatgaaggcatctgacaagtcaaggaagctagtaagaatgcatacagttttcattaatgcaagggatgtcatcttaatgacagcaagcacactgtaaactaaatcgtgttttgtacaaatgccatagtatcggttactcaaattagagcaagttaatttgctgctctgtgctttaaaatatcctagtctttgattccaagctcgaacttcagtgagaagaaatgaaagggaagaaatcattgtattctgatttagaaggaaaacatcatttgtcttcttctgtgtttctttttaagggtgctcgtggtttccctgggactcctggacttcctggcttcaagggcattagggtgagcacattctttacccagaagagaggaaatgttgattatttttaggaaaagcgtcaactatatttaaactcccgtgtgacacatacttgcttccaaaatcctggaattcgccagagtgaagagagaaagttcacatggctgaaaagtccagtggggtgtgcttttcttagtatgttcgtagctttcaagaattgaggatccctatggagaaaattgtataaaaggcatatgacttaagaggtacttataaccatctgaagatcgtaaaattattaaagagagaaatgatgtaagagagcacctagttctcgttccttccctttcaaatgcagggaggtttagtgacttaactggggcaatggagcaagtttgctgggtgccagaccctccagtgcactgaagcggtgcatgcacgattcactcaggaggttgggatttgaccaagcacgataatggaatggcattttaagaataagaatttgcatttcagggacacaatggtctggatggattgaa

SEQ ID NO: 2971 - DNA, 133 bp, Canis familiaris
agtcatcattacccaagagcaaagagatactgtgcccatccccaaaacaggcctcagccaactaggtcgctggatgtcagaggaggactttgagaaagctttcaatgcccgatttccagggtgcatgaaaggt

SEQ ID NO: 2972 - DNA, 8190 bp, Canis familiaris
  misc_feature (942)..(942): n comprises a, c, g, or t, or includes no nucleotide
  misc_feature (1015)..(1015): n comprises a, c, g, or t, or includes no nucleotide
  misc_feature (2261)..(2261): n comprises a, c, g, or t, or includes no nucleotide
  misc_feature (5709)..(5709): n comprises a, c, g, or t, or includes no nucleotide
tgaggggtttaataccaaagttttttttctgagagaatttcatttttctacctcagcacatgcagagaaaagagagggctcaaaatcttttagtgccactaagttttaaaggagttttaataaacaactgaggaagacccagtgagaaattatctcaaaaaatattgaaaatgtaatatttaagcagataaaatgcttcaatgtcaccaggagttgaccctgataacaaaataaaatagagcactaattatagcaggttgtgcttcaaagtatgtttttatatgaattcttattatgaaaattgggttagcaaaggaatcaacagaaattcttatcaaaattattggggatcaaaaaattagaagaagcaaattatgatatagtgtctataatgtaaattaaattcttgaaatttaccaaagcctctcaatgaaaaaaaaatctgctatctaggatatttctctgctctatttaaatggtttctaattatgaggattttgagttggtgatatgaatctaatagtcttatggtattaataaagagagattaaattggaattctatattagccctgatcatgcagtcctatagtcagacagaatgtactcctcccagctgagattgattcttctatcaattgaaaaaaagttttcttatattttattctgtatgttggagttgactccctaagtgtatttttaaaaacatttatacttaacaaatatctttatatttatgaagtatctaaaggtacttgtcaaggtggattcatatgaggcatgtcattaacgacaacaacaaaatctgtgagtatatgaagcacatcttttgtaaagcccccagagactatagctgtctttgcattagcagctgattattataattgtcataatatggcaagtagaaacaaataaggaattcaactttagaaattatgtgttnttatataattttctttcttccgtgtgttatttcttgatttgactcttcaaagtagtatcaaaattctgtgttntgtttctttaatcataaaatagggagatgtaaatattttattttcatatattttttaaaagatttatttattttatagataaagagaacatgagtgggagaaccagagggcgagggagtaagaatctccagcatactccccgctcagcatggatcccaacactgggggttgatcccaccaccctgagatcatgacctgagctgaaaccaagagttggacacttaaccaactgtgtcatccagatgccccctcccacctttttaaaagatttatttatttatcttagagagagagataaatattattttaaattttcattgggctaggtattgaaaaataaatttttaagtgtcattcagttcctttatgcttttagcttgtcagactgagtagtgtgtgaaagcagaaagggtgctactgtgagttttattcccactttgtcgcttacccactgtgtgagttttcaaaactgtttgacctctctgcacctcggtttcctcatgtatacaagattgggggcatgctgtatgttttataaggtctctcctttcttactataaaatcttgagctagctaatttttaaaacaaaattattcctgagacacacacacacacaaacgattattcggtttagcaaacctgacacaaagggtttttttgtcttgtcccattgctgactttctgaagcttatgctctgaggaaggtggtggtggcagtggtgatggtggaggtgatagtgcttgtcctgcctttggtttcacttgttcttataagcacttttatgagcatcacttcagatttgttaagataaatttaatagaacaggtttgacacttgtaaacgtctcttgtagattaaaaggtgtaaggagacttctgaacatggggcatattcagatctgcttcagcgtcagaaggcatcaatgattgagaatagcaaacttacggggaaaataagtgagctggagaaaatggtagcagaactgaagaaacaaaagtcccgcgtagaggaagaacttcccaaggtcaaggaggctgcggaaaatgaattgagaaagcaacagagaaacgtagaagacattgctctgcagaaaatcagggctgagagcgaagccaagcagtaccgcagggagctagaagccatcgtgagggagaaggaggctgcagaacgagagctggagcgggtaagaaagctcacgctggaggccgaggccaaaagagcagcggtagaagaaaacctcctgncgtttccagaaccagttagaggagaacacctttacaagaagaaccctggaagatcatcttaaaagaaaagattccagtctcaatgacttggagcaacaaaaaaataagttaatggaggaattaaaaagaaagagagacaacgaggaggagctcttaaagctgataaagcatatggaaaaagacctgacatttcaaaaacagatagcagaggccggttgaaagaaaagcagaagattgaattggaagcaagaagaagaatagcggacattcagctttcatgtagagaaaagccattgccagcctgtgtggttgcacagcctacctcatacagaggagtagcaggtcttcaggaagagcaggacagacaaaagacagaagaactcaaacagcaggtagacgagctaacggtcgccaataggaaggctgagaaagacatgagagaactgaagtatgaacttaatgcccttcagcttgaaaaaacctcatctgaggaaaaggctcgtttgctaaaagaaaaactagaagaaacaaataatacacttcgggtgcctgaagttagagctggaaaggaaggatcaggtgaaggaagggtattcccagcagctcagagaactggggagacagctgaaccaaaccacagataaagctgaagaagtcatgaaagaagctaatgaccttaggaaaataaagcacaattatgaagtagaattagaatctcttcagcaggaaaaagggaaactgcaaagagaagtcgacaggatcactaagacccatgctatagctgagaggaatattcagcacttaaattcacaagttaattctttccaggctgagaaagaatcctctaatgaaagaatacggttctgccagagaaaatcagagcatctaaaagagcaatttgagaaaagccatgcacagttgcttcaaaatattaaagctgagaaagaaaataatgataaaatccagaagcttaatgaagaattgaagaaaagtaatgactgtgcagaaatgctaaaacaaaaagtagatgagcttactaggcagaataatgaaaccaagttaatgatgcagagaattcagacagaatcggcaaatgtggttttagagaaacaagctattcaacaaagatgtgaagccctgaaaattcaggcagatggttttaaagatcagctacgcaacacaaatgaacacttgcataaacagacaaaaacagaacaggatttccatagaaaaattaaatgcctggaggaagacctggccaaaagtcaaaatttagtaagtgaatttaagcaaaagtgtgaccagcagaacattatcatccagaacactgagaaagaagttagaaatctgagcgcagagctgaatgcttccaaagaggagaagcgactaggggagcagagggtacagctacagcaagctcaggtgcaagagttaaataacaagttgaaaaaagtacaagatgaactgtacttaaagaccatagaggagcagatgacccacagaaagatggtctgtttcaggaggaatctgacaagttcaaacgctcagcagaggagtttcggaaaaagatggaaaagttaatggactctaaagttatcactgaaaatgacatttcaggcatcaagcttgacttcgtgtctcttcagcgagaaaactgcagagctcaagagaatgccaagctctgtgagacaaatatccgagaacttgaaagacagcttcagcaataccgtgagcaaatgcagcaaggacagaatgtggaagcaaatcattaccagaaatgtcggaaacttgaagatgagctggtagcccagaaacgtgaagttgaatgcctaaagcaaaagatggatcaacagataaaggaacatgaacatcaattagttttgctccagagtgaaatccaaaaaaagaacccgaccaaagactgtaccttcaaaccagagtttgagatggcagtaaatgagtgtccgcgctctggagacctgccctctaggaacacagggcagcttcacccaatggccaggtctcctctgttgaggtggaatcaagacccacagcagtcagaagaaaaatggcaacatcgggttgttgaacaaataccaaaggaagtccagttctggccatcagggggtccacctgagaaagagaaaagccagcaatgttactctgagtattattctcagacaagcaccgaattacagataactttcgatgagacaaaccctattacaaaactatccgaaatcgagaagataagagatcaggctctgtacaattccaggcccctggttaggtatcaagatgacaaatgtgaaatggacctggcgaagcttttggccccgttggaggtatactctggattctgagaccttattagctacctcataccatgtttcctctcttgkttcctttctctgctagactaaatttttttaacaatgttgagtgagattggctctttgtagttctggcggaaaattatgccatagatatctagagattggcttgaatctttactataaattatcattctttaatttttaaatgtttgagattaaatacacagatgtaatggttagatctatggtattatattctgaagaatgttttttttagaagctagtaaaaccaagctagttcactttaatttctatagtttctttgtagagatttcacctcaaatcttttttaagcctgcctttttttttttttaaagattgtctttttaagtaatctctatacccaaagtggggcttgaacttacaactccaagatcaagtcatcacatgctttactgactgagccagcaaggtgctcctaaacataccattttaataccttagttgtcatttaaagtaaacttcagtctgtcgaaatactactacttgtccctgagccctctttggtttgaaaattttcttctctttacttaccttcgttattgtaggaatcatatttggattgaggatgagtaaagtgacaatgttttttagatgacttttaatgtctcctaaattcctgttacagatagctaagaacaagcagtatgatatgcacacagaagtcaccacactaaaacaagaaaagaactcaagtcccagtgctgaagatggatgcttgaagggagcagagcatccagtggactcaagagagattttcttaagaaaggctcagaaccagagagcttccagaacttggatggtgatcacatatgttcagttagggatgatgaatttaaattccaggggctccggtgcacagtgactggcaggcagttggttgaagctaagcttctggacatgaaaacagttgagcagctgcgacttggtctcaagactattgatgaagttcagaaaaccctgagcaagtttttgacgaaagccacctcaattgcgggactgtatctagaatccacaaaagaaaagatttcatttgcctcagcagccaaaanaatcataatagacaaaatgatagctttagcatttttagaagctcaggctgcaacaggtttcataatcgatcccatttcaggtcacacatactctgttgaagatgcaatccttaatggagttattgacgctgaattcaaaggcttcttgaggcagagaaggcagccctgggatactcatattcttctaagacattgtcggtattccaggctatggaaaatagaatgcttgacagacagagaggtaaacatatgttggaggcccagattgccaccgggggagtcattgaccctgtgagaggcatccgcattcctccagaggttgctctgcaacagggcttgttaaataatgccatcctacaatttttacatgagccatccagcaacacagagttttccctaatcccaataacaagcaagctctctattactcagaattactgcgaatgtgtgtatttgatgtagactgccagtgctttctgtttccatttggggagaggaacatttccaatctcaatgtagggaaaacccataggatttctgtagtagatattaaaacaggagcagaactgactgcatatgaggctttccagagaaacctaattgaaaaaagtacctatcttgagctttcagggcaacagtatcagtggaaggaagccacgttttatgaatcctacgggcatccttctcgtatgctgactgatactaaaacaggattacagtttaatattaatgaagctattgagcagggaacacttgacaaagcctgggtcagaaagtatcaggaaggactcatcacacttacagaacttgctgattgcttgctgagccagctggttcccaagaaggattcacacagtcctattgcagggtactggctgaccactagcggggaaaggatctctgtcttgaaggcctcccgcagaaatttggttgaccggattactgccctcagatgccttgaagcccaagtcagtacaggggggataattgatcctctcactggcaaaaagtatcgagtagcagaagctttgcatagaggtcttgttgatgaggggtttgcccagcagcttcgacagtgtgaattagtaatcacagggattggccatcccgtcactaacaaagtcatgtcagtggtggaggctgtgaatgcaaatatcataagtaaggaaatgggaatcagatgtttggaatttcagtacttgacaggggggttgatcgagccacagattcattcccggttgtcaatagaagaggctctccaagtaggtattatagatgttttcattgctacaaaactcaaagatcaaaagtcctatgtcagaaatataatgtgtcctcaaacgaaaaggaagttgacatacaaagaagctttagaaaaagctgattttgacttccacacaggacttaaactcttagaagtatctgaacctttgatgacaggaatttctagcctctactattcttcctaataggacacgtttaaataaccttgcacaaaggtgatgctatccacttcatatgatctgttgagagcatgatggtatcaaacacacagtctagcaatcgtgtctcatactccaagcaccatttatttcttgagggctgaatatagctgactgttcagaagagagaataatttttaaaattggaagtaaaaaaatatttactgttattcaaaatggtttcctttagcttttaagctaaggttttgtatttttttgatcttgccttcactgtaatatggagtaagcttgatgaactccagcaagttcatagcatcctttcttcagaattcttcatcactggaaggatccagctggacattaggtttcccagttattaaatgatctattacgttccctgaaagagcacttcgaaaagcaccatggattcaaagagatataaatttgttcccacatccctgaggctatagtgaaaaaaaatttttttctgtacattgtaaccttctttacatattaaatgtttaccacaatttcccatttccaggtagagtcttaattaaaagtagcattactgtgtgttggaagatggggagagatttttcttcattttgtgtatctttcatatgtgtgtacacattcactgttctttcagatttccattgtttgatacttttctgtctagacatttgtgattgtaatgctaatgcaaaggcagcacttcaaaggtcttctggtgcttcatgaataaaattgagtttttttatttgtcatattgatagaccagctgggaggttggactgatcattccagagagtcacagctttctttgctaccataaacattttggaactacatctgccatgtgacttgaaaaacatggttaagtgaatgaataaaatactcagtaactggtgtgtgatgacaaaatatttctacattgttttctgtggagaggtcagtttaacagcttaagcatttactggaatatgtctttttttcctaattactcacatttgtc

SEQ ID NO: 2973 - DNA, 10560 bp, Canis familiaris
  misc_feature (8604)..(8604): n comprises a, c, g, or t, or includes no nucleotide
ccatagaacaatttagtcctatggagttgctttctcaagcgctcaaatttattcataaaaataaattcctcaagttttctttaaatgaaaacatcctgtcctttaatctcatcaactaacatttgatgtacttttctctcaacatagattagaaaatctctttatcaaacatccattcacagatactctaaaatttctctattttggtttcctcttcagaaattaacttgtaaccctctttgtttttatgtttattataaaaaattctgctctcagacccagatttccaatgtaagtcttcacagattcagtttcagaaatatcactcttgagtctgaaaactgagctatatatcttttttatgagacaatccattaatatgatattttagtgtcaatttttaatcagcaaatctttttttatctactttaagttacagtctcttcatggtcttctgtaaactataatgttatgacttcctaattgagtatgaatcttttatgtttcaaaagatgatgagcataatctgtacatctatcaggctttttaaaaaatctcttggttctgcaacttcaattatacttcatcacataaactgagcaaaatggctcatatatgtgtaatcagatatatactataggaaagggaaaggactgatatttaactaaatatacaatttgaaagatctacatatcattttcagtgggatcatatctctcaaaaactgaaaatgtaaaaaaaaattatagatgttcttgtagagatgagatgtataccaactattggaatggttacagatattctggttttcctttctaagcatataggaatctagttgtaaagacttgcaattagctatgttagtgatttagttgcagaaatctattaactctgaacagactaaaatagtttgcaaaagtagaaaataagaaagtaacatctattagacatccacgtaccatttcagttctttcattatacgaagttacactaagtaagtataatcatcttcagaagttcaacagtctaatttaaatggctaatgcctcacaatttacttattttatcattctactatttttgtctgttctgagggtaggaatagaaagcatatcaagataatagagcatagtataatcccttcaaaattagatacaatagccttgtgacaatatattttcataagtaactccttactctatttctgaatatattttttaaatgtagaatcaaagcagagaaatcctccaaattagaatggtactgaaatagtcttttactatataccgtatcttttggggaacaataaaaacaaaacaaaaaactccacaatccttaaaaagtagtatcatttttgtagaaaaacttgcttcttctaaactaatggtttttatgttttaaatccttaaagatgtaaattattttaaaatgtataaaatacactttaagtagtatttctgtagacatcttaacagtagtaactatacttcaaagaagtatatttctcaaatttgagaaaactgaaaaaaattctgccaagctgccaacatttcatagagccatttaagacattaactctaataatattagcatcttagagtgaaaataaatgctttcctgttggagagaatcaaaaacaaaccaaaaaatcgcaggcttctactctttttcattgtaaccatctaattaaataatttatcaaccatgtaaatttgtcatgaaaactttttttgttttcccaaacatatcgtagttgctttttagttggctgttcatagttagtggttacctcctcttcttccagcctctttaatgaatcaccagcaaatttaatatattgcgtcatgagtgtcaccagagcagtgtatcgggtccttaggtccatgaactgcaaaaaatgaaataaacaataaaagcataatctccagttgctctaaatgagtttaatgaacactgactaacagttataacattaactagcctttgtgatggtaaaatacacaattgcccaataattgtaagtaggtagggataggcttattactgttgtgcaaaacatactaaatgacaattcttctctaaatttaattgcaaagtgtatttgttattctctgcaattaataattaatcttgaataaagcttttccaagaatttctgttgttgtttttacaacccttaggaaaagcactgtttaggtagagagtttcttttttggaatgagggaaaaagttctggaaatggacagtagtcagcatttgcacaacagtgtgaatgtactgagagccaatgaattggacacttaaaaatggttaaaatggcatgttttctattatgtgtatacaaatacaaatacataatttctattatgtgtgtacaactataatttctatgtgtatacaaatatataaatacaatttttaaagtattgtttctctcttttagatcgcctcacttctctcttgtacttttactacctcttgaataatgagatctgctgagctctgcattcttcggcgtttcacaggagatttttgctgtgaatctaccatggcccggtaggtcattgtttgtaattcatagtcctgtacaagagttataagattcaattaattaaagcaaaacattaatgctccattctacagtgactcaatgcacagaaattgaacctagcttctttcactgaataacatttaaaaattactgcaaaactacatttttaggaatctatctaatcctgggatgtttccaaggtggtaataaaaattggaaacatttgggtggtcataaaagtttcccaagtctctttagaagctcatggaatcatttagttataatatgctagttatattcagctttcctttcccctggctaggcaacagaactgtagatctggatggctaaataggcccagacattggcaacttcaaccatgggaactgtctcctaagaaagtcacattctttcagggaatattctagcaatgctaaagaagagagagaaaaaacaaacacaagcatgcacaaatcagtaagaaaccaatttcagagctatacatctattctggtgtgtgtatgtatgctgttgtgcacgtgtgtgagagaggatgaatgaagcagaggctgacatgtgactcacatgtccaacagagaattattagctaagtgtcacaaattaagagtctctgttttcactatttaacagagtgaagtgatttgcagagactctttcttaaagtatattgttgaatcatatagctgaaaattaaatttgatgcaagtaactgtatcttcttaccttcactgtagttgagtactgttccgcatatttttgacactcatccattttgctctgtttcatttctatttcggacaccagcatctacaaacacatagagtttagaaggaaaagaacaaggaactctatactattcaaccaagatgatcaggaactaagaaataaccatatcttttaataataaagcttcttagccctttgcacttaatatgtaattaggcaaatgacaaacttctacattaagccacataaatgacccactcagggagggcttccaaaacagaaatcactaaactctgcagaaatcatccaaagatagacttgaaggccttgaacccacctactcctgatcaaagcaaaactagacactactgtcctgcaagacagaataaaaatcttaaagaatttaattctctgtcaagtgtggtatttaattttctaccactagccatttttgggatcccaactattgcagcaagcagagtactaataaagagatttccatactgatgattaaatgaccattagaaatttgaacactgtcccagcatgctcttttcttattccttatactttcgaaaatgacttccaaaaaatcaaagtacatgatgtatgtaggtttggattacaggattttagtatttatgatttactccttatcttcctccaaatacttgctgactttttcttttaatgaggtaaagaaagataatggtcatgaatgaccaaatgcagacaaaaccttcatataataaactgtttttacataccttctgctgattcaactgtgtggctagagttttactattttcaggctgattttcctgaatctttctctgggtagtttcaacttgctggatccaatcatctaacgggtgataagtatctctgtagtacttcagtgatttgccaatgccttctaagtcccgtaacctaagagaataaaaacaaagtagtcactgtttccaacagtatccattaagagggtggaagatacagagaggagagatgaaattactgtaccacagtgcactatgtacaacaataggggtgtgtgtaaagatttcaaggctacagcaccttgaggactatctccaagggcacaccatactggcataggtcgaatatagatattttggtcctggagttgtacaacttagtgatactgtttactccgggttcaagcctaactgactaaagctaaaaatcagggaaactggaaacgtaatcataattgttatcaatcggtatgtctgaaggcccaaagtttgcataaatggcagtttacttctgaaataatgataaagtagttcaaaagacagttcaatgtggactcaagaaagtacttcctagaactgtgattaaataaaaatacctcagttcctgtgattttaaaaccactatattaaacccatataacatgtattttacagagattcaataatatatatttgaatagaattttaattctcaagaatggtactatgctatacaggcattttatatgcatttatataaacattaaaatgaatgagaaaggacactattccatttcttttaagatgagtcctaaaaacattccatttcctttcacttttttattttagtcactgggtgaatgatctcaactgtcttatatcctcaattaaaatgaacactgagtcatttcaattgctttacacttcttaggtctagtacagattccttcatacagccccctcaaacacatggtaagaacacgttcttactaaatcttggttatttgaatattgtaagttagtaataatttcctttagaaaaggcaagtagatttactatacagatgtcagagtatatcaacagttttaacaacatagagttgaaaaatatttattttgaagttaattgtcttgctgattccaccatatcagaaagaaataaaatcaggtggagctcttgcaattaacaaaattaactatatatggaaggtaactatatgaaattaactgtatatggaagtttttttttagaaacctagaagtttagattttacctagaatacaggataaaaattaaatctgtgctgaaactgaacaaaaaaggatactaacctgttgtcaatctgaacatgaatattttgccacctttcaaccaactgatctgctttttccttgtgccagtcaaaatcaaggtcccgttctttatatgttttaaacatttcatcactgatggctttagctttctgcaactcatcctctaatgcatggaacacctctctcttttcatctacttcagatctccattgctaaaatgcattaattggtgaaagttataaaaattgtcaaccacccactatgtaaacacattatttacctaactttacaatttatttacaaatgactgatataaaatcagatcaagaaaagactacatttcatatataaaaatgatatattaggctgaaccatatggaattgtcaatctctgatggcactttgacctaaaaagaaccccaattttataaagttcaagctaatagaatttgcacatcaataaaaaaaatatattccatgagtaagtttgctacttctgtctttcgaactgcctatttcttaaacatctactaatctcgtttaaaaatgaatacatgcattaaaaaaattaatgagataatttttcacaactactttgcaatgatttcatactcaatactttacatacagaaatatcaatacagatgagtacagttaccagtctttttcctttcctgaattaactcctctacttacttccctgatgtcttaaaataactacctctttcagcaagagaatctattagaaataatttaattttttgcttcaattgcttttgctgacccaaattaattataaaaagctattattgcaaaaagacacaaatttcaaatgagaagaactctcctcaaatgaaaaatgacttatttacactaaggtacggttatgtagagatatgaaatgaaattaatataaatgtattcaaattaagatatttactagttgatatttgaagatctaggtactagagaaatttttagagtgtgatcttagcaaatagccataaatgaggtgcattacctttaaagtacttattagattctcaatggtattcttgtcagctataactgcttcttcttcacacagtttagtttcatagagtttaacaagagcttttgctgcttgtgtgttttttaacaccaaattaacagttttcagtctaaaaaagagaatgcaacaatagcctcttattagtaaacatttattttccaataatgcagtcctgaagaaccatttatgatgcaagatatagcatgttcttcatcttggaatatgaaacacactgactacaagattaacattcagctaactctcttcttaatggagggcatgtgctccaatccatgccctgccctgcagatggtatattttgtaagagattccagggtaaggtggtcttctttcaaaccttattcagaacaagcttgagaggaaagttctataagctacaacagctgagggactaaacccataggcaaaaatgtgggaaaagcatacacatgccctattccctcaggcatatttcttttcaacagaaagcataataaatccagagaaacatttaatagatattattaagacaaaaaagggattatttacattcataaaaatgaatgtttttaaatgaacagcatatatatatgtttatatatatacacataactatgggagttaaatgaagcaaatttatattaaaacagaggttacatacttatctatgtaagtagaagacatagaatagacttggttcatgttctgaatgaccacaccgagctcagatcgtaaggtgggaactgatgcagaggttgctgcttgactgaaaaattcttcacatttattcgtgattgttcccaaatcatctttaagtcgctccagttctttctttagtttctatagaagagagaataaacacgggtattaggctaggactccacctggggcatcttttctaaaacagcttgaaaacacacaatttacattataatcactgacttaaaaaactacgttatgtattctttactttttctttatcaaggaaactaagcctgggccttcaagttttatcatcagtaattcctttactgcccatctcctcgggcacaaacatgtaacttagtgcttctgcatccagcagctgatcaataagcattcacaactgtcactataagaaaccccgagacactctatcataatgggtgaaagggtacacgtttctgcatttacctaagtcaaaggcaaaactgaattagaaaattctcattcacgataagcaatagatacataatcagaactcacgtggtgaccagtgggcaaagctgagcccatgagaagtcaccggagtcaacaacgaatgcattgtgacagtaatttaccttgagtccattatgtcccaagatagttacaaatctcacctcctgctctgtgattctgaacacactttcatgcaaatcatctctttccaatggagtgcggatctgtctaatcaaccgatcctcacaactctctaaccgaagtctaatgtttcgaacttcagagatgtagaggttatacacagactcctcttgctcctctgtgaaaataaatataatgtttggaaaacactttgttctctgtcttctggatgttgctgttaacattttaacttggcagttttactaccactggacatagctggtcagactaaggtcacccaccagtcattaccacaatcccaccctaaggatataaaccttcaaataatagaccttataatttatgaacaattaataaaattttcctaatgctatctaagtcccaatttctgatttatgatatccaaggaaagtaatatattacgctgttatatgttcacaaaaatctgaattacattagctacaggttaatttttaaaatttaaaaaaattccttaaaaatgaaaggtagataaagaatttgttaatgtttaaaaatattttaaatagattactaataaagttttttgtctctaagtgatattaaaagaattaataaaatatatatttaccaaaacttaactagacaaaaatcttctcctttaatctctgtataaaatccaagttttgttatgggatatctctgtaccttcctctcaattttgctaagactcttaaactgctctaaaaaaaatcaagtgttttttttttatccaggtgtgatacatggaaaaataactgaatcttttcaaaaactagatcattctgaacattacaaaatagtgncaatgtgaaaagtagatgtattaagaattcactgcttgtcccattatttggttggcatctttttattaattgatcacttaaaaataaatgaacccccccccttgcatctccctactacaactgtgcttttaatgttccagcacctgtgtccacctattataggctgagtaatataacacaccgaagatcaagatacccactgagagtaaaaaatagcctggactaatcaccctgagaggaaaaaaaaaaaaaaaaagataaggattcccatgctttacctctttctgctgatttaagaagttcttgataatattgcttacaaacattaacctccttctccagttgtgttatatctgagcccgaaaatatttgggattcctggctatcttccagaaaatcttcaaaacgagattgtaggttactcagaacttgctgatgttcaccaggtaacattgtctttatctaaagaagaccaatgatccatatgatcaaatgattatagtactaacagctaaatttaaatgggatagatcttaggttagggtcttctggtgtaggtcagttcatattaatagtgataaatagaagagtgatttgaaattaatgttatttttattaacaatttcaagttttaatagattaggaaaaacaagagtataaaatatcaaaaaatgagatcaactatatccatccctgaaggccaaacagcatatcttctcttcccaaaatgtaataaacagtgaatgaaatatgtgatctccagatatccaccattcttagaaagtgccatgtacatagcaagtatgtaacaaaatattattaaatggatgaatattaaccatggatctgctggactccatcctattcgcgaacaaatacacactccacccctcataataatgtgccccacatttttggacagattaggccaatatgtagactcatacttactgaagccacattgctagctcgaattctgtcaatttcattgatgagataatgccaggacactacactcttcatgtttatgtgagactcatgccaaagagtcaggacattctgatactgttgctcaattctgaaatacatgagaaatacagacaaactaaacactgattaagcctttccactccctctggaaacacgtataatttttctttctgttgtaaactatcccatctttactagttcaagatctttctgatcctatgggtcttgacaaagtattgattgttttgttaaccttcagagagcctccaaacacagttctgtgtgtttagtaaatgcatacaaacctgtttgcaaaggcaactgcttctttggttggtggaggaactgtaaagcacacagatgggaccatagcctcattcccagtagggctaatgactttccatttagcacgatgagaattgttggccaaaacacattcatcatctttgtaaatggttatctggtttcaaatgaagaaaagaataaccaaatgaggtcactgttgactaatcctttactaatcccaatcttgggactttttgtttttttgaggtagaaaactttaccactggtcagcaatatgacctcatttttaaaaggtaagaataatgccaaaaattggtctatttctagaatacctcaatttgtctgtagtcacagatagctttgatcggaatagaagttttgagtgtacagtcaggattccttggcttcagctgaattattgtttttgctctccccatcaggcttgctattgtgcttttatactgcaaaagttcttctttctcttcctaagtaataaataagacagatttttaaaaattaaaagacttgtactctttcttcttttagggctttacacaagtaaaatttcatcataaaagttttccctgaccacttggtctaaatattcaatccctctctgcccctcttacatctctctttccttgttttggtcggctggtt

SEQ ID NO: 2974 - DNA, 8731 bp, Canis familiaris
gagctccatcttttgtcaactgtggcaagtttgggtgattaagctaaaaaagcaaagtcattttggtccagaggattagttttgaggtgtgttgcaaatctagaagtaacttattgcctgcgaggcaaaccaaacccaagatgactctcagctaattgcctgcctttccttgtgccaagcctagctccttggtatataaaggccagcctcctcttcgtccccatcctctcccttcatccccctcggcttttgctaagtgattgttatctgacctccaagctctctcaccatgaacagacaagtctgcaagacatctggtggcggcagccagggcttcacgggccgctccgccgtggtctcaggcagcagcaggatgagcagtgtggcccgctccgggggagccagtggaggggcctgcgggttccggggtggagtgggaggcttcggcagtcgcagcctctacagcctgggtggcaacaagagcatctccatcagcgtggctggtggctcccgggctggtggctttgggggagggcatagcagcagtggcagtgtctttgggggcggctatggaggtggctttggtggtggcagaggaataggaggtggctttggaggagctggtggctttggaggaggagctggtggctttggaggaggtgctggtggctttggtggagctggtggctttggtgggccccgtggctttggtgggcccggaggctttggtcctggtggctttggtggccctggtggctttggtcctggtggctttggtggtcctggtggcttccccgggggaattcaggaggtgactgtcaaccagagcctcctgcagcccctcaatgtggagatcgacccccagatcgggcaagtgaagacccaggagcgcgagcagatcaagaccctcaacaacaagtttgcctccttcatcgacaaggtgagggcaaagctcagaggtgccgtggagggtttgggctgctcatggggttggtacatggagatgccggtgggatccgccaggcttacaggcgggggtattggcttcttgtcctgattctgtcttgggcccctcagacagcaggcatgtctgttttactcttcaggccctgttttcccagctatgaaacagaaagggattttagcttctgatttccttctagggataggactaaggaaaactaagtgtgggtccatgttttcaagagaacattcaatttctcttgaaaagcagcttcttgacaatctaaaccagttggtaatcaaacttgcattagtaagaatcttgggactgcctctcagtgatgagtgttggcaactgacttactttccaaatggtgctatgttgtagttgataaatttatattttatacatatatcaaaaatatatattatatatatattggctgatatatatattttaaagattttatttatttatcatgagagacacagagagagacagagacacaggcagagggagaagcaggctccctgcggggaggctgatgtgggactcgatcccaggaccctggggtcacaccctgagccgaaggcagatgctcaaccactgagccacgcaggtgccccagccgatgttaatttgagctgtctatgctggggcagggaagggtgtgctggatcttggggaatgagcctggggtttgaagttaaacccaggtcagctataagctgagtaactgaaaggggaagcaactagggaaaacgtgaaacaacttaggaaaagttagatcctgctgactattttcactgcctgtaggaaggtaaagttttcacttaaaaaataattacaattaactgtatttacgctgaccttctatacttgtgttctgaaggattcccatagactagggcagtgccggcggtgactcttagcgtggtcacttagtatccaagccactttgggcaacttaatgtgttagagactctgtttccttatctacgcaggggataatcacatctcttttataggtggttgtgaggattaaatgatttagaataagtgaaaatagtgggtatagagtcaacaacacattgtggctctgtctcgtctacattctcatccttctcagttaaacagaacaaaacccagaggctgttacagattgaactaggttcattgccacatttccactctttgggacgcatgattccactttctcaactcaagaggctaactccttttctttctaacttaacacaggtgcggttcctggaacagcagaacaaggtcctggagaccaagtgggagctgctccagcagcagaccacaggagctggctcaggacccaacaacctggagcctttctttgaatcctacatcagcttcctgcgcaggcagttggatttggctctaggggagagaggaaatctggaaggagagctgaagaatatgcaggaccttgtggaagacttcaaaaagaagtgagggccccaactggggagtttccccttctgggggattagcaggaaggagtaactccaatttaagattttaactgttccagactataccttcagtcaatactcttggatggatttgttgggtgaagtgtgactgagtggaacggggtgagagggtggggactgagacttctaagtggctgattatgacagatttctcaggatccaggcagacccccttctatactagcctcgatggatgagagaatcctcccagagttaaaagctgtttgggatggagagcgctccacacttactgtgcataggagtcaccttggaagcttgtcagtcctagatattctgaatcagtaggtgtgaggcatgtcccaggagtctgagtccccatagttcccaggggttcctggcagatggtctagtactctttcaatgtgcccaatactctgtttctggagcttcaatcagtctcctgcatgttcggggttgtagttgataccctctgaggtctatgagaggcaaatagggcctctcgaggtgggaaggaagttccagacatccccaggctcaggactcacagtggtgggcatacctgctctggggaggccccattctggttcaactgcacaaacctgatgggcacctgctctgtgccaggctctgtggtgagctctgggaatccagtggcaactcggattgacattgcccaggaacctctcctcctggaaccatttccattttttaatctttatgagatctagaccctgggtgggagattatagtcattaacaagtagaggtctcataaccttgatgcatttggaagacaagagtttattctttcctaaattcctgtaagaagcagctctaattaatgggaagagacacagaacagaggcagaaagcctcttctgagcaaatacctctctggatctcatatacacacgttgcactttgtgatgtctgtagagtcaggcaagtagtcagcttccttgatgtcttcccccaccctgcctacccacacttcagcctgttcccagacttcgcagagaaggttgaggcagtggcctgagctctgaaaggcctctaagcaggactggctacataatcctgggggctcagtgcaaaatgaaaatgcaaggctcttgttaaaaaattatcaagaatttcaagatggcgccagcagagccattagatggaatgaatgtgaggaccttctgaactcagtcagagctccgtgtaactgcctaggtcacatgcccatgaagctgtcttgtctctgggtgaggggattccacatgcatgtttgggatcctcattttttttttttctctgtcccaggtatgaagatgagattaacaagcggaatgcggctgagaatgagtttgtggggctcaagaaggtaggagaactgggaagagcaggttgaggctctatttctgggcactaaccccatggagtcagctgccctggggcccagggaccctatgctgcgtgtagattttacgtttctccttatgtttttggaaatgaaggaagctgctctaaatacattgttgatgaggaaaacatcttacagtgttactgcaattaattaatcagttagtaatgtgaactaataataaaggtcttatgtgtagcattaatcaaggttttcagcctacaagtgtaccctggatgttattaataataacaatcatccaatacttgcagcttacttaaccagtcatcataaagatgaggtagtgagaagaataccctcatttctattcagaaggttggtaatataatatcccaaacccaaagtcacatgttaaataaatgtgattttctacccttactccaatgcctggctaatatggtttatattttgttaaagcatcagggtttaattggtcaaggcaactaaagggaagaaaactgctttgattttcttttaaaagggaaagtgaggagtggaaattaggaggaggacaggggagggacaaggaggagggacaaaggcttaggaaagacctgtgagtgatggaggggcagtgggtcattcttttgggtttctgatttcctgcctttataccctgcaggatgtggatgtggcgtacatgaccaagacggagctgcaagccaaggtggacagcctgacagatgaactgaacttcttgaggaccctctatgagatggtgattccttgattccttggtttgccaagctccagagccttcttttctgcatcttcccagacatgcttcccaagtaggagtttaggggatagtcaagtagaagaacacccccaaaccagcaacagggcttagaactcaaccatgccctgccagggaaatgctcatttaggtctcccagcctgcatagacctgggccatagagccagggtccctttctgtcttctttgytttccttctgtcttgtccattttgttctacaccttccttttggctcctaaaccagtaccatagctagctccttcagactcctcctccctactgcagtcccatggaaaccccacagttgagctcactggctgatactctcaggctgacaacctgattatatttgcacattaactttttcttttaacatggtttctagcagccttttggctatagcgggatggggcctgaaatgcaagcttatttttctaactatctcattcctggctccattgttgggatatatctgctggtagaagattcttggacttcttcattcccagcatcttctggggccaagggatggtgaaaatgatcatgttccccataggagctgtcttagatgcagagtcatgtcagtgacacatctgtggtcctgtccatggacaacaaccgctgcctggatctggacagcatcatcgccgaggtcaaggcccagtatgaggagattgcccagagaagcaaggccgaggctgaggcattgtaccagaccaaggtgagagccctctccttgcccccatcctctaggtttaggtcttgctgaccttcatcaggaatgttctaacactgcaaaaccatgttgattggtttctcttctgtcagcttggggaacttcagaccactgctggcaggcatggggatgacctgaagaacaccaagagtgagatcatggagcttaacaggatgatccagaggctgcgggctgagattgagaatgttaagaagcaggtgggtctggacctaatggagagatgctgagggtcttctggccttggggagaaagagaagcaataactgcctctgtcacatgctttctctgtcctttcatggtgtcacatgtgggatagcagtctctgggagagtccattctcccagagattccttctggaattggattcttggaaagctccctaaggagatattgttgctcattctggctttcccagcaaatcttgcaactgtagggatggccttaaacacttaatttcagtagaatctgccttcaacgaactatttatcatgtacttcacataacctcaatggctaatttgtatcactggaataaagtgattaattaggcaagggagttttaaacagtcttgcaaaaaagaaccagttactagaccactactacctttactagcaaatcagtgttcttatcttgatgagacctgagttaatttcaatgggctaaagataaatagaccaattgcaaaatggacttctgttttctggccatgtgcaattgcaatttctaaggtaggggatggagggatgctgaacggggaagaaagttttcaggaaagatcagttgtttgtttcttggtcactatgctaatcggtctcctacctctccctgccccagaatgccaacctgcaggcagccatcgctgaagctgagcagcgtggggagatggcgctcaaggatgccaatgccaagctccagggcttgcagaccgccctgcagaaggccaaggatgacctggcccggctgctgaaagagtaccaggagttgatgaatgtgaagctggcgctggatgtggaaatagccacctacaggaagctgctggagggcgaagagtgcaggtgagagagcatgtggggtcagcattctccagataagattttagagtgacctttgataataaagaaagagagcaagatgattggagaggacaactcagacaaagagtaaggaatctcctgaatgacagaatttagcattcaagtgccatcatttttttttttttttttgtcaatcaagatcgtccaattctccattttaccaggacatcgatgttgtattacataggtctgttgatcctccttaggagcaataagtaaggaaaagtgctttggggttatgacaaaagttatagtgctgtccactggaactttctgagatgacaaaatgttctgtgtgctgtccaagacagtagctattagtcacttgagtacttgacttgtggcgagcgcaactgaagaacttagttttatacttaatttaattttaataaatttagctagctttatgtggatattggacagcacagtatagacagtcctgcagctttcccccctgaggctgtccatagggaaaggggctgatgcacacatactctggaaaaaatagcacagtatcaagtagcagataagggcttagtgagtggatatcaaatgccaaagaactatcaagggttgagagatcttctgctgactggctagttgctctaagcatcctgcattgtctctgtcctcaggcagttcccaatctgagggaggaagcagaactcaggtgtgagaaggaaacttaaggattttatataagtctctgtgaaaaggagtgggagtgatgatggtgctctaagtgtcggggattgtgggacgaggacagagtggttgacgatagtaaggcacacagtggcaaggtgcacagacatgctccatgtgtgctcaggcatgtggacatgcctgctccataaacaagaaagaggcacaagaagaagggctgtgtgggcaggacattttcagactcatcatgtgttgggtgtcagctcttctcacattttacccatataaaccactgaggggctaaccaactgggggttaggtgttgagcagtcagcccggaacagattctctggaaactaaggggaagaggatggacagatggagaaacaggatggctggtgaagctcctgaacatcttaactcccccagagcagcctcttttcctggggagatgtggtcatgaagactcttggaatagcctttcttcctttgggggcttgactcctagtgaggcacataggggcatggctcccagggttatgaaccctcagctccgtggctaatgactcatggcggaaataacccacatcttcttctcttcctttttaggatgtctggagaatgtcatgagtgctgtgagcatctgtaagtctcccttcaaaaatgttctccctgggttgcaaagcgggtgaccagagacatcctcactgactgacctatagcaggaaagcttggcctatgcaaggagttcaggccactaaacagtgctagggtctcgggccatggtcacacactcccctgctagcataagtggggaaactctctaacgccaaagctaaaatgcctgtggtcttggggagttccctaagttggagaaccagaaatttctgtggatgctactggctcttgttcttgggggacactagaaggccaggctcactcttgtcagggaagttgagcatctttytcaaatttgcacaacaagcagggtagggttgtcatccaaacccaggtctttgcctaaattgagtgcctgttctccgcagcggtggtcagcaatgtcaccagcacaagcagtggctctggtggaagccgtggagggttcagtggtggcagcagcggtggctacagaggcggcagtaccagcagaggcagcagtggaggctacggaggagtccgcggtagcagcagtggaggctaccagagcggcagcagcgggggctaccagagcggcagcagcgggggctaccagagcggcagcagcgggggctaccagagtggcagcagcgggaacaggctcagcagcggaggaagcagctctgtgagccagagtggaattggctccagctctggtggcatccagacctcaggaggcagcagctataagtctggcagtggaggcagcaccaacatccgcttctctcagaccaccagctccagccagcactgctccaagtgatcctctggggttaagcgtccatgcccacctgcatycctctcggcctgcccacagcacttcccactctgcctggcatcaaaaaatgccaacctccacct

SEQ ID NO: 2975 - DNA, 12706 bp, Canis familiaris
  misc_feature (6257)..(6257): n comprises a, c, g, or t, or includes no nucleotide
aaaaaaaaaaacactatccttgctcatttgttttgccatctgcaagaacttgccagtagaatagtggcagcaggctctaatgttttgagaaaattgcttgacacagaactgaaaatcctgaggctggagaagtctactaactgccggtggttgatttcagctctggagctttccacgggaggcagcacgctttgggaggtcctcctactcacttcctgtgtccccgtgtccattttccctgaccagagcctggccacccagtggccccgctgccccgatggatccactgaacctgtcctggtacgatgatgatctggagagccagaactggagccggcccttcaacgggtccgaaggaaagcccggcaagccccactacaactactacgccatgctgcttaccctgctcatcttcatcatcgtcttcggcaatgtgctggtgtgcatggccgtgtcccgcgagaaggcgctgcagaccaccaccaactacctgattgtcagccttgcygtggccgacctcctggtggccacgctcgtcatgccctgggttgtctacctggaggtaggtctgcacccccgcctggaaggagctgcccgggggcctggagtccaggctctgtgctggttcctgccaacaagttgcccggtgccttctcagctggcctggcctcttcctccactctgggctcagtttttctccttataaaatgggctgcttgttccttgacaatcgcaactaccagcttgagagtgcttgctaagtgccacacctcctgccaagtcctccatgcccagctttccccgtgtagccctcagggcagccctgcgaggtcaccatgtcacgaacaccaatttacaggtggtgaccctggtggtyagagagatcatgccgctggcaattcccacctggaaccctgtttggccccggtaggttcattagatcatgctggaaatgggagtaactgaggagtatcctcaaggaagggagatgttcatgcttccagaccagaagcttcctgttccctcttcccacttcaaaagtggaagctgctgctgtgtgtgctccttatccctccccccttcccccatttggtctagagcccatgtctgggatccacaggcaggggtctccgtgtgggctgtgccgcaggccctttgctcagcaaggtcaccaagggctggcccaggacagagcccagctctgcatctccgaacagagagtagctagtccccgctgtggtccaggcaccacgccaggcatttcgcagacacggactcagcactcatgttaatcctgggagttgagactattctcagtgtacggaggaggaaacagaagctttgagaggttgcctgtttttgctccgatcgcacagcaaggggagaaaccactaactgcgtccctaagtgtggagccacctcctggtggacactttccagagctgacaggcagacgtggcaggggctggggtctgggtcctggatcctgcccctttctcagcctaggactctggggtggagtttgggaatcgaggtcactcatcactgggcagtttaccttcccgcctgggcgagagagggatttacctgtgccatggaggtaaaayctggctgggagggaaggctcctccatttttaaaggaaagcatgaaattctrtaggcttgagcagaggagacatctagaaggagaagctgaagtgaggaggggagcccagtccaaagtggtatctctcccagtctccctgcctgggggctccctgtgtctcctccgtatgttgctgcatcacccccctgggttcctttagcacagcccaaacaggctggaacactcaaaacagatgttaagggagaacccaaaggaagcaaacaacagacatacaatctacagatgccagagscaggcgtccccttcctccatgactcccatgcctgtgagggccaccagactccatccatccacgtcctgtctgayggcctccccgtgcatgtctagcayggagaccttgggatgtgcgtgatttattctgctcagcatatggaaagcacgctggtttgcagtgggaggaccagttccaattcccaactctactaccttccatctggagaaggtcccgagagaaaagaaccagggtcacttgtctgcatttcagcctccccactctgtgaggtgagggccgactgtgtgccttttccagaggggtagatgagactgagaagggaacacaccaaggtcgcacttgtttactcattcaacaggtattgagcacttccctgtcctatggcatcctcggggcactgcctgccatcgatgaagacccgataggacyactgtagtgcagtctgatggaggtgacaacagagcagtccccacargggatgtgggaacgcgatgggggtgactgtggagacaaggcggtcctgcaggaagaagtgatgctttcagaagaattatccagaggagggagcaaggcgcttacactccagcctgagaaaagaagtgtgcaaagctgctgagtgagggggtgtcactggctggaactttcaaggggtagaagccttatcgttggcctagcaccatccatagagctgagtgtgaaatgtttgggacagtgcctgacacatagtgcttaatagaggccagttattaggatttygccgagctagctcatggcccaccctgcagggctcagcttcatgtgaacaacgaggtcagtaaagtggtgcccaaaggtgcagagacacagccctggagtcacaccagcaaacctggtgatcaccaggtgaccttggaaagtccactttgttctctgcctccaggtcggtccctctttgcaacgacaatctctcctttcatgctttatgtacattgagtaattttgacataattatctcctcttttgacaagctaaatgatccttcccaagacagtttatgagagagcatcggatgtgctacctgaagaccgtgcttcaatcccagccctgctgcacacttgctgggggagccctctgagcttcaggtccctcgcccatgaacgggcacagcaaccctgtcttgtgcgagcgtgagatgcccacatgcccatagtaggtgtaggtggctgccaacaatttctcttgagtctttgagtcagctgcccccaggagtgtggaggaaaaccctcccttcttctgagctccagaaaggcctctgggggtggggatgagagctccctaaaggcatgggactatgccagtgctgttcaccaccgcaccccagagtctagggcagagcctggcacgtagtaaactgctcgtgagtgtctatgggaaagaagaaaggcagggaagagggaagaggactaggaagagggcccaagtatctcagacctggatccccggggacatagaagcagccctgaggtcctagtctaggagggcttcaaggtggagggtggaccaggtgggcctggggccctcccagcggtgccctaatgggaggtgctgtttacactgggaagctccctaccccccccccccccgccgtccagacctgcaacttggggagccctgtgttgccacgtgggatgggccctggtatgggccacgggagcccagagaaggtgacttcctgttggggcgagctgctgtttcttcatgcccgagaacaacggccacagttcctgtcacggagcttargtggcaacgtttggtttcatgccagggagcagaaaagaaggggcagtgcagagaacragcacgttcgcaccagcccgygccgtgatgtgcggygaagtggggcctgcccggccccaggccctgggaggccactgccctgctcctttgtctcctgctgggagaaggcccggatgtatctccccgtctcgactctgtgctcagacccagggtgccccgaacttccccagttgcccagggccagcctgccgtgtgagtgtgtgcacccgtgtgtgtgaacaggaggcatgaaggtgtgtgtaaggggggagggagtgtgtgtgtgcaagggggagaaggatgcaggatgctttcgaggggagcgggcctcctcattcccatcatacaggatatatgggcacagcacccctgtcccsccmccccccccsrgttcccacagctcgagtccccrtgttctgtccctcactctccaggtctgaccaagagtagcgccgtcttctcggtttctgagccttggtcctcacagctgtccttaacagacaggtttgcgccctggctctgagggagctcccccaggaacctgggcccggcaggatcagaagttgagctaaatggcctggggcaagtcactgcccctctctgaggctcagtttccccattggtagcatgggattgcaggctgatcactgggctgttttacacatgaaggcggaaagttgagagactcagttgaaggtgctcatcttctagcccagtccttggcacaaagtggccttatgtgtctaggaggagaggggaccaggagcgagggcctcgaactccccttcgctggcccacttctcccccgggccccagctggagactcacagattcccacagctgcctgccgagcctgaggccccatctgccccaggaaggagagccccgctatagggcctgggctcatctccccctctgccgtccacccattatggtgctttgtccccaggtggtaggtgagtggaaattcagcaggattcactgtgacatctttgtcactctggacgtcatgatgtgcacggcaagcatcctgaacctgtgtgccatcagcattgacaggtgagcccagctagggtgggaaaggggacccaggccattcacttttcaggcttccccgtctctccttcaggggcaggatctctctgatactgtacggctgaccgtgtgtcctcgggcccatgtgtttgtgcgtgcatatatgtgtgtgagtgtgcacacatatctcctcatgcatatctgcacatgtgtgtaggtgcacatgtgtctgggacagtacagacctcctaaagagaggccatcctccggatggagatgctaccaaaggtacccagtggctggtagagaagagaaaactcagttctgacagcacccttgaaactgcacctgtgcaccctggctgtctgagctggggcaggagacaggagacaggagagattgacaggaagacctcagggaggtgacaactgtcactccccaaggcacaaggtgtctctggtgtatatgtgctgtggaatgaggggtccttgggcctgcacccagacttaaggtcccccgccctgcgcccccgcaggtacacagctgtggccatgcccatgctctacaacacccgctacagctccaagcgccgagtcactgtcatgatcgccatcgtctgggtcctgtccttcaccatctcctgcccactgctcttcggactcaacaacacaggtgagtcctgcctctgtctgcctggggttccgctggccccgtgcacagggccccaagggagctgagcccctgatgcagagatagggactgaggccgggccctatccccctggccaagcctgactctgagtgtacctggatgggccggagaggaacagtagcttgggcctgatagagttgggtgaggagtggggataatgactcgggaggatgtctggccattttcaactttgtttattaaattgaagcaagtcagacagccgcacaaaccacatgtgtacgtgtgtgtgtgtgtgtgtgtacacactcatgggtggcaactactgggccccatccaccaccctcacccccacccccagcaatggtatttgtgtaaggaggctgcagcccaagggctggccctgcccagcacagacctgagttacctgaagcaggaaaggtagactcgagcaggagctagctcagggcgcctgtcctgtgcgtctgaggcagaggaggggttgtgcctgcctgcctgctggcggggcatagaggccatgcaggtgtacctcggagactgttacagggcaggacacagggaagccttgcaatctgactctgtgggaatttcaaggagcgcgagtagggcctgatatgctcagatctgtctggagaggccctgaggtagaggacagacatctggtaaaccaggagggcattggcagtgcactggagcacaggtgagttcagcaaacgggaccgagttaccttgttctaaacctgggaggtggtagacggcccccaagtacacaggaaggcctacaataagggttcactctttgaaaataattttcttgntatttttttctgaacactccagctccacttgggtgtcggtggatgacaaaactaacgctgaagtcaggggggaatatgagtgggaaagcttggacgcagcttggcttctcgctcagggtctacttttcagtcaccggtttacaccgtgggtccgtttccatctagcatttccaggcgacctcagacccccaggcgtactctgtcacatggctgggctgggtcccgcggaggaggaggggacagtctgcggtggtggtggtgcctgcacgccccacggctgctgacatcccgtctggctctccccccagaccagaacgagtgcataatcgccaaccccgcattcgtggtgtactcctccatcgtctccttctacgtgcccttcatcgtcaccctgctggtctacatcaagatctacatcgtcctccgcaggcgccgcaagcgggtcaacacggagcgtagcagccgggctttcagggccaacctgaaggccccactcaaggtccccagatccctcctgccctccagtgccctccctgaagtgcctccctgaccccccccaggacagagagggctggcctgtgctgggtgggcctggtgggtgggtgagggtccagggagggggttcccagcaccagggcagggcccagtccaaggctcagacctcagcggagggagtgagtctctaggagtgggaaggggggggccagaggcggatgccacctggggggaggagaagtcggctagatctgtgtctgaaaccctcctttccccatcacttgtcctttcctggctgtggcccctctcttctccctgtccttgctctgtccttcccgccctctccagtaccttccacctcctcctcctcccctccatgcacacctcctctcgcccccccaaccccagctccctgtcctcctctccatgcacacctcctccctcctcctgggtccctgtcctcccctccatgcacacctcctccctcctccctggctctttcaccctcctctcctctgcctttctttcattctctccccactcccttatgtcttgtgaattttcccctctgctcagtcatccctgaggaagacagtgtgggggcgtggaaggaaccagagttttggggttagacacatcaggttcaaggcctggcactctcacctttttgttgagtgacctagggcaagttacttaacttctctgagcctcagttttctcatctgttaaatgggagtcctaatgccaacctctcagcgtggtcttgaggattcagtgtgagagggatacgagcatgcctagcacgtgcccagaaaaccaggatctctttggcctttgtcctgcccacgatctttcatcatagtaccaaccttcactcttgcctcccctggcccatacccacctactctgcccttctgggagcccctgtgcccagcctgactactgcatgtcgggtgtctgtccccggcccctgcccatcatgaccagtgtcctggctcactccacagggcaactgcactcaccctgaggacatgaaactctgcaccgttatcatgaagtccaatgggagtttcccagtgaacaggcggagagtggtaagtgctcaggtcagggacccagagccaggtctttctgcccctagggaaacccacctaccatgattctcagctcaccagctggtcaaagggaggagcacctcccaggctctcccacttagcttcagcagagaccagactccccatgcacaagtcacaagcaggcacgcagcaagatggctcagttctgcaaggcacagataggcactcccagcacaaggaggtggttcggagagaggactcggccataaagataagaaaaataagaagaatggctattaccattcattgaacacccgccatgttcctattatttcatcaaatcctcacagcgaccctgagagataggtcttattaggcttattgattttaattttaaagaagagcaaacaggctcacagagggaaggtaactcacccaaggcaagacatttagttagtaaataatgtgtatttgagcccaaacccatgcgactccgaaatccacacatccgccattcttcccacttgcctgtgctaggctcctacagcggtttctggggctggaggcagggcatgggggagggtggaagggcagggagccgagtaaccccagggctggtggggaagtgcagcctgtaagtggagcccagagacgcagaatcacagccgaccccaggctctgcccagcgatgggagcatcagggttcaagcagcaggggtctcatccctggctgggacagggagcccacacagggccatacacgaagtccaagtcgggtgtccccaggaagcagggcccccactgtccacctgcagggcaagggcaggaccccagggagtcattttatgagatgggttcccaacagggactcgggactgggctagggttacaccacccaggcacacagcaaagctgcactttggatgttcagatgggaccccaaggcagggaagaacctggaagcccgtgagtggaccgccagcagggtccccaggtcagcccagcaggaaagatggggggttcaggggttagctctttggcacccagattggtctaggaggaacatgtggaacccacgtgtgagtgagggtgcaggtgccctgcagggagaagaggggtgccctctatgcagctagaacaggagctcctggaaggaggcaccgaacatcaaccagtgatgtattcccagcagccagctcggtcacttagctggtgcttggtacgtgttgctcagttaacaagagaggaaagtgttgtggtactaagttcccacaaatgcttatggagttaatgaggctctgggacaggggctggggatgacctgcaggcaggggctgccgtgggtcctgggtcctagtcccagactattcctgcctcccggtgattatcctcattgtctctctggcagagtgacccgtgatgtttgtaggagtctctaaaggaggataggggagggccaggggcacccggtgaggctgagtggctaatgcctgagaacttgcctggctttacccagagctcttcgcctccgtgcaggaggctgcccgccgagcccaggaactggagatggagatgctgtccagcaccagcccccccgagaggacccggtacagtcccataccacccagccaccaccagctgaccctccccgacccgtcccaccacggcctccacagcactgccgacagccccgccaaaccagagaagaatgggcatgccaaagaccaccccaagattgccaagatctttgagatccagtccatgcccaatggcaaaacccggacctctctcaagaccatgagccgcaggaagctctcccagcagaaggagaagaaagccactcagatgctcgccattgttctcggtgagtcgggccggccagctctgtccaccgttaccgaggaaaggacccatcactctgggtccccttacctgccatcaccttcctagccatggcggtgagcctcgggaagggcactttctcagattgcaggccacacccattgacgtaggccattaagtagattctctaattaatgctcattttacagacggggaaactgaggtttggagtgggcatataacgtgatcaaggaagacctatgatttaaactcagggagtctgacctcagagtctgtgagcttgagataccatagtgacccccagaaccccgagatcctaagcaagtcactttctctctctgaagtcccctcagcagcagattagctctcagggttgtttgctgtggtcaaaggtttacaaaggtgaaagaaagcatttcctaaagggcaaagcggtgcacacagccaagtgttatcagggtggtttagttgttgaggagtgggaagttcagttcaccccagctcaaccaaggccccgtgggaccagagctgggaacagagaaacagggctgggaggggggtccctctggaggagggtgtggctccgtcagccagccaaggctttcgaataaaagtctcctagaaaaccaggactggagtcaaaacacaaggctgggctgacgtgggtggtgggcacaggaggggctgctgtgactctccctgccctctagcaccaaggtctcatgggacaccctgccacactcaccatccccttgggcctcccaccaatcctgtgatgtgagtgggacaggtgttacctccctgcttttgtgaatgcatgcactgagtcatggcaggttaaaggacagatccttggtcaccgggctgagggtgagagccgggcctgtggcttctgtccatggggtctcgctgtggtcctggggactcccagggtgcttgtggggcactttgtgctcacaacgcctccataccgaggggcccactggggcagcaggtcctgagtcaggcagacaaagccagtgggggcgggggggggtcagtctaggtcagagcatcccgatgcaggaatacgcaagtggtggcctccaaggcctgggggaaggtggagcgagagcatggccatgggagggggcgggggggctcgataaactggagttcaggtctcgctcggctggctttgtcactcatgagcggggtggccttgtgtacatcacagagcctttgggagccccagttccctgtctaccccacagagatgccagggagtctgagggagatgggtacctaactcttccttttgtcacttgggctcaaaccgtgcatcccacgctgcaatgaccacacgctccacttccaggtgtgaaggaagacgttccccaaagatgaccagagagtagagtaaacatttccacttctactgacttgtgtcagaatgttaaccttatggatttgttttcaagctcatctttccctagaggggtaggtgtgggtgttatgcccatttggcagatgaggaaagtaaggctgagggacgtaaagtgaccttcactgcaaacgggtgtcagggacagctctgaagtctgagatggggactcctcctgcagtcctcctgggccagggcccgtagcacccaatcttggtgcccaccgagtatgggccttcccagcccagcctcccctggccccaggggcccgcctgaccgccgccctctcccccaggcgtgttcatcatctgctggctgcccttcttcatcacccacatcctgaacatacactgtgagtgcaacatcccgcccgtcctgtacagcgccttcacgtggctgggctatgtcaacagcgccgtgaaccccatcatctacacgaccttcaacattgagttccgcaaggccttcctgaagatcctgcactgctgacctgctgcccacctgcacagcagcctgcttcccgcctccccgcccaggccggccgggtctcagctccggggagccgtggacaggggagggggcgcagggcggaccaggccttctctttgccccggcgggtcctgcagtgttagcttggctctgcgcccctccgtgctcgcacaccctcatctgccggggtagtgctagggagccaggcacgctgccggccctcgggccggacccctggctcaggggcagctcacagagcgccccccccacctctgggccctccctccttggcaccaaagacgcagccgccttctccgacctttctgtggggttctggggttgccggggtcagaggtggggctcagagaccgtgctttctggtaggtttggcttggtcttcacaggccgatgccggggcgggcggtgggtggggatggacagttcacaccccacgaggcccatgcccggggaagccagagctcttgccaaggccccaggcagcttcagtcctgggagacccatgtaaataccagacccacaggctgaaccccagagaagcccaagccaaaaatcttcacttgctccctgtcctgccccccaggagcctctatttccacagcagtgggtcccgccccggcccacctcgctccagcacccacgtgctttccatacctgccgaccgcagggactctggtcttgaagggcccccggaaggtctgtggggagaggagccacccccaaacccaccctgctgtctcccgacagactctgcatcccttctcgtagcaattgttgggcctgcctgggagcgggcagggacagcaggcttgcgaccacatctggggcctgggtcggggtactggagggcctctgggggctgcctcctgccacaaaaccactctctctccccctttgcctcctctctctccrgtcccctttcccttccactgtctccgccttagatgagccctcggccaagggagctgctgaccgccactcggcctgagggaggaggggaggctgcagcttcggggagcccctgggccccagactctgtaacatcactacacaygctccgaactaataaaactctgacaagagtc

SEQ ID NO: 2976 - DNA, 1332 bp, Canis familiaris
atggatccactgaacctgtcctggtacgatgatgatctggagagccagaactggagccggcccttcaacgggtccgaaggaaagcccggcaagccccactacaactactacgccatgctgcttaccctgctcatcttcatcatcgtcttcggcaatgtgctggtgtgcatggccgtgtcccgcgagaaggcgctgcagaccaccaccaactacctgattgtcagccttgctgtggccgacctcctggtggccacgctcgtcatgccctgggttgtctacctggaggtggtaggtgagtggaaattcagcaggattcactgtgacatctttgtcactctggacgtcatgatgtgcacggcaagcatcctgaacctgtgtgccatcagcattgacaggtacacagctgtggccatgcccatgctctacaacacccgctacagctccaagcgccgagtcactgtcatgatcgccatcgtctgggtcctgtccttcaccatctcctgcccactgctcttcggactcaacaacacagaccagaacgagtgcataatcgccaaccccgcattcgtggtgtactcctccatcgtctccttctacgtgcccttcatcgtcaccctgctggtctacatcaagatctacatcgtcctccgcaggcgccgcaagcgggtcaacacggagcgtagcagccgggctttcagggccaacctgaaggccccactcaagggcaactgcactcaccctgaggacatgaaactctgcaccgttatcatgaagtccaatgggagtttcccagtgaacaggcggagagtggaggctgcccgccgagcccaggaactggagatggagatgctgtccagcaccagcccccccgagaggacccggtacagtcccataccacccagccaccaccagctgaccctccccgacccgtcccaccacggcctccacagcactgccgacagccccgccaaaccagagaagaatgggcatgccaaagaccaccccaagattgccaagatctttgagatccagtccatgcccaatggcaaaacccggacctctctcaagaccatgagccgcaggaagctctcccagcagaaggagaagaaagccactcagatgctcgccattgttctcggcgtgttcatcatctgctggctgcccttcttcatcacccacatcctgaacatacactgtgagtgcaacatcccgcccgtcctgtacagcgccttcacgtggctgggctatgtcaacagcgccgtgaaccccatcatctacacgaccttcaacattgagttccgcaaggccttcctgaagatcctgcactgctga

SEQ ID NO: 2977 - DNA, 1245 bp, Canis familiaris
atggatccactgaacctgtcctggtacgatgatgatctggagagccagaactggagccggcccttcaacgggtccgaaggaaagcccggcaagccccactacaactactacgccatgctgcttaccctgctcatcttcatcatcgtcttcggcaatgtgctggtgtgcatggccgtgtcccgcgagaaggcgctgcagaccaccaccaactacctgattgtcagccttgccgtggccgacctcctggtggccacgctcgtcatgccctgggttgtctacctggaggtggtaggtgagtggaaattcagcaggattcactgtgacatctttgtcactctggacgtcatgatgtgcacggcaagcatcctgaacctgtgtgccatcagcattgacaggtacacagctgtggccatgcccatgctctacaacacccgctacagctccaagcgccgagtcactgtcatgatcgccatcgtctgggtcctgtccttcaccatctcctgcccactgctcttcggactcaacaacacagaccagaacgagtgcataatcgccaaccccgcattcgtggtgtactcctccatcgtctccttctacgtgcccttcatcgtcaccctgctggtctacatcaagatctacatcgtcctccgcaggcgccgcaagcgggtcaacacgaagcgtagcagccgggctttcagggccaacctgaaggccccactcaaggaggctgcccgccgagcccaggaactggagatggagatgctgtccagcaccagcccccccgagaggacccggtacagtcccataccacccagccaccaccagctgaccctccccgacccgtcccaccacggcctccacagcactgccgacagccccgccaaaccagagaagaatgggcatgccaaagaccaccccaagattgccaagatctttgagatccagtccatgcccaatggcaaaacccggacctctctcaagaccatgagccgcaggaagctctcccagcagaaggagaagaaagccactcagatgctcgccattgttctcggcgtgttcatcatctgctggctgcccttcttcatcacccacatcctgaacatacactgtgagtgcaacatcccgcccgtcctgtacagcgccttcacgtggctgggctatgtcaacagcgccgtgaaccccatcatctacacgaccttcaacattgagttccgcaaggccttcctgaagatcctgcactgctga

SEQ ID NO: 2978 - DNA, 317 bp, Canis familiaris
aatataaatgcctttcgtctcctcaagaaataccaaaaccgatattgtacgttcaatgatgatattcaaggaacagcgtctgttgcagtggcaggcattcttgcggctcttcgaataaccaaaaacaaactgtctgatcaaaaaatactcttccaaggagctggagaggctgccttagggatcgcacacctaattgttatggccatggaaaaagaaggtttaccaaaagagaaggccatgaaaaacatatggttggttgactcaaaaggattaatagtcaagggacgtgctgccttaacacaagagaaagagcaatt

SEQ ID NO: 2979 - DNA, 2313 bp, Canis familiaris
atgatggatcaagccagatcagcattctctaccttgtttggtggagaaccattgtcctatacccggtttagtctggcacggcaagtagatggtgataacagccatgtggagatgaaactagctgcagatgaagaagaaaatgttgacaataacatgaggggtaatcatgccagtgtcccaaaaccaaaaaggtgtaatggatttatctgctatgggactattgctgtagtcctctttttcttgattggatttatgattggctacttgggctactgtaaacgtgtagaaccaaaagctggatgtgaaagaccaacaggaacagaggctctggggacagagagaacagaaccctcagaaacagaagagtacttccctgaaacaccttctcgcttattttggacggacctcaaaacaatgttgtcagagagactgagtaacacagatttcaccaacaccatgaggtggctgaatgaaaattcgtatgtgcctcgtgaggctggatctcaaaaagatgaaagccttgctttattaattgagaatcgattccgtgaatttcaacttagcaaatcctggcgtgatgaacattttgttgagatccaggtcaaaagcagcaatgctcaaaacacggtgaccatagtggatatggagagtgacttggtatacctggcggagagtcctgagggttacgtggcatacagtaaggcaacgacagttaccggtagattggtccatgttaattttggcaccaaaaaagacttcgagaatttaaaatctcctgtgaatggatctttagtgatcgctagagcagggaaaatcacttttgctgaaaaggttgcaaacgctcaaagttataatgcacttggtgtcttgatatacatggaccaggctagatttccaattgttaatgcacggattccattctttggacatgctcacctgggaacaggtgacccgtacacgcctggattcccgtcattcaatcacactcagtttccaccgtctcagtcgtcaggattgcccagcatacctgtccaaacaatttccagagctgctgcagaaaagttgtttgaaaatatggaaggagactgtccttctgcctgggaaatagacccctcgtgtaggctggaaacgtcctcaaacaagaatgtgaatctcactgtgaacaatgtgctgaaagagataagaatttttaacgtttttggagttattaaaggttttgaagaacctgatcgctatgttgtaataggggctcagagggatgcctggggtcctggagctgcaaagtctagcgtaggaacagctctcctattggaacttgcccggatattctctgatatggtcttaaaaggtggctttaaacccagcagaagcattgtctttgccagctggagtgctggagactttggagcaattggtgccactgaatggctagagggatacctttcttccttgcatttaaaggctttcacttacattaatctggataaagctattcttggtaccagcaacttcaaggtttctgcaagcccactgttatattcacttcttgagaaaacgatgaaagatgtgaaacatccaattactgggcagtctctttatcgggacagcaactggatcaacaaagtcgagaaattgtctttggataatgctgctttccctttccttgcgtattctggaatcccagcagtttctttctgtttttgtgaggacacagattatccttacttgggtactaccatggatctctatgagaacctgaatcagaaaattcctcagttgaacaaaatggcacgtggagcagcagaagtagctggtcagcttataatgaaacttacctatgatcttgaattgaacctgaactacgagatgtataatgacagaatactttcatttgtgagggatatgaaccaattcaggacagacataaaggagatgggtctgaacctacagtggctgtattctgctcgtggagactttttccgagccacctccagactaacgacagattataagaacgcagagagaacaaacagatttgttatgagggagatcaatgaccgtatcatgaaagtggaacataacttcctgtcaccctatgtatctccaagagattctcctttccgtcatatcttctggggttctggctctcacactctgccagctttagtggagcatttgaagctgcgtcagaaaaataagagtgcttttaatgaaacactgttgagaaatcagttggctctagcaacttggaccattcaaggagctgcaaatgccctctctggtgacatatgggatattgacaatgagttttaa

SEQ ID NO: 2980 - DNA, 1793 bp, Canis familiaris
atctgttgttcgtcctgaagcagtccctgtccgtccgagccctgcaggagatgctggccaacacggtggaggctggcgtggagtcgtcccagggcgggggccacaggacactcctgtacggccatgccatcctgctccggcacacacacagcggcatgtacttgagctgccttactacctcccgctccatgactgacaagctggccttcgacgtgggactgcaggaggatgccacaggagaggcctgctggtggacggcgcacccggcctccaagcagaggtccgaaggagagaaggtccgcgtcggggatgacctcatcctcgttagtgtctcctcagagcgctacctgcacctgtccacggccagtggggagctccaggttgacgcctccttcatgcagacgctatggaacatgaaccccatctgctccggctgcgaagagggctacgtgaccgggggccacgtcctccgcctctttcatggacacatggacgagtgtctaaccatctcccccgctgacagtgaggaccagcgcagacttgtccactatgaggggggatctgtgtgcacccatgcccgttccctctggagattggagccactgagaatcagctggagtgggagccacctgcgctggggccagccgcttcgtatcaggcatgtcaccactgggaggtacctggcgctcaccgaggaccagggcctggtggtggttgatgccagcaaggcccacaccaaggccacctccttctgcttccgcatctccaaggagaagctggatatggcccccaagcgggatgtggacggcatgggtccccctgagatcaagtatggggagtcactgtgcttcgtgcagcatgtggcctcgggcctgtggctcacctatgctgccccggaccccaaggctctgcggcttggtgtgctcaagaagaaggccatgctgcaccaggaaggccacatggatgacgcattgtcgctgacccgctgccagcaggaggagtcccaggctgcccgcatgatttacagcactgctggcctgtacaaccagttcatcaagggcctggacagcttcagcgggaagccgcggggctcggggccgccagccggcacggcgctgcccatcgagggcgtcatcctgagcctgcaggacctcatcggctacttcgagccgccctccgaggagctgcagcacgaggagaagcagagcaagctgcgcagcctgcgcaaccgccagagcctcttccaggaggaggggatgctctccctggtcctgaactgtattgaccgcctaaatgtctacacaactgctgcccactttgcggaatttgcaggggaggaggcagccgagtcctggaaagagattgtgaacctgctctatgaactcctggcctccctgatccgtggcaatcgtagcaattgtgccctcttctccaccaacctggactggctggtcagcaagctggataggctagaggcctcttctgggatcctggaggtgctgtactgtgtcctgattgagagtcctgaggtgctgaacatcatccaagagaaccacatcaagtccatcatctccctcctggacaagcacgggaggaaccacaaggtgctggacgtgctgtgttccctgtgtgtgtgcaatggtgtggccgtgcgctccaaccaagatctcattactgagaacttgctccctggccgtgagcttctgctgcaaacaaacctcatcaactatgtcaccagcatccgccccaacatctttgtgggccgagcagagggctccacgcaatacggcaaa

SEQ ID NO: 2981 - DNA, 2014 bp, Canis familiaris
ttgcagcaccgtgtggaatccctagcagcctttgcggagcgctatgtggacaagctccaggccaaccagcgggaccgctatggcctcctcatgaaagccttcaccatgtctgctgctgagactgcccgacgtactcgcgagttccgctccccaccccaggagcagataaacatgctattgcacttcaaagatggtgaagatgaggaagattgtcctctccctgaagaggttcgacaggatttgctcgaatttcatcaagacttgctggcacattgtggaattcagctggagggggaggaggaggaaccagaggaagaggccaccctgggcagccgcctgatgagcctgttggagaaagtccggctggtgaagaagaaggaggagaaacctgaagaggaatcccctgctgaagagagcaaaccccagtcattgcaggagctggtgtcccacacagtggtgcggtgggctcaagaggacttcgtgcagagccctgagctcgttcgggccatgttcagcctcctccaccggcagtacgatgggctcggggagctgctgcgtgccctgccccgggcatacaccatctcaccgtcatccatggaggacaccatgagcttgcttgagtgcctgggccagatccgatcgctgcttattgtgcaaatgggtccccaggaggaaaacctcatgatccagagcattgggaacatcatgaacaacaaagtcttctaccagcacccgaacctgatgcgggcactgggcatgcatgagacagtcatggaggtcatggtgaatgtcctcgggggtggcgaatccaaggagatccgcttccccaaaatggtgacaagctgctgccgcttcctctgctacttctgtcgtatcagccggcagaaccagcgctccatgtttgaccacctgagctacctgctggagaacagtggcattggcctgggcatgcagggctccacgcctctggatgtggcagctgcctccgtcattgacaacaacgagctggccttggcattgcaagagcaggacctggagaaggtggtgtctacctggcgggttgtggccttcaaaagctgccccatgctcctggccaaagggtacccagacatcggctggaacccgtgtggcggcgagcgctacctggacttcttgcgctttgctgtctttgtcaacggtgagagcgtggaggagaacgccaacgtggtggtgcggctgctcatccgcaagcccgagtgcttcgggcccgccctgcggggtgagggcggctccgggctgctggctgccatcgaagaggccattcgcatctctgaggacccggcgcgcgatggcccaggcgtccgcagggaccggcggcgtgagcacttcggtgaggagcccccggaggagaaccgggtgcacctgggacacgccatcatgtccttctatgccgccttgattgacctgctaggacgctgtgcaccagagatgcatctaatccaagctggcaagggagaggcactgcggatccgcgccatcctgcgctccctcgtgcccctggatgaccttgtgggcatcatcagcctcccactgcagatccccaccctgggcaaagatggggttctggtacagccaaagatgtcagcatctttcgtgccggaccacaaggcatccatggtgctcttcctggaccgagtgtatggcattgagaaccaagacttcttgctgcatgtgctggacgtggggttcctgcctgacatgcggcggccgctttcgttggacacggccacgttcagcaccacggagatggcgctggcgctgaaccgctacctgtgcctggcggtgctgccgctcatcaccaagtgcgcgccgctcttcgcggggaccgagcaccgcgccatcatggtggactccatgcttcacacggtgtaccgcctgtcccgcggccgctcgctcaccaaggcgcagcgcgacgtcatcgaggactgtctcatggcgctctgcaggtacatccgcccgtccatgctgcagcacc

SEQ ID NO: 2982 - DNA, 153 bp, Canis familiaris
gccattctatcaaccagcatgaacctggctggagggctgggccctatcctggcaaccatcctggcccagagctatagctggcgcagcacgctggccctgtctggggccctcggtgtggttgtctccttcctctgtctcctgctcatccacaat

SEQ ID NO: 2983 - DNA, 320 bp, Canis familiaris
tcgcttacaacgagatttgaaaagaaccgtagatgccagactgaaattaagtgaggaattgagtggtggcagattgaagccaaaacctattgatgtacaagtcattacacatcacatgcagcgatatgcagtttggtttggaggatcgatgctggcttccacgcctgagttctaccaagtgtgccacaccaaaaaggattatgaagaaattggacctagcatttgtcgtcacaatccagtgtttggagtcatgtcgtaaaattgatttcataattattggggttagggaggtggggaagaaataatctttctgattacct

SEQ ID NO: 2984 - DNA, 1123 bp, Canis familiaris
tacatgagctcaggacacagcacagccaaagttccgaaaagagggctcgctctctccccacctgctctgttccaatcgcggtgtcagaaggcagcaaaaatgaaaagcatttactttgtggctggattgtttgtaatgctggtacaaggcagctggcaacgttctcttcaagacacagaggagaaatccagatcattctcagctcctcagacagagccgctcaatgatctggatcagatgaatgaagacaagcgtcattctcagggtacattcaccagtgactacagcaagtatctggactccaggcgtgcccaggatttcgtgcagtggttgatgaacaccaagaggaacaagaataacattgccaaacgtcatgatgaatttgagagacatgctgaagggacctttaccagtgatgtaagttcttatttggaaggccaagctgccaaggaattcattgcttggctggtgaaaggccggggaaggcgagatttcccagaagaagttgccattgttgaagaattccgtcgcagacacgccgacggttccttctctgatgagatgaacacagttcttgatactcttgccacccgggactttataaactggctgcttcagaccaaaattactgacaggaagtaagtatgtcactcttcaagatcaccttcacatcacctgcgagccatgggggatatttgaaattttaagaattctgtaaatttaagaggtgtattccgaaactatattgctttgcatgctaataaataaattttcttttgatgttgtgtagccaaagattgtaaatggaataaactactgtcaaaatattgctaaaataccaggctttaaaacatgaaattacagaattctctcgattttcttattttggatgaagtaccctaacctgcttatatttagcaatgaaattatttttctgtgatataatttgtacatagaaattatttcaatcacagcatatttgcattgtaatggtaggataagggaggacaagtagccacagcggtaaaactggaaagagacattccttcttgaaacgtttgtcgtaaaagtgctccgctttcaatacattaaaggtagctaaataaaattttcaagcttctct

SEQ ID NO: 2985 - DNA, 522 bp, Canis familiaris
tggcctgcctcatgaagataggtttccacgtgatccccactatctcgagcattgtcccggaaagctgcctgctgatcgtagtggggctgctagtggggggcctgatcaagggcgtgggcgagacgccccccttcctgcaatcagacgtcttcttccttttcctgctgccacccatcatcctggacgctggctacttcctgccactgcggcagttcactgagaacctgggcaccatcctgatcttcgctgtggtgggcacactgtggaatgccttcttcctgggcggcctcatgtacgccgtgtgcctggtgggcggtgagcagatcaacaacatcggcctcctggacaacctgctcttcggcagcatcatctccgccgtggatccggtggccgtgctggccgtcttcgaggagatccacatcaatgagctgctgcacatccttgtctttggggagtccctgctcaatgacgccgtcactgtggtcctgtatcacctctttgaggagtttgccaactatgacc

SEQ ID NO: 2986 - DNA, 579 bp, Canis familiaris
atgtgtgacctgttcctcactgccatcatcactgtcatcttcttcaccgtctttgtgcagggcatgaccattcggcccctggtagacctgttggctgtgaagaaaaagcaagaaacgaagcgctctatcaacgaggagatccacacacagttcctggaccaccttctgacaggcatcgaggacatctgtggccattacggccaccaccactggaaggacaagctcaaccggtttaacaagaaatatgtgaagaagtgtctgatagcaggggagcgctccaaggaaccccagctcatcgccttctaccacaagatggagatgaagcaggcaattgagctggtggagagcggtggcatgggcaagatcccttctgctgtctccactgtctccatgcagaacatccaccccaagtctctgcctgctgagcgcatcctgccggcactgtccaaggacaaggaggaggagatccgcaaaatcctgaggaacaacttacagaagacgaggcagcggctgcgatcctacaacagacacacactggtggcagatccctacgaggaggcctggaaccagatgctgctc

SEQ ID NO: 2987 - DNA, 456 bp, Canis familiaris
catcaaaccaagaaatccaaccttcgatccctggctgacattgggaagacagtctccagtgcaagtaggatgtttaccaaccctgataatggtagcccagctatgacccataggaatctgacttcctccagtctgaatgacatttctgataaaccagagaaggaccagctgaagaataagttcatgaaaaaattgccacgtgatgcagaagcctccaacgtgcttgttggggaggttgacttcttggatactcctttcattgcctttgttcggctccagcaggcagtcatgctgggtgccctgactgaggtccctgtgcccacaaggttcttgttcattctcttgggtcctaaggggaaagccaagtcctaccatgagattggcagagccattgccaccttgatgtctgacgaggtgttccatgacattgcttataaagcaaaagacaggcaggac

SEQ ID NO: 2988 - DNA, 631 bp, Canis familiaris
aaatttaaaactagccgttattttccaaccacggcaagaaaactgatcagtgattttgccattatcttgcccaccctcatcttttgtgaaatagatgctctggtaggtgtgaatactccaaaactaattgtgccaagcgagttcaagccaacaagtccaaaccgaggctggttcgtcccaccatttggaggaaacccctggtgggtgtaccttgcagctgctatccctgccttgttggtcactattctgatttttatggaccagcaaatcacagctgtgatcgtaaacaggaaagaacataaactcaagaaaggagctggatatcacctggatctcttttgggtggccatcctcatggtggtgtgctcttttatggctcttccgtggtatgtggctgctactgtcatttccattgctcacatcgacagtttgaagatggagacagagacttctgcccctggagaacaaccaaagtttctaggagtaagggaacagagagtcactggaaccctcgtgtttatcctgactggtctgtcggtctttatggctcccatcttgaagtttatccccatgcctgtactctatggcgtgttcctgtatatgggggtagcgtcccttaacggtgtacagg

SEQ ID NO: 2989 - DNA, 416 bp, Canis familiaris
atgagatttttcatgatgtggcatataaggcaaaagagcgagatgatcttctggcggggattgatgagttcctagatcaggtcacagtgctccctccaggggagtgggacccctccattagaatcgagccacccaaaaacgtcccttcccaggagaaaaggaaaatgcctggagttccaaatggaaatgtttgtcacatagaaccagaaccacatgggggccacagcgggccagagcttcagcgcaccgggcggctgtttggaggcttggtgttggacatcaagcggaaggccccctggtactggagcgactaccgggatgcactcagcttacagtgtttggcctcctttctgttcctgtactgtgcctgcatgtcacctgtcatcacctttgggggactgctcggagaagccact

SEQ ID NO: 2990 - DNA, 1547 bp, Canis familiaris
ggcggggtcgccgcacccaccgaaactcagccacctgtgacgaatttgagtgtttctgttgaaaacctctgcacggtcatatggacatggaaccctcccgagggagccagcccgaattgcaccttacggtattttagtcattttgacaacaaacaggataagaaaattgctcctgaaactcatcgttcaaaagaagtacccctgaatgagaggatttgtctgcaagtggggtcccagtgcagcaccaatgaaagtgacaatcctagcattttggtggaaaagtgcaccccaccacctgaaggtgatcctgagtcggctgtgactgagctacaatgtgtttggcacaacctgagctacatgaagtgtacttggcttcctggaaggaatacaagccctgacaccaactatactctctactattggcacagcagcctgggaaaaattcttcaatgcgaagacatctatagagaaggtcaacacattggttgttcctttgctctgactaatttgaaggattccagttttgaacaacacagtgtccaaataatggtcaaggataatgcaagaaaaattagaccgtccttcaatatagtgcctttaacttctcatgtgaaacctgatcccccccatattaagcgtctcttcttccaaaatggtaacttgtatgtgcaatggaagaatccacaaaatttttatagcagatgcttatcttaccaagtagaagtcaataacagccagactgagacgaatgatatattctacgttgaagaagccaaatgtcagaattcagaatttgagggaaacctggagggtacaatttgtttcatggtccccggcgttcttcctgatactttgaacacagtcagaataagagtcagaacaaataagttatgctatgaggatgacaaactctggagtaattggagtcaagcgatgagtataggtgagaataccgaccccacgttctatataaccatgttgctcgccactcaagtcatcgttgcaggtgccatcataatccttctgctttatctcaaaaggctcaagatcattatattccctccaattcctgatcctggcaagatttttaaagaaatgtttggagaccagaatgatgatacgctgcactggaggaagtacgacatctatgagaagcaaacaaaagaagaaacggactcagtagtgctgattgaaaacctgaagaaagcctctcagtaatggggataacttattttagccttcagcatgaccttgtaaagattcatccccacgttctcgggaagcttcaaggtcaagcatcttgggaaaggacattacagtttctacagcatggtgtacctgggcatctccgactacttcttcaacacagcagggcttgtgtaccaagaggcaggggccttaaacatgaccatcacggacgacatgataccaaagaaatccaaattccgactgacaaccgattttttggggaccctcataccccaagtggccgagatgttccccaacatgacggttcaattcaacgtctgggcctcctccccgccgca

SEQ ID NO: 2991 - DNA, 1454 bp, Canis familiaris
  misc_feature (1438)..(1438): n comprises a, c, g, or t, or includes no nucleotide
ggcacgaggctgagtttgtgtgcttgattatcagacaggaagggaagtcttagagattctaattaatgtctccaaactggagaagagaaaaaaaagaggacctgtgataattgcctatgataattcatttcttgagaaaccatattattgagtggaaacttcaaagtattgaatcttggaggaatggctttcattcatttggatgtcggattcctctataccctgcttgtttgcacagcatttggctctatgctttcaaatgctgagataaaagttaatcctcctcaggattttgagatagtggaccctggatatttaggttatctctctttgcaatggcaacctccattatttccggataattttaaggaatgcacaatagaatatgaattaaaataccgaaacattgatagtgaaaactggaagaccatcattaccaagaatctacattacaaagatgggtttgatcttaacaaaggtattgaagcaaagataaacacacttctgccagcacaatgcacaaatggatcagaagttagaagttcatgggcagaaactacttattggacatcaccacaaggaaatcgggaaactaaaattcaagatatggactgtgtatattacaactggcaatatttagtctgctcttggaaacctggcatgggtgtccattttgataccaattaccagttgttttactggtatgagggcttggaccattcagcagagtgtactgattacatcaaggttaatggaaaaaatatgggatgcaggtttccctatttggagtcatcagactataaagatttctacatctgtgttaatgggtcatcagaatcccagcctatcagacccagctattttatttttcagcttcaaaatatagttaaacctatgccaccagactaccttagtcttactgtgaagaattcagaggaaattaacctgaaatggaacatgcctaaaggacccattccagccaaatgtttcatttatgaaattgaattcacagaggatggtactacttgggtgactaccacagttgagaatgagatacaaatcacaagaacatcaaatgaaagccaaaaattatgctttttggtaagaagtaaagtgaatatttattgctcagatgatggaatctggagtgagtggagtgatgaacaatgctggaaaggtgacatatggaaggaaaccttagtatttttcttgataccatttgcttttgtctcaatatttgttttggtaataacttgcctgcttttgtataagcaaagggctttactgaaaacgatctttcatacaaaaaaagaagtcttttctcatcaagacacattctgttgactcagtaactttcagtcttatggccagatgttaaatatgagtcttattaaactgaagcttttcctcaaatattgaataaatcttattttaaaangaaaaaaaaaaaaaaa

SEQ ID NO: 2992 - DNA, 146 bp, Canis familiaris
ggagcgcattaaggcggagcgcaagcggctgcgcaaccgcatcgctgcctctaagtgccgcaagcgcaagctggagcgcatctcgcgcctcgaggagaaagtgaagacgctcaagagccagaacacggagctggcgtccacagcga

SEQ ID NO: 2993 - DNA, 151 bp, Canis familiaris
  misc_feature (119)..(119): n comprises a, c, g, or t, or includes no nucleotide
aagagccagtccccaactccattggcaggtcccccgacagcatcctcctcacagccagcgtcaaggaagcggccgaggccttcctaggcttttcctatgcacctcctatggactctttnctctgaatagtccgagggttggtcttgaagga

SEQ ID NO: 2994 - DNA, 1564 bp, Canis familiaris
aggccaatgtgcaataccaacatgtctgtgtctactgatggtgctgtaagcacctcacagattccagcttcggagcaggagaccctggttagaccaaagccattgcttttgaagttgttgaagtctgtaggtgcacaaaaagacacttatactatgaaagaggacttcttgggcatccatggatcccaggttaagaacttctgcactagagatacatgagtacagtatactgatctttctgggatagaggtgatattttatcttggccagtatattatgactaaacgattgtatgatgagaagcaacagcatattgtgtattgttccaatgatcttctaggagatttgtttggagtgccaagcttctctgtgaaagagcacaggaaaatatatacaatgatctacagaaacttggtagtagtcaatcagcatgaaccatcagattcaggcacatctgtgagtgaaaatagctgtcaccgtgaaggtgggagtgatcaaaaggaccctgtgcaagagttgcaggaagagaaaccttcatcttcagatttgatttctagaccatctacctcatctagaaggagaacaattagtgagacagaagaacatgcagatgatttacctggtgaacggcagagaaagcgccacaaatctgatagtatttccctttcctttgatgaaagccttgctctgtgtgtaataagggagatatgttgtgaaagaagcagtagcagtgagtcaacagggacgccatcaaatccggatcttgatgctggtgtaagtgaacattcaggtgattggttggatcaccattcagtttcagatcaattcagtgtagaatttgaagttgagtctcttgattcagaagattatagccttagtgaagaaggacaagaactctcagatgaagatgatgaggtgtatcgagtaactgtgtatcaggcaggggagagtgatacagattcatttgaagaagatcctgaaatttccttagctgactattggaagtgtacctcatgcaatgaaatgaatcctcctcttccacctcattgcaatagatgttgggcccttcgtgagaattggcttcctgaagataaagggaaaatccctgagaaagccacaccagaaaactcaacacaagtagaagagggctttgatgtccctgattgtaaaaaagctgcagccagtgattccagagaatcatgtgctgaggaaattgatgataaaatcacacaagcctcccactcccaagaaagtgaggactattctcagccatcaacttctaacagcatcatttatagcagccaagaagatgtcaaagaatttgagagagaagaaacacaagacaaagaagaaattgtggaatctagttttccccttaatgccattgaaccttgtgtgatttgccaaggtcgacctaaaaacggttgcattgttcatggcaaaacaggacatcttatggcatgcttcacgtgtgcaaagaagctaaagaaaaggaataagccctgtccagtatgtagacaaccaattcaaatgattgtgctaacttatttcccctagttgacct

SEQ ID NO: 2995 - DNA, 613 bp, Canis familiaris
agtggcgtcgggcgctgcgggcacctgtgattcgcggaagtcctgccgcctcgcgccgcctcgcgcccggctctcgacccccgcccgccatgggccctcggtacggcggcgcccccgcgctcctgctcccgctgctgctgctgctgcaggtctcatcggggctctgccaagagccggagccctgccgccctggctttggcgctgacagctacacgttcaccgtgccccggcgacacttggagagaggccgtgtcctgggcagggtgagttttgaaggatgcaccggtctacctaggacagcctatgtttctgatgacacccgattcaaagtgggcacagatggtgtgattacagtcaagcggcctctacaacttcataaaccagagataagttttcttgtccatgcctgggactccagccgcaggaagctctccaccagagttaggctgaaggcagcgacgcaccaccaccaccaccatcatgatgctccctctaaaacccagacagaggtgctcacatttcccagttcccagcatggactcagaagacagaagagagactgggttatccctcctatcagctgcccggaaaacgagaaaggcccatttcctaa

SEQ ID NO: 2996 - DNA, 1658 bp, Canis familiaris
aggcaaacactgaacatttcagagctatgagaatgcttctgaatttgagtttgctagctcttggggctgcctatgtttctgcctttgctgtagaaaatcccatgaatagactggtggcagagaccttgacactgctctccactcatcgaacttggctgataggcgatggggtaattttctttttgattcctacagtctttaaaatgcatgggtaattggtggtggtggctagtttttaaagatccattatcaataatgaagtaatgagtgttaataatatataatgggtaaccatgttactcagaagaattatattaaaagttatgaaccttacaatacattaaaaatgaatgttgtttcctttctttttcagaacctgatgattcctactcctgaaaataaaaatgtaagttaaattatgatttgataaaatgattacatgaatcagtttcatattttaagctataaagtatcagttaacattgggatgatttaattttatctattttgtttttatgtgtgcggatgtaaattatgtgcttatgaatattaggaatggtgttaggaatggctctacaatattaagtagaatccattaagcaagtggatcaggcccttttttgatgttgtcagttctccatctcaaagagcctcgtgtcaggcattctttccaaaagaattccatattgggtcagagatacttcctaggctccattcacctctgtcgttggctttcctcacctcaacgtttttctgaaagtactagcaacttggggttatatttttagaattatggtcagtagacatgaaaatatacagtgaagtcctatattaatagtcacttccacatatttaaatgatttttaactctaatggaatcatatacatctggagtatgtcatggtcatattaaaatgttaaaaatgtgatatcattagtctaaatagaataaaattaccagctagaactatacgaggaaattctgaggtgaggtaaatcagtaaggcagttgtattatacctcgtaagcatttatttttcattaatcatttcatttatatcatttgtaacacttctcagtaattatataaacatcatttacttatggtaattatagcttagtataaggtggtttcccacctggaaaagacacaagtaaaaacctcttgggagaagggaacttgtgtaaaccccacaaaacaaagtctaactttttggaccaaatttttatgccttgttttgatgaattatattttttaaaatcttcctcatttagcaccaactgtgcattaaagaagtttttcagggtatagacacattgaagaaccaaactgcccacggggaggctgtggataaactattccaaaacttgtctttaataaaagaacacatagagcgccaaaaagtaagttaaagacatttggcaaaaacttaagtatatttgtctgactctgcctgttttttttttttttttttacaagaattgacagtttcctacaatatctcctctgttcttttaacagaaaaggtgtgcaggagaaagatggagagtgacaaagttcctagactacctgcaagtatttcttggtgtaataaacaccgagtggacaccggaaagttgagaacaaaccggcttattgtagtggaagattttggaga

SEQ ID NO: 2997 - DNA, 206 bp, Canis familiaris
cctgggttgccaagccctgtcggagatgatccagttttacttggaggaggtgatgccccgggctgagaaccacgacccagacatcaagaaccacgtgaactccctgggagagaagctcaagaccctcaggctgaggctgcgacgctgtcaccgatttctgccctgtgagaataagagcaaggcggtggagcaggtgaagagcgcat

SEQ ID NO: 2998 - DNA, 288 bp, Canis familiaris
gagctcagcacaggcccggacagcaggggggagaagcctgctcccagtgcaccctggcggccccgccgatccaagcgctgctcctgctcttccctgatggataaagagtgtgtctacttctgccaccttgacatcatctgggtcaacactcctgagcacattgttccgtatggacttggaagcccttctaggtctaagcgatctttaaaggatttatttatcacaaaggcaacagaccacaggaagagatgccagtgtgctagccaaaaagacaagaagtgctggaat

SEQ ID NO: 2999 - DNA, 2424 bp, Canis familiaris
cgcccgggcaggtgggagcccgacggggactcgatcccgggtctccaggatcacaccccaggctgaaggtggcgcaagctcccactttcaaaaaggaaaatgagttagtgggtctaagtggcccacactccaagtggttgccccaggatttggactcggctttcagagcccccgactcgtcctttatgccaggggtcggcaaacgtatcctcaaagggaacggatggcaaatcttttcggctccgcaagccacacagtgtttgtcgctgcccctccactcccgcccgctgtgacacaaaagcagccttggacaagatgtaaatgaataggtgtggccgtgtgcccataaaaccttattttcccgaactgggagcgggctggaggcggccggcgggtcgtagttggctgcctcccgtgtcacgctgcgtgctgttcgatgcaggtccctgtggatggcatcgcgggcccccctggagctcctgcccctgaaccggagccagctgtcgcctccaaacgccacgacctgtgacgatgctccagaagcctgggacctgctgcacagagtcttaccatcagtcatcatcatcatctgtgtctgcgggctgctgggaaaccttctggtgctggcggtcttgctccggccccggcggcgtctgaacgtggccgaaatgtacctggccaacctggccgcctccgacctggtgtttgtcctgggcttgcccttctgggcggcgaacatctcgaaccagttccgctggcccttcgggggcctcctctgccgcctcgtcaacggagtcatcaaggccaatttgttcatcagcatcttcctggtggtggccatcagccgggaccgctaccgcgcgctggtgcaccccatggccacccggcggcggcgacaggcccgggccacctgcgtgctcatctgggtggcgggcagcctcctgagcgtccccaccttcctgttccgctccatcgaagctgtgcccgagctgaacaacgacagcgcctgcgtcctgctgcacccgcccggggcctggcacgtcgcgaggatggtggagctgaacgtgctggggttcctgctgccgctggctgccatcgtcttcttcaactgccacatcctggcctccctgcgcgggcggcccgaggtgcgcggggcgcggtgcggggggccccccgacggcaggaccacggcgctcatcctcaccttcgtggccgccttcctggtgtgctggaccccctaccacttcttcgccttcctggaattcctgacgcaggtgcaggtcgtccgcggctgcttctgggagaatttcaaagacctgggcctgcagtacgccagcttctttgccttcatcaacagctgcctgaaccccgtcatctacgtcttcgtgggccggcttttcaggaccagggtgtgggacctttttaagcagtgcgcccccaggaggccacctgccgtgtcctggtcccacaggaaacgggtcctccagctcttttggcagaattaagacagccgtggggcccgaagctcggcttcctcatcggtgatttgggacagaagaaatactgctgtggtcgagccccctctgccccccgccttcggcccccagggacagggatccaggccctggaaaccgtggggggttttggtgcgaggacttggcaggtgtgatcaagctaaggatcttgaggtggggagatgatcccggattatctgagagggcccagcgtagtaatcccagaggttttaggaaagaccagcagccaagtggaggctggagagacccggggagccctgagccaggggttgctggtgcccccagaggctgggaaggggacagagtcagagtgtcccctcgggcctccagaaggagccagccctgcagacgtttggactttagcccactgagtccagcctccagaaacataagacaataaagtcgtgtcatttaaagtcaccacgtttgggctaatgcgttagagcagccacaggacactcccggcaagggtctctgagcgcattgccacgtgcccatccaaaatgttctaggccaactgcgaggcatagagatgctagagctagggagcctacctgcaaggaactggcacaaatacttagagtattaaagaggaaaacaagaaatcacagaagcaggcctcggatccagcaccctgagcattccgagggaagagggtgggttcccggcaggggtgtcaggagaagccttcggaagggagtccgcccttccaaagtagggcgcccagaaactgggtgcctggggagcgggaaggaggcctggtcgaggcgtaaccgggacccgcaggtggaaatcgtgcgctcgcaggagagcgtgtttatggaaccgttaatgcttcaggattcttcttgcagtgggggacccagttgccttcaaggacctgcccggg

SEQ ID NO: 3000 - DNA, 1681 bp, Canis familiaris
gcggctcctaggaggactgaggacatcaggcagtcctgcaggaccgagggagctctctaggtgcccacgtggcttgctctgggcaagaggggtcccaggaggacaggaggtcccaggacaaagagagagccagcagtcagcccaggagcctcacttacatcccaccctgagtccaaatgttctctgcctggaagagaccgatgttcctgtcttttcatgaggaccctgtgcccactacagcctctctcagcactgaaatgttcaacagcacctcgcaagacctcatgcccactctcaatgggaccctgcccagtccctgcgtctaccccgagtggtggaactggcttaacaccatccaggcccccttcctctgggtcctgttcatactggccgccctcgagaacctcttcgtcctcagcatcttctgcctccacaagagcagctgcacggtggctgagatctacctgggcaacctggccctggcagacctgatcctggcctccgggctgcccttctgggccatcaccatcgccaacaacttcgactggctcttcggggaggtgctgtgccgcgtggtgaacaccatgctctacatgaacctctacagcagcatctgcttcctgatgctggtgagcatcgaccgctacctggccctggtgaaaaccatgtccatgggccggatgcgcggggtgcgctgggccaagctctacagcctggtgatctgggggtgcacgctgctcctgagctcgcccatgctggccttccggaccatgaaggagtacagagacgagggctacaacgtcaccgcctgcgtcatcatctacccgtcccgcacctgggaagtgttcaccaacgtcctcctgaacttcgtgggcttcctgctgcccctgaccgtcatcaccttctgcacggtgcagattatgcaggtgctgcggaacaacgagatgcagaagttcaaggagatccagacggagaggaaggccacggtgctggtcctggccgtgctgctgctcttcgtcatctgctggctgcccttccagatcagcaccttcctggacacgctgctgcgcctcgacatcctgtccggctgccggcatgagcacctggtggacgtcttcacgcagatcgcctcctacgtggcctacagcaacagctgcctcaacccgctggtgtacgtgatcgtgggcaagcgcttccgcaagaagtcccgggaggtgttccggggactgtgccagaaagggggctgcgtcctggagtccaacaagatggacaactccatgggcaccctgcggacctccgtctcggtggagcgccagattcacaaactgcccgagtgggcggagaacagccagtgaggggccgcggccgccaggaccacggttcgtgtgtgtgaggaccgggggacagcagagcttcaggatatgcctgacaaggaatggcaggcaggccacgtgtgtggcctcggccaataagtcgatgtctctggtaaaacccaggagcttggctcctgtcccatgcaagctgcagggggtcaggccgggagggtggggtggcctcacacccagccaaggggccccataaacacgacagtattattgtcctcatttgccaccgcctctgggccagtctgcatctttccaggagtggaaggggcctggggacagggacaggagtgactgag

SEQ ID NO: 3001 - DNA, 269 bp, Canis familiaris
ctgaaattctttttaaactattccctgacacccgcattaacctgtgtgttacgactatcccgcgctcccaaaacttgccctatgtacgtcgtgcattactgctatgccccatgcatattaagcatgtacatatacttatataattacataagacatactatgtttaatcttacaataatctctgtcaggagcatatatgactgcacgtcacttagtccagtaagggatttatcaccatgcctcgagaaaccatcaatccttgctcgaag

SEQ ID NO: 3002 - DNA, 270 bp, Canis familiaris
cacatttcttggagatgttaaagttcgagtgccatttcaccaacgggacggagcgggtgcggtatctggtgagagacatctataaccgggaggagcacgtgcgcttcgacagcgacgtgggggagtaccgggcggtcacggagctcgggcggcccgacgctgagtactggaaccggcagaaggagctcttggagcggaggcgggccgaggtggacacctactgcagacacaactaccgggtgggcgagagcttcacggtgcagcggcgag

SEQ ID NO: 3003 - DNA, 270 bp, Canis familiaris
cacatttcttgaagatggtaaagttcgagtgccatttcaccaacgggacggagcgggtgcggttggtggaaagagacatctataaccgggaggagtacgtgcgcttcgacagcgacgtgggggagttccgggcggtcacggagctcgggcggccctcggctgagtactggaacgggcagaaggagatcttggagcagaggcgggccgaggtggacacggtgtgcagacacaactacggggtgattgagagcttcgcggtgcagcggcgag

SEQ ID NO: 3004 - DNA, 270 bp, Canis familiaris
cacatttcttgaagatggtaaagttcgagtgccatttcaccaacgggacggagcgggtgcggtatctgatgagagacatctataaccgggaggagttcgtgcgcttcgacagcgacgtgggggagttccgggcggtcacggagctcgggcggcgcgacgctgagtcctggaacgggcagaaggagctcttggagcggaggcgggccgcggtggacacctactgcagacacaactacggggtgattgagagcttcacggtgcagcggcgag

SEQ ID NO: 3005 - DNA, 159 bp, Canis familiaris
aggaggaagtctagattttccaagaggttggaaagaatataaaatgggttttggaaatccctctggtgaatattggctggggaatgagtttatttttgccattaccagtcagaggcagtacacactaagaattgagttaatggactgggaaggaaaccc

SEQ ID NO: 3006 - DNA, 384 bp, Canis familiaris
gggaatcgctagagttgcgctgtctgttgagagatgccgccacgatcatttggactaaggatggggtacacttggggcccaacaataggacagtgcttattggggaatacttgcagataaaaggtgccacgcctagagactccggcctctatgcttgcacggcggctaggccggtagacagcgaggctgtctacttcatggtgaatgtcacagatgccatctcatccggagatgatgaggacgacacagatggctccgaggattttgtcagtgagaacagtaacaacaagagggcgccttactggaccaacacagaaaagatggaaaagcgtctgcacgctgtccctgcggccaatactgccaagtttcgctgtccagcggggg

SEQ ID NO: 3007 - DNA, 272 bp, Canis familiaris
  misc_feature (15)..(15): n comprises a, c, g, or t, or includes no nucleotide
  misc_feature (74)..(74): n comprises a, c, g, or t, or includes no nucleotide
  misc_feature (76)..(76): n comprises a, c, g, or t, or includes no nucleotide
  misc_feature (122)..(122): n comprises a, c, g, or t, or includes no nucleotide
  misc_feature (154)..(154): n comprises a, c, g, or t, or includes no nucleotide
  misc_feature (169)..(169): n comprises a, c, g, or t, or includes no nucleotide
  misc_feature (181)..(181): n comprises a, c, g, or t, or includes no nucleotide
atgtgaagtgctgcngccagacctgaaccacagttctctggtagatgacggcatccagttgcaagtctccaccngnacggtaacaagagtctgaggcatttcgtgtcagtcatcgtagcttnggagaagctgaagaagcctgcccacaggtccnccaggaggatgaccngaagagcatctnttgctacatctttgaagaagaacctatcgatgtgcaaaacagatgcgataattttatagtgatgcagcgatcaatcggttgactgcaagtt

SEQ ID NO: 3008 - DNA, 2032 bp, Canis familiaris
gcaggtttcccattgccgctcaagtagggtcaccgtgatttcctcttccaaggtggtggagagttggggagaatccagaggacatatcgtaaccgtttcctcctttacctccgaactgccaaggctgcagggaagggaccggccctgcctcggcctgggctcccggtgaggcgagctcagaggtcggccgggccgccacaggttggggctcagctacatttccagaaccatccagtcaagatggtagacacagaaagcccgatttgccccctctccccccttgaggctgatgacctggaaagcccgttatctgaagaatttctacaagaaatgggaaacatccaagagatttctcagtccattggtgaggatagttctggaagttttagttttacagaataccagtatttaggaagtggcccgggatcagatggatctgttatcacagacacgctctcaccagctcccagcccctcgtcggtcacgcacccggcggctcccggtggtgccgaggaaccttccagcgtagccttgaacattgaatgcagaatctgcggggacagagcctcgggctaccattacggagtccacgcgtgcgaaggctgcaagggtttcttccggcgaaccatccggctgaagctggcctatgacaaatgtgaccgcagctgcaaaattcagaaaaagaaccggaataagtgccaatattgtcgtttccacaagtgcctttcggtcgggatgtcccataatgccatccgctttggaagaatgccacgatcagaaaaagcaaaactgaaagcggaaattctcacctgtgaacaggacccagaagacgcagagacagcagatctcaagtccctggccaagagaatttacgaggcctacctcaagaacttcaacatgaacaaagtcaaagcccgggtcatcctcgcagggaaggccagcaacaacccgccctttgtcatacatgacatggagacgttgtgcatggctgagaagactctggtggccaagctggtggccaatggcatccagaacaaggaggcagaggtgcgcatcttccactgctgccagtgcacatctgtggagaccgtcacggagctcacggagttcgccaagtccatccctggcttcgcgaacttggacttgaatgatcaggtcactctactgaaatatggagtgtatgaggccatatttgcgatgctgtcttctgtgatgaataaagacgggatgctggtagcctatggaaatggctttataactcgtgagttcctaaagagcctaaggaaaccgttctgtgatatcatggaaccaaagtttgattttgcgatgaagttcaatgcactggagctagatgacagcgacatctccctttttgtggctgctatcatttgctgtggagatcgccccggccttctaaacgtgggacacattgaaaaaatgcaggagggcattgtgcatgtgctcaaacttcacctgcagaccaaccacccggacaacatctttctcttcccaaaactccttcaaaaaatggcagacctccggcagctggtcaccgagcacgcacagctggtgcaggtcatcaaaaagacggagtcggacgcagccctgcaccccctgctgcaggaaatctacagggacatgtactgacggcttgagagcgaaccgcacgacaagcagctcttcgaggacttttaaagtcgacagcactacaaatgaaaactgggagcaatgcctgctttgcacaaattccaccattttcaccttagagaatgggacggatgagccctaggtaaccggaaacctagaccacatttctttctttttcacatcagtacttgtaagagcgtgccaagtgtcgaaacgccggtgacaggtagctgataggcagttcttggaaaattaaggggaatgatgcccagcagtctgattttaactcacttgatgttaatccatgcagatttctttatatcacattagccgtgtagccttgaattaactggtgaccttgaaaaaaaaaaaaaaaaaaaaaaaa

SEQ ID NO: 3009 - DNA, 1654 bp, Canis familiaris
ggcacgagccagcccccaggatccccaggtgaccccattcagtgctcaggacacaacacagacaccaccatggagtctgtgttctgctgggttttccttgtcgttattttaaaaggtgtccagggtgaggtgcagttggtggagtctgggggagacctggtgaagcctggggggtccctgagactctcctgtgtggcctctggattcaccttcagttcgtactacatgcattggatccgccaggctccagggaaggggcttcagcgggtcgcacatattagaggtgatggaaggactacacactacgcagacgctatgaagggccgattcaccatctccagagacaacgccaagaacacgctgtatctgcagatgaatagcctgacagtcgaagacacggctatttattactgtgtaaaggacatatactatggggtcggggactattggggccagggaaccctggtcaccgtctcctcagcctccaccacggccccctcggttttcccactggcccccagctgcgggtccacttccggctccacggtggccctggcctgcctggtgtcaggctacttccccgagcctgtaactgtgtcctggaattccggctccttgaccagcggtgtgcacaccttcccgtccgtcctgcagtcctcagggcttcactccctcagcagcatggtgacagtgccctccagcaggtggcccagcgagaccttcacctgcaacgtggtccacccagccagcaacactaaagtagacaagccagtgttcaatgaatgcagatgcactgatacacccccatgcccagtccctgaacctctgggagggccttcggtcctcatctttcccccgaaacccaaggacatcctcaggattacccgaacacccgaggtcacctgtgtggtgttagatctgggccgtgaggaccctgaggtgcagatcagctggttcgtggatggtaaggaggtgcacacagccaagacccagtctcgtgagcagcagttcaacggcacctaccgtgtggtcagcgtcctccccattgagcaccaggactggctcacagggaaggagttcaagtgcagagtcaaccacatagacctcccgtctcccatcgagaggaccatctctaaggccagagggagggcccataagcccagtgtgtatgtcctgccgccatccccaaaggagttgtcatccagtgacacagtcagcatcacctgcctgataaaagacttctacccacctgacattgatgtggagtggcagagcaatggacagcaggagcccgagaggaagcaccgcatgaccccgccccagctggacgaggacgggtcctacttcctgtacagcaagctctctgtggacaagagccgctggcagcagggagaccccttcacatgtgcggtgatgcatgaaactctacagaaccactacacagatctatccctctcccattctccgggtaaatgagcaacacgcccggcacccagcaagccccccacccttggctctcaggatcccctgaggacacctgagcccctgtccctgtgtacataaccctgggtaggcacccatcatgaaataaagcacccagcactgccctgggccctgcaaaaaaaaaaaaaaaaaaaaaaaaaaaaaaaaaaaa

SEQ ID NO: 3010 - DNA, 1456 bp, Canis familiaris
  misc_feature (27)..(27): n comprises a, c, g, or t, or includes no nucleotide
aagtgctcaggcacaacacagacaaancaccatggagtctgtgctctactgggttttccttgtcgctattttaaagggtgtccagggtgacgtgcagctggtggagtctgggggagacctggtgaagcctggggggtccttgagactgtcctgtgtggcctctggattcacctttagtagctgtgccatgagctgggtccgtcagtctccagggaaggggcctcagtgggtcgcaactattcggtatgatggaagtgatatatactacgcagacgctgtgaagggccgattcagcatctccagagacaacgccaagaacacggtgtatctgcagatgaacagcctgagagccgaggacacggccgtgtattattgtgcgaaggcccccccctacgatagttaccactatggtatggactattggggtcctggcacttccctcttcgtgtcgtcagcctccaccacggccccctcggttttcccactggcccccagctgtgggtcccaatccggctccacggtggccctggcctgcctggtgtcaggctacatccccgagcctgtaactgtgtcctggaattccgtctccttgaccagcggtgtgcacaccttcccgtccgtcctgcagtcctcagggctctactccctcagcagcatggtgacagtgccctccagcaggtggcccagcgagaccttcacctgcaatgtggcccacccggccaccaacactaaagtagacaagccagtggccaaagaatgcgagtgcaagtgtaactgtaacaactgcccatgcccaggttgtggcctgctgggagggccttcggtcttcatctttcccccaaaacccaaggacatcctcgtgactgcccggacacccacagtcacttgtgtggtggtggatctggacccagaaaaccctgaggtgcagatcagctggttcgtggatagtaagcaggtgcaaacagccaacacgcagcctcgtgaggagcagtccaatggcacctaccgtgtggtcagtgtcctccccattgggcaccaggactggctttcagggaagcagttcaagtgcaaagtcaacaacaaagccctcccatcccccattgaggagatcatctccaagaccccagggcaggcccatcagcctaatgtgtatgtcctgccgccatcgcgggatgagatgagcaagaatacggtcaccctgacctgtctggtcaaagacttcttcccacctgagattgatgtggagtggcagagcaatggacagcaggagcctgagagcaagtaccgcatgaccccgccccagctggatgaagatgggtcctacttcctatacagcaagctctccgtggacaagagccgctggcagcggggagacaccttcatatgtgcggtgatgcatgaagctctacacaaccactacacacagatatccctctcccattctccgggtaaatga

SEQ ID NO: 3011 - DNA, 1460 bp, Canis familiaris
ccaggtgaccccattcagtgctcaggacacaacacagacaaaccaccatggagtctgtgctctgctgggttttccttgtctctattttaaaaggtgtccagggtgaggtgcaactggtggagtctgggggagacctggtgaagcctggggggtccttgagactgtcctgtgtggcctctggattcaccttcagtgactatggcatgagttgggtccgtcagtctccagggaaggggctgcagtgggtcgcagctgttagcaatcgtggagatacttactacgcagacgctgtgaagggccgattcaccatctccagagacaacgccaagaacacgctgtatctccagatgagcagcctgaaagccgaggacacggcaatctatcactgtgtgacgggagtatggccgcgacattattatggtatggaccactggggcaatggcacctcactcttcgtgtcctcagcctccaccacggccccctcggttttcccactggcccccagctgcgggtccacttccggctccacggtggccctggcctgcctggtgtcaggctacttccccgagcctgtaactgtgtcctggaattccggctccttgaccagcggtgtgcacaccttcccgtccgtcctgcagtcctcagggctctactccctcagcagcacggtgacagtgccctccagcaggtggcccagcgagaccttcacctgcaacgtggtccacccggccagcaacactaaagtagacaagccagtgcccaaagagtccacctgcaagtgtatatccccatgcccagtccctgaatcactgggagggccttcggtcttcatctttcccccgaaacccaaggacatcctcaggattacccgaacacccgagatcacctgtgtggtgttagatctgggccgtgaggaccctgaggtgcagatcagctggttcgtggatggtaaggaggtgcacacagccaagacgcagcctcgtgagcagcagttcaacagcacctaccgtgtggtcagcgtcctccccattgagcaccaggactggctcaccggaaaggagttcaagtgcagagtcaaccacataggcctcccgtcccccatcgagaggactatctccaaagccagagggcaagcccatcagcccagtgtgtatgtcctgccaccatccccaaaggagttgtcatccagtgacacggtcaccctgacctgcctgatcaaagacttcttcccacctgagattgatgtggagtggcagagcaatggacagccggagcccgagagcaagtaccacacgactgcgccccagctggacgaggacgggtcctacttcctgtacagcaagctctctgtggacaagagccgctggcagcagggagacaccttcacatgtgcggtgatgcatgaagctctacagaaccactacacagatctatccctctcccattctccgggtaaatga

SEQ ID NO: 3012 - DNA, 953 bp, Canis familiaris
ctgcagcccggaaggcaaaggaacaagccctgaagacacttctgctgggaggtccgccatggcctctctcggcctccaacttgtaggctacatcctaggcctcctggggctgttgggcaccctggtggccatgctgcttcccagctggcgaacaagctcctacgttggtaccagcatcgtgacggcggtcggcttctccaagggcctctggatggagtgcgccacacacagcacaggcataacccagtgtgacatctacagcaccctcctaggcctgcctgctgacatccaggctgcccaggccatgatggtgacatccagtgcgatctcttcgttggcctgcattgtctctgtggtgggcatgagatgcactgtcttctgccaggactcccgagccaaagacagactggcggtggtgggtggagtcttcttcatcattggaggcctcctgggcttcatccccgttgcctggaaccttcacgggatcctgcgggacttctactccccgctggtacccgatagcatgaagttcgagatcggagaagctctctacctgggcattatttcctccttgttctccctggtagctggcatcatcctctgcttttcctgcccactccagggaaatcgctccgactactatgactcctaccaggcccagccccttgcaactagaggctctccaaggccgggtcaaccgcccaaagccaagagcgagtttaactcctacagcctgacagggtatgtgtgaagaaccaggggccagagctaggggggcggttggtggccgagtctgtgaaaaccagtgaacagcacctcccaaaccaccacccctggggccacaggtgagggacattggcactgtatcatgtcagaaggtgctgctgaggctagattgactttgcccactggatcaagtgaaggcagaaatgagaactggtgcaacagcatgc

SEQ ID NO: 3013 - DNA, 1006 bp, Canis familiaris
aaagcacaggcaggtgcaggcgctgccccggcgccagcgggcagaacggagccgttagcgcgcgccgtcggtgcctccgtccttccgtccgtccgtcgaggcatcggtcggccggcgcgcggcagctcccgcccaggcccagcggccacggcccctcgtcgccccgcaccctgagccgccgggcagagccggctttggcgcggcagccatgtccatgggcctggagatcgcgggcacgtcgctggccgtgctgggctggctgagcaccatcgtgtgctgcgcgctgcccatgtggcgcgtgacggccttcatcggcagcagcatcatcacggcgcagatcacctgggagggcctgtggatgaactgcgtggtgcagagcaccggccagatgcagtgcaaggtgtacgactcgctgctggcgctgccgcaggacctgcaggcggcccgcgccctcatcgtcgtgtccatcctgctggccgccttcgggctcctcgtggcactcgtgggcgcccagtgcaccaactgcgtgcaggacgacacggccaaggccaagatcaccatcgtggcgggagtgctcttcctgctggccgccttgctcaccctggtgccggtgtcctggtcggccaacaccatcatccgggacttctacaacccgctggtgccggacgcgcagaagcgggagatgggcgcgggcctgtacgtgggctgggcggccgcggctctgcagctgctggggggcgcgctgctctgctgctcctgcccgccgcgcgacaagaagtacgcgcccaccaagatcgtctactccgcgccgcgctccgccggccccggcaccagcacagcctacgaccgcaaggactacgtgtgaggggcagcggcggggagcccccagcacccgtcgagctacagcgcccctgtccggcgtgcagcctctcggagaccaacccactccagacgccccgagctctcccacgggactgggaggggccagcccggcggccccttcccc

SEQ ID NO: 3014 - DNA, 429 bp, Canis familiaris
aaaggaagcttagattccattgatcaaactgatttttatatgctgagtgatccaaaagtattctgaccaagatggaggacaaaggccaggtccactgcttaaagccaaggagtaggatcaactacctgcaaacccaccaacccccgaatgtagatctgacaacaacaaaaaagaacaagaaaagaactacaaccatatatgccagggtctttggctctggtgagctgtaggcctaaggaggcaaggacgcagacataatctgacttcacaacgaagccaccagctgactgtgtgagtggatctccaatatgcctaagagctccatgggggcagtgatatgaatatgccataaaatggttttgatctgggcagccccggtggcacagcggttgctctctctgtgttgctcatgaatatataataaatctc

SEQ ID NO: 3015 - DNA, 480 bp, Canis familiaris
ctcatcttctcaaataatctgaagagcgtgagacttggaaacaagtggaatcgtctgcctgacaatccagaaagatttgatagttgcatcattgccctaggccttccaagcttcttctctggccgccattactgggaagtagaggtgggaaacaagacagggtggatcctgggcatctgcaaagcatccatgagcaggaaagggagcatgactctgtcacctgacaatggctactgggtggtgataatgatgaagcggagtgagtaccaggtgtccaccattcccccaacacgcctgcaattaagggaacctcccaaacgtgtgggcatcttcctggactataaggctggagacatttccttttacaatgtaacaaacaaatccctcatctatgcattcactggcttctcttcctctgagcccctccagcctatcttcagccctggaacacatgatggagggaagaacatggatcctctg

SEQ ID NO: 3016 - DNA, 281 bp, Canis familiaris
agacgtgggacctgcatcaggggagctcctgaggcgatacacaagtacactactccctggggatgcctgggccctccagacatttcgtgtggaacactcacccaacgagaccttggtccaggccaacggcagctttgcgcgggcaactgtgcatgactacaggctggttctcaaccggagcctccccatctcggagagccgctccctgcagctggccgttctggtcaatgactcggacttccagggtcccggggagggcatcctcttgctccacttcaacg

SEQ ID NO: 3017 - DNA, 2004 bp, Canis familiaris
gaggagaacatggccaagcgggttgcaattgtgggagctggggtcagtggcctggcctccatcaagtgctgcctggaggaaggactggagcccacatgctttgagaggagtgacgacctcggggggctgtggagattcaccgaacatgttgaagaaggcagagccagcctctacaagtctgtggtttccaacagctgcaaggagatgtcttgttactcagactttcctttcccagaagattatccaaactatgtgccaaattctcaattcctggaatatctcaaaatgtatgcaaaccggttcagccttctgaaatgcattcgattcaagactaaagtctgcaaagtaacaaaatgcccagattttactgtcaccggccaatgggaggtagtcactcagcatgaaggaaagcaagagtctgccatctttgatgctgtcatggtctgcactggtttccttactaacccacatttgccactggactgttttccaggtataaatacatttaaaggccaatactttcatagccgacagtataaacatccagatatatttaaggacaagagagtccttgtgattggaatggggaattcaggcacagacattgctgtagagaccagccgcctggcaaaaaaggtgttcctcagcaccactggaggggcatgggtgatgagccgagtctttgactcaggatacccatgggacatggtgttcatgactcgatttcagaacatgttcagaaattctctcccaactccaattgtgacgtggttgatggcaaggaagatgaacagctggttcaatcatgcaaattatggcttagtaccagaagacaggacgcagctgagagagcctgtgctaaatgatgagcttccaggctgtatcatcacaggaaaagtgctcataaagccaagcataaaggaggtgaaggaaaattctgttgtatttaacaacaccccaaaggaagagcccattgatatcatcgtctttgccactggatacacctttgctttccccttccttgatgagactgtagtcaaagttgaaaatggccaggcatcgctgtacaagtacatcttccctgtgcatctgccaaaaccaaccctggctgtcattggcctcatcaaacccttaggctccatgatacccacaggagaaacacaagcacgatgggctgttcgagtcctgaaaggtataaataagttaccaccacaaagtgccatgacagaggaagttaacgcaagaaaagaaaacaaacccagtgggtttggcttgtgctactgcaaagctttacaatcagattacatcacatacatagatgaactcctgaccaatatcaatgcaaaacccaacctattctcattgctcctgacggacccacgcctggctttgaccatcttctttggcccatgcacaccataccagttccgcttgactggcccagggaaatggaagggagccagaaatgctatcttgactcaatgggatcgaacattcaaagtcaccaaaactcgaattgtacaagaatccccaactccctttgcaagcttgcttaaactcttaagccttctggctttgctaatggccattttcctaattttcctataagaagtacccagatggcctgtcagatgcacatagtagatttacagtgctctggtccctccattcccacatcatgaccctcacagccttgaactatattcaagtggtgaaggccacctcccatccttccctggctgaccccaaggctaccactggtattcctggacctctcccagccccacctgctcccagtgctagagcaagataatcatgatttctgtgcatttgaaggctactgggaagttccatgttcattttacaaagagagttgtttacggcagcactctgagcatttatatctctctctcatataaaccatttcataggcctcaaataaaaccccctaattcacaaaagatttggttgtactaaaatgatgttgttaggtatcagctgatt

SEQ ID NO: 3018 - DNA, 2704 bp, Canis familiaris
ttttttgtttattttgtcttctctcttttcttctctgattattcttgataaagaaaaaaggtaactatggggaaaagagtggccatcatcggagctggagtcagtggcttggcctccatcagaagctgtctggaagaggggctagagcccacctgctttgagaggagtgaagacatcgggggcctgtggaaattctcggagcatgcagaggaaggcagagctagcatttaccagtctgtctttaccaactcttccaaagagatgatgtgtttcccagacttcccatatcctgatgacttccccaactttatgcataatagcaagctccaggaatacatcactgtattttccaaagaaaagaacctcctgaaatacatacaatttaagactcttgtatgcagtgtaaataaacgtcctgatttctcagtctccggccaatgggatattaccactgaaagggatggtaaaagagaatcagctacctttgatgctgtactgatttgttctggacaccatgtgtaccccaatctaccagaagagtcctttccaggactaaaactttttaaaggcaaatgtttccacagccgggaatataaggaaccaggaatattcaaggggaagcgagttctggtgataggcctggggaattcaggctgtgatattgctacggaactcagccacacagctgaacaggtcatcatcagttccagaagtggctcctgggtgatgagccgggtctgggatgatggttatccatgggacatgatgttcatcactcgatttgaaaccttcctcaagaacagcttgccaacaatcatctctgactggtggtacatgaagcaaatgaatgcaagattcaagcatgagaactatggcttgatgcctttaaatggaaccctgagaaaagaacctgtgtttaatgacgagctcccagcttgcattctgtgtggcacggtgtccattaagcctaatgtgaaagcattcactgagacttcagccatttttgaggatgggacagtgtttgaggccatcgattgtgtcatttttgcaacaggctataattatgcctaccccttccttgatgagtccatcattaagagcaaaaacaatgagatcaccttgtttaaaggcattttccctcctaaattggaaaaaccgaccatggcagtgattggttttgtccagtcccttggggctaccattcccacaactgatctgcaagcccgctgggcagtacaagtaataaaaggaacttgcactttgccttctgtaacagacatgatgaatgatattgataaaaaaagggagggaaagctcaaatggtttggcaccagcgagacagtacagacggattatattagttatatggatgaacttgcctccttcattggggcaaagcccaatatcccgtggttgttcctcacagatcccaaattggctgtggaggttttctttggcccttgcagcccataccaatttaggctagtgggcccagggaagtggccaggagccagaaatgccatcctgacccagtgggaccggaccctgaaacccatgaagacaagagctgttgggaaccctcagaaaccttgcatgctttgccatttggtcaagctctttgttcttcctgttctgttcattgctgttttcctcgcattgatctaattatcattccccacaggattctgaaagttactgatgatacccaggatagaactctcctatttaaaaaataagaatttcacacctcctactttcctattcagcaggcattcatcagtaacacagtactatttccaggctttcaagtaagcccctttaagaatcaaatcacgacctaaagacagcattaattacttttctttaggttccactaacatttcataatcagaactatgcttttcaccactaacctcaagcatctcctgaaacattgcgatgtgattccttttctcctttaatcaaagtttgaaatacatgcttcaaacttaaacaaagagcaaactcagcagagtagttatgatattctccagccacttctgaaaaccatttgcaggagaatcaagtagagaatttggcttttaattctatttttgttttatgccaaatcctccaggcaatatgtcctgatccctggccaaaaattatagcatggatggggatccctgggtggctcagcaatttggtgcctgccttcagccctgggtgtgatcctggagaccggggatcaagccccacatagggctccctgcatggggcctgcttctccctctgcctgtgtctctgcctctctctctctctctctgtgtctctctcatgaataaataaataaaatcttaaaaaaaaaaagtatagtatggagacctggtctataatgaaagttaacaagaagtaacattatggactgataaaggatataatattcttctcaaacttatgtagccaacacattctcttaatgtcctattaatgtcaatctttctccatacttaagacatgaattattttaactatttttgatgtcttaattacttctttattaacagcgatgatttttgatcactcatttttgctctcaagttttactgataaaattaaatatatatttatgtcttaaaagatatacaatttgaacatatgaagcacaaaagatcttttcactcccaatttcatctcatcatatctatattctcaataaggacac

SEQ ID NO: 3019 - DNA, 879 bp, Canis familiaris
gacaacggtttctgctcacccaagatactccgatgtgctcctgaaccagatgcttttaatccctgtgaagatattatgggctataacttccttagggtactgatttggctgattaatatcctagccatcgtgggaaatgtgactgttctctttgttctcctgactagtcgttataaactgacagtaccccgttttctcatgtgcaatctctcttttgcagacttttgcatggggctctatctgctgctcattgcctcagttgattcccaaaccaaaggccagtattataaccatgccatagactggcagacagggagtgggtgtagtgcagctggctttttcactgtattttcaagtgagctttctgtctacaccctcacagtcatcacactagaaagatggcacaccatcacctatgctcttcagctggaccaaaagctgcgtttaagacatgccattccaattatgcttgggggatggctcttttccactcttatcgccatgttgccccttgtgggtgtcagcaattacatgaaagtcagcatttgcctccccatggatgtagaaaccactctctcacaagtatacatattaaccatcctgatactcaatgtggtggccttcatcatcatttgtgcttgctacattaaaatttattttgcagttcaaaatccagagctgatggctaccaacaaagatacaaagattgctaagaaaatggcggtccttatcttcactgatttcacctgcatggcaccaatctctttttttgccatctcagctgccttcaaaatgcccctcatcacagtaaccaactctaaagttttactggttcttttttatcctgtcaattcttgtgccaatccatttctgtatgct

SEQ ID NO: 3020 - DNA, 582 bp, Canis familiaris
gggcctggagtcctgcttcccctgccgaagggggcctgcccaggttggatggcaggcatcccagggcatcctggccacaatgggaccccaggccgtgatggcagagatggcacccctggtgaaaagggtgagaaaggagatccaggtcttgttggtcctaagggtgacactggtgaaactggagtaactggggttgaaggtccccgaggctttccaggaaccccaggaaggaaaggagaacctggggaaagtgcctatgtacaccgttcggcattcagtgtggggttggagagccggatcactgtccccaatgttcccattcgctttaccaaaatcttctacaatctgcaaaaccactacgatggcaccactggaaaatttcactgcaacattcctgggctgtactacttctcctaccacatcacagtctacttgaaggatgtcaaggtcagcctctacaagaaagacaaggctatgctcttcacctatgaccagtaccaggagaagaacgtggaccaggcctctggctctgtgctccttcatctggaagtgggcgaccaagtctggctccaggtgtacggg

SEQ ID NO: 3021 - DNA, 443 bp, Canis familiaris
ggggccgcgcatgaggagctccaacagtcccgcatccgcatcgacagcctctcggcccaactcagccagctgcaaaagcaggtgtgcccctccccaccccttccctcctgagctaagggtgaggctggatgtagtgcaagtccccaggagggagaggagggggcaggtgagaggccaaccatgtcccaggaccttggactgggggaggagcctaggattcagtcaggtaacctggccgttgtgccagaccacttcctgtttgacctgcatgacctgtattcctcagaaccttgctcttcccagttgagaatggaggcctttcttaccttctgcgtggcttggtgagtgcttttaaagcacctgttctgaccagctgtgcatttgtgacagaggaagcaggttccagcctcagtactagagatttcagttagattcagggaagg

SEQ ID NO: 3022 - DNA, 281 bp, Canis familiaris
tttgtgcagagcagtgtaagcaaaccagcatataagccctctttttaaagaattcttcccaagtggatagagaggggacagaccaatgcagttaaaattctttgaagttagtctattattttaaagtgtttttgataatgttcttgatgaattttggctgcagtctcctttgaaaacatactcatgataaagtgtttttctgaagattgtctttcagcaagggacaacaaagctcagtgtagaaaagaacaaaacttctattacgagtgacattggtatgc

SEQ ID NO: 3023 - DNA, 519 bp, Canis familiaris
ggctctgttgccgatgctatcatcattatttgagcatattggccagcatcaattcggagaagatctaatattggaagatgtacaagtgtcatgttacagaattctgactagtttatatgctttgggaaccagcaaaagtatttatgtggaaaggcaacgttctgcgttaggagaatgtctcgctgcttttgctggtgcctttcccatagcatttttggaaactcatctggacaaacataacatttactctatctacaatactaagtcctcacgagaaagagcagctcttaatttgccaactaatgtggaagatgtttgcccaaatataccatctttggagaaactcatggaagaaattgtggaattagctgagtctggcattcgctacacacaaatgccacatgtaatggaagtcatactgcccatgctttgcagctacatgtctcgttggtgggagcatggacccgaaaacaatccggaaagggctgaaatgtgctgtacagccctgaactccgagca

SEQ ID NO: 3024 - DNA, 352 bp, Canis familiaris
cgggactccaggctcatgccctgggctgaaggcagatgcttaatcgctgagccacccggttgcccctaaatttatttatttatttattattatttatttatttatttatttatttatttatatttattttcccgttaaatttatttatttatatttatttattccctaaacttatttatttatatttattttcccctaaatttatttatttatatttatttatttgtttatttattctctaaatttatttttttttaaatgtgtatttcaaagcaaacacgagagccttttgctcacaggtctcttaatcacactgaagtgccagcgggtgataaggagatggtggttttca

SEQ ID NO: 3025 - DNA, 933 bp, Canis familiaris
  misc_feature (423)..(423): n comprises a, c, g, or t, or includes no nucleotide
  misc_feature (425)..(427): n comprises a, c, g, or t, or includes no nucleotide
tgccgagaaagtatccatcatggctgatgcaatgcggcggctgcatacgcttgatctccattttatttagatgagagaacagaggaagagacccttccaaggtcactgggtcagcccagtgagggcaggcaagtctgcatggctggaggccagctcttgccgtagggctgagcagggagcttcaggtgtgtagaaggagaggggtcagctggaggtcctccccactctcccaccacctctaggccctgggccctggggccaatggagaaaggaaatggcccgctgtgggtgaccttctattctggtccccttgagtggcttgagtggctacctctcctgttctgagaagtgtggggctagggtgagaagcaacaaagaaccttctagtttcttccttcacctctctctctctctctctctctnbnnnybtctctctctctctgtctcatccatccatccatccatccatccatccatccatccatccagtcatccatccagccagacatccttctctatatctttgtcctggcaagaggcagggttgggggggctttggagaacagatgccaccatatcctcacagccaaaaccccttaggaaccctacgaacagaaaagctcctcttattacagttagattctttccacccagagtctaagctctgccccagcctgggcagacccacctgggggcttcctcttagcctctggacacatccattacacacttcccaacccgcagatttggggagctgcatggctgttgggaagccagttcctccactctttccattagggactttccagtgcagaggccccatcaccccatcactctggcccccgagggcaggtccgtgcctccctcatcagtgggggaccctatccttccctggccatattatgcaccccctttactccttcctgtctcagt

SEQ ID NO: 3026 - DNA, 871 bp, Canis familiaris
  misc_feature (55)..(57): n comprises a, c, g, or t, or includes no nucleotide
atggggagcaggtctgctcatgagggcaggagtcataaaatcattttaaagcgtnnntactatattgttctgtgtgttgattttatgttctgcacaaataaaactttattgaaagaaagaaagagaagaaagaaagaaagaaagaaagaaagaaagaaagaagaaagaaagaagaaaaagaaagaaagaaaaaaaagaaagaaagaaaagaaaaaagaaagaaagaaagaaaaagaaagaaagaaagaaagaaagaaagaaagaaagaaagaaagaaagaaagaaagaaagaaagaaagaaagaaagaaaaagaagaaaaagaaagctagctagctagcttagctgtttgggaaagaggccagtgatgtcaaagttagaatgcacttatcaaagtagacagtatttaatgtattgggagttaaataagatcagagaaaaatccttcacaagattgtttgtccctgggcctggggcttggaatatcagggtttaatctaactggaccatataagtccatgttctcctatggttcaagtcgctatggagagcaatgacccagacagacactctggcatatgaagttgtcatggcctcttgctttgagccacttctaatccttccccccttgttcaagaccattggtttcatgggcaggccaggcatcaagttgctgtaagtgacgcacgctcatggttctggtggcctctctccctcagcgaccgctggccctgtcggtggtgagccagatgaaggacccaacctttgcaacattcatgtaccagctcccctgtgggaagcagactgccttcttctcgtcccagggccaggagtacatggtggtgttctgggacgggaaagaggaatccaggt

SEQ ID NO: 3027 - DNA, 2739 bp, Canis familiaris
tgcaaaaaagtcatactacatgtcccctccaaactagatgctgagaaatttgtcggtagagttaacctgaaggagtgctttcagtctgcaaatctgattcattcgagtgatcctgatttccaaattttagaagatggttcagtctatacaacaaatgctgttttgtcttcagaggagagaagttttagcatattactttccaacactgagaaccaagaagaaaagaaaatacttgttcttttacagcatcaaactaagaaaagacattctaaagaaaaagttctaagacgtgccaagagaagatgggctcctattccttgttcaatgcaggagaattctttgggtcctttcccactttttcttcagcagattcaatctgacaccgcacaaaactacactatattctattccataagaggacctggggtagaccgagaacctaagaatttattttatgtagagagagatactggaaatctgttttgtactcgtcctgtagatcgtgaggaatatgaatcctttgagctaattgcctttgccacaactccagacggatacactccagaacttccactgccactggtaatcagaattgaggatgaaaatgacaactaccccatttttacagaaaaaacttatgtttttacaatttctgaaaattgcagagttggttctacggtgggacaggtgtgtgcaactgacaaagatgaacctgatacgatgcacacacgtctcaaatactccatcatcgagcagttgccagcgtatcccacactattttccatgcatccggctacaggcgtgatcaccacgtcctcatctcagctagacagagagctaattgataaataccagttgaaaataaaagtacaagatatggatggtcaatatttcggtttgcagacaacttcaatttgcatcattaatattgatgatgtaaatgacaacttgccaacatttacccgtacttcttatgtgacatcagtggaagaaaatactgttgatgtcgaaatcctccgtgttactgttgaggataaggatttaatgaatactgcgaattggagagctaattataccattttaaagggtaatgaaaatgagaattttaaaatagtaacagacccgaaaaccaatgaaggaattctgtgtgtggttaagcccctgaattatgaagaaagaaaacaggtggacctacagattgttgtagttaatgaagctccatactcgaaagagggtagcttacgatctaccatgagcacagcaacagttactgttaatgtaaaaaatcaagatgagggccctgagtgtagccctcgagtacaaaccattcaaactaaagaaaatgtgccagtggggacagagattcaaggatacaaagcgtatgaccccgaaacaagaagtagcagtggcataaggtacaagaaattaagtgatccaaaagagtgggtcagaataaatgaaaacacaggatccattacaattttcagaaacctggatcgagaggcagagatgatcagaggtggtatatataatattacaattcttgcatcagacaaagatgggagatcatgtactgggacactgggaatcatacttcaagatgtgaacgataatggcccatcaataccaaaacacacagtggtaatctgcaaaaccgtcttgtcaccatctgcggacattgttgctatagaccctgatgagcctatcaatggcccaccctttgacttcagattggagaatattcctgattcagacatagaaagaacatggagattaacaaaaattaacgatacggcagctcgtcttttctatgagaaggaccttccatttggaacatatcgaatatctgtcagagttgccgatagacatggccggtcactcatcactccgttaaaagtacttttatgtgactgtgttactgaaaatgactgcacgcttcgcacagatgcgaggactggtggcggagatgtgagacttggaaagtgggccatccttgcaatattgttgggcatagcgttgctcttttgtatcctatttaccttagtctgtgggggtactggggcagctaaacagcccaaagtatttcctgatgatttagcccagcagaacctcattgtgtcaaatacagaagctccaggagatgacaaaatatgttccacggatggcttaacaacccatactgtgggcagttcggctcagcgagtgtgtggcaccatgggatcaggagtgaaaaatggagggcaggagagcattgaaatggtgaaaggtggacatcagaccctggaatcatgccgggggactgggcatcatcacaccctggattcctgtaggggaggacatgtggaggtggacacctgcagatacacctactccgaatggcataatttcactcagccccgccttggtgaagaatccattagaggacacactctgattaaaaattaaacaatgaaagaaggtgcaactgtgtaatcaagatgacaagcataagcatgctcaagactatgtccttacatataactatgaaggaaaaggatccgtggctggttctataggttgttgcagtgaacgacaagaagaagatgggcttgaatttttggatcatttggaacccaaatttaggacactagcagaagcatgcatcaagagatgagtgtattctgataaatctacaaaatccagtgactttatctccttccaaccaccacttttttcattaccagccagatttaaaaaaaa

SEQ ID NO: 3028 - DNA, 806 bp, Canis familiaris
  misc_feature (510)..(510): n comprises a, c, g, or t, or includes no nucleotide
aattaaaaaaaaaacaaacagatgcatcgctatgtccttcaatgccccagatagcgggctcaagactggtattcccagtttccagatgtagcctctgcagcttgtatggtgagtacatggcatagttcatattgtaggcttgccatggccaggtatgaactgcaggcaggcaaggtgttgagccatagaggtggcttgagcttctggtctgggctgtgacagagctggcacggaccccatctgtgtacctgtcccttatgagctggggaagtggggaatggagggtgactgcagtggggcccggcactagtaggaagcagtagtgttggaggtcggccctggtgtttcccctgaaagcctgtgcaaggagccaagatgggcccctacaatcctgttccccgccccactccccaactcctcctgcagcctgggaactcacctgtgcctggacctagaatgacttggtccattctatccacagacagggagcccggatgctagacttgaganagcttgctggtcacctggagagggaattgtagaactcacatttgaactcaggcctttgatgatttcattatatgtcactgtagtgtgtaagccccccaacatacacacacacacacacacacacacacatacacacaggcacaatgtctcccttacctgaatggctttaccagctacttgttccatctcaactaccactcaccaagtacctaccgtaattcttgacacttacataaatgccagccctgggaggtagcggttgttgcttttttttttttttttttttttttttattg

SEQ ID NO: 3029 - DNA, 270 bp, Canis familiaris
cacatttcttggaggtgttaaagtccgagtgctatttcaccaacgggacggagcgggtgcggttcgtggaaagatacatccataaccgggaggagaacgtgcgcttcgacagcgacgtgggggagtaccgggcggtcacggagctcgggcggcgcgacgctgagtcctggaaccggcagaaggagctcttggagcggaagcgggccgaggtggacacctactgcagacacaactaccgggtgggcgagagcttcacggtgcagcggcgag

SEQ ID NO: 3030 - DNA, 270 bp, Canis familiaris
cacatttcttggaggtgttaaagttcgagtgccatttcaccaacgggacggagcgggtgcggttggtggaaagatacatctataaccgggaggagttcgcgcgcttcgacagcgacgtgggggagtaccgggcggtcacggagctcgggcggcgcgacgctgagtcctggaaccggcagaaggagctcttggagcagaggcgggccgcggtggacacctactgcagacacaactaccgggtgggcgagagcttcacggtgcagcggcgag

SEQ ID NO: 3031 - DNA, 589 bp, Canis familiaris
aggttctcccaggtgctggacaccctggggagatgtgtcagtggaaccattactgtagctcccggtagaagtattcctccctttggaactaacacttctgggtcagcagcacataatgtcacagggacaggaaacagtttgctagtggaccccgagaggtatagtgagcggtgtvactcccatttctctttcttctttctttctttctttctttctttctttctttctttctttctttctttctttctttctttctttctttctttcttctttctttcttctttctctttctttcttctttcttttttctttcttttctttctttctttctttctttctttcttctttctttctttctttctttctttcttctttctttctttttatatttatttattcatgatagatgtagacagagagagaggcagagacacaggcagagggagaagcaggctccatgctgggagcccgacgtgggactcgatcccgggactccaggatcgtgccctgggccaaaggcaggtgctaaactgctgagccacccagggatcccctctttcttttttaaaaaaatattttatttatttat

SEQ ID NO: 3032 - DNA, 236 bp, Canis familiaris
acagagaaaaccagtccatcctgatcacaggagaatctggtgccgggaagactgtgaacaccaagcgtgtcatccagtactttgcaacaattgcggtcactggagagaagaagaaggaagaagctacttctggcaagatgcaggggacccttgaagatcagatcatcagtgccaaccccctactggagcgctttggcaatgccaagactgtgaggaacgacaactcctcccgcttc

SEQ ID NO: 3033 - DNA, 230 bp, Canis familiaris
acagagaaaaccagtccatcctgatcactggagaatctggggctgggaagacagtcaacaccaagagggtcatccagtactttgctgttattgccgccattggggatcgcagcaagaaggatcagacccccggaaagggcactctggaggaccagatcatccaggccaaccccgccctggaggcgttcggcaatgccaagacggtccggaacgacaactcctcccgcttc

SEQ ID NO: 3034 - DNA, 230 bp, Canis familiaris
acagagaaaaccagtccatcctgatcacgggagaatctggggctgggaagacagtcaacaccaagagggtcatccagtactttgcaacaattgcagccactggagacctcgccaagaagaaggactccaaaatgaagggaaccctggaagaccaaatcatcagcgccaacccgctgctggaggctttcgggaatgccaagaccgtgaggaacgtcaactcctcccgcttc

SEQ ID NO: 3035 - DNA, 301 bp, Canis familiaris
  misc_feature (276)..(276): n comprises a, c, g, or t, or includes no nucleotide
agatctaaacagccagctagagaggatcctgagtctatcccatagctgccaaggctaacttctacctccgtgctacccccgcccacaggagctgggtcaggagcaggtgactagggaatgagaggttaggaggagactttgcccccatgtgtttgctttctggggctgccataaataaccaagtaccacaaatggagtggcttatgcaatgcagtttgttgtctcatattctggaggctagaagtctgtaatcaaggtgtccggaggctatgctgnctctgaaggtgctaagggaagatct

SEQ ID NO: 3036 - DNA, 218 bp, Canis familiaris
agatctggagcctcagaggatttagaggacatcaaagtttctttatggcaggagatgtgattggcccagagtggtactcaagaaatatttgttaaatacatgaatgggttaaagaaaaatgggcaaatgaagacattactcattgttcaataatggtgggtgaatggattggtggttacgcatttctgatgggatagactataaagtcctccatgggg

SEQ ID NO: 3037 - DNA, 338 bp, Canis familiaris
agatctagcaactcaacctcctcaaggcaccaggcctgagaagtctccttccagttggggagcccgaggggccgcccagcagaggccgtcgtgtccaggcggggagtccccggacagggccacccgtgctccaactacccagcactgctgagggctggctgcgcagctgttgggcccccctagctctctaagactgttctttgtctcgagtgtcttcctaggcgaagagaaggaccagccacctctctcctttgtccctctccaaacccagcctcagctagccacgcctcagggggctgcttggaagtctagcttcagggtcctgcgagctccacccc

SEQ ID NO: 3038 - DNA, 257 bp, Canis familiaris
agatctgaacagacccgtccctaactccgacagcatctttaattctgtacatggacagtccacacctaagtgcaggggaagccacttccatcagcacagcagtcagctaaggcccaggtggagttgtcagctgctgagtgctcagtactctgctttgtgaggtgctgggggtgtggagaggtgtcggatgtggggaaatcagggcagattccaagaacattaagacttggtcctttgcctcctgaaacatgagatct

SEQ ID NO: 3039 - DNA, 359 bp, Canis familiaris
  misc_feature (159)..(160): n comprises a, c, g, or t, or includes no nucleotide
  misc_feature (173)..(173): n comprises a, c, g, or t, or includes no nucleotide
  misc_feature (295)..(296): n comprises a, c, g, or t, or includes no nucleotide
  misc_feature (330)..(332): n comprises a, c, g, or t, or includes no nucleotide
  misc_feature (334)..(334): n comprises a, c, g, or t, or includes no nucleotide
  misc_feature (349)..(349): n comprises a, c, g, or t, or includes no nucleotide
agatctgtgcctgatgccttctttgcacacctccaaacacttcactctactattggtgcccaggaaacacccatcacctccctgacgaactgattccttcaaagcaagaatactccaagaggcccctttgccatttctttatcaaaaataagcatcctnnagcaggaaggggnggtcctccttatagggcctcctttatctaaaggtggaggagaagtgcttccccatcccagccccagggagtcagggggcagggggctgcctccccggctcctctttctcagcagggggccannggcagaaaacctgctggcaccccatagcctcggnnnangctgggtgacatctncccaagatct

SEQ ID NO: 3040 - DNA, 885 bp, Canis familiaris
aaatttgagaagaatttttatcaagaacaccctgatttggctaggcgcacagcagtgagtaatttcacagggcttccttgggctgtaactcaacagtgacttttagtaaacagaaatttgaacagaggccttggaaaactcatattttctgatagtcgaggaagaggaggtgctttggcaagtggtatctttgaatttttctgtttagagtggttaaatataactacaatagatggatcttgtgctctgtaggttttctatatgtggatatagattttaaatggcccgttacagtttgctaatccttgataaacttaaggcctgctgactgcatattggtgaaggttgttatggtacttagtaggttattaaaatttgttttatagcaagaggtggagacatacagaaggagtaaggaaattacggttagaggtcacaactgcccaaagccagttctgaatttttatgaagcaaacttccctggtaagtgctagttcagagcactcactcccccccctttattaatttcaccctttttcttagcttcactaagtttactgaattactgttgctaattacagcaaatgtaatggatgtgattgcaagacagaattttactgaacccactgcaattcaagctcagggatggcccgttgctctaagtggtttggatatggttggagtagcacagactggatccgggaaaacattgtctgtaagtgtggaagaatttttgagttttaatatgtgattatgttagagaaaatggattagtgatataaggaaattagaagctttttaatttaacttttgttttgttcccccaccccaaatagtatttgctgcctgctatcgtccatatcaatcatcagccattcctagaga

SEQ ID NO: 3041 - DNA, 294 bp, Canis familiaris
gatggatggacaaggagttaggtgggtgggcggatggatggatggatggatggatggatggatggatggatggagaggtaggtgggtggagggggagacggatgggtggatggggagatggatggatggatggatggatggatggatggatggatggagaagtgggtaggtgggtgggtggatggatggatggatgggtgagaggaataacttgcctttctgtcttgcctgtctacatccacccatctcagtacattcctccataaggaaaaggcagtcaaccacataggaaag

SEQ ID NO: 3042 - DNA, 256 bp, Canis familiaris
aagattcttaaatagctcactttgggcccagtaggatgggaagacatagtccccactctcctcactcgctcccctcaggcacgctggcctgcgtgctgggccacacacacacacacacacacacacacaagtacacataactgagcctcaggacctttgctcttgtccttcccgccatctagaatgtcctttcccagatatccagcctacatgactttcttcctcaactaacccagtcttttctcaaatgtcatct

SEQ ID NO: 3043 - DNA, 456 bp, Canis familiaris
attgagctggggctgaagttgtgaactcagcatctttaggggccaagctggggtcacgtggactagagaactggcagagaagggcctgaggggcactagtgacaacgtcccatccagggcagccctcgctgcatactccccctgtctccatgcagaaagagggacagaagagacaggtcttccaaccttttcagcacagctggaggtttgctctgatgcacaatccttcaattaaaaaacaagtgatagttaatttaaatgtgtgtgtgtgtgtgtgtgtgtgtattctaatactttgggggaaggatgaaccccaaacaaactggtttgtagaaaacatttagcctgtgattgctggattatgctctacttgcgagctgcaacattaaaaatgctaaaacaagaccatggattaagtgcttaacatacgcctggcactgttgacatgtaggcttt

SEQ ID NO: 3044 - DNA, 253 bp, Canis familiaris
tcagagttgtgaattcaaatctcgtgttgggctccatgcttagagtggagcctactgaaagaaagaaagaaagaaagaaagaaagaaagaaagaaagaaagaaagaaagaaagaaagaaagaaagaaagaaagaaaagaaagaaagaaaaagaaagaaagaaagaaagaaagaaagaaagaaagaaagaaagaaagagaaagaaagaaagaaagaaagaaagaaagaaagaaacctttggccacttcctgcct

SEQ ID NO: 3045 - DNA, 641 bp, Canis familiaris
gggtggtaggtttcatgcagggagggtggtcagcaggcacgttggttgtgaccaattaaaatgtcaaccttaggtgagtaggacttgggtttctcgttgctcagatggatttggggtttcggcaggtgaaagcaagggtaaagcagtaaggaggaaagaaattggtgtcctaggcctgctgcagggggcttcagcacatgccccctgcctcctgtggaccacgcagcatatgggcgcaggtgcacgctctcctcaaagttgtctggtctctgctggagctgttctttggacaggcaagtcctggggccacgtgaatgtgatggtaagtgtgcatgagtgtgcgatgctgtgtgtaggggatgctgtgagtgtgtgtgtgtgtgtgtgtgtgtgtctgtctcactcagcctgtccacttttccactggtaaccatatgggcctccaggctgcttccccatagacctggattagtccccctcctgcataggccagagccccagcactaggtgagtactgagtgcagagacagcctggaaccctgtgttcttgcctccaccttggcttctgggcctgagaatcaagtctgtttgttcaggttcactgtgggggcacagaagagctccggcatcccttcaagtgt

SEQ ID NO: 3046 - DNA, 297 bp, Canis familiaris
tgctcacctctggatggaggatgatgctaaggtttgggaacttttactctgagctacttgtcgattttgtatgagtgtgtgtgtgtgtgtgtgtgtgtgtggagaaaaacaaacctgttggttgggactctgtgctgagcccatgaattgcagacatggagaggccactgggccatgggaaaccctgggctgggccatctcacattcctgtgtggctctgtgtcgggaaagagcttgaaccaggagcgagaacctggtgttagtgtttgctctgcctcacactggccctgtgcaagg

SEQ ID NO: 3047 - DNA, 406 bp, Canis familiaris
tttatcaattgccaagagttatctgttctttcttcttcatagccttctctttctttccctctgcattagggtttctcaagagaaacaaaacaaaaaaatctctctctctctctctctctctctctatatatatatatatattatatataatatatatatagttgacctttgaacaatgtggaacttaggggcaccagcctcccacatggccatatatcacatataattttttactccccaaaaacttaactgctaatagcctattgttaatggaagccttatcaataacataaaatgttgatgaacacatattttgtattttatacatactatatatatatatatatatacagtattcttttttttaaagattttatttatttattcatgagagacacagagagac

SEQ ID NO: 3048 - DNA, 734 bp, Canis familiaris
gtgtgagtgtctcagcacttagggtggccctaaactcaggacagggcttctatgagaggcacagagagcgcgccacacacacgaaggcaaacgcgggacacggctctatgggccagatggacaacacgcccgggcgtggggggtgtgggggggaggcctggaccagtccctacaggtgagcaaacgagatgctcgtgttctggcagccggggctgtggcagtttgtcacatgggcagttccacgcccgtgatatttatcttgagttttcttttgtctggaacctgatgcatctaagggtctctgtttctccttcgacaaccccagctaagcacatgtctccagacccctctccatagcgggaccttctctccccccgacacacacttggcaaactgctatgcccagccacagtgggcagctcccaacagcattcaagcacacgcatacacacacacacacacacacacacacacgcacgggctgttgacccagcaggagtctggggactttgaggacagggtttgcaggaggttcgggttctgcttcattggtaagaggctctcactactgccctgcctgcaccaggcacaatcctcccctccaggggggtgagctgcactcagtcatctggggccatgctaaggccctggggcagggtgggctctgggaggggggttgtggtcaggcctggatgtggccgccctgttccatccatgccactggcctaaaagga

SEQ ID NO: 3049 - DNA, 591 bp, Canis familiaris
ttccattcttttccccccacgtatttctcaggaactgtcccacaatttactgcctgtagcccagacccctttgtctttgtttaaaaagatataagcttttggtctaatggcttcttcaggcattcattttccttctggagactcccatgtccacgcaaaaatattaatgcatttgtaagctggtctccatgtaattcttaggccagctgcagcaccgaagtgggtagaagggagttttcttccctcacacattctttctatacaacactggaacagtctgcaacacagacaactgttccaaggacattttttctctttctttctttctttctttctttctttctttctttctttctttctttctttctttctttctttctttctttctttctctctttcttctttctttctttctttctttcttctttctttctctctttctttctctctttctttctttcttctttcttctttctttctttctttttaaaagattttatttatttattcatgagagacacagagagaggcagagacataggcagaaggtgaagcaggctccctactgggagtccaatgtgggactcagtc

SEQ ID NO: 3050 - DNA, 576 bp, Canis familiaris
ccggagtcctgggattgagccccacaggggctccctgctcagctgggagcctgcttctccctctccctctgctcctcccaatgttgctcactcatgctctctctctttctctttctctctctctctcaaataaataaataatattttattattattttttttaaataaataatattttaaaaaaacacacaatagccacttatttagctcaacattaagcaggtcagtaatttaggttgcgcttagctggaaagttcttctggtctcagcaggctggaagctgattttggctgggttgttcacaaatcagagagacagatcagtggggggctggctggactaggatggcacatctcacatgtctgaggttggctggtggtcggctaggacaatgatggggaccaagccatgtgtctctcattgtccagcagacctgctgggcagggtttcaagaaagtgaacagaagcatacaatacttcttgagaccaaggactagaatttttctactgtcaattctatatgtgctgttggccagagcaagtcatgaggccagctcagattcaagtggggaggaa

SEQ ID NO: 3051 - DNA, 546 bp, Canis familiaris
ttttgcactgaccccctcgggtccctgagctgcggtgaggtcagttgagtcaggcatgagtgagcaagtgtgtgtgtgtgtgtgtgtgtgtgtgtgctgttgccgtaatccttccttttgggacccaccaaatcaatagccaagagaggccaaacctgggcctccaaagccttggctcctgccgcattccccccaggagcacctggcggtacaagcccatttgcccttttgacttctgaccccatatttcaggccagcagaggaaagctttaaacacggaggaggcccttggagcagggatgggtcaccatgcagggagggggcaggtagtagcccgggggaaagtaaagcatctatggctggaaacaagtccctgtagagtgtgctgactccccacaggtgtgcgccccaaggctggaggggaggggctggtgtccctgtagggccctcctgtatccacgggatagagacaggattttaagtaggagcccaccagagaggatgttttgtgtggccatcaggagcataagactttagaatcagccc

SEQ ID NO: 3052 - DNA, 271 bp, Canis familiaris
agatctgagcgagtaggtggctaaacaaacatttgtggagttcaggggagcgatctagctggaaacacaaatatagaagtcattagggtgtggatggtatttattaagccccaacattgagtgaaattaccagagagtcaagtagctaaagaggtgaggtctaaggaccatgcccggggcactctaacatttagaggtcaaaaaaatgaggagggtggcgcctgggtgactcagtctgttgaactcttgattttagctcaggtcaagatct

SEQ ID NO: 3053 - DNA, 314 bp, Canis familiaris
agatctcctgttgtcccttcataacctgttttcctaggttcgaagtgaggggcagtctccccggacaccccaggctctccaaaccttctgtagcctggaggtaagtggttgcctaaggctcacaaaatcttttgcaaacccaggtggaggtcccccatgtgactcccaggttgtcccagggctgtacaataagggttaactcagctggcttgggacagtcgggcttgcacactccaaagaaaggactggcccttcttggtctcctgtgacgtaacttatgagcccctggaatgttgtgcctgataagaagatct

SEQ ID NO: 3054 - DNA, 352 bp, Canis familiaris
agatctactggcactgggtagagtttgatcttattcctttgaatggtgcataaccctgcatttcctggacatggaacaaatttttttttttaacacagaaggtctctcaggaactttgtgggccttaccagccccatttgtttttctttcatgagttaggtcttcctgagaaaggtgcacgtgaacctggccacagatgaccagcatctcgtgctcaagcctgcctcctgtctgctgaaactgaacactcactctttttttttaaaagtaggctctatgtccagcctggagcccattggagggcttgaactcacgaccctgagctcaagacctgagcttgagctcaagatct

SEQ ID NO: 3055 - DNA, 352 bp, Canis familiaris
agatctctgctactccacagtcattgctcctaaagctctggctattttcttgtccaaggacaagaaaatttcatacaatggccatgcagcatagttcttttcctttgctgtgttgggactgaaggccttcttctggctgtgatggcatatgatcacttctcagccttttgctcgccattcctctatcctgtccgtatgtctcaacaggtttgtgttcacttagtaattggctcctacatatgtggaggcatcaactccatggtccagacagggttcaccttcagcttgaatttctgtggagaaaactgactggaccacttcttctgtgatgtcccagccctgatcaagatct

SEQ ID NO: 3056 - DNA, 347 bp, Canis familiaris
agatctgcatacacatgacaactttcacatgtgctcgctcagatacgcctgtgcaagctcatgcacacacatgcccgtgccaactaacatgtgtgcctggtgaacatattgatgcacctaaacgcaagacaacagatactcagggacactttgtgtgcaaaactgtaaagaaagtgaaagttagactataggcccttcgtctcactcactgtgtgtggccgcctccttcccagtcatccaggcatctaaggtgtttgggggctgagaagtttctcactggcacgctccccctcactccccagggcagccctccatggacagtctcctagctctaaccttcaagatct

SEQ ID NO: 3057 - DNA, 445 bp, Canis familiaris
agatcttcggagagacctcagctcactggggcctggagcagacggggggagctccctgaggtgggcgtggaaagtcctagatggataagctccgtgtgcagtgcctctgtacttagttacactggcttcctggcccgcggctgccacttaggtctagcagacgctgacttcatcttactcttgtcaggaacatgtcacctgactcagtctatagtgtctgcctttctctgtcacctttgacgagtggggcattacctctggggcttgcagacccgtccaggtgacaggaactagtgaggcttgccccagagacacgtgtgcgagtacaggtggttgtaagctctgggcacgtataacccccacgcgctacgtggagaccccaggtcaagcgcccttcttcacagtaagaacctggttaccacgcccccatcctccagttagatct

SEQ ID NO: 3058 - DNA, 233 bp, Canis familiaris
agatctgttggcccctagggctggaaggacagtggagtcctgaggccatacccaagtccaagaaaacaacagttgtaaagaagggtgttcaggtgatccagtgttgtccattcagattgggcacgatgtgcaccaggggtatgtcaggaggaggtcaagcaattgatttttttaaaaccattaggaacagactcggggtggtggttggctctaaggctggcaagaagataatg

SEQ ID NO: 3059 - DNA, 183 bp, Canis familiaris
agatctcatctccagctgccagagcaagagtaaaagttcaggattactagagcacatttccagggaaggagggtgaaggggttggtgggtgagatattttttgctgagaggcctttgcatggctattaccactgcttgtaagtgtttcctttactgtagcaggggctaattgctccaagatct

SEQ ID NO: 3060 - DNA, 399 bp, Canis familiaris
agatctaatttcacggtccctaaaatccatactttacaagggctccgtgcagcgctctgggctttttctgtgaaactgcgcaacagtcaccgccagttccagaacattcccgtcatcaccccgaaagaagccacacctgtacccattcgcagtgactccccccgcgccccggccctgccacccctgccacccactaacctgccgtctgcctgccccgggtgtcgctgcgtgcacagaatcattacacgcgtggcctgcggcgtctggcttgctccccggagccccgggcggccacacggagagaccacggtccgtgcaccccttcatccgcttgatgcgcgtggcggtgcttgcactttctggcgagcgtgaatgaagctgctgctcctttttcctaac

SEQ ID NO: 3061 - DNA, 182 bp, Canis familiaris
agatctcaaagtccaaagggaagcagggacctggacaaattgcattaactgattgtatgcagtgatagaacctggaagcttctgtcaccattggtaagttgtctgttccttaactctgatcgtcacgtccctttagacttctcttgccacctcaggaggttccaacacagtctgacagatct

SEQ ID NO: 3062 - DNA, 280 bp, Canis familiaris
agatctccggttgaatgttgcctcagtacctcaaaagcatcttcaaagagttgtcccagcttgtcttgttcaacacaggactgctagaacaataggagaaccctcaagctatgaaattattgaatgaacttaatttctctgacatacatgagggtttctcacccatagcagtattgacctgtgaggttggttaagtatttgctgtggggagtctgtcatgcgctgtagggtatctaccagcatcccttgtctctacccactggataccagcagcagatct

SEQ ID NO: 3063 - DNA, 205 bp, Canis familiaris
agatcttgtggaccctttggctctgcatgaccaagatcatcgtacggaggacaccaactctgagagataaaggaatcacccaaaggcagccagctcgtgggggtcagaacttcgaggtatttacggggtggcctaaatacaaacagaaggttttgaacagaatgacctttgctaagggatcatgggataatgagacaggagatct

SEQ ID NO: 3064 - DNA, 307 bp, Canis familiaris
agatctgggacctgtgggcaatgctaactcttctagtgacacagagaaaccctctatggactttgtactaattcagagccattgaactggtcacaaagattgaatggtttccctctctccttccctttcttctcttctttattccttcccccatccccctctccaactctttttctgttttcaaacactttaggcaacaattgctattgagtagtattaagttgctttactgcagaaaccaaacagctgtcagactgaaataacattcacttactgctgaccgggtctgaagccaaacaagagatct

SEQ ID NO: 3065 - DNA, 242 bp, Canis familiaris
agatctgttcctcagaatggggtgaggggaggggtggggaaggcccaaagtatccacatctggatgaagccaaggttgagaacccctactgaggaggcattttaagaaaaaggaacgggttgagcaaaggcatggagagtcaaagcagtgaatgtctgaggaatccatcacaggtaattaggtatggctagaatgataggtgccgtttaactcacatgccaggacgatgacaaacaagatct

SEQ ID NO: 3066 - DNA, 335 bp, Canis familiaris
agatctgatttctgccaggagcctcatcaggttggcccctgctcactcttgcttctgtccacctgattttcttcatcctcacggctcctccatcagtagccacttcgccttcttttaaagcccagcccagaacgtgtttcccaggggcatctattgacctgtgcctcgcttcctgtacctgtgcctctccaagtatccaagtggcagctgaagtatatggaaaaggattttacacattctctacttttgagtagtcctattaagccttgtaacagcgacttcacagcatgtcctctcctctccaacacctctctgaggtggctacgggaagatct

SEQ ID NO: 3067 - DNA, 441 bp, Canis familiaris
agatctggctcattggcatggaggacgtgtcccggaggggaaagagtgctggtgacaaggtggagaacagcaggaaggcttcctgggggcggaggcctgggagggccggagggtgagtgtcggactcgcggccagacaagccggcgcagccagggcctctcgcggggccttgggctttgccttggggttttgcctctagattcttgcccttccctcctctggcctctttttgtgacacgtgttgaccagttggttaacccaggcaagcggtgttgggtgacggccaaggaaacccccgcgaacacgaagcacccccagaacaggcccgggaaagtgcggcggcccgtgtttggcgagggccacggcaagctcctccctgcccttcctcggggcccgaggaccccaggggacacacaggacacacaggaaggactcagatct

SEQ ID NO: 3068 - DNA, 190 bp, Canis familiaris
agatctggtgactctggtcctcacttgggcatcattggtacctggtgactctcttccacacctgagcctcacctgcaaatgttgactctggaaccgctctgggcctcaccctgaccgagtgactctggtccccatctggatgtcacatggacaaggtgattctggtaccccctaggcctcaaacagatct

SEQ ID NO: 3069 - DNA, 132 bp, Canis familiaris
agatcttcagggtgagttggcaacttgcagattcagaactgccaatggtttagttccagtctaagtcctaaaatctaagaaccaggaagccaaagatgtagttcatatccaaggccaacagaaatgagatct

SEQ ID NO: 3070 - DNA, 388 bp, Canis familiaris
  misc_feature (297)..(297): n comprises a, c, g, or t, or includes no nucleotide
  misc_feature (299)..(299): n comprises a, c, g, or t, or includes no nucleotide
agatctggggtgtaggggtgggtggggaggccgaggggcccccctgtctcagtacaatccagggatgcaatgcaggcttgtttaatctttgtgcctgaatctctccatgtctagaaaacaaaacaaaactgctgcaatttttcacgagtgtatggtacccttcttgtatgctgtcaggtaccacctggccgcagggggtgttcaggcccttcatagagagggccatttggctgacctccttgcaggggagcgagcggtggtgggatggcctttggactttgcgcacaagggctgtcngngcattgaggagatttgggggtagctccctgtaggcccaacaagagtgaaaggagggggcaccacatgttataaaagcataaaaagatct

SEQ ID NO: 3071 - DNA, 137 bp, Canis familiaris
agatctgggcacgaaaggacactacaaaccatgtgggaagagaggcaggaagaatagggaagaaggcctccaaagcgaggagtttggacttctgcagaaatggaagatccagagtaagttgcgcagatttgagatct

SEQ ID NO: 3072 - DNA, 294 bp, Canis familiaris
agatctcctgtagagaaagacatcacaggatggggacaggacttgccttccctgagggatcgtccaacatgagcactcagaggaaatgatggtcagcagcagtggtgaagagcacaggatgtccaggcggggacgcaaaagtcactgcctaaacccagtgcttggcttctcaaccaagtgaagatttggggatgtttccatcctcttaaatatcctgacttacgtgtcatggtattcagggacctgccacatggagactgagtctgcatgggggaacagtgagcacttagatct

SEQ ID NO: 3073 - DNA, 301 bp, Canis familiaris
  misc_feature (245)..(246): n comprises a, c, g, or t, or includes no nucleotide
agatctcccaagttgactgaagcagcaattccaaattcagaattcaaggcggaaaagtgcttctgagcaaatgtcccctactgcatagtttacatcctcccctcccaacaccccgccaagatggtacttacaccaaaaaaatatactgttccttaccatatgtgtattcccttcaaaaagaggaaaaccaagagagcaacatttctaatacaggtaagatggggcaggctttccatagaagtggnntggagagtctttcaaggattcttcaaactcagacgccacagccttggaaagatct

SEQ ID NO: 3074 - DNA, 283 bp, Canis familiaris
  misc_feature (223)..(224): n comprises a, c, g, or t, or includes no nucleotide
agatctcgtggtcctggaaaatgatccaaagggaatggaagaaaggcaggttggaggcagcctagtcttgccctgtgtccctccccactggattgtcagccttgcaagagcagggaccgtgttcggcatgtcatctaagttcagcacctagctcagtgcttagtacacagtagcaaatgttcacagaaagaagggaggctccgaagggtggagggagcaggannggctgggtgatgcaggcctgcacaggtgacatggccgacaggcatcactgcaaagatct

SEQ ID NO: 3075 - DNA, 265 bp, Canis familiaris
agatctgtgtcctccccccagaggagatgtggctgggaaagccagcactaagccatgcctccctggtggggctgtagggctcagggaacactgtgacccacgtgcactgaatggggtcaccgcaggtggctgttctatctgggacagtgatacaccgaggaggcttgggggtgctggggccttgaacagagcaccccgtccctcccctgatggccccggccacccctcaccatgctgcaggtagttcatgaggctcgtgccatgt

SEQ ID NO: 3076 - DNA, 426 bp, Canis familiaris
ttacttgatgtcgtgtccccaaagcccagcacactgctggctcccagtggtgctcaatcaatgttcactggatggatggatggatggatggataatggataaatggatggagacagagaaaaagagaaggatggatggacaggtaggaagaaagcggctgagtcactcacagatgagcacgtgctcctcgccgactataaggtgctgggactgctgctttcctgagaccctcatgtgattcctcacccactcccttcctgtggtcactcctcactcctgtctctatcactcagccggagaccatggtgagaggcaaagagcaaaccctctggtgccagcaggcctgggttcaaatcccagctaaagcctttatagctgggcaggcagctcctgcacagacacagcacctccgattctccatctcta

SEQ ID NO: 3077 - DNA, 1014 bp, Canis familiaris
ggaaatgttgaatactcatactcttcctttttcaatattattgaagcatttatcagggttattgtctcatgagcggatacatatttgaatgtatttagaaaaataaacaaataggggttccgcgcacatttccccgaaaagtgccacctgacgtctaagaaaccattattatcatgacattaacctataaaaataggcgtatcacgaggccctttcgtcttcaagaattcgcggccagctcgagctgccagctttgtgcaaataacccgccgatgccaaggcacctcggctcccccccrcacacaaatcctgtgctctcacacacacagtcaccatccaagaagtgcaagctggtgcgtctgagaaacagagtttgctaccttcccacaaggagttacatgccataagccccaagccagcagctatttggggctgattagaacctggaatcagaagaaagaaagagagagcagtgagagagaaagagagagagaaagaaaggaaagaaagaagagaaagaaagaagaaagaaagaaagaaagaaagaaagaaagaagagaaagaaagaaagaaagaaagaaagaaagaaagaaagaaagaaaggaaggaaggaaggaaggaaggaaggaaggaaggaaggaaggaaggaaggaaggaagaaagagaaagaaagaaagaaagaaagaaagaaagaaagaaagaaagaaagaaagaaagaaagaaagaaagaaagaaagaaagaaagaaagagaacctagaatcgattcattttgttgcatgggggaaagaggggctgacgaggcaggctggtaaaatccttactggcaaggctgcctgccactttgccaaggtccccaccagcccaggcacagagacacagcactggttaacggattccttccttcctcccaagttgtaaactggcagtctgtgggccacacggagcttgcagattcgttttcgttgggctcatagagcatagctggaaaaattgcagtttattgccactattta

SEQ ID NO: 3078 - DNA, 201 bp, Canis familiaris
agatctttcccctctgctcaggctctcctctcccttgtctggctgccctccagtgaagatgcctcagtcaccatcctcagaccctgacacacacatggtgccactctgcatagggatgccccctcacccttaggggctctgactcctgttttggtcatacctccccttgcatggtggccctcttcaccttgctggagatct

SEQ ID NO: 3079 - DNA, 307 bp, Canis familiaris
agatctctcgagaaactccaacaccccacagaggctagcacctctttcatgttcttaccggtcggatagctggcatctcaacaatcacagcttgcgcgacaatgtgcgtcttaaaataactccctgaaatgtttcagtggtgcctgggccttgaattttctgtgggttcaccacccatcctctcccttgcagatgttccagcgaagtctacacggagtcctgcagcagaggcaagtcttctcgtgttaacattatatcagtgtaatgggcccattttcctggtgtgaaggaaaacaggaacagatct

SEQ ID NO: 3080 - DNA, 285 bp, Canis familiaris
agatctcgggatcacgccctgagccggaggcagatactgagccacactgagtcactcaggcatccaagtttcttttttcctattcattttagtcgcttctgtatttgacgtttcccttatttcaattgctacttagctgtttgtgtttcagactgagacatggtatggctgccttggatctctgcgtgccttaggtttgaggttagccccactctctgcatcattagtctgggccattcattgcgatactcacaactgtcaaattctgcacatcagtgcagatct

SEQ ID NO: 3081 - DNA, 322 bp, Canis familiaris
agtgacagtggatcatcataagccaaagcaggtggtcacttgagttgcagtgttggacccgatatcgttgcattgcttccgcaaattaatgtatcccctggtactgatatatagcttggatctggccaaatgcttttttctccatctctgctagaagaccaaccagaagcagcttgctttcagctggtaaggccagcagcacaccttccctggtctatgtcagggatgtatcaactctccagccccgggtcataacttacttcacagggatcatgaatgcccctcccttcccgaagatatcacagtgatttattacattgat

SEQ ID NO: 3082 - DNA, 321 bp, Canis familiaris
agaatgacactgaatcaccataagcttaactgggtgatgaattaaaattgaagctgctataccatatatggtttccttgcttgaacaaatgaacacatccaagtatgtacctattgatatgtttttctcctagacatcttttagaagaaagcaccagaagcagcttgtgtttggttagcaggaacagtagtacatcctacttcaggagtatataagttctccaaccccatgtcataatttaatttcacaacttatttcctgtgtcaggaatttgatcacttttccctttcataagattttgcactggttcataacactggt

SEQ ID NO: 3083 - DNA, 311 bp, Canis familiaris
ggaataacaatgtattattgtatatttaactgggtggtaattctacttgcagctgctattctagatgtggtttcacagcgtaacgaaattaacatatcccctcacacatggtatgcaattactgatctgtcaaatgctttcttcttgatacttgttagtaaagactgccagaagcagtttgctttaagctgctatgagcaatactccttcaccatcctatcttagggctacatcagctcccatccttatgtcataatttaatccataaggatcttgaccatcttttgctcccactggtcaattatattgat

SEQ ID NO: 3084 - DNA, 325 bp, Canis familiaris
agaatgacaatggattatcataagctttaccaggtggtgattctaattgcagctgttgtaccagctgtggtttccttgcttgaacaaattaacacatcccctgatacctggtatgctgctattgatctggcaatgcttttaaaaaaaaaaatctactaataaagaccaccagaagcagttttcgttcagcaggcaaggccagcaatatgccttcactgtcctacctcagaggtacatcaactatctagcattgtaccacaacttagtgtacaaggatcttgattgcctttgccttccacaaaatatcctggtccattacattgat

SEQ ID NO: 3085 - DNA, 327 bp, Canis familiaris
aggattacactggatcattggaaattttaaccaggtgatgaaagcagttgcagttgctgtattagatacatactcattacttgagcaaattaacacattctttggtaaatgctatggaaatgttgatcttgcaaatgcttttttatctgcccttgttaataaagaccaccagaagtgtttgctttcagctggtaagaccaacaatacacctttgttgttcttcctcagaagtatctcaactctctatccctatgtcataaattagtttacagggatcttgattgcctttcccttctacaagttatcacactggtctattacattgac

SEQ ID NO: 3086 - DNA, 641 bp, Canis familiaris
aggttcctgttagtgggggctgtttccttccttgcctttcccctccccggttgtacacacacattctctctctcaaataaattaccttagaaataaagtaaaataaaattgggatatttcagatttttgaaaaatccagattgcagtattcttttttaaaagatcactatttggccataccagttcgcatttctgcagaacagttagctggagctgagtgcaactgccccctttagataagacagaggatctctccagtttgccacagtctccaccactccctgtgcatcccagaagtaccaagtgccagttgccatttatcgtcatgattttgctgctcttattctacttcccattcttgatttctctgattctcttacagttggcttgccttctgcatgtgtgattatctgtgagcctcagaaagccccttagtttgcaacttggtctaaacctgggcaaaggggaagcgcatggtagtttcctctcacctagtggggtctctttcctatctgattgcaggggcggcaggagatcagccggggggcaaccccagcccggccgggggcgcacctgcatccaagtcctgctgcatccagtaacgctgcctggcatcagctgcaccgaatggtaccaccctt

SEQ ID NO: 3087 - DNA, 683 bp, Canis familiaris
  misc_feature (5)..(5): n comprises a, c, g, or t, or includes no nucleotide
  misc_feature (7)..(7): n comprises a, c, g, or t, or includes no nucleotide
  misc_feature (21)..(22): n comprises a, c, g, or t, or includes no nucleotide
  misc_feature (663)..(663): n comprises a, c, g, or t, or includes no nucleotide
  misc_feature (668)..(668): n comprises a, c, g, or t, or includes no nucleotide
  misc_feature (671)..(672): n comprises a, c, g, or t, or includes no nucleotide
  misc_feature (677)..(677): n comprises a, c, g, or t, or includes no nucleotide
tttgnanccgttgcctgcggnngactctagaggatcagtagtttgatgcctgcatttggcccagggcatggttctggagacctgggatagagtcccgcatcagggtccctgcatggagcctgcttctccctctgcctgggtctctgtctttctgtctctctgtctctctgtgtgtgtgtctctcatgaataaataaataaatctaaaaaaaaaaacccaaatccacccatattaaaaaaagaagtttctatgaacagaaagataatgataaaagaaagaatcttgggacatcagaaaggaagaaaaaacaatataaagagtgaaaatacaatcaaatacaatgcatttcccactgtaagtttcctaatttatgactgacagtgaaaaattagaacactgtctgatacacctattatgtatatgtagaagaaatagttgaaacaactatattgttaatggggaagggtaaaaggaggtaaagatttccatacttgacttgaccaggtaaaatgctgacaccagtagcttatgataagcggatgatagatagatagatgatagatagatagatagatagatagatgatagatagatagatagatagatagatagatagatagatagatagactgacagataaacaggcagaatgatcccacggcnaccgngcnngaatncgtaat

SEQ ID NO: 3088 - DNA, 649 bp, Canis familiaris
  misc_feature (39)..(39): n comprises a, c, g, or t, or includes no nucleotide
  misc_feature (48)..(48): n comprises a, c, g, or t, or includes no nucleotide
  misc_feature (50)..(50): n comprises a, c, g, or t, or includes no nucleotide
  misc_feature (57)..(57): n comprises a, c, g, or t, or includes no nucleotide
  misc_feature (61)..(61): n comprises a, c, g, or t, or includes no nucleotide
  misc_feature (85)..(85): n comprises a, c, g, or t, or includes no nucleotide
  misc_feature (578)..(578): n comprises a, c, g, or t, or includes no nucleotide
  misc_feature (631)..(631): n comprises a, c, g, or t, or includes no nucleotide
  misc_feature (637)..(637): n comprises a, c, g, or t, or includes no nucleotide
  misc_feature (647)..(647): n comprises a, c, g, or t, or includes no nucleotide
gccaagcttgcatgcctgcaggtcgactctagaggatcnccgggtacngngctcganttcntaatcatggacacacctgtttctngcccacctccccaccacaaaaatattagctcaggtctgtgctatgaaaggcccacatctcagattacctttctaacttggactaattcctcactgagagccaggtgggttaaatgcagactctttcctcaggtaagaagtctgaactttattctacaggcgagtgacatttcaaactatgttccatagacaggggtttagagaggaggaaataaagcagagagcaagggacaaacaagtgctgtctgagttctttacctgagcttcaactgaagtacctgtgctcattcctgctttaaggtgagacttatgaggtaaattttgcccaacagaggacatgagaggaaggaaggaaggaaggaaggaaggaaggaaggaaggaaggaaggaaggaaggaaggaaggaaggaaggaaggagagaggaaggaagatgggaagaagggaataaagggagggaggaagagaggaaagagatggtaacttggaggcatanaatttgaaaggttttatacaaaggagtgaaatgatccccgggtaccgagctcnaattcntaatcatggnca

SEQ ID NO: 3089 - DNA, 951 bp, Canis familiaris
  misc_feature (15)..(15): n comprises a, c, g, or t, or includes no nucleotide
  misc_feature (20)..(20): n comprises a, c, g, or t, or includes no nucleotide
  misc_feature (23)..(24): n comprises a, c, g, or t, or includes no nucleotide
  misc_feature (28)..(28): n comprises a, c, g, or t, or includes no nucleotide
  misc_feature (588)..(588): n comprises a, c, g, or t, or includes no nucleotide
  misc_feature (936)..(937): n comprises a, c, g, or t, or includes no nucleotide
gcaccgtgccgggtnaaagncgnntccngaggatcacatacaactaagcattttttcatcagtgattttaagtattccacatgttttcttgaaacttttctttcatgaaaaaatacattgttctcgatctaacttgaaatacagaaaacttccaattctgctaaccgaggaagccactttctaggtctttcactaacttatcaattacaaataccataattaaacaaatattatatatttattggctataggcattattttcaattatgttcaattactttaaagtagcctatctacccttttctactactttgtccaaatttgtgttggttgcattattattattttagttgctctattactgttctttttaagatacagtagaactaaatataagtgaggcagcactgtgattgatgcacaagtaggaaaatatgaatgaaaacacagtgcatcaaaagtcatgggaggcagtgaagcagtacttagagggaaattttgcagcatttaacctttattaaaaaggaagaaagagaagaatggcttcatatcaacaaagtcagattccctttaaataatttttttcanaatagggaaaataaactcaaaataggacaagaaaagagggaagaaaggaaggaaggaaagaaggaagggaggaaagaaaggaaggaaggaaggaaggaaggaaggaaggaaggaaggaaggaaggaaggaaagaaggaaggaaggaaaacatcacggcaataaatgaactagaaaatagaaaaagaatagaaaaaaatcacaatcaaaagctggatttttgaggagattgatgtaaaggataaacctctgaccagagtaataagaaagattagaaaaattataagaaatataagaaatgagagaggtgaaatcattacagatactactgatccccggcgaccgcccanngaatccgtaatcct

SEQ ID NO: 3090 - DNA, 789 bp, Canis familiaris
  misc_feature (2)..(2): n comprises a, c, g, or t, or includes no nucleotide
  misc_feature (5)..(5): n comprises a, c, g, or t, or includes no nucleotide
  misc_feature (787)..(787): n comprises a, c, g, or t, or includes no nucleotide
gncangcttgcatgcctgcaggtcgactctagaggatcaaaacaaaatgacacaaacttcagaagtccagaggagcttgggtcctagattatttcctttaaaaagcatctgaattgagtgtcttgaaaacacaccaaaaacaataaagactgaaaaatagggagctacaacaacacgagaagcaaaaaccctccgtggtcaataaaacaaaaatagccatagcctcaaaccataaacagtcatgtgtactgtgaaatgctgtggagtctgtaccaaaatgaagagagaatctgagccaacacaaacttcagacatggaagaggaaagagatttccttaaaagggtcatagtcttgacagtgttatctaattatttgattaaagtattaggccatgaaaatgggtgcatcctgtgagtaggaaaatataccagaaattttatcccacagaaggtcaaggaaggtggcatagaaggcaaaaccatttttctgtttatttccctgtcgtctagtttaggaaaggtttcaaacactgaagctgcatgaagaagggagaggagacagaaaccactagattccaatactaagagctgcgttgctgatagtaatacagacatagatagctagatgatagatggatagatgatgatagatagatagatagatagatagatagatagatgatagatgatagaatggtcctattcaagaattagttgtagtcaaagaaagataagtagggattacagaagcacaataggatccccggtaccgagctcgattcgtatnct

SEQ ID NO: 3091 - DNA, 1284 bp, Canis familiaris
  misc_feature (5)..(5): n comprises a, c, g, or t, or includes no nucleotide
  misc_feature (7)..(7): n comprises a, c, g, or t, or includes no nucleotide
  misc_feature (11)..(11): n comprises a, c, g, or t, or includes no nucleotide
  misc_feature (14)..(15): n comprises a, c, g, or t, or includes no nucleotide
  misc_feature (18)..(18): n comprises a, c, g, or t, or includes no nucleotide
  misc_feature (21)..(21): n comprises a, c, g, or t, or includes no nucleotide
  misc_feature (657)..(657): n comprises a, c, g, or t, or includes no nucleotide
  misc_feature (1254)..(1254): n comprises a, c, g, or t, or includes no nucleotide
  misc_feature (1260)..(1260): n comprises a, c, g, or t, or includes no nucleotide
  misc_feature (1263)..(1263): n comprises a, c, g, or t, or includes no nucleotide
  misc_feature (1269)..(1269): n comprises a, c, g, or t, or includes no nucleotide
  misc_feature (1275)..(1275): n comprises a, c, g, or t, or includes no nucleotide
gcacntnccgngtnnagncgnctccagaggatctatcttatctgcatggaaagtattggcaaataaaatgatatagttctcccacttaaatgagaatgtaacagatatcagtaccccatggcttcctatgtggttgctgacattttggtaaatattttctttcacttagataaggaaaaatgtgctttaaaataatattcctgctcttagatagttctggaagagagcaaaaatattttatttcttcattttgatatgttggtagcgatggttaacttctaagtccatttctttatagtgaacatttcagtgacttagagatacaacatcatcatcactgatttatagagtattgcacggtattagtgtgctagactgtaagtctaaatgtaagaccattattatttccctatctagaaaaactgagacataaaaccctatgcattaatgatgtaaaaataacctttaggatagttagttgtggtttaggtttaagcattctgatttttgatttgtttattagtttatgtacttccttttccattaactaatgtagtgaaagtgtgcaagtgttgtgtgtgtgtgtttttttttttgttgttgttgttgttattacgaggttagaaaaagaagcagaagttcgtaggttaggattcnccagagaaaccagaaccattagaaaatagatagatagatagatagatagatagatagatagatagatagacagataaagagacataagaggaggtttattataggaattgactcatgtaatgatggaggctgggaagtgccacagtctgccatcaggaagctagagaactgtgaaagccagtggtgtaattaggtccaagtacaaagacataagaagtggggggcaggtaatgtaagtcctggtctgaatctgaaaacccaagaaccaggagtgctgatgtctgagagcagaagacggaagtttcagctcaagcagagagagagagagagaaaatacccttcctctgcctttttgttctaattaggctctcagtggattggatgatatccacccatatttgtgagagccatctttactgggtctactcactcaaatgctaatctcttctggaaacattgttatagacacacccagaaataacattttgccagccttctgggtatccctttgcctggtcatgttggcacataaagttaaccatcacagttcatttatcatattaataaatcaccttcccagtagcatgaaaaagatcnccggcnacngagcantgaatncgtaatcat

SEQ ID NO: 3092 - DNA, 983 bp, Canis familiaris
  misc_feature (3)..(3): n comprises a, c, g, or t, or includes no nucleotide
  misc_feature (16)..(17): n comprises a, c, g, or t, or includes no nucleotide
  misc_feature (20)..(20): n comprises a, c, g, or t, or includes no nucleotide
  misc_feature (33)..(34): n comprises a, c, g, or t, or includes no nucleotide
  misc_feature (37)..(37): n comprises a, c, g, or t, or includes no nucleotide
  misc_feature (288)..(288): n comprises a, c, g, or t, or includes no nucleotide
  misc_feature (693)..(693): n comprises a, c, g, or t, or includes no nucleotide
  misc_feature (702)..(702): n comprises a, c, g, or t, or includes no nucleotide
  misc_feature (923)..(924): n comprises a, c, g, or t, or includes no nucleotide
  misc_feature (936)..(936): n comprises a, c, g, or t, or includes no nucleotide
  misc_feature (946)..(946): n comprises a, c, g, or t, or includes no nucleotide
  misc_feature (955)..(955): n comprises a, c, g, or t, or includes no nucleotide
  misc_feature (958)..(958): n comprises a, c, g, or t, or includes no nucleotide
  misc_feature (964)..(965): n comprises a, c, g, or t, or includes no nucleotide
ctngctgcctgctttnncancttgctgcctgcnngtngactctagaggatctgtcagtttctacaattctcctgctgtctctcaaagaagcagagagaaaattaagaatggaaagtgagctgcctaccttcttataatctgggtattctttctgtttgctgaagacagagccttgtgtgtccttgcattcccccaaagccttgtgcataacagagtattcagaagtacacactgaaccaataaatgaagagcaatccaacgggtggtttacagttccaagcaccttangaacccatggaccctccctctcttgtccatggttctgacacaactatgtcgcattggtgcatcaaatagattgaaggagattttaagatatttcctacacaagacactggagcttctgtcagaaaaattttaaaagaagtagaaaagaaagaaagaaagaaagaaagaaagaaagaaagaaagaaagaaagaaagaagaaaggaaggaaggaaggaaggaaggaaggaaggaaggaaggaaggaaggaagaaagaaagaaagaaagaaagaaagaaagaaagaaagaaagaaagaaagaaagaagaaagaaagaaagaaagaaagaaagaaagaaagaaagaaagaaagaaagaaagaaagaaagaaaaccctacacgttttttcgtatagttttgaacagatanaggccaaanaagctgttctggtgtggcttgcatccggctgtgttttttcttaagcaaccgattgctcaggaaactcacttctgggactgagaagtttggtttaggtttctcagaatgcctaaatgtctgaccacttttcatcacagaaggctggacctatgattaactactggtttcctttgttttaccaaatagatgtaacctatcaacttcagctgtaacataagatnnccgggtaccgancggaattagngtcttaaantcnccgggnnccgagctcgaattcgaat

SEQ ID NO: 3093 - DNA, 777 bp, Canis familiaris
  misc_feature (12)..(12): n comprises a, c, g, or t, or includes no nucleotide
  misc_feature (21)..(21): n comprises a, c, g, or t, or includes no nucleotide
  misc_feature (31)..(31): n comprises a, c, g, or t, or includes no nucleotide
  misc_feature (148)..(148): n comprises a, c, g, or t, or includes no nucleotide
  misc_feature (282)..(282): n comprises a, c, g, or t, or includes no nucleotide
  misc_feature (318)..(318): n comprises a, c, g, or t, or includes no nucleotide
  misc_feature (345)..(345): n comprises a, c, g, or t, or includes no nucleotide
  misc_feature (395)..(395): n comprises a, c, g, or t, or includes no nucleotide
  misc_feature (426)..(426): n comprises a, c, g, or t, or includes no nucleotide
  misc_feature (447)..(447): n comprises a, c, g, or t, or includes no nucleotide
  misc_feature (501)..(501): n comprises a, c, g, or t, or includes no nucleotide
  misc_feature (504)..(504): n comprises a, c, g, or t, or includes no nucleotide
  misc_feature (533)..(533): n comprises a, c, g, or t, or includes no nucleotide
  misc_feature (542)..(542): n comprises a, c, g, or t, or includes no nucleotide
  misc_feature (550)..(550): n comprises a, c, g, or t, or includes no nucleotide
  misc_feature (561)..(561): n comprises a, c, g, or t, or includes no nucleotide
  misc_feature (612)..(612): n comprises a, c, g, or t, or includes no nucleotide
  misc_feature (638)..(638): n comprises a, c, g, or t, or includes no nucleotide
  misc_feature (652)..(652): n comprises a, c, g, or t, or includes no nucleotide
  misc_feature (655)..(656): n comprises a, c, g, or t, or includes no nucleotide
  misc_feature (658)..(658): n comprises a, c, g, or t, or includes no nucleotide
  misc_feature (673)..(673): n comprises a, c, g, or t, or includes no nucleotide
  misc_feature (687)..(687): n comprises a, c, g, or t, or includes no nucleotide
  misc_feature (701)..(701): n comprises a, c, g, or t, or includes no nucleotide
  misc_feature (728)..(728): n comprises a, c, g, or t, or includes no nucleotide
  misc_feature (732)..(732): n comprises a, c, g, or t, or includes no nucleotide
  misc_feature (734)..(734): n comprises a, c, g, or t, or includes no nucleotide
  misc_feature (737)..(737): n comprises a, c, g, or t, or includes no nucleotide
atccttgtcatngtcatagtngtctcctgangactgctaataaatagattttggcacccacaagaggaataatgaactgaattgcctacagtgctaaagaccgtgaggcagggaatttgcattttaatcctcactctactgctagtanattggtacctataagttctgtttcctttctgtccacagaaggaaagaaagaaacagagagagagaaagagaaaggaagaaaaaaaggaaggaaggaaggaaggaaggaaggaaggaaggaaggaaggaaggaangaaggaagggagggaggaagggagggaaggaggganggaggaaaggaggaaaaaagttattanactagctgaactaagaatcatctgcagttctaccagtctgtggttagtcntgattacaagaataaaaagaaaaactactcnactattaaatggaggcactantacagataacagaaataaaccaccttatcagaaggatgtgttagggccccccantcnagattgaaaaaaaaaacaaaaacaaaacnttggtccantctcaganaaagcaactantggtcttcttgtggtgcacagattatctaattaacttcatctctcatctancctcgtgtctgaccctcttgaccccncgccacagccctantcnnanctgctcccctaatcnctcttctgataaantcagaatgaacaantggcatggatgttgacttgttttctcnccancnttncttgatccccgggttccaaccccaattccttatcctggtc

SEQ ID NO: 3094 - DNA, 1018 bp, Canis familiaris
  misc_feature (9)..(9): n comprises a, c, g, or t, or includes no nucleotide
  misc_feature (24)..(24): n comprises a, c, g, or t, or includes no nucleotide
  misc_feature (30)..(30): n comprises a, c, g, or t, or includes no nucleotide
  misc_feature (36)..(36): n comprises a, c, g, or t, or includes no nucleotide
  misc_feature (72)..(72): n comprises a, c, g, or t, or includes no nucleotide
  misc_feature (330)..(331): n comprises a, c, g, or t, or includes no nucleotide
  misc_feature (341)..(341): n comprises a, c, g, or t, or includes no nucleotide
  misc_feature (688)..(688): n comprises a, c, g, or t, or includes no nucleotide
  misc_feature (936)..(936): n comprises a, c, g, or t, or includes no nucleotide
  misc_feature (1003)..(1003): n comprises a, c, g, or t, or includes no nucleotide
  misc_feature (1006)..(1007): n comprises a, c, g, or t, or includes no nucleotide
  misc_feature (1009)..(1009): n comprises a, c, g, or t, or includes no nucleotide
atgattacnaattcaagctcggtngccggngatcancaagtctgcaaatatgagaccatggctgtggccaanaggctccaggattatgcttctgtaacttgactgtagatttcctttctcctaactcaatcccccagctaatggctgaatagtgggtgactcaggattagattcacttcttggatgcaccgcctacacctgactgcagcagtcatgaaagggagagaggggctaggagaagtgatgattaaagtccccaccctaattttccaagtattgttctatcttcaactttgacattattctgatgtttgatagagtgatttcagnncacttgcccnaaagcctaaaaatgtgcaggtacctgacatataataggcgctcaatacacaggaaggaaggaaggaaggaaggaaggaaggaagaagaagaagaagaagaagaagaagaagaagaagaagaagaagaagaagaagaagaagaagaagaagaagaaagaaagaagaaagaaagaaagaaagaaagaaagaaagaaagaaagaaagaaagaaagaaagaaaaagaaagaaagaaagaaagaaaagaagaaagaaaaggagaaaagctaaaataacaaaacaataaaataaccatacatgagtactaaccacacctgctgaatcaggctcagtaatccgtgcatttaacnaagcactttctgggtgagtgttaccaggcaagtttgggtcatactaccttgggtcatgctaccttaggacagagatttccaaaattagctcattaccagaatcacctggagggtttttaagactcacagatttctgggccttcatatggactttgtgaattagggtctaaatagaggaatctgtgtttccaaaacagctcctcagatggttctagatatgcgactcaatgtagtagaatatgttgagntacatttgctcacacatggaactcagttcagatttaatgggtaatgagatcctctagagtcgacttncanncntgcaagcgt

SEQ ID NO: 3095 - DNA, 1088 bp, Canis familiaris
  misc_feature (4)..(5): n comprises a, c, g, or t, or includes no nucleotide
  misc_feature (11)..(11): n comprises a, c, g, or t, or includes no nucleotide
  misc_feature (13)..(14): n comprises a, c, g, or t, or includes no nucleotide
  misc_feature (17)..(17): n comprises a, c, g, or t, or includes no nucleotide
  misc_feature (27)..(28): n comprises a, c, g, or t, or includes no nucleotide
  misc_feature (43)..(43): n comprises a, c, g, or t, or includes no nucleotide
  misc_feature (46)..(46): n comprises a, c, g, or t, or includes no nucleotide
  misc_feature (50)..(50): n comprises a, c, g, or t, or includes no nucleotide
  misc_feature (53)..(53): n comprises a, c, g, or t, or includes no nucleotide
  misc_feature (64)..(64): n comprises a, c, g, or t, or includes no nucleotide
  misc_feature (72)..(72): n comprises a, c, g, or t, or includes no nucleotide
  misc_feature (1031)..(1031): n comprises a, c, g, or t, or includes no nucleotide
  misc_feature (1057)..(1057): n comprises a, c, g, or t, or includes no nucleotide
  misc_feature (1061)..(1061): n comprises a, c, g, or t, or includes no nucleotide
  misc_feature (1069)..(1069): n comprises a, c, g, or t, or includes no nucleotide
  misc_feature (1087)..(1087): n comprises a, c, g, or t, or includes no nucleotide
gacnnctagtnanngtnatagctggcnnctgaggctgcctgcnggncgtnctnagaggtaatcngtagattngcacatctattatacaagttatgaatgtgtttagctgcaactaacagcagcttaaataattagcattgtattttcttgcatatcaaggtcggaggttggtgtccttgattctgatgtgcaacaatatccctttcattttcttctagcagccttacattttaggctcctagccttaggccagttaccccatggtcatgaagcagctatactatcctggccttttactggcatcacaggtcaagaggaatgaagggtcgtgaccagaagatatgttatctgttttatcaataaagcaaaagtttctaaagaaatatccccagcagaactgtccttccatctcattgaccagaatagttagagtcatgcatagctataagggaatctaggaaagcaggtaacaagattggcctgagtagactaattatactctctactaaggctgaagtgttatggcaaaaaaaaaaaaaaaaaaagaaagaaagaaagaaagaaagaaagaaagaaagaaagaaagaaaggaaggaaggaaggaaggaaggaaggaaggaaggaaggaaggaaggaagaaagaaagaaagaaagaaagaaagaaagaaagaaagaaagaaagaaagaaagaaagaaagaaatcaagattatgttaccagagcagtaattctcaaatttcagcatacatgatagttatctgaagggtttactaaaacaagactttctgggtcccactcccagaatttctgtctcagtaggcctggagtagggatgaagaatttgcatttctaccaagatattgttgtggccatctgtagaaaatacattctgccataggcagacatagaacagtgtctattatatctccactgaaggattcttaagtctcttgaagtcctcactagaagcctgtggtctagcatcagagcataggatgtcggttcagcagagcatcatgtgggagcatttcntggggaccaccactaagtttgatctnacgncgacgcgngcagtgaatccgtaatcnt

SEQ ID NO: 3096 - DNA, 1105 bp, Canis familiaris
  misc_feature (4)..(4): n comprises a, c, g, or t, or includes no nucleotide
  misc_feature (6)..(6): n comprises a, c, g, or t, or includes no nucleotide
  misc_feature (18)..(18): n comprises a, c, g, or t, or includes no nucleotide
  misc_feature (688)..(688): n comprises a, c, g, or t, or includes no nucleotide
  misc_feature (730)..(730): n comprises a, c, g, or t, or includes no nucleotide
  misc_feature (738)..(738): n comprises a, c, g, or t, or includes no nucleotide
  misc_feature (1075)..(1075): n comprises a, c, g, or t, or includes no nucleotide
  misc_feature (1079)..(1079): n comprises a, c, g, or t, or includes no nucleotide
cctntntggtctagctgntcctgaggatccagagatgggcaatgtctcaagtttggctccggtgtagtaatgcacattgatatttactccaggaaagacacagactcatgacctgatgccaggaggtgggaaggcttgtaactggaccagcatactctacaaagaaggctagtccaaactttgcaggctgctaaatgtaagtatgccacacggaaagctaaaagcaaaaaggacagaattaaaccacatcatcaggaacagacctgaaaatactctctgcttttaaagattaatttaagacccaggttatgaggtccagttcctaaccagctaccagagtatgtaattgaagcaatcacagaacttattactcaaggaaggaaggaaggaaggaaggaaggaaggaaggaaggaaggaaggaaggaaggaaatgaaagaaacagaaaggaaggaagaaaggaaaaaaagaaagagggaaggaagaaaggaaaaaattcaatgctaagaaaggcaacatcaaatatcaacattaaaataggtgtgtactctagaagaaactgaactacagggaagaacatggcaaatattaacataaatatttcggatacccaaaaagataaatggaaacaaataaattatgaaggaaaaaataaacaagaaattgtgaaataaaatagaatgaaatangaactatggaaaaaaggaaggagagttagagcttgaaaaatntaatcacntgaagtgaaaagcccaatttaaaaattaaatataggcagaacagtcaaaaaaagaagctacaaagtgaaattagaattgaaaaaagaatcattcaaaatatagcctagagatagaaagacataagtgtcataaaagcaattcagaaacaagtggatactaataggtgttacagaaaaaaagtcaaagaatgatgagcaacagttgataattttgcacaaatgtgcatgtgattagcagtttttaaaaaaggaccagaatattctcaatatcaagtagaaaaagaaaataaataaatacaactccatagctcatcatattgttataacactgcagatntcangacgacggcgcagtgaatcctaatct

SEQ ID NO: 3097 - DNA, 764 bp, Canis familiaris
  misc_feature (6)..(6): n comprises a, c, g, or t, or includes no nucleotide
  misc_feature (9)..(9): n comprises a, c, g, or t, or includes no nucleotide
  misc_feature (22)..(22): n comprises a, c, g, or t, or includes no nucleotide
  misc_feature (382)..(382): n comprises a, c, g, or t, or includes no nucleotide
  misc_feature (720)..(720): n comprises a, c, g, or t, or includes no nucleotide
ttgcanctngctgcctgcggtngactctagaggatctagattccagcccaagctccaccacgtatcagttgcaggtcttcgagtaactttcttaatatgtctgtgtctcagtttcctcatccacaaaggaaaaataccaccagtacctgcctcattgagtgtgaggattagctgacaatatatttagggcaggtagcacaaaataaacgatggctcctccagatagcggaacacacacagtcttagaaatgattgaacagtcaggctttgccctcagtggggtgtctgtttgaggttctctctttccccttgcctctccccaccctccccccaactccctctcaaataaatcgatggatggatggatggatggatggaaggnaggaaggaaggaaggaaggaaggaaggaaggaaggaaggaaggaaatgatagcataaggtgtgctaactggcatttactagcacagaaagatacccaacacatgaaatgaatgggcagcatgcaaaatactcatttttgtcaatggctagagacaaacagttcagaaatttataaatgattatttctggctggtgagcttataggtgttctttcattgtttcagcttccttgagttttctagtttctctacgataaagcacacttctataaaataaaaggtttctatgaccaaaaagtacagcacacagtaagtgcttcagtaattggctattatgantgatgatccttctaggagcttggcaaagaaaagacccaggatcc

SEQ ID NO: 3098 - DNA, 1206 bp, Canis familiaris
  misc_feature (9)..(9): n comprises a, c, g, or t, or includes no nucleotide
  misc_feature (11)..(11): n comprises a, c, g, or t, or includes no nucleotide
  misc_feature (16)..(16): n comprises a, c, g, or t, or includes no nucleotide
  misc_feature (24)..(25): n comprises a, c, g, or t, or includes no nucleotide
  misc_feature (254)..(254): n comprises a, c, g, or t, or includes no nucleotide
  misc_feature (464)..(464): n comprises a, c, g, or t, or includes no nucleotide
  misc_feature (511)..(511): n comprises a, c, g, or t, or includes no nucleotide
  misc_feature (554)..(554): n comprises a, c, g, or t, or includes no nucleotide
  misc_feature (559)..(559): n comprises a, c, g, or t, or includes no nucleotide
  misc_feature (703)..(703): n comprises a, c, g, or t, or includes no nucleotide
  misc_feature (1178)..(1178): n comprises a, c, g, or t, or includes no nucleotide
gaaccgtantntggtnatagctgnntcctgaggatcctgtcccctagtcctggtgggctctgagtgccccattttgaaaaagagtctgaagccattagaacaaaaagcactggaagggcttgggctgttaaaggctacatctgggctcagcaacatgcatactaataacatcattacggccgagtggtttggagagcgtgtttactttgttgtggttgctgtcaccttctagagctgaattgttaatatgtggntttaaattcaaatagcacacagggctaattttcttgtatttgcccaaaaaattaggttacatagttcatctaattctccctccactttttcatgtgtgggtggtactccttgtagagagtacttcttttccatgacattgaacttgaacctgactgacctttctataatgagtgaattgaaaacatctccctttggaatgtggcttgtanatactggctacgccagtttttctgcatttgatgaaataaaggggcanaagtccttttcagagaccagaagagttatttaacaagataaanaaganaaaagagagaaagggaaagaaggaggaaggaaagagaggaaggaaggaagggaagaaggaaggaaggaaggaaggaaggaaggaaggaaggaaggaaggaaggaaggaaggaaggaaaggagggagaagggaaggaagaaaganagaaagaattttaaaagccttttgcagaggcactctgcttaattagaaaccttccattaattttaacaaaaagtgattaggtgaaagcttgggttgccttgggtgtattgggcttccttttcttcctttttgttttccatttaaatatgtaaggtctctgccactttaaagttctatgtattttaacaaatacttaaataacagattcagatatttgtctctttcaactcaaatattctgtccttcctattcattgttctttctcaaatcaatcccccccccaatcaaagttaaatggggagacacgagatgagacccactgaataatcagttagtagatttcttctcttatgcgttcatagcccatggattcatgcttcttcatttttctaaggggggggggagacgcagaattgatggaagacagctgaaaacagtcagctgcgtgaagtccagcactacccagcatctgatntaaagacgacggcgcagtgaatccgtaa

SEQ ID NO: 3099 - DNA, 850 bp, Canis familiaris
  misc_feature (9)..(9): n comprises a, c, g, or t, or includes no nucleotide
  misc_feature (11)..(11): n comprises a, c, g, or t, or includes no nucleotide
  misc_feature (15)..(15): n comprises a, c, g, or t, or includes no nucleotide
  misc_feature (20)..(20): n comprises a, c, g, or t, or includes no nucleotide
  misc_feature (759)..(759): n comprises a, c, g, or t, or includes no nucleotide
  misc_feature (766)..(766): n comprises a, c, g, or t, or includes no nucleotide
  misc_feature (777)..(777): n comprises a, c, g, or t, or includes no nucleotide
  misc_feature (780)..(780): n comprises a, c, g, or t, or includes no nucleotide
  misc_feature (790)..(790): n comprises a, c, g, or t, or includes no nucleotide
  misc_feature (822)..(822): n comprises a, c, g, or t, or includes no nucleotide
  misc_feature (825)..(825): n comprises a, c, g, or t, or includes no nucleotide
  misc_feature (843)..(843): n comprises a, c, g, or t, or includes no nucleotide
gccacgctncnttgntgaangccgactctagaggatcaagtcccatgtcttgctccctgcatggagcctgcttctccctctgcctgtgtctctgcctctctctctcgtgctctgtgtctctcatgaagaaataaataaaatctttaaaaaaaaagttaaaaaaaaaacaagtgtaatcaaaagatattactgaggcttgaggcttgatggcaccactctaatatatttcccttgaaatcctttgaaagacagaagcttaaaagaataaacaagatgagattcatgagatagcatttcagaatggagcttaggtacagctaagctgagctaaggagtaacagaaggagaaagtgcatgtcaaaaaaggaaggaaggaaggaaggaaggaaggaaggaaggaaggaaggaaggaaggaaggaaaggagaagaaagaaaggaaaggaactaaggaaggaaggagaaaggaaggaaagaaagaaaaccctaaaatgcctctgccctgtgaatcttgtgggcggcaaacttccttcacaaagtgcatgtttgtgttttgagggactgagagtccagagacaagtttaaacacacataagttcaatttaaaagtaaataagataacactggaggaaattaatgatgcaatgtccctttttatgtaacacattttctttggaattcaaaatatatctacttaaaaatgacacatcaatttaaggcaactgggtggctcaattgggtaaggtccaaatctaattcanctcaagncatgaagtcanggncatgaaaatnaaccctgcatccgggttctgtgctcaacaatngantcggcttaaaaatccccntttcccc

SEQ ID NO: 3100 - DNA, 763 bp, Canis familiaris
  misc_feature (2)..(2): n comprises a, c, g, or t, or includes no nucleotide
  misc_feature (6)..(6): n comprises a, c, g, or t, or includes no nucleotide
  misc_feature (9)..(9): n comprises a, c, g, or t, or includes no nucleotide
  misc_feature (17)..(17): n comprises a, c, g, or t, or includes no nucleotide
  misc_feature (36)..(37): n comprises a, c, g, or t, or includes no nucleotide
  misc_feature (40)..(40): n comprises a, c, g, or t, or includes no nucleotide
  misc_feature (59)..(59): n comprises a, c, g, or t, or includes no nucleotide
  misc_feature (61)..(61): n comprises a, c, g, or t, or includes no nucleotide
  misc_feature (70)..(70): n comprises a, c, g, or t, or includes no nucleotide
  misc_feature (76)..(76): n comprises a, c, g, or t, or includes no nucleotide
  misc_feature (80)..(80): n comprises a, c, g, or t, or includes no nucleotide
  misc_feature (82)..(82): n comprises a, c, g, or t, or includes no nucleotide
  misc_feature (96)..(96): n comprises a, c, g, or t, or includes no nucleotide
  misc_feature (121)..(121): n comprises a, c, g, or t, or includes no nucleotide
  misc_feature (125)..(125): n comprises a, c, g, or t, or includes no nucleotide
  misc_feature (128)..(129): n comprises a, c, g, or t, or includes no nucleotide
  misc_feature (139)..(139): n comprises a, c, g, or t, or includes no nucleotide
  misc_feature (150)..(150): n comprises a, c, g, or t, or includes no nucleotide
  misc_feature (157)..(157): n comprises a, c, g, or t, or includes no nucleotide
  misc_feature (538)..(538): n comprises a, c, g, or t, or includes no nucleotide
  misc_feature (542)..(542): n comprises a, c, g, or t, or includes no nucleotide
  misc_feature (683)..(683): n comprises a, c, g, or t, or includes no nucleotide
  misc_feature (697)..(697): n comprises a, c, g, or t, or includes no nucleotide
  misc_feature (702)..(702): n comprises a, c, g, or t, or includes no nucleotide
  misc_feature (717)..(717): n comprises a, c, g, or t, or includes no nucleotide
  misc_feature (745)..(745): n comprises a, c, g, or t, or includes no nucleotide
  misc_feature (754)..(754): n comprises a, c, g, or t, or includes no nucleotide
cncagnttncatgcctncaggtcgacttttggaggnncanttttcgcatggggcttccntncacgggccntgcttntctntntgcctgtgtctctncctctctctcttgtgtgtcttctcntcantanntaaataaatntttttaaaaanctgaatntcacttagaaatgtttacaaaggaaatattgttacatgcaataatgtaagtgaatatccagttaattaaactgagtagaaaaaaaaaaccaattccagaacattacatactgcatgattttattcatatgacattgttaaaataacaaaataataaaaatggagaccagggctgtctggctggcttagtcggtggagcgtacgacgcttactcttggggttgtgaattcaagccccatgtagagtgtagatgttactttaaaatattagaaggaaagagagagagagagagagagagggaagaagggagggaaaaagaaagaaagaaagaaaaaagaagaaagaaagaaagaaagtaggaaggacggccggaacgaaggangganggaaggaaggaaggaaggaaggaaagaaaagaaagaaaaagaaatggagaccagattaacagctgctaagcatcaagaagggaatagttatgggaggtaaacgggtatgactgtaaaaaggcaactggttgggggaatccntgcatttaaggaantgttntgtatctcgaccatnttggatgtcaagatcccacggctaccgngcttgaatncgtaatcct

SEQ ID NO: 3101 - DNA, 775 bp, Canis familiaris
  misc_feature (27)..(27): n comprises a, c, g, or t, or includes no nucleotide
  misc_feature (29)..(29): n comprises a, c, g, or t, or includes no nucleotide
  misc_feature (31)..(31): n comprises a, c, g, or t, or includes no nucleotide
  misc_feature (688)..(688): n comprises a, c, g, or t, or includes no nucleotide
  misc_feature (711)..(711): n comprises a, c, g, or t, or includes no nucleotide
  misc_feature (770)..(770): n comprises a, c, g, or t, or includes no nucleotide
atgattacggattcactgcgccgtcgncntnagatctagatgatttctagggctccattccatgttctttccctgggagcaatcagttgtgtcccaccatcctcataggggcttggcttcaaagaaacagtatgaattttctgtttggagacatgggataatgctttggtggcatgtgttctgtcttatatttgttgttagaagtagtcatttggccttacttcagtggcatttgataaaacagctctcttgaaagagagaaagaaagaaagaacgaaagaagaaagaaagaaagaaagaaagaaagaaagaaagaaagaaagaaagaaagaaaaagagaagaaagaaagaaagaaagaaagaaagaaagaaagaagaaagaaagaaagaaagaaagaaagaaagaaagaaagaaagaaagaaagagaaagaaagaaagaaggaaggaggaagggaaggaaggaaggaagaaaagaagagaaagaagaaggagaagaagaagaggaaacaaagaaagaaaggccatgtttgtagtgtttgccaatttccacagtgtaatactcctatcacggttgatttcaagctaccagcatgacatcactgaatgcagagtccatgaaggtgggaagagcagcaaagaatggcttccagtgagccaacaggaatcagctccagcacagcgtatgancctgttggttggttatacaaaanttctgtgatgggtacaggcaaaagagcttctttttggcctgtattcctcaagctaccanagcta

SEQ ID NO: 3102 - DNA, 714 bp, Canis familiaris
  misc_feature (11)..(11): n comprises a, c, g, or t, or includes no nucleotide
  misc_feature (15)..(16): n comprises a, c, g, or t, or includes no nucleotide
  misc_feature (23)..(23): n comprises a, c, g, or t, or includes no nucleotide
  misc_feature (28)..(28): n comprises a, c, g, or t, or includes no nucleotide
  misc_feature (676)..(676): n comprises a, c, g, or t, or includes no nucleotide
atcctttgcancgtnntagtcgnctctngaggacaagtcctggcatcagggttcctgctcaccaaaatgaggggttctaagtatgtgtggaccttcaggttgaagagcctagacaagacagccaagtcgctcctggaaggtgtggctctgcttctagaagcattaaatggcccttgtgctgggacttattcctccagcctcagccagaacacagtgaggattttaactggcatccacgcacattatttttttctactgaaagccctaaaacatcctcccacctatgtaacgtgcattaagcactaaagtttccccatcagttaagcaggaatttagttcttgcagacattaaacaaaatctttttaaattaaaaattagcccttacattcttttaaaatctcgaagccgctgacttcaggcagcaggtgaatcttgaatgaaggggcagacattctagctgaccagcaataaatagatagatgatagatagatgatagatagatagatagatagatagatagatagatagatagatgatagataaaatccctcatgaaacaactccttttcctggctcacaatggtctttatctttttatagataaaagccaccgtcatacttcaccctctccctctgctcctccccctgctcacgcttgatccccgggtaccganctcgaattcgtaatcatggtcatagctgtttcctggaa

SEQ ID NO: 3103 - DNA, 3775 bp, Canis familiaris
ccccccgggtatgcccaggggggcctcaggcggggtgcatggctctggcctgcagggtacagacagtgagcccacaggggcccctcccggggcagggcactgccaaggtagggggaagagcgaggccggcccagcgggtccctcacctggacggctctcccccacctgggcccctctgcacgtggccaaagtcagagcccaccccttgtgacctggcccagcacctgctgcctgggacaggtttcactccccaacagcagtgctcaggccgaggtgggcaagtggggccaccaatatgagtctccccctcgctcaccgatggccaagttccacggccaggaggacctctggactgctcaccagctccgctgcgacctgtggcccctggcccgccgagtgcttctctgcactagggtcagagggacagcctgctgaaagcgcgccttccgggccaggctctgggggccggcgggcccagtgttggccagaaggggtctggggcgcccaggcctagggaggctaggactcgggcaggggaagggccagaggcccgggtgaacgagaagcagctcactcaccccacgggcagcgtgatgtacttgtggggaatgagcccccgggcgcccgcgcactcgccccgccaccagtcgcccgacgcccgctcgtacagccgcagcacatccccgcgctggaagctcagctcctgggccgtgcggcccgtgtaggaaaagcaggccacggcctccacgccgccgtccaggtctggggagagaagggggtccgagctgggagggggagtgggcacccagggcggggacaggacggggccctcctcctctccccctcaccatcctcctgggccgaggtcccggcttccagctccggctcgttctccccaaccaggccctccagctgggcgtccctgaggtcagagcgaggcatctgagagacgagagggctccccctgctggaccccccaccctggcacgcgacgggcataccccaagcagccggtggaaggcggtgccatgcacttctcatagatggggccgggcagcagggtcgggggtgggaaaacccgcgcgggctgcacgatgagagtctgtaccagctggttcacccgaccctgcaaggccactgggtcctggccggcgggcacgggcagcagggtcggcccaaagcacacggccaggttgtagggatccatgacctcaccgacctccatccgaccgagcgtgcctccccaccgctgggacccccccacacacaggcaccccgccaccctggcacccagtctctaggggcgcctgtcgagagactaggcccctcggttgggaggctgagcccgataccctgtgtcccccaggcgctcgagacacctgccccggccccaccatgctcctggcatccaccacctcgggtaaggttccagcccccgggccccaacctgtccccccaccaatccctcctcggggacgagccaggtaggccgagtgggcttgcagaagcagagaagcccccctttcggagactccttcaccctccctgtcggggctgccagtgcggggaggcgcgggcacggccctgcgtgctcatggggggggctgcccccccacacgggccaggagtggtgagcgctccgcttcgggccggggcctgggaggcggcagggaagcgggggcccaggttgacgcggctcagccactggccctgccatcgggcccagggccccccgcagagcacataccctaacggggcctcttcctccacccgcccagctgtgccccggaccctctctccacctactccagctggcaacggcagcagggagctgctggacacccgggacccgctgcttgtccaggccgagctagccctgctctccacggtcttcgtggctgtggccctgagcaacggcctggtgctgggggccctggcgcgccgggtccggcggggtcgctgggcacccatgcacgtcttcattggccacttgtgcctggccgacctggctgtggctctgttccaagtactgccccagctggcgtgggatgccacggaccgcttccgtgggcctgatgccctgtgccgggcagtcaagtacctgcagatggtgggcatgtatgcctcctcctacatgatcctggccatgacgctggaccgccaccgcgccatctgccgccccatgctggcataccgccacggaggtggagctcgctggaaccggccggtgctggtggcctgggccttctcgctcattctcagcctgccccagctcttcatctttgcccagcgtgacgtgggaaatggcagtggggtccttgactgctgggcccacttcgctgagccctggggcctccgagcctatgtcacctggatcgccctaatggtctttgtggcacctgccctgggcatcgcggcctgccaggtgctcatcttccgggagattcactccagcctggtgccggggccagcagagagggctggggggtgccgtggagggcaccggaccggcagccccagcgagggggcccgggtgtccgcagccatggccaagacggtgaggatgacgctggtcattgtgatcgtctacgtgttgtgctgggcgcccttcttcctcgtgcagctgtgggcagcgtgggacccgcaggcgcccctggaaggtgggtgtggctgcggccagggcggtgggggaccttcgggctgggccgcgcacgcgccctcaccccgcagacatatgccccagtgagcagacggggtcactgcacctctgcgcggacaccctcagccccagcccggactctccccacccacaggggcccccttcgtgctgcttatgttgctggccagcctcaacagctgcaccaacccctggatctacgccttcttcagcagcagcgtctcctccgagctgcgcagcctgttctgctgggcccggagtcgggccccacccagcctggggccccaagaggagtcctgcgccacggccagctccttcctggccaaggacacttcctcctgaggagccaaggggcgccttccttccagaggctctgcgaggcccggctgcctacctggggctggccctcggacccctggggggaggagaccctctgggagggggctctgggactaggagccagaggtcagctccttggggcctagcgtgggggggctagggcggcagccgggggcctcgtctggggggcgcacaaggcctccacgcagcgggtgcctgcccctgacaggaggctcctcggagcccgggaggaaggaaaggggtagggggcctctctgctccccctctgccctcccctctcactctgtccctaataaaagatccagcactttttccacccagcgggtctccttggatcagggtaagggcgcttgtcgggcagcgtgcaacggcattctcggacccccaccggacaccggacccccgcttggacggccgtgtgccgagacccccgccgcctttgccgagcgccccgcatctggccgtgcccccgcctgccccccgagacagaggactggcttgcacgggggtcaacacgcaggcctttataaacggcagccagcacctgccggccgccaccgggctcgcacccagcgcccggcagccaccgccaagccctcacagcaaagccagggtcggggcaggcaggggcgcgtcggggcagccgtctcctcctctgcgaaggggcaagagcaggagcccggcaccggccacacagggccagggagatgccacaggtggccacgtcggggggggggg

SEQ ID NO: 3104 - DNA, 1187 bp, Canis familiaris
ctacctttgatcaaatctaccttcagttccatgggaggctttgagggtcatctgtacccagggctgtctctcttcttctatggactttatcatgcacgactagtatcaagggccttgatatgcaaccaccctgtccagtatcggccatgtcatccctggagaaaaggaagatgggcaaggctgcagcaaatatactatgttgggctggtgaagatattaagtgccttcattttagcagcacaagagctgcataacgtacatggacaatttgtacttatcagcaagatatatcatcagagaaactttttgtaccgcaaacagtggcagcatctcactctgtatatgactttcttcctgagcgggtgtacggatgtagtgagccagaacctgctgccccagaggtgtgctgctctggagcaaggtgcccaagccctgggcatatttttatttctgcctctcatgatgtctcacatgcaggactcagaaggtgtggagctacagtctcacatcctgcttactcaggccatgttcctgctggtgctggtggtgattgcagagctgtgggctcccaatatgctgcagctttgggttatgaaggcctttttttatatgatgataggctcttggctgattcagataggctttatgctgtacaaaccaatttctggctataaatggatggatgatgacaaaaacaacattatatttgtcaccaccttcttctgctggcatgtggctttcattgccattttaatgatctgggtctatggcttctcctttttgtggtattattacatttgttgaggtatgaaccttggtgatcccagaatggcttttgtcacctgcacattctggaatacctagatgagaagttgtaggaagtggaggtgttagaaaggaagatgactgaggcaacagactttgttgggatggacatccacctctccccttctggcttctgagcagtctcatctgctgggcagtatgctgggacaggcaaatgaaacccaagaagaagttatgaccttcactctcagctccccaagtatttcccctacctctcctacctctcaattccagatgaggcattctccttgtcttgttcttctctgtactcttcacatccctcctaggagaatatgaaaataaatgtgctgtatcctgaaaaaaaaaaaaaaaaaaaaaaa

SEQ ID NO: 3105 - DNA, 789 bp, Canis familiaris
gaaggtagccggagtatgggcgcggagtatgggtgccttcccagcacctctcaagccctgtacgtgatcctcttaatagtgctggtcaggatgagcttggtgtttgttcagttccccaaatacctgcgctgctatcgatgcctcttggagaccaaggagttgggatgccttctgggatctgacatctgcctcgccccgcctggcagcagctgcatgactctcctcataaagaacagcagcagcggttctgacatcatggtgagtgactgccgccacaaggagcagatgagtgattgttcatatacccgctcttctccagtgtttggcttctggatattttctcgatgctgcctccgggagttctgcaataaccctcagaacagagtcttctacattccttagaatttctgcaaagacttgtggaataaaatcctgccagttgccatccatcttcttgatttccagttggctggcacagccaggacaacttccaatcctttttaccagccctccctgcctctctcaagttactggcccccagccctgtctcttagttgacacccctcaagctccccgactcccactctgcccctcccccaggctccctctccagaagtctgagttttcaagtcctcacggtctgacagcttttgtcctcttctcccactcttcaagctgcttctttgcccggctttgcccatctcccaccacaagccagtctcgcctcaagtccccaggtgttcctcccaaataaattggtgtacaaactcaaaaaaaaaaaaaaaaaaa

SEQ ID NO: 3106 - DNA, 555 bp, Canis familiaris
ggcacgagcagacatccagagttaacatcatgaagtggttggttttccagctggtgacactctactgcctggtcatcatgccagtgacaggaactatgaaagaaaaaactaagaaagtaactcgtcgtccaaatttcattgtagtaaaaccgaaaatgcgagattgctcgaggtcacctacctactacgagtgccaaagaaagtgccaatattcctgggactgtgctgttgggtatgaatgctgctttgctgcctgtggaagtatttgcttgaatatccgacaaatcgagacccataaggacactacacccagaaccgaggctgtaactactttgtgtcacccaaccaccatttggaattaggacctatagccctacaaggtgtcaggctaattctacatgatgtccagtggtatgattgtcttatcccagctgggaggcggcagggaggggagtggatgggtcccaaggcaatgtctctcctatttgccaaccctcttccctgaaccattgtatatcagcttcttttccctgaaaaataaacagtggcattaaa

SEQ ID NO: 3107 - DNA, 634 bp, Canis familiaris
  misc_feature (528)..(528): n comprises a, c, g, or t, or includes no nucleotide
  misc_feature (561)..(561): n comprises a, c, g, or t, or includes no nucleotide
  misc_feature (572)..(572): n comprises a, c, g, or t, or includes no nucleotide
  misc_feature (591)..(591): n comprises a, c, g, or t, or includes no nucleotide
  misc_feature (607)..(607): n comprises a, c, g, or t, or includes no nucleotide
  misc_feature (612)..(612): n comprises a, c, g, or t, or includes no nucleotide
  misc_feature (614)..(614): n comprises a, c, g, or t, or includes no nucleotide
  misc_feature (617)..(617): n comprises a, c, g, or t, or includes no nucleotide
  misc_feature (621)..(621): n comprises a, c, g, or t, or includes no nucleotide
ctagtcttgtgtgccgggtgattccaattacctcttccagcacttccgtcaaacagcgagcctaggccttttagaagccaagggtaccagcaggctggctgtggaggtataggccataagctcaactctcagaagtgtgtatgcatgggaggcagatgtctgctacccactcggacatgggagttggaacctagctacactgtgattgaaaacgccattggaaatcgctgtattcaactcagatacacgggagttcaggcccagtgctcacacatgcttttcccgcaacctctcccagccaataaaataaggatgttagcagctactcctacagtcaggcaggatgcgggagggttctgccctgtcctcagctctcacagggaagcatgtcttgaagccagctgtcaaatagctgcattcctatggcagtgagaaggtagcagtactctgagtcaggaggttccaagattaccactctactgcacctggagataccctccaggtctgcattgttaccctgcgtctcangaagcctttggcaaaagtttttgttgaagaccngcgaaaatcantttgcaggcagtgtggaantgtgagggaattaggntgagntnaantttnagaagtaagatgg

SEQ ID NO: 3108 - DNA, 557 bp, Canis familiaris
  misc_feature (2)..(2): n comprises a, c, g, or t, or includes no nucleotide
  misc_feature (5)..(5): n comprises a, c, g, or t, or includes no nucleotide
  misc_feature (300)..(300): n comprises a, c, g, or t, or includes no nucleotide
  misc_feature (314)..(314): n comprises a, c, g, or t, or includes no nucleotide
  misc_feature (518)..(518): n comprises a, c, g, or t, or includes no nucleotide
  misc_feature (538)..(538): n comprises a, c, g, or t, or includes no nucleotide
  misc_feature (549)..(549): n comprises a, c, g, or t, or includes no nucleotide
  misc_feature (551)..(551): n comprises a, c, g, or t, or includes no nucleotide
  misc_feature (556)..(557): n comprises a, c, g, or t, or includes no nucleotide
gnacntgaaccacccaggtgcccccaatttggatttttaaaaggaaaccagtgctgacttctcttaataggtgggtttctttttatttttttttatttaaattcaattaattaacacacaatgtattattagtttcagaggtagaggtcagtgattcatcaatcttatatataacacccagggctcattccatcacgcgtcttccttaatgtccatcacccagttaccccatcccccatctcctcccctccagcaaatcccctttttctcctttcctgaggctgccattctctattgtantttttttttttttnaatgaccatcagtattcaaggttataggacccaaaagtgctatataaggatgctctgagtcttcggtaaagggctccttctaggtttgacccgtgagccctcaggctctcacccacaccactggcactttcataaccagtgtcagggaaaagtattcaggcccttacagggcttttcaggggtcctgctccccatctgggcacntctatgacagcggggacggngccgagatctnanaccgnn

SEQ ID NO: 3109 - DNA, 1119 bp, Canis familiaris
  misc_feature (9)..(9): n comprises a, c, g, or t, or includes no nucleotide
  misc_feature (14)..(14): n comprises a, c, g, or t, or includes no nucleotide
  misc_feature (31)..(31): n comprises a, c, g, or t, or includes no nucleotide
  misc_feature (38)..(38): n comprises a, c, g, or t, or includes no nucleotide
  misc_feature (48)..(48): n comprises a, c, g, or t, or includes no nucleotide
  misc_feature (51)..(52): n comprises a, c, g, or t, or includes no nucleotide
  misc_feature (61)..(61): n comprises a, c, g, or t, or includes no nucleotide
  misc_feature (73)..(73): n comprises a, c, g, or t, or includes no nucleotide
  misc_feature (77)..(77): n comprises a, c, g, or t, or includes no nucleotide
  misc_feature (85)..(85): n comprises a, c, g, or t, or includes no nucleotide
  misc_feature (88)..(88): n comprises a, c, g, or t, or includes no nucleotide
  misc_feature (98)..(98): n comprises a, c, g, or t, or includes no nucleotide
  misc_feature (115)..(115): n comprises a, c, g, or t, or includes no nucleotide
  misc_feature (133)..(133): n comprises a, c, g, or t, or includes no nucleotide
  misc_feature (137)..(137): n comprises a, c, g, or t, or includes no nucleotide
  misc_feature (252)..(252): n comprises a, c, g, or t, or includes no nucleotide
  misc_feature (450)..(450): n comprises a, c, g, or t, or includes no nucleotide
  misc_feature (658)..(658): n comprises a, c, g, or t, or includes no nucleotide
  misc_feature (663)..(663): n comprises a, c, g, or t, or includes no nucleotide
  misc_feature (675)..(675): n comprises a, c, g, or t, or includes no nucleotide
  misc_feature (677)..(677): n comprises a, c, g, or t, or includes no nucleotide
  misc_feature (698)..(698): n comprises a, c, g, or t, or includes no nucleotide
  misc_feature (706)..(706): n comprises a, c, g, or t, or includes no nucleotide
  misc_feature (711)..(712): n comprises a, c, g, or t, or includes no nucleotide
  misc_feature (768)..(768): n comprises a, c, g, or t, or includes no nucleotide
  misc_feature (796)..(796): n comprises a, c, g, or t, or includes no nucleotide
  misc_feature (805)..(805): n comprises a, c, g, or t, or includes no nucleotide
  misc_feature (908)..(908): n comprises a, c, g, or t, or includes no nucleotide
  misc_feature (923)..(923): n comprises a, c, g, or t, or includes no nucleotide
  misc_feature (1045)..(1045): n comprises a, c, g, or t, or includes no nucleotide
  misc_feature (1047)..(1047): n comprises a, c, g, or t, or includes no nucleotide
  misc_feature (1056)..(1056): n comprises a, c, g, or t, or includes no nucleotide
tttgaaccnctttntgttgacgccgtttccngaggccnctgtcctttnctnnataaactgnacaccatagaancaancaatccanttntgaaatgggnttaagacatgaagaganatctcacagagggagacntttnacatggccaacatgcacatgagaaaatgctctgcatcacttgccatcaggaaaatacaaatcaaagccacaatgagataccacctcacaccagtgagaatggggaaaattaacanggcaggaaaccacaaatgttggagaggatgcggagaaaagggaaccctcttacactgttggtgggaatgtgaattggtgcagccactctggaaaactgtgtggaagttcctcaaagagttaaaaatagacctgccctacgacccagcaattgcactgttggggatttaccccaaagatacagatgcaatgaaacgcanggacacctgcaccccgatgtttatagcagcaatggccacaatagcccaagctgtggaaggaggcctcggtgtccatcgaaagacgagtggatagaaaagatgtggtttatgtatacaatggaatattactcagctatttagaaatgacaaatacccaccatttgcttcaacgtggatgaacctggagggtattatgctgagtgaagtnagtcnatcggagaaggncnaacattatatgttctcattcntttggggnatatnnataatagtgaaagggaatataagggaagggagaagaaatgtgtgggaaatatcagnaagggagacagaacgtaaagactgctanctctggganacgaactaggggtggtagaaggggaggagggcggggggtgggagtgaatgggtgacgggcactgggggttattctgtatgttggcaaattgaacaccaataanaataaattaaaaaanacaaaaaaataaaaataaaaataaaaaataaaaagcccttgccacgttccagctaataatagaaaagacataacatggcaacctgctctacccaaaaaagaatctattaaactataatattnanctatatttnaaaaatttatattgaatattctcattgccaaaacaccaccatttgcataaggtttggatgttt

SEQ ID NO: 3110 - DNA, 1158 bp, Canis familiaris
  misc_feature (70)..(70): n comprises a, c, g, or t, or includes no nucleotide
  misc_feature (1125)..(1125): n comprises a, c, g, or t, or includes no nucleotide
  misc_feature (1136)..(1137): n comprises a, c, g, or t, or includes no nucleotide
  misc_feature (1155)..(1156): n comprises a, c, g, or t, or includes no nucleotide
cgaattcgatctcggtacccgggatacagaacttcttaaaatcaacaccaaagagacatagaatccaatnatgaaatgggcaaaagacatgaagagaaatctcacagaggaagacattgacatggccaacatgaacatgaaaaaacgttctgcatcactaccatcagggaaatacaactcaaaaccacaatgagataccgcctcacaccactgaatggggataattaacaagcaaggaagaacaaattttggagaggatgcagagaaaagggaagactcttacactgttggagggagtgtgaactggtgcagccactctggaaaactgtgtggaggttcctcaaagagttaaaaatagacctgccctatgacccagcaattgcactgttggggatttacctcaaagattcagatgcaatgaaacactgggacacctgcatcccgctgtttatagcaccaaagtccacaatagccaaaatgtggaaggaggcttggagtccattgaaaaatggatggataaggaatatgtggtttatgtatacaatggaatattactcagccattagaaacgacaaatacccacgatttgcttcaacagggatggaactggagggtattacgctgagtaaagtatgtcaatcggagaaggacaaacagtgtatgttctcatacatttggggaatataaataatagtgaaagggaatataacggaatggagaagaattgtgtgggaaatatcagaaatggagacagaatataaagactcctaaatctgggaaacgaactaggggtggtagaagggcaggagggagggggatgggggtgaatgggtgatgggcactgagggggacactggacgggatgagcactgggtgttattatgtatgttggtaaattgaacaaaagtaaaaaattactttattaaaaagaagattcatagaaactaatacgaatgaagatattaccatacaaaatccttgtaatgcagccaaagcattctaaggggggaatacatcacagtacaagcatccattcaaaaactggaatgaactcaaatacaaaagctaaccttactcataaaggagctagagaaaaagcagcagatagatcctctagagtcgacntgcaggcagcnngctgtcaattccaaaggnntt

SEQ ID NO: 3111 - DNA, 737 bp, Canis familiaris
  misc_feature (119)..(119): n comprises a, c, g, or t, or includes no nucleotide
  misc_feature (130)..(130): n comprises a, c, g, or t, or includes no nucleotide
  misc_feature (188)..(189): n comprises a, c, g, or t, or includes no nucleotide
  misc_feature (245)..(245): n comprises a, c, g, or t, or includes no nucleotide
  misc_feature (247)..(247): n comprises a, c, g, or t, or includes no nucleotide
gaataccatatgatgcagcaattccacttctgggtatatatccaaaggaaacaaaaacagggtattatagagttacatgtagtgttattcacaatagtcagcatatggaaatagcccangtatctatcanaggaggaatggataaaaaaaaagtggtatagcacatacacatacacatatacaatggnntattattcacccatgagaaagaaggaaatcctgccatttatgccaacatggatacnanttgagtacattatactaagtgagataagtcagaaatactgtatggtatcatttacatgaggaatctaaacaagccaaacttaaaaacagaacagaatggttgtcaccagagcctgagggatgaggaaataggagagaagttgtttaagggtacaacctagcagctaatagataaataagtccctggagatgtaatgcacagtatagtgattatagagaacaacgctgcattataaataacacatttgctaagagactaaatcttaattattctcatcagaaagaaagaaatgacaattatatgatgtcctagaagctttaactaacactacaatggcaactatattgcaatatataaaattaacatgcataccttaaacttatgcaatgttacatttcatttaaatctcaatttttttaatggaaaacttctgggttaattcatagacagctttgtaattattattttcttcatcattatgatgagatgt

SEQ ID NO: 3112 - DNA, 898 bp, Canis familiaris
  misc_feature (80)..(80): n comprises a, c, g, or t, or includes no nucleotide
  misc_feature (390)..(390): n comprises a, c, g, or t, or includes no nucleotide
  misc_feature (569)..(569): n comprises a, c, g, or t, or includes no nucleotide
  misc_feature (640)..(640): n comprises a, c, g, or t, or includes no nucleotide
  misc_feature (669)..(669): n comprises a, c, g, or t, or includes no nucleotide
gaacaaagtcaccaggactgagtgaggcccagatggggaccggattcaccaggtccaggtgaggcccaggtggtgaccanagtccccgggtctgggagaggaccaggtaaggaccagattcaccaggtctaaaaggcccacatggagacctgagtcaccaggtatgggtgaggcccaagtggcatcccccctaacaaggtccatgtgaggccaacctgcaggccaagtcacccgattcacgtgaggcactagtggggactggagtcaacagttaaaagtgattctacaagaacaacacagtcaccaggacctggtgtggttcatgtgggaacgagagtcaccagtccaggtgagacccagttggtgaccacagtcaccaggtgcagtttngtggcttagggggggggaccagagtcatcaggaccatttgaggccaaaggtggagcaaagttatcatgtccaagtgaggcccaggtgggaacagagtcaccatgtcccattgatgccaggtgggaaaagagtcacaaggtccagatgaggcccaagtgaggaatagattcaccaggacntgttgaggcccagttgaggaccagtgtccccagctccgggtgagtcctagagggggaccagagtcacccgnttctggtgatatccaggtggggacaagantcaacacgtcagggtgaggcccagagtgggacgagaatcactaggtccaggcgaggccccgatgtggaactgagaaaccaggtcccatgatgcccatttgaggacctgagtcaccaggtccatgtgaggtcgctgtgggaaccagtgacctcatccaggtgaggcccaggtgggaccactgtcatcatgtccaggtgaggcccaggtatataagagagtatccaggtcc

SEQ ID NO: 3113 - DNA, 755 bp, Canis familiaris
  misc_feature (23)..(23): n comprises a, c, g, or t, or includes no nucleotide
  misc_feature (654)..(654): n comprises a, c, g, or t, or includes no nucleotide
  misc_feature (708)..(708): n comprises a, c, g, or t, or includes no nucleotide
  misc_feature (729)..(729): n comprises a, c, g, or t, or includes no nucleotide
  misc_feature (743)..(743): n comprises a, c, g, or t, or includes no nucleotide
cggtaccggggatcctatctgcncgtcaccgaggactggtgacgctggtcctcccctgggcatttttggtacctggtgactctgttccacacctgagcctcacctggacatgatgactctggaacctctctgggcctcatcctgacctggtgactctggtcccatctggaagtcacctggaccaggtgattctcgtacccctctagacctcaaccaattctggtgactctggtcctccactggacctcacctggacctagtgaatatgctccatctgggccaaatttgcacctggtgactctgtcactacctgggcctcatcgggacatggttccactgcatgacttgcaggttggcctcacctggacctggtaactctggtccctacctgggcatcatcgggacatggttccacacatgcctgcaggttggcctcacctggacccggtaactctagttcctacctgggcatcatcgggacattgttcctctgcatggcctgtagattggactcacctggacctggtgagtggcgttgccaccttggcctcacccatgcctggtgacacaggtccccacctgggcctcacttggacctggtgaatctggtccttacctggtcctcacccgaaactgctaactcggttaaccacntgggaatcacctgaaccaggttaatttggtccccatctggtccacatccaatcntggtgaatttatcaccccacntggacctgattgcngtggttctttct

SEQ ID NO: 3114 - DNA, 582 bp, Canis familiaris
  misc_feature (14)..(14): n comprises a, c, g, or t, or includes no nucleotide
  misc_feature (581)..(581): n comprises a, c, g, or t, or includes no nucleotide
ccgtcgttttacanggtacctggtgactctgttccacacctgagcctcacctggacatgatgactctggaacctctctgggcctcatcctgacctggttactctggtccccatctggatgtcacctggaccaggtgattctggtacccctctaggcctcaaccaggtctggtgactctggtcctccactggaccacacctggacctagtgaatatgctctatctgggcctcattggacctggtgattctggtccctacctgggcatcatcgggacatggttccactgcatcgcctgcaggttggcctcacctggacctggtaaccctggtccctacctggacatcatcaaggcatggttcctctgcatggcctgcagattggcctcacgtggacctggtgagtgaggttgtctcctgggcctcactcatgcctggtgacacaggtccccacgtgggcctcacttggacctggtgaatctggtccttacctggtcctcacccggaactcgtaactctggtcaccaccggggactcacctggacctgcttactgtgttccacacctgggcctcaagtagatcna

SEQ ID NO: 3115 - DNA, 714 bp, Canis familiaris
  misc_feature (1)..(1): n comprises a, c, g, or t, or includes no nucleotide
  misc_feature (10)..(10): n comprises a, c, g, or t, or includes no nucleotide
  misc_feature (19)..(19): n comprises a, c, g, or t, or includes no nucleotide
  misc_feature (24)..(24): n comprises a, c, g, or t, or includes no nucleotide
  misc_feature (28)..(28): n comprises a, c, g, or t, or includes no nucleotide
  misc_feature (31)..(31): n comprises a, c, g, or t, or includes no nucleotide
  misc_feature (38)..(39): n comprises a, c, g, or t, or includes no nucleotide
  misc_feature (682)..(682): n comprises a, c, g, or t, or includes no nucleotide
  misc_feature (689)..(689): n comprises a, c, g, or t, or includes no nucleotide
  misc_feature (696)..(696): n comprises a, c, g, or t, or includes no nucleotide
  misc_feature (706)..(706): n comprises a, c, g, or t, or includes no nucleotide
natggtggcntgagtcctnggtcntgantcntccgctnnaccctactgagccaccaggcaccctcattctgctctacctcttaaaattgtttgtgataatgagctttacaggggatgtctttactgctaagtggaatctttctacaatgtgatgtgatttctcctatcttaccttttgcacagatataaaaactgttccatatactaatgtgtttggaaggatataaaagctgggtcttttatgcctctgaatggaagaagagattttccttagacttcacctttaggcatcaacattctgtcaaggcctcaccaagaactctgagaaaatgtcaaaattatgggctgcctgggtggctcagtggtttagcacctgccttcagcccagggtgtgtcttggagtcctgggatcgagtcccacattgggctccctgcagggaacctgcttctccgtctgcctgtgtctctggctctctctgtgtctctcatgaataaataaataaaatctttgggaacaaaaatgtcaaaattaggctgtgcataattcatcctactgagtttgagtcttctctcaatacactacaatcatgacatgctgtccagtttgtaaagtattaatacatctgcagtctcacttgatggtcaaggttgtcttgtgatgaaggcaggagaggtccagtcnggagacnagtgtgnccatgaaaangcagttga

SEQ ID NO: 3116 - DNA, 529 bp, Canis familiaris
ggctggaacctgaggtgcaaccgcagcactaatgcctgttccgatcaccagaacaagttctcggggcttcttagtttttaagcttggaagcagcttcctgataaagtcaaccaaatgaagaggattaggaacatccaacagataagagggacatggaaaggctgtcgaaaatcatggatttcagctaccattttcgtcattgcaaagaggacaagtaccagtttctgagacctctcctgagtatcttaagcaagatgaccagaatattggaatggttgggtggctcagtggtagagcatctgcctttggctcagggtatgagcctggggtcctgggattaagtcccacatcgggctccccacagggggcctgcttctccctctgcctatgtctctgcctctctgtctcccatggataaataaataaaaatcttagaaaaaaataaaaaagaagaccagaatattgtgccagagcttgcagaaaaacctgtatcaggaatccttaaaggcaatcttaaagtcaattttct

SEQ ID NO: 3117 - DNA, 975 bp, Canis familiaris
  misc_feature (84)..(85): n comprises a, c, g, or t, or includes no nucleotide
  misc_feature (109)..(109): n comprises a, c, g, or t, or includes no nucleotide
  misc_feature (142)..(142): n comprises a, c, g, or t, or includes no nucleotide
  misc_feature (150)..(150): n comprises a, c, g, or t, or includes no nucleotide
  misc_feature (153)..(153): n comprises a, c, g, or t, or includes no nucleotide
  misc_feature (170)..(170): n comprises a, c, g, or t, or includes no nucleotide
  misc_feature (211)..(211): n comprises a, c, g, or t, or includes no nucleotide
  misc_feature (221)..(221): n comprises a, c, g, or t, or includes no nucleotide
  misc_feature (250)..(250): n comprises a, c, g, or t, or includes no nucleotide
  misc_feature (335)..(335): n comprises a, c, g, or t, or includes no nucleotide
  misc_feature (341)..(341): n comprises a, c, g, or t, or includes no nucleotide
  misc_feature (343)..(343): n comprises a, c, g, or t, or includes no nucleotide
  misc_feature (365)..(365): n comprises a, c, g, or t, or includes no nucleotide
  misc_feature (777)..(777): n comprises a, c, g, or t, or includes no nucleotide
tctgcttctcctcctccctcctccctctctctctctctctctctctctctctctcaaataaatcttaaaaaaagaaaagtgacnngttaggggcacctggctggcttanttggtaaagcatgcaactcttaatcttggggtngggggttngancctcatgttgggtgtanacattgcttacaaataaaatctttaaaaaaatctattaaanaaaaatggcngggtaactacacatgcttattttatctantctcccttccaaaaaattgttaaattatagcagtaaaatgtgtattttagaaaagtaaagaattaaaaaatattttatttaagangtgtantngaaaattttttaaaggctttancccttcaagagaaagagacacccccccaaaaaaatgagagattatagcccaatttttggacatagaaagtgggaagagaatgataagtgacttggcagagtggaaacaattccactaagtgctttcagaggccatgccccaaaaagcaggccaaatgtatatgctaccagccatggtagaaagcagggcaaaggcttggtgaagcctacattcagaatggatttcaagtttcactgcatcaacttggtctggtcactggaaatttattatggagaaatttcaagactcagaatctgtggagagcagaggagagatgggcatggcttggaaaggggacacatccatacagtcatgcggtctcttgcttcccttgaccacagaatcagtagcaagatattcaaactcccctacnttctctattccttctaagcttaaaagcagactactcttctctgaaggagctgaaagaccctaggggaaaatcttccagctacttggattttgtggggtttatttgtattaagattttatttatttattcattaaagacatagagagagagagagagagagagaggcagagacatagggagaagcaggctccatgcagg

SEQ ID NO: 3118 - DNA, 676 bp, Canis familiaris
  misc_feature (346)..(346): n comprises a, c, g, or t, or includes no nucleotide
  misc_feature (499)..(499): n comprises a, c, g, or t, or includes no nucleotide
agcacctgtgtagagagtataaacagggggccttttgcaattttactactaatcaactctttatcaaccttattaatgcatgagaatcactaggatatttgttaaaaatgctaactcttgacttaggacatggccaaggagtctgcattttaaatgtgtcttgggtaattctggtgcagttgatgagcagaccacactttgtgaaaactgatttcctcaataacaaatgaatatacttttctcaaaaaaattattattctcctggttataaaataaaaggtttagagaatgctaacaataaaaaagaatatagaaatcatttgtgaaaaaaaaaaaaaaagaaatncatttgtgggcacccctggtggtgcagcggtttagtgctgcctgcagcctggggtgcgatcctggagacccggaatcaagtcccacgtcgggctccctgcatggagcctgcttctccctctgcctgtgtctctgcctctctctctctctctgngtgtctctcatgaaaaagtaaataaaatcttaaaaaaaaagaaatcatttgtcattatactttctatagatgatgattaccaatatcttgatggctgtccctctagtccttttttaaaaatatgcgacctaggggcatctgggtggctcagtcggttaagcatgtgcttttggctca

SEQ ID NO: 3119 - DNA, 504 bp, Canis familiaris
atctgggtggctcaggcaataaagtgtctcactcttgatttcagctcaggtcacgatctcagggttgtgaggtggagccctgagtcgggctccgtgctgaacgtggagcctgcttaagattttctctcccccgggacgcctgggtggctcaacggttgggcaactgccgtcagcccagggcgtgaccctggggtcctgggatcgagtcccgcgtcgggctccctgcgtggagcctgcttctccctctgcctgggtctctgcctctctctctgtgtctctcatgaataaataagtaaaatctttaaaaaaattttttttctctccccctccccctctaccctactcttaggctctctttctcaaaaatgaatgaatgaatgaatgagtgaataaataaataaataaatctgttatccctgctggatttttttaattgaggtataattggcatgtcaattatgttaatttcagatatataacatgatgactcactgtttgtacttt

SEQ ID NO: 3120 - DNA, 804 bp, Canis familiaris
  misc_feature (25)..(25): n comprises a, c, g, or t, or includes no nucleotide
  misc_feature (182)..(182): n comprises a, c, g, or t, or includes no nucleotide
  misc_feature (204)..(204): n comprises a, c, g, or t, or includes no nucleotide
  misc_feature (210)..(210): n comprises a, c, g, or t, or includes no nucleotide
  misc_feature (215)..(215): n comprises a, c, g, or t, or includes no nucleotide
  misc_feature (217)..(217): n comprises a, c, g, or t, or includes no nucleotide
  misc_feature (225)..(225): n comprises a, c, g, or t, or includes no nucleotide
  misc_feature (236)..(236): n comprises a, c, g, or t, or includes no nucleotide
  misc_feature (252)..(252): n comprises a, c, g, or t, or includes no nucleotide
  misc_feature (266)..(266): n comprises a, c, g, or t, or includes no nucleotide
  misc_feature (278)..(278): n comprises a, c, g, or t, or includes no nucleotide
  misc_feature (281)..(282): n comprises a, c, g, or t, or includes no nucleotide
  misc_feature (288)..(288): n comprises a, c, g, or t, or includes no nucleotide
  misc_feature (296)..(296): n comprises a, c, g, or t, or includes no nucleotide
  misc_feature (309)..(309): n comprises a, c, g, or t, or includes no nucleotide
  misc_feature (314)..(314): n comprises a, c, g, or t, or includes no nucleotide
  misc_feature (318)..(319): n comprises a, c, g, or t, or includes no nucleotide
  misc_feature (322)..(323): n comprises a, c, g, or t, or includes no nucleotide
  misc_feature (327)..(327): n comprises a, c, g, or t, or includes no nucleotide
  misc_feature (356)..(356): n comprises a, c, g, or t, or includes no nucleotide
  misc_feature (360)..(360): n comprises a, c, g, or t, or includes no nucleotide
  misc_feature (363)..(363): n comprises a, c, g, or t, or includes no nucleotide
  misc_feature (379)..(379): n comprises a, c, g, or t, or includes no nucleotide
  misc_feature (453)..(453): n comprises a, c, g, or t, or includes no nucleotide
  misc_feature (456)..(456): n comprises a, c, g, or t, or includes no nucleotide
  misc_feature (463)..(463): n comprises a, c, g, or t, or includes no nucleotide
  misc_feature (484)..(484): n comprises a, c, g, or t, or includes no nucleotide
  misc_feature (495)..(496): n comprises a, c, g, or t, or includes no nucleotide
  misc_feature (508)..(508): n comprises a, c, g, or t, or includes no nucleotide
  misc_feature (514)..(514): n comprises a, c, g, or t, or includes no nucleotide
  misc_feature (530)..(530): n comprises a, c, g, or t, or includes no nucleotide
  misc_feature (534)..(534): n comprises a, c, g, or t, or includes no nucleotide
  misc_feature (558)..(558): n comprises a, c, g, or t, or includes no nucleotide
  misc_feature (591)..(591): n comprises a, c, g, or t, or includes no nucleotide
  misc_feature (593)..(593): n comprises a, c, g, or t, or includes no nucleotide
  misc_feature (613)..(613): n comprises a, c, g, or t, or includes no nucleotide
  misc_feature (622)..(622): n comprises a, c, g, or t, or includes no nucleotide
  misc_feature (625)..(625): n comprises a, c, g, or t, or includes no nucleotide
  misc_feature (629)..(629): n comprises a, c, g, or t, or includes no nucleotide
  misc_feature (649)..(649): n comprises a, c, g, or t, or includes no nucleotide
  misc_feature (663)..(663): n comprises a, c, g, or t, or includes no nucleotide
  misc_feature (665)..(665): n comprises a, c, g, or t, or includes no nucleotide
  misc_feature (689)..(689): n comprises a, c, g, or t, or includes no nucleotide
atccaaactattttatagtttttcncagaatactgaaataataaaataaaatccaaaagtatatactaagttaaaaatataccaccttgagatagttgaaagttataaataatatattagccagtaaatttagtaatatttatgaaatatattttatctacatatggaatctataagaaagnaggaagaaagcaaagaagacgnaaaganggagnanagaaaagnagaaagaaagnaagagagagaaggaantagaaagaaagaanaagaaagaaagnaanngaaganggaagganggagagagaagangagangganngannaganggaaagaaaggaaggaaagaaggaggganaagnagnaagaaagaaagaaagnaaagaaagaaagaaagaaagaaagaaagaaagaaagaaagaaagaaagaaagaaagaaagaaagaaagaaaggnaanatcaatnattttggataacagaaccaanacagacaaatnnaaagcatccatnaaaccnaaaataataatttagnaaanatgatgtagggattcctgggtggngcagcggtttagcgcctgcctttgtcccagggngngatcctggagacccgggatngaatcccangtngggntcccggtgcatggagcctgnttttccctttgccngngtttttgcctttttttttttttgngactatcataaataaataaataaaataaataaattaattaattaaaaaaaaaaaaagaaaacatgatgtaggggcagctggctcagtggtttagcaccactttaagccgagggca

SEQ ID NO: 3121 - DNA, 820 bp, Canis familiaris
  misc_feature (231)..(231): n comprises a, c, g, or t, or includes no nucleotide
  misc_feature (272)..(272): n comprises a, c, g, or t, or includes no nucleotide
  misc_feature (534)..(534): n comprises a, c, g, or t, or includes no nucleotide
tgatgagaatattatagaaaacattatctatacacattaataacagaacattgaataactgcattaaaagtaaacacctgaggggatacctgggtggctcagtggtttggcgccacctttggcctagggcgcgatcctggagtcccgggatcgagtcccgcgttgggctcccgtcgtggagcctgcttctccctctgcctgtgtctctgcctctctctctctctctctctnatcaggaataaataaataaaatctttaaaaaaaaaaaaaancaacataaaagtaaacacctgagttttccataagtaggaaaggtgttaataaaaaaaaaactcttgaaaataataaagaaattccacagtgtaaaattacaaatagtcaacatgtgctttaggaaagttaaaactttaaaatattataaaaggaaaatgtgattcagtaaaaatatttcctttatataaatattaatacttgtttaaataaaccttaaaactcaagggaatgcaagttaaaaaaccagttaaactgatattncaaacagtaatattcaaaagcacattgatttttgcagtactgaaaacagcttttaaataaatctgcatatgtaaattacccatataattgaagattcactttcaaagtaacaaaatcttatttatagttgagtttttagtgaatctgcaaattataaatttattcattttggtgtactgttactcagtttaacatttttcttgagacgatgtgactgtcattctgaacactaattttgagtttggcattgagcagggcctgataagcattcagttcatatttaatg

SEQ ID NO: 3122 - DNA, 846 bp, Canis familiaris
  misc_feature (9)..(9): n comprises a, c, g, or t, or includes no nucleotide
  misc_feature (265)..(265): n comprises a, c, g, or t, or includes no nucleotide
  misc_feature (289)..(289): n comprises a, c, g, or t, or includes no nucleotide
  misc_feature (295)..(295): n comprises a, c, g, or t, or includes no nucleotide
tgatacgantcgagctcggtaccggggacacaccctgggctgaaggcggcgctaaaccactgagccacccgggctgcccactggggcatattttaagtacatgattactttcaaaagaaactgctgggggaatccctgggtggcgcagcggtttggcgcctgcctttggcccagggcgcgatcctggagacccgggatcgaatcccacatcgggctcccggtgcatggagcctgctcctccctctgcctgtgtctctgctgcttntctctctctgtgggtctctcaggnaatagnataaataaaatcttagggaaaaaaaaaaaggaaactgccaagtttttttaccaacgtggctgctccagtgggtacactacccacccaggagtgagggttacagttgctctgcatcctctccaggctttgaaattgtctgattttttttttgtttaatttaaaccattgtaataaatgtagttagtatcttactgtaatttaaaaaataccttatttaaggtttaattgatataatctaagttgttaccatatctcgtgctctttattttttaatgtagctctacacttccatttgatatagttttacttctgaaaggactttctttactatttcctgtcatgtggggctcctgatgaccagtcttttcagtttccatttgctttcattttagaaagaaattttccctggatatagaatcctagattgactttttttttaaaataatactttaaatatgctagctgctgtccttttgcttatggtatttctaacacaaaatctgctgacatctttatctttgttcttctgtttataatgtgttttgtcatca

SEQ ID NO: 3123 - DNA, 749 bp, Canis familiaris
  misc_feature (7)..(7): n comprises a, c, g, or t, or includes no nucleotide
  misc_feature (14)..(14): n comprises a, c, g, or t, or includes no nucleotide
  misc_feature (16)..(16): n comprises a, c, g, or t, or includes no nucleotide
  misc_feature (134)..(134): n comprises a, c, g, or t, or includes no nucleotide
  misc_feature (142)..(142): n comprises a, c, g, or t, or includes no nucleotide
  misc_feature (233)..(233): n comprises a, c, g, or t, or includes no nucleotide
  misc_feature (695)..(695): n comprises a, c, g, or t, or includes no nucleotide
atacgantcaagcncngtaccggggatctgggatttatccaagcctgacctgaacatccctcttcccagtccactcccccaggcttgtcccctttagttgaaaatgaatactgagggcagcccaggtggctcancggtttancgccaccttcagcccagggcatgaccctggggactcaggattgagtcccacgtcgggctccctgcatggagcctgcttctccctctgcgtngtgtatctgcgcctctctctctctctctcagtctctcaggaataaataaataaaatctatttaaaaaaaaaaagaaaatgaatactgcagccatatcaatcctttattcagcaatatgccttaagtcaccactttgtacaaaaaccttgagttctctaaggcctaacacattacctctgaactgtcccacctccacagtgtggggcctcactaccttctcgtgtgtgtaaccatatgtgtcctgcctgtctccttacactccttcactttctgctcctttcaggtgcctataaaccctctcgcctctacctgggatatcccagcctcattaaaggcttggctgttttccgtgccatttcttgttacacaactgctccagcctccaaatagtaataaagtcaacttcttaacataatatttatttttttgcttatttcctgtgttagtcttatcattaacttntgtagggaagaggtcccatattcatccagagcctatcagaatgggagaggaggt

SEQ ID NO: 3124 - DNA, 775 bp, Canis familiaris
  misc_feature (6)..(6): n comprises a, c, g, or t, or includes no nucleotide
  misc_feature (10)..(11): n comprises a, c, g, or t, or includes no nucleotide
  misc_feature (13)..(13): n comprises a, c, g, or t, or includes no nucleotide
aacctntagnngncggcctgcagggcatgcaagcttgggcactgggccgtcgttttacagaaaattggattgcattctccttacttttgggccatcttgagtctctggctgtcagggaactctaataattctggtgccagtgaaataagctttggacttgagaaaagaggaacttaattaatgtatggaagcagttgagttgctttatttatttaggtttcatttaagttatttatgtactgagattcctacaggtaaaaaaaatgaattatctaaattataattcattttttgttcatggaaggcatgaattacatgaatattatggataataaaagggtctcaaaggggacactggggtgcctcagtggttgggcctctgccttcagctcagggcataatcccagagccccgggaccgagtcctgcattgggctccctgcatggagcctgcttctccgtctgcctatgtctctgcctctgtctctccctctctctgtgtgtctctcatgaatgaatgaataaattaattaattaattaatccttttaaaaattagagtctttgggtacctaaaaacatttaacactgacacatataaatacttgtactcaggttggtagtaaggcaccaggtagtagcaatagaaaaaaaaaatctcttatacaagagacttgatggtccatggcaaggagcagagagaagatagtcagggtagaggggctgctagataggacttatggctgtaggtagaacacacctgctgccaaaagtgct

SEQ ID NO: 3125 - DNA, 671 bp, Canis familiaris
  misc_feature (11)..(13): n comprises a, c, g, or t, or includes no nucleotide
  misc_feature (19)..(19): n comprises a, c, g, or t, or includes no nucleotide
  misc_feature (22)..(22): n comprises a, c, g, or t, or includes no nucleotide
  misc_feature (33)..(34): n comprises a, c, g, or t, or includes no nucleotide
  misc_feature (45)..(45): n comprises a, c, g, or t, or includes no nucleotide
  misc_feature (659)..(659): n comprises a, c, g, or t, or includes no nucleotide
  misc_feature (662)..(663): n comprises a, c, g, or t, or includes no nucleotide
  misc_feature (666)..(666): n comprises a, c, g, or t, or includes no nucleotide
ctaagggtcannntgtgtnccnctctactaggnnatatgtgtccnttgggagatttttaaatcccaagacaaaatttgactcctgtagattctgattcgatacaagtttggtcactactttctcccttcatatgagctactttgcctataccaaaatcccgatctccagtagttttcgttagtctcattttaaaattaaaaatgacttctgtgagtctgatataaagggaaaaaagctcttaggtagaaaacctcctgggtcttccttctaccctgaaactaattttaagaaagctaattaaaggaattgatttctgggcagccctggtggcccagtggtttagcgccaccttcagcctggggcgttatcctggaggccccgggattgagtcccacatggggtccctgcatggagcctgcttctccctctgcccgggtctctgcctctctctctctctctctctctctctcaggaataaatgggtaaaattttaaaaaaaaaaaattaaaaaaaaaagttgattcccatttcaatgattcctgggtaacttcttccagcaagaacactggtatacaagctataggtacccatatgggaagagaagtggactttgaccaagggcagagcggaaagaccaaaatatggtccagaattagtntgnntcngccag

SEQ ID NO: 3126 - DNA, 341 bp, Canis familiaris
  misc_feature (154)..(154): n comprises a, c, g, or t, or includes no nucleotide
cttaattctaagttatttgaaaagaactatcttagagtacagttactcggaagatgaaggagacttgagaaatattagtgtaaatcttttggtggaaaggagcaaagcttctcatacttgaaataagaatgagaagggcagactctattaaaanaaagaacttgggcagccctggtggcccagtgatttagcactgccttcagccgagggcgtgaccctggagacccgggatcgagtcccgcatcgggctccctgcatggagcctacttgtccctctgcctgtgtctctgtctctctctctctctgtgtctctcatgaataaataaataaaatcttttttt

SEQ ID NO: 3127 - DNA, 736 bp, Canis familiaris
  misc_feature (16)..(16): n comprises a, c, g, or t, or includes no nucleotide
  misc_feature (56)..(56): n comprises a, c, g, or t, or includes no nucleotide
  misc_feature (84)..(84): n comprises a, c, g, or t, or includes no nucleotide
  misc_feature (242)..(242): n comprises a, c, g, or t, or includes no nucleotide
  misc_feature (274)..(274): n comprises a, c, g, or t, or includes no nucleotide
acatgcaacagaaganctgacctagcctgggaacaataggaaaggctttcttgaanaaatgagacaagctgagctctgaagaangagtagaggtttgtaaggtaagggggacaaaattttcctgagagaacagcatgtggtaagaccctgtggcgggagggaatttgctatctgacattgaggaaaggaaaggagctcatgatggttggaggggagtggtatgaggtagggctacaaggtanacagagaccacatcaagtcagctgtgttaaanatactgaacttttgggacacctgggtggctcagcggttgagtgtctgcctttggctcagggtgtaatccccgggtcctgggattgagtcccacatcaggctcccttcaaggagcctgcttctccctctgcctgtgtctctgcctctctcttggtgtctttaatgaataaatacatccaattttaaagaagatactggacttttccttgaaaagactggaaaactaatgagaatttttatataagcaagtagcatcattggatttgcatttagtaaaggttgcctggcttcacatggatgaccttagagaaccatttaggaagacattgtagtaatctacatgattgtatcttaaaagtatggatataaataaattggtgaatttgggacatatttagatgattgactttaacacttgtactctaagatggaaatgcccctgaatgtttctatggcagcattt

SEQ ID NO: 3128 - DNA, 549 bp, Canis familiaris
  misc_feature (8)..(8): n comprises a, c, g, or t, or includes no nucleotide
ataagagntataccatagtcaagtgtttaaaagaataggagaaggatgcctgggtggttcagcggttgagcatctgcctttggctcagggcatggtcccagagacccaggattgagtcctgcgtcgggcttcctgcagggagcctgcttctccctctgcctctgtctctgccactctctctgtgtctctcatgaataaatgaataaaatctttaaaaaataaaaaataaaagaataggagaaaatatagattatttcaaataaatgtgaagaaaaatattagaaaaagttatacttttctaacctggtaattattcccattgccaggtacttcatgttcagaaggattcactgcaggctccattaagtaatacttcttgatgaactttaatttaatttattagaatttaatttccataaaacttagtagaaatatgggctgtcacagagtttttaaaaggagtcatctagtctgactatagctattttgtgaagtagaataaaagtgcctttattatctaactctttagttctaaattattaataaagc

SEQ ID NO: 3129 - DNA, 780 bp, Canis familiaris
tttcaagatattatttttaagattcttttgagccttgtttaatacttatgggatatcttaaaaaacatgcaatgaaaacttgagtcacaataacacttcttgtcctttaaatgttgctcagcaaatcttctccctcagtgtgaatttaaatgctttgagggcataaaaattccaaatttctgtaagcatcccccaattaattccatgataaaatgatacctaaatctgaaaagatgctgtagacatatttggtatttgattaaataaacaagtgtaaaactctagcagttgtaactggatggagggagaaggaaagtataccataagagtctgtttgaggaatccctgggtggcgcaacggtttggcgcctgcctttggcccagggcgcgatcctggagaccggggattgaatcccacatcaggctcccggtgcatggagcctgcttctccctctgcctgtgtctctacctctctctctctctgtgactatcataaataaataaaaattaaaaaaaaaaagagtctgtttgagtctcctttcctgccttcaaaggggtttaaatttgaggaagagaggaaggggtaaataaatatgtaaataatataagagagtcaacaaaaatctggtagattcaggtggagtggaatagccagaaggcattgaattaaaatggacagactcagaattatgaacgagaacactggtatgcagagcaagtgctggtttaaaaccctatccaacatggaccaactcaagttaaggacattcacagctaacc

SEQ ID NO: 3130 - DNA, 965 bp, Canis familiaris
  misc_feature (89)..(89): n comprises a, c, g, or t, or includes no nucleotide
  misc_feature (111)..(111): n comprises a, c, g, or t, or includes no nucleotide
  misc_feature (156)..(156): n comprises a, c, g, or t, or includes no nucleotide
  misc_feature (161)..(161): n comprises a, c, g, or t, or includes no nucleotide
  misc_feature (286)..(286): n comprises a, c, g, or t, or includes no nucleotide
  misc_feature (318)..(318): n comprises a, c, g, or t, or includes no nucleotide
  misc_feature (386)..(386): n comprises a, c, g, or t, or includes no nucleotide
  misc_feature (393)..(393): n comprises a, c, g, or t, or includes no nucleotide
  misc_feature (481)..(481): n comprises a, c, g, or t, or includes no nucleotide
  misc_feature (498)..(498): n comprises a, c, g, or t, or includes no nucleotide
  misc_feature (511)..(511): n comprises a, c, g, or t, or includes no nucleotide
  misc_feature (899)..(899): n comprises a, c, g, or t, or includes no nucleotide
  misc_feature (952)..(952): n comprises a, c, g, or t, or includes no nucleotide
tgagaaatctttcaattagaattattactgatatttgtaaaaatacctgtttttatcaaatcactgggaaggacttcctgcttatattnggataaactatatgaaattggngattcaataattttgatagataaaaatggcaattttaagttttanatttnactttctaaattgagatataattcatacgccataaaattcaccctttaacccacacaattcagtgattttttttcacaagattgtgtaactatcactactaattccataacatttccattgcttntaaaagaaacttcatagggatgcctgggtggntcaatggttgagcatctgcccttggctcagggcctcatcctggagttccaggatggagtcccacatcnggcttcntgcgtggaaccagtgcttctccctttgcgtatgtctctgcttctcttcatctgtgtctctcatgaataaatacgtaaaatactttttnaaaaatatgggagatanattatgaatctanaaggccttgacaccatccatgaccttttgtcttggaaacaaactccaaaggcagcaactgtaattggtcctccctacctagtaaccccctcacggatgccagtctcataacaaatccgaacaaggagtaaagcaataagagcacaaaaatgtgcacagatactttcaacaaagggatgaccaatgctttcaattaaaaaggaatctaaaaagaaaacagcaacatcattttaagtacagccagagcaactcattctgctacttcagcactccccaacccctccacctttcagagatgctgggttgacttttttcccatggaatgtgatgctctttctcagatattgtcatcaccatccgtaatgccaccagccttgtattataaccangggcctgtattactgttatgtgtggatatagaaaatgaagtacaggttatgtnatttacccatgat

SEQ ID NO: 3131 - DNA, 741 bp, Canis familiaris
  misc_feature (714)..(714): n comprises a, c, g, or t, or includes no nucleotide
  misc_feature (734)..(735): n comprises a, c, g, or t, or includes no nucleotide
  misc_feature (738)..(738): n comprises a, c, g, or t, or includes no nucleotide
ctgtgaggagctgtttctccctctgcctatgtctctgcctctctttgtgtctcatgaatgaataacatcattaaaaaagaaaaaagagaagtttttttaagaaaatgaaccttaaatagagcgattgaattttactggagctgtgcagtgttaaaggaggtcacatattagaaactaatccatccaaagggtaggtgttattcttccttcaaatttcatcaccttgtcacagcccttttagctagctggcatgtgacactattctcagtaatttgggggatagggaaggggagaaaatctcctgcaggctccatgcccagcgtgggccctgagactggaacccaagctgaaatcaggagtcagacgctcaaatgacttagccacccaggagcccctgtccttagtaatttttttaaatttggggaaggggttgtcctttatttcagagtgaacttataaatacagattttgcagaatatttgaaagagtggttttcatggaggaaggagcatctagagcaatattgttaaaatacaaataggggggcacctgggtggctcagtggttgagggtctgcctttggctcaggtcataatcccggggtcttgggatggagtcccacattgggctccccacagggaacctgcttctccctctgcctgtgtgtctgcctctctgtctctctctcataaataaaatgtttaaaaaaatacnaataggatccccgggaccgnnatngaa

SEQ ID NO: 3132 - DNA, 674 bp, Canis familiaris
  misc_feature (95)..(95): n comprises a, c, g, or t, or includes no nucleotide
  misc_feature (666)..(666): n comprises a, c, g, or t, or includes no nucleotide
tcattcagttaggtaagtggtacagccagatgtctgataccaactcctctgctgtctgataccaactcccctgctcaaaccactataccatctantctctgaattggcacaaatatttcaggatactggggaaaaaaggatatagggagggggcggaagttgtgagagcaggcaggcaggcaattatgacagttacagtaattctttaaatttaaagttagccatctaggctgttcctcattcaaaggttgttgtgatagatgcttccaggttgcgtatttattaatcagcaaaatctattttccaagtagccattttactaataactaaatgacttcagcaagaccaaacacaatttgataatcaacctaaatttggtgttcaaatttttctcaaattcatgtgtcatttagttttcattctcttttaaaaatattttaaaaagggatacctgaggggttccctgggtggctcagtggtttagcacctgcctttggcccagggcgtgaccccggggtcccgggatcgagtcccacatcgggctccctgcatggagcctgcttctccctctgcctgtgtctctgtgtctctgtctctctgtctctctctctctctgtttctcatgaataaataaataaaatcttaaaaaatatattttaaaaattncgtaaaac

SEQ ID NO: 3133 - DNA, 933 bp, Canis familiaris
actgaaggcaagaacatttgactcgcaagagacaaaatttgttactagagaaatagattattttttcctggaagtctccagattgggatttacttatggaacaccaagccagagccactagaaagttagagttcttctctgaatgataggagggtatggcataacagtagttccttctagatgggctctgagaaggaggaaagggagataaagagggaataagatacaaatgagatattttttttatcacttaaagtctaaggtgctgaagtggctggtgatgtttgctttcaatcctagttacaagtcttctcaggaaaacggtacacatggtatgagtgagacaaaatcatttgcccttgggacgcctgggtggcttagtggttgagcttctgccttcagctcagggcgtgattctggaatcgagtccctcattgggctccctgcatggagcctgcttctccctctgcctgtgtctctgtctctccctctgtggttctcatgaataaataaacaaaatcttaaaaaaaaaatcatttgccactaatcatttttagttttttccattatataaaatcagcccattacataaagaattctgaacaaaaatacaattggatatattagtggctatttacgaagcgaccaactaatctagagaaaaatattaaagttatatacagagaaagcaaatataaaccataagcttccaccattgacacagcataattatgctaactagtcctcaaaagttttttctatttctcaaaatatttgattatcatcatataagcacatccccagattgaggccactctgccctatgccaagttcacagttgctagggaactaggaggcaaacacaaaagttattttgagacacctgggtggctcagccattgagcgtctgctttccacccagggcatgatccc

SEQ ID NO: 3134 - DNA, 679 bp, Canis familiaris
  misc_feature (586)..(586): n comprises a, c, g, or t, or includes no nucleotide
  misc_feature (604)..(604): n comprises a, c, g, or t, or includes no nucleotide
  misc_feature (616)..(617): n comprises a, c, g, or t, or includes no nucleotide
  misc_feature (625)..(626): n comprises a, c, g, or t, or includes no nucleotide
gaaaaatgctatttaaaacctcaagtgttgggcagcccgggtagctcagtggtttaacgccgccttcagcccaaggtgtgaacccggagacctggtatcgagtcccacgtcgggttccatgcatggagcctgcttctccctctccctctgcctgtgcctgcatctgtttctctctgtgtctctcatgaataaataaataaaatctttaaaaaaataaaacctcaagtgtctgctaacgaaggagcatccctggtaaagaatgagccctaacctccctgggtccctgttgggccttgctgctgttaatggcttagaagggttctctggcctctaagagcccggatgagctgtggctatacaaaagcgggtctggaggctttaggtctgggtagggatagaggtaaatccctttgcctaataggaagatttggaggagggagtaaggcagagaaagcaatgagatggcccagggtcaggctctccaagggatgggtagccagtgaaaacccccgggggatgaggggttgtccagggaacattcaggaataggaaatctgttctctcatctgtgttaagtgtgctgttntcttcagtaatgccatgnctttctggggannctgacaanntcatggcttgtatttgcgggtgctttgatggtagcttgcagggcatgtgggag

SEQ ID NO: 3135 - DNA, 3980 bp, Canis familiaris
ctggcggcgaaggtccgcggcgggctcggcgtggctgcggctgcccaagaccccccagcccggccgggagctcccgcagacccaccttcgcggcgcgcgcttccctccagaggaggtcgggctcccggctctgcggacccgcctggcgacctcgcctccggcggcggggcgcgcggctgcggcgcccggggcatggcttcggcgggcagcggcatggaggaggtgcgcgtgtcggtgctgacgccgctgaagctggtggggctggtgtgcatcttcctggcgctgtgcctggacctgggggccgtgctgagcccggcctgggtcacggccgaccaccagtactacctgtccctgtgggagtcctgccggaaacccgccagcttggacatctggcactgcgagtccacgctcagcagcgattggcagattgctactctggctttactcttgggcggtgctgccatcattcttattgcattcctggtgggtttgatttctatctgcgtgggatctcgaaggcgcttctacagacctgttgctgtcatgctttttgcagcagttgttttacaggtttgcagcctggtcctttacccaatcaagttcattgaaactgtgagcttgaaaatttaccatgagttcaactggggttatggcctggcctggggtgcaactatattttcgtttgggggtgccatcctttattgcctgaaccctaagaactacgaagactactactagaaccaacagtctcagattttaaaaacaaccaaccatccaacaaaaggattacttctgtatcttttctaactcactgttttctaaaacacttgtggagtatcaagcagtttgctcagttgatttaatatcttttgccttttggctgtcagtatcataaccagcttttacatccattttagggacctgcacaaattaagagagctgattagacataggcaaatgctgcaaacttccaatatgttcatgtcatttttcttgacaagtgaaagggtctgtatgacagcaaccattgtgagatactagttggaatgagaaatgcctgaatctcctattgcctgcaggggagcagctggcataagaaacatttagaagttcctttgctctgacaaggattccactgctatagagtccttattacctgcttatcccacccaatgactaaattggccattggttatttgcttgagtgagcttttgaaaggtgaactgcccttcagcacctaatgggagttctgagtgtaatgggttaaaggtatatagattctaccttcaagaatagtctttttgaatgggaggcaatgctttggcagtcagcatctccctgggaaaggagtcaagacttggagacatgtgcttttcattatgtggttagaaattgtgcctcagccgtatctagaatgaggacaattgagagtctctactttccctggggcaactagaaagaactatgcatgagttgcttttgtcctaagtaccctttaaatcatttaccaaacattaccgcaaataattgtgcgtatgtaacaagcttaaatatttttatagaaggtgaaccattagtatacatggtagtaaactattccgtagccctatacatgcatttgcctattacacataaaagtaacatttgctctagtgaagtgatttgaacactaaccttgtacacgttaagaggcttagattggtattcacacttacttactgtacaaaagtacatatattttaaagcttttgctctctgttctctactgtttcactggaaagttttaatagaattgtaaagaagaaaaattgcaatggtgttaacctgaaaattcatgattcttctgtaagcactatagttcaacgaagagtagcaattagaatgatcattttgttaaaaattcagtaaaatagaaggctgctttttttttcaagtaccttaaatgtctttattaaaaaataaaagaatagtgatagatttatagaaatgtcttaatgtctcagtagaggagtagaattcattggtgatcacctggtcctctgaagtgaactaatgggctaactgatttgtgcacacaattatgatggatttatgttacaggaatcatttgttggctgttcaaatggaaggaaatatcaatgatagggaataagtttgccactaatctcagactgcaaacttgtgttaatcctgtttactatacaaatttggatagtttaattgtaaacatatttttatatcaaatatacagttctaatataaaagttataaataattatttttgttaacaaaggcactaaaacagtattcctggttttggcccttttgcagaaagaagcattggaaaaatcatttaaaacatacttatgttctattgtattgcaaaatccgttaagagcaggactacatcaatagtatttaataatttggtttacctcccagaacagagttctgctttcagcatgtcttatgaactgtttgccaaaacaacagaaaaaaaaatctattttattattcaaatgcttagaaaaaaaaaaaaaccctcctatcttgtgacttttctgtaggatcacaaagtaaatatgaagaaccaggctgaatcttattttagcaatgacagacaaaagtaattaaatgcatcctagagagaaacctttatgaaagtatatgattctctctagaatcataagaaactatgggtgaagttttccagaaaaatattagtattatataatcctttgaagcaattttcttgagaaatagtaaaatctgggccagactgtcttgcagttaattgcgtattgtcagagcagcatgagaaatacgatatttgttggatagggatttcggttactaaccactctctattgtgagagagtctctttattcctgaataatggaagaacagtactttggtgctgacatcaatgaggcacttttcttagtcctagtggaggatgcagtgtgctgttagaccagtaccacatctcgagtcttttcaagttttcattctctgtcaatatgacaggctggaaaatgacaatatgttataggctaaggcacacatgtttgcagtacactgaaaagtagatttcttctataacttttttcctctccccagtgaagagccctatgttatatttctaccatcactaatatttgaaagtatttcatgactaacgaactcagtacaacatgaaagttgttgctcatccgaaatatggtatcgtctatcaaaataaacacgtgaattttcacctacattatgtctttgccgctttaggtttgtttgatgttttcttacaagcaaaactgttaactataaatccattgtttatcttagatatatacatgtacacacatagagcataaaatactcagcagggctagttatttggatttcttgcacaactatttagctttttgtaagttcaacatgtaaattttaaagacaaatatagagagacctatgtgtttgaaatataaatgatatatatggattagcatgtacctgtatattattaaacatgcaatgaactgactggtaagtgatgtctaattgtatggctagcaatgtaatttattcagactgtatttttgtacagagcagcgcacactaacctatgcctctgtgtcctctttaatgcctaaaactgtgcctagaaatttcatctgtcttaagaaataaaattatacttcatgctgtttatgctatagtttctctactgctgttctatatttattatttttaaatatatgacatgtttactacttaaatatgaatccatggtattctggttattttttttaacagtcctctggggggaacctgtttctcactccagtggttttgagtttgcagtttcacaatcagttcttcatttcatgatttttgtagctgacatatgaagttatctatgtggataaaataaaaataaaagtggtttcactgaaaaaaaaaaaaaaaaaaaaaaaaaaa

SEQ ID NO: 3136 - DNA, 684 bp, Canis familiaris
ttgaaagtccctcctgatgctaaggttctgtggtccataaataagcttctaaaattctttcagctctgagattcagattctattcttttgagtgggcaaggaagtcctagagggttgaatggatttcctagagctgtggcattgtttgtttgttggaaatcatcaagcattttcctccttctatatagagagtgaatttccaagaggactggaagattatcacagtgctgattggaggcagtgatttatgtgactactgcacagactcggtaaggggggcagccaggcctactcattgctcctgatattgaccaaaagaccttagatgtgctctctgagaacagtctctagaaccaaccctgggactgtccaaagcctgtgtgtgtgtgtgtgtgtgtgtgtgtgtgtgcgcgcgcacgtgccgtgcctcctcttaccccatgaccctcaggtttttggttctaattccatgtcccaagtggtatgaggtagcaggtggcaaatatggtgcttctgctccactcttacaatttctgagaattcaggaagtggggagatgtaaaccccagcagtaggatggaggacccacacattcaactcttaaactaaagctctggctgaaggttccagtcttctggttggcccatctttgataatagccagtaatcaactgttcaggttcta

SEQ ID NO: 3137 - DNA, 847 bp, Canis familiaris
cagagctggggccacagcctgacctgtggacagtggtctcatttctcacacacatcagagccaagagctgtaccctccgaggcctcctctgcccctccatgacctgcccttccactctgagctacacggctgggacagaggtcaaggacttcatggggtttgcagaggctgggttggggagtgggctttggtggagtggagtggagtggagaggagaagcaaggcaggcagggggcgccacggagccctccagggtggcagatgagcttgtgaggttgtacctgctgagctcccctgagcaaccaagcactggaaaatcaatatcgttttccactttctgtgctgggcgactcattttcattatgtctcacgcttcctctgtgctgctggggactgagacggttctctggccatggtcccagccctaatctctgtacaggatgacaagcttggtgagcacatggctctaggacccatggtctgtttcacactgcctcagaacctgggggccatccccaggcctgccacccttagctccacccctgcccttcttaaacacacacacacacacacacacacacacacacacacactccaccctaactcatcacccacatttttcagagggtggaatatgtgaccattgaagcaccaacacttcatcattttaacccttatggatgaaaatcttgcccaaatgttctcaaatctcccctgacattaaaaaaaataaaacctgtatctttatctctttttattaaaataataaatatctgttatatacaaagtttggcaactataggccattaggaggaaaaattatttcatgcaggagtcattaatgaag

SEQ ID NO: 3138 - DNA, 344 bp, Canis familiaris
gtagagaatccctcccagaaggtgtgttatgaaggtaacagtgctgatacattctctctctctctctctctctgtctctctctcgcgcacacacacacacacacacacacacacacccctaccaacagccttcaggtgttgccatataaatttgcactgatttttaagtctgatgtgattttctgcctctctttggagagagaggccttatcccagtctcttaggaggtcagagaaaaaagctctgaggactttcttttggcctccagaggcttttccacagcttggctcaggagaaaacaaagaatttgtaaaatcagtcaatcaatcaatcaatcaatcaat

SEQ ID NO: 3139 - DNA, 720 bp, Canis familiaris
tcagaacctggaagtcaagggcttttgtgaacatttccacaaatattgtcatggttattctggaggccaggtcgaacccagtaattacggagctttgggacacaccacgaccacagcagcctgcggggacagcgacactggagggacagaggcgccctggcgaggaacttgggagacaggcaggatgggcccgattctagctcggccccttctggccctgcgacttaccctcttagactctaagtttcctcatccgttagatgaagaaaatataccatttcataataccatgaggaccagatggggggtgtgcgtgctccatctgtcccctcttctcatctatacgtgtgtgccgcgtacatccatgtgtgtgtgtgtgtgtgtgtgtgtgtgtgtatctctgtgtgcatctatacaaagcacctttgtgtgtatctcttacttacctacaacctgactaaagtccccccgggagtctaaggcagcccgtttctgataggtgcacacttgggagtcgctaacgtcttcctgattaaagggtcaaatggtgctttacacaaatcagcgaggtctctgggtgcaggaagcatgagctctatggagagaccctcaggctctctccggtgaccagtgagactcacactggaccttggaagctgagctgcattcatcacagccgcttctgcttccagagcttctcctgcttccctcaaacaagcc

SEQ ID NO: 3140 - DNA, 758 bp, Canis familiaris
ctcttaagctagctgggttgtcccagtagcttttctgtgggtggaggggtgcgaagaaagaagtctggccaacaggaactatcacctccaattaacctttgctcctgcctgaaaaaaatcacttgtgacagatggcagcttatctacctctctattaacccttcctcctaaaaaaccaaacagccacaatgattactaacttggatgcggtttctgggaagaggcctgtagctcgctacataatctatcttccgtggttttttcctggtgtgggtactgccaacattttctgttctcctcagtgtttgcggaggatagagctataccactgagagaccccctccaaagccatggtctaaatgctaggtttgtttctccttgggcagttgttctcaaacctgaaggacctgcctcccttcggaggtctggtccctgtcccaggggcctctgctgggcatggtctggtgtgtgtgtgtgtgtgtgtgtgtgtgtgtgtgtgtggacagacaggctcctgccctttccaggcctattttcagttccctttcttagttaacttccctttcttggttagaaactcaaagaacataccttgaagaccaactgtccttcccctcctctgttccactgggagtgggagagagaattgagcttattgaggagcaagtgaacctatatatagtcagttcaagagggagaacctttggcagaatgtcccctaggtcctttcccgtttggtcagtgcaaggacctttctt

SEQ ID NO: 3141 - DNA, 578 bp, Canis familiaris
ttgccctccatagcacagactcagagctagacagaaacacaaacctcaggcagtctcccatctcatacctcaactaccttctagccacaccctctgctcatgtgcaccaacccaattcacatacccccagaaacacccactgcttctggtgaaccagatacatgctaacactcaatgtgcttatagacatttgtttgggagtgcaaagattcatacacagaaatacacatgcctgcgccttgtcacacacacacacacacacacacacacacgtgcacacactccttaaaggcacatctcatttcgagaacaaatccagagctctcataaaaatgcacattggtcctaaatataccccaactctcacactcagtagaaatcccccaaacctttgcacacgtgaactcatgaatgcacacacactcacccgtggatatgcagacatacatatacacatatacacataatacatattttcacgcacaaccctccatgtgcatacacacacatgcaactgggaccaaggatttgtctcccctacataaacccccctgaccattgggccctggaagggtgtg

SEQ ID NO: 3142 - DNA, 1308 bp, Canis familiaris
atgagctcccccggcgccgagagcgcggggaagagcctgcagtaccgagtggaccacctgctgagcgccgtggagagcgagctgcaggcgggcagcgagaagggcgaccccacggagcgcgagctgcgcgtgggcctggaggacagcgagctgtggctgcgcttcaaggagctcaccaacgagatgatcgtgaccaagaacggcaggaggatgttccccgtcctgaaggtgaacgtgtccggcctggaccccaacgccatgtactcgttcttgctggacttcgtggcggccgacaaccaccgctggaagtacgtgaacggagagtgggtcccagggggcaagcccgagccccaggcgcccagctgcgtctacatccacccggactcgcccaacttcggagctcactggatgaaggctcccgtctcctttagcaaagtcaagctcaccaacaagctcaacggagggggtcagatcatgctgaactccttacacaagtatgagcctcggatccacatagtgagagttgggggcgcacagcgcatgatcaccagccactgcttcccagagacccagttcatagcagtgactgcttatcagaacgaggagatcacggctcttaaaattaaatacaatccatttgcaaaagctttccttgatgcaaaggaaagaagtgatcacaaagatatgatggaagagcctggagacagccagcaatctgggtactcccaatggggttggctcatccctggaaccagcaccctgtgtccacctgccaccccccaccctcagttcggaggccccctctcacttccctccacgcacggctgtgaaaggtaccccgccctgaggaaccaccgtccatccccctatcccagcccttacgcacatcggaataattctccaacctattctgacaatccatctgcatgtttgtccatgctccaatcccatgacagttggcccagccttgggacgcctgcccacaccagcatgctccccatgagccacagtgccggcccacccaccggctctagccaataccccagcctgtggtccgtgagcaatggcaccatcacgccgggagcgcagccggccgggatgtccaacgggctgggagcgcagttcttccggggctcctctgcgcacggggcgcctctcggccacgcggtcccggctccctcggcctccggatccccgctgtacgagggggcccccacggccacagacgttcccgacagccagtacgacgcctcggcccaagcccgcctcatcgcctcgtggacgcctgtgtcgccgccttccatgtag

SEQ ID NO: 3143 - DNA, 246 bp, Canis familiaris
ccatctgtaaaatggggataattatccctgtctctgtcttggagttattgtgaaccactgctttgtgtctcaaaaactttgactatgtttttgtactttgttagatactgctgtggtctgggagcaaagtctttgaagagcttacggacatcgagaggcagttccacaaggccctgtacacagtccgggccttcctcaactgtgacagatattgctgtgggactcttagacatgaccaagcagaag

SEQ ID NO: 3144 - DNA, 540 bp, Canis familiaris
gccgacacaggcaagaacctagtcacccttcccaacacgacggccactgcaactctgcgcagcgacgagaccatctggctggaacctgaggttctcttctcagggcctcgtcaaggtgaggtgatgtgagaaagggagagtgaaagggaatagaagggaagggagaagaatgtgggggaaatatcggaaagggagacagaacatgaagactcctaactctgggacacgaactaggggtggtggaaggggaggagggcagggggtgggggtgactgggtgacgggcactgaggggggcacttggcgggatgagcactgggtgttattctgtatgttggcaaattgaacaccaataaaaaataaatttattattaaaaaaaaaaaaactgtccctccccgtccagagactgactgggttttcctaaggcacatcctctattttgtagcctttgagtttcctcaaatcaactatcagaagtctggcgggaagccttacacgtacgcgtatggacttggcttgaatcacttcgttccggacagg

SEQ ID NO: 3145 - DNA, 745 bp, Canis familiaris
tctgggaatcgagtcccaggtcggctccctgcatggagcctgcttctccctctgcctgtgtctctgcctctctctctgtgtgtctctctcagtctctgtctctgtctctgtctttctgtgtgtgtgtgtctctcaggaataaataaataaaatcctaaaaaaaaacaaaaccagaccgtgtccctatcctcatggaactggtgtcctgactccatgtgacgttctggccacaaaggaatggacagataaaaagatgatttctaagtgtaataaattcaaccactttgccatactgactaaatcacctccgttgaactcagcacgacagacccaaaagggacccgagaggccatcttgtctagtcatgttcaaagtttatttttgccgcagaacctgtttaaagggtatcttttatggtaaggggctgggatgtaggggcttcttagggccgtcagccaggagcctttcccagctgtacccagagctttggcccacagaggaaaaaccacccgcaaaagaccagagctggatggagtctgagaggccctctcaagctgtgcttcgtacatgaggtgacacaggctgttgcccccggttccatgagaaggggactgtaatatggttgtcacagtgaagaatatttgccagccctcttctgtatttgtaattacctgcctgtaattaatacacacacacacacacacacacacacacacacacacacaccctgccccttctgaagggg

SEQ ID NO: 3146 - DNA, 1108 bp, Canis familiaris
aacatctaaccactgtcggccagccggcagcaagctggagcgctctggcaccagctgggggtacagggcagctgcaggagacagagtcaaaaagccagggtggtttggattcacttgtgggtgtttgtttcatgcacctttgcggtgaagattgtatctgactgcgttttctattaatagaagtaaatacagtctagggcttagaggaaaaattgcttttaaataacatgaatagacggtctcctaaagaatgagcgacagtgttgctccaggagaaaaaccgagtggcaggaaatgataatagaaacatcactcttgtgccatttaagtaaaagtcagggtgttggtgactaggacccagagggggctccgtccctgtgaattctcctcctcctcctcctcacaccccttcccacagacccatcccgtagcctgtcctcccgcttccctggcagaaaccaagcccagctctacatttgtggactggcttttctttggaactccctgaccggcagggtctcctctgacctcctaaccatccctgcataccctgactttgcatattatttgcatatacaccttttttgcatctaagacacacacacacacacacacttaaaatgatttacacacccatcctgcagagcacactcaatttgacacatggatgtggacttacaaaacctaaatgagatagaagcacaatggaaggtgcctgtcacccacggggagaagtagcacaggtgtgggaaaatccacatccacgcacacagaggagctgcgtgcgaggggacactgcagtgtcataaagagccgcaggctgtctatctggagaaacctgtagatagctccaggggcaatgaagctctgtctcggagtcctggcaaaggcccaggtccaggagtcagaagccctaggtaccccccccaccgcccccagggccctgccctctcactctgtgtgtcgcatgttggtgcctctcacctcgcccgcccgtaaattcacagactgacccggcagcctcaactcctccggctgacggggtccgtctctctcctcccctgcagctcagccaaagacccacagtggaagaacttagagaaagaaa

SEQ ID NO: 3147 - DNA, 250 bp, Canis familiaris
gcaccccgggccgaacggcactaaaccactgagccacctgggctgcccgtttgtgtttgtgtgtgtgtgtgtgtgtgtgtgttaaagctggctgccagcagagtgtggaggctgcagctccatcaccagggacctgtggggggtgtcacccccgtagtgggtgatacatggctctgaggaggtggtatgttgataggtggcttgtgcaaggggattagccctgcatccttacagaggtaggaaagactgt

SEQ ID NO: 3148 - DNA, 540 bp, Canis familiaris
ccctaggccccatgggcagaaacagcctgagccaaggggcagggcccagagattgggtgactgctctgtgactgagccgtgccctccctgcatgtgctctgaagctctctccttgggactcacccaaaactgagacacctgctttgtctcaggcagcatgagagcttcagaaaggctgaataggaagtggcttttgtcctctcaaaggccagggattcacaaaggagagacagatgctgcgatggttaactccttcaaggtgtactgggatggcctgtgttgaaagttctgaggcctggcacacagtaggtgctcagaaaatggtaatggacaggaagcagagataccagctgtcagctgacttagatgtcaagtccagaccacatgtagcacacgtgtgtgtgtgtgtgtgtgtgtgtgtgtgtgtgtgaataatcaaggcagctcatgcttactgagtacttgctgtatgccaggtactgctcagcacttttacactgcatttcattgaatctttgcagcaacccatgagttaggtac

SEQ ID NO: 3149 - DNA, 527 bp, Canis familiaris
ggtttcttttctccttttagtgtttaatattcgtgttttccatcataagaaggaaattctgggattatggccgtattgccctggtgtcagaagcagacaggtaacaaagacacatcacctcgagagtgtgtgtgtgtgtgtgtgtgtgtgtatgagagagagagagagagagagagagagagagagactgggacaggctggcggcccacacgtgatgctgacactagattgcgctcactgagtgagccaagccagtgccagaagtgctgcccttgggccatggccttggcctggccgtggctggaaccttgttggtttcaggctctggaggagacctgattgctttccgtatgtggagctgtcagtattgcctgcaaatgatgccagttttctttctcaccttgaatattttcaagtgtctcttctttgaaatgtgctactttggggttggggaggaggcaagaagggttaggaagggtggtagggccatagggagaggcccttgtccttgctccgggttggtgtag

SEQ ID NO: 3150 - DNA, 379 bp, Canis familiaris
cctgcagctagggggctgaataccagcttcggtgggtggaggacagggttctgggggccgaagcactttctggtctgtgtgtgtgtgtgtgtgtgtgtgtgtgtgtgtgagagagagagagagagagagagagagagagagagagagagagagagaccgcctccagcttgggaactcatgcctctcctttcctcccctccccagggtattgggaacacgtttcagggcggcgccaattgcatcatgttcgtcctctgcacccaggccgtcagaactcggctcttctctgtttgctcctgctgctcttcccagccgtctacagagaacccaactggcccccccaaggctcctgcaccctccaagacaggagactctcagg

SEQ ID NO: 3151 - DNA, 173 bp, Canis familiaris
ggcctggcaggagtcagagcatggaggaaaacctcaatgacaggaaaaagaaatttggactttctcccacaaaagccagttactgtgtcaccgcctccaccccacacatagacacacacacacacacacacacacacacacacacacacacggattcagggcatgctgtgtcc

SEQ ID NO: 3152 - DNA, 5351 bp, Canis familiaris
gtcgacgcgggagttcaggcacccagagagcgaggagctccggctcctcaccgtaggggatgcaaagtccccgcgtggcccccgctccccggacggcgtcgagagctctccgcccctccctgccctcgcgctctcccagcaatgacctcattgcaaaaggcagccggagcggatggttcccctccctggagaaccagggccgggagtgctagcagtgacgcaattggagctgggtcggtcctggccactttggattggccgcgccggctcgtggggacccccctcccgctatcgccggaataagagccggagctccgcggggaagacgcccgcagcaggcgtcgtgtccccccgggctgacggccgctggcgctctccagaaactcccgtctcaggtgaggaacttcccgctccgcgccccctaataactggcctctgggttaggtcacccactgcgctcgggccggctgcctttcctttgcgtccgaggcccttccttggcggcccaagtctgggcaggtgctccaggtgctccgtgcggctcagggcgcggagggcgctcgggacggtccgagcgccgtcttctactcagtgcaggtggaaccccaagtatcccagggctcctgccgggcgctggaagctccgcgggcggaggtaggcaggctgcgccccggtgtcggtgcccccgggcgtggcgtgcaggatgcagcctcactctggcctgggggtcctgtgccatctgcgtcctgaggggtcccatcgagtctcccgatgggggagcctcgagccttcctaggaggcgccgccagcccgccagcgaccctgggacaccccggggtggggccctgggggcggtgcagccggccgagcaggtccaggcccacctctggatgccggagatcagcagctgcggctaactgcgctccagcatcggcgggctgggcacgcagagcccagaggccccagtagcgggcacgtcaacgtttcccccaaacctacgtattgagagatcagggctcctttccaaggcagccttccccttcccactctcctctcccacctgttagtgggaagtcccgccgaggggaaggaaagtggtgcagatctctccgacagacaggcgcggtgggagaacagacggataagggggtgggtcccggcgtggtctctgcattaggcaagaggtgtgcgctcctgtgcctgcactctgcctctccccgacttaacccagagctccgctgcaccccaggactcttgcttctgctctaccaagcccttcactgcacgatatcttctgagattcacagcagcctccctggcagatgaatggaggcttggggaggtcgggtaacctgcccgaggccacagggccgctgtggataggcaggatgggagcctaggtctgggggctccaggccttgcttggtctccgtgcagcggtaatgtcattctctccttacagagagccatcatgggcttgtggaagtcctcccccttcctggctttcagcatcttggtcctgtgccaggcgggcggcctccaggcggcaccattcaggtgagacagcctgaagccccagagcatttcccttctactggccctgggcccaggcccttctgcaccgctgaagtccctgcagacaggctgctggtgaattaagacccttgggtggacgttgaattcagccctgcggactgggagtggaggtggggggcacatcctcagggaaagtcacgggggccaggaagccttgctacttatcctggggaggaggcaggcaggggctcagagcctccatggggtttgcttcccctccccaggtccgctctggagggcctcccagaccccactgcactcagtgagaaggaagggcgcctcctgctggctgccctggtgaaggcctacgtgcagaggaagaacgaactggagcaggagcaggagcaggagactgagggctccaggtaaggcccccaactctactccgcagggtccggaaggtcgtatcccacagaggtaggaaatacaacatctggccaggagtgcagcaggctgtggtggttcaccaggctctggggcccagccattctcaggctccatggaagacggaggtccaggtgtagctgaagagaccgtggtcagacgcattaaaaagatccactcctggaagttgttaggaaatagaatgggaggtatagagtcctgcactcagggaatgggtctggccctactgaggagaagttccagcattggctgacttggggctggtaagtgtaaagccagaagacacactcggtgtatctcagagttttttagaaatgtaacctgtgtgtgttgttctttcacacccacaaggagtcttcattgcacatgtgcaaggtgaagccaaaggccgtgcagagggtggggttaggtagagcagtgtctgaggtaggtctggggtctttagatctggaggatctgtggagatgtgcatgctgtcccggggccagacccttgcccagcctcacctccagggttcccggagcttgggcacgttcctgcccctggcctggccctggcactgccgggtcagaggcgtgtgatgcacacgtagctaccccgagaatctcactgcagagcatgagcagcatgtggaatgctagaaaaggccgcccctccccgaccacagcccttccccacactggcctggctccatggaggatgtgtgagctgcgctcctgcctgcccctcctgcctctgctcacagggcccctcccctggtctacctcgctgcatgactgcccttgggggcagacccggggcatggtattgtctggcatgtattttccctgcagcctggacagctccagagctaagcggtgcagtaatctgagtacctgtgtgctgggcacatactcgaaggacctgaacaactttcatacattctctggcatcggcttcggggctgaaacacctggcaagaaaagggacatagccagcggcttggagaggggccgctaacctcgctttggggtgccccaggatgccaactgatctccttccactccttcctgacttcccttcttgctcccattgatgaatttaatgcatgcagatttcacttggattgctcttccagctggcattggtagctttgcttgcgagagagaatattggggatctcaggatggaagggaagtgagcagcactcatagaccaggttagaggtaagagtgagggaagcctcttgagattccagaggatttcgaggtagagtcctccaatttctgcttcattcctcatgcttcatcaccgatgaataaatctattttctaaaaggatttgccctgtggtggtcgttactctggtccccgtccaaggcttgagagtgcctagaacccatgtttaaaagtagctttagcctcagggtagccggatacgggcgttggtgagtggtccctgtgaagcagctccaccatccaggacaggtgtgctgaggagcaggtaagacttctgggggaggatgctgcatccctgctctctgagcctctccaggtaagactttagggaattttcactgtcccatggaaagtggtttgttggtgtctgtggctgctgtacggcttctgtatgctccttgcatgtcttggggtagggctgggcctttggtgaccacttcttatggttctaaaaggactataagtgacagcaagtgcaggtgtcagtacatgagtactggagtctttagcttagcgctgggttgttttctttttcttattttaaagcttttatttaaattccagttagttgacgtacagtgtaacgttagcttcatgtgtacagtacagtgattcaacgcttccgtacaattggcactgggtttcttttgcgaagaaaggtctctgggcagggctcctagcaaaagctgccagcccatttctcataacagcttcgataattgcacttaggagaaacacttattcttaagtgatatgtcgaagagctgaaattctttttacgaaggcctcatggggcgggtgcctgcccctagcctctcactgacaggccttgtcttcttcctccatcctacaaatcagcatcactgcccagaagagatcctgcaacactgccacctgtgtgacccatcggctggcaggcttgctgagcagatctgggggtgtggtgaagaacaacttcgtgcccaccaacgtggggtccgaagcctttggccggcgccgcagagaccttcgtgcctgagcagtgacatgactccgggaagtaggtgactgtccttacactgtcagatgggaggggaaagaatttggaggttaggatccacatttggaaacccactggacctggtagggtcttcagatcccttctttcccattacatccttccttctgagtagtgagtttcttctagtcagcctgaaatcagagcactaggataggctgcagacatgcagtgtcatctttatgagaagagaaatgaaaaaaaaaaaatgcttgctgattgataattgcttttttctcatcatttgcttcaaaagcttatttacatctcagacccacaatttgtgtatgctgtgaaagaagcacccctgtagatttgtgttctttttagtagtaattgtgattatttccttcttgtctttcttattctatttttctttcttctccttctccacttcctcctccttcttcctcttcttttttattttattttattttttcccatctcaggtaaccatgaagctgaactcaccacttctattaatttctgttgacaacacttggtgagaaggccccatggaagatatacatgtttgcatcccaatagatactgaaaaaaagcacctttgtcatttggaaggaatgaaactgaatgcaaaataagctaatcccatacgtgttatgtattctttttatatttgattctgtgtgcggtcagtgtgatggcatctattattggcttatctggtagcaaactggttctttgagagttatcctattgatcatggcagctctgctcaaccttaggagggacaataaatcattgtctttgtggcctctgggaatacatggtaatggtaatgctttgcctggttgtctaagaacatgattgtataatttaaggaaatctcaatattgtaccatttgtgaacttcatcaagattaaaaacatattttggatacacgtgttttgagaccccagtggttcatttcaacttgtttccctgtgtagtaaaaatcacagtaatagttgacattttttgagaacttcctcaaaatgggccagatgatgttctaagacagtgctttatatctattaattcatttagtctgtgtgacaactctgtgaaggagatc

SEQ ID NO: 3153 - DNA, 497 bp, Canis familiaris
gaattcggcacgagctgctgtcggggctccctggctctcctgctcctctcggcacctccggcctcactctgcaatatgaaggcgctgagcccggtgcgcggctgctacgaggcggtgtgctgcctgtccgaacgcagcctggccatcgcgcgcgggcgcggcaagggcccggcggccgaggagccgctgagcctgttggacgacatgaaccactgctactcgcgcttgcgggaactcgtacccggagtcccgcgaggcactcagcttagccaggtggaaatcctgcagcgcgtcatcgactacatcctcgacctgcaggtggtcctggccgagcccgcccctggaccccccgacggcccgcatcttcccatccagacagccgagctcgctccggaactcgtgatctccaacgacaagaggagcttctgccactgacctggcagccctggcgcctccagaacgcaggtgctggcgcccgttccgcctgggaccccggg

SEQ ID NO: 3154 - DNA, 804 bp, Canis familiaris
atggcttctccgtccaaaggcagtgacctgttctcgtccgatgaggagggcccggcggcgctggccgggccgggcccggggcctgggggcgcggagggggcggccgaggagcgccgcgtcaaggtctccagcctgcccttcagcgtcgaggcgctcatgtcggacaagaagccgcccaagggggcgtccccgcggccggcagacagcgcctctgccggggccgccctgcggccgctgctgctgccgggacacggcgcccgggaagcccccagccccgggccgccggggaagcccttcgaggccgcctcggtcaagtcggagagcgccgaggacggagccgcgtggatgcaggagcccggcagatactcgccgccgccaagacatatgagccccaccacctgcaccctgcggaagcacaagaccaatcggaagccgagaacgcccttcaccacgtcgcagctcctcgccctggagcgcaagttccgccagaaacaatacctctccattgcagagcgcgcggagttctccagctctctgaacctcacagagacccaggttaaaatctggttccaaaaccgaagggccaaggcgaaaagactgcaggaggcagaactagaaaagctgaagatggctgcaaaacctatgctgccctctggcttcagccttcctttccccatcaactcgcctctgcaagcagcatccatatacggagcgtcctaccctttccatagacctgtgctccccatcccgcccgtcggactctatgcgaccccagtcggatatggcatgtaccatctatcctaa

SEQ ID NO: 3155 - DNA, 535 bp, Canis familiaris
  misc_feature (14)..(14): n comprises a, c, g, or t, or includes no nucleotide
ggttaaagtttttngggggtacggttgggagcatgtgttttccagggcagggtggtggcccccaggaaccggatggcgccgccttggcctttgccattggcacctgggccccagcacccttgggaggaaatgcacgtgaacagggcttttggggctgtgagggccggagccgtcgggtcacgggagcgaaggcaggaagggccgaggcggggctggctaatcggctcaggcgggcaccgggccgaggaggacgccggggagcaggccgtgctcaaccctcgtgctcaccctcccctcaccgtcccgtctctctcgcagcgggcacagagatttgcaacggtggccccgcacccaagtcttccacctgctgcatcctgtgagctgctcccgggttcggacggcgcccccgcctctaagggtttgctacatgtgaggaagccccagaaaatgactaaagacaattttggatatcttgaaacttttttaagatctgtgtttttataaactcaactatgaataaagtttagtgtacctc

SEQ ID NO: 3156 - DNA, 1249 bp, Canis familiaris
ggcacgagagaccacctgcctcacatcagaagaaatgcagaaaaagaactatgcaaggattagaaataagaggccagttgagatgaacccatggtccagttatctgttgggatggacaactttcctcctctacttctatgagacaagtggaaagattcctaacctgagttcactgggaaagcatgagttcacgaagccctggattagtataaaagaagatcagaaagattcatgtgtatttcccttcgtctacaaggggtcttcttacttctcttgcatcaaaaccaatagcttctctccttggtgtgcaaccagagctgtttataatgggcagtggaaattctgcatggcagacgattacccacgatgcatcttccccttcatctttcgaggaaagtcccataacagctgcatcacggagggcagcttcctcagaaggctgtggtgctcagtcacctccagctttgatgagaatcagcagtggaaatactgtgaaaccaatgagtatgggggaaattctttcagcaagccctgcatcttcccctccatcttcagaaatagcacgatctttgaatgcatggaggatgaaaacaacaagctctggtgcccaaccacagagaacatggatgaggatgggaagtggagcctttgtgctgatactagaatttcctccttggttcctggctttccctgccacttcccattcagctataaaaacaagaattattataactgtatcggcaaaggaacaaaagagaaccttacgtggtgtgcaacctcttacaactacgaccgggaccacacctgggtgtattgctgatgcaaaggggaggagaaacatcttcagaggaagacggacatactaagtctagaacctgcttcatcattttcatcaagtctttcaagtttaattgcttttagaagtaccttgtctgccattttgcttaatcacttggtcctttgtgaagaacagagggaatatgtggcataaccaccaataaaggagcccacagttaacccccagggctgctctttgtgctctctggaatgagataaggtgagggaccagaatgtatggtgaaggaagccttggtgactgagtggtgagtctcacaggcggaggtcagattcttagcccaggggcccttggaaggaactgcaacctgctatctctttctgggaaactgtagatttgggtggagcatttgtagatacttgttaaatcattaataaataaattagtaagtta

SEQ ID NO: 3157 - DNA, 225 bp, Canis familiaris
cctagagtttggcttgtttgggggtctgagcatggctttgaaatcctccgttgcgtttttaaaatctaactttctgtctccaatggagagaagcagagggaggaaagcaaaagcagagaggctgggagaccccctcccttcccacacacacacacacacacacacacacacacagcgccggagtcccccaagcccgaggcatcaaaagccgggaaacttacctgg

SEQ ID NO: 3158 - DNA, 511 bp, Canis familiaris
ccaaattccatcaattacacacatgaatgcagacactaaagtcctagaagcctgtattccaggtcaaaattccctgtctcaagaatctctttgtgtagagaagataggatgtgctacatttccaaagcttagtgttcaaaattaaacttattatgtttcatctgggtgacaaactcagtgcctctagaggcaaggaaggtagactatagaagatagtggtggggactatgacaaattgagagcatgtactctgtcttaaggctgtcctttttggagatgtagcaagcatttgcagtaagcagcgttatgcatctgaggtgagcactggagggataggaatgttgcattgactgcctctgcttggtctccaaaccttttatgagaaaaatctgaattttattacctccatcatcatcatcatcatcatcatgttaatgtgaatgatgaattccgtgatcacaaagggataagcaaatcttaaggtggtagctcatgtattacattacaaaac

SEQ ID NO: 3159 - DNA, 264 bp, Canis familiaris
gatctcaaggttatgatattgagcccttcatcaggctctgtgctcagcatggagtttccttgctcctcttcctctgcccctcatgctcatggtctctctctcattctcagatagatagatagatgatagatagatagatagatagatagatagatagatagatagatagatagaaagaattcttggctacttattttccccattcagcaccttgaatatatcctgccactcttttctggcctgccaagtttttgtgggcagatc

SEQ ID NO: 3160 - DNA, 693 bp, Canis familiaris
  misc_feature (33)..(33): n comprises a, c, g, or t, or includes no nucleotide
  misc_feature (155)..(155): n comprises a, c, g, or t, or includes no nucleotide
agtgccaagcttgcatgcctgcaggtcgacttntagaggatcttgcaagcattatttattgccacacgctccttagtcaagaaagacttttgctctacacacacacatgtacacacacacaggttgatttactaaatgaaaaaatccctttctantacataaaccaattgataggcagttttctgtttgccttttagtaagtttgtcaggcattggacaaacattgtgtctataatgttttgtaggggtctacctaaggtaacgtattatggtgcttgcaatgacctttcaaattgctcaccaggatagataaacagacagatggtgacaatgatagatagatgatagatagataatagaaagagagatagatgattgatagatagatagatagatagatagatagatagatagatagatgatagatagatatagatagagagatagatgatagaggagaattatacagtgtgagaaagaatgaacatgagagagaaagcaaacataatgagataacaataaatgatgagtccaggtgaagactacacaatattcattatagtctcttcatttcccttttaggtttgaaatttccaaataaaaaatagaaaagaacatagtactccatgtaaatgcaatgtaagtttgaagaccactggaagatccccgggtaccgagctcgaattcgtaatc

SEQ ID NO: 3161 - DNA, 616 bp, Canis familiaris
  misc_feature (10)..(10): n comprises a, c, g, or t, or includes no nucleotide
  misc_feature (16)..(16): n comprises a, c, g, or t, or includes no nucleotide
  misc_feature (24)..(24): n comprises a, c, g, or t, or includes no nucleotide
  misc_feature (30)..(30): n comprises a, c, g, or t, or includes no nucleotide
atgattacgnattcangctccgtngccggngatctactgttgaataaggagtattagggtcattggttaatactttcttggaaaaaaaattagttatatccagtaaactatatcacaacaaataatataaattggttaagggtttaaatgtaaaaataatattttgtattattatagtatttatattcttggtattgggaaagttttgtaagcatggattctaaaatacaactataaagcaagtgcttatataattgactgtaatacacaaaggaaagaaggaaggaaggaaggaaggaaggaaggaaggaaggaaggaaggaaggaaggaaggaaggaaggaaggaaagggagcaaaacagaaaacaaagaaacaaaataaagtgaaaaagacacaagttttagaccaaactgaaaaagcattggcaaattttgtgttataacacaattataacaaagtgttactcttattaatataaagaaaattctttcaagtcaaatgaagtcataaacaataatagaaatagactaaagagtataaagagattattcaaaaatgatcctctagagtcgacctgcaggcatgcaagcttggcactggccgttccttttttaa

SEQ ID NO: 3162 - DNA, 892 bp, Canis familiaris
  misc_feature (15)..(15): n comprises a, c, g, or t, or includes no nucleotide
  misc_feature (24)..(24): n comprises a, c, g, or t, or includes no nucleotide
  misc_feature (780)..(780): n comprises a, c, g, or t, or includes no nucleotide
  misc_feature (876)..(876): n comprises a, c, g, or t, or includes no nucleotide
  misc_feature (882)..(882): n comprises a, c, g, or t, or includes no nucleotide
atgattacgaattcnatctccgtngccgtgggatctcagggtcatgtgttcgagccccatattcggtgtatagattacttaaataagtagagaaggaaggaaggaaggaaggaaggaaggaaggaaggaaggaaataaagaaagaaagaaagaaagaaagaaagaaagaaagaaagaaagaaagagagaaagagaaaaagaaagaaaaagaaaacgaaagaaagaaagaaagaagaaagaaagaaaaagaaaggaagaaaggaagaaagaaaaaaagaagaaagaaagaaagaaagaaagagaaagaaagaaagaaagaaagaaagaaagaaagaagaaagaaagaaagaaagaaagaaacaaagaaacaaagaaacaaagaaacaaagaaagaagaaagaaagaaagaacacagaagaaagggaggagacttggtggtagataatggactctaaatttggtgctgacacagttctgagtgtctgtttcagaccggacagagttcaccaataagagcttcctagaggaggtgcaccaaatctgggtctctgtaggaggggtaggctctgggcaaccatgcttgggaggtaccagcttgcctaggcctttgcttttgctgactctccagccctgagttgattctgtcagaagacctggtctccctattttaaagttcagcaagcatttcttggcttgggtgctgggcacagaaggggtaaaaaaagaccaagccttgtcttttgggagtcctcagcctactggatagacccaaaaaacttntagaacacagtggcttaaataaatattagcctcttgatggctctccaagaccaacggaatcaagtccaaatgctttggatcctctagagtcgactncaggcntgcaaggtgc

SEQ ID NO: 3163 - DNA, 797 bp, Canis familiaris
  misc_feature (9)..(9): n comprises a, c, g, or t, or includes no nucleotide
  misc_feature (15)..(15): n comprises a, c, g, or t, or includes no nucleotide
  misc_feature (19)..(19): n comprises a, c, g, or t, or includes no nucleotide
  misc_feature (27)..(27): n comprises a, c, g, or t, or includes no nucleotide
  misc_feature (37)..(37): n comprises a, c, g, or t, or includes no nucleotide
  misc_feature (64)..(64): n comprises a, c, g, or t, or includes no nucleotide
  misc_feature (68)..(68): n comprises a, c, g, or t, or includes no nucleotide
  misc_feature (70)..(70): n comprises a, c, g, or t, or includes no nucleotide
  misc_feature (747)..(747): n comprises a, c, g, or t, or includes no nucleotide
  misc_feature (765)..(765): n comprises a, c, g, or t, or includes no nucleotide
  misc_feature (768)..(768): n comprises a, c, g, or t, or includes no nucleotide
  misc_feature (771)..(771): n comprises a, c, g, or t, or includes no nucleotide
  misc_feature (778)..(778): n comprises a, c, g, or t, or includes no nucleotide
  misc_feature (782)..(782): n comprises a, c, g, or t, or includes no nucleotide
  misc_feature (785)..(785): n comprises a, c, g, or t, or includes no nucleotide
  misc_feature (794)..(794): n comprises a, c, g, or t, or includes no nucleotide
ccttgcatncctgcnggtncgactctngaggatcctntgtctccttcttcctctgctccttctncctncncactgttcctttcaaaaaaattttttaaattaattaattaaagggaagggaagggaagggaagggaagggaagggaaggaaggaaggaaggaaggaaggaaggaaggaaggaaggaaggaaggaaggaaggaagaagagaagaggagaggagaggagaggagaggagaggagaggagaggagaagagaagagaagaagagaagagaagagagagaaagaagagaggagaagagaagagaagagaagagaagagaagagaagagaagagaagagaagagaagagaagagaagagaagagaagagaaaagagaaactttccaggagggaaggatggaagaaagaaattttcaaattagcttttgtatagaaatgaatctgttgttcaaagcaaatgacagataatgacatgcctttacatgagaagcccccatgggcccttctcaactaaatcaagggaaatgttgagtgttatggtctgaatgtttgtgttctccccaaatccatgtgtggaagccctaacccccagtgtgatggtactacaaggtggggcccttgggaagtaattaggtttagatgaggtcatgaggatgggccccatgttgggctttgtgttctcttataagaaggaagagataccagagctctttctctccaccttgtgagggtataggaagaangtggctatgtacaagccnggncangggccancatncangcctgcagntgc

SEQ ID NO: 3164 - DNA, 683 bp, Canis familiaris
  misc_feature (9)..(9): n comprises a, c, g, or t, or includes no nucleotide
  misc_feature (15)..(15): n comprises a, c, g, or t, or includes no nucleotide
  misc_feature (643)..(643): n comprises a, c, g, or t, or includes no nucleotide
  misc_feature (649)..(649): n comprises a, c, g, or t, or includes no nucleotide
  misc_feature (671)..(671): n comprises a, c, g, or t, or includes no nucleotide
  misc_feature (679)..(679): n comprises a, c, g, or t, or includes no nucleotide
atgattacnaattcnagctcggtacccggggatcaagcaaggaaaatgcaaaacccttccaccggatttacagctctagctgcataccagcctagggaataaaaacttcaccctgttctaacaccttgagagggctaaaaccacatgaggttaggtaagagaggctttgttaggtggggccttggctggaacctaaaaggaatcatcattctattttactggagcttctaactttcagctactgtgatatatggagaaagagaggaaggaaggaaggaaggaaggaaggaaggaaggaaggaaggaaggaaggaaggaaggaaggaaggaaggaaggagaaagaggaggaaactatagtctctgctatggactgaattatgtctcccccaaatgcatatgttgaaggccctagcctcccatatgatgaaatctgaaggcagagcctttaggaggaaattaggtttagatgaagtcatagggtagagccctcaagacaagactaagtgtaagaagagacagcagagttttcttcctacctctctctcaccaccttcatgcaccttagtgcatgacctttcttcgaaaggtcacaaggacttgagaaaagcagtcatcagtacccaaggagaaagctctcctcanaaaggnactgaaccctgccagaaacctnatcccctnaatc

SEQ ID NO: 3165 - DNA, 680 bp, Canis familiaris
  misc_feature (62)..(62): n comprises a, c, g, or t, or includes no nucleotide
  misc_feature (64)..(64): n comprises a, c, g, or t, or includes no nucleotide
  misc_feature (70)..(70): n comprises a, c, g, or t, or includes no nucleotide
  misc_feature (674)..(674): n comprises a, c, g, or t, or includes no nucleotide
gcttgctgcctgcaggtcgactctagaggatctccgggtcccgagatcgagccccccatcgngnatctgnttgggattctctctttccatctccttctgcccctcaccccctgcaagtgcctgcccgcactctctctgtcatgctctctctctctctctcaagaaaagagagagagagaaagaaagaaagaaagaaagaaagaaagaaagaaagagaaaaaaagaaagaagaaagaaagaaagaaagaaagaaaaaaagaaagaaagaaagaagaaagaaagaaagaaagaaagaaagaaagaaagaaagaaagaaagaaagaaagaaagaaagaaagaaaaggagggaagcaaggaaggaaggaaggaaaagaaaaaagaaaagaaagaaagaaaggagagcttcagtcttctttaagtagagatggtgaacagtgaagccaactctagagcatcctgttccatctgaacaattaatggagaaaataaagtgatatcctccctcccccccccttttcatgtccttacgccctcatctcatcagtactaaagtttcagccagtcaaacaaaagtaagggaacacagtggcttcctggagctcaaagacacagctcagccttcacttgctgttgtgcaaaatgcatgagctaattataccctaagcctcctgcanagtagc

SEQ ID NO: 3166 - DNA, 707 bp, Canis familiaris
  misc_feature (6)..(6): n comprises a, c, g, or t, or includes no nucleotide
  misc_feature (20)..(20): n comprises a, c, g, or t, or includes no nucleotide
  misc_feature (24)..(24): n comprises a, c, g, or t, or includes no nucleotide
  misc_feature (31)..(31): n comprises a, c, g, or t, or includes no nucleotide
  misc_feature (47)..(47): n comprises a, c, g, or t, or includes no nucleotide
  misc_feature (68)..(68): n comprises a, c, g, or t, or includes no nucleotide
  misc_feature (78)..(78): n comprises a, c, g, or t, or includes no nucleotide
  misc_feature (82)..(82): n comprises a, c, g, or t, or includes no nucleotide
  misc_feature (85)..(85): n comprises a, c, g, or t, or includes no nucleotide
  misc_feature (196)..(196): n comprises a, c, g, or t, or includes no nucleotide
  misc_feature (295)..(295): n comprises a, c, g, or t, or includes no nucleotide
  misc_feature (297)..(297): n comprises a, c, g, or t, or includes no nucleotide
  misc_feature (300)..(300): n comprises a, c, g, or t, or includes no nucleotide
  misc_feature (327)..(328): n comprises a, c, g, or t, or includes no nucleotide
  misc_feature (382)..(382): n comprises a, c, g, or t, or includes no nucleotide
  misc_feature (655)..(656): n comprises a, c, g, or t, or includes no nucleotide
  misc_feature (658)..(658): n comprises a, c, g, or t, or includes no nucleotide
  misc_feature (689)..(689): n comprises a, c, g, or t, or includes no nucleotide
ttgacnacttgatgcctgcntgtngactctngaggatctgttcctgngcccatccaagtgcgaggganggagaccgcngcanggntgaggccctccctgaagtgaactccatctgtaggatggtctgttctctgaaaataaaccacttggctctaaatgctcagtaaacttaatttcaggggaaaggaagaaaaanggagggaaggagggagggaaggagggaaggagggaaggagggaaggaaggaaggaaggaaggaaggaaggaaggaaggaaggaaggaaggaaggaaggnantgnaaggaagggagggagggaaggaagganngttggaaggagggaaggaaggaaggaaggaaggaaggaaggaaggaaggaaganaaagaaagaaagaaagaaagaaagaaagaaagaaagaaagaaagaaagaaagaaaggaaagaaactttatgctttgctcagattcctacaaatatcatacccagcttttaataaaaattataccaacaatttctgaagcctctactgcatcaaaggaggtttgcatgtctcaatttaatcccccaaaacaacactgaaagagaggtgggttggtttgatttcgatttttaaaggaagacaactggtgttcgcaaagactagtaaattgtcctnnanaacccagattacgagcactggagcccaaaantccctgcccggtctcccg

SEQ ID NO: 3167 - DNA, 776 bp, Canis familiaris
  misc_feature (15)..(15): n comprises a, c, g, or t, or includes no nucleotide
  misc_feature (35)..(35): n comprises a, c, g, or t, or includes no nucleotide
  misc_feature (102)..(102): n comprises a, c, g, or t, or includes no nucleotide
  misc_feature (129)..(129): n comprises a, c, g, or t, or includes no nucleotide
  misc_feature (703)..(703): n comprises a, c, g, or t, or includes no nucleotide
  misc_feature (752)..(752): n comprises a, c, g, or t, or includes no nucleotide
aatgtttcttcattnttcttccttccttcactggncctgctgtaactttgcaccagcctagaaaattcacccaaactgttatacgatgagaggattctattntgctggaaagtcgtcttgggaaacggncagtgccagcctgtgtgcggcacaagcccaggtcctagctctgcgcaggggtgtggcctatgtcaccctacggtcctttggactatgtgtctgtaatagaaaatccatcctattcctcaggttttatctgctctttaaatggcagttacttcaactcctatcatgcagatgaatatatttgattacatatctgtatatgttgaggtttgtatcagactggatggatggatggatagatagatggatagatggatagatagatagatagatagatagatagatagatagatagatagacagacatggatggatagatggatggatagatggatggatggataaataaagattatagatagatgatagatactctgacatcatgccccatcacccctcaaatactcccccatgtacctcctaaaaacaagaacacactcccatgctacatggctctccaagtcaggaaatcaacactgacacagcactgccatccaacagttgttcaaatattatcaactgtctcaacagtgttccttgtcctctgccttgcgggctccaccatggagcatgcaangcgttgagttgtccatcccattagtgtccttccatctggagcaaccccngtgtctggctgctctcaaaggtct

SEQ ID NO: 3168 - DNA, 885 bp, Canis familiaris
  misc_feature (807)..(807): n comprises a, c, g, or t, or includes no nucleotide
  misc_feature (820)..(820): n comprises a, c, g, or t, or includes no nucleotide
  misc_feature (822)..(822): n comprises a, c, g, or t, or includes no nucleotide
  misc_feature (846)..(846): n comprises a, c, g, or t, or includes no nucleotide
  misc_feature (854)..(854): n comprises a, c, g, or t, or includes no nucleotide
  misc_feature (858)..(858): n comprises a, c, g, or t, or includes no nucleotide
  misc_feature (863)..(863): n comprises a, c, g, or t, or includes no nucleotide
  misc_feature (869)..(869): n comprises a, c, g, or t, or includes no nucleotide
gactcttgaggatcaattttcatacaatttccatatgtgtttctgaagaatgtacattttttaaacgcagaataccaagtcccatgtatattgcccattccatcaagcctgttaattgcattgtttaaaatttctatgcttttcctaaatggtactgactaaacataccagtccttcattttttccaatgtattcaaatcatgtgtattgaaatatttgtcaaattctacttgtagctctgctgacttttcgcctatataccaacctcaagcaactaaattggctcctacacataaaatttactactgctggcaattacataaatatctcccttacttcttgagcactcaacttacatatttataatatgttgcaatttttttcctaacttttctaagtggttgtactaaaagattttttcaacacttttttgtttctttaaatttgccatacttcagaagcagaatgtaattggaaagatggaggaaggaaggaaggaaggaaggaaggaaggaaggaaggaaggaaggaaggaaggaaggaaggaaggaaggaagaaaaaaagacatcctaaaagatgataggtttctgtatattcctctggattctcctttgtctaggtatttttaaagttccagtgtcagcctataaaaataggggagaatgtatctgagtgtagggagcctccccctgccgtatatgtcacttctccccttctattggaataaggagctatcctcccataggactgggagaggaacaatttctactatacaataagaacaactagacttacaggcagtgttntgatgtagtacangntagggaccatctcctataccttcnaacctaantagntcacngagcangcttagggtctcaaat

SEQ ID NO: 3169 - DNA, 1153 bp, Canis familiaris
  misc_feature (8)..(8): n comprises a, c, g, or t, or includes no nucleotide
  misc_feature (560)..(560): n comprises a, c, g, or t, or includes no nucleotide
  misc_feature (1057)..(1057): n comprises a, c, g, or t, or includes no nucleotide
  misc_feature (1065)..(1065): n comprises a, c, g, or t, or includes no nucleotide
  misc_feature (1115)..(1115): n comprises a, c, g, or t, or includes no nucleotide
tgtgcacnttgactctagaggatccccgggtaccgagctcgaattcgtaatcatggtcatagctgtttcctgaaaatcttttgctttctgcccctcccaggcatttgttgaaggccaagacttgggagtagttcatttgctttgttttctcatccaactttgtgctgttctccaaattgctcacgctggtcagaaattcatgtcaattcatgtgcatcttaaaactcactgccaaatcaattcacaattttctatgccagtgggaaaaatacaaagccatgcactcacaattattttctttttcctagctagtaattaatttttttccagttgcattgaggtataattgacgtaagcactatataagtctaaggtatacagcatcatgatttgacttacatatatcatgagattattcctacaataagtttggttaacatctatctcatatagaaagaaagaaagaaagaaagaaagaaagaaagaaagaaagaaagaaagaaagaaagaaagaaggaaggaaggaaggaaggaaggaaggaaggaaggaaggaagaagnaaggaaggaaggaaggaaatgtttttgcccttggtgagaactcttgggattttttttctcataacgacttttctatgtgccatagagtaatgtcagctgcagtcatcaggttgtacactaaatccccatgacttaatttattttataactggaagtgtgtaccttttgaccaccttcctccaattcccccaccccctaccctctgcctctgataaccacaagtctgatcgcttttgctatgagtttgctttttgttttgtttttagattttgcatataagtgagatagtacagtatttgtctttctgtgtctgacatgttactcagcgtgatgctctcagcatccatccatgttgtcaaaaaaggcaagatttccttctttttatggctgaataatattccattgtgtatatatactacaacctctttattcatctagccactgatgggcagtcaggtaatttccatgccttggctattgtaaataatgctgcaagnaggggcantgtaaaacgacggccagtgccaagcttgcatgcctgcaggtcgactctanaggatccccgggtaccgagcaagaattcgaatcataaa

SEQ ID NO: 3170 - DNA, 894 bp, Canis familiaris
  misc_feature (3)..(3): n comprises a, c, g, or t, or includes no nucleotide
  misc_feature (798)..(798): n comprises a, c, g, or t, or includes no nucleotide
  misc_feature (825)..(825): n comprises a, c, g, or t, or includes no nucleotide
  misc_feature (827)..(827): n comprises a, c, g, or t, or includes no nucleotide
  misc_feature (848)..(848): n comprises a, c, g, or t, or includes no nucleotide
  misc_feature (850)..(851): n comprises a, c, g, or t, or includes no nucleotide
  misc_feature (861)..(861): n comprises a, c, g, or t, or includes no nucleotide
  misc_feature (869)..(870): n comprises a, c, g, or t, or includes no nucleotide
  misc_feature (877)..(877): n comprises a, c, g, or t, or includes no nucleotide
  misc_feature (882)..(882): n comprises a, c, g, or t, or includes no nucleotide
  misc_feature (885)..(885): n comprises a, c, g, or t, or includes no nucleotide
  misc_feature (887)..(887): n comprises a, c, g, or t, or includes no nucleotide
  misc_feature (889)..(889): n comprises a, c, g, or t, or includes no nucleotide
gtngactctagaggatcatttcagcttataggcatcaacacacatgctctttcaaggctatgtccttgaaaatggctccagctgtggaaacagtgggcagtgagtacattccagaggtagaagatggcataaggagcttctaactgcctgggtccaactcacaggtcctcacaattatctcctccaacaggaggtcagagctcacccctgcagacagctaggcctagccactgcaatgaaaaatagacactaaatcagaggtcatggttccctcatacatgagagttccctcaccatgaagtcactgtagcctcaaacaacagttattttcccagtaatctgtgcgttaaagtggctgtctacatgtgtgtccatgtgtgtgtgcaccagaaatccttagattcaaaaacaacactctgtactaggcctgtgtaaagaaaggacggcctaccaagcaccttctcttgggcctcaaattctcaggttcacatttcacaagagagaaaagaaagaagaaggaagaaaggaaggaaggaaggaaggaaggaaggaaggaaggaaggaaggaaggaaggaaggaaggaaggaaggaaggaaaaagaaaagaaagaaagaattggaatcttgtcaaccccaggaggactctggctccatctacatagaatatgatgcaaaaatcattagaaccatcaattcttagaatggaaggctctttctgaaagaacctggccccaaacctcaccaatttttataaacagatagagctgttctgggaattgataaatttctcagtcaaanggttaagtagaagacgaatgttctaanancaaccctgcccagtatgatcncnnggtaccgggntcttccannagtcttntaggnaanancncaggg

SEQ ID NO: 3171 - DNA, 678 bp, Canis familiaris
  misc_feature (164)..(164): n comprises a, c, g, or t, or includes no nucleotide
  misc_feature (229)..(229): n comprises a, c, g, or t, or includes no nucleotide
  misc_feature (290)..(290): n comprises a, c, g, or t, or includes no nucleotide
  misc_feature (639)..(639): n comprises a, c, g, or t, or includes no nucleotide
gatctgaaggatgagccttcctaattagctaatccctcacaatcagagaaggtggtttttatgcaccctttttcctccttggttaaggttcatttctcaggtaggggaaccaagcatagcagggttcaaatcaaccagtaagcaaacaacatgaaagcaggacncagtatgtacaaagggctgcatttggtggagccagggttggggaaggtaaaggggaaaagctgcnaactacaagacattgtccctgcctggaagagtgccttatccccagagagaaaagatacatnaatgccaaatgggcaaacagaagtactgtactttttttttttgaagtactgtacttttacagtgacatcttatcctgcaaacaactaaagagtcatcaatttaactatatatccatgaaagaaagtaaagaaagcaatcaagagagagggagggaaggaaggggagggatggagagtaagatagagggaaggaaggaaggaaggaaggaaggaaggaaggaaagaaggagaggggaggggtagaaagaggcagggcaggggtattccactactacgttcttctgatgaggtgtctcagggggaacttgcatttctctaggggtcctcagctatcatggtcctctttagnatacagctctctctagctgagaatggatcctctagagtc

SEQ ID NO: 3172 - DNA, 906 bp, Canis familiaris
  misc_feature (43)..(43): n comprises a, c, g, or t, or includes no nucleotide
  misc_feature (53)..(53): n comprises a, c, g, or t, or includes no nucleotide
  misc_feature (74)..(74): n comprises a, c, g, or t, or includes no nucleotide
  misc_feature (94)..(94): n comprises a, c, g, or t, or includes no nucleotide
  misc_feature (101)..(101): n comprises a, c, g, or t, or includes no nucleotide
  misc_feature (103)..(103): n comprises a, c, g, or t, or includes no nucleotide
  misc_feature (117)..(117): n comprises a, c, g, or t, or includes no nucleotide
  misc_feature (121)..(121): n comprises a, c, g, or t, or includes no nucleotide
  misc_feature (138)..(138): n comprises a, c, g, or t, or includes no nucleotide
  misc_feature (142)..(142): n comprises a, c, g, or t, or includes no nucleotide
  misc_feature (353)..(353): n comprises a, c, g, or t, or includes no nucleotide
  misc_feature (358)..(358): n comprises a, c, g, or t, or includes no nucleotide
  misc_feature (374)..(374): n comprises a, c, g, or t, or includes no nucleotide
  misc_feature (517)..(517): n comprises a, c, g, or t, or includes no nucleotide
  misc_feature (823)..(823): n comprises a, c, g, or t, or includes no nucleotide
  misc_feature (827)..(827): n comprises a, c, g, or t, or includes no nucleotide
  misc_feature (836)..(836): n comprises a, c, g, or t, or includes no nucleotide
  misc_feature (870)..(870): n comprises a, c, g, or t, or includes no nucleotide
cacgctttatgcctgcccggtcgactcttaatgatccccgggnaccgagctcnaattcgtaatcatggtcatanctgtttcctggacaatgaantagggancnaagcctgtgcattngaangataatatcaaatcaanattnacttcctgacaggagaatgactaagtacttgagaaaaatacactgaagtcaactaaggggaatgggaccacatgtccacaacttactctcaaatggttcagaaatgttaacaactgggaaatctgggcaaagggtacacaggcactctatgaactctttctacaaattttacataaatatgaaattatttccaaaacagtttaaaaaatanataanagaagggacataccanaatagttctatgatatagtcttaagtcatgctgtaaatgaattcaaactcttctctgaggtgtaaatactatttctacttcatatgaggactcaactccccatccctgtagtgggactcagctccccatccctgtagtgcaantgagaaagaaaagaaagaaagaaagaaaagaaagaaaagaaaaaaagaaaacaaaagaaaagaaaagaaagaaaagaaaagaaaagaaaagaaaagaaaagaaaagaaaagagaaaagaaagaaggaaggaaggaaggaaggaaggaaggaaggaaggaaggaaggaaggaaggaaagaaagaaagaaagaaagaaagaaagaaagaaagaaagaaagaaagaaagaaagaaagaaagagagagagattgtcttttcaataagtggtgttaactgaacatctatatattaaaaagaagaagaaaantgtnaaacgacgnccagtgccaagcttgcatgcctgcaggtcgactntagaggatccccgggtaccgagctcgaattcgtaat

SEQ ID NO: 3173 - DNA, 686 bp, Canis familiaris
  misc_feature (2)..(2): n comprises a, c, g, or t, or includes no nucleotide
  misc_feature (8)..(8): n comprises a, c, g, or t, or includes no nucleotide
  misc_feature (16)..(16): n comprises a, c, g, or t, or includes no nucleotide
  misc_feature (20)..(20): n comprises a, c, g, or t, or includes no nucleotide
  misc_feature (31)..(31): n comprises a, c, g, or t, or includes no nucleotide
  misc_feature (46)..(46): n comprises a, c, g, or t, or includes no nucleotide
  misc_feature (53)..(53): n comprises a, c, g, or t, or includes no nucleotide
  misc_feature (86)..(86): n comprises a, c, g, or t, or includes no nucleotide
  misc_feature (105)..(105): n comprises a, c, g, or t, or includes no nucleotide
  misc_feature (133)..(133): n comprises a, c, g, or t, or includes no nucleotide
  misc_feature (242)..(242): n comprises a, c, g, or t, or includes no nucleotide
  misc_feature (261)..(262): n comprises a, c, g, or t, or includes no nucleotide
  misc_feature (682)..(682): n comprises a, c, g, or t, or includes no nucleotide
tncctctnactccctntganggtccttctgnttcttgaggatcccngatttcnaggatcgagtcccagatcgggctccctgcacgnttcctgcttctccctcttnctgtacctctgccttctctctgtgtctntcatgaataaataaataaaatctttaaaaaaaaaaatacaggggctcttcaagctttgcagcctcttcatgtcagctgttcgctggatggtaatcagataaagagctanaagaattacgtgaaaaaannaaagagagagggaagaaaaagaaagaaagagagaaaagaagaaagaagaaagaaagagaaagaaagaaagaaagaaagaaagaaagaaagaaagaaagaaggaaggaagggaaggaaggaaggaaggaaggaaggaaggaaggaaggaaggaaggaaagaaagaaagaaagaaaggaagaaagaaagaaagaaagaaagaaagaagagaaaagcatggcatgagttggtcctacaagaacactggctagagccttctatcagaaaatgaaataactgaatcaccttggcctaggctaaacttctcagtgtatacagtaagtgatgttaattttatgcactgcaggctttttattaagcagctgctataaaagctccttatccctcatgaaaattacaatacttaaccactaacatctcanccat

SEQ ID NO: 3174 - DNA, 681 bp, Canis familiaris
  misc_feature (471)..(471): n comprises a, c, g, or t, or includes no nucleotide
  misc_feature (479)..(479): n comprises a, c, g, or t, or includes no nucleotide
tgaggatccttagtcaacgggtaaaattaataacttgcaatttcaagaaaataagaccctgcttgccagtcttcccatcctatgtttctaaaaaacactctagctataaatcccatgactttaagaaatctttccttcatcttgcaggagcttagtttccttcagaaaaataaatagaaagagggaaggaaagaaagaagaagaagaagaagaaaagaaagagaagaaagaaagaaagaaagaaagaaagaaagaaagaaagaaagaaaaaaagagagagaaagaagaaagaaggaaggaaggaaggaaggaaggaaggaaggaaggaaggaaggaaggaaggaaggaaggaaggagaaagaaagaagaaagaaagaaagaaagaaagaaagaaagaaagaaagaagaaagaaagaaagaaagaaagaaagaaagaaagaaagaaagaaagaaagaaagaaaaagaaaatnaatttaanacttgctgaacaataaattagataggtacagatattttactacagacaagttaatatataatatacatattatatataatatgacatgtaatgtatacaatatacatatttaaatgtacagttttatcatgcaaaaataatttcgtgaatgaatgattttttaaaaattcttaagattcctacttcccaaagtttggggggg

SEQ ID NO: 3175 - DNA, 402 bp, Canis familiaris
aaccaaaataatgcagcagaagatgcctgtgttccagattcattgaaaaccaataggaagttatctgaagagagagcagaagatacagactatgatggctcacctctacctgaagattttacagagtctgtcaaaatgaatggctgtgaagaatattgtgaagaaagagtagaaattgaaagcttgattcaaaagtcacaagaaaggaagcctgaagatgacgatgagataacatggggaagtgatgaattgccaatagaaacaacaaaccatgaagattccagtgaagatcatccctttctgacagatgagcaacttgctgcactccccattgtcaaagtgcttccctctggtaaatacactggtagcaagttgaaatcagtcattcgaacattgcgaggt

SEQ ID NO: 3176 - DNA, 1587 bp, Canis familiaris
atggctcgcctccttcatttgtttcaaaaggtgttcttcctaatgctctggggggaggctgtaggtgacaagcttctggtggtccctcaggacggaagccactggctcagtatggagaacatagttgagctcctcagtgagaaggggcatgacattgtggtgctggtgccagaagtcaatttgcttctgaaggaatccaaacactacacgagacaaatctactcagtgccatttggccaggaagggttggagaaccgctaccgctcttttggaaagaatcactttgctgagagatggctcctgaacgctgctcagatggagtacagaaatagcatgattgttattgacatgtacttcaccaactgccagagccttctggaggactcggccacgctcagtgtcctcaggcagagcaagttcgatgcccttttcacagacccagctctgccctgtggggtgatcctggccgagtacctgggcctgccctccgtgtacctcttcaggggcttcccatgctccctggagcatactatcagcaggagcccaaaccctgtgtcctacattcccaggtgctatactcagttctcagacaagatgacatttccccaacgggtgggcagctacctcgttaattacctggagacctacctgttctactgtctgtattcaaagtacgaagaccttgcatccaatatcctcatgagagatgtgcacttacccaccttgtatcggaacggctccatttggctgttacgatatgactttgtgtttgagtatcccagaccagtcatgcccaacatggttttcattggagggaccaactgcaagatgaagggagtcctgcctcaggaatttgaagcctatgttaatgcttctggagaacatggaattgtggttttctctttgggctccatggtatcagatattcctgagaagaaagctatggagattgctgatgctttgggcaaaatacctcagacggtcctgtggcgttatactggcactccaccaccgaatctttcaaagaatacaatacttgtcaagtggctgccccggaatgatctgcttggtcacccgaaggctcgcgcctttatcacacattctggctcccatggcatatatgagggaatatgcaacggcgttccaatggtgatgctgcccttgtttggtgatcagatggacaatgcgaagcgcatggagactcggggggctggagtgaccttgaatgtcctggaaatgacttctggagatttagcaaatgccctaaaagctgtcatcaatgacaaaagctataaggagaacatcatgcacctctccaggctgcacaaggaccgccccatcgagcccctggacctggctgtgttctgggtggagttcgtcatgaggcacaagggggctccccacctgcgtcccgcagcccacgacctcacctggtaccagtaccactctttggacgtgatcggcttcctcctggccgtggtgctgggggttgtcttcatcacttacaaatgttgtgcctttggctgccggaagtgctttgggaaaaaaggacgggttaagaaacctcacaaatccaaggcacactga

SEQ ID NO: 3177 - DNA, 4814 bp, Canis familiaris
ggcacgagggggcgtgcaggtgagcggacaggccgagtttcgccggcatggccgaggccaggaagcgccgggagctccttcccctgatctaccagcacttactgcaggcgggctacgtgcgcgcggcgcgggaagtgaaggagcagagcggccagaaaagtttcctgactcagcctgtgacccttatggacatctatactcactggcaacaaacctcagaggttggccagaagcggaaggcagaggaggatgcagcgctgctggctaagaagacccgagtgtcagaccccattagcagctcagagagctcagaagaggaggaggaggaggagacagaagctgaagccaccaaaaccaccccaagactagcatctaccaactcctcagttccaggaccggttttgccatcaagcacaaaagaaaaaggcgtggcaaagaccaacaaagccagcaagatggtcaactccacaccacatccggcctctgccaaggcagtggcccacattctgtctgggagatcacccaggaagtctgcagggccctcggcaaataccatcctggtctcggaaactgaggaagagggcagtgtcccggcactcggaaccacagccaagcctggaatggcatcagccaaccaggccgacagctccagcgagacctccagctccagtgatgagaccgatgtggaggtgaaggcctcagagaaaattgtccaggccaaagctgcctcgggtcctgtcaaggggacccctgggaaaggggccactccagctccccctgggaaggcagggccttcggctgcccaggccaagacagagaagccaaaggaggactcagatagcagtgaggaggactccgacagcgaggaggagccaccagctgccaagacgccacttcaggtgaagccttcagggaagacaccccaggtcaaagctgcctcagcttctgccaaggagtcccctaggaaaggggtccctccagtgccccccggcaaggtagggcctgcagccggccaggctaagaagggggcgggggaggaagacccggacagtagcaccgaggagtctgacagcgaggaggaggcaccaacagctgtacccccaaccaggagccctgttcaggcaaagccctcagggcaaaactcccaggtcagaactgcctcgggtcctgtcaaggggccccctcagaaggcagggcctgcagccaccccagtaggaaaacaggaggaggactcagagagcagcagcgaggaggaatcagacagcgagggggcagcgccagcccaggcaaagtcttctgggaaaatcccccaggtcagagctgcctcgggtcctgccaaggggccccctcagaaggcagggcctgcagccacccaggccaaggccaagatgtccaaggatgactcagagagtagtgaggaggagtcagagagtgaagaggaggcgcctgcagccatggctccagtccaggcaaaatcaactgtgaaaacaccccagacgaaggcctccccaaagaagggcacccccattacccctatacctgccaaagctcccccagtgcgagtgggcacaccagccccttggaaggcgagagcagaagcttctccagcctgtgcctcgtctccagctatggcgaggggcgcccagaagccagaggcctcttcaagcagcgaggagtctgagagtgaggaggagactgctcccgccccagcagcaggacaggcaaagcctgtggggaaaggtgtcaccgtgaaggctgcctccacacccaccaagaggccctcaggccaagggactgccctagcaccccctgggaaggcagggcctgcaacagccccagtgaaaactgaggtgcaggaagactcctcagagagcagcgaggaggaatcgggcagtgaggaggctgaggaggcggctgcggctcctgctcaggtgaagaccgcagtgaaaacccctcagagcaaggccaaccaagctcccaccagagcaacttcagccaaaggggcagcatcagctccaggaaaagttgtcagtgcagctgttcaaatcaagcaggagtccccggccaaggtaaagccaccagcaagaacctcccagagcaatgctgtctcagtgaggggccagggcgctgtgccagctgtggggaaggcagtggccacagcagcccaggcccagccagggccagtcaagaacccagaggaggactcggagagcagtgaggaggagtccgacagtgatggggaggcccccactccggtgaagccctcagggaagaccccccaggtcggaactgcctcagcccccagcaaggggctgtccaggaaaggggccacagcagcccctcccaggaagacaggagccgtggccacccaggctgggaagccggaggaggactctgagagcagcagtgaggaggagtctgacagcgaggaggaggcgccggcccaggtaaaacctggtataaagcctccccaaaccaaggcttccctgctgaaaggtgtctcaggcactcctgcatctgccgaggcctccacaacacgagtggacaactcagccccacagaaggctagaccagcacctcctgccaagaaagaggggagctccaaaactgcgaaaagcaaggcccaggccccagcacctccggagaagaacgcagaggggtcctccgagagcagcgacgacgagctgccagccacccaggtgattaaaccccctctgatttttgtcgaccctaatcgtagtccagctggcccagctgctaccgccacacaagctccagctgcagacaccccgaggaaggcccaggcctcggagagcacagccaggagctcctcctccgagagtgaggatgaggatgtgatccccgctacgcagtgctccgttcctgccggtagaaccaacgtgaccccactcacggcccacccaaggccggctgtcagagccagcactgttggggccagcggcggtgaggcatccggtcgggtgtcagaaggcaagaagcaggaggcacccatcactcaggtgacaaagaggaaccctgctcacctcccgctgacccaggctgccctgaaggtccttgctcagaaagccagtgaggcccagcctcctgctgccaggaccccgtcttcaagtggggttgaccatgctctgggcacactccctgtaatgagtcctcagatcacccctgtgcaggccaagatgaccaacaagctcaaaaaggctgaggtccctgcagtcgagcgagccacagccactcctgtgggacaccccaaagccaaggcctctgagacctccaacgacagcgaggacagcagcggcagctcttcagggagtgaggaggatgctgacgggccccagaaggcccacaggcgggtaggtccagccccctctgcgacggagaccttggtggaggagaccacagcagagtctagcgaggatgaggtcgtggcaccctctcagtctctcctctcaggttatgtgacccctgggccaactctggccaactcccaggcttcaaaggccactcctaggccagacctcaacccgtcggcttcctctacttccatcagcaaagatgccccagatggcaagcaggaagtggagccccaacacgtagcaggcactgtatcccctaaaacaagcaggagagaggctgatgccacgcctcagaagccccggaagcccaagaaggaggccgggagcccccaagcctccacgctggccctgcagagcgacatcagccgacgcctcctgagtgagccctggcccctgaatgaggcccaggtccaggcctcggtggtgaaggtcttgacagagctgctggagcaggaacggaagaaggccgccgatgccgccaaggagagcaacaggaagggccgggtgggccgcaagcggaagctgtcgggggaccagacagcagccagagtccccaagagcaagaaaaagaagcagctcgtggccgggggaggtggggagggtgctgctggctcaccagaaaaggccctcaggactcccaaggggaaagccaagagagatggagcaagcagtgacatcaaggagaagaaggagaaagagtctcctggctctctagaggccaaggagaagccggaaggggagccggggacactgaaggttgaaggtggagaccaaggcaacccaaagatcaagaaggagaaaaagaaatcagataagaaaaaaaaagacaaggaaaaaaaggaaaagaagaagaaggcaaaaaaggcctcaaccaaagaccctgactcactattccagaagaaaaagaagaaaaagaagaagacagcagagcaaactgtctgaggggcacaaggcgacagggatttcttagccaagtggtgaccagccccatgcctctgccctgtgcccaccgtgggctggaactgaatctttagcttcccccgtccccagaagaggccagccagccacagtgtccacgctggccgagctagtgagccctgcagaggctggtccgaggaggaggagaagcttccagctccaatgactggcactcactgactccgcgtctgacttctgtcctgacacagaatgcttcatagagatgtgtacagtatatatatatttttttaagagacctgcccctcccccttcaaactgacactcccagaggcctcgggaccttccatcctttgacctgcagacccagcaaggcccggcctgcagctcctcccatgtccctggtctctggtctctggctgatgctgaggctttgtcctctctgtttttcacattttgtttgtggttttttgtaacaactcggaaaataaaaggcttgaagga

SEQ ID NO: 3178 - DNA, 391 bp, Canis familiaris
agtctctaaaacaactgaatccgggatccctgggtggcgcagcggtttggcgcctgcctttggcccagggcgcgatcctggagacccaggatcgaatcccacatcaggctcccggtgcatggagcctgcttctccctctgcctgtgtctctgcctctctctctctctctctgtgactatcataaataaataaaaattaaaaaaaataaaaaataaaaaataaaacaactgaatcctgaggaatgtgattcaaaagactctaaactcactcactagcagagccacctgaacagcacaaagaaaaagtccttcaagaagacttcagtcccctaggccttaagcagcatcccagcttcatagagtgataatggctgccatgctcaagaccaagg

SEQ ID NO: 3179 - DNA, 328 bp, Canis familiaris
agtcctccaccctcaacatattaaggatgataataaaacttgtaaaatgtggggatccctgcatggagtctgcttctccctctgcctgtatctctgcctctctctctatctcaaataaataaattaaataaataaataaataaataaataaataaataaataaataaataaataaaatgaaacttgtaaaatgtagaccacggggtatctcacaccttgactctgaccccgacagtagacagggagaaattaccacacatcacagaccgtttactcccacatatctgtctccagaatttagattccaccttcactctctctatatcca

SEQ ID NO: 3180 - DNA, 205 bp, Canis familiaris
caatacttaaaaaagataattattcctacatatcattctacaatgctctgatacatgaagggtataaagatcttgctgcccttctccatagtggcattcctgtcatctcttcttccaacggtggcaaagattcagttggtggaataacttcacatggtttgtatccatgtcttctacaacatttggtgtcacaatagcaatgtag

SEQ ID NO: 3181 - DNA, 330 bp, Canis familiaris
agtcctgtggcacaacacatacagcattggttcctctagatctggttaaatgcaggatgcaggtttgttttgcatgttggattaaaagcatatggttgaagcatggcttctaagttgtacaacatagactctactaacaagccgtgtggaaacctaattgtccaagaggtaagttgataactagtaacatgagttttatattaaaatgcatggtgtgtcttgtcttactacagagtacagttgcgaatatggctccatgaagttttatgcactgtgtggctttgggtggggtcttaagttgtggtctgacacacactgctgtcgttcctc

SEQ ID NO: 3182 - DNA, 623 bp, Canis familiaris
  misc_feature (538)..(538): n comprises a, c, g, or t, or includes no nucleotide
  misc_feature (545)..(545): n comprises a, c, g, or t, or includes no nucleotide
  misc_feature (560)..(560): n comprises a, c, g, or t, or includes no nucleotide
  misc_feature (574)..(574): n comprises a, c, g, or t, or includes no nucleotide
  misc_feature (585)..(585): n comprises a, c, g, or t, or includes no nucleotide
  misc_feature (604)..(604): n comprises a, c, g, or t, or includes no nucleotide
  misc_feature (609)..(609): n comprises a, c, g, or t, or includes no nucleotide
gcacgagccaggcctcacctcttggagggcccaggaacacccatacaggtggccatgacagcccccatggacaacatgaattgtctacagtggagggcaaaacatcctctgggagcttcttcctgtttctttccccagctaaccatcctgcaagaaatatttctggaatgcctccatatttaaagaagattccttgagacagtccatctttctgcgctagtgacagtagagaagtttttactttctctcagaaagcgaaaaaagggagacttttacgggaaggagagaggacttacttgctgtactaatgtgttaagtggggggaaaatttatgacttccggtgctacctggggcatgttctggggctcattgttctccagagcgttaggacatcagtcaaagaatttttgggacatataaacacgtggatcccgggtttttttgaccttttgaattattttggaaccaaaggtggatcaacttgacacatgctgggggagctagaacactttggggactgtgatcacttatccactngggatkntgaaccacttttgtngtgtgctttgrccngtataatatgntgwtaacgtgattttacgnttacnttttttttgtggag

SEQ ID NO: 3183 - DNA, 567 bp, Canis familiaris
acgaggtggagggcttctttgccacactgggcggtgaaattgccctgtggtctttggtggtcctggccattgagcggtacgtgggtggtgtgtaagcccatgagcaacttccgttttggggagaaccatgccatcatgggcgtcgcttcacctgggtcatggcgctggcctgtgcggcaccccccctcgctggctggtccaggtacatcccagaggcatgcagtgctcatgtgggatcgactactacacactcaagccagaaatcaacaatgagtccttcgtcatctacatgttcgtggtccacttcgccatccccatgattgtcatattcttctgctatggacagctcgtcttcacagtcaaggaggcagctgcccagcagcagggaatcggccaccacccagaaggctgaaaaggaggtcaccccccatggtcatcatcatggtcatcgcctttccctgatctgctggggtggcctatgccaattgttggatttctaaatcttcaccccaccaagggttccactttttggccccactcttcattaaccctccccgcggttttttt

SEQ ID NO: 3184 - DNA, 609 bp, Canis familiaris
ctggagcagacacggaaggaaattgttatggccatgatgatgaccgcctgtgatctctcagccatcaccaagccctgggaggtgcagagtaaggtagctctactggttgctgccgaattctgggaacaaggtgacctggagcgcacagtgctgcagcagaatcccattcccatgatggacaggaacaaggcagatgaactccccaagcttcaagtcggcttcattgactttgtttgcacctttgtctacaaggaattctcccgtttccacgaggagatcactcccatgctggatgggatcaccaacaaccgcaagagtggaaggcgctcgcgatgagtagacaccaagatgaaggcctggagaggagagcagagcagagacagaagcaaggggggagagatagccgggggaaaccagccgggggggggactcatcaagttgctgatagtaagtgcctcataggtgacgatgtacaacttctgaaggacaccaccagagaaacaaacctgtttgagtaatagtatggttgaatggaaaattagctattattgtgtttgaaattttagttaatatttatggtaacaatttgttatgatattaattataggg

SEQ ID NO: 3185 - DNA, 578 bp, Canis familiaris
ctggagcagacacggaaggaaattgttatggccatgatgatgaccgcctgtgatctctcagccatcaccaagccctgggaggtgcagagtaaggtagctctactggttgctgccgaattctgggaacaaggtgacctggagcgcacagtgctgcagcagaatcccattcccatgatggacaggaacaaggcagatgaactccccaagcttcaagtcggcttcattgactttgtttgcacctttgtctacaaggaattctcccgtttccacgaggagatcactcccatgctggatgggatcaccaacaaccgcaaagagtggaaggcgctcgcgactgagtacgacaccaagatgaaggccctggaggaggagaagcagaagcagcagacagcccaagcaaggggcggcaggagatcagcccggggggcaacccagccccggccgggggcgcacctccatccaagtcctgctgcatccagtaacgctgcctggcatcarctgcaccgaatggtaccacccttccttaaagaagaccaccccaaccaccaaaaacaaaaccctgctgttgaagtaaaata

SEQ ID NO: 3186 - DNA, 708 bp, Canis familiaris
aggggctgactggacccccgcagcctcctgggaatgggggagacccagagcccgcctggccggagcatgaagcgctcggcccggttcctgggacatggtccagactaacgtgcccgccgctgttgatggtcctccctgcaccagagacaccagattttgatttgattttcttctcttgggagaaaagggtcaggaaatcttacatctggatgtgtttccttcacccagggatttcttagccaagtggtgaccagccccatgcctctgccctgtgcccaccgtgggctggaactgaatctttagcttcccccgtccccagaagaggccagccagccacagtgtccacgctggccgagctagtgagccctgcagaggctggtccgaggaggaggagaagcttccagctccaatgactggcactcactgactccgcgtctgacttctgtcctgacacagaatgcttcatagagatgtgtacagtatatatatatttttttaagagacctgcccctcccccttcaaactgacactcccagaggcctcgggaccttccatcctttgacctgcagacccagcaaggcccggcctgcagctcctcccatgtccctggtctctggtctctggctgatgctgaggctttgtcctctctgtttttcacattttgtttgtggttttttgtaacaactcggaaaataaaaggcttgaagg

SEQ ID NO: 3187 - DNA, 1995 bp, Canis familiaris
gtaaagactcaatttcttaaacaaagctatttatccatttaaatagtgttcttctgtcgctgcccccccacccccaccgtggatttgaccactggggcggccccacacaggcacacctgggagaaagccacctgtgctaactggctccctctctgttctctaggacatatgagccccaccacctgcaccctgcggaagcacaagaccaatcggaagccgagaacgcccttcaccacgtcgcagctcctcgccctggagcgcaagttccgccagaaacaatacctctccattgcagagcgcgcggagttctccagctctctgaacctcacagagacccaggttaaaatctggttccaaaaccgaagggccaaggcgaaaagactgcaggaggcagaactagaaaagctgaagatggctgcaaaacctatgctgccctctggcttcagccttcctttccccatcaactcgcctctgcaagcagcatccatatacggagcgtcctaccctttccatagacctgtgctccccatcccgcccgtcggactctatgcgaccccagtcggatatggcatgtaccatctatcctaaggaagaccagctccatggacttgtgatggatgtttgtttaaatgggtaccccttccctctccaagaaggcagtaccaagccagtactcctgctctgcagaccttgcatgcgccaccctaagcagctaggcctacggggccacagacatagtttgaatttgttctttaggctggaggcaccaagctccattttcttggtgtaatcttctagatgtccccttttcacaaagattggctctgatatggttttatatataaatatatatatataataaaatataatgacatttttatacagcagacgtaaaaattcagattattttgaaaggcaaaatttatatgcacatgtgtatacttttttctctatatcaccttcctaaaagactgcttaagtccatttgttttttcttataggagagaccaattatttgctaaaatttttgacatttggggattttgctgggatgatggacttttgctgatggaaaacaaaagttagaattaggcacaatgcatacgaagtagatatggcgagattcctcaaagtgatgaggatacattgtttttgcatttttacatacattgaaaaactcattacatactaccatatttggcccatagtttttcccctctatccacattgttacagattgttaaagttttaatttccccccttttttttggtaatatcaataaaagggggatgagaagaatcttgagaatgccttgagggtagcgtgggacatggaagtacttcctaattcctcttcaggctgttgcttaactccatttcagatcattggagagtaaaaagttaatgcacatcgtggaattgatggtttctgtgaaatactaggtacaagtcattcctcacacattgcaaaggtgattgggggcggggagtgtagttaattctctgcttaaaaaaataaatatattgtaaccattacctatatgctaaatattcttgaacaatgaatagatccagaaagaaaaaaaaaaatcatgctttctctgtgtgtgtacctgttgtatgtgctaaacttattagaaaaatttatttactttttaacatgttgggggcagagggtaaagccatgttttgacttgctaaaaatggtgttgtcaaacagcccatttagctccctggtaattcatctttccatcttccccccccaacaccacccagtatacgtttatccctttgaaagggtgccttgtataattttatatattttattgaagagttatttcttatctcttattctgaattaaattaaacatttgttttattgcagtaatgttttgtccaaacacagttattttaaaggatgctctctgttcttagctgggttcaattcaaaaacgccaccaggattggaggaggggttttttcttatgatattag

SEQ ID NO: 3188 - DNA, 270 bp, Canis familiaris
cacatttcttggagatggtaaagttcgagtgccatttcaccaacgggacggagcgggtgcggtatctgctgagagacatctataaccgggaggagatcctgcgcttcgacagcgacgtgggggagttccgggcggtcacggagctcgggcggcccgacgctgagtcctggaaccggcagaaggagctcttggagcagaagcgggccgcggtggacacctactgcagacacaactaccgggtgggcgagagcttcacggtgcagcggcgag

SEQ ID NO: 3189 - DNA, 413 bp, Canis familiaris
caggggcgggggtggtgatcaaacaggaacagacggacttcgcctacgactcagatgtccccgggtgtgcgtcgatgtaccttcacacagagggtttctctgggcactctccaggggacaggaccgtgggttatggctacgagaaacctctgagaccattcccagatgatgtctgcgtcgtcccggagaaattcgaaggagacattaagcaggaaggggttggggcgttcagagagggaccgccctaccagcgccggggggctttgcagctgtggcagttcctggtggccctgctggatgacccaaccaacgcccacttcattgcctggactggccgggggatggagttcaaactaatcgagcctgaggaggtcgccaggctctggggcatccagaagaaccggccagccatg

SEQ ID NO: 3190 - DNA, 748 bp, Canis familiaris
ctcaacagcgtgtctccgagcccgccggtgctgctgcacccgccgcctcagctctcgtccttcctgcacccccacggccagcaggtgccctattacctggagaacgagccgagcggctacgcggtgcgccaggccgagcccgcccgccttctacaggccaaattcagataatcgacgccagggtggcagagagagattggccagtaccagtgacaaaggaaacatggccatggagtctgccaaggagactcgctactgtgcagtgtgcaatgactatgcctcaggctaccattatggagtctggtcctgtgagggctgtaaggccttcttcaagagaagtattcaaggacataatgactacatgtgtccagctaccaaccagtgcacaattgataagaacaggaggaagagctgtcaggcctgtcggctgcgcaagtgctatgaagttggcatgatgaaaggcgggatacggaaagaccgaagaggaggaagaatgttgaaacacaaacgccagagagatgatggggagggcaggaatgaagtggggtcctctggagatgtgaggacttccagcctttggccaagccctctcttgattaagcatactaagaagaacagcccagccttgtccctgacagccgatcagatggtcagtgccttgttagaggctgagccccccataatctattccgactatgacccatccagacccttcagtgaagcttcgatgatgggcttgctgaccaac

SEQ ID NO: 3191 - DNA, 751 bp, Canis familiaris
cctgtaaacagagagacactgaaaaggaaagttagtggaagcagttgtgccagccccattactagtccaagttcaaagagggatgcccacttctgtgcggtctgcagcgattacgcatctggatatcactatggagtctggtcgtgtgaaggatgtaaggccttttttaaaagaagcattcaaggacataatgattacatatgcccagctacaaatcagtgtacaatagataagaatcgacgcaagagctgccaggcctgccgacttcggaagtgctatgaagtgggaatggtgaagtgtggctcccggagagaaaggtgtgggtaccgtgttatgcgaaggcagaagagttccgatgagcagctgcactgcctgagcaaagccaagaaaaatggtggccacgtgacccgagtgaaggagctgctgctgagcgccctgagcccggagcagctggtgctcacgctcctggaggccgagccgccccacgtgcttgtgagccgccccagcacgcccttcaccgaggcctccatgatgatgtccctgaccaagctggccgacaaggaactcgtgcatatgattggctgggccaagaaaattccaggctttgtggagctcagcctctgtgaccaagtgcgcctcctggagagctgctggatggaggtgctaatggtgggcctcatgtggcgctccattggccacccgggcaagctcgtctttgctccagacctcgttctggacagggatgagggga

SEQ ID NO: 3192 - DNA, 4934 bp, Canis familiaris
tcatgctggagaagttctgcaactctacgttttggaactcttcattcttggatagcccagaagcggacctgccactttgttttgagcaaactgttctggtgtggattcccttgggtttcctttggctcctggccccttggcagcttcttcatgtgtataggaccaagatcaagagatcttctataaccaaactctaccttgctaagcaggtgcttgttgggtttcttcttattctagcagccatagagctggtccttgtactcacagaagactctggagaagccacagtccccgccattagatacaccaatccaagcctttacctgggcacatggctcctggttttgctgatccaatacagcaggcgatggtgtgtacagaaggattcttggttcctgtctctattctggattctctcaatactctgtggtagtttccaatttcagactctgatccggacactcttaaaggacagcaattctaacttggcttactcctgcctgttcttcatcggctatgcactacagatcctggtcctgatcctatcagcattttcagaaaaagatgcctcctcaaataatccatcattcacggcctcatttctgagtagcattacgtttagttggtatgacagcattgttatgaaaggctacaagcaacctctgacactggaagatgtgtgggatgttgatgaacagattacaaccaaggcactggtcagcaagtttgaaaaatatatggtagaagagctgcagaaggccagaaagaccctccagaaacagcaacagaggaacacccaggggaagtctggagaaaggctgcatgacttgaacaagaatcagagtcaaagccaagatatccttgttctggaagaagttaaaaagaaaaaaaagaagtctgggaccacagaaaagtttcccaagtcctggttggtcaagagtctcttcaaaactttctatgtcatactcttgaaatcattcctactgaagctggtgtttgaccttctcacgttcctgaatcctcagctgctgaagttgctgatctcctttgcaaatgacccagacatgtatgtgtggactgggtatttctattcggtcctcttctttgttgtggctctcatccagtctctctgccttcagagctactttcaaatgtgcttcatgttgggtgtaaacgtacggacaaccatcatggcttccatatacaagaaggcgctgaccctttccaaccaggccaggaagcagtacaccattggagaaacagtgaacctgatgtctgtggatgctcagaagctcatggatgtgaccaacttcattcatctgctgtggtcaaatgttctccagattgctttatctatctacttcctgtgggcagagctgggaccctccatcttagcaggtgttggggtgatgatactcctaattccagttaatgggctacttgcctctaagagtagagctattcaggtaaaaaatatgaagaataaagacaaacgtttaaagatcatgaatgaaattctcagtgggatcaagatcctgaaatattttgcctgggaaccttcattcaaaaaccaagtccacgaacttcggaagaaagagctcaagaacctgctgaccttcgggcagatgcagtctgtaatggtgtttctcttatacttaactccggtcttggtgtctgtgatcacgttttcagtttacactctggtggacagcaataatgttttggatgcagagaaggcattcacctccatcaccctcttcaatatcctgcgctttcccctaagcatgctccccatggtaatctcctcactgctccaggccagcgtttccagagaacgcctggaaaagtacttgggaggggatgacttagacacatccgccattcgacgtgacagcagttctgacaaagctgtgcagttctcagaggcctccttcacctgggaccgggactcggaagccacaatccgagatgtgaacctggagattatgccaggccttatggtggctgtggtgggcactgtaggctctgggaagtcttccttgatgtcagccatgctgggagaaatggaagatgtccatgggcacatcaccatcaagggcaccatagcctacgtcccacagcaatcctggattcagaatggcaccataaaggacaacatcctttttggatccgagttggatgaaaagagataccagcaggtgctagaagcctgtgccctcctaccagacttggaagtgctgccgggaggagacctggctgagattggagagaagggtataaatcttagtgggggtcagaagcagcggattagcctggccagagctacctatcagaattcagacatctatgttctggatgaccccctgtcagctgtggatgctcatgtgggaagacatattttcaataaggtcttgggtcccaatggcctattgaaaggcaagactcgtctcttggttacacatagcattcactttcttccccaagtggatgagattgtggttctggggaatggcaccatcttggagaagggatcctacaacactctgctggccaagaaaggattgtttgctaagattctgaaggcattcacaaaacagacgggtcctgaaggagaggccacagtcaatgaggacagtgaagaagatgatgactgtgggctgatgcccagtgtggaggaaatccctgaggaagtggcctccttgaccatgaaaagagagaacagccttcatcgaacacttagtcgcagttccaggtccaggagcagacatcagaaatccctaagaaactctttgaaaacccggaatgtgaacactctgaaggaggaggaggaaccagtgaaaggacaaaaactaattaagaaggaattcatacaaactggaaaggtgaagttctccatctacctgaagtacctacgagcaataggatggtatttgatattcctcatcatttttgcctatgtgatcaattctgtggcttatattggatccaacctctggctcagtgcttggaccaatgactctaaagcctttaatggcactaactatccagcctctcagagggacatgagaattggcgtctatggagttctgggattagctcaaggtgtgtttgtgctcatggcaaatctcttgagtgcccatggttccacccatgcatcaaacatccttcacaggcaactgctaaacaacatccttcaagcacccatgagtttttttgacacaacacccacaggtcggattgtgaacaggtttgctggtgatatttccacagtggatgacaccctcccccaatccttgcgcagctggatattgtgtttcctgggaatagtcagcactcttgtcatgatctgcacggccactccagtgttcatcatcgtcatcattcctcttagcattatttatgtgtctattcagatattttatgtggctacttcccgccagctgaaacgtctagactctgtcaccagatccccaatttactctcacttcagtgagacagtgtcaggtttgtccgtcatccgtgcctttgagcatcagcagagatttctgaaacacaatgaagtggggattgacaccaaccagaaatgtgtcttttcctggattgtctccaacagatggcttgcagttcgtctggagctgattgggaacttgattgtcttcttttcatccctgatgatggttatttataaagctaccctaagtggagacactgtgggctttgttctgtccaatgcacttaatatcacacagaccctgaactggctagtgaggatgacgtcagaaatagagaccaacattgtggctgttgaaagaataaatgaatacataaaagtggaaaatgaggcaccctgggtgactgataagagacctcccccaggttggcccagcaaaggggagattcggtttaacaactaccaagtgcggtaccggcctgaactggatcttgtactgagagggatcacttgtgatattaggagcatggagaagattggtgtggtgggcagaacaggagctgggaagtcatccttgacaaatggcctcttcagaatcctagaggctgcaggtggtcagatcatcattgatggggtagatattgcttccattgggctccatgacctccgagaaaaattgaccatcatcccccaggatcccatcctgttctctggaagcctgaggatgaatctagacccttttaaccactactcagatggggagatttggaaggccttggagctggctcacctcaaaacatttgtggctggcctgcaactggggttgtcccacgaagtggcagaggctggtgacaaccttagcatagggcagaggcagctactgtgcctggccagggctctgcttcggaaatccaagattctgatcatggatgaggccactgctgcggtggacctagagaccgatcacctcatccagatgaccatccaaagggagttctcccactgcacgactatcaccattgctcacaggctacacaccatcatggacagtgacaagataatagtcctagacaatgggaagattgtagagtatggcagccctcaagaactgctgagaaattcgggccccttttatttgatggccaaagaagctggcattgaaaatgtgaacagcacatcgttctgacagtaggtcccatgggctgaaaaaggactataagatcattccttatttttttgtgagagatactacacagaagtttgtaaaatatacatttttgaagaaggattgttatatccagctacagcggaccacccccaatcttgctttgatgatcccacttcaattttatctccttcatacttaccttcccagagataactaacctgaattttgtgataatgatatcctcctgcttttcattttagttttactacttggtatgtacccttaaacaagatataccttttttaatttatgtga

SEQ ID NO: 3193 - DNA, 504 bp, Canis familiaris
  misc_feature (440)..(440): n comprises a, c, g, or t, or includes no nucleotide
  misc_feature (442)..(442): n comprises a, c, g, or t, or includes no nucleotide
caaccacacgtacaacatggcgcccagtgccctcgactctgctgacctgccaccacccagcggcctcaagaaaggcagcaaggataagcaggctgacttcctagacaagcagatgagccgggacgagcatcgagcccgagccatgaagatccccttcaccaatgacaaaatcatcaacctgccagtggaggagttcaatgagctgctgtccaaataccagctgagcgaggcccagctcatcctcatccgtgacatccggcgccggggcaaaaacaagatggctgcacagaactgccgcaagcgcaagctggacaccatcctgaacctggagcgggatgtggaggacctgcagcgtgataaagcccggctgctgcgggagaaggtggagttcctccggtccttgcggcagatgaagcagaaggtccagagcctgtaccatnangtgtttgggcggctgcgggatgaaaatgggcggccctactcgcccagtcagtatgcactcct

SEQ ID NO: 3194 - DNA, 503 bp, Canis familiaris
  misc_feature (402)..(402): n comprises a, c, g, or t, or includes no nucleotide
ccgggactgccagctcaatgcccacaaggaccaccaataccagtttctggaggatgcagtgaggaaccagcgcaagctcttggcctcgctggtgaagcgccttggggataagcatgcaacactgcagaagaacaccaaggaggttcgcagctcgatccgccaggtgtctgacgtacagaagcgtgtgcaggtagatgtcaagatggccattttgcagatcatgaaggagctgaacaagcggggccgtgtgctggtcaatgatgctcaggtgactgaggggcagcaggagcgcctggaacgacaacactggaccatgaccaagatccagaagcaccaggaacacatcctgcgctttgcctcttgggctctggagagtgacaacaatacggccctgctgctctncaagaagctgatctacttccaactgcatcgggccctcaagatgattgtggaccctgtagagccacatggcgagatgaaatttcaatgggaccttaatgcct

SEQ ID NO: 3195 - DNA, 511 bp, Canis familiaris
  misc_feature (503)..(503): n comprises a, c, g, or t, or includes no nucleotide
gccaggtcagcgagagcatctgcgggagccgggcgggaggggagcgggaagcgggaagccccatccgagagtgtggatttgagcgtccgctttctaacccaagatctcgaaatgcatcgtgattcctgtccattggactgcaaggtttatgtaggtaatcttggaaacaatggtaacaagactgaattggaacgagcttttggctattatggaccactccgaagtgtgtgggttgctagaaaccctcccggctttgcttttgttgaatttgaagatccccgagatgcagcggatgctgtccgagagctagatggaagaacgctgtgtggctgccgagtaagagtggaactctcgaatggtgaaaagagaagtcgaaatcgtggcccacctccttcttggggtcgtcgccctcgagatgattatcggagaaggagtcctccacctcggcgcagatctccaagacggagaagcttctcccgcagccggagcaggtccctttctanagatagga

SEQ ID NO: 3196 - DNA, 656 bp, Canis familiaris
  misc_feature (586)..(586): n comprises a, c, g, or t, or includes no nucleotide
  misc_feature (647)..(647): n comprises a, c, g, or t, or includes no nucleotide
  misc_feature (652)..(652): n comprises a, c, g, or t, or includes no nucleotide
ggcgagaacgacccccggaccggccaaagcccgcgtgccgccgcatccccgcgtccagcgcttacgtcccgccgccgtcgccaccatgcccaagagaaaggctgaaggggatgctaaaggagataaagccaaggtgaaggatgagccacagagaagatctgcaaggttatctgctaaacctgctcctccaaagccagagcccaagcctaaaaaggcccctgcaaagaagggagagaaggtacccaaagggaaaaaggggaaagctgatgctggcaaggatggaaataatcctgcagaaaatggagatgccaaaacagaccaggcacagaaagctgaaggtgctggagatgccaagtgaagtgtgtgcatttttgataactgtgtacttctggtgactgtacagtttgaaatactattttttatcaagttttataaaaatgcagaattttgttttactttttttttttaagctatgttgttagcacacggaacacttcattgttgttttgggggaagggcatatgtcactaataaaatatttcccaagctagattgataacgaaggaaaaacaccttccccttctanttttgaaaaacttcctcttggctccaggaagaaggatccctgatgttgaccacatgaaccnccttngtgg

SEQ ID NO: 3197 - DNA, 402 bp, Canis familiaris
  misc_feature (36)..(36): n comprises a, c, g, or t, or includes no nucleotide
  misc_feature (46)..(46): n comprises a, c, g, or t, or includes no nucleotide
  misc_feature (97)..(97): n comprises a, c, g, or t, or includes no nucleotide
  misc_feature (137)..(137): n comprises a, c, g, or t, or includes no nucleotide
  misc_feature (158)..(158): n comprises a, c, g, or t, or includes no nucleotide
  misc_feature (196)..(196): n comprises a, c, g, or t, or includes no nucleotide
  misc_feature (205)..(205): n comprises a, c, g, or t, or includes no nucleotide
  misc_feature (234)..(234): n comprises a, c, g, or t, or includes no nucleotide
cgctcggggagccgcgggctttggtgcagacatggncaagtccaanaaccacaccacgcacaaccattcacgaaaatggcacagaaacggcatcaanaaaccccggtcacaaagatacgaatctcttaagggggtanaccccaagttcctgaggaacntgcgctttgccaagaagcacaacaagaagggcctgaanaaaatgcangccaacaatgccaaggccatggctgcgcntgctgaggctatcaaggctcttgtcaagcccaaggaggttaagcccaatatcccaaagggcggcagccgcaagctcaatcgacttgcctacatcgctcaccccaagctcgggaaacgtgctcgtgcccgcattgccaaaagtctcatgctctgccggccaaaggccaa

SEQ ID NO: 3198 - DNA, 327 bp, Canis familiaris
  misc_feature (314)..(314): n comprises a, c, g, or t, or includes no nucleotide
gatgccgaaagggaagaaggcgaaggggaagaaggtggccccggcccctgccgtggtgaagaagcatgaggccaagaaggtggtcaaccccctgttcgagaagaggcccaagaacttcggcatcggacaggacatccagcccaagagggacctcacccgctttgtcaagtggccgcgctacatccggctgcagcgccagagggccatcctgtataaacgtctcaaggtgcctcctgccattaaccagttcacccaggccttggaccgccaaacagctacacaactgcttaagctggcccacaagtacagaccanagaccaagcaaga

SEQ ID NO: 3199 - DNA, 409 bp, Canis familiaris
cgatttaaagagacagaagctgccggggcccaagaagacggtccccaggaccctccccccgagtccttgggaccgcctgggtccccagagccggggagatggtttgcggtggcttcgcctgctccaaaaatgcgctgtgcgctctcaacgtggtctacatgctggtgggcttgttgctcattggagtggctgcttgggggaagggcctgggcctggtgtccagcatccacatcatcggaggagtcattgccgtgggggtcttccttcttctcatcgccgtggctggactggtgggtgctgtcaaccaccaccaagtcctgctcttcttttatatgatcatccttggtttggtcttcatcttccagtttggaatctcttgttcatgtctggctattaaccgaagcaaaca

SEQ ID NO: 3200 - DNA, 357 bp, Canis familiaris
ccgccccagccgccgccgccgccgccgccacccccgctgcagcttatggtctctccctagagctttgccgtttggggcagctgctgaggtcgtgtggttccgcccgccccgcgcggcagcgacatggaggaattcgactctgaagacttctccacctcggaggaggacgaagactacgtgccgtcgggtggagagtatagtgaagatgatgtaaatgaattagtgaaggaagatgaagtggatggtgaagagcagacacagaaagccaaagggaaaaaaagaaaggctcagagcattccggccaggaagagaaaacaaggtggcttctcattagaagaagaggaagaggaggatgcc

SEQ ID NO: 3201 - DNA, 486 bp, Canis familiaris
  misc_feature (399)..(399): n comprises a, c, g, or t, or includes no nucleotide
accagcatcttcgagacggcaggggtcgggcagccagcctatgcgaccataggagctggtgtggtcaacacagtcttcaccttggtctcggtgttcctggtcgagcgggctggccgtcggacactccatctcctgggcctggcaggaatgtgtggctgtgccatcttgatgaccatagccctgcttctgctggagcggcttccagccatgagctacgtctccatcgtggccatctttggctttgtggccttctttgagattggcccaggccccattccctggttcatcgtggccgagctgttcagccagggcccccgcccagccgccatggccgtggctggcttctgcaactggacaagcaacttcatcattggcatgggtttccagtatatcgcggangccatggggccctatgtcttccttctgttcgcggttctcctgctcgccttcttcatcttcaccttcctaaaagtgcctgaaacccga

SEQ ID NO: 3202 - DNA, 519 bp, Canis familiaris
gcgccgtgctgctggccgcccagctcccgctggtgccttcgcgccccgcggcgccgggggccgagccgggcagagccgccaccctccagggcgagggccgggacggcgcggcccccaacggctcggcccagcagctgccgcagaccatcatcatcggggtgcgcaagggcggcacgcgcgcgctgctggagatgctcagcctgcaccccgacgtggccgccgccgagaacgaggtccacttcttcgactgggaggagcactacagccagggcctgggctggtacctgggccagatgcccttctcgtccccgcaccagctcacggtggagaagacccccgcgtacttcacgtcgcccaaagtgcctgagcgcgtccacagcatgaacccgggcatccggctgctgctcatcctgcgggacccgtccgagcgcgtgctgtccgactacacccaagtgttctacaaccacgtgcagaagcgcaagccctacccgtccatcgaggagttcctggtgcgcgacg

SEQ ID NO: 3203 - DNA, 172 bp, Canis familiaris
cgcatccaagcctacgactacctcgagtgctcggccaagaccaaggagggcgtgcgcgaggtcttcgagacggccacgcgcgccgcgctgcagaagcgctacggctcccagaacggctgcatcaactgctgcaaggtgctatgagggccgcgcccgccccgcctgcccctgc

SEQ ID NO: 3204 - DNA, 450 bp, Canis familiaris
cccagatctgtatatacaagaatgtccagattacacctgcccgatcatgttctcctccccggccgacatcaccatcctgctggacggctcggccagcgtgggcagccacaacttcgacaccaccaagcgcttcgccaagcggctggccgagcgcttcctgacagcaggcaggacggacccggcgcacgacgtgcgggtggcggtggtgcaatacagcgggcccgggcagcatcggccgggccgcggggcgctgcggttcctgcagaactacaccgtgctggccagcaccgtggacggcatggacttcttcaacgacgccaccgacgtctacgatgccctgggctacgtgacgcgcttctaccgcgaggcctcgacccgcgatgccaagaagaagctgctgctcttctccgacggcaactcgcagggcgccacggcggcggccatcgaaaa

SEQ ID NO: 3205 - DNA, 574 bp, Canis familiaris
  misc_feature (8)..(8): n comprises a, c, g, or t, or includes no nucleotide
  misc_feature (67)..(67): n comprises a, c, g, or t, or includes no nucleotide
aaagtcgntcccgatccaggtctcggagcaaagttcgatcacgttttcgatcaaaaggcaggaaatntagatcaaaaagcaaatctaagcccaagtctgatcggggctcccgttcgcgctctcgaagcagatctaaggagtatgagaaatctcgaagcaggtctcgctctcgatctcgttcccccaaagaaaatggaaaaggtgatataaagtcaaagtctaggtcaagaagccagtctcgttcaaattctccccttcctgctccaccctcaaaagcacgttctgtgtcccctccaccaaaaagagcttcaagatcccgttctagatctcgttcaaagtccaggtcacggtccagatcgagttccagagattaacctagaactctacattctttgcacactattatggaacactttcctacttgcttaggcagttactcttccatgtttgtacttggcctcttctgcaagaggaatctcctgaaaatgggggcacacagaaatttgatttgtggccaaatttgatggaaaaaaaatgaggttctaaggaaatggtggcatgaagaccctctcac

SEQ ID NO: 3206 - DNA, 393 bp, Canis familiaris
  misc_feature (321)..(321): n comprises a, c, g, or t, or includes no nucleotide
  misc_feature (353)..(353): n comprises a, c, g, or t, or includes no nucleotide
tcggtcggtgcgtctgtgcggcgcggcggcggcggcggcggagggcgcgaggtcgcggcggctccgttggcggcggaggctaggcccggcagcgcaggcgtgagcgcggccgagcccgcggcgccttcccggcgggtggggacgagcgggccccgcggcgtcatcggcggcgaggagctgccgcgcctcggcctagcatgtcggaagcgggtgaggagcagcccatggagacgacgggcgccaccgagaacggacacgaggccgcccccgaaggcgagtcgccggcggggtccggcaccggggccgcgacgggcgccggangcgggagcgcggcgcccccggccggcaaccanaacggcgccgagggcgaccagatcaatgccagcaagaacg

SEQ ID NO: 3207 - DNA, 462 bp, Canis familiaris
ccgaagggtgagaaggtcgctgagtgtcgcgactggggcaaggggcgagtgcgggggcggacagaagccgcgcgggcgtgggagggcgaccgtccgcccgccgaagggccgccgagggctcccgccgaggactccggccgcagcgcccgcgccgcaccgcaccgcgcggcccctccgcgagcgcccgcacctgaacgcgaggctctccagcgcgcgtgcgcgccaagggtcttcccgcccccgatcgcgagaccctaacggccggcggctcgacgcttcgcctgcgctgccgggtggagcccgacatggcgcagctccgtgggccggggcggtgcggggcgctcgtcgccctgctggcctcgctgctgctcttccgggctgaggcggccgacggagaacgtggcgtccacgacttttgtcacgtttcgaaggttgtgggaaaatgccgggcctccttcccta

SEQ ID NO: 3208 - DNA, 473 bp, Canis familiaris
agtgtccagaggaggacaaaaagaatgatgcagtctagaaacacagtgaatgtatttttctcaaccaagcccagctttaagatttctttcttttttcctgggcagctctctttagtcaataccaaggcaggctttggaacactgcagatttgctttagaggtagataaaacagaaatcatgcagttaagtcaattgaggaggaagggctttgcactcttgaggacatcaggaccagaaggggatcctttttttcgggactagaaggacttttcccatttaacatttttacctgtttgggggaaatacccaagtcttacctgtctctctcaggaaaaactaaaggcagcctgcactaactacagacagaaggagagtgccaacatttggattacggcactgcagttcacggtctgggtctgtgacacacaaacacgtcatgcacttggagacagaggttaattatatcagtgtc

SEQ ID NO: 3209 - DNA, 354 bp, Canis familiaris
  misc_feature (303)..(303): n comprises a, c, g, or t, or includes no nucleotide
ctggcgtggagctccgcggtccggctgcctcggccccagtccccgctcctgcgctcggccacccctgcctcctgcagcacagcgtcaggggagccaccgccggacggagcagcggaggctgtcgggcccatctgtcccccgggcccgcggcggccgtgctggccgtaggtttgccttgtgtcaatcaggtaccgtgtctcctcctaagtactcggatcagccaggactttttttttttttttttttttaaagaaaacggacttctcgcttccccgacgttctgaggttgaggtgttttcatanaacatggagaggctcctgccaccttcaataaagacctgaatcggagcgatt

SEQ ID NO: 3210 - DNA, 520 bp, Canis familiaris
caaaggcagggggctcaaccactgagccacccaggcgccccaagggcttttttttatcaagaggataaaagaatcacttttgttatccaaaaagatcacatatcgaagaggaaggggaggcaggggtggaggacgggaatcttgacagtttatagagaaatgagcatttggaattaataaagcactaataacagatgttaaggaagcattttgatatgggggaaaggtatggactttgtgagggtgtctactttttacttcccagttatgatttggatagattaatttttttttttaatttttatttatttatgatagtcacaaagagagagagagaggcggagacgcgggcagagggagaagcaggccccatgcaccgggagcccgatgtgggattcggtcccgggtctccaggatcacgccctgggccaaaggcaggcgccaaaccgctgcgccacccggggatcccagattaatttttttttagccttaattttttcagtttggaaacaaggacaaa

SEQ ID NO: 3211 - DNA, 413 bp, Canis familiaris
  misc_feature (18)..(18): n comprises a, c, g, or t, or includes no nucleotide
  misc_feature (304)..(304): n comprises a, c, g, or t, or includes no nucleotide
  misc_feature (310)..(310): n comprises a, c, g, or t, or includes no nucleotide
  misc_feature (329)..(330): n comprises a, c, g, or t, or includes no nucleotide
  misc_feature (393)..(393): n comprises a, c, g, or t, or includes no nucleotide
gccgaggcatagggcccntgtgcagaggcagcagttgggaacggccatcaggtcacaatgtagggccgtgtgcagcccagcagcacgaaggcgacaccagcacagccgaagcacgttctgtcgaggagcgaggatgaaggatagagacaggcgcctccgggagcagggagcgcggggacttgcggggacttgtggctcattgggaggggcctgaggctggtctgcagggctgggccactcccccccgccatggcctatttggaaggcaggtgtcccgcagcctcccgcatgtggggcatatgangctgangttcaaccttctgctccannggtggcctctcgtatcctaaatggttccttctgggcaggaacgtacgtttctaagtggcctcncttcgcttaggcatgtccca

SEQ ID NO: 3212 - DNA, 356 bp, Canis familiaris
ggcgaggacatcaagtgggtgtgccaggacgtgtccccgggcgcccccaaggagctcagaaactacctggagaaattcaaggacccggcctaggcccccgcggggcctggctcctcgctcggctccagagtgggctggccggggcgtcggagggtctggccgagcgggacgcaccggggccggcggaccgcggaggcctccgagccgggaagggctgtgtgcctcttttgcagcagcgggtttagcagccggtgacggcggagttcccagtcagcggagcaaactccggcctgcaccgtcggaaagtgagtctatgagtcaaaatagaacagacaagctaccaaaaattatttgtt

SEQ ID NO: 3213 - DNA, 131 bp, Canis familiaris
cgcagtccctcggcgagctcgcaccgcccgcccgctcgcgccccgccgccgagctcctgccgccccgcgtcctctcaggggcatgatcaggggggcatcgggtattgggggtgtttgtgtggtattgagtc

SEQ ID NO: 3214 - DNA, 211 bp, Canis familiaris
ggctccccgggccgggcgccccgggtcccgcgcccgggcggcggcggcggcggcggcggcggggagcccccgaggacgccggcgctggcgctgcgcttcgacaagcctatcaagcaggccttctacaacacgggggccgtgctgttcgtgtgcctgtgctgcggcgccgccgtgctcgtctacttcatcctggaggccttcctgcggccgc

SEQ ID NO: 3215 - DNA, 1309 bp, Canis familiaris
cgggagcgggcgcagtgtgcgcgggacgcgagcccccgagcgcgcagaggcgccgccgctgagagccccccggcccgccgcgccgacccgcccgcggagccccggccgcgcagccagcatgaagcgagcccacccggactacagctcctcggacagcgagctggacgagaccgtcgaagtggagaaggagagcgcggatgagaatggaaacttgagttcggctctaggttccatgtccccaactacatcttcacagatcttggccaggaaaagacgaagaggcatcattgagaagcgccgacgggaccggattaataacagtttgtctgagctcaggcggctggtacccagtgcttttgagaagcagggatctgctaagctagaaaaagccgaaatcctgcagatgaccgtggatcacctgaaaatgctgcacacggcaggaggaaaaggctatttcgacgcgcacgcccttgctatggactatcggagtttggggttccgggagtgcctggcggaggtggcccgatatctgagcatcattgagggactggatgcctccgacccgcttcgagttcggctggtctcccaccttaacaactacgcctcccagcgggaagcggccagcggcgcccacgcaggcctgggacacctcccctggggcagcgccttcggacaccacccgcacgtcgcgcaccccctgctgctgccccagagcggccacgggaacactggcaccagcgcctcgcccacggacccgcaccaccagggcaggttggctgcggcgcatccggaggcgcccgccttgcgcgcgccccctagcggcggcctcggaccggtgctccccgtggtcacctcggcctccaagctctcgccgcccctgctgtcctcggtggcttccctgtcggccttccccttctcctttggctcctttcacctcctgtctcccaatgcactgagcccttcggcacccacgcaggccgcaaaccttggcaagccctatagaccttgggggacggagattggagctttttaaagacccgacgctgtaggatggagggaggggaacacctaaaggcccagctgagctgggctgtggccaacatcaccttaaagtcctcagtaaaagtaaagaggagaaaaggtacacgttcagatcaattttgttgaaagactaaaggtttgttggtttactttttcttttttaatgttttttttttcttttttaaaatcaggtcccgtcttagcagtttttaaaagctagttgttaaattttgttccaaacattacattgaaatagtgagtataaacc

SEQ ID NO: 3216 - DNA, 893 bp, Canis familiaris
  misc_feature (28)..(28): n comprises a, c, g, or t, or includes no nucleotide
  misc_feature (30)..(30): n comprises a, c, g, or t, or includes no nucleotide
  misc_feature (36)..(36): n comprises a, c, g, or t, or includes no nucleotide
  misc_feature (72)..(72): n comprises a, c, g, or t, or includes no nucleotide
  misc_feature (110)..(110): n comprises a, c, g, or t, or includes no nucleotide
  misc_feature (112)..(112): n comprises a, c, g, or t, or includes no nucleotide
  misc_feature (120)..(120): n comprises a, c, g, or t, or includes no nucleotide
  misc_feature (152)..(152): n comprises a, c, g, or t, or includes no nucleotide
  misc_feature (154)..(154): n comprises a, c, g, or t, or includes no nucleotide
  misc_feature (156)..(156): n comprises a, c, g, or t, or includes no nucleotide
  misc_feature (206)..(206): n comprises a, c, g, or t, or includes no nucleotide
  misc_feature (219)..(219): n comprises a, c, g, or t, or includes no nucleotide
  misc_feature (246)..(246): n comprises a, c, g, or t, or includes no nucleotide
  misc_feature (271)..(271): n comprises a, c, g, or t, or includes no nucleotide
  misc_feature (286)..(286): n comprises a, c, g, or t, or includes no nucleotide
  misc_feature (384)..(385): n comprises a, c, g, or t, or includes no nucleotide
  misc_feature (387)..(387): n comprises a, c, g, or t, or includes no nucleotide
  misc_feature (399)..(399): n comprises a, c, g, or t, or includes no nucleotide
  misc_feature (414)..(414): n comprises a, c, g, or t, or includes no nucleotide
  misc_feature (419)..(419): n comprises a, c, g, or t, or includes no nucleotide
  misc_feature (457)..(457): n comprises a, c, g, or t, or includes no nucleotide
  misc_feature (481)..(481): n comprises a, c, g, or t, or includes no nucleotide
  misc_feature (496)..(496): n comprises a, c, g, or t, or includes no nucleotide
  misc_feature (837)..(837): n comprises a, c, g, or t, or includes no nucleotide
gggaccgaatactgctgctccgcggcanancgaacngcggtttcctcgggaactggcgtcgccgctggaaancagagcgccgcccgggagcgtccccccctccggcccgntncactgtantgcggtccccgcctcgcccggcataaggcaancnanaagggacgcactttgccggctcgcgaagcgaggcggacgggacccgacanttgggacctcacncgggcggagagcgagcctgaggcctgnaaggaagcccgctcgccgagcaaanaccccgcgggagcancggcgcgcgaggactccagccaccgggaatcacgggagcgcgctccgcgggtcatctcgggcggggatgcgactgccggcctccctggggctgcgtcnncnccgggaccggangccttgggcggggangcacngaacccctatcggggcccggggcgttcccgagcctgcngcgggcgaaacttccgggaccctnggaaactccggcctngcggcctcaaaccacctgttcggccgccgcaggacggagggaagcgggggcgggagtctttggaggtgcgggcgggaagggccgcgggggagagtgcgggcttccagaagccgccgaagaccgctcgctgaaatgcgggcaggtgtcgatggggggaacgaactgtacagatcaccttagaacacggaaagaggccagcccggggctcagcggttcagcgtcgcctgcagcccggggcgtgacccgggagacccgggatcgagccccacgtcgggctccctgcctggagcctgcttctccctctgcctgagtcctctctctctctctctctctctctctgngcgtctctaatgaataaataaaaatcttttttaaaaaataaaatacagaaagaagt

SEQ ID NO: 3217 - DNA, 439 bp, Canis familiaris
  misc_feature (103)..(103): n comprises a, c, g, or t, or includes no nucleotide
  misc_feature (112)..(112): n comprises a, c, g, or t, or includes no nucleotide
  misc_feature (192)..(192): n comprises a, c, g, or t, or includes no nucleotide
  misc_feature (393)..(393): n comprises a, c, g, or t, or includes no nucleotide
agacgccccgcaggcggcttcgcgctgcccggaggcgcgggtggcgcgccgtgctctgtccgcggtgcgaggagtgtgcctcccgcagccccggggcgcgganagcgcggangaagggtcggggccgcccacactgctctcgctgtctcgccgtcgcaaacgccctccggggggtggggggggcgtcccccnaccggcgcgatgggagccaacgaggaccaggagatggaactggaagccctacgttctatttatgaaggggatgaaagtttccgggaattgagtcccgtttcatttcaatataggataggtgaaaatggtgatcccaaagccttcttaatagagatttcctggacagaaacatatccccaaacacctccaattatatctatnaacgctttttttaacaacaccatcggtatacttcttgtgcattgta

SEQ ID NO: 3218 - DNA, 588 bp, Canis familiaris
  misc_feature (168)..(168): n comprises a, c, g, or t, or includes no nucleotide
  misc_feature (170)..(170): n comprises a, c, g, or t, or includes no nucleotide
  misc_feature (312)..(312): n comprises a, c, g, or t, or includes no nucleotide
  misc_feature (371)..(371): n comprises a, c, g, or t, or includes no nucleotide
  misc_feature (391)..(391): n comprises a, c, g, or t, or includes no nucleotide
  misc_feature (398)..(398): n comprises a, c, g, or t, or includes no nucleotide
  misc_feature (431)..(431): n comprises a, c, g, or t, or includes no nucleotide
  misc_feature (460)..(460): n comprises a, c, g, or t, or includes no nucleotide
  misc_feature (523)..(523): n comprises a, c, g, or t, or includes no nucleotide
  misc_feature (552)..(552): n comprises a, c, g, or t, or includes no nucleotide
  misc_feature (588)..(588): n comprises a, c, g, or t, or includes no nucleotide
aaggggcagaaatggcggctccgctcggctcccgctgaggagggcgaagccggtggagggtctgagctgccggccgggggcaccgctcccgcttcccgcctcctgccttctcgcgcctacttgtcttcctgtgcccgactctcgcctgtcgtcggctccgcggcgcanantccgggtgggctcgcgtctcccggcccggctccgctggccctgcctgcccggccggcgccggcctccctcggctccccgggcgcggcgggcgcgggctggaccccgtccgcggggccgcaccatggtgaacacccggaaganctctctgcgtctcctcgggtccaagtcgcccgggcccgggcctgggcctggggccggancggaactggggcgaccggangcagcanccatttcatctcgtctcggaccgctcctccaanaccgcgccgccagctgcccgggcgccaangccgggggaaacgcggcgccggcggcgctctggaagaagcccggaaactgaaattgatggtantttaagtgataaccacgtttctcctccanccaaacgcatttgaaacaacctgattctgtttgcan

SEQ ID NO: 3219 - DNA, 2218 bp, Canis familiaris
gttctctcaatggtgtttgctctgagggtgggacacaaggctgtttagtgtctcgtaaaacatttaccaaaagcactgagccatggttttgaagggcattccgttgccagagtgtgggaggagagcgagccggggaaaggagagctccaggtgtttggcaggtctccgccagccgtggatgcctttgacaccatgaccgcagaggacgccgccgcagccatgagcagcgactccgcggcgggcggcgcggcctcggccaaggcgcccgagggcgtggccggggcgcccaacgaggcggcgctgctggcgctgctggcgcgcacgggctaccgcatggtgcaggagaacgggcagcgcaagtacggcggcccgccgcccggctgggagggcccgcacccgcagcgcggctgcgaggtcttcgtgggcaagatcccgcgcgacgtgtacgaggacgagctggtgcccgtgttcgaggcggtgggccgcatctacgagctgcgcctcatgatggacttcgacggcaagaaccgcggctacgccttcgtcacgtactgccacaagggcgaggccaagcgcgccgtgcgcgagctcaacaaccacgagatccgcccgggccgcctgctcggcgtgtgctgcagcgtggacaactgccgcctcttcatcggcggcatccccaagatgaagaagcgcgaggagatcctggaggagatcgccaaggtcaccgagggcgtgctggacgtcatcgtctacgccagcgcggccgacaagatgaagaaccgcggcttcgccttcgtcgagtacgagagccaccgcgccgccgccatggcgcgccgcaagctcatgcccggccgcatccagctgtggggccaccagatcgccgtggactgggccgagcccgagatcgacgtggacgaggacgtcatggagaccgtgaagatcctctacgtgcgcaacctcatgatcgagaccaccgaggacaccatcaagaagagcttcggccagttcaacccgggctgcgtggagcgcgtcaagaagatccgcgactacgccttcgtgcacttcgccagccgcgaggacgcggtgctcgccatgaacagcctcaacggcaccgagctggagggctcgtgcctcgaggtgacgctggccaagcccgtggacaaggagcagtactcgcgctaccagaaggcggccaagggcggcggcgcggccgaggcggcggcgccgcagccgggctacgtgtactcctgcgacccctacacgctggcctactacggctacccctacaacgcgctcatcgggcccaacagagactactttgtgaaagcaggcagcataagaggccggggtcgaggtgcagctggcagcagagccccagggcccaggggttcctaccttgggggatattcagctggccgtggtatttatagccgatatcacgaaggaaaaggaaagcagcaagaaaaaggatatgaacttgtaccgaatttggaaatctctgccgtcaatccagttgccattaaacctggtacagtggccatccctgccattggggcccagtattccatgttccaggcagcgccagcccctaaaatgatcgaggatgggaaaatccacacaatggagcacatgatcagccccatcgctgtgcagccagacccagccagtgccgccgccgccgccgctgccgccgccgccgccgtcatccctgccgtgtccacgccgccacctttccagggccggcccatcactccggtgtacacggtggcgcccaacgtgcagaggattcccgcggccgggctctacggggccgggtacgtcccgttcgcggcgcccgccaccgccacgctcgccacactacagaagaacgcggcggccgccgccgtgtacgggggctacgcgggctacatacctcaggccttccccgccgccaccatccaggtgccgatccacgacgtctacccgacgtactgacccggcggggcgcgcggaggccgcggaggccgcggaggccgggcccagccaccccgccgcgggacactgtgctatgtatgaagaaccaacgtgccgcgggagcacgcctcggaaacccgaaagtgaagaatgttgtcagacatcatcccgaaaagattttatattcatgaagttttcactagttttgttgtcgttgtcgttttgtcttttcgtttttgtttttttaagactattttcaacgtagcgg

SEQ ID NO: 3220 - DNA, 453 bp, Canis familiaris
gttagttctgccctccgtgttcaccagagagttcatactggacaaaggccttataagtgccgtgaatgtgggaaatcttacactgttagttctgccctccgtgttcaccaaagacttcacactggagaaaggccttatgagtgccatgactgtgggaaatcttacactgttagttctgccctccgtgttcaccagagagttcatactggacaaaggccttataagtgccgtgaatgtgggaaatcctttaccactaattctatcctacgttatcaccaggcagttcacactggacaagagccttataagtgccatgaatgtgggaaatcttttatcagtaatcctgctctccgttatcaccacagagttcacactggacaaaagccctatgaatgccgtgaacgtgggaaatcttttaccagtgattctgccctacgttatcagagacttctc

SEQ ID NO: 3221 - DNA, 3106 bp, Canis familiaris
caacttccggcccggccgcttcgggctcccgggtccggcgtccgcgaggcgcacctgccccgagtccgagccgaacctcttgagacccaggcatggaagtctcagtgttgctgtgaaaagcaggctggtcaaattcctttacagtcttccctccacctgccatttcacccacctccttgggatgagctaagagatccaatgatggccgtcaagcagctccttcctgctgggtcccaggttttggtttcctttgaagacgtggctgtgctactctcccgggaggagtggggccgtctgggccctgctcaaaggggcctctacagtgatgtgatgctggagacctacaggaacctgatctcactgggacttcaaggttcgaaacctgatgtcatctccaggctagagaagggggaagagccatgggccccatactcagcgaaaattgaggagagctggatccggagtcatgagagtgaaagttttcagtctctgatggaaaagaaaggattgactccaaaacaggaaatttccaaagcaatggggttccggagagcaaagtcagaatatgtaaggaatgtttccaaggaatctgagtttgaagagatgaataaaaccaagggaaagttaaagaattacaggaaaaaatctgcagaggaagaacttaagaaatccttctcccagaagaacagttccaggccagtgacgttgacacatgtgaaatcccctgtttcaggaaaaggccaaaaatccagttctctggaggtagactacactgtagatgcaagccctgtcagatttcatagagcatctacagggggtagtctccaccagaatgtgccatgtgtaaatgactttcaacaaagtcaggacctcattaatctccagtgtttgcatctaggagaaagagcttgtcagacagatctgttcatgaaagcacccaggcagagttcagttctcagtgagaatcagagggttaacaatccagaaaaatcctttgaatgtactgagtgtagaagacttttcagcccaagcaaagctctgtctcagcatcagagaagtcacactggagagataccctgtgagagtggtggatgtggaagaacttcccaccactgctctgtcctcagccaacatcaggaagttcaccatggaggggagtcccatacctgtgctgagtgtggcaaagctttcaaggcccattcctacttcattcagcagcataacactcacacaggagaaaggccttatgagtgcagtgagtgtgcacatttatcttacagtcaacatcttcaaattcatagtgggcagaaacctcatgagtgtagtcagtgtggaaaagcctttagtcatagttctaacctgtttcatcatcagagaattcatagtggagagaaaccatacgagtgtaaggaatgtgggaaggcgttcggtaggcactcgcacctccttcagcataagagaattcattctggagagaaaccttatgactgtactgagtgcggcaaagccttcagtgcacggttatctctcattcagcatcagagaactcatacaggagaaaaaccctatgaatgcaatgaatgtgggaaatcctttagcctgaaccgaacccttattgttcatcagaggattcacactggagagaaaccctataggtgtaatgaatgtgggaaatccttcagtcagcgtgcacaagtcattcagcacaagagaattcacactggagagaagccctatgtctgcaatgagtgtggaaagtcattcagtgctcgcttgtccctcatccagcatcagagaattcacactggagaaaaaccttatggatgcagtgagtgtgggaaaacgttcagtcaaaagggacatctgattcagcatcaacgaattcacactggagagaaaccctatgagtgtaatgagtgtggaaaagccttcagccagagttttaatcttattcatcatcaaaggacacacaatggtgagaagccctatgaatgtaatgaatgtgataaagccttcagtgtgctctcttcccttgttcaacatcagagggtccataatggtgagaagccctatgagtgtcacaaatgtgggaaggcctttagccagggctcgcacctcattcagcatcagaggagccacactggagagaaaccctatgagtgtaatgagtgtgggaaaacctttgggcagatatccaccctaattaagcatgagagaacacacaatggagagaaaccctatgagtgtggtgactgtgggaaagccttcagccagagtgcacacctcgtccgccatcgaaggattcacactggagagaatccctatgagtgcagtgactgtgggaaagccttcaatgtccgttcctctcttgttcagcatcacagaattcatacaggggagaagccttatgaatgcgagaagtgtggcaaggccttcagtcagcattcacaatttattcagcatcagaggattcacactggagagaagccctatatttgcaatgaatgtgagaaagccttcagtgcacgtttatcccttatccaacacaagagaattcacacaggggagaaaccttacaaatgcactgaatgtggaaaatccttccgacaaagctctcaccttattcgacatcagagagttcacagtggagagcgaccttatatgtgtaatgaatgtgggaaaacttttagccagagaataactcttactagtcatgagaaaactcacaccagagagcaagcctataagtgtgttaaacgtgaggacctcttaactgcacagtcagcttccattcagcaccataaagttcacaatggagaataacatctttattcaataaagtcttcactattttacatcaggagcagtatactgatgggaagccatcacttttacagctttcattttggagatttatctcttaagtgatttaacagtctcccagtgcactgttaactaaaagcaagatgccaaaatatgtggcaaaaattccaaggtcacatgccatcccttagattcagagggtggatctatgcttgagtattttaaaggatcacaatttaattacacttactcaagattgtgttttcatagcaccagactttaa

SEQ ID NO: 3222 - DNA, 935 bp, Canis familiaris
  misc_feature (92)..(92): n comprises a, c, g, or t, or includes no nucleotide
  misc_feature (209)..(209): n comprises a, c, g, or t, or includes no nucleotide
  misc_feature (235)..(235): n comprises a, c, g, or t, or includes no nucleotide
  misc_feature (265)..(265): n comprises a, c, g, or t, or includes no nucleotide
  misc_feature (396)..(396): n comprises a, c, g, or t, or includes no nucleotide
  misc_feature (412)..(412): n comprises a, c, g, or t, or includes no nucleotide
  misc_feature (472)..(472): n comprises a, c, g, or t, or includes no nucleotide
  misc_feature (483)..(483): n comprises a, c, g, or t, or includes no nucleotide
  misc_feature (501)..(501): n comprises a, c, g, or t, or includes no nucleotide
  misc_feature (503)..(504): n comprises a, c, g, or t, or includes no nucleotide
  misc_feature (567)..(567): n comprises a, c, g, or t, or includes no nucleotide
ctgcagagacagacgcaaagtaaaatatggtaaaaaaaaaaaaaacaacaacaacaacaacccacacaccatgcaaagagtaagtataaganggctttcctgagtttgtagtaacctcagattaactagatgtgaagacaacaggtactaagagggctaaggaatgacattccataacgaaagaagacagctaaccagctcggaaactntaaaatgcacatccctagtcgcagancctccaagtagtgggctaacatggaaaganttaaagggagagatccacaattatagttggagattccaacacctctccctcagcaactgatacaagtcaaccaaattatcggtaaggagtatacaagtatctaagcaacagcattcagccaacttcaccangttgacgtttacagancatggcacccaacatgcaagatactcatttcccttcaaatgtacgtggaatatcttcacnacgatcgatcnatggcatggccactgggnannaagggtctcaagtgatgtcagcaagacagaaggctagaaggtctcagggcttgttttcccganaaaaataagaacaagggaaaaacaactacacactgatgcaaagagctatgaccacgctccagagtacaagcaagcagcagcaaaaaccccagggagtacaaacaccaaaaatggacacatagaaaagcacacctctctctgtttgaagacaatgcagagctctttccccccaagacaacgtgtgctgaaccgggagctgcctccacccaccctcctgtctcggcctgtagctagcttaagtcacagcataatccagccaggaaaggggaaggaaaactggacccccagggagagggaagatgcaggacccacaggactgtgctggggaccagacttggggagtctgaacaagggggctggggcaccag

SEQ ID NO: 3223 - DNA, 282 bp, Canis familiaris
  misc_feature (1)..(1): n comprises a, c, g, or t, or includes no nucleotide
  misc_feature (8)..(8): n comprises a, c, g, or t, or includes no nucleotide
  misc_feature (32)..(32): n comprises a, c, g, or t, or includes no nucleotide
  misc_feature (186)..(186): n comprises a, c, g, or t, or includes no nucleotide
  misc_feature (243)..(243): n comprises a, c, g, or t, or includes no nucleotide
ntgttgtnctactagctatccattttcagctnatactctgagcaggaagtgacttcttctgccaaaaggatttccaaatttccctttaatgctacagcatacatgagacagataaggcaagaaaaagagcagggtctataatgatgattaaggggctgagtcactatgcagccatttcgttagcgntttaaacgtgcagccagcagcatgcagggcaaagccttctgaggagaacaccaaggngtattcaaaggctgactctgagtcaatgaagtaatcaaa

SEQ ID NO: 3224 - DNA, 355 bp, Canis familiaris
  misc_feature (26)..(26): n comprises a, c, g, or t, or includes no nucleotide
  misc_feature (48)..(48): n comprises a, c, g, or t, or includes no nucleotide
  misc_feature (257)..(257): n comprises a, c, g, or t, or includes no nucleotide
  misc_feature (283)..(283): n comprises a, c, g, or t, or includes no nucleotide
  misc_feature (309)..(309): n comprises a, c, g, or t, or includes no nucleotide
  misc_feature (313)..(313): n comprises a, c, g, or t, or includes no nucleotide
tcaatacccctgccagttaaattctnagactaggtttctttgatgagngatattgtattaaaatgtaaggttattgtttattaatattattattactattattattattactcaggtatggtgaggccaacggatcaggaggcaacagccattaaaaagagagtttgttatactcgcagatcccaagaggaagggggcacagcatgccactgggaaccacacccacacaggaagtaccagtgtcaattaggaggcanagggagaaggaaaatgtgagcaagancctttattgtggttctgggggaaggnacanacaggcaaacaagtttaggattggctagtttgagtaattcag

SEQ ID NO: 3225 - DNA, 725 bp, Canis familiaris
  misc_feature (40)..(40): n comprises a, c, g, or t, or includes no nucleotide
  misc_feature (42)..(42): n comprises a, c, g, or t, or includes no nucleotide
  misc_feature (243)..(243): n comprises a, c, g, or t, or includes no nucleotide
  misc_feature (591)..(591): n comprises a, c, g, or t, or includes no nucleotide
  misc_feature (670)..(670): n comprises a, c, g, or t, or includes no nucleotide
  misc_feature (682)..(682): n comprises a, c, g, or t, or includes no nucleotide
gatctgtgtgaaataagagatgagggaacaagagcggagnangggagatcacagccttcctaagattaggttatttggagtagggggtgggtttggggggaaaggtgagagccttgagagaacaataggtcagcaccaggaaagaaaagatgactgcattagactctggaagccaatgcaacggcttgcaagtttagcactgtaagtacggtacaccgtgaatcatgtctgctgatgcaacancccctgggaaaggcaggggccccgagacagacactaataacaatgcaaagtcattcatgcttttattgttcaattataatgagtccactcatcacggtaataataataatgatgtgtttgaataacataattgcttaatagccattccttaccaccaccaccaccactaccccctaccattaggataaaactaaaataatctagagtatttatcattctaaaagaggatgaaaaaattggttttctgtattagcagcttttaagaattaaattatatatgggatccagttacttctgcagctttaaagggggagcttttcacctaaggtagcaagattgcataggggntaatttttttttttttcaggaaaatcccttccatattaatggaatctccttcatggaattcaagaggtctctgggcctnagttttgacgtncctggtgggcaatcaagatgacatttgtggttctgaaatccag

SEQ ID NO: 3226 - DNA, 502 bp, Canis familiaris
  misc_feature (145)..(145): n comprises a, c, g, or t, or includes no nucleotide
  misc_feature (395)..(395): n comprises a, c, g, or t, or includes no nucleotide
  misc_feature (427)..(427): n comprises a, c, g, or t, or includes no nucleotide
  misc_feature (442)..(442): n comprises a, c, g, or t, or includes no nucleotide
  misc_feature (485)..(485): n comprises a, c, g, or t, or includes no nucleotide
  misc_feature (495)..(495): n comprises a, c, g, or t, or includes no nucleotide
tgtcagagaagagctcccctgaggctgtgatggatgcacacagtcttggtcaataacagaggttgagggcagactaaatcttttccctgcagcccttcctcagggggcgcggcaggtgtggccaagcagaaaggtggtgatagtnctgctgctgctgctgctgctgctgctgctgctgctgctggggtctgtgtgattagtttgggtaacaaggtaaagaaactcacattgtcactaactctagaaccccctgactgcatgcattgggacagtataaaaaggaatgaggcacagagagtcatatttcccaaaaaactggaaagagagactctaacaaatccttggttcactcatgttcatggtggcatgacttcaccaaccatcaaaaagatggnaaaccacgcaaattccggacaaaatgggtaangcaaaagtgttgctnataattccatatggctgggaaatgggtaattccaggggggtanggaaaagggnaattttt

SEQ ID NO: 3227 - DNA, 426 bp, Canis familiaris
  misc_feature (1)..(1): n comprises a, c, g, or t, or includes no nucleotide
  misc_feature (96)..(96): n comprises a, c, g, or t, or includes no nucleotide
  misc_feature (136)..(136): n comprises a, c, g, or t, or includes no nucleotide
  misc_feature (293)..(293): n comprises a, c, g, or t, or includes no nucleotide
ntgcatatgattacagctaaaatgggcattattattattattattttttttaagtttcatgactgtcgttttatcaataggactcctaggtgtttnctttataaagttctctttgaacatgaaacttttgcccgtnagatgtgctttcatctaaatcagtattccgagggagcctcccaagtttcttaaatcgaaatgttagataaatgaacaggaaaaatatagcatttcacaataaaatttgaaacaaggatttgtaggtttattttttaagatttatgtttctgaatganggcaagaataccatattcttcagatttcttttaaactaacgtttttaagtcactcagtgcaccacactctactgttagctttgtgtgtggttacccatttaatccgcgcagttaccctgtgagggtggaaggg

SEQ ID NO: 3228 - DNA, 475 bp, Canis familiaris
  misc_feature (48)..(48): n comprises a, c, g, or t, or includes no nucleotide
  misc_feature (197)..(197): n comprises a, c, g, or t, or includes no nucleotide
  misc_feature (344)..(344): n comprises a, c, g, or t, or includes no nucleotide
  misc_feature (351)..(351): n comprises a, c, g, or t, or includes no nucleotide
  misc_feature (378)..(378): n comprises a, c, g, or t, or includes no nucleotide
  misc_feature (393)..(393): n comprises a, c, g, or t, or includes no nucleotide
  misc_feature (398)..(398): n comprises a, c, g, or t, or includes no nucleotide
  misc_feature (424)..(424): n comprises a, c, g, or t, or includes no nucleotide
  misc_feature (427)..(427): n comprises a, c, g, or t, or includes no nucleotide
  misc_feature (435)..(435): n comprises a, c, g, or t, or includes no nucleotide
  misc_feature (442)..(442): n comprises a, c, g, or t, or includes no nucleotide
  misc_feature (470)..(470): n comprises a, c, g, or t, or includes no nucleotide
ctgcccacactgcctgcactccggccttgtcaaagagccaaggctttnccccagaaggacattgacataaacctcctcagcttgtcctatccttccctgggagctgagctcagccctgggaggccggactggggggtaggggtgggggtaaggctctgctgagaatatcggggctcaggttcagcccacccaccatngcctgccgtgtgtgatctggggagtgcagtctccaccccgagccttactcttcctcttcttcttcttcaaaatggggtggggtgcagtgaggctggaggcacgtgcttgctgcaagagcatttagagtggtgcctgggtgaaggggncgctttnacagcgatgggtggctgtgtggggatngggtaagccagggangtgtncccagcattgaaggggttgggtttanctngtttcctnaggcttnctgtaacaatgaccattaaagccaaggntgctt

SEQ ID NO: 3229 - DNA, 846 bp, Canis familiaris
  misc_feature (117)..(117): n comprises a, c, g, or t, or includes no nucleotide
  misc_feature (425)..(425): n comprises a, c, g, or t, or includes no nucleotide
  misc_feature (436)..(436): n comprises a, c, g, or t, or includes no nucleotide
  misc_feature (441)..(441): n comprises a, c, g, or t, or includes no nucleotide
  misc_feature (456)..(456): n comprises a, c, g, or t, or includes no nucleotide
  misc_feature (475)..(475): n comprises a, c, g, or t, or includes no nucleotide
  misc_feature (478)..(478): n comprises a, c, g, or t, or includes no nucleotide
  misc_feature (488)..(488): n comprises a, c, g, or t, or includes no nucleotide
  misc_feature (503)..(503): n comprises a, c, g, or t, or includes no nucleotide
  misc_feature (508)..(508): n comprises a, c, g, or t, or includes no nucleotide
  misc_feature (514)..(514): n comprises a, c, g, or t, or includes no nucleotide
  misc_feature (540)..(540): n comprises a, c, g, or t, or includes no nucleotide
  misc_feature (543)..(544): n comprises a, c, g, or t, or includes no nucleotide
  misc_feature (546)..(546): n comprises a, c, g, or t, or includes no nucleotide
  misc_feature (569)..(569): n comprises a, c, g, or t, or includes no nucleotide
  misc_feature (638)..(638): n comprises a, c, g, or t, or includes no nucleotide
  misc_feature (673)..(673): n comprises a, c, g, or t, or includes no nucleotide
  misc_feature (772)..(772): n comprises a, c, g, or t, or includes no nucleotide
  misc_feature (775)..(775): n comprises a, c, g, or t, or includes no nucleotide
  misc_feature (802)..(802): n comprises a, c, g, or t, or includes no nucleotide
  misc_feature (814)..(814): n comprises a, c, g, or t, or includes no nucleotide
taaaaaatgaattagacagaatgtatgagtctgcttgaagaaaacaaagacttagctgttgggactggctctgttttagaaatagttcagttttgtcttttaaaatccacaaacctncccccccccttacctatttatttattattttctacagtagatcacacaaaaagaggaatgaatcattccctaaacttctttcttttcagatgcagcttgatgtattgtcttcatttaaattacaaatacactaatctgaaacactgtttaccaagtagcattttaaatgaaagatacaagaaattgcatcactcacattttaaaaatgactttcgactctgggacctcataaaaaacagccgacagtgttctctgtcttgggctgctatatttcagtccagtgaatgaaattcaattagtgagctttngtacttagggncattnatgattctgatgggnkgctctggakcaaaaactngkngtgccaargnccctarwbctgttgnktttnkttttnttttttttttgcagactgcagttaanggnncngagcggtggtggtggtgaagaancccaatagggcaggttggcatgaagaaagttagttttcggagcagcttacttttcaccatcatcagaanataggggaggaggagagctgttccccagaacagcncattatttactaagtgcatggattaactttttgagaaacctcaatgcttctgtccgtcattaccagttttagtactttcccaaaatagcaatcagcctnaanccaaccagttagcgggctactaccaangcattccagatntaattcgttcttaggttttgatctgcctcaga

SEQ ID NO: 3230 - DNA, 875 bp, Canis familiaris
  misc_feature (9)..(9): n comprises a, c, g, or t, or includes no nucleotide
ctgagcctnctacaaacagcatagactcagggtgagtcaccaggagacctcaatcacaggaagctggtgcagggggtcgtgggggaccaagcagagctggttaaagcccaggcatgtccaaacaaagaggaaaagaaggggccaaggctgctgtggacgattcagggtataaataagtagattttgttctttttaagattttatttatttatttgagagagagcacaggcaggttggaggaaggcagaggaagaaggagaagcaggctccccactgagcagggaccccagtgcagggctggatcccaggatcatgacctgagccaaagcaggatacttaaccaactgagccacccaggtgcccccagagtataactcagtagaaaggatggtttaagaacaacccaacaacaacaacaacaaaaaataaggacaacccaacagatcccccctgcccacagtaggagggtcctcaccatctgactgctggctggtagagactctttcccacctggactttgtggggttccctagagggaccaccatcctgcccatcttggtgtcttgctgagaccctgctcacctggaagtcctgctcactggcaatactggctcggaggcagcgctcaaaagggcaactataaagctcagtcttcacttaagagtttcaaaaaatgcttcctgaagtgaaaagttcaaatatgaaaggcctactttctatattgttacctcagctcctttaaaatgcatactttctagtttatcttgctgattttctatacagacaactctcaattaatcccctaaatccaaactagcaatgtttcacacacgcttcattcacactgaggcataaatgactagtggcctacccag

SEQ ID NO: 3231 - DNA, 280 bp, Canis familiaris
  misc_feature (106)..(106): n comprises a, c, g, or t, or includes no nucleotide
  misc_feature (110)..(110): n comprises a, c, g, or t, or includes no nucleotide
  misc_feature (200)..(200): n comprises a, c, g, or t, or includes no nucleotide
  misc_feature (206)..(206): n comprises a, c, g, or t, or includes no nucleotide
  misc_feature (251)..(251): n comprises a, c, g, or t, or includes no nucleotide
  misc_feature (263)..(263): n comprises a, c, g, or t, or includes no nucleotide
tgcagcaacctctgctcttccacagactgcacttccctgccccgctcccttcctcacttctcctcctcctcctctctccacctccccattttcctctgccaccctncctnctttctttgtcctctctccccactctgtttccctgtgctctgggagaatagagagggcgggagatttagtaagataacaattatatttgnctcctncccccaccccaacttcaagctctaggagagcaaaatgaaagcgtnctacatttaggntaaaagtttgggcttga

SEQ ID NO: 3232 - DNA, 300 bp, Canis familiaris
  misc_feature (5)..(5): n comprises a, c, g, or t, or includes no nucleotide
  misc_feature (12)..(12): n comprises a, c, g, or t, or includes no nucleotide
  misc_feature (16)..(16): n comprises a, c, g, or t, or includes no nucleotide
  misc_feature (22)..(22): n comprises a, c, g, or t, or includes no nucleotide
  misc_feature (27)..(27): n comprises a, c, g, or t, or includes no nucleotide
  misc_feature (32)..(32): n comprises a, c, g, or t, or includes no nucleotide
  misc_feature (105)..(105): n comprises a, c, g, or t, or includes no nucleotide
  misc_feature (189)..(189): n comprises a, c, g, or t, or includes no nucleotide
  misc_feature (206)..(206): n comprises a, c, g, or t, or includes no nucleotide
  misc_feature (246)..(246): n comprises a, c, g, or t, or includes no nucleotide
cagtnctgtgancctnctgganattcntttgntttatgccatgcctaggtgctgttaccatctgggttggttcctacttaaggctaatgtaatgtcaagctttgnattatctccaatccacctttccttaaactgagatcacccccttgccgttcctggcttaacctggctccagataactggcatatnctgggaatcaaatgatnagaaggagaagactatggggtgcagttagagtttgaacanagaataggtgctcacggcatgaacgcatggaatttttgtccattaaagaagcag

SEQ ID NO: 3233 - DNA, 379 bp, Canis familiaris
  misc_feature (323)..(323): n comprises a, c, g, or t, or includes no nucleotide
  misc_feature (356)..(356): n comprises a, c, g, or t, or includes no nucleotide
ctgcattcttatccttcagtgctgagagccaactcacaccattaaggtaagttcttcttcttcttcgtcttcgtcttcgtcttcgtctttttatttttatttttttagattttttctttttaaagtaatctctatacccaatgtggggctcaaacttacaaccctaagatcaagagtcgcacaactactgactgagccatccagggatcccataaattctatttttctgtttaatccagtttcagacagtttctgttacttgtaattaaagagtccaaacaaacataatggaacttcttctttagtttatactttgctttctnttccttccctctgcccctctactgccagtcctntttgtctagggcttctgagtgag

SEQ ID NO: 3234 - DNA, 429 bp, Canis familiaris
  misc_feature (1)..(1): n comprises a, c, g, or t, or includes no nucleotide
  misc_feature (9)..(9): n comprises a, c, g, or t, or includes no nucleotide
  misc_feature (352)..(352): n comprises a, c, g, or t, or includes no nucleotide
  misc_feature (381)..(381): n comprises a, c, g, or t, or includes no nucleotide
  misc_feature (396)..(396): n comprises a, c, g, or t, or includes no nucleotide
  misc_feature (404)..(404): n comprises a, c, g, or t, or includes no nucleotide
  misc_feature (419)..(419): n comprises a, c, g, or t, or includes no nucleotide
  misc_feature (426)..(426): n comprises a, c, g, or t, or includes no nucleotide
  misc_feature (428)..(428): n comprises a, c, g, or t, or includes no nucleotide
ntgcctgantccagctctctccaaatgtcctccaaacatcactcagttcaaccgaagacaaggaaggaaataaaaacacttgtatctcgtgcttccagcaaactgagaaaatactacagactttggcgatcaagcaccgtcacctggtctctgctattcagaaatcctaggaccacatcaaccccggggagcttagacccacagcagtggctcccggcaacctggcctccaagggaccacacggtgcagcacgcttagcattgatgagactactgggctgggggtgcacaaaataggcaaactgtaagacaaagaagggggatgaacgaacacaagagaaggggcaggaggnggaggaagaggaaggaagggaggaaggangggaaggaaggaggnggttaaangaggaaaagaggttnattgggntng

SEQ ID NO: 3235 - DNA, 454 bp, Canis familiaris
  misc_feature (20)..(20): n comprises a, c, g, or t, or includes no nucleotide
  misc_feature (27)..(28): n comprises a, c, g, or t, or includes no nucleotide
  misc_feature (60)..(60): n comprises a, c, g, or t, or includes no nucleotide
  misc_feature (63)..(63): n comprises a, c, g, or t, or includes no nucleotide
  misc_feature (76)..(76): n comprises a, c, g, or t, or includes no nucleotide
  misc_feature (131)..(131): n comprises a, c, g, or t, or includes no nucleotide
  misc_feature (383)..(383): n comprises a, c, g, or t, or includes no nucleotide
  misc_feature (449)..(449): n comprises a, c, g, or t, or includes no nucleotide
aaaaaatatttaataataanggcttgnnttataaaaagttaatgaaaattggggaagggnagntggggacacagcnccggggcttgcccaggtcttgtgctgagcatggagacctcatggcactgagatgnactcagggactgttctggtaacagaggagcattgaggccgcttcctggaagggaggaccggggatggaagggggccttccaactgtgggcccatttacccgacgcccacctcaggcatgggcttaagggaaagaggtttgaggtctggcctgcatcagctcccaggagctgtggctactctaactgaccccactacctgccccgctgctctggttccagaggtcaagccaggttcaactcccacccacctcnccagtctccaaataaacacaacagaatgaggctgagtgaaaaatccactttaataatccacttcanctcag

SEQ ID NO: 3236 - DNA, 240 bp, Canis familiaris
  misc_feature (1)..(1): n comprises a, c, g, or t, or includes no nucleotide
  misc_feature (96)..(96): n comprises a, c, g, or t, or includes no nucleotide
  misc_feature (201)..(201): n comprises a, c, g, or t, or includes no nucleotide
  misc_feature (216)..(216): n comprises a, c, g, or t, or includes no nucleotide
ntgcagcaagcctggcagatttccttaaaaagaaagccctgaagacagatgacatgtgcagccatttgccagggcagccgtgacaaactaccagtntccaggtggctcgaaacagcagagatttattctcacgcagcgtggaggtcagagagggcagcgccaagctgcctgcagaagccccaggcagggctcttccctgcntctccagcccctggntgctcctgggcttgtggccatgcc

SEQ ID NO: 3237 - DNA, 354 bp, Canis familiaris
  misc_feature (3)..(3): n comprises a, c, g, or t, or includes no nucleotide
  misc_feature (5)..(5): n comprises a, c, g, or t, or includes no nucleotide
  misc_feature (17)..(17): n comprises a, c, g, or t, or includes no nucleotide
  misc_feature (26)..(26): n comprises a, c, g, or t, or includes no nucleotide
  misc_feature (30)..(30): n comprises a, c, g, or t, or includes no nucleotide
  misc_feature (39)..(39): n comprises a, c, g, or t, or includes no nucleotide
  misc_feature (47)..(47): n comprises a, c, g, or t, or includes no nucleotide
  misc_feature (57)..(57): n comprises a, c, g, or t, or includes no nucleotide
  misc_feature (79)..(79): n comprises a, c, g, or t, or includes no nucleotide
  misc_feature (114)..(114): n comprises a, c, g, or t, or includes no nucleotide
  misc_feature (136)..(136): n comprises a, c, g, or t, or includes no nucleotide
  misc_feature (143)..(143): n comprises a, c, g, or t, or includes no nucleotide
  misc_feature (147)..(147): n comprises a, c, g, or t, or includes no nucleotide
  misc_feature (180)..(180): n comprises a, c, g, or t, or includes no nucleotide
  misc_feature (249)..(249): n comprises a, c, g, or t, or includes no nucleotide
  misc_feature (261)..(261): n comprises a, c, g, or t, or includes no nucleotide
  misc_feature (282)..(282): n comprises a, c, g, or t, or includes no nucleotide
  misc_feature (289)..(289): n comprises a, c, g, or t, or includes no nucleotide
  misc_feature (293)..(293): n comprises a, c, g, or t, or includes no nucleotide
  misc_feature (328)..(328): n comprises a, c, g, or t, or includes no nucleotide
  misc_feature (332)..(332): n comprises a, c, g, or t, or includes no nucleotide
  misc_feature (334)..(334): n comprises a, c, g, or t, or includes no nucleotide
ctntncatgctccagtncagaaaccncctnctcctccgnctcctccncttcctcctncctcggccttccagggacccanaagaacgtgacctgggacccacgttccaggagcanatggggctcttcccacttcctngcaggtnagtncggccttggcaccgtgactgctccctgtgggtnactggtgagcctcatgtccctctgttggcaggggtgggatggcgccgactccctccatgcctcggttanaggtacaggganagtttctgtagtccctcactnttagaancagnaaagatgcaacaggcccagcaccagcccttggctnggangnacaagagtgtacccacacag

SEQ ID NO: 3238 - DNA, 776 bp, Canis familiaris
  misc_feature (28)..(28): n comprises a, c, g, or t, or includes no nucleotide
  misc_feature (31)..(31): n comprises a, c, g, or t, or includes no nucleotide
  misc_feature (186)..(186): n comprises a, c, g, or t, or includes no nucleotide
  misc_feature (318)..(318): n comprises a, c, g, or t, or includes no nucleotide
  misc_feature (391)..(391): n comprises a, c, g, or t, or includes no nucleotide
  misc_feature (441)..(442): n comprises a, c, g, or t, or includes no nucleotide
  misc_feature (454)..(454): n comprises a, c, g, or t, or includes no nucleotide
  misc_feature (458)..(458): n comprises a, c, g, or t, or includes no nucleotide
  misc_feature (462)..(462): n comprises a, c, g, or t, or includes no nucleotide
  misc_feature (465)..(465): n comprises a, c, g, or t, or includes no nucleotide
  misc_feature (467)..(467): n comprises a, c, g, or t, or includes no nucleotide
  misc_feature (526)..(526): n comprises a, c, g, or t, or includes no nucleotide
  misc_feature (591)..(591): n comprises a, c, g, or t, or includes no nucleotide
  misc_feature (610)..(610): n comprises a, c, g, or t, or includes no nucleotide
  misc_feature (612)..(612): n comprises a, c, g, or t, or includes no nucleotide
  misc_feature (657)..(657): n comprises a, c, g, or t, or includes no nucleotide
  misc_feature (675)..(675): n comprises a, c, g, or t, or includes no nucleotide
  misc_feature (685)..(685): n comprises a, c, g, or t, or includes no nucleotide
  misc_feature (689)..(689): n comprises a, c, g, or t, or includes no nucleotide
  misc_feature (702)..(702): n comprises a, c, g, or t, or includes no nucleotide
  misc_feature (709)..(709): n comprises a, c, g, or t, or includes no nucleotide
  misc_feature (726)..(726): n comprises a, c, g, or t, or includes no nucleotide
  misc_feature (744)..(744): n comprises a, c, g, or t, or includes no nucleotide
  misc_feature (749)..(749): n comprises a, c, g, or t, or includes no nucleotide
  misc_feature (766)..(766): n comprises a, c, g, or t, or includes no nucleotide
tgttggggaactgtgctgccagcgaagntcntcctgtccttccggccggccttgagtgccacctgcaggctctgatgcacagccggggtggcttgggagttcctgcagtgcaacagtgctgctcaaacttgagggcatcggtcacctggggaactgcgccccagccccacagctcttgattcagtngctctgggatggggcctgagaatgtgcatttcagacaggttcccagatgatgccgctgctgccggtctgcggacactgcgaggaagcacggcactgagacagcccttgcgagcgggttgggaggtaggaatnggcagcccgggtttagctctccttgtgtgggcagagttaatgttgtcgggggcgcacatacgcacaggctgtnaggcctgtcttcacaggtacatgctgctgctggtggtgctggtgctggtnnctggtggtggtngttngtgntgntnctggtggtggtttctagcagatgagaaatcagccccagtaggtagtaaatttgagaganagagactgtgtcctggttggagtgagcaccatagctacggtggagttgggcccttaatgaagagnagaaagattatataagatntntcataagtatttggtagaagcagattgtactcagttttatttatnttttattctttaaaggtnttttatttantcantcatgagagatanagagagncatagagagagggagangcagctctgcaggagccnccagnggaaagtagaccacgtnacatcttcag

SEQ ID NO: 3239 - DNA, 754 bp, Canis familiaris
  misc_feature (229)..(229): n comprises a, c, g, or t, or includes no nucleotide
ctgtaacatttggggtgctagatgtgtggacatgctccttccagggagaaactggagacttggttttactgctgcacaagttggggggagatggtaggagacatgcccaccagctctttcaggtcctgagaggatcccagcctgctcccatgtgcagcctaactagaagccagaacctcagacagtagctaggaaggtacacaatcaagtgccttctagggagaaactnggaggtgaatgtttgcctcttccttctgtgctgagctggggaagtgagagctgcaaaagtgcttgtgtgcccatttaaaaagtacttttttgttgttgttgttgttgtgttgttgttgtttaatatgaccctatgagatttgtaaatgccaagccctggtaactattagttaggtgacttgagaacctgttccttgagtggcaactacaaaatttggagcaccttatgtgtggacagtttctttcccagggaaaaggttgcaacttggtttgttttttattattgaagtgagttagagggggaatatgggacaagtgcccaccagctctttaggtctccttggaggatcccagtcaatacccagatgcaaactgattagaagccagaccctcaggcagcagctgggaaattctgcactcaaactctcttccagggaaaaactgggagatgggcacctttgcctgctccatctgcactgagccatggggaataggtgggaggagtgttcatgtgcctgtttaacag

SEQ ID NO: 3240 - DNA, 251 bp, Canis familiaris
  misc_feature (3)..(3): n comprises a, c, g, or t, or includes no nucleotide
  misc_feature (14)..(14): n comprises a, c, g, or t, or includes no nucleotide
  misc_feature (17)..(17): n comprises a, c, g, or t, or includes no nucleotide
  misc_feature (33)..(33): n comprises a, c, g, or t, or includes no nucleotide
  misc_feature (54)..(54): n comprises a, c, g, or t, or includes no nucleotide
  misc_feature (85)..(85): n comprises a, c, g, or t, or includes no nucleotide
  misc_feature (122)..(122): n comprises a, c, g, or t, or includes no nucleotide
  misc_feature (133)..(133): n comprises a, c, g, or t, or includes no nucleotide
  misc_feature (176)..(176): n comprises a, c, g, or t, or includes no nucleotide
  misc_feature (183)..(183): n comprises a, c, g, or t, or includes no nucleotide
tanctaagaggagncangtcgccagggcccagncaaagaggttacggtttggcncgaagttgagctcctatccagcgggcgggtnaaaaaggtacctggaaggcctcccggttcttgcgttntgacgccgctnccgaaggcgggcttgctcccgctcctcctcctcctccctctcnaaagctnggatgtgctccttaaagcagatcagtgcatcttccttgtccatgtctaagcacagggaagaggctcag

SEQ ID NO: 3241 - DNA, 354 bp, Canis familiaris
  misc_feature (1)..(1): n comprises a, c, g, or t, or includes no nucleotide
  misc_feature (5)..(5): n comprises a, c, g, or t, or includes no nucleotide
  misc_feature (9)..(9): n comprises a, c, g, or t, or includes no nucleotide
  misc_feature (39)..(39): n comprises a, c, g, or t, or includes no nucleotide
  misc_feature (41)..(41): n comprises a, c, g, or t, or includes no nucleotide
  misc_feature (46)..(46): n comprises a, c, g, or t, or includes no nucleotide
  misc_feature (50)..(50): n comprises a, c, g, or t, or includes no nucleotide
  misc_feature (60)..(61): n comprises a, c, g, or t, or includes no nucleotide
  misc_feature (78)..(78): n comprises a, c, g, or t, or includes no nucleotide
  misc_feature (81)..(81): n comprises a, c, g, or t, or includes no nucleotide
  misc_feature (86)..(86): n comprises a, c, g, or t, or includes no nucleotide
  misc_feature (174)..(174): n comprises a, c, g, or t, or includes no nucleotide
  misc_feature (177)..(177): n comprises a, c, g, or t, or includes no nucleotide
  misc_feature (183)..(183): n comprises a, c, g, or t, or includes no nucleotide
  misc_feature (188)..(188): n comprises a, c, g, or t, or includes no nucleotide
  misc_feature (192)..(192): n comprises a, c, g, or t, or includes no nucleotide
  misc_feature (215)..(215): n comprises a, c, g, or t, or includes no nucleotide
  misc_feature (229)..(229): n comprises a, c, g, or t, or includes no nucleotide
  misc_feature (239)..(239): n comprises a, c, g, or t, or includes no nucleotide
  misc_feature (271)..(272): n comprises a, c, g, or t, or includes no nucleotide
  misc_feature (295)..(295): n comprises a, c, g, or t, or includes no nucleotide
  misc_feature (303)..(303): n comprises a, c, g, or t, or includes no nucleotide
  misc_feature (338)..(338): n comprises a, c, g, or t, or includes no nucleotide
  misc_feature (348)..(348): n comprises a, c, g, or t, or includes no nucleotide
nctangcanttgctctgtgagattaatcagccctcgggncnagggnaagnacgaggccannagagacatggcccagcnccncgatnttggtggtcttcctggccccactgcagtaaacaggcaaccttatgaccttgtccgtgtgtgtgtgtgtgtgtgtgtgcgcgcgtgcgngtngtgggnacggntggntggggcaggggctgagcagagantgagatgggtgctntgggaccctnttcaggcgcatggtgagcagacgatgcatctnnttctctgtctcccgtgtgtccgntgtcgggntggcctctggtatcttgtcactccttgtgactctnaccctattcnctttac

SEQ ID NO: 3242 - DNA, 524 bp, Canis familiaris
  misc_feature (11)..(11): n comprises a, c, g, or t, or includes no nucleotide
  misc_feature (20)..(20): n comprises a, c, g, or t, or includes no nucleotide
  misc_feature (31)..(31): n comprises a, c, g, or t, or includes no nucleotide
  misc_feature (64)..(64): n comprises a, c, g, or t, or includes no nucleotide
  misc_feature (99)..(99): n comprises a, c, g, or t, or includes no nucleotide
  misc_feature (118)..(118): n comprises a, c, g, or t, or includes no nucleotide
  misc_feature (120)..(120): n comprises a, c, g, or t, or includes no nucleotide
  misc_feature (177)..(177): n comprises a, c, g, or t, or includes no nucleotide
  misc_feature (186)..(186): n comprises a, c, g, or t, or includes no nucleotide
  misc_feature (235)..(235): n comprises a, c, g, or t, or includes no nucleotide
  misc_feature (298)..(298): n comprises a, c, g, or t, or includes no nucleotide
  misc_feature (488)..(488): n comprises a, c, g, or t, or includes no nucleotide
  misc_feature (491)..(491): n comprises a, c, g, or t, or includes no nucleotide
  misc_feature (500)..(500): n comprises a, c, g, or t, or includes no nucleotide
  misc_feature (502)..(504): n comprises a, c, g, or t, or includes no nucleotide
  misc_feature (507)..(507): n comprises a, c, g, or t, or includes no nucleotide
agtattgtccntccccgaangggataaccgnacttcaagattaccccaggaatgccaaattganttcgagctgtaaagtccattctgagaaggagcctnccggactgttacccccacntncccaactccatcagcatcgatgctggccctcggcaggcccccaagattgcccagatnaagcgcaanctctcctatggagacaacagcgaccctgccctagaggcatcctcgctgnccccgcctgacccctggcttgagaccacctccagctccccggcagagccagcgcagccagggncctgccgccgggatggctactggttcctaaagctccttcaggcagaaacggagcggctggagggctggtgctgccagatggacaaggagaccaaagagaacaacctctctgaagaaggtgagtgccgcagggatggcctccgggctggggagaagggcgtgcggctcgttctccagcctcagtgcctctnagngcgttagtncnnnacncccaagggagctcacag

SEQ ID NO: 3243 - DNA, 873 bp, Canis familiaris
  misc_feature (4)..(4): n comprises a, c, g, or t, or includes no nucleotide
  misc_feature (17)..(17): n comprises a, c, g, or t, or includes no nucleotide
  misc_feature (19)..(19): n comprises a, c, g, or t, or includes no nucleotide
  misc_feature (39)..(39): n comprises a, c, g, or t, or includes no nucleotide
  misc_feature (53)..(53): n comprises a, c, g, or t, or includes no nucleotide
  misc_feature (56)..(57): n comprises a, c, g, or t, or includes no nucleotide
  misc_feature (61)..(61): n comprises a, c, g, or t, or includes no nucleotide
  misc_feature (63)..(63): n comprises a, c, g, or t, or includes no nucleotide
  misc_feature (65)..(65): n comprises a, c, g, or t, or includes no nucleotide
  misc_feature (67)..(67): n comprises a, c, g, or t, or includes no nucleotide
  misc_feature (369)..(369): n comprises a, c, g, or t, or includes no nucleotide
  misc_feature (376)..(376): n comprises a, c, g, or t, or includes no nucleotide
  misc_feature (393)..(393): n comprises a, c, g, or t, or includes no nucleotide
  misc_feature (432)..(432): n comprises a, c, g, or t, or includes no nucleotide
  misc_feature (453)..(453): n comprises a, c, g, or t, or includes no nucleotide
  misc_feature (500)..(501): n comprises a, c, g, or t, or includes no nucleotide
  misc_feature (503)..(503): n comprises a, c, g, or t, or includes no nucleotide
  misc_feature (518)..(518): n comprises a, c, g, or t, or includes no nucleotide
  misc_feature (858)..(858): n comprises a, c, g, or t, or includes no nucleotide
acanaatgatccaaatntnttttccctgcccctaactgnatgtaattcctggnggnnactnanantnaagtattatagtttctctttctatatatttgtgttgataccactttccagtttcacttacatacctaaatacattccccaagaagggacaggcctggtaccagtgaaggggcatggatatgggtgcaggacataatccaaaaaaacacgtaagaggttcatgctctcttgactttcctatagcatttatttttcagtaagattatagctgcataaccataaggtgttaagaacattttcttctaaaccagaacttctgagtctatcaacaaactgtacatatgtttaaattataccatatgncaacagnatgggaaggaagagggngatttttaagaagctggaaaaattagtgctcaaaatcgncaaagggttattatgtaagtncaacatatgtgcaatgagtttaaagatgggtcctctattctcaaggnngncctcctatactcaanggaggaggagacagttgcagttcatagctctctgttcactcagaaacttgggtgtttccatcaatttaataaagtattaactggtacatctccacatctactgaaaatacattatatattaagcactaccttcccaaaacaaattcacatatatgttttttagataactactttagtagcctcctcaaaaacgctgtactgcctacactgaacagagatccctccgtgagaggaacaaacctatcacactgcacacacacacacacacacacacacaccactggattgcaaatactgtgttaagtctcacaaagaaacggcatgtagtcatcaagcttancgataccgtcgacct

SEQ ID NO: 3244 - DNA, 472 bp, Canis familiaris
  misc_feature (81)..(81): n comprises a, c, g, or t, or includes no nucleotide
  misc_feature (175)..(175): n comprises a, c, g, or t, or includes no nucleotide
  misc_feature (221)..(221): n comprises a, c, g, or t, or includes no nucleotide
  misc_feature (304)..(304): n comprises a, c, g, or t, or includes no nucleotide
  misc_feature (339)..(339): n comprises a, c, g, or t, or includes no nucleotide
  misc_feature (349)..(349): n comprises a, c, g, or t, or includes no nucleotide
  misc_feature (353)..(353): n comprises a, c, g, or t, or includes no nucleotide
  misc_feature (356)..(356): n comprises a, c, g, or t, or includes no nucleotide
  misc_feature (386)..(386): n comprises a, c, g, or t, or includes no nucleotide
  misc_feature (416)..(416): n comprises a, c, g, or t, or includes no nucleotide
  misc_feature (428)..(428): n comprises a, c, g, or t, or includes no nucleotide
  misc_feature (448)..(448): n comprises a, c, g, or t, or includes no nucleotide
  misc_feature (459)..(459): n comprises a, c, g, or t, or includes no nucleotide
ctgatggcaatattttaatctttctagatcttagtctcagttaaaaaaaaaaaaagtataatcaggaaacacaagtttgtnaagtttaagcttgtgagataaaaattattatgaattaaggttactgataccctagaaacttccaactctaccaccacccagtgtacagcttggnaagctgctcaatctctctgtgtctcagcttctttttttttttttcnttttgttttgtgtgtgtgtgtgtgtgtctcagcttctttacctgaaaaatgaggttaatgatggcatggggttgtcacaaaanttaaaggagccaacatgtgaaaagcctgtgcatgngccttacatnccangcnttcattacaagctttagttgggcaccaaanttcaaaatccagttcaaaaccagctaggtncaattccaccanccacattccaacaaggttgnccctaaattgngggtgtggtaggc

SEQ ID NO: 3245 - DNA, 460 bp, Canis familiaris
  misc_feature (3)..(3): n comprises a, c, g, or t, or includes no nucleotide
  misc_feature (70)..(70): n comprises a, c, g, or t, or includes no nucleotide
  misc_feature (398)..(398): n comprises a, c, g, or t, or includes no nucleotide
  misc_feature (434)..(434): n comprises a, c, g, or t, or includes no nucleotide
  misc_feature (442)..(442): n comprises a, c, g, or t, or includes no nucleotide
  misc_feature (452)..(452): n comprises a, c, g, or t, or includes no nucleotide
  misc_feature (457)..(457): n comprises a, c, g, or t, or includes no nucleotide
ttncaaaatcagtatcaaaacagcctagggtacaatacacaacacatacacaagttgcccctaaatgagntgtgtagcctacagcctacctttataccataaagcacatgttaagaagagagtcaaagtttattcaatatgaatggctcatggaaaatatgaaattcctattcaccaatcacatttggaattcctccctaaatgaggattatttgggaagcagacagaaaaccattatagacagctactatctgccaggaactactcggcacttttccttcctatggagtcttggtttcactttcagttggcctccgcaggctctgtactatgatgaatagcctccccacaagcagggactttgaggaaaggtctcatgactccatttacatggtctntccacgcccaaacaaaccagagtctaagctcagaancccgacancttggtgcangaggncag

SEQ ID NO: 3246 - DNA, 372 bp, Canis familiaris
  misc_feature (78)..(78): n comprises a, c, g, or t, or includes no nucleotide
  misc_feature (271)..(271): n comprises a, c, g, or t, or includes no nucleotide
  misc_feature (279)..(279): n comprises a, c, g, or t, or includes no nucleotide
  misc_feature (308)..(308): n comprises a, c, g, or t, or includes no nucleotide
  misc_feature (349)..(349): n comprises a, c, g, or t, or includes no nucleotide
  misc_feature (367)..(367): n comprises a, c, g, or t, or includes no nucleotide
aactctttacactgattttttaaattatttttcatgaagaggtaatttacatttagtaatgggcccatgttgtaagtnctcagcttgatgaactctcatgcacacacacacacacacacacacacacacacccctcctgtagccatcacccagcccaagcacccagtggactcctctggattactttccatcagtatccccaaacggtaaccccttttctggcctctataaccaaaaatgactttttaggtcttcattattaaaacataancaaaacanacagaaaacactgcagatgatatgggggngcggtgagctggatatcaagagggggcaagagcacttaatntattccatttttggaaanaatcg

SEQ ID NO: 3247 - DNA, 782 bp, Canis familiaris
  misc_feature (87)..(87): n comprises a, c, g, or t, or includes no nucleotide
  misc_feature (98)..(98): n comprises a, c, g, or t, or includes no nucleotide
  misc_feature (103)..(103): n comprises a, c, g, or t, or includes no nucleotide
  misc_feature (125)..(125): n comprises a, c, g, or t, or includes no nucleotide
  misc_feature (200)..(200): n comprises a, c, g, or t, or includes no nucleotide
  misc_feature (205)..(205): n comprises a, c, g, or t, or includes no nucleotide
  misc_feature (224)..(224): n comprises a, c, g, or t, or includes no nucleotide
  misc_feature (284)..(284): n comprises a, c, g, or t, or includes no nucleotide
  misc_feature (287)..(287): n comprises a, c, g, or t, or includes no nucleotide
  misc_feature (323)..(323): n comprises a, c, g, or t, or includes no nucleotide
  misc_feature (339)..(339): n comprises a, c, g, or t, or includes no nucleotide
  misc_feature (343)..(343): n comprises a, c, g, or t, or includes no nucleotide
  misc_feature (345)..(345): n comprises a, c, g, or t, or includes no nucleotide
  misc_feature (347)..(347): n comprises a, c, g, or t, or includes no nucleotide
  misc_feature (374)..(374): n comprises a, c, g, or t, or includes no nucleotide
  misc_feature (746)..(751): n comprises a, c, g, or t, or includes no nucleotide
  misc_feature (753)..(754): n comprises a, c, g, or t, or includes no nucleotide
  misc_feature (757)..(757): n comprises a, c, g, or t, or includes no nucleotide
  misc_feature (762)..(762): n comprises a, c, g, or t, or includes no nucleotide
ggaattcgatctggaagagagataagtgagaccaggttgtggatggcctcgaagtaaagctttagagacgggcttctgtagggtagncaagcagaagnaaatnaaagttgatagtgatgggagcnttgtaacagagttgagtaggaaagattatactggcagttatgtgcataataaattggtccaaaaaaaaaaaaaancagantccagacatcctgtaagangtcctttacaattttcctgataggaagtaaagatgttcgtaactagagcagtggcaaggngancagtgtattcatcagggttctccagagaaacagagnccgataggaaatacanacanananacacacacacacacacacacacacacncatgcacgtgtgcgcgcaaacatgcagagacagagaaagagattgacagattgattcactgaaggaattagcttacatgagtgtggtggcccagaagcccataatctgccctctgcaagctggacttccaggaaagctgatgtctgaaagcctgaaaactaagagctctgataaacatccagctcaagaaaagagaaagagaatttgtgtttcctctgcctttttgttctatttggatcctcatggattgaataatgtcccacctaaattggtgagggcatatcttctttactcagtctggtgattcatatgctaatgttttccagaagcatactcaaagacacactcagaaacaatgttttaccagctctnnnnnnanntgngaagncacaggcacagatcaagctt

SEQ ID NO: 3248 - DNA, 400 bp, Canis familiaris
  misc_feature (12)..(12): n comprises a, c, g, or t, or includes no nucleotide
  misc_feature (346)..(346): n comprises a, c, g, or t, or includes no nucleotide
  misc_feature (362)..(362): n comprises a, c, g, or t, or includes no nucleotide
  misc_feature (377)..(377): n comprises a, c, g, or t, or includes no nucleotide
  misc_feature (382)..(382): n comprises a, c, g, or t, or includes no nucleotide
  misc_feature (393)..(393): n comprises a, c, g, or t, or includes no nucleotide
aaaaacccaccnggcctccaccccattcactttattacaagtgaatgcaaatcccaacatctgctgcactcctctaatttctaaatcagatcactcccacatcgaaacaccaaagaaacttttacaataaggctgtgtttagccttatcatacctttgggtctcttcacctcacagtagtttggtttttcctttgaagacctcggtcttccctgaggatcttcattcatatcaacctcacgaccgatcgaccttttaaaaatgtacacatcacacacacacacaatcaccaaaccctgaaaagatttggattatcatataggaaggaaagaggtgtttttaggaanccaaggcaagctgggngcttcccagttctgnaaggnagttggccggnaattagt

SEQ ID NO: 3249 - DNA, 379 bp, Canis familiaris
  misc_feature (13)..(13): n comprises a, c, g, or t, or includes no nucleotide
  misc_feature (70)..(70): n comprises a, c, g, or t, or includes no nucleotide
  misc_feature (73)..(73): n comprises a, c, g, or t, or includes no nucleotide
  misc_feature (277)..(277): n comprises a, c, g, or t, or includes no nucleotide
ccctactgcttgntagtgttagttcctttggctttgggcaacttgctccgtctctcatcctcagctcccnctnctattaaacagggatttgagtatctcctttatagagctgttttgagaattaaaaataaaacatatgtaaagtgcttggcacgtcccggcatgagggaggcactcaggatgtggcaactcttctcattctctgtcccacatgcaatcgtgagagaagaataaaggtcatcccgttcctcagggggctcgccacctgtaagagganctacccccaccccgtcccttcttgttgagggaaatagtaagtcacacctagattgggcacgttaacagatctgcttccagaccatgagcacagatcaagctt

SEQ ID NO: 3250 - DNA, 348 bp, Canis familiaris
  misc_feature (92)..(92): n comprises a, c, g, or t, or includes no nucleotide
  misc_feature (94)..(94): n comprises a, c, g, or t, or includes no nucleotide
  misc_feature (112)..(112): n comprises a, c, g, or t, or includes no nucleotide
  misc_feature (114)..(114): n comprises a, c, g, or t, or includes no nucleotide
  misc_feature (135)..(135): n comprises a, c, g, or t, or includes no nucleotide
  misc_feature (137)..(137): n comprises a, c, g, or t, or includes no nucleotide
  misc_feature (152)..(152): n comprises a, c, g, or t, or includes no nucleotide
  misc_feature (333)..(333): n comprises a, c, g, or t, or includes no nucleotide
  misc_feature (342)..(342): n comprises a, c, g, or t, or includes no nucleotide
  misc_feature (346)..(346): n comprises a, c, g, or t, or includes no nucleotide
aattcgataactgcacatcaacccctcagcactgagccttcccttgccagcagggaagcacgtagaggtaaaggaggaaggcaaagaaaaananggggaggggaggcctctnantatggctgctgcctccttctntnccctccaccccccgntcctgccctcaagactgggagcagctctggaaatctgcccgatgaaagacatcaagcatgtaactgccgaaaccattttccaaatgggaattaatttctcccatgggtctcctgccaggctggtcccagagaagcctgactcctcaccacctgccctaacacacacacacacacacacacncacacacanacanct

SEQ ID NO: 3251 - DNA, 350 bp, Canis familiaris
  misc_feature (30)..(30): n comprises a, c, g, or t, or includes no nucleotide
  misc_feature (62)..(62): n comprises a, c, g, or t, or includes no nucleotide
  misc_feature (315)..(315): n comprises a, c, g, or t, or includes no nucleotide
  misc_feature (320)..(320): n comprises a, c, g, or t, or includes no nucleotide
  misc_feature (330)..(330): n comprises a, c, g, or t, or includes no nucleotide
  misc_feature (333)..(334): n comprises a, c, g, or t, or includes no nucleotide
  misc_feature (341)..(341): n comprises a, c, g, or t, or includes no nucleotide
  misc_feature (344)..(344): n comprises a, c, g, or t, or includes no nucleotide
  misc_feature (346)..(347): n comprises a, c, g, or t, or includes no nucleotide
taggtacccatcacgtggtacatgcacagncccaaatgcagatacactgcagacaccagaancacagccaaaacatgtccacaaacacactgctagaaacaacccccatgcagactggggtcagtctgtcacccagcaatccaaaaccttcagtttgcactaaacccaaatcccaaggcctacagtaataatacaatcaagaactatgtgactattcttaggaggtcaggcaatgggctgagggtgccctaggaaggagccatacccttgcatctcccagttccccccaaacacccactggaaaaaggtcactanttggncactgtgggnaannaggtctnacnanntgt

SEQ ID NO: 3252 - DNA, 452 bp, Canis familiaris
  misc_feature (19)..(19): n comprises a, c, g, or t, or includes no nucleotide
  misc_feature (175)..(175): n comprises a, c, g, or t, or includes no nucleotide
  misc_feature (434)..(434): n comprises a, c, g, or t, or includes no nucleotide
aagcttgatctgtgcgtgnccacccacacgggacacggggcccctcagcaaccgagaactgcttcccagccttggcctcatcaaaagacaagtccaccacctgtaacccccttcttgcctccttgttttgaggctagacacttccactcacgccatctgccttcctctgtctgtnttcacccctgatgcaagaccgaagagctctgtggtttgagaagatctccttgccttgcctagtgaagttgcatctgctacagcctagatgcctggagggtgtgtgtgtgtgtgtgtgtgtgttgtatccttgcttaggcacctgataaaaacactgttcacatccatgaacttcagggtccaactgtagcctgggacgtgtccttgagagatctgcaggagccaccgtaatatttaaatttctcttttcattgaaactnatccggtgcttcccacca

SEQ ID NO: 3253 - DNA, 355 bp, Canis familiaris
  misc_feature (51)..(51): n comprises a, c, g, or t, or includes no nucleotide
  misc_feature (236)..(236): n comprises a, c, g, or t, or includes no nucleotide
  misc_feature (240)..(240): n comprises a, c, g, or t, or includes no nucleotide
  misc_feature (244)..(244): n comprises a, c, g, or t, or includes no nucleotide
  misc_feature (259)..(259): n comprises a, c, g, or t, or includes no nucleotide
  misc_feature (319)..(319): n comprises a, c, g, or t, or includes no nucleotide
  misc_feature (331)..(331): n comprises a, c, g, or t, or includes no nucleotide
  misc_feature (340)..(340): n comprises a, c, g, or t, or includes no nucleotide
  misc_feature (343)..(343): n comprises a, c, g, or t, or includes no nucleotide
acccgttttcataggataacaatttttgtttcttaaactagcattatcagnccataccttttttttttcattatgaaaaaaacaaaaaaaaacaaaaaactccacctagaaatagtgccttagggtacagtgggtaagcaagactcaaatttaaaaaaaaaaaaaagtttctgtttttgaaatgtctgtggagttattggaattcactttggtaaaaaaaaaaaaaaaaaaaaaantggnaatncaccatggttggccngttcctggttgaagttgtgtcacacacacacacacacacacacacacacaacacacacanacaggggctctncgtgtctgngtntgatatcgaatt

SEQ ID NO: 3254 - DNA, 830 bp, Canis familiaris
  misc_feature (42)..(42): n comprises a, c, g, or t, or includes no nucleotide
  misc_feature (45)..(46): n comprises a, c, g, or t, or includes no nucleotide
  misc_feature (49)..(49): n comprises a, c, g, or t, or includes no nucleotide
  misc_feature (56)..(56): n comprises a, c, g, or t, or includes no nucleotide
  misc_feature (61)..(62): n comprises a, c, g, or t, or includes no nucleotide
  misc_feature (64)..(64): n comprises a, c, g, or t, or includes no nucleotide
  misc_feature (68)..(68): n comprises a, c, g, or t, or includes no nucleotide
  misc_feature (73)..(73): n comprises a, c, g, or t, or includes no nucleotide
  misc_feature (82)..(83): n comprises a, c, g, or t, or includes no nucleotide
  misc_feature (152)..(152): n comprises a, c, g, or t, or includes no nucleotide
  misc_feature (220)..(220): n comprises a, c, g, or t, or includes no nucleotide
  misc_feature (346)..(346): n comprises a, c, g, or t, or includes no nucleotide
  misc_feature (439)..(439): n comprises a, c, g, or t, or includes no nucleotide
  misc_feature (441)..(441): n comprises a, c, g, or t, or includes no nucleotide
  misc_feature (445)..(445): n comprises a, c, g, or t, or includes no nucleotide
  misc_feature (506)..(506): n comprises a, c, g, or t, or includes no nucleotide
  misc_feature (786)..(786): n comprises a, c, g, or t, or includes no nucleotide
  misc_feature (788)..(791): n comprises a, c, g, or t, or includes no nucleotide
  misc_feature (797)..(797): n comprises a, c, g, or t, or includes no nucleotide
  misc_feature (803)..(803): n comprises a, c, g, or t, or includes no nucleotide
  misc_feature (807)..(807): n comprises a, c, g, or t, or includes no nucleotide
aattcgatgacaaatccaagaagttctttgccgcgatactgnttnnagnatactgngaccnnanaaangacgnctacctccnnagagcccatggttgcctgggccacctacctaaccgcctggaatcctccagccttggggtggtggttgtnaacacttacagttcatcaggtggcagtgaacaatttgggggcatcaaacaacgagaactgggtatggntccagaaagtgccaggagtgatacatcagtgggaaactgcacaccttgggtgccagaggggcctggggctggggctcatggaccctggctgaagccctaacagatgggaggtgaagctgagctctnatccctggcgctatgcttggtctctaggggccccacaatccccaggaggagaacctgggccaggaaaagcaaaagcagggcagcccgggtggntnagtnggctcagtggtttagcgcccctttggcccagggcaatgatcctggagacccgggatcgagncccacatctggctccctgcatggcgcctgcttctccctctgcctgtgtctctgcctctctctctctctctctctctgtgtgtgtgtgtgtatgtgtgatgaatgaataaataaaatcttaaagaaagaaaagaaaagttggacattggagtggcatgcaaatgcctatagatctccctaagggtgctcagtgcatccccagcagacagagtccagggccaggaatcttccagaaggacgctggatctggcacagccaccaagggatgctctagttccacntnnnntgggtnccgccngccncgcgctgcaggcagatcaagctt

(The sequence listing continues in the following parts.)
